United States Patent Application Publication US 2020/0109395 A1 - sequence listing, part 21

SEQ ID NO: 86406 - DNA, 1716 bp, Dysgonomonas gadei ATCC BAA-286
atgcttaatgttaatatagtacataatgaagtgtatagtttattaatgaagcaccgaacaaataatccaaattttttcttcacacttcgaagaagtaatcgtgatggcaaattggataaaggatattggttttatggaaatgagtggtatttggcggtatcattttggtcgggaacggattggaaaaataaaacaccaaatatatcttttgttgtatctctagatagcgggcaaacttcattagaaataaacacgtcagactcagatattaaaagagcatttataacagcttatttggttgatcgtttagagttaaaggctgatggaaggcggtataaaaaattatataaaggaggtcatctagaatctctagagtcttttttaaaaacagataaaataataatagataatattatagatgggtattctctgtctttttttgaaaaatctgataaaggtatttattttattaagcctacagatttcatggagcagctagagaagattggtaagtataaaaatgaatatataagaggaaataataaacctataaaactaaatagtgtaaaaatcgagaattatgggcctattcgaaaaatagaaatacaagatatacccttttcgtcacagtggatttttcttacaggagagaatggaacaggaaagacatctattttaagagcgataacagcttctatatgcaatagaaaaattaatatagatgagtcctgctatggtgatttcagaataaatttagatttatttacatcctcgattaataaaaatgcatataatagaattcaaaataggatctctgaacaaattaatatccctttaactagtggcttcgctggttatggacaatctaggttgaaaacgaataattcaggattaagtggagatacattaaattccatatctgtagatgatttaacctcttcaatttttgatgaaaattcatacttaatggatttacaatatcaattcgcaatatggaaaaatgataaaataaacattgataaatacgaaaagagaataatatacattacagagatacttatagatatcctcccgaatttatatgatattaattttaatgatatgataggggatattccagctacgacatatattgaaagagatcacgatgggggagaatttagaaaagttacttttaataaattagcatcaggtttaaaaagtatgattgctatgattggagatattcttattcgtttatataatcaacagtctgatatcgatgatccttcggagtttaccgggattgtattaattgatgaaattgatattcatttgcatccgaagttacagaaacagattatacaacaattgactagaacctttcctaaaattcaatttatagctaccacccatagtcctatacctttcttgggcgctcctaaaaatagccaaatatttagagttgaaagaacatctgaagaaggggtaagaatcaagcgtttggatgaaaaaatagaacttggggacttattgcccaatacaatattgacctcacctatatttggtttagatgatattataccagaaagccatgatcaaaaaagttttgtaagaacagaaactatatatgagcagattgaatttaatgataaattgaaaattattattgataatttcatcactgatgccaaagagcaagaattaataaatctatttaaatcacgaagaaaatga

SEQ ID NO: 86407 - DNA, 924 bp, Dysgonomonas gadei ATCC BAA-286
atgagatttgttataaaaaaagatgaagacaaaactgctaaattggcatccaatgagacattacaagttctagaaaagatcgtcaaaacgaaaaacagaggtttgataacagatacaatctatcgtgatagttatgatactgaagatggtaaatgttcacatgtagaagataaattagcaatagcatataaaaataagtgcgcatattgtgaaagaatctgtaaggcagatatagaacattatcggcctaagaaaggggtaacagaggataatactcatctaggatattattggttatgttacgaatggacaaacttaattccttcatgtattacatgcaatagagaaggagcaaagcacaataaattcccaattctaggtaaaagagtaataagccccccattattgcctaatggatcacttaatctgacattatgcaaagctgggactactcctctccgagatgagacaccttatttattgcatcctgaagttgatgatcctgttgattatttcgtattcgaattagatgttgaaggaaaaggtattcgaattaaaggcattgatatacaaggacgtggggctgaaacaatccgtatctgcttgttaaaccgtaatgagttaaagttggatagagtgaaatctgtaattgatgattttaaagagtcaatacatagtcttttcgtcttacttgaaagaggtgatattgatgcaccagaactgaagaaggatgttattcaccaattgagattattaaaaaatcatagtctcaatgatgagaaaacatatacattattgcggaagtatattgtagcatcatctactaattttgaaaaaatagttatcccattcttagatagcaaaataagaagaattgttttagaggcttttaagtctatagagcctctaaaaccaatactttag

SEQ ID NO: 86408 - DNA, 1731 bp, Acidithiobacillus ferrivorans SS3
atgcgtttgaacaaactcacgatcggcagcgccaaggacagccagacgcaccaattcaagaacctgaagaacgtcaccatcgacttcgatcaggatcactgggtgacggtggtgatcggctggaacggcactggcaagtccaacgtgctggaggcgctggccattatcttccgcgatctgatcaccaagaagcgcacacctgcatttgcctttcagctgctctatcgcatgggcattggtgagaatctgcggcacattcatatcgatgccgacccggatcgtgaaaaagagccttacacgattcatgttgcgacggatgctcaagcctgtggtgaaggcaccctgactccattcatcgagggcgcagagctggcgtcggccccgcgtggcaaggccattaagctcacggcgttcttgaaggccgatgtcgagtacctgccacgctacgtgttcagctactactcgggcgagagcccgcgcatgcacgaggtatttcgcccctacctcgaaagctacgacagcaagctgcgtaatggcgaagaccccggcttgaagcggctgttctatgccatgccggtgcacagccagttcgtattgctggcgttcttgattcagcagtctgacgtggtgcgggcgtttctcgatgaccacctcggccttgaccccaacgaaggcattgagtcggtgctgttcgtgctgcggcaaccgccgtggaagtccaaggcagccgatggcgacccgcgcttctggaatgcgcgtggcgtggtccagcattttttgtcccgcctgtacgacatagctttggcacccattgagatcagccgccgtgtctcgacctcaatttggaacaaggaaacgctccaatttaaatatctgtatgtgaaggatatcgccgcattgcggcgcttggtaggaagccaagtacccgcgcaattcttccgtgatctggagagtacttatgtttccgagttggtcgaggaggtacgcatccgtgtgcgcttgaagaaaaacgatggcagcgtcaccttccgcgaactcagcgaaggggagcagcagttgctcaccgtgttaggcctgctgcgctttacggccgaggatgaaagcctgttcctgctggatgagccggatacgcatttgaatccgcgctggagtgtggactacatctcttatctcaagcagttcatcgccagcggtaccaaacaagaggaaaccagccacatcctgctgaccacgcacaatccgttggccattgccgaactggatcgcggacaggtacagatactgcgcatgatcaagcaggatgggcagcgtcaaatcgtagcctgctacccggaaatggcgccgcgcggcatgggctatgccgcgatcgtcaccagtgacatgtttggaatcgcctcatcactggatcagccgacccaggagcttttggaaacacagcgtgcattcgcagccaaggagcggcttacaccccatgagcagtgcgagttggatggcatcaatgcgcaactggatcggcttggattccgattcttccatccagatgatgagtactcgcgctatctgcggttgcgcaatgacctgctcgtccagcaatttgaaacagcccaacccactgagctcgcaaaacaagtggtgcaaatgccgcgaactgatcgcgaggctctggccaaacgcctgattgctgacctgctggcggaaaagccaaacccgccagaaggggcggcgtcatga

SEQ ID NO: 86409 - DNA, 813 bp, Acidithiobacillus ferrivorans SS3
atgaggtatgtcgatcgatccaagttagtgaagccaactgactgggctcgacgcgctgaagcagccacacaggccgtcgcaagtggtgaggatccgaacgaccacggcggggtttggcgtgaactcaaggacgaactggctaagctcctgcacgacaagtgctggtactgcgaatcgcctgttgatcgatctgacaacgctgtcgatcacttccggccaaagaaccgtgtcagcgatgcagcaaacccgcacacgggctaccggtggctggcctttgacgcgagcaactttcgttacgcatgcacctactgcaacagcaggcgcaaagacattgagggtggaactgcaggcggcaaggctgattgctttcccttggtcaacgaagcacaacgcgtctatgcggtcggctctgtggcagcggagcaaccgttgctgctagacccctgcgagatgtcggactggcgtttgctgggctgccatcaggagaacggccagccatgcgccgccggtaccgacgacgccgccaagcggcgtgctgatgtatccattgagatctatcaccttcactacgagccaacctgcaaacggcgacacactgcggcagttcagctaatggcggatgtggatgagggcaaacgcctgtttgaactagtcacccacgatccaggccgtgaggcggatttcaagtccgttgcggcgcgactgcgccgtgcgattgaccgggattcaccgtatagcggcgacatgcactttctcctgcgggggcaacgcagcgatgcacacccgtggatacaagaactattagaggcctga

SEQ ID NO: 86410 - DNA, 1755 bp, Vibrio anguillarum 775
atgcgcttagcttcatttactatcggttcagatcgtgaaggtgaacgccaacgatttaaaaacctcaaaaatgttactatcgactttgaagaacaagagtggatcaccttagtcataggttggaatggcactggtaagtcaaacgtacttgaggcgttggcggtactgtttcgtgatttaatcatggggaaaaatgacaacggggaaaaagataaaccctctttttcctatacattgaggtatttttgtcatcacaaagaaatagaaataagcgctgacccggatcgcaccaaagatgcctatttggtgggttatcgagatttgggagaaaagctagaaaacacgacgctacaggtagattttttcagtgaattaactgatgactcaacacttgtgggacttaaatttaatgagttcaaaaagcgccaagatgagtttttacccaaatatgtgtttggctactattcaggccatagtgaccggttgcagtcggtctttcgcccgtatcttcagcaatatgataaaaagctacgtaactcaaagtcggaagacccaggactaagacgcctgttttatgccttgcctgtgcatagccaatttgtgctgttagcctttgtgcttaaccaagatgatttagtcaggcattttttagatactcagctcggcctagaaacggatgaaaatgctgaaagtatcgactcggtgttgctggaactcaatgagccctcatggaacttaaataagggtaaagatccaaaaggtacttatggtgcttgcaaagataagcctgatattttttggggcgctgaaggtgtggtgcgcgattttttaaatcgagttcataaagtggctactgcaccaattaaaattagccgtaaagatgatgcgaccttatggaataaaaaaggtcgtgaatatttgtatatgtttatcaaggacgttacgcgactcactgagctagttggtgaccaagagcctagggagtttttccgcgaccttgaaagtacctatgtttctgagctaatcagtgaagtgcgtattcgcgttaagcttaaaaagaatgatggcagtgtaacttttcgcgagttaagtgaaggtgagcagcagttattgaccgtgttaggcctactcagatttaccgctgaagaagaaagcctatttttattagatgaacctgatacccacttaaaccccaagtggagcgttgattacatcgattacctcaataagtttgttaactctggctctaaaggtgaaaacaatagccacatcgtgttaacaacccataacccaattgctattgcagaattaactcgcgatcaagtacaaatcttaagtcgtgatgatgagactcgtactattgagtcgcataagccacactatgatcctcaaggcatgggatacgcaggcatcattactagcgatatgtttgggttaggctcaagtctcgataagcgaactcaaaaacggcttgaaacatatcgagcattggcaagtattgaaaataaaacaaaatttgaagcacttcgttttcaagtcatttccgaatggttggataatgataggtttagcatgtctcaacgtgacgatgattatgagcgctacattaaaatcagaaactcacttttgaaagaacaatctggaatggatgattaccagcagctagtaaacttcgctctaagtttatcgcaagaaaaacgtgatgaaattgcgaagcaagctatcacaaaattgctgcaagaggatcagcgatga

SEQ ID NO: 86411 - DNA, 876 bp, Vibrio anguillarum 775
atgagatttgttgataatgcctttattgatttacctgacaattgggaagatagggctgagactgccacagatgcgttattggctggtgagattgttgcagatgatcgtagtgccatctggaaagacttaaaagaaagcctagagaccctatcaaatggtaggtgttggtattgtgaaacaaatatcccgagaaccgataatgcagtcgatcattataggcctaaaggcaaggttcagggtgttgcattagcagatgaaggtaagtctttaaccagatatgacattgtgcctgaacactctggttataagtgggcagcctttaaggctgaaaactttcgtttttcttgtcaacactgcaatgagtacagaaaagaccttcaaggcaccgcaggtggtaaatggaattactttcctttggtaaatgaaccacaacgagcctatgaagagttagatgaagacaacgaagtgccagccttgcttgatccatgtaaaagattggattggaggttactttcttatgacaaatcaggtatgccattttctcgatttgaagagggatcgcctgaggatacaaaagtcaaactctcaattcggctgtatcaccttgatcaaaagaggttaaatgaaggtcgtatcgctcagtggaaacttttcaaaccatggttagatgaagcaaaaaagtggtacttaaaaaagctccgacaagatcaaggcgcagatgcttgctttgaaaaagagcttcgaaaaataggccaatggtttcaccctaagagtaagaatacttatttggggtttcttgtttatcaacttgaacaagacaaagataaggatgtgctccatccttggataagcgaactgattagaactgtaggatga

SEQ ID NO: 86412 - DNA, 1251 bp, Vibrio anguillarum 775
atggaaaactataattcgattcaactgattgatacgataattcctaactcagacaaacatgtaacaatctctcttgaaggcaaaaaccttatcattactggtggcaatggttgtggtaagacccgccttttaaaacaaatccacgagaacatttctgcccaagtcgagcagatgaatcataaaaccgcagaccaaattagggaggatataaggaatcgtgaagcatggatgaaaaattctagtccaacgaattctgactatcatcgctataagcagcaaataagtgaattagaactaaaacttgctgatattgataaggtgaaagtaatactggggaaagtggaaacatactgcaccgaattcaacgaaaaaaaggcactacttcgtttattcccagcagtcagagaacagtctctggctcatactggctcatatgacagtcttgctcgcttaaagaaagaagacgagcgaaattctctttctcaagactcaagttctcaatttgaacgctacttagttgctttctacaattacggtagtcatctattagctcgtgttgacgataaggctcagggtgcaaaagtagatgcgtggttcgataacgtaacaagtcaattacaatacctattcgaagatgaaaccctcaagttggattacaacgctgaagagcaggctttctacattaaacaggatggtaaagacccatacaaatttgacaaactatcatcaggctatcaatcaattcttagcatctatgctgaccttttgatgaaagtagaattaaaagaagttagtgcccaagagctatctggagttgtcttcattgatgagattgacgctcaccttcacgtatcactccaaagaaaaattttctctttctttgaccaagcgtttcctaaagttcaattcatcgttactactcactcacctttcgttgtccaatcagtgaataactccgttatctatgatttgagtgcgaatgagcaattagaagacctttcgatgtactcatacgaatcgattctaaaaggcttattgggagttgaaagcaaatcaagcattctggatggattgatagaagaactagcaacacaaattcaagtgaagaaacctgattgggatactatcatcgatcttattcgtagaattaaaccaaatgaacgcaacttagatacacattcgagcaatgttttaaagcaagccgaaatacagctcatggatgagcgtaataaaaatggaacggaggaataa

SEQ ID NO: 86413 - DNA, 690 bp, Vibrio anguillarum 775
ttgttcaaagttattcgcccattagaagagcctcctgagcttaagacaaaaggctacaattgcgatgaagttgttcatgctctttggaaaatatgccaccgcaaatgctatctctgtgaaacattgaatcctgatgctccagaaatcgaacataaggaacctcatgaaaacaaagacgaagaccttaaagtcgattggaacaatctattttattcatgccgtagatgtaacagtatcaaaggaacgaagcacaagaacattctcgatgttgcgcaagttgatccgataactaaaatcatttggaacatggctccatccaattattcagatgtaacttttgaaaaggtggacaagaaatgcaaggacaaagccgttgacgacacgataaagctccttgagcgttgttttaacgaaactggtactgcttttcgtggaattacaagagaagctcttattgagaaagttgaaatcaagttacagcattttttaaagcaagcctataaaatccgtcacgaagattctgatgaagatgatattgaaaaagcgagaaagcaacttaaagtaatgcttcaaaatgagtatccatattcagctttctggcgttggcgtttcttgagagatcctgtactgatgaggggtcactcagatctactacctgaatatgtaacgctgagtccttgcaaactgtag

SEQ ID NO: 86414 - DNA, 1638 bp, Shewanella sp. HN-41
atgcagcttcgatatttagccattccgcagtttcgtaacctgcgcaatctagaagtgagttttgccagcgagctggaaccagtttcaggcacaccagccgacgcaacagacagtacacctgcaaaacgcattcgtagtcatgcgctgattggccagaatggaactggcaaatccaatttaatcgaagcgctgattaccctgttccgtgatgtagacctcgaccgagaagcggcgtttgattacaccttggaatatgaaattcgcggccatatcgtgcgtattcaggccgataccgcgaaacaaaaacgcccctatgtctgggtggatggtaaaagcgaatcccaaggatttcttgtaaaacatgcgagggaatatttaccgtcacatgtttttgcttattactcgggcaagaatgaacgtatagaggcgctatttcgaacccaccaagagcgctataagcaattactgcggcaagatgatgatgacttaatgcgcaggctcttttactgtcgtggcggtcatagccaattggtgttgttagcttgtttgttatccgatgatccggtattcaagaagttactaagcaatttgaatatcgaagccatagagtccgcgctgttcgttctgaagaagccatattcagcgcgcgatctggatgagaaagacattgagctaggtgatccacgtttttggtttagacgtggaacagtcgtgaatggatttctcgacaagctgtggcagatcgcctgggcgcccgttcaggaaacgcgactggctgccattgattttcgccgtcgccctgaaaagcaagagctgctttatttgtttgttcctgacaataaaaggctcaaaaaattaggtgaggaagtcgggacgcctgagcgctttttccgctatgtagaagcagcctatatcggtgacttgctggaggaggtgcgcattacggttaaaaaatcgaagggacacggaggcgatgttgagttcaaacagctctccgaaggcgagctgcaaatgctcactgtattgggcttaatgcgcatcacccgcgaagatcattgtttgtttttgttagatgagcccgacacacatttaaaccccatctggaaactgcgctacttcgacgatattgaaggcgtgttgagttccgaaaaagattcactggtacaaggcgaatcgcaaattctgattaccacccacgacccgatgatggtgggtagtcttaagcgtgagcaggtacatattttgcgcaagcacggtgatcgttcagtcattgaatcacccgatgaacacccgcaaggtatgggggttacggggttgctcaaaagtgaattatttggcctgtcatcgacactcgatattgaaaccgaacgtcgattattccgccgcaatgagttgtttgtaaagtcaccgcgtacgccggaagaagatgctgaactttcgaggctctctgccgagctagccgatcttggcttttcgaccgccgattttcgcgacccagattacgctttgtttgttcgcaagatggcccaacaccgcaaattcagaaaaccgacacttacacctgaagagcaagccgaacaagatcgtatcgccgatgacataataagcgaaattctgcgcgaggaagctggcgaatga

SEQ ID NO: 86415 - DNA, 852 bp, Shewanella sp. HN-41
atgatttttatcgacttggaaaacaaactgccgaccgatactgacttgcctgccaatgttcgttggactcaagccgattgggatgcgtggttagctgagtcagcacgtttggttaatgagcttgccaaactagatgctgcaggaagtgtcaaagagcgtaatagcttgattgataaacacgacaatcattggggaaaactaaaaccttggttattaactctatcgggcggaaaatgctggttcactgaggcgcgcgaccttgcttcacacttaactgtagagcattttcgacccaaaaaggctgctcgtaatgttaaaggccaagagcgcgacggttattggtggctagcttttgattacatgaattttcgaatagccggcaccgtgcctaattgtaaaaaaggtgtttggtttcctcttcgttatggttcaccagtttctactttcacgcgccgctgcgaaggcgacgaaaatcaacattttctcgacccgaccaacgcgtatgatgtcacacttctagcgtttgacgaggaaggcaaggctgtgccagctcctggtattccccgttgggaatacgtgagagttaaacgcacggtagaaagattgaaacttactgaacatcaggttttgtcagaggaacgccgtaaagtctggcaaaaaacctcaaagttgattaacaaatatcacaatgctcttgcggaagcacgtaactctcctgctgcgcgtgagcgagtcagatccactgcgcgtgaaattgcttgcctaacaaaacctgagtctgaactttcagctgtagcgaaatggtgtatttggttacggaacgacccgcaactttcaagactggttggttag

SEQ ID NO: 86416 - DNA, 1635 bp, Rheinheimera sp. A13L
atgaagctagataagctgtggatcagtgagtttaaaaacttaaagaacattgaaatagactttgatgaagatgagctggtcaccgttgtcatcggatggaacggggcaggtaagtctaatgtcattgaggctctggtaattatatttcgtgaactcgatctacacaaatctcccacattctcataccgtctagaatacctttgtcgtggtaacagaattacagtggaggcgctcgctactgaaatcaaaaaagagcagtacaacattaaagttgtatcaaaagagggaaaactcgtaacagataaagccggagaatttttcgatgatgagcaaagacgctttttgccatcgaatgtctttggttattactctggaccaagtgatcggcttgcaactcacttttatgatcatcaaagaatcttcagagaccagttgctttatcccaataaatatggtttggatgaaaaaactttacctttgaggccattgttctatgcacagaaagtacatagtaactttgtattgttagctttctttttaagctcagatgagaaggtaaccaaattcctgaaagaaaaactctttattgaggggatcgagtcagtcttatttgtcttgaataagcctgattggacgagtaaagagggggactcaaggttctggaacgcgaatggagtggttatgccattcctggataggctgttttcagcctctctagctccaatgcgaaagacaattaaagtcccgcatccaatgaaaaagagtccagaaaatgttgatgcactctttttatatctgaaggatctgtctgctttaaagcaggttggcaaagatacctcggacaaagacttcttcaagttgttagaaagtatctacttttcaaatttgatttttgaagttcgtatcagggtaaaaattaagaataaaaatggttctgacgactcattaacgttcagagagcttagcgagggtgagcaacaactattaactgtcctcggtttattacgattcaccagagatgatgagtcgttgttcttacttgacgagcctgatacccatttaaatcctgcttggagcatggagtacatcaacttcctgcaagaagtggcgggttttaatctcaacacggaaaaaggtaacaaagagggggttgataatagccatattgttttagctacgcatgatcccatcgttatttctactctgaaaaaggggcagatccagatcatgaagcgagatgagaatgacttaaaggtatttgccacaccaccactgtacgagcccaaaggtatgggcttttccggtattttgatgagcgatatgtttgggcttcgctctgatctagacccgcaaacgctcgaaagcttagatgagcacgccattttgcttgctaaaattgaacggtctcccgccgaagaaactcggtataaagaactccaaaccgaactagataaagctggctttttagaggcgtattcggacccgtatttctcagcctttgtaaaagcgtggggcaggaagcatagtgataaactattcacgcagacttttttaagcgatggcgatcggcaagagctgagtgttatgacggatgaaatacttgctgaattggatgctgaagaggctggtgagtaa

SEQ ID NO: 86417 - DNA, 924 bp, Rheinheimera sp. A13L
atgcgttacatcgatattgatgaggttgaactcgaactccctgatgattgggacgataaagtagctagcgcttgggcattcgttaatcgaaaggttgctgaagccgaggttgctacgagtgcaaaaggagttcaggaaggttgggatgctcaaaggcttgccacggagctattaaatgccgctggtactgccctgaaaactgctattgcgagcaaaagtgacgtttgggggagcctaagtgaggtgttggcaaagcagtctaatggaaaatgttggtattgcgaaaccaatgagttgagatctgacaacccaatagatcactttagaccgaaaggtagagtagctgagtgcagtgatcatcccggctattggtggttggcatttgattggcgcaacttccgtttcgcttgtacttactgcaactcgcgccgtgtcgaagttgatacggccggaggtaagcaagaccacttccctgtgtttacgccaccagattggaataagacgccgcaagataataatcaggagcgccctaaattattagaccctacggatcctgatgattgtgaactgttagctttcaacataaatggacttgctacgcctaattgtagtgatcaaacatctgataattataaaaaagctattgaatctattgaaagatttcatcttaatcacggcccaacaaagaaagcaaggatggctattagacaaaagataaatcagctagtagcaaacacaaatgatctattgcagcaaggtgttgccgcgcattctcagcagattaaatctaataaaaaagagctaatgaagcttatacgtccctcatgcacccagacaaaatttaatactgcagcgagactttacttgaatgaatttgctgcccttccatgggttaaatctatgcttgatcgagaaccacaatga

SEQ ID NO: 86418 - DNA, 1236 bp, Bacteroides sp. 1_1_30; identical to SEQ ID NO: 86388

SEQ ID NO: 86419 - DNA, 642 bp, Bacteroides sp. 1_1_30; identical to SEQ ID NO: 86389

SEQ ID NO: 86420 - DNA, 1242 bp, Fusobacterium nucleatum subsp. animalis 21_1A
atgaaaattgaaaaagtccatataaaaaatataaaaggaataaaagatttagaactttcatttaaaaaaaataataaaattttagatgtaattgttttagctggagtaaatggaagtggtaaaactactattttagaagctataaaagatttttttaataataaaaatgtaaactacgatgaaccaaagaaatcaaatgttaatttaaatatattttttgaagaatttgaaaaaaagaaaataaaagaggcagaaaaatcttctaataacaataagcgaccattatgggatttttttagtgctttacaaaattatgagatttatataaaaaggagtgataaacattatcatactcatatagcaaaaaagtttgatattccacctaaaataatttatgtcccagctgaaaataaatttgaagaaattcaaacttattctacaactttatcaaaagaatatgaatttataaatactataaattctaatgtaataagggatattccatcatatatagcaacaagaagaaattatcttgctactattgaagaagatttaactatgaaagaggttactaataaagtagtaaatgaaataaatggtatttttagtattttagaattagatgtaaaattaaaaggtttttcaaaagatgaaaaaactttacctatttttgaaaattctgctggtgaagaatttgatataaataatctatcatctggtgaaaaacaattatttttaagaactctatcaattaaaatgttagaacctaaaaattctataattttaattgatgagccagaattatcattacacccaaaatggcaacaaagaataatagaagtatataagaagattggagaaaataatcaaataatagttgcaactcattctccacatatattgggaagtgtttctaatgaaaatatttttattttgtatagaaatgaaaatggaaaaatagaagctaaaacaggagatgaactttattcttcttatggacagcctgttgatagagttcttaaagatataatggaattaaaatcacttagaacaccaaagatagagaaagacttagaagaacttagaaaacttgtagatgaaaataaatatgaaacagatgaatttatagagaaatataataaacttcttaaaatattaggaaatacagatgaagatttattccttatagatatggatataaaaatgaaacaaaaggtgaattctaatgttgaaagtaaataa

SEQ ID NO: 86421 - DNA, 591 bp, Fusobacterium nucleatum subsp. animalis 21_1A
atgttgaaagtaaataagaaaaaaagtgaaccagaagaatttactaaatacaaaagtaaacataaaataataaattgggatagttttacacctgaaattaaacaagttttaaagcaatatctattagaagaacaagaaaatagttgttgtccctattgtgaaatagaaatccatttagaagatagccatatagaacatattatgccaaaagataaatttcctaaacttttagcagaatacaataattttattgcttgctgtcttgaaaagaaaatatgtggtaattcaaaagcaagtaaatggagtgaactttttattaatcctgttatagaagatccagaagattattttgaatatgatataaaaactggaaaaataatacctatttttaaagagggaaatagacatgaaaaagccaagtatacaatagatttattaaatcttaatgataatagactgtgtgaaattagaaaaaaatatatatttgaatttttaagttatagcaaaaataataaatatagtttaaacaactttccagtaaaatttccatctttaagaagatatttagaaggggctgttgcaaacttataa

SEQ ID NO: 86422 - DNA, 1245 bp, Fusobacterium nucleatum subsp. animalis 11_3_2
atgaaaattgaaaaagtccatataaaaaatgtaaagggaataaaaaacttagagctttcatttaaaaaagataataaaattttagatttaattgttttagctggagtaaatggaagtggtaaaactactattttagaagctataaaagatttttttaacaataaatatctcaattttaataaaccagaaaaatcaaatgttaatttggatatattttttgaagattttgaaaaaaaacaaattgaagaagcagaaaaatcttctattgataactatgaacataaattacaagatttttttagtgctttgcaaagttatgaatataatagaaaaaataatggagagtattatagttatttaatagcaaaattttttgaaaatccacctaaaataatttatgtcccagctgagaataaatttgaagaaattcaaacttattctacaactttatcaaaagaatataaatttataaatactataaattctaatgtaataagggatattccatcatatatagcaactagaagaaattatcttgctactattgaagaagatttaactatgaaagaaatcactaataaagtagtaaatgaaataaatggtatttttgatattttagaattggatgttaaactaaaaggtttttcaaaaaatgaaaaaactatgcctgtttttgaaaactctgctggtgaggaatttgatataaatgatttatcttctggtgaaaaacaattgtttttaagaactctatcaattaaaatgttagaacctaaaaattctataattttaattgatgagccagaattatcattacacccaaaatggcaacaaagaataatagaagtgtataagaagattggagaaaataatcaaataatagttgcaactcattctccacatatattgggaagtgtttctaatgaaaatattttcattttgtatagaaatgaaaatggaaaaatagaagctaaaacaggagatgaactttattcttcttatggacagcctgttgatagagttcttaaagatataatgggattgaaatctgttagaactccaaaaatagacagagatatacaagaactaagaaaatttgtagatgaaaataaatatgaaacagatgaatttatagagaaatataataaacttcttaaaatattaggaaatacagatgaagatttattccttatagatatggatataaaaatgaaacaaaaggtgaattctaatgttgaaagtaaataa

SEQ ID NO: 86423 - DNA, 591 bp, Fusobacterium nucleatum subsp. animalis 11_3_2
atgttgaaagtaaataagaaaaaaagtgaaccagaagaatttactaaatacaaaagtaaacataaaataataaattgggatagttttacacctgaaattaaacaagttttaaagcaatatctattagaagaacaagaaaatagttgttgtccctattgtgaaatagaaatccatttagaagatagccatatagaacatattatgccaaaagataaatttcctaaacttttagcagactacaataattttattgcttgctgtcttgaaaagaaaatatgtggtgattcaaaagcaagtaaatggagtgaactttttattaatcctgttatagaagatccagaagattattttgaatatgatataaaaactggaaaaataatacctatttttaaagagggaaatagacgtgaaaaagccaagtatacaatagatttattaaatcttaatgataatagactgtgtgaaattagaaaaaaatatatatttgaatttttaagttatagcaaaaataataaatatagtttaaacaactttccagtaaaatttccatctttaagaagatatttagaaggggctgttgcaaacttatga

SEQ ID NO: 86424 - DNA, 1365 bp, Runella slithyformis DSM 19594
atgcaggcgagtgtagtaaattgcattacacttgaaaaaagcgcaaacatggaagagatttttgtgaccaaacttcgcatcaataaggttcgccatctggaaaacctcgaaattccattgtccgaaaccgagcgtaagcacttgattttgacgggaaaaaacgggagtggaaagacgagtgtgctagaggggattaatacttttttgaattggattttaaattctcaaactcaggaaacagaagttgaagaaaacgtacagcaatatattttttataaaaatgaaataaagcaacgggaagcaagaatggccaaaggctataacgaatcttatgggcattatcaatggaagggagatgctgtgaatgttcaggatatgcaatcaaaaatagtgcgttatcaaacctttgttgaatcctgtactcctgttcagctattatcaaatgttgacttatatagtgagggaaactttcaaaaagtaaattggcgatttggtgattttattctcaagtatttcccttcaaagcgtttttttcaacctaaggaatctctaggcccccaaaaaattgaactcaaagaacaatataatattaaagaaaatgcaagtgaaaactttgttcgtcaattagttaatctacgtttggatttattggatgcgaaagatacaggcaaaacgtgggaggttgaaaaagttgagaattggttcaaacaattcgaaactacacttagaaaaatttttgatgatgagtctcttgaattagtttttgaccgatccagttttaattataatattgttacaaaagggaaagggttatttaacttaaatcagctttccgatggatatgcagcatttttgtcgatagtctctgaattaatgatgagaatggataaaaagtttgagatgataagaccctacgatctccaaggcatcgttctgattgacgaagtagaaactcatctgcacattgatttacaaaagaaaatacttccgtttttaacatcgttcttcccaaagattcaattcattgttaccacacactcgccttttgtgctgagttcgattgacaatgcggtgatctatgatttggaaaagcaggaaagagtagaggatttatcggcttattcttatacaaatattgtcaagggctactttggaaccgatgaatattccaatgaaattaaggagaaagtagttgattatgagcgtttattaaacagaataaagggcagtacagctaacctttcaattgaggaaaaagaacagttttatgaattgaaaaagtattttgaggaattgcccaaatcactttcacctgaactgcaactcaagattcaacaattagaacttgcccaattagctcaatga

SEQ ID NO: 86425 - DNA, 426 bp, Runella slithyformis DSM 19594
atgataaatattttaaaatcacagcctgctcctgaatgtttagcgtcagaatctcaaaaagtcagcggcgattataagtgtggagatgtattacatcgaattaagcaagattttaaaaataagtgctatatctgcgaaacaaaaggccctaccactattaacgttgaacatttcttgcctcatcgcggagatgttcaacgaaagtttgattggaataatcttttttatgtttgtggacattgtaataatacaaagttagctaagtctcaatacgataatattttagattgtaccaactctgataaccgagttgtagatttaattgaacatatttttggtccattaaagtctgattcccttgattttaaagctcaaattcaaagccaaatagttcttaatacggtggcacttttggaagaagtatag

SEQ ID NO: 86426 - DNA, 1371 bp, Runella slithyformis DSM 19594
atgtacataaaaaaggtaatcataaataatattcggtctatttctgattttgaaatgacatttcctgaacctgccggttggcatgtggttattggagataatggggcaggcaaatcaacggtggtaaaatctattgctttggcattgcttgatattacagatataaatgctgcggggcaggattgggaagagtggcttaaaaataatggggtccccactggatcaattgaattatttatcaatccctatgaaagtaacaagatagttcaaaataaaataacttttcagcaaaaagtgacttttcaggaagatggatatatttttgatgatattaatataaccatcaaggaagtaatctttagagggagaaaaacacttgatagtgtgccttcaatccctacaactacttttccccatccaactccttccattcgagttgaagaaataaagcaaaaaagagaatactggttttctgcgggttacggaccgttcaggcgttttacaggcgggagccaggacaaagagaaaatttataaaaccaatcccaatcttggaagtcatttgtctattttcggggaagatgttgccttgcccgaagcattaaattttttacgggacttatacattgaagaattggaggcaaataaaaatgaaagaaatggtgaatcaggcgttaaaacaaaaccaaagtcaacgcttgaaaatcttatgaaattcataaatgaggctggtttattgcctcacggagcggctattcacggtgtagctttgaaagaaatctattttaaagatggctatgggaatattgttacatcacttcaaatgagtgacggatatcgatctatactcagtatgacatttgagctgatacgccagttgattagaatttatggcaatcagttggtttttgagaacatcaacaatggtaaaaacatcattgatttaccgggagtagtactaatagacgagattgacgcccatcttcatcctacttggcaaacacgaatcggtgaatggtttaccaagtatttccctaaaattcagtttattgtaaccacacatagccctctggtatgtcgggcttgtgaaaagggaagtatatggcggttggcctctcccggaagtgatacagaatcaggtgaagtgacgggcttggaaagagaacgtttgatatatggcaatattctggatgcctatggtacggaactgtttggacaatctcctgtgcgatcagataaatcagaagaaaaactagaaagattaggacacttaaatatgctttctgcctttgggaaaataactgaagaagaagacaaagaacgactggaattacaaaaaatactaagcacagatgatccaactggcttctaa

SEQ ID NO: 86427 - DNA, 870 bp, Runella slithyformis DSM 19594
atgatccaactggcttctaatgatttagataaagatgtacaacaggagttggacaaattgcaaaataaagtaaataaagaaacaacctttgcaaagaaggtaaaaaaagcccggagcctttggaattcaaaaggaggaattaaaggtaagcaagctttcaacaaaataacaactcagttatatgacttgtgcgtttatgaaggtatttgcaattactgcgaacagagcgaggctaacgatatagaacatatttaccccaagtcattttttcctgataagacatttctgtgggagaattatctattggcatgcaaacagtgtaattccggttttaaattagataaatgccatgtgttaggtggtgataatgaattaattattgtgaatagaggtactgagcctttatcaaaaattggcgcgttcattaatccgcgaatcgaaaatccaaatgattttatgattctgaatttaaagacatttaagtttgaaactctaccgggattatcaaagagagaaatcaacaaagcaaaatcaaccctcgaaatccttgaattgaataaaagagatacactcattgaggctcgaaaaagcgcgggaaggcattattacgaaatgctggaaaggttggtaagaatacttgatgctgaaacaaaagatgaattacaagatttattgactccctatgatgatcgttttgactttagccaatctttggaaatcttaaaagaagaaattaatacaagttacaaaaaatacatagcacgctatcaacatccctctgtttggtacagtatcaaaatgatagaaagtaaaacaaatctgagatggagaaaaatatttgatgtaattcccgatgctctgacatggtaa

SEQ ID NO: 86428 - DNA, 1323 bp, Runella slithyformis DSM 19594
atggataactttcgtattgaaagtctggaaatcaatgaaattgggccgtttaagtatctaaagattgattttcctgtaaaaatagaccctgacaaagccgagattcatattctgaccggggagaatgggacggggaagagtacagttttggaggcgttgatatatccagtaaacagtgatattacccggcagtttatttatcctgaaaatatgtacaatgttcaaaatggaattgtaaataaattatggaatcaaaaaatcgacagtcgtattcagataaaattcagtactgtaaattctttttctgcttattggagtgaaggtaaatggatgatagatcatctgagagcttatgcaattttagaatatcttaataaagcaaatcggttaaatattaatgagttaaatattgctttttttgcatattcaggttacagaaaagcggaaaaaactggcattacaggtattcaggaaatagaggaatcgccaatcgctaatgctcacaacttccatttgtctatatctccccaaaatctcattcagtggcttgttaatatccaaacgcgtgaattgatagccaaaggaaaaggggataatcaaaaagcaaaacaataccggagcaccattgaaatcattgagaatgcgttaggggaaatcattgaatccgaagtgaaatttgaccttgaagaagaccccttaggcgtaaaaattaacgttgacggacaatcgctcaattttgaccaactgcccgacggcctgaaatccatggtgagttggatgggagatttgttaatgcggatggacaggcttaaatgggtaaataatacgcctgtattggagcggaattttatcctgttactggatgaaattgaggttcacctgcatccggcgtggcagcgaaaaattttgcccgtagtccaaaaactctttaaaaatgcccagatcttcatttctacgcattccccgtttgtagtcggttcagtggatggtgcctgggtgcatcggtttgtcaaaaaagatggttatagcgtgttggcaggagaaccgattttgtcagaagacgccaagagctatgattatattttggaagaaatttttggcataaaagagcgttttggggttgaggtagaacggaaattaagtgaattccaacaactcaaaaaagagattttgaaaggcagtgaaacggtagataccgcttattttagaaaattgattggagaattggccggacaaagtgttgaactcgaaagtatcataggcatggaaatcagacagttaaaacgccttactaaccaagatttttccctgactgaagcatga

SEQ ID NO: 86429 - DNA, 621 bp, Runella slithyformis DSM 19594
atgagaaaatttgctcgcacagaatctcctgaggttttgacgaaagttattggagaaaaaaaagtacctcgttggcaaagttatggggaacggtacgcacagaatcgtgaaaacaatccctcttttgaatttcaatggcctcaaattgagggaaagaagctcaatcaacaccttttacctgatttaatggcaatgactgatgaccattgctcgtattgtgatgattatccattgaaaagaggagatgatacgattgaccattttcatcctaagacgcactctgcgttttatacggaagtctgcaaatgggaaaatctgtatatttcatgcaaacattgccaagattcaaaaggaagtcaatttgaagagcaattgttaaggccggatgagatagagtttcattttaatcgctatttcatttatgactatattgaacacacaatttctcccaatccgcttgcttccattgacgaacaatatcaagcaaaaagaaccatcgaagtctttgatttaaagcataaaagcctttgcataagaagaagacatgcttttcaacggtataacagtgatgccaaccccgttttgtcagattacaattttaggtttatgtttgacgaataa

SEQ ID NO: 86430 - DNA, 924 bp, Myxococcus fulvus HW-1
ttgctcggatctcccgtgtgggaatgcaaacccggctggttctccgccgcgtttggcccgttccggcgcttcaccggcgggaatgaggactacgagaagctcttcgatgcctacccgcggttggcgcggcatctgtcggttttcgacgagagtgtcgcccttaccgagggcctgaagtggcttcagcggttgcagttcaagaaactcgaaaaggatcctgatggagcgctgcttgagcctctgacccggttcatcaatcagcctgagtttcttcctcatcaggcgcgccttgagaaaatcacctcacggcaggtgttgttcgttgatggcaatggctaccgcgtcccgatcgaagagttgagcgatggttatcgctccaccttgagcatgaccttcgaactcatccgtcagctcgcggattgctatggggcaaagaaggtcttcgacccgaaggaccccacctgcgtgaatgttccaggggtcgtgctcatcgacgaggtggacgcccatttgcacccgacgtggcagcgcaaggtcggccattggttccgaaagcatttcccgaagatgcagttcatcgtcacgacccatagcccgctggtctgtcaggccgctgatgagggctcggtatggcggctccctcgtcccggtacgaatgaggaagcccggcaagtgacgggcgtggagcttgatcggctcatcttcggaaacgtgctcgacgcctacggtacgggcgtgttcggcgagggggttacccggtcggagcgagcgaaggagcgactgcagcggctttccgagctgaacgtgaaggagttgcgaaaaggcttgagcgcggcggaacgcaaggagcagtcagccctgcgcgcgagtcagcccaccgcggcgatgacagttcatgagtcggaggagtggggggcgaagtga

SEQ ID NO: 86431 - DNA, 807 bp, Myxococcus fulvus HW-1
gtgattcagctccctgaccgcccactttccaggagagcgacccagcaactcgcgcgctggcaggccgaggtggatgcactggcaagccatgcggagcgctccgcggcggcgaagaggctcttcaagcaacgcaacactgcccggaatcagacgttcgtcgagattcggaggcagctcacgacgatgtgctcgggggcgcagcgctgtggatattgcgaagactcggcggcggatgaggtcgagcacatctggcccaaggacctttatccggagtgggttttcgcctggcgcaactacctctatgcctgtggtccgtgtaacggaccgaagagcagcaagttcgcgatcttcccgcaccgaagccgtagccccgtcgaggtcagccgagcccatcgtggtgctccgaaggcgccaccgaagggcatgcctgcgctcatcgaccctcggaccgaagaccccatggcatttttgatcctcgacctccaggggacctttttcttcgagccattggggaggacgggcacacgggactttgcgcgggctgattacactcggagcctcctacgcctcaacagggagctcctttcgcttgcacgggcagaggcgttcagtgcctaccgagcccggctccgtgagtacatcacgcttcgagacgaaggcgcttcgtccctggcgcttcgtcttcacgtcacggcgatccagcgcgcggcgcatcccacggtctggcgtgagatgcagcggcagcagcggcgacttccagcgcttcgggcgctttttcgcaaagcgcccgaagccatggggtggtag

SEQ ID NO: 86432 - DNA, 1272 bp, Myxococcus fulvus HW-1
atgtttgatcggctggaacttcatcatgtcgggccagccccagaactcgttttcgacttcgcccaccggctgaatctcatcaccggcgacaacggggtggggaagaccttcatcctggatgttgcctggtgggcgctgacccggacgtgggcgggacaccccgccgcgccgcatcgaggggctggcctcaaaccccgcatcgccttcgagttcgaggggaagagaaggcccgtccgttactcgagcgaatacgacttcaaatcgcagagttggaccttgaagggagggcggccccccaatccgggcatggtgctctacgctcgggtggacggctcgttttcggtgtgggacccggcgcgtaactactggagaaacgcgccgtcgctgggggttgatgcgccagatcggcctcccgcctacctcttcagttcccaggaggtgtgggatggtctcaagcctgatggaaagtatttgtgcaacgggctgattgcggactgggcgtcttggcaagggagcaacaaggagccgtatcggcagctccgccaggcgcttcatgcgctgtctccttctgatgcggagcttctcgttccgggagagctcacgcgtatcagcctggaagacgtccgggacatgccgacgctgcgcacgggctatggccaggaggtgccggtggtgtatgcgtccgcgggcgtcaggcgcgtcatcacgttggcctacttgctggtgtggacgtggcaggagcatctgcaggcgagtcggttgatgaaccaggatgccacccggtcgatcatcttcttgattgacgaggtggaggcccatctgcacccgcgttggcagcggacggtcctgcgctccctgctcaaggtcatggaggcgctcacgggcgctggtgacgtccaggtccagattctcgccgtgacacactcgccgctgctgctggcttcacttgagccactctttgacgccaacgaagatgccttgtggcacctcaatctccagaacagggaggtcgtccttcacaaggaggagtggcatcgccggggagacgcgaactcctggctcgtttctgaaatcttcgacctcaaggagccccgttcgctggaggccgagcaagccatcaagcgcgccgaggggttgatggagcggcggcacggcgtttcgtccgacgagttcactgagacgcgcgacgcgctgcgcgccagcctccccgagattgatccattctggttgcggtggcgcttctgggctcgtgaggcggggttcatgcagtga

SEQ ID NO: 86433 - DNA, 642 bp, Myxococcus fulvus HW-1
ttgactggccagccgccgttgttcaggcgccgtggcccgcgaatcgcgaagcgggcggaccgaatcgaggatttggatgcctcggttctgcgctcatatgcctactggacccgtgcgctgcccgtcctgcatgattcatatgggggcatttgcgcatatgcctgtttctacattgagccgctctgcgggccgaccgtcgaccactttgtcgccatggtgagcgcggagcatcggcaggcctacgagtggggcaattatcggctggcctgctctcagatgaatgcacgcaagcgagagtttgccgacgtgctcgacccattcgtggtcgaggatgggtggtttgtcctcaacctggggacgttcaaggtggagcccgccgtggggttggccccggaggtggacgccaaggtccgtgaaaccatcgagcgattggggctcgactctcgtgagtaccagcacatgtgtcgacggtacttcgacagctactggagcccgaaggttgctgatcaacctgtccctctctggtccttggagcgagatgccccctttctggtgcgcgaaatgaggcgtcaggggcgcattcgggaggcggatgtggcgccgagggggcccgtggccgctgctcgccagactcccccatga

SEQ ID NO: 86434 - DNA, 1239 bp, Myxococcus fulvus HW-1
atgctgcgcatcgaaaaactccaggcagagaacttccgctgcttcgacaccgtctccatgacgttcgagccagacgtcactctgctcttcgcagagaacggcggcggaaagacagccctgctgacggcgctggccatgggactgggcctcctccagccgcgtcaccccaaagaactgacgctcaacgccgaaagggacgcccgacgcatcgcagggaagaatggaggtccacgagaagccgcgggcccctgcaaaatctcctggtccgcgaccatcggtgagcgcgctggagtgggatggagcgcggccacctccccgaccgccaggaaggcatcgacacaggttcgcgccgccgctgacgccatcgagcaggtccgcaagcagggtgcgcgctggccgctcatgggccactacggcacggggcgcttcgccacggagcgcaaggcaactcgcaagtcccgagacctcccagaccgctgggatggctatgaaggatgcctggagccatctcccacggacgcccccctgctcgaatggctccgggacgaggcgttcggagacctggcgcggcatcggagaggagagccggagcgcaggttcgacctgaccgtcttcaacaccctcaagcgggtcacgccgggcgtcgcggacatctggtacgaccccgccgcgggcagccccatggtccgcttcgaagcggggaacgaggtcgcctgggaagagctgtcggacggcttccacatgttcctggccctggttggagacatcgcccgacgggcggtcatcctcaacagccaggatggcctggaggcgccgctcctggtggaaggcgtggtcctgattgacgagctcgacctccatctccacccaaggtggcaacgtgacgtgctcaagggcttgcgcaccgcattcccgaaacttcagttcatcatcaccacccattccccccaggtgctcagcagcgcggagaaccgccaggtccggcagttcgtggactgggacgtcaaggaagggggaatcttcgtggagggccgggacaccaatgccatcctggtggaattgatggggacggacaaccgcgacgagacagggagaagcaagctcgatgcgctctacgaggccattgacgacgggcggatctcggatgcccagcggctgctcaccgaactgcgcacacgctggggtcaggtagacccggagctgatacgggcagaaggacttctggacctggaggaatga

SEQ ID NO: 86435 - DNA, 792 bp, Myxococcus fulvus HW-1
atgcggcgcatcgccaagcgctggcctcccagcaacgtctcacccgacgaccagcctccacggagcctcaggcaggcggagaaggaacatcaagcggccttgtcgaccatcccccaggggaaggagcagacccgaaacgcccgggccagcttcgatgcgctcgacaagaagaaacttcgagaagccctcctcttggaacaaggaggactctgcgtctactgccagcagccgctgacggaccaggggcgccgcgactccgttccccacgtcgagcactggcgctcgctccgtgacaacccggaccaggccctccattggaacaacctctacctgtcctgcccgacgcccaccacctgtgatggcgccaagggcaagcgtcggctcgcatggagtgagacagacccggagctgccgtggccgacggaagtgccctaccacgactggattggcttcacgagcggcggtgaggcctacgtccgcaccgatgcccggctcgacacagccacacggagaacgctcactctggcgctgaacgactgccttgagtccggccagacacgactgtctctgctgaacctgaatgcccgtgccctggtcgaagcgaggaaggcggccatcgacagcgaacggaaacgacttgagagggacttccccaaatccaccgtccccatggaagagcgacgcgccagggccaaggccctgctcaagaagtcctcgccacttccgagcttcatcagcgtccgcattgcatggctgaccaggcagacaggcaagaacaaggggcccgcctga

SEQ ID NO: 86436 - DNA, 1452 bp, Myxococcus fulvus HW-1
atgtacatccgccatcttgcggtcgataacctgaaacgactcgggcgtttcgaactcgacttcacgcaccgcggtgagccccgcatgtggacggtgctcattggcgaaaacgggacggccaagacctcgctcctccaagccatcgcgctggcagcggcaggttacaaagaggtcagcgggctcgccggatccgcggtcaaacacctgtgcgaccggcgaaaagaagaatccatgtcgatcgaagttgagttcatgttcggtcccggctcagtcgcaggaggcagcaagatccacccactggcgtctccaaaggccaggcacaggccagcgggcttggaactccgctctcgcgtccgcctccctttcggcaccacctccctggatgccgatgcccactatcttggcgtgccctctaagtcggacacgcgtgatcccctcgccgaggcgcgagccaccaacgcgcctctctggttcgttgcgggctatggcatctctcgcgcgctgccggatgcgaatgagacgccaaccctgactcgcccttccatcgagcgcctggagcctttgttccggcagaaacagctcgcatcgattggcttcgcgaaccacttccttgagaaggatcagcgagaaaaccgcaagctgggagagacatcacgccgcttcagccgaatgctgaaccaagccgtcaagctggggggctccgacctctttccggggctggcgcgcctggagttgcgcggccagggaggcacccgctccagcatgtcgctcatcgagagcgaccgcttctaccaggtcatggcccggaaccaggatccggtcgccattgcgggggtcgcgctctcccacggataccagtcgaccttcgcatggatcgcggatctcatcggccatgttctactggagtcgaagaccgagttggacaccaccgacatggagggactcgtcctcattgatgagatcgacctctacctgcatccaacctggcaagcgcgcttcattccagccctgcgccgcgtcttcccccgcatgcagttcgtggcaaccacccactcccctgtcgtgctgtcatcgctggctccccatgaggtggtccggctcgtggtggacgaggagacgggcgacatcgtccaggggggctgggatcggcagggaggacagttccgtccaggggttcaagacgccgagcatcagccggatcctcggctcatgactggcggtgagttgtaccggacgtggttcggactcgaaggcatgacgcccaatccgctgggggaaaaactccggcggctccaggtcctcgcggcccaccccaagccgacaggcgctcagtcgcgggaactgaaggaactactcggccagatgcggagagagctcattcagcggctcggaagagccgagggcacgaaagcctttgaagacctctcggcgaaccgagggagcgcgcagtga

SEQ ID NO: 86437 - DNA, 879 bp, Myxococcus fulvus HW-1
gtgatccgcatcgctcgcggtgccgcgcccatcggccttgaaaaatccgccccccggtaccaagccgccgccgcgaaggtcttcaaccgacacagggggatgtccgacgccctgcaggaaatcctgagcaaaggctacaactctcgcgcgaccaagcaggccctgtacctcgcccagcacgagaagtgcgcatggtgcgagcgccagatggatttcagcagctcgccggtcgagcattaccgccctaaagatggtgcctggaggcacctccctggccagaagcctcgtatcgacaaggggcattactggtggctggcctggagctggtcgaacctgctgttttcctgcagccgatgtaatgaccgtggccacaaggcgaactacttcccactgcgccgcaagactcgaaaagcccgtgcacccaaggcgcccgtttcacgctcgcggcccgactccatctcggacgtgtccaaggagcggccgctgttgctcgatccggcgggagccgaagacccgctcgaccacatcgagtggtaccccacgaacaccagcttcaaccggcgagactggctctggacgcccctgggcctgacggacgaggggagagcaaccatcgaaatcctccagctcagcgaattggcgggccgggctcagggccatgtgagatcgctgctgccgatcatcgaagaagtggagcaacatctggccgctggccgtatccccgaggcgcacaaacggtggaaccaactgatcgcggacagcttcaccccggaagcacagtggtccgcattcgcgtggcacgcgcttcgtcacctcgtacctccctcctacagggcccagcaccagctcgcagacccgcgcagacccggcgcgccttga

SEQ ID NO: 86438 - DNA, 1350 bp, Prevotella dentalis DSM 3688
atgcaagatataactatccataacttccgctgttatgaggacaaacagatgactttccgacgtggcgtcaatttgctgataggagacaattccgcgggcaaaacatcgctgctgcgtgcttgcaacttcgtcatgaattcgtttttttccgggtatagtgacgagaacacggtttggaaaagcgttgaagacgatgatttcatgctgcaggtcagcgagcaaggctccatactcccagaacgtcctattgccatctcgtttcatgcgggcgagtgggactttcctcctgtagccgtcatggcaggaggaaagatggaaactgtagctggggttgggcctgacgaagaactgagaatagagaaaacatcgaagaaaaacagcaggaatctggtgaccggactaagggtgctgaaggattatgccgccttgttgcaacagcattcacatgttatggcaggcggacgtgtctgtcaaaataatgtgttgcccgtatatgcctacttctctacagaggatattcacagctcccgaaaaatcaaccgagagcgtttcaaggagtataaccacaagacttcgttcggatattatgagtgttacgattgcaaggggctgttcgattattgggtggatcggttgcttgttttggaagaagcggaggtcgggcagctggagattcaaacggtgcgcaaggccattgccgaagcgcttggagccaaaggctgtggcattgttgaggagctcatcattcggccgcggcgtggaaaagtcttcttcagatacacagaccatcgcatggtggaggccaatctcttgtcggatggctatcggaggctaatcaatattgtgatggacatagcctttcgctgcgcattgctgaacaaagagaagtttggcgatgagtgttacaagcatacacacggcacggttattatagacgagatagacgaacatctgcatccggctttgcaggtaagggtcttgaaagccttgcaaaccacgtttcccatgatacagtttattgtcagcacgcatgcgccaatggtgatgtcgtctgtcgaccggtgcccggagaatgtggtgtataagctggaatatcatcaggaaagcggcagatacacacatcgcgagctgaatacttatgggcttgacgcgtctacgattttgggttcgtccatggggcaagtgccgcgcgaccttgatgtggccaaggatttggaacggctctttcagcagatagacgaacagaaactgcccgaagccaaggagactttgcatcgtttgtatgaggtgatggagaatggagacccggagttggcccgtgcagaggccatgatttcattcatggagtga

SEQ ID NO: 86439 - DNA, 672 bp, Prevotella dentalis DSM 3688
atgattaagataacgaagactaaggagccgctgcaatggacgcaataccgcaagacaccgggggctcattatcaggcgcaagactatctgacggaggccctgatgagggagcagggatatatctgtggctattgcatgcggcgcattccacggaaagacaaactgagtggagcggctactcaggaggatcaccgtatagaacacgtcaaatgcagaacgttttacccggagcttgagttggattattccaacatgattgcctgttgtccgggccatattggggatgaggaccactgcgaccgcagcaagaaagatctcgccatatccttttcgccgatggaggaagcggcaatagagtcaattcgttattccagttccggcaagattttttctgccaacaggcagtggaataaagagatggacgaggtgctgaacctgaataccagcatgctggttcttaatcgcaggagcatgcttgacgaggtgattaagcgtatcaatcagcaatgcaggaagaagaatggctgggacaaggcattgttgaacaagttcctgcagaagtattcccagatgcacaaaagtaatgacaaggaagaaaaccgcatggaatattatccattttgtggcattgtcatctggtttctgaaagacaaactacggaaacttgggtag

SEQ ID NO: 86440 - DNA, 939 bp, Fusobacterium nucleatum subsp. animalis ATCC 51191
ttgagagattatgaatataatagaaaaaataatggagagtattatagtaatttaatagcaaacttttttgaaaatccacctaaaataatttatgtcccagcagaaaataaatttgaagaaattcaaacttattctacaactttatcaaaaaaatatgaatttataaatatcataaattctaatgtaataaaggatattccatcatatatagcaacaagaagaaattatcttgccactattgaagaagatttaactatgaaagaagtcactaataaagtagtaaatgagataaatggtatttttgatattttagaactagatgttaaattaaagggtttttcaaaagatgaaaaaactatgcctatttttgaaaattctgctggggaagaatttgatataaatgatttatcttctggtgaaaaacaattgtttttaagaacattatctataaaaatgttagaacctaaaaattctataattttaattgatgagccagaattatcattacacccaaaatggcaacaaagaataatagaagtatataagaagattggagaaaataatcaaataatagttgcaactcattctccacatatattaggaagtgtttctaatgaaaatattttcattttgtatagaaatgaaaatggaaaaatagaagctaaaacaggaaatgaactttattcttcttatggacagcctgttgatagagttcttaaagatataatgggattgaaatctgttagaactccaaaaatagacagagatatacaagaactaagaaaacttgtagatgaagataagtatgatacagaagaatttaagaaaaagtataacaatcttcttgaaatattaggaaatacagatgaagatttattccttatagatatggatataaaaatgaaacaaaaggtgaattctaatgttgaaagtaaataa

SEQ ID NO: 86441 - DNA, 450 bp, Fusobacterium nucleatum subsp. animalis ATCC 51191
atgttgaaagtaaataagaaaaaaagtgaaccagaagaatttactaaatacaaaagtaaacataaaataataaattgggatagttttacacctgaaattaaacaagttttaaagcaatatctattagaagaacaagaaaataattgttgtccctattgtgaaatagaaatccatttagaagatagccatatagaacatattaaaccaaaagataaatttcctaaacttttagcagactacaataattttattgcttgctgtcttgaaaagaaaatatgtggtgattcaaaagcaagtaaatggagtgaactttttattaatcctgttatagaagatccagaagattattttgaatatgatataaaaactggaaaaataatacctatttttaaagagggaaatagacatgaaaaagctaagtatacaatagatttattaaatcttaatgat

SEQ ID NO: 86442 - DNA, 1254 bp, Vibrio tubiashii ATCC 19109
atgtttaaaaatattaaaattaattattggcgacagtttgaaaatgtcgatatagattttgggagtaacgttactatattgacgggtagtaatggcgcaggaaaaacgacgattcttagtatattaagtgaacactttgggtggtcagcaagactactgtcaactcctgaaaaagaaggagaaacaggtttaacacgctttgtcactggagcttggagttatttatttgataataaaaaagctgatgattactgggttgatataggatcaattgagtactccgaaatggatggagggaaggttcaagtacctaaagaagcaggttctagttatagcttcaatatactaaatagggtagagataaaagggatgcatatcccttctcatcgaccagtttattcatataaagaagtagactcaataccaacgagaccaaagagcaaagaagattactttaacgaatataattcaaatatattggataaatttaacaatacttcaaactatcttgaaaatataagtccaagctatcttttaaagcaatcacttattggtttagctacttttggctacgggaactcacatgttgtaccgaatagtgaatacgctgctctttttgagggttttcaagatgtactaaagattttattaccagaaactataggttttgagcgtcttgaaattagaattccagaagttgttctggtaactaagtcgggtgacttttccattgatgctgcatctgggggagttgcttctataataggtatagcttggcaaatttacatgtttgctcagaataaagcaagttacgtaattacaatagatgaacctgaaaatcatttacatccatcaatgcaaagagagctaattccaaatctaattaaagcattccctgaagctcagttcattattgcaacacatagcccttttgtcattggttcatcgaaagagtcttcagtttatgcattaacctataatgatgataatcgagtatgttcaagaaaacttgatctaatagataaaagtggtagcgctaccaaagttctgagagaagttttgggtgtgcctgttactataccggtttgggttgaacaaaatctaaatgaaattatccataaatattctaataaaggtattaccgaagatttatttaaggatatgagggtcgaaatggagagtaaaggcctagcagagtttatgcctaaagctgtatctgttgtagtggagcagattaatgataaaaatatctaa

SEQ ID NO: 86443 - DNA, 660 bp, Vibrio tubiashii ATCC 19109
atgataaaaatatctaaaacccagaaaccccagatactccaagataatgcagatacttggaaaaaggagctaatggagtatgtttcaaaaggagagaaagttcctaagtctctgtcaaataagtataatgactgcacagttaaagatgctttaaagactgaatcatccgcaaagtgtatgtattgtgaaagtgtagtaaagcatgtagcccatgagcatattgaacatattaagcctaaatcggtaaaaaaatatccttctcttacatttgaatggagtaatttaggccttgcttgtccaatctgcaatatgaataaaagtgatatctatgatgatcagataccatttattaacccctatatagataatccatcggacttttttgtggcggctggtccttgtgtgttctctaaacctggtgagagaagagctgagttaacagaaaaaattataaagttgaatagagctgagcttattgagcagcgtttagagaggattgattatcttagggaacttgtggataaatataacaaagaagccaatagtacacttaaatcaatgttattaaatgaaattaatattgagttgggatcaaataagccatatacatttgtctcaaatgcattggtgaaaattgtcgatagtgcacttgtagtttaa

SEQ ID NO: 86444 - DNA, 1272 bp, Ketogulonicigenium vulgare WSH-001
atgaagatcagacggctcagcgttgccggccttcgcggcttcgaccaggcgaccttcgaattcgatccgcacttcacgttactggtgggtgtcaacggcgtcggcaagagcagcgtcctcgaggctctgcgggtctcactgtctcgggttctacctaagttcacggcgagccgctcgacgcctctggcattcgccgccgatgatatccggcaggtaagcgcctcgctgaccgtcgatctggatctcgagtttcccgaagggcaacggaacttactgctgcacaagccgagagaacggtttgttccggatgaagaggggtctgttcggaacgcgacgctagacacgcctgaaagggaagagctgtcaccaccacactggccaaaggccgatccgtcaggcaatcaacctatagcaatctacttcggaacgcgtaggtctcaccccacggatgagcagatcaagattggtcggagccgcggaggccaggctgcggcatttgccgatgcgctttccgatgtccggccgctccaccttcgggacatggcgtcctggatggtggcgcaagaggcgttggcggaggaactgccgcgtgcacgattccatcttgaggccctgaaatctgcagcagcccgtttcttgccgacctgcaagggcctgcgagcgaccaacggcgcggacaagccacggcttttgatctcgaaggacggcattgaactcgatgtgcggtatctctctgagggtgagaggggcgtgcttgcgttggcactcgaccttgctcgccgcctttcgcaagccaatccagcccttgacgatccaatcggggacggcgttggagtcgtcctgattgatgaaatcgatatgcacatgcacccgctttggcagcggcagattgtgtcccttttgacggagacgttttgcagttgccagtttatcgccaccactcattcgccgcaggtgattggcgagacgcaaccgagccaagtggttcttctgaaacaatctgcggggcgcgttgttcctcagcgatgtgggcaggcgtatggtctggacacgagttttgtactcgagcagatcatgggtacgccttcccggccgacgtttgtaaaggctgcgatcgatgaagtcgagaatgcgctggaggacgcagatttagatctggcgcgcgaaaagttggcaatattgcgcaaactgcagcacggagatgatcccaccactgtcggatttgaggcggagataaacaacctagaagcactggcagatgaggaagattaa

SEQ ID NO: 86445 - DNA, 687 bp, Ketogulonicigenium vulgare WSH-001
atgaggaagattaataaagcggctccgccagcagcgctaacagaatggatcgccgttaatagaaacggacagaactgtagttacaattcagttggaggtgaattgcgacggatcatcagggcggcgctcgtctccgaacagggcggtttatgcgcgtatacgggtcgcaagattgatgccgacacatgccacatcgagcatttgaagccacaagcgcattgcggtgacttagaggacgtaacttacttaaatttggttgcggctgtgccgcaaccaaatacaccaaagctgccgtatggagcacatctgaaggacaattggccgtccttggctgagtcaagcctatttgtttcgcctctttcagccggatgctcggctaggttctcattcagcttcactggtagaatctcgccacgcaattcaacggatactgccgcagatgagaccataaagcgtttggggctgaatcacgatattcttatcgccttccggcaagcagcgatcaagggaacgatccagtcgcgcggtcgtcagatggatgcgaaattggcgcggcgacgattgcaaggcttgcagcagaaagagctgacgtcacgtgatttggagcagttctccttcgcgcttatcgacgcgctggagaaacatatcatccggcttcaaaagattagcggaaagaagaagaagtaa

SEQ ID NO: 86446 - DNA, 1056 bp, Desulfosporosinus sp. OT
atgacgcatgtcttcctttgtgctatattggccggtacggactcctttgaaaagcgccatctgcttaaaaactgtaatttttctgcggttgaaaatgtcgatgttgaagttgacctgcgcaaaattaaggagttcttccctgcaaatgatatggacacggtacagatgccaaaagaattagttcttgcgattgactttatcgatctgcattttgttgatgtattttcacgtggatttcaatattccactggtgataaggcgttttttagcctaacaaaacttgaagaacttggactggattccatctcaatctataattttttcgagaagcttgcctccttgttctcggcaaagtataaagtctatgtaaaacacggcgagagcagggtaagcgttgatgaaatgagcgaaggtcaacggcaactcataaaggtcttggggatgcttggcgtctgcaaggatgaggactgtcttgttttgatggacgagccggatgcccacatgaatccaaaatggaaatacgaacttaaagcaacgatagatggttcgttagatgctgcaatcaatactcaagtgctgattgccacacatgatccactggtcattaacggggtggataaaaggtttattcggatttttgcttacaacgttgcgttaattgaggacaatggttttttcttcacgaaggtttacgagcccacagaagagaccaaaggaatgggaatcgatggtctgctgcaaagcgaatactatggcttgcaaacttcttatgaccaagagacatcccagaagtatatagagcggcagcagttatacattagactgattaacaaggagattacggaggaggaaaaaacgcatctcagggaattgactgctgaactggggtccctgccgatttcctacaataccattgattttttatatgacgattttatcaaggagttccgcaactcggagttttactcaaaagaatacctctcctttgatgaaatcgagcaaagaagagaaaaaatcaaagaaattattcaggcattatacgaggacagagaatga

SEQ ID NO: 86447 - DNA, 732 bp, Desulfosporosinus sp. OT
atgagatatttagatacgacagaattgctgcaaaaacgatctagttggggagatagaacagagctctggaaaaatgaacagcttcgtgaggacttcaaagagcttttttacgggaaatgctggtacacagaaatcaagttgctgggacaggatgtacatatcgaccacttccggccgaaagcagaggtcagacggtttcaagataacccatataatgaacccttgcagcatacgggatatagctggcttgcaaatgatgaagcgaattaccgggcatgttgtatttatgcaaaccgagttacaggtgaaggtggaaaaggatgttatttccccttacaagagggtagcccctatttaactcggggtggttcagaagatgaacagccgctcttgcttgatccttgtaagcaagatgatgtgaatgtgctgacttttttcggaggagatgtgctctgcgcgtctaatgaaccaattgatatcaaacgtgtagaaatatcgaaaacgctgtacaatttgagcgaacaatccatcaaatctgcaagggctagattatgggaagatatttctagaacgctcgccgagtatagcacaggtgatattagcagaaaagcctgtttgcgaagattatcagatgcaatcagccctgaagcgcagttttctgcctgtgcgatggcttgtgtcaattctttggcacaagatgaacttaaggccgatttagatttagagctataa

SEQ ID NO: 86448 - DNA, 1215 bp, Escherichia coli O7:K1 str. CE10
atgatgaatatccgcacgcttaagctcactaatctggggcggtttgaagaacttgacgttcatctggctccagtggaggagttcaagagcaatgtgaccgtttttattggtaataatggtgcaggtaaaacatcaatattaaaatcgttggcaaccagcctgagttggttcgttgcccgagttcgtactgaaaaaggtaacggtagccctattcctgaagacgctattctgaacggtaggagttcggcgacaattgaacttcaggtactgaatacgcatccagcgacggaggtcgctacgccctaccgttggttgcttgccagaacggccagtgggaaaaaatcgaccaccgcctccagcctgcaagaggccagccaattggctgcgttttatcgagatcaatacacccagaatagcggggcatccttcccgcttatcgccttctatcccgtagaacgtgtcgtgctggatgtgccgttgaaaataaaagaacgtcataattttttgcaactggatggctacgataacgccctgaatcagggtattgatttccgccgtttctttgagtggtttcgcaatcgcgaagatgcagaaaatgaatcgggcttaccgcaagacgttctggataagctcagtaccaggatagatctcgataacgccgtcttaaatgcattaacggcgctcatggcctcgtcccgggatcgccagttgaccgccgtcagaacggccattagtcgctttatgccagggttcagcaacttacgcgtcaggcgtaaacctcgcctgcatatgtcgatagataaaaatggccagacactgaatgtgctgcaattatcgcagggtgaaaaatcactgatggcgttagtcggcgatattgctcgccgcctggcaatgatgaacccgatgttagaaaacccgctaaacggcgagggaattgtattaattgatgaagtggacatgcacctgcatccaacatggcagcgtacaatcatccagcgtctgacgacaacattcccacattgccagtttgtcttaacaacccactctcctttagtgatcagtgattgcaaagatgtgctggtttattctctggatgatggcgaattaacgcagctcccgtctctgtatgggcaagatgcgaatactgtgcttttgaatgtgatggatacggatattcgcaatgcaacagtgggtgagagcaaaaccacgggataa

SEQ ID NO: 86449 - DNA, 624 bp, Escherichia coli O7:K1 str. CE10; identical to SEQ ID NO: 86041

SEQ ID NO: 86450 - DNA, 1485 bp, Rhodanobacter denitrificans
atgaagctccgccgcctctggatcgccagctttaagaaccttcgcaactgcgaaatcgctttcgagcagccccatctgctcaacgcggtcattggcggcaacggcagcggcaagtccaatcttgtggaggcgatcctccacatccttctcgacacctacctcaacaagacgccacccttcgactttcacttcgaatatgaggctcaaggccgccacatcaaactctccgccgcggacggtcgcctgcgatccattgtcgatgagcaggaaatgctcatcagtcacttcacccgtcgcctgcgcgacggcgaggctcaggtcttctacccggagtccacgttcgcctactactcgggtgactgtgaccgcgttcgccgcttgctcaaacgctacaacgtcagtttccgccgcttcgtccagcaatccgaacatgacaacctgcgcccgctttttgtcctgtccaccaaccagcaggcccgcaacatcctcctggcgctcatcgcccatcgccatgtcgagttcctcaatcgcctcggaatctccggcgcgcgcaaaatcaagatcgtccttcagtcacccgcaggattcgatcccgaaaaagacgagcctgtgctttggggcacgctcggcaaggtcggcaaaaccatcgcagcattggctgaaacggcggatgccgaagaaagccggaaggaagaactgccaaaacgtcgggacagcgagatcaccggctacgcgttctccgagacccgaacctacaccttcgaggaaatcatgaatccggagcagcgcctctggaaactggccgcccgtcttgagcgcggacgcgacaatctctaccttgccctggagcaccttgctgtccgcggcatccttagaagtgtcgaatacgaactgatcggcgatggcgaccagcagcctttcaacttcgaccaactcagcgagggcgagaaacagcttattgccgtcatcggcgccatccgcctcaccaaccaacgcgacaacctcatcttgctggacgaacccgacacgcacctgaaccctcagtggtcgtgggaatatcccgaaatgctcgacgaagcgttcgacagcacccaaaaggatcgttccaccgtcctcatggccacccacgacccggtagtcatctctggcctggtgcgtgagcaagtatttctcgccaacggcaacggtcacgaccgatccaacttcgaacatccagtccgccatccccgtggccagggcgtcgccaacctgctttgcagcagcgaatttttcggccttccgtccagcctggacaaaaaaacccaggtactcatggacgagcgactcaagctcagcctgaaagaaaccctcaccgaagccgacaaacaacacctcaaggacctgaaccaaaagctcgagattctccaatccggtatcagtgaacgcgacccggactatgtcgagtttctgcgtcagaagtatcagccggaaggaatcgggaactaa

SEQ ID NO: 86451 - DNA, 810 bp, Rhodanobacter denitrificans
atgcgctttatcgacatcaagttactcaccaaggtcattgaagcggacgccgacggtgcaaaaatatgcagtacgttgcacagggctcataagagcactgcggtgaaatacgcaggcgaccggcagggctacattgatcgaaacggatccgcgaaatggcgtccgctcaaggctcgttttacggcgattactggcagaaagtgctggtataccgaggcagagctcactggcggcgaccttgtgattgatcactaccgcccgaaggctgcttactggtttcttgctttcgacgagtataactaccgcgtggcatgtccatacgcgaattcgccgcatcacaacgaggaatacgggtgcgccggtgggaaaggagatgagtttccgctgctcgatccacgcgccaaagcaaaggggcgcaatggcatcaaactagagcgcccaatgcttcttgacccatgcaatgaggctgactgcaagcttgttgtcttccagactgacggccgccccgttttacatcctgatcacctgaacgatgcgatcgcgaaacgaagagttgagaagagcaagattctcttgaacctcgaccatccagacttcaacagcaaacgggagcaacttcgaagggatattgacagagatgtgaggagccatgagaactctgctggagatcccgcccaccagcaggatctgcgcacaaagctaaccgcacgaatctcacgaactgcgccattcagtaccgccgcacgccaatacctcggcgctcacaagcatttcgaatgggtggctaagcttctgggtcaaaatatgtga

SEQ ID NO: 86452 - DNA, 1239 bp, Yersinia enterocolitica subsp. palearctica PhRBD_Ye1
atggaaaaatttctaacaaaaatcaactactctcttggcatcgaagagaccagacatgatattaatgtcaatagtaggatactaatagtgacaggtgggaatggttgcggaaaaacctccttacttaaccagataaacagtaaaattaaaacgttatgtgtcgaaaaaaaacacagtcagatctctgatatacagcgagatattaagtattgggaagaacaattaaacagttttccacgtggtaatgcgcaacatcaaaatgccaagaaccaactcaaataccaaagagaatctctcaattccttagaaaagggtgttactttagagtttaaagatataaatgaaattagcgcgttacttgatgaaaaaaaagctatttttaactacttccaagctgataggaaagccacaatactagaatcaataggggcaacgaaagtatcgttacaagaaaaactcgacaaaaattatgcttataacaatatgaatctcggtaatgaatttgaaaatcatttagttaatttaaaaacaagacagtcatttgcaaaaacattcgataacaatgaatcactctacgaatcgatggagacgtggtttattaatttagagaaaagcatttcctttttaatggaagatgaatcattcaaattaatatttgacccagataaatttaaattccatttgcagcaagacagtaagcctccatatacatttcaaactttatcctcaggctattcatctatatttaatattttatctgaacttataatgatgactgaggctaatcatatatctccatcagacttacaaggaatagtattaattgatgaaattgatgcacatctacacgtatcgttacaaagaaaaatactaccattcctaaccaggacatatccaagaattcaatttattgttacaacccattccccttttgtaattggttcattagacaatgcaataatatatgatttaagcagccaacaagaattttctgatttatcaaattactcttatgaaaccattatcgaaggtttactcggcgttcctgtggtctctatttcattagaaaaagatactaaaaggctatcagctttattagtagaggaaaatgttgataacgctgcaataactgagcttgtagaaaaacttagtccacaccaagaaaatttagatgatgaatcagctgtttttcttttaaaggccagaagggtattgcgcgaagataaggagactaaataa

SEQ ID NO: 86453 - DNA, 657 bp, Yersinia enterocolitica subsp. palearctica PhRBD_Ye1
atgtttccggttaataaatctcaagaagctccagcctctctcgcagcaagaagatcctacagtgaaaaagatgtaatcgaagcattgtctcgtgactttcataataaatgttacatatgtgaagttaaagatcccctggttttgaatgtcgagcacttccggccacatggggataatttagacaaaatgtatgattggagaaatttgttttttgcttgtggtcgttgcaataacattaagagagcgaaatttgatgacatgctcgattgtacgaatcaaggcataaacatcttaatgtcagtcaaacacgtattcccaactttagcatattccaatcatgtggatataattcctatgaatgatagtgaggaaacaaaacaaactgccgaattgatttatagtgtgtttaatgacgaccacacaggaaataaagatttaacacgtatattcttactaaaaaggctcatgaaaatatataggaaacttcttgaattaactttagattatgatgacgaagatactttagaggaagaaaaggagcatatagcaaaaaaaataaaaaacatgcttaaagttgaatatgaattctccgcctttattcgctggtccataatagatgcaacgaaacttcatcatttaaaagagggcattttttaa

SEQ ID NO: 86454 - DNA, 1155 bp, Paenibacillus lactis 154
atgaaagtagagaaattaattatccaaaatattggtggtattaaaaatttaactctagagttcattgatggtttgaatttaatttgtggtataaatggtgtcggtaaatcgactattctagactgtatagttagtagcttttcgttataccccgcagaaggccttagaaggaattcaaactctgaatatggtgaatggacaataagtgtagacggtacaatctttaaaaacagtctaagaatatttagacctgaggaacagattgttaatcataaccctttaggtccttccataaagaatataatttatgttaaagaacagagacctttaaaatattctagattacaaagtatttcaagagataatgattttgaccagagtcaatatagtgctaggatcacaaatggtctaaatggagattcaataaaaaattggtttattaatagacttgcatttgaaagacaggggaatttcacttcacaagagaaacataatcttcaaacggctcgaaatagttttagcttactagatcctaatgtagagtattctcatgtccttcatgatagtttagatataatgttaaaaactacaagaggtgaaatttatttcgagtacttgtcaacaggttttaaatcttgtttgtttattatccttgggataattaaggaaattgagtttaactttaaagatccaaaaataaaagtaaatgagtttgacggggttattttaattgatgaagtcgatgcacatcttcatccatattggcaaggaaggtttttaaaagtacttaaagaggtttttccgagttctcaaatcattgcaactacacatagtcctcacatgattcaagaagctgatgctaaagaaatcattgcacttacaattgatgaaaatagcaatgtatcgaggttagaattagatcagctagaatttggttttaaagggtggacaattgaagaaatccttgaagatgttatgggtttaaaagaaactcaatctaaccgctatttagaagtgaaaaatgaatttgaacgagctattgaacatgaggacataattaaagcagaatatacatatgaaattttgaacaagatgctacatccaagaagtcccatgagaaaaatatatcaattacaattaggaagcatacggtga

SEQ ID NO: 86455 - DNA, 765 bp, Paenibacillus lactis 154
atgataaaagtcgaaagaacaaaatgccccagtgaattaactgaagatattaaacaagccctcacacaagaatataagacaagtaagaagaacgtatggaatgtagattacatcaagaatgctctgcttgaaatgagcaataataagtgtatattctgtgagtgtaaacttggcgaggagagtaagtatattgaagttgaacatttttatcccaaatcgttatatccagatgaagttattgaatggacaaatttattaccaatttgcaaaagatgcaacgtaaaaaaactagatcacgatacaaaaaaagaaccgatcattaatccaacagtaaatgatccaaaaaatcatttaagaatgataaattaccgattcgttggtaaagaccaaattggaaaagatactgtaagtattctcgcactaaacgattcaaaaagactaatattaccccgagcaaccatcggaaatgagatagctgagttattggaggacttatcagacttagttaatgaatatagtcaaaaggaaaacctctcccgaaaagaaattaataagataactggcaagcttgaaaatttacttgattcttgtcaatgttattctgaatatagtgcaacttgtgcatatgcattatttggcgatgacaattattatctggttaaagagtttttcattagcaaagggctttgggaccctaatttgcaaaatttagagaagaccgctatagttaattggctcgaagggacagttgaaaaagtacagtag

SEQ ID NO: 86456 - DNA, 387 bp, Salmonella enterica
  subsp. enterica serovar Hvittingfoss str. A4-620
ttgcgcagcgcatttccgcagatccagtttattgttacgacccatagcccgcaggtgctcagtacggtaaaacgcgaatccattcgtctgcttgagcaggatgagaatggcaacgggaaagcgttgatgccgctcggagcgacctacggcgagccgagtaacgacgtgctgcaaagtgtgatgggtgtcgatccgcagcctccggttaaggaaaaggccgatctgcaaaagctgacggcatgggtggatcaggggaaatatgacgagccagaaacacagcaactgatggctgcattgcaggtggcgctgggtgatcaacatccgcaactccaacgcttacagcgcagcattgcccggcagaacctgctgaaagggaaggcacaatga

SEQ ID NO: 86457 - DNA, 597 bp, Salmonella enterica
  subsp. enterica serovar Hvittingfoss str. A4-620
atgacgcttctgctcaatgagcaatatcatctttgctgttacagcgaaatccgtgctgatttgcgtggcctcggctatcacattgaacacgtcgaaaataaaagccagcagccagcgcgaaccttcgattatcaaaatctcgcagccagcgcgttagactctgagaatggtttgccccagcttggcatcaacgcgttcggtggtcatgcacagggaaagaataaatctgtggatatggcaaagtttattcattgccacctccctgactgttctcgttattttgcctatttatctaatgggcatgtggttccttcaatagatttaactgagcaggaagctgagtacgcacagtacaccattgatcacctgaacctgaacagcggattccttcaaacggaacgccgtaatcattgggaagagctggaacagctttttgaggaacatattgagaaaggctgggatctgcaccaattacttcagcttgatctggttccgacaccagaccataaactgcatgagttcttcagctttacacgccagttctttcagcaagaagcaaagcaggtattacaggattacgctcccgaattgatgtaa

SEQ ID NO: 86458 - DNA, 1398 bp, Escherichia coli str. 'clone D i2'; identical to SEQ ID NO: 86202

SEQ ID NO: 86459 - DNA, 732 bp, Escherichia coli str. 'clone D i2'; identical to SEQ ID NO: 86109

SEQ ID NO: 86460 - DNA, 1398 bp, Escherichia coli str. 'clone D i14'; identical to SEQ ID NO: 86202

SEQ ID NO: 86461 - DNA, 732 bp, Escherichia coli str. 'clone D i14'; identical to SEQ ID NO: 86109

SEQ ID NO: 86462 - DNA, 1662 bp, Aeromonas salmonicida subsp. salmonicida 01-B526
atgaaagtcaataatttgcatattcgctctcgctttaaaaaccttgaaaacgtgaaggtggactttgacgaaaaccacctgatgacagtcgtggtaggccgaaatggttcgggtaaatccaacgtactggaagccttagtggcgatttttcgcaaccttgacttgggagatgcaccaccgttctcatacgagttgatttatcgacttggcgagcctcacaagcaaaataagcccagtgaacggtggctggaaatcactattgatgcagacccaactcgtggcacaatcgcaaagcaataccaagtacaagtgcgagacttattagcagataacgaacttaataatacatccaccaataaaccttcaggtgaaaccattccgttttcaaaagtgaaacgcgacaaagaaggtaaagccccgtacctacctaactatgtgtttgcctattattcaggccctagcgatcgtttggaaaataactttaagaaacatcgcacaaatttttaccgtcggctacttgaggataagttggatctaaaaggcgacattaggcctttgttctatgccaagccacaccacagccaatttgtgctattagcatttttcttatcagaacaagacagcgtagaaaaagcatttttgcgcgaacacctaggcattaaagacttagacagcattcactttgtgatgcggcaaccaggatgggcaaaacagaaaggagaattattctggggagcgaaaggagttgttcgtcgttttttagatgagctaatcaagcacacgctgtcccccgttaaagtgacacgtccggaagatacttcgttaacgaatagtaatattagcaaagagttcttccatttgtttttacccgatgtaaaggcactacgcgagtttgccaaagacctcaatcctgacgagctgtttaaaatgctcgaaagtacgttactttcggagattatttctggagtcagcattcgagttaaagtgtccagcagcaaggagccactgactttcagagagctcagcgaaggtgaacaacaactacttactgtattaggtttgctcaaattcactggaggaaaagactcattgtttttactcgatgaacccgacactcacctcaacccatcatgggcagtgaagtatttgaagttcctccgtgagttcgtaccaaaccatgaaaccagccatttgttgatggtgactcatcatccactcgctattgctgagttgaagaaagagcaggtacaggtcatgtggcgcgattctaactttcaggttcatgcacaagagccggaagaaagccccagaggcatggggtatggtggaatactcactagcgatatgtttggtttgctcacaactctggacaattcaacagaacgtttgctgcgattgcgtcggcgttttaccgaaaaaacggagttatcgcccatacagagtaggcgtttgagaaaaattgataaggctatagaggggctggggttcacaaccgctcattgggatgaggagtatgcacaatatttgcgtatgcgtagagaggtggagaaggaaaccgaagccgttaccgtaacaccagaacttaaacatgttcgaaaagagcgagccaaagagatcgttcagcgtatgctggctgccgaacagggagaagacaacaaatga

SEQ ID NO: 86463 - DNA, 864 bp, Aeromonas salmonicida subsp. salmonicida 01-B526; identical to SEQ ID NO: 86365

SEQ ID NO: 86464 - DNA, 1242 bp, Hungatella hathewayi WAL-18680
atgatagagcaaattcaaataaaagactggagacaattcgatagtcttaccattaattttgatactcgtttgacaattttaacaggcacaaatggttctggtaaaacaactatattaaatattctatccaaggcatttggtgaatccatcaagtttgttagcaatgttaatgaaacttctaatggttctgttaattattcttcaagtgtactaggtaatttggaggataaacgagatgataattacaactcctcaatcattggaagcattacttataattctataacctcccctattttagttccagaagaagtctcaacaacatacaacatagactttaaagatactcagccttgtgatggtttatatatcaattcacatcgttctctatttcaatacaaaagagtggataccatacctactcatgccctaaaaagagacgagatttttagcacctaccacaaatacaaaaccttaccattgtctgatatatattataatcctaatgaacaaggtgctacaaaacacataaaagaagctattatttcattagctacatttggcccaggtaatagctacgtaaagtctaatcaagaggcacttaatatatttgaaggatttcaatctatactaaataaaatattaccacccaaaattggttttcaaaaattatcgatagaaattccagaagtcattttagagacaacatcaggggcgttccctattgatgctgtatctggcggtatcgcatctattattgaactcgcctggatgatatatatgtatgccacttctgaaaaatcctttactgtactatttgatgaacccgaaaatcatttacatccagaactgcaacaaactcttttgcctaatttgcttgatgcttttccaaatgtgcagtttattgttgccacacacaacccttttattatttcatctgtagaatcgtcagtaatttatgtcttagattacaatgaaaagaaaaaagtgatagcttctgtacttgaaaacataaccaaagcagcctcgtcaaatgaaatattacgagaagttctcggaatcacaagtacttttcctctatgggcatctgcaaaaataaaattgttaataaatgaaacaatatcaaagggtatttctgaaaatagcctttcagatttccgagaacaattaaaatatcttggttttgaaaatgttattcctgttgcacttaatcaattattcgaaggtgagataaatgattaa

SEQ ID NO: 86465 - DNA, 657 bp, Hungatella hathewayi WAL-18680
atgattaaaattaagaagagagcaaaaccgcaaattttaagagataacgcccagcagtggacatctgagtacttaacagctttacaacaaaaaaatcccgttcctaaccacataaaatatagatatcaaaactcagaaatcaaagatgctttagaagaagaaacatctggaaaatgtgcttattgtgaaagtaaatttaaacacattgcctttggggatatcgaacatattttacccaaaaataagaatgctcgaccagaactatatgttgaatggaccaatttgactttatcttgtgaagtttgtaatcgtatcaataagaatgattactataatcctttcgacccattaataaatccaattgaagatgaaccagataagtatttaatggcacttggcccatttatttatcaagtacccggtgaacgaaaaggagaaatatctattgcgattttagacttaaatcgttctgatttaattgaacgcagaaaagaaaaaattgaaaatttattacctctggtagataaatggaaaaaagaaaccaatgaaacatataagaaattacttcattcacaaataaaaaaagaagccgactctgataaggaattctcatttgttattagtagctatcttaaactaattaatttctacaattaa

SEQ ID NO: 86466 - DNA, 1211 bp, Halomonas sp. HAL1
tgcatccacccactcatcaagaacgctacaagcaattgcttcggcaggatgatgacgacttaatgcgcaggctcttttactgccgaggtgggcatagccaattggtattgctagcgtgtttgttatctgaagatcccgtattcaagaagttattgggtaacttaaacatcgaggcaatagagtccgctttatttgtgcttaaaaagccatattctgccaagaatttggacgagagtgatatcgaacttggagactcacgcttttggtatcgacgcgggacagtcgtaaatggatttctcgaaaaactttggcaagttgcttgggcgccggttcaagaaacaaagcagatagcagtagattttcgccgacggccagagaagcaagagctgctgtacttgtttgttcccaataatcaaagccttaaaaaactgggcgaagaagtaggcactcccgagcgcttcttccgctatgcagaggcagcctatattggcgatttattggaagaagttcgcattactgttaagaagtcaaaggggcacggaggggacgtcgaattcaagcagctatccgaaggtgagctgcaaatgctcaccgtactcggcctgatgcgcatcactcgtgaagaccactgtttgttcttattagacgagcctgacacccacttaaatcctatctggaagctacgctacttcgacgatattgaaggcgttctaagctcagaaaaagattctttggtacaaggcgaatcgcaaatcctgatcaccacgcacgaccccatgatggtaggaagcctgaaacgcgaacaggtgcatattttgcgaaaacacggtgattgctccattgttgaatctcctgacgtgcatccacagggaatgggtgttaccggcctgctgaaaagtgagttgtttggtttatcttccacactggacatcgaaaccgaacgccgcctgtttcgtcgtaatgaactgtttgtaaaatcgccacgtactgctgatgacgatgccgagttatcacggctttctgccgagctggccgatcttggtttttctactgctgatttccgtgacccagactacgcacttttcgtgcgtaaaatggcgcagcatcgcaaattccgaaaaccggtgttaacgccagaggagcaagccgaacaagatcgcatcgccggtgaaatcatcagtgaaattctgcgtgaggaggacggcgaatga

SEQ ID NO: 86467 - DNA, 858 bp, Halomonas sp. HAL1
atgatttttatcgatcttgagcacaaaaagccgactgatacggacattcccaactgggtgccctggacacaagcgcaatgggaagcttggttggccaaatccaatcagctcgttaatgacatggccgcactagaagcggctggcaagtataatgaacgtaatgcattgattgacgaaaaccgcgcccactggggagcgctgaaagaatggttattagccctttctggccgtaagtgctggttctctgaagtccgcgagctgtattcgcattacgatgttgaacactttcgaccaaagaaggaagccaaagccttggatggcaccaaccgtgacggttattggtggttggcttttgattacatgaattttcgtgcatgcggcaatgtgggcaatcgtaaaaaagggggctggttccctttgcagcaaggatctttgatttcaacttactcggcaccctgcgaagaatccgaagcacgttatttgattgaccccatcgatgactatgatgtttcactcattgcctttgacgaagaaggtaaagttgtgccagcccccggtacatcagcgtgggaacagcagcgggtagaacaaactgtgaagcggctcaaacttaacgaacatgtaacactggcagaagagcgtcgtaaggtatggcagaaagtcgatggcctaatagaagatttccaaagggctaaaacacgctgcgccacaggaaataacccggccgctaaagagaaactaaaagcggtgcgttatggcattcgtgaaatgaccagcccaacagcagagttgtcttcggttgctcgttggtgcgtgctaatgcgcagcgaccctcaactatccatgctggtagggtaa

SEQ ID NO: 86468 - DNA, 1320 bp, Actinoplanes sp. SE50/110
gtgtatctgcaccgcctacggatcagcgacgtgcgcggcttccatggttcccacgaggtcgacctcggcttcgagctttccgcggacggcgagccgaccgaccgctatcccggcttggtcgtcatcgcggggcgtaacgggtcgggcaagacgacactgctccgggccgccgccaccgccctcgccgggccggaggtcaccaacagtttgaccgaaggcgtccgcgactgggtgacccacgaggcggcgacggccgtcgtgcacgctgacattcggctggccggagatgagatcttcccgccggaacgcttcctcgaggcacgcctgcggtggccgcggacggaaggcgcgcgcgccagaccggaatcggggcttgattcccggagcgagcagcacgcgagaatttcgctgtggcggtccaacccggagagctggttcgcggccggctacggaccattccggcgcctggccggttccagcagcgaggtcgcacgcctgacggccggcgattggaccgtcgcccggttcgcgaccctgttccgggaggaggcctcgctcgccgagaccgtccactggttgcagcaggtcaactaccgtgcccggtccggtcagcagcggtacgccgacatggagggcttcctcctcgccctgttgaacgacgggctctttccggatggacatgccgtcgaccgcgtcgacccggatggactctggatcgcccggcagtccggcccacccatgttgatcgaggagatgagcgacggctaccgcagtgtcaccgcgctgatcaccgacatcgtccggcagatcagtgactgcttccggctgggcgttccgtggaccggggaatacccgcccagggtgctgacgtcggggatcgtgctgatcgatgaggtcgatgcgcacctgcacgtttcctggcagaaacggatcgcgccatggctgcgggagcacttcccgaacatccagttcatcgtgaccacgcacagcccatacatctgccagagcgcctcccccggcggtctcatccaacttcccggcccggacgacgatttcgcaccccgcgtcgtcgatgacgagctctaccgccgagtcgtcaacggcagcgccgacgacgccgtgctgaccgagctgttcggcctggaatcgccatactcccagcgggtcgacgaactccgtgccgagctgacccggctggaacgactggccatccgcggccacgcccaagccggcgacctggagaaactcgccgagctgagcgaggagttgtcgccgtcgccgagcagcagggcccgcgacgtcctcggcggggaagcgtga

SEQ ID NO: 86469 - DNA, 732 bp, Actinoplanes sp. SE50/110
gtgatcccgttcgcccgccggcccctcccgggctccctctccaccagtctcgccgccagaaccaggcagctcagcggtagcaccagcccgtaccaggacgcgcggaaagcgtggaagaccgccaccaccacgcgtcgtggcctgaagacacacctgtgtgtcagttgcgcccgaccggctttctgcatgtactgccacgagagccggggcaccgacgtcgaccactacgagccgatcaggcgggctccgctgcgaaccttcgtgtgggacaaccatctgctcgcctgcgcgtactgcaatcagcaggctaagcaggaggtgttccccctcgacgggaacggacagccgcttctgctggatccgtccgtcgacgactcggccgatcacatgacattgctttcgaccggggtcttcgaagggctgaccacgcgcggggctgaaacgatcgaggtgctgggcttgaacaagcggcccgagcttgtccgggcgcggaccgtgtcctggcgcggtgtggtgcgggtgttcgatcaggccgctctgcacggaggcgtgctgaccccgaacgacctggaggacctgcggttcctgccggtagtggacgctttccaccacttcgcgcatgacgttgtggcggggcggctcgggttcaaaggcgtacggccccatgtggtgacttctgctgacgcgaacctggcggtgatccgcggcctctttcccgcatgtcgcctttag

SEQ ID NO: 86470 - DNA, 1380 bp, Azospirillum brasilense Sp245
atgaaactatccaggatcgagatcaccaactttcgctgtttcgagagcctgacggtatcgcttcagcccgacgtgaatgtcctggtcggcgtgaacgcggcaggcaagaccaccatcctggatgctatcgcgatcgcgctctatgacgtcgtggcggcgaatggcggcggcggcaaacggcagcggcaggctcagcagacggcccttcgcccgtcggacatccacatcgcgcctggagcgtcggatcagatgtcggggcggaaggatcatgttcttttccgagcctgggcgaccgacttttacccggttaccggcttcatgacggccgagcggttggagggccatcctgctctcgtgtggcaggattacatccggtatgcgccaccaaatgatttcaattattcatcgggtggttcggacgatctcaacagctactttaaagcgctttgggatgcggcacgaaaagaggcaaaggcgctgattgccttccctgttgttgcgtattacagggcaacccgccggatatctgaaatgcccccccttggtgacatcttcaaactcaggctggagcggcaactggcgttcaaggacgctatggacgctggcgcgagctatcagtccatgtgccagtggttctacttgcgtgaaaaccaggaactacgtgaaaagctgaggactcaagaggtacaggatttccagtaccctgatctaaaggccattcgtcaagcgatctccaagactttggaaaatgtgaaacgggtattctttggtgaaaaccccccgagtctaatggtggaatttgaaaatggcagtggtgccccacggtccatggctttgacacagctcagcgacggatatcggaaccttctgggggttgtcctggatttctcacgacggctcgccctggctcatccgaactgggacaatccgctagaggcacctggcattctgctgatcgacgaaattgatctgcatctgcatcccaaatggcagcagcggatcattccaagcctacaggatgtcttccccaacacgcagattattgtgacgactcacagcccacaggtattgaccacggtgcgtcgccggaacatcactatcatcaaagaccagcagctccacatgcctcacggcagcacctacggcgccgagagccagcaggtcatgcgccaagtcatgggagcggatggacgcccgccggacaacccgaacgcagaggcgatctacgaactttttgccttgatcaatcgaggagagttggaagctgcgggcgaaaaatgccaggaactgatgtctctgatcggaccggatgatccggctctcatcgaagccgaaaccacgatcaagaaccggctttgggaaaaggagctgggactgtga

SEQ ID NO: 86471 - DNA, 771 bp, Azospirillum brasilense Sp245
gtgaagcattgccggaaatcaaccccggagccacccaagctgaccgagttccgtgcggccaatccgcaggcaaagtgggacgagcttcgcgatcatgcctgctatggtgacgttcgcgacgcgacgcggcgcgatcaaggtggtctgtgcgcctattgcgaactgtcactgaccgacgacaatgagcaaatcgcccacttccatcccaaaagcgaccatgccggaaccgttaactgggccctgacgtgggagaacctctggttggcttgcaagggcggaacgcagacacatcacaacgatccggcctgttaccgccccccgctgcccgacaataggagttgcgacgagaacaagaaagacgacatcgtcgatgggcatgttctctctccggaagaggtgcccctatttccgcgcatcttccgatttgagcaaagcccaaatgaaatcagaattgtgcccgacgaaaacgggtgcgaacaggcgggaataccaatcgagaaggttcagaggactatcgacgtcttcaatctgaattgccagcggttggcagaggcacggctgtccgtctatcgcccgattgagtcgacgctcaagaagctgcgggaatcctcgttctcaacggaacagaaggttgaaaaacagcggcagtttgcggctcgtcatttgaccatagacgcagggcatcgctggccgcgcttcttcacccttctccgttggcagtttggtatggtcgccgaaacgcatctgaactcccttccgtatcaaggttag

SEQ ID NO: 86472 - DNA, 1653 bp, Pseudoalteromonas arctica A 37-1-2
gtgagtagtgattttaatcatgataaaactattaataaattagctaaaaaagctaaaagtggaaatttcttttcagcaatagaattgtcaaattattataatataggccgttttgttagtaaaaataaagaaaaatcagattattataatggcttggcatatagctactttaatactcagtcagttaaattgaaaaaaattaaaataaataattttagactattcgagaaagggattgggatcgaaggctttgacgaacatttaaatatttttgtaggcaataatggtgctggtaaaacatctattttagatgcaatttctctttctcttagttggttgagtattagtatcaacaaaaatggcggttcgggtgaatatgttgatatgggggatattaataattacagtgatattccttatgcttcagtagcttcagtaattgagttaaataaaagtatctctgcatctttagagttatctcaggcgcgtgaaggtactacaaaaataaaaaacaaactacacgagttcaaaatagtaggtgacttttacaaaatagctaacggttttaattctgattttaatatgcctttacttgcatattataatgttatgagatcatatgatgtaaacccaaaggactttaaagggttagatgatttatatgaaagtacagtaactgacaagtttgatgcttatcaaaagtcactaactggaaaaactgactttaaagcctttattaaatggtataaaaaatctgatgatatattaaatagaagaaaagttaataataataggagtgcagtattatcggaattaggtattacagaagaaactgtcgattttttaaagtcaattagcttgggaaatgctaatgctaaaaaaagtttaggtgaaataaacaccgctctaacaaaaaacgagcctgtgttgtcagacgatgataatttgaaaagaaataaagaaataattgataaagttattaatatatttatggacgggtatactgatattgaagttcagcttgagcccatgattgatttaataatcaaaaaaaatgataaaaagattagtgtgatgaagctgtcgcaaggtgaaaaaactcttctttcacttgttctcgacattgcccgtcgtttgattattttaaatccgtcattagataatccattaagaggtagcggtatagtgctaattgatgaatttgatcttcatcttcatccattatggcagaggcatatggcgaagaatttaataaatacttttcctaattgccagttttttttaacaacacactcccctattgttctctctgaagtagatagaaagcatgtttatattcttagtaacacagaaagtggacatacagttattgatcgtccttctcaaacatttggattaacagctaacgaaattcttaatgagttaatgacccctgatgatattagccaattagttagatctcagtatgttgaaaaagaattggaggagatatttgatttactagatcaagaatcagctacagctttaaatagcgcaaaaggaaaaataaataatttagagcagttgcttcatggcgatatacccgaattagttaaagcaaaaacccagatggaattaattaaagattggttagaagactgtgaaaaagattga

SEQ ID NO: 86473 - DNA, 648 bp, Pseudoalteromonas arctica A 37-1-2
gtgaaaaagattgaaaaactaggtgagccacgacagttaactgagtacagaagtaagccaggtgcgatatatgatggtcctaactttacttctgtaaaaaatgatattaaaaagcaactacttaaagagcaaggccacttgtgtgcatattgcatggcgagagtcaaaatatcagaaatgaaagttgaacatttcttatgtcaaacagaaaatgataaagaacagttgaactacaaaaacttacttggttgttgtaaaggtggtgaagggaataaaccaaggaatcaaacatgcgatactaggaaaggttctaaaagcatactcttttctcccgcaaaccaagcatataatattgaaagtaaaataaaatatagcactacgtctggaaaaataagttcatctgatactatttttaacaggcaaattaatgatgttttaaatttaaatttttcgagattaattacaaatagaataaaagctttagagggagtagaaaactttttaaataagaaagcaggtcggcgaaataaggctgagatacagaaagtgatcgagacttataagagtaagaatgctaacgataaattcaaggagtataatgcttacatacttcactacttaaatataaaactagctagattaaaatga

SEQ ID NO: 86474 - DNA, 1245 bp, Pseudoalteromonas arctica A 37-1-2
atgaaaaggcatatagatagaattaaaggtgtagtaccaaacacccataaagaaatagacatagctttgaatggtcgaaatttaattattactggcagtaatggatcaggtaaaacttgcttattgaaagaactagatagaaaagtagatttactgatcggaaaaaaacaattagctgataaaagtacaattgaaagatatgttcagatgtttaaagaagatgtacatagtagtcaaaatggtactacaaaaaatgatagagcaaagaataatttagaatctcagatagctcaactggaaaaaattaattccggcttagatatagcttttatagatcatttagatttttcatcaaaacttgataatggaacggctgtgctcagcttttttgaagcacatcgcaggtctaatataacatctgctaacacagcaaaaggtattgaaattgaaagaacttcaatattaaataacacgccaaatgacactagaagaaatcaaattggtaacaatctagaacaacacctagttaacttaagaaataggcgttctctagccattacagaagataatgatcagctactagctagcaatatcgaacattggtttagtgcatttgaagagagccttaaatatttgctcgaagacgaaacggctaaactaagttttaattcagataccttaaaatttacaattattcaagctaataaaccggcatataccttccagtcaatttcatctggctaccaagccatttttgatatttatgctgatttgctaatgcgtactgagtattttgagataacagcagaagagttaactggattagttcttattgatgaaattgatgcgcatttacatgtttcattgcagcgcttagtattgccattttttacgcgctcatttccaaacctccagtttattgtaactacacattcaccgtttgtattaatgtcagctacagataccgttatatttgatctgacacataatgaacaaatcgaagaagatatatctctttattctcatactgcagtcatggaaggtctgcttggaacaaaagcaacttctactcatcttgataactatattaatgaagttgcttcaataattaatatgaataaagttgattatgaacgtttagagttacttgtaggtaagcttaagaatgttgaaaactcattagatagcaaatcaaaagccttctttcttaaaggactaaacatacttgcggaaaaggagctgtag

SEQ ID NO: 86475 - DNA, 645 bp, Pseudoalteromonas arctica A 37-1-2
gtgttcaaagttgagagaataggggaggcacctgcttcccttgcaaggaaagtttataactcaccagaagttgttgaacggctaaataaaatgtttcacggaaaatgctatctgtgcgagcaagctgacttggatgcgccagagatagaacactttgaacctcatctggaaaatgaagtattgaaatttgattggaataatttgttttattcatgtgctcgctgcaacagcataaaaggcacacggcataaaaacttggtagattgttgttctgacgatattaatttagtacatgctataaaacacatgccccctataatgccggataatgatgtaggtataaccgctattgtagataaccctaaagttattaacacggttgaattattaagtaggtgctttaacgaggacaatacagccctgcgtggaattactcgtgctaatttaatggaaaaactatttaaacactatactaaattgcttaatcatagacttacaatagtaagtagggaatctaccgatcgagatattcaagatgcagttgagagaattgaagtaatgattcgtgataattacgagttttcagctttttggcgttcctatgtaaaggatgataaaaaacttcaaggtatgatgaaaatatga

SEQ ID NO: 86476 - DNA, 1284 bp, Synergistes sp. 3_1_syn1
atgctgaaaaaactgcttatcaggaatgtaggtcccgcgcctttaatggaaatggagccggggccgcggcttaacctcataacgggggacaacggccttggaaaaagttttctgcttgacacggcatggtgggcaatgaccagaaaatggccggccgaggttaattctaaactgacaacgggccgcatggcgctgccaaattcaaacaaaaaagccgtcatagagtttgttataaaaggaaaaacgagagattacgaacgtgaagttcctttcagcagagcatctcaaagctggaatctggaaaaaggacggcctggaagccccgggattgtaatatacgcaatgtctgacgaaagctacgcgctgtgggatccgctgcgtaattatggtaacagtcagaataccgacgaaaatgtcgcggcctatgtattctcgccaaatgaaatatgggacggccttgagctgcccaacgaaaaaggatggctctgcaacggccttatccgtgactgggcgctgtggcagacagaaggcgggcggcgctttgatctgctgaagaaagtccttgccgcactttccccgtcggaagaggaaaagctcgcaccgggaaacctcacaagaatcagcataaaggacgtgcgcgatgttccgactataaaaatgccgtataaacaggaagtccccgtcatcaatgcatcgtccgccatcaagaggatccttgctctggcttatctgctggtatgggcgtgggaagagcatcttcaggcggctaaaatatcgcgtaaaaaaattactaatcaaatcatcctgctggtagacgaaatagaggcgcatctgcatccgacgtggcaaagaaggatcattcccgcccttataaccgcgatggattctctgtctcagcaaaaagcagacgttcaatttgttttcaccacgcatgctccgctagttatggcctcacttgagactgtatttgacggcacaaaagacaaatggttcgatattgacttgcgcggggacgaagtttcaatggcatccagagaattccaaaaacagactgacgccgccgcgtggctcacaagcgaagcgttcaacatgaaatccgcaagatcgctggaggcggaaaaccttacccgcagagcctccgcattgttggactcagaagaagatgtcgataaaaatgcggtacgggcgatacacgaggaactgataaaaaaattgacgccttatgatccgtttctaaccacatggcgttacatttgcagtaaaaaaggttggctagacaggtga

SEQ ID NO: 86477 - DNA, 600 bp, Synergistes sp. 3_1_syn1
gtgattccggtacagcaacagcccgagcccaagagtttcggaaaaaacgtgcgaaccccgggggcaagatggctgagcggactcgcaatgcccccgcaaagccagaaagaatggaagggacacgaatactggcacaaatgcctcaacgatctgtatgcctgttacaatgggatttgcgcctactatgccatatatatcgacatgacctccggctatgctacggtggatcattttgtgccaaagagcgcggacccgaagcaagcctatgagtggaataattatcgcttgtcttcattccggccgaattcggccaagagggatgccgtttcgattatggacccgttcgccctacggaaatggactttttttataaatttttccaacggggaagtccggcctaacgatagacttcctgtcgacgaaaaaataaaagtcgacgaaacaataaaaatattgaaacttaacgcttcggaaatcacacggaagcgtgcggaagatttttcggcatatatcgccggaatggtgaccctggaatacctcgtaaaatattcccctttcgttgcggaagaaatcacacgtcaacacctagaacttgcataa

SEQ ID NO: 86478 - DNA, 1332 bp, Cardiobacterium valvarum F0432
atgccggacatcgcagctgtctctggttcacgcatgcatattcatcaactcacactgacaggttttcgcggtgccaaaaacctgaccctgcacctgcaccccgggctaaacgtttttgtcggccgcaatggtgccggcaagtccaccttgctggatgccggcgccattctgttgtcctggctggccaaccgtatcaaaacggccggggcatccggcaggcaaattgcagaatccgacatcaccaatgggcagtctgtggcaaagctggcgctcgaactgtcttaccggggagagcaaacaggatggcatctggtgaagacacggcgtgggcttcaggcggtcaacaaagcaggttcatcgtcattggccgacttgtcaaagctcgccgccgccatccaggaagaaggcattgaagaacaagcgctcgttcgtttgcccctcttcgcttactatcctgtcaatcgtgccgtgctcgacatccctttgcgaaaccgggagcggcacgatttcaatccactggccgcctacgaaagcgcgctgaccggtgcagccaatttccgcaccttcttcgagtggttccgtgaacgggaagatctcgaaaatgaaatacggcgggatttggatagagattccttgggcttttttgccacggaacaaacagcatcgttcccagatccgcaactgcaagcggtacgtgaagccttgtccaaactgatgccggaattcaagcatctcacggtacgacgtagcccgctacggatggaagtagaaaagaatggttcaaccctgaccatcaatcagctctcggacggggaaaaatgtctcatggccatggttggcgacatggcgagacgcatggccgttgccaatccgcacagctcaacacccctgacaggggatggcatcattctgatcgatgaaattgacctacacctgcatccggcttggcaaaaaatgatcgtgcccaaactgacggcagtctttcctaactgccagttcctgatatccagccactctccgcatgtcatcacccaggtcagacccgaaagcctcttcctgctcaccatgcaggataatgaactgaattacgaactggcagcagaatcctatggcaaaactgccgagcgggtgctggaagacctgatggggctgacaacgacgcggcctgaagcagtggcgcaaacgcttaccgaaatttaccaggatattgaccatggcgaatatgccagggcaatgcaaaatattgacaacctgggcaaagaaatcggtaatgatcccgacctgttcaaggcgaagatgctaatcaaacgcaaagagctgatcgggcgatga

SEQ ID NO: 86479 - DNA, 618 bp, Cardiobacterium valvarum F0432
atgaaatacattgtcaaacaatgcgagcctgtgtttttcaccacgtggaaggcgcaagcaaatgccaattggcaaccggaatacagcaacatgccgacggatatcaaacagcaattgaaagatgccttactggatgaacagggctggatttgttgctactgcgaacaagagatcacacctgatgattcccacattgaacattttcgtccgcaaagcgatccaaattgcgacccgctggattacagcaatcttttggggtcatgccaaaaacagcggcgcaaaggggagccgctgcattgcggcagtctgaaggcagactggtttgaccggaatttactgatctcaccgttgaatccaagttgcgaatcccgttttgttttcctcggtaacggggaaattcaggccaaagatgccaatgaccaagcggctaaagaaactattcaaaggctaggtctgaatatccctaaattgattgaaatgcgcaagaaagttatagaggtatttctagatgaattattaactgacgtcgaagtggcaaatcttgtttcaacatacttggtcaagaaggcaaaaaaatactctcctttttggagcaccatccattacctgttttcctga

SEQ ID NO: 86480 - DNA, 2526 bp, Pseudoalteromonas sp. BSi20311
atgcaaacccacaatgaaattaatagcctagctagaaagcaggcaaaagaaatatggaggttacttgaatatattcgaggatcagcgccaatagcaagctaccgttcacttgcttatatggtgctattcattcggtatatgcaagacaacagtgggcagcactttaacgtaccaaggttctattcatttgatgctattgggcaatatatagatgagcttgtactcacctgcactgagttaggactttttcagcgagagttagggtatatagctagcgagtttacaatagatattttacgtaagaataatcgaattgaaggcgacttagtaaagttactcgctcaaagtaatggagtcaatagagacaaatacattgttaagcaaacattggatgagctaaatagactctttgcagaaaacgaaatgagatcaggaagtgaattttatactccaaaggatataaataaattagtaactactttgggtatgcaatattctccaagatcagtttgtgacccttttgcgggggctgggagcactgctttttcattctatgaagctactaatggaaaggttcaaatagacactcaagaagttagcacagatatatatttccaattagtcgttacacgaatattaaaaggaatatatggaacagattttttagaagactccattagccatccaaaatacaaaagtgagctatacgatttaatagtttcatttccgccgtttggcttgaaaataccgagctctacgagggaagctatatataaaggtggttcaaacgaatggctgtttttaactgaagagcttcctatgactaggtccgattggttgactaccctctcgatgtttccatcattaggtagtaaaactaaattaattataggtatgtctttaagttcattaactcgagttggttccgaagccagaattcgagagtttcttatagataagaatgtagttgatactattattttgctacctaaagctattcactactcgactaacataccgacagtcttattaatttttgacatggcccctcaaaaaaatacaaagtcagttcgctttgtcgatgcttctttgttctacgaacctcacagaggtagaaatttactttctgatgaaaatatagctaaaatttttgatgctaccgtttcagatgggcgttttagcaatacagtaactcgtgaaaaactagctagaaataactttaatcttaaccctagcttatatgtagataagacaataaaggttagtaaagtgaagctaactaactttagagggtacaaagatttcactgtgccacttcatggagcattaacagttttggttggtgagaatggagctgggaaaacttcaattttagaggctattgcatgtggcttaggcccatttttaactgcaatgcccgaggctaaaggaaggctgatacgaaaatcagatattcatgtaggtattgatggtgtagctgatttttcccgtatatcgatagacacgaattctagccttagttgggatttagtaactagaggcacagaaaaaagtacacaggcaaaaataggtactcaagccctatctgattttgcaaaacaaatagtaaatacagatacagagtatcctcttattgcttattacggaacgaatcgaacactatcaaacactggcaataaagtatctattagcccttttgaagaacttcaaagaagtgaagggtatgactctgcgcttgaggcgaaaattaattatgggtctttaaaaaactggtttacaaaaattgaagtagatgagctaaagcttagagataaaaagaagaaccacgacattattcacccagctaaggtattagtagcaagagcagtacgagaaatagttaatagagttcaaaatgtcacttttgacaaatcaattaatgatgttgttgttacttgggagaatgaaagcggcgaaaatatttctctaggtttagagcagttgagcgaaggctatcgcaatatggttgctctcacaattgatcttgttagaagagcctatctattaaatccaaactctaaagctccattgtctgtagttggagtagttttgatagatgagattgagcttcatcttcatccccgttggcagcaggttgtattagaagacataactaagttattcccaaatatacagtttgttgttacaacacacagccctcaagtacttactacagtcagaggtgagagtattcgagttgtatcaaattcatcatcatttgctgaaactgtaaactctccttttggtggtgaaaatagtcgtgtaatgaaacagattttacatgttaactctaggccggttaccgatgtatcaagaaagcttaaagaatattttgatttaattgagctaggtaaaggagaggatcgggaagctttagttttaagagaagaactttcaaaattaacagatgggactgagccgatgttagtagaggctgatttagcgataaaacgcgttaactggatgaagtctagaaagagtcagtaa

SEQ ID NO: 86481 - DNA, 756 bp, Pseudoalteromonas sp. BSi20311
atgtctattaaaaatattccagagcctgaacgactcaaagagttccgcttagccaacccaaatgcaacatggaatcaattaaagagtgattcagatgttaataatgcgttgaaggttacagcaattaaaaaaacggcaggcttatgcgtttattgtgagcataaactaatagctaaaactgattatcagatagagcactttcatccgaagaagggaaataataattctgattttggagctggaaaacctaattgggctataaattgggataacttataccctggttgtttagggggtacggctcaggtagtacatttcaccgagcagtatgacattgattttagaactggcgctaacaggagaaataagggaagactcacatgtggtcagaaaaaaggagaaatagatcctgaaggcctaattataaaaccaacagagttgaataatagagatccaatattcttatttaatggtgctgatggctctattagtcttaatgcagaagcttgtagaaggcaaaacatatcaacagagcttggagagagccaaatagtaaggttgaatttaaatagtcaaaggctaaaggatgcgagattagagcttgcaagttctcttcgcactcaatttgataaagcgtttcaatttgatggggatgctattgaagagctggttgaagattggctagcgctaaatgaaaatgaaatgtatgagctaccttttattagcatgatttcaagtaagtatgaaagaagttaa

SEQ ID NO: 86482 - DNA, 1506 bp, Pseudoalteromonas sp. BSi20311
atggaggtaatcctgagtttttgtattcattgtcttaatagttcacgaatactatctaacttgttatatttacgaataaatttaggatgggggaatcggatgtcttttagattaaaaaaattcaaattggatgataaaaacttacaactaccattagttaaattaactaatggtaatgatagtgaggataactattttactgttgtaattggtaataatggaacgggaaagagccgctttctaagaggtattgttgattcgtataggaagcgaaatgtcggacatgaaaacttttctttgcaagataaaattaacaatccacagaaactaatagctattacgaccagcttatctgataaattcccctcggattccagttttagtagacaagcgaatcctaatatcattcgtgagcaatactgttatttaggtcctagagggcgtgttggtggttcttcaaatagagctttaatggataaggctatttcgtttctcatgtcaggttttgaagaaaaaagtaatttttatcaatacaacgaaatatttaattatttgaagtatgaacccgtcttaaaactggcttataaggtacgagtgccagttgaattgaaggatagtattgagtcaattgatggtgaaaacttaaagagcttcattgctatgcggagtgaaaaccgaagtggtatcaggcaagggacatatagcaggtttttatcttcacctgagtattactgggatgagcttgctgatgcttatcgatatgcttttgaacagcaaaattttaatcgcggtggtgaattcaattttgtaatcaacttttctgaagaaaatattagtcgttcggatcacgtaatatctcaccgtgagatatctagatatcgggtgtttgatgatctacgaaagctagacttaataaaaagtatgcaggtaaaactctacaagaagcatggtggtgagtttaactacacagacgcaagttcaggagaagcaagtatattatcgaccttaatcggattagtacccaacttaaagaacgatagcttgattcttattgatgaacctgaaattagtttacatccatcatggcaatatcgttacattgagttaattgataagttgctacaatcagtaaaaggttgccatatcatagtagcgacacactcacattttttaatttcagacttacctaatggtcgttcaaatatagttcattttaaaagctctaagggtaatcggattgatgttgattactatgatgaaaataccaacggtatgtctgctgaagatgttttgttaaacatcttcgatatgccttctacaagaaattattaccttagcgctattgtgactgaattattgcaattgctggcagatggtcaaaagcactccgatagatatcatgacttatgtctcaaagttaagaaggtattacctaatttaaaaccagtagacccgctttatgatgttatttctaaacttacaaagttaaggttgcgtaatgactga

SEQ ID NO: 86483 - DNA, 627 bp, Pseudoalteromonas sp. BSi20311
atgactgatagaattctttcaccatattctttcaaagcgcaagagcttcaactgatttctgatcggtttgtaactcatacagattggagtaagtcatgttttgacggaattaaactggcggttaaaaatgatttgcgacccaaacaaggaaacctttgttgctattgtaaatgggaattaggcttcgacataaaggaagtcgatatagagcatatagtgcctaaaagtgaatattcagagtacacttttcatccgaataacctttctttgtcatgtccgggatgtaacaccaataaatggactaagcctgttttaagtgtacctattacagcttatccaacagatggtattaatgtgagcattgttcatgctcactttgatgattatagccagcatattgagaggcatgcagatgcaatatatgaggggctttcaccaaaaggacgtagaacaatcaaactatgcaaattggataggttgaaagacgtacttaaaaaaatgaaagccgcaaaatcgaaagatactcaaattgcacaattggttgcagagttaagacaaacaaatgatactcaacgctctgaagaaattaagcttgaattatcacagttaactgaacaatttctataa

SEQ ID NO: 86484 - DNA, 1281 bp, Flavobacterium columnare ATCC 49512
atgaaactttcaaagttacatatagaccaatacagacatttagaaaatttagattttgactttacctatcctatggattttcacgatgaaacaatgcgtggaaaacctttaaacaaaatatgttttattgggcaaagtggaacaggaaaaacgaagttattagaactaatacacaaagatattagcaatctactgaatactgaattagatgaagatagcaaaatctggataaatttcaataaatatgatagtactattggattacagataaacgaaaataactttagttttaaagaaggcaattactacctaaatggaaacattatacaaagaagttcgaataaatcaacttttactagcacacttataaaagaagcaaaaagtctattttattttacagctgaactactatcaactaaaaatttagaatttttcgaaaaagaacctattttgttaatagagaaatctagaactttttcttttattgatcaatttattgtaaatgaaaatcaaaacataattttcaatgacaatattgaagaagaaatttggatcagattactaaattcaagtataaattatttacaaaactttttacaatttgcaacagaattaattaatagcggaaatgtactagacaattcctctcaaaacaaaatagatgcttggaaatcagaaaatataaatcctctaatagatttttcagaaaaattcaatatcatcttagagaaaattcaattagaagttgatttaacaaatgcaaaaaacattatccctttaaaaaataaaaacacaggagagaatgttgatataaaaaacatcagtacgggaaccaaacaacttttaatcaactccttacctctttacaaactcgaaaccaaagaatcaatcatcctaatagacgaaccagagcgttcattatatccagatatgcaaatggatttgatggactattatcaaaatcttgcaccagaagctcagtttataatagcaacccactctccatttatcgcagcgtcttttgaaccttgcgagcgatttattttatatttcgatgaagatggaaaagtggcagtaagacaaggaacgtctcctataggtgatgacccgaatgacttattaagcaatgattttaaaatagattacattaacaaatttggtcaccaaaaatttcaggaatacattgacttaaaacaaaaagtttattttgaaaaagacgaaaaacgaaaagaagagtatttagaaaaattagaaaaactaggagaccaatataacttctaa

SEQ ID NO: 86485 - DNA, 576 bp, Flavobacterium columnare ATCC 49512
atgaaaagaattattaaaagccaagactcaaatgttttacaagaaaatttaatttataaaaaaggaaataatcaaaaattaggaaaaattcttttacaagaacaaaaaaatttttgcgcttatacggaggaatatatcaacataaatgacgctgttgatattgaacatttcaacccaaatcttaaatacactgataaagactcatattacaattggtttatggtaaaacacaaacctaataataaaaaaagaacaaagtggatggaacaaatactccatcccacaaatgaagatttcgaaaaaagaataatttactttgaaggcttttttattcataatcctaatgatattgaagctaaaaatttgatttctttgttaaacttaaatcatgaatcttttgtaaaaaacagaaaaaattatattaaaagacgaaaagaaagaattcaagagtcaaataaatcaagtttcgattattttaaagaaaaaatagaaaaagaaattgactccatcaaataccttagagccatacaagaagaatttaacatagacatttggaaaatgattccacaaccataa

SEQ ID NO: 86486 - DNA, 1620 bp, Klebsiella oxytoca KCTC 1686
atgcgtatcgattggctatggattggtgaatataagaacctgaaaaacctgactattgacttcgctcaggggcacctgattactgtattgattggcagaaacgggactggcaagtcgaatgttctggaggcagctacagttcttttccgggacctgatcatgggtgaggatgggaaggggaacaaaaacaaaccgtcctttgcttatcgaatttgctatcagatcaaggataaatgggttcgcattgatgccgatccagcaggcaaagaaccatatcgcattaagctcgcaccatatgatcccgatgctgaacctccttctgctgtcatcacctttgaggaaacccctggcgaagcaatggctctttccaagttgcgagatccagatgacggctatctgccgaggtttgtatttggctattattcaggccaaagtgaaaggatggaaaaggtatttctcaaatatctcgaacgatacgatagagacctgcgggctggaaaaaatcctggcttgaagcgtctgttctatgcgcttccagttcatagcaattttgttttgctgtctttcattgtgaataacgccgagttgacagacaagtttttgcaggaacagctcggccttgaagaggggggaatagaatccgttctctttgttcttagacagccatcatggacatccaatgacggcgatccacgcttctggaatgcacgtggcgtcgtatccgatttcttagcgacactttacgacatatctcttgcgccattgcggatcacccgcaaggaaaaggtcagcctgtggaactggcgaaaactggagttcttgtatctttttgtgaaagaccttggtgcactgcgcaagctggctggaggtaagagcaccgcccagttctttcaagatttggaaagtacgtatgtttctgagttaatcgacgaggtacgaatcaggatcaagctacggaaaaacgatggatctgttacgttccgtgaattgagcgaaggcgaacaacaacttctaactgtactaggcttgcttcgcttcacagcggaagaggaaagcctgtttctgctcgacgagcccgatacgcaccttaacccaagatggagcgtcgagtatcttcaacatatccgcaattttctgaatgtgaatgggacagaaaagcagagtagtcacgttcttctggcaacgcacaatccagttgccgtagctgagcttgagaaggagcaagttcagattcttacgcgcgataaggatacgcaggcgatctcggctgcggagccggacacgcacccgcgtggaatgggctatgcgggtgtgatgaccagtgaaatgtttggactaagtgcggccctagacacccatacccaagatctgcttgcgaggaagcgccatctcagcggacaggatgtgctaagtgaagatgacaggaaaacgctgaaggaaatcaacgaagagctccaaacttatgggttccgctatgaggtgcgcgatcccgaacttaaagaggcattacgaaggctggatcaggaggcgatgccaataagtgaaaggaaagagctgcctgacgaggctgagaaagctcgccgtctaattcagaatgccttgaataagaagggggattga

SEQ ID NO: 86487 - DNA, 783 bp, Klebsiella oxytoca KCTC 1686
gtgcggtatattaatctggaccagttggaattaccagatagctggcaggtgcgtgcagacgccgctatcgcagatgagcctggaaaaattaaagatcattccgatgtatggcgcgacctaaagcgaccattaatgaagctatcgcatgacaagtgttattattgcgagattgtgcaggaacggtctgatggagcagtagatcacttccgtccaaagagcaaatatccgtggtcggcttttagcccttccaattatagatttgcatgtacattctgcaacagtgtgcggtcggataaagaaagcgagaagacaggggggaaaggagaaaattttccccttcatgatgagaagaagcgggcaacttgctgtgcagatgaggcaaatgagagcccaatccttttggacccgtgcaagccagacgagcccggccttatagattttgacgaaactggaatgcctataccgacatattcgaaggagaaacacgtcggtcgcaataggcgagcagctgaatcaatcaggctttaccacttggatcactctgaccttgttgacaaacgcaagacgctcgctgtttcaataacacgaaagattgatgccgccgataggttatttccactaacagaatctggaaatgtggatatcgataattcgttttcagaacatgtgcgtgctcttgcggattatatttctgagagtgcggagttgtcggcctttgctcgaagaattgtggccggtcaccgagatgttttgtgggttgagaatttgcttcgctcggcctga

SEQ ID NO: 86488 - DNA, 1647 bp, Pseudoalteromonas sp. BSi20495
atgaataacaacaatcctgataactcgtttgttcctcctgctagacttacgaaagacttgatagaaaaagcagataacggagattatttagcatctattgaaatggcaaacaagtatgagaaaggcatacatgttaagcaagatgctataaaggcgaagtattactttgatcaagtttatgcatcagttgaacactttaaattggtaatgaagaaattgaatttatctcaatttcgtcagtttgaaaaaataagcgtcgaatttgaaccacaagtaaccattttagttggtgataacggttcaggtaagtcgacaataatcgatgctattgctaaatctttaaaatacttagctgcaactattattaaggaaaatgcctcgcgttcttcattagatgatagagatataaatgtcgatgagttagctgatattgctacggctattaatttattagcggttgaagatggccaatattttgaacacacgttatcgaaaggaaagcgttcaaaaggtgaatctaatcatgcaccgattacaatacttggtgatatttatcgcaactttgatcgtgtaaacaatcaatccaacttacctgtcattgcctattattcgattgatcgagcaaatgaaatagcagttgatatatctaaaacagcagaaaaaaaagcagaaaaacttagttggtctaaatttgatggttatgcagatgcgcttaaaaattcacaaaatttcaccaattttttagcatggtttatactttgcgacaaaatggcaaaacaggccgaagtacctctggcacgcataacacaattgcatgatgagctaaaaactataaatgaagatattcttaaggccgacggtaacctattaacttaccttgaaaaagaccgtcaaaaaaaacagaaagagctatctgaactagaactatcagtagttaatagtgaagccggtctttgtttgaacatgactaatcaagttatcagtgctatctgcacatttattcccgaaataaattccatctcgattgtacatgctaatggtggtattgatatgaagatcgaaaagtcaggtgcaatgattagcgtatttcagctatcacaaggcgaaaagtcgctgctcgctttggtaggagatctagcaaaacgtatgatcatgttaaatccatctagagataacccatttgatggtaatggcatcgttttaattgacgaaatagatttacatttacatcctcgctggcaacaacaagtggtaagtaagttgcttactacgtttaaaaatattcagtttattttaactactcacagtccacaggtcttatctactgtgcataaacacaatattcgagttctaggtaataatatttatggtgatgccgttgcagcgatccctatagcagacagttatggtcatcctaattctgatgttatgcatacaattatgggggtggaaccaactccgataatcgcagagtcagatattcttataaaatataggaaactgatagagcaaggcgatttaaaatccgaagaggtagccaataaaataaataagttacagttacagctaaatggagtattaggcgaacaacatcctgatatggttaggttagctatggctaagcgacgcagggagcgattagaatga

SEQ ID NO: 86489 - DNA, 741 bp, Pseudoalteromonas sp. BSi20495
atgaggagaataaagaaaggtgttgcaaatagacatctagaaagtcgtcatatggagcctccacaaactcatgaacaagcaactaaggcttgggatcgttttcaaggagagagaaaacgtgcaacaaagaatctatgctatgaagagcaatttggattatgtggctatagtgaaattagtttggataatatttttccaataattgacgattcaaattatgaaattagccgtaaccttggtattcatatagagcatgttgaacctaaaaatattaatccgcaaagaacatttgatcatactaacttaattgcatcagcaattaaggacatcaaagcaaacaatttaatcaaaaaagatgtttttggcgggcatgccaagttgaaatggtttaatgaaatatcttttatatcaccactcttagaaaattgttgtgattactttcattatgagacaacaggaaaagttgtgcctaaagaaagcttacctactagaagggaaaaagccaaagcaagacttacgattcataaattaaacttaaacgccccaatattagtaaattggcgtaatgtttggttgaaagctttagaggagattattgatgaatctgatgaagcctctttgtctctaattgcagaaactgaattacttcctattaatgggttattacggccatttcactctgcgcaaagagggttatttggaaaaattggagagagaatttgtcatgacaatgggctatga

SEQ ID NO: 86490 - DNA, 951 bp, Acinetobacter sp. NBRC 100985
atgaattctaatgaaaatattgatttggtcgtaactggcattggtaacctgagcgaaaatattcaagcatcaaaagtaacgtttaatttcttccctgctcatagacaatcacaaattaccgcgtccacaaatacaactgacttaaaccaatatattaatacagcaaaacatgagtactattcaaagttaggacaatttcttgaacaatatttattgaatattaaaattgagaaatcactcgctttatctgaagaacaagatacgaatcatgcatatcaaatagatcagtggtttaaaaagtttgacgaggatttaaagtttttatttgaagactcaacaactcgattaaaattcgattataaattaagaaaatttagtttgttgcaatcctatcgagagtttactttccaatcactttcctcaggatttactgcgatatttgatatttatagtgatctgttaatgagatcaagattactaaatattttaccgaatgaattaaatggggtcgtgctcatcgacgaaatagatgctcacttacatatttcgcttcagaagaagattctcccatttttaagccaatcttttcctgaaatccagttcattgtaagtacacactctccatttgttatcacatcaaccaataatgatactgttgtgtatgacctttcaactggagaattctttgaagaggatttgagtcattactcttatgaagcagtgattaaaggtctatttcatgtcgacactcaatcagatcacctgaaaacagaaattcaaactattgccaccattttaaatagtgatcctaataattatgaaaaacttcgagaaactctaaaaaatattattccatatgctaaacaacttgacgtggagtcaaagtctttttatttcaaagcattaaatcatttattagacaatcaagagttaggagaacttgatgtttaa

SEQ ID NO: 86491 - DNA, 420 bp, Acinetobacter sp. NBRC 100985
atgtttaaagtaactcgatcagcgaaacctaaagaatggacgaattctgattacacagatccagcagtagtcaaacaattgaagctagatttcttatctaagtgttatttatgtgaacaaacagatttcggtaatgtaaatgtggagcattttgtgccccatctcaacaaaagtaaagaattaaggaccgattggaataatctttattactcctgctctcactgtaacggtattaaaggttcaaggcacaaagaattatttgattgctgtaacgaaaatcatcatgtggatgttgctattgctttacaagcaccaagcgtacctaatggaaaaattgtactcactaatactttaaacaatggctttattagagcaatgctacaacaatgcgaacagtggcaatcaacaagtgagtcatga

SEQ ID NO: 86492 - DNA, 1173 bp, Acinetobacter sp. NBRC 100985
atgaaaattaactccatcgaactaacagatgtaggtggaataccccatctaaatttggaatttttgaatacacagatgaacattatttgtggtgaaaatggtgtaggcaagacaaccttattggatagtattggacatatttttacaaatcaatattcacatattctcaaaaaaaacattaattcgaatagggctacaattaatgggaatgtaaccgatgatagagggaataaacttaaccctatattactttttaatcaatccagaccagatcaagggagtcctatgaatggattaggacatttatcctttaaattaatatccttaaaggttgatcgtacattttcttatcaaaagttagatgctataactaaagatcagactaaacaagaagatcatgcttcccatcaatcaattaatggaattgattatagagatattaaaagttggtttttacataggcatttatactcagctcatccagaagcattaaaaaaagagcaattagaaaattttgcacttgcaaaaagatgtttttctattctaaatccagcttttaattttagtagggttgatgcaaatgataatgaaatcatgttaaatactccgagtggagagatctattatgagtatttatcatcgggttttaaatctacaatatcgattgtatttggaataataaaagaaattgagttgcgatttaaatcaccatatatgctagcacatgaatttgatggaattattttagttgatgaaattgaattacatcttcatccagaatggcaaggtagaatttgttctgttttaaaagaagtttttccaagagcgcaattttttatttccacacatagcccacatgttgtacaaactgctttacgtggtgaagttatcgccttggagcgcaatgaaactggcgtgtcaaaacgcgaattgccaacatctgaatatggctatcaaggttggactattgaggaaattctagaagatataatgggaatgccagatcttcgaacacagaaatataatgagattaaaaaaagatttgaagatgctttggatgagatgaataaagttgaagcacaaaatgcatataatgaattgaataagatgttacatcctgattatccattacgtcctgttttccaaatgcagcttgacagtcttggggaataa

SEQ ID NO: 86493 - DNA, 732 bp, Acinetobacter sp. NBRC 100985
atgattaagctggaaagaaaagagaagcctgaatacttaagtaatgaaaaagtagctgaactaactgaacgatttaagataaacaaaaaagatactgtttggaaacatactgacatccatagtgccctgcttttatctagttcatctaaatgtgcattttgtgaagcacaattacaaactggtacagcatacatggaaattgagcattttaaagataaggatacatacccagagcatgtagttgattgggaaaaccttttaccatcttgtaagcgttgcaatactacgaaaggaactcatgatgtagttactgaaccaattattaatccttttgataccgatcccaaagaacatttaactcaagctgtatgtaggatttattttaagacacaacttggagagtcaacgagggatgtattaaatcttaatgatgatcgtttattgcgcctccgatttgagacttggaactatgttatcaatcaggttgaaagtatctattatgatatggagagaaaaactactttaaatagacgagaaaggaataaacttgcaaatttattaacttcttgccaatctgatcgtgcattttcgggatttgcatctacagcattgcatcaatcggttgaatatacaaagattattgcgttactaaaaaaccataacctgtgggatgatcatttagagttattgcacactagctcattaaaccttatcctagattgtcgcacataa

SEQ ID NO: 86494 - DNA, 1248 bp, Comamonas testosteroni ATCC 11996
gtggattttgaacaactgaagttgcatagttggcaacagttcgctgagatagacatcagcttccatccacgagcaaccatactcacgggagcaaacggaagtggtaagacaacaatcctatccctgctagcgaggcaccggggatggcatcaacagtcgcttgccacgccgaaaaatgactttataaccaaagctctcaagtacttctccctattcagatcctccagtcagaagacaagtagcgatcgttcaatcggcgcacttagatacagcaatggctccacggcaacactcatcgttccggaggcacagacagcacagtatcaagtggccatctccaaccagcagccagcgcgcttcttctacattccatctcatcgtcaaaccttctcttataggcgcgtaggtcagatcaataccattcgcaaggagcgacagaccgctttcgatgaaattcagcacaatcaaatgagtaagcacgccggacatcacaacgatatgccgagtagtttcctcatgaagaatactctgctcgggtggatgatcaatggctacggtgtgcgcagtccgacaaagacaatcatgccaccagaccccctgcagataaggaactttgaagggttccgagatgctttaagactcatattgccgcagtcgcttggcttcgaggatcttgaagtcagagactatgagatcgtgttcatctgtaatgggggggcagatgagttcttacttgaaaccgcttctgggggaatctctgcgctgatagatatcgcctggcaaatcttcatgtttgacaccgacgagaaagcaccatttaccgttgtaatcgatgaagttgagaaccacctacacccgagcatgcagcggacgttgctgccgagcctactgtcggcctttccgcatgcaaaattcatcgtcacgactcacagtccgctgatcgtgacctcagttgaagatgcgaatgtctatgctcttcgctacgaccattcgaagaaggtacgttcctatctattggacttcaaaaccgaggttatgaacgcaatcgacgtgctggatgaagttctcggtgtttcaacgaccttgccgccgtgggcagttgataagctctccagcattcttgaaaggcactcggtacttgacccgacttctgagtcgatgactgcattacgtattgagcttggtaatgccggactttctcgtctgtttcctgaggcagtgggaaggatcgctgaggctcgaaaatga

SEQ ID NO: 86495 - DNA, 591 bp, Comamonas testosteroni ATCC 11996
atgagacgcctctatcgcccggcatgtccgaatcctgaagccctgaaaacaaactataagcaccctgacaataaagaagctttgctgcgagcttcgcatggcaaatgtatgtattgcgaaagccaggtctcacatgtctatttcggagatgtcgagcacatccgcccaaaggcggctgataagtacccagagcttgagttcgaatggagcaatcttggctattgctgtgcgcgctgcaacaacgcgaaaaaagatcaattcgatgctacttgcccaatggttgatccttacagcgaagatcctaatgcccaccttatcgcatttggtccgtccgtgtggcataaggcaggaagtgaacgtggtgcaatcactatcgctaccgccgacctaaaccgtccggagcttattgagaagcgtgctgtacgtttatcccacctgcagaatgcgctagatgcctgctatcgaacaacgaacgaaactattcgagcaacgctacttgctgcgcttgatgcggaaggcgctgttgacaaggagttctcgatgtttgctaccgcattgattgcagcaaaccgcgaaagtacctcgaattag

SEQ ID NO: 86496 - DNA, 1497 bp, Rahnella aquatilis CIP 78.65 = ATCC 33071
ttggaattaacacctttctacatagtgtcatacacatcagatagaataatgttacctctgcatgatgtggccgacggtaagtcaggaccaaaagtttcagttataatcggaccgaatggatccggaaaaagttcagcaatcgcgagtttagtagatgagttggaggtgatgtaccttctgttaacctcatctaaagataactttaagaaattacgccatcctaaacaagcagaaattgaatttagatatggcggggatatatttaaaattatgcgggatggattagttcttaccgctttaaaaaatgaagttaccatcgatatagaccgagattcattcccaaagcatgcattagctgtagcacatttaccgacagataaatttagattttctcgcaatgatgataatttattttatcggtatttagggttgcggcaagcgacaaatatggtaactacaggtgctcttgaagcaaaagtaatatcaagtcttcttaatcaatctcaatgtagtagttatcatcaggcacttgaggaatggttgaaagtgcttaatgttggaggtgatttcgaaattgaatttcggggtttgaatactgatgtattccacatgggcgaaattaaagacctcaatagcatatccagacgcattcaatatcgaagcgtggaagactatattaatcatttacaggaaaccgttgatgcttcgataacagaatcaagcattactatgttcttaagcatttttggtaaaatttgtaaagagttaggggaggaaaacctagactccaaaggcaagagaaaaaactacatacttcccctcaatttgctaatagatgatagcaagatcgatagcatatcttgggatctaggggtggaaattatacgcaaacttcgaatctctgacgaaatacgcctaattgtcagcaagaatggggaaaaaaaagcattttctgatctaagctcaggagaacgctgtgtcattggtacagtggcacgcttgtttgaattcgctacagaaagatgtgtaattgctattgatgaacccgaagtgagtttacatccctcatggcagataaaatatatacccacactaatgaaagcaatgaaacatctaaagtcggcacatgttttaattgcaactcactcgcattttttagtttcggatgtggatgagtcttcatcgcttattatagcaagtaacaatgatgtggggcagattcagtttgatagatttgatggggatgtttatggtaggactcccgataacattctctatagggtatttggtgttggtgctgcgacaaatttctacgttgagcatgatctctccgaggcccttcaaattctttccgaaccagaaaatatgaattttgttaaacttaaagaaattagaagacggcttaatagagtttcggcagatgataatccagcttttaatgaaatattaaatattatagataaatctttggaaggggttaatgatgctaaaaattaa

SEQ ID NO: 86497 - DNA, 621 bp, Rahnella aquatilis CIP 78.65 = ATCC 33071
atgatgctaaaaattaataaccctgcaactatcgaccctgccgttcagagaaaactggatgatattcccgaagttgaacgcccaataaaatgggatacttcaagaactaatgctattaaaaacttcagaaatgaaatcatgacacatgggttaaaggagcaagataacagatgtgcctggtgcacgcttcctgttggcgcaactggcagaagaactgctcatagagatcacattgctccgaagaagctttatccaaaatggacatttcatgcgaaaaatctggttgtcgtatgcgaatactgtaatggtttcgctgttaaatgcgaccttgataccgttaaaacagaaaaagcagcttatgatgacatggagttttttatagtacatccgtaccttcacgacaccgaaaaacacattcgattccgtgaaaaagaaggaaatgaaccaggggttgttgttgaaggaattactccagaaggtatttggacggtcaatcaactcaagctttatgaagatggattaacagtacttcgtgcacaagaactagtttattatcgcaagataaataaactccctcatcacttccaaattcttctaaataaagcgactggccgtgagtaa

SEQ ID NO: 86498 - DNA, 1359 bp, Escherichia coli B093
atgatgaatatccgcacgcttaagctcactaatctggggcggtttgaagaacttgacgttcatctggctccagtggaggagttcaagagcaatgtgaccgtttttattggtaataatggtgcaggtaaaacatcaatattaaaatcgttggcaaccagcctgagttggttcgttgcccgagttcgtactgaaaaaggtaacggtagccctattcctgaagacgctattctgaacggtaggagttcggcgacaattgaacttcaggtactgaatacgcatccagcgacggaggccgctacgccctaccgttggttgcttgccaaaacggccagtgggaaaaaatcgaccaccgcctccagcctgcaagaggccagccaattggctgcgttttatcgagatcaatacacccagaatagcggggcatccttcccgcttatcgccttctatcccgtagaacgtgtcgtgctggatgtgccgttgaaaataaaagaacgtcataattttttgcaactggatggctacgataacgccctgaatcagggtattgatttccgccgtttctttgagtggtttcgcaatcgcgaagatgcagaaaatgaatcgggcttaccgcaagacgttctggataagctcagtaccaggatagatctcgataacgccgtcttaaatgcattaacggcaatcatggcctcgtcccgggatcgccagttgaccgccgtcagaacggccattagtcgctttatgccagggttcagcaacttacgcgtcaggcgtaaacctcgcctgcatatgtcgatagataaaaatggccagacactgaatgtgctgcaattatcgcagggtgaaaaatcactgatggcgttagtcggcgatattgctcgccgcctggcaatgatgaacccgatgttagaaaacccgctaaacggcgagggaattgtattaattgatgaagtggacatgcacctgcatccaacatggcagcgtacaatcatccagcgtctgacgacaacattcccacattgccagtttgtcttaacaacccactctcctttagtgatcagtgattgcaaagatgtgctggtttattctctggatgatggcgaattaacgcagctcccgtctctgtatgggcaagatgcgaatactgtgcttttgaatgtgatggatacggatattcgcaatgcgacagtggcagaaaaacttaacgatcttttggatctgattcagaaaaacgactttatcaacgctaacgctcttctgaatacgctaagcctggaacttcctgaaaaccatcttgaactggtgaaagccagaatgcttctgcgcaaacaggaaattaaacatgcgcgaaataactaa

SEQ ID NO: 86499 - DNA, 660 bp, Escherichia coli B093
atgcgcgaaataactaaagggcaaccaccggccagtttgcaacagtgggtgagagcaaaaccacgggataaaaatgccaatcagtggtttcaggaactttatgcgcaaaaaaaatgggatatcgttggcgatctcagccagcagtgcgctcaggagcaattttatctctgtgcttattgctgcgatcgcgtgacaggtacaaaccgcgataccgttaatgaacatgtcgaagccagggatttagctcctgctcgcagtctggaattcaccaatatcgttgcaagctgcaaaacaaaaggccagtgtgacgactcgcataagaaccagccattgctgttaacgccgcttatgccggaatgtgaaaccgagtttatcttcaagatcagtggtcgaattgaagggacgacgccgagagctatcgatgcgattaaggtactcaaccctggcgatagtgaacgtaataatcgggcattaattgaaaaacgtaagcagctttccgacagccttctgtgggctaatggcattgacccttcagaggggcttgaggatgacgacctgctgcaagcggttatcgacgaattactcacccccgtcgacggttatctggcacctttcgctcccgtggtggcgaatattctaaaaaactggatgaccgcatga

SEQ ID NO: 86500 - DNA, 1284 bp, Pseudomonas extremaustralis 14-3 substr. 14-3b
atgcagatcaagcgttttaccctcgtcaatttccgtggcatcgagaagatggaactcgatttcgagggcaagaagactgtcgctttagtgggcgtcaatggcgtgggtaagtcttcgattctggatgcgttggcgataacgctgtccagtctgacggctcggatggttggtcagccgtccaagtcgcggtcgatcgctaaagatgacatcaaggtcggagccgattacacgcggctacatgtcgaaaccaagctatttgaaaactataacgtcgattgggccattgctttgaatcgcaaggccggcaagggcggaaagcatcccagtgagcgtagtagtgatttgtctcgattaaacgaggccgcagacagtgttgaacatggaataggtcaatacgaggttatcggcggaaagtcaatcgagttgccattggcggtttactacgatgtacaccgcgcagtactggacgtaccgttacgcgttcgcgaacacttggtgaatgccattgctgaagggtatgacgacgcacttggccatggtggtgccgacttcaagcgatttttcatttggtttcgtaatcaggaagatctcgaaaatgaaaatagccgggatattccaggctatcgcgacccagagctttctgctgtacgcagagccatcgaaacgtttactgggttcaaggacgttcgggtccgtcgtaagcctgcattgagaatgacggtgctcaaaggtgaactcgaattcaacgtcctgcagctttcagacggtgagaaatgcctgctggcaatggtcggagatttggcccgcaggctcacattgctcaatcgcgaagtgcctgacccattgcaaggaaagggcgttgtcctgattgacgagctggatctgcacctccatccaggctggcaacgcacggtcgtcgccaatctggaaaataccttccctaactgccaattcatcattactactcactccccgcaaatactgggagagttgcctgctgagtccgtaatgctgctcaaagacggccaatatctggggcatccagagcgctcattggggctgcgcagtggtgaggtaatcgaggagttgatgggagggttgtcccaaaaccaaaacgttagtcagcaactcagaaaaatctatcgcaatcttgacgatgatgatcttgagtccgctcagatccaccttgcgcagttgcgtgaaaaggtcggaaaaattcctgatgtccttgaggtccaggcgagcattgattcactgaggtcattagaagagggggaggcgtga

SEQ ID NO: 86501 - DNA, 720 bp, Pseudomonas extremaustralis 14-3 substr. 14-3b
gtgagatctatcaaaaaaggcgcagaaccacgcgcgttgattgactggcgaagggaaaaccgcgagaccccgcaaaatctcttttatggcaaaggaagtagctttcctagcgaggcggttcgccaagcgttattgaaggaacaatttcatttatgcgcctataccttgcgccgtttgccaacagcggcagagtgtcaggttaagaatcagggcacacaattcagttgccatattgaacatattctcccccagcacccttacaaggctgacagcatcgtctacacaaatatcgtggcgtgttatccatcaagccaaacaaaaacggtttgcggttacggtgcggtggagaagaaagactatgatccggcaaagaagccgtttatttctccgttgactgcgaaggtggagcgatatttccggttcactcgtgatggatatgtcgaagggctcacaccggaagcgatcgcaacggtcgaggtcttgaacctcaaccatccgacgttggtcaatgatcgatctgcggtcatcaaggggcgattgcagccacgtggcagttatatttcagctgccatggccaggcgcttgattgaagaggtcgatataccagatgcctatcagtgcctacccgagtactgtcaggcaatcaaacaacaggccgagcttcatgcacaacgcctcgaaaaacgagccgttcgtgtacgcggtcaagtgaggggttga

SEQ ID NO: 86502 - DNA, 1290 bp, Pseudomonas extremaustralis 14-3 substr. 14-3b
atgctaaaactcttgtctctcaaaggtgtcggccctgctgaaaagtttggtccggttgagttcgcgcctcgcctcaatttcattacgggtgacaatggtcttggtaaaagcttcctgctggatgctgcctggtgggctttgacgcggacatgggcgcgtgggtcagaggctattcctagagaatcgtcgagatcggccagtattgagttcgcgtttagcaaggtgacgactggggacaaagcaggcgaagtccatttcaaggacggtttttggcggcagccgaaggcgcgtccatccattcctggaatcgttatctatgcgggggtggacggtagcttttctgcttgggatcctgcgcgtaattactggactgatcaacaggcggggactgaagaaaaaattcgggcatttaacttttctccagatgaggtgtggaacggtgctgtgtccgaaaaaggtaccaatatctgcaatggcttgattcatgattgggtccgatggcagcggaccgcaagtgactcgtccttcaaggagttgactgtggcattggatgcgctgtctccctcgggtatcgaaaagttatcgcctggggagccttgccatattggtcctctggatgaaaccgaatacccgacattgcgaatgccttatggccttgacgttccactggttcatgcttctgcaggtatgcgtcgaattgctgcattagcctacatgattgtttggacttggaacggtcataagcgagcatgcaaacagcgaaaagttaaccctgccaaagagatcatctttctgatcgacgaagtcgagtgccatttgcatccgcaatggcagcgtcgaatcgtccctgccctgcttaaagtggtagaggaaatgacgcaagagaaggtggccgtgcagctaattgtggcaacccactccccgttggtattggcatctgccgagcctgaatttattgaagaaaaagatgcggttttcaacatccatcttgaccgaggacaggccaaaatcaccaaagaggtctggtccaagcagggcgatgtggtgaactggttggtgtcggatgtttttggtttgcaacaggcccgctcggtggcagcggaggaagctatcgaagccgccgaagcctggatgcgtgacgataaggacgcgttgccggaaaacttggcaacgcaatcagctattcatcaagaactggttcgtgttttgcccggccttgatgatttttggccgcgatggatagtgtctcagggaaaacctgagaaagagtcgaaaggaaaaaggtcatga

SEQ ID NO: 86503 - DNA, 606 bp, Pseudomonas extremaustralis 14-3 substr. 14-3b
atgacgcccgttttgaaccctattccagagcctgaaaaatttgacgagaaatgtcgcaagccaggtggcctctggttgagagcacacccgacagccgagcggccgagagacttgtggtcccctttcaggcatgcgcttgccgatgggtttgatgatcgatgtggttatgccgcaatgtatattcccagcggtacagtcgatcacggcatcagtttcaacgaagacccgttgctcgcctatgagtggtcgaactaccgatttattgatggatggatcaatagctccaaaagtaagcaggtggctgctgatttgttggacccctttgaagtgcaggaggggtggtttgagatcagtttgccgtctctccaactggtattaactgacgcggttcctgcggaatttagagctcgcgctgaaaacaccctgaaaaagctaccgctcagggatgatgagcggatattgaggcctcgacgcaaatggctgagcctttacgagaagaccggaaatttagaaatgctccgtgaaatggctcctcttatcgctaccgctgttgaaaagaaactggccttggaagcggcccatgcgccagcgccggggaatcagtga

SEQ ID NO: 86504 - DNA, 1566 bp, Myroides odoratimimus CIP 101113
gtgttaaatactgatctaacaagtttaattgttggacaaaatggtttaggtaaatctaatcttctagaagcactatctttgatttttattgcaattgattcgaatagcaatgatgatgaagttactctatcatcatttgaaaataaatattttaattttgaccttaagtataagttgaaaggtaaaagtattaatatttgctatggagttaataaagcatactactttaaaattgatgattttacttatcaatttttagactacaataaagtaagagatcagttaaaaaaagatttactgccagattatgttgtagcttattactctggtcaaaataagcgcttagaaaaaatatataataattttgaatataaatatattaacggcttaaaaaaaaatcaagataatgagaaattaacggatcttagaaagtttatttatttaaagaaaagccatgggccactgttacttttaacatttagtattttttctgaatttcaatctaatggcaggtatatttataaggaatattttgataagttattatcttatttaaaaattgaaaaaatagataattttgcgattaagatatgtagtccttattgggttaaatatataaatgatgaggatgaagagcaaaaaaagagtaagggacatgtttcttatatacatgaaactttagaggacattacaaaatatcctaatcctttttggaacttaaaaagttcgttgaatttattttttagagctcttgcttatactgaagatatagtaccttatacaaatgaagaagaggatgattttaaaagatctaattttagagaatatatagatattcataatgttaaaataaatgaaataagtgtagagctttttaaaaactttaaatctcctttagaattattctatactttagaagcattgtattttttagaaatggtagatgaggagggaatcaaattttctgttacaaaaaacacacatcttgatattaattatgatatgcttagtgagggtgaaaatcaattatttattgttttatcaagtgtattaatgactggaaatgaagaaacattatttcttttagatgaaccagatacttacttgaatccaaggtggcaaagagagtatgtaaatttgttagaagattttaatttagaagatgatgattctcatatttttgttactacccatagtcctttgctagttcaaaatattgaaggtgaaaataaatataagtatgatttattattattgtatcaagatcttgatggaaacgtttgtattgatagcaaaaatggtattattgaaaactggaggttagatcaggttttattgagtaaatactttaatatagaaagtactagaccattacgtatagatgagtttatgaaagaacgaataaatgttattcaaggaaaattttcaaaagaagaggctcaaagacgattaaaagaatttgataaaaaaactataggttatttaccatcaggcgaaagtatgatagaaatagagagtttgaaatttttatatgaattagcacaaagtaagaatgataaaacttga

SEQ ID NO: 86505 - DNA, 783 bp, Myroides odoratimimus CIP 101113
atgataaaacttgagagagtagataatagttgtcctatttgtttatcaggaaatggagaagcaaaaaaagaagagttaaaagtgtcatttgttgcggataaggaaggttttttaaagaaaactagtaaagaactttttgatagtagtatatatgctcataatgatgtgaaaaagaaattaatagaatttcaaaagaacaaatgttgtttttgtgaatcagaggtacggagtgtaagccatggtgatgtagaacattatcggcctaaaggaggatggtgtaataatgaaggtactgaaatacaaaaaccagggtattttatgttagcttatgattggacgaatttgatgttttcttgtcaaatatgtaatcaaagatataaaaagaatttttttccattgtcaaattcagaatgtagaattgtgattgatgataattatgatttttcagaagaattgccagttcttttaaatccttatgaagacaatccagaagagtttattgaatttataggtgagatacctcgagctatagataataatgttagaggggtagggactataaaatatttaggattaaacagggaagatttaaacactacaagaagggaattattaagcccatatttacattttgtaagtctgttagaaaacgacaatataggtgatgatgttaaatctttgatattaattgaattaaataagctttacgaggcaaaaattaacaataaagggatctttatgcagatgataaaggataatataggcgaatattttaaaaaataa

SEQ ID NO: 86506 - DNA, 1182 bp, Haemophilus sp. oral taxon 851 str. F0397
atgaaaattgaatctttagcaatacaagatgttggtggtatatcatctcttaagttggaaaacttgaatccttatttgaatataatttgtggggtaaatggtattggcaaaaccaatattatcgaatcaatagcagcatgttttacaacctattctcaaaatgaactaaagaaaaaggctgattctaatagtggtctaattaaattaaatatgactgatataaatgaggaatttaaaaaaatagaatatatagtagatgctttctatcccagagaaagtaattacaacaataaaaattacagtactctttatagattttgggaaaattacttaaattttttaatgtatttcaaggtagataggtttttctcatatcaacgaatagattcattaaaaatacatgatgatataaatgagcacaccaagagtaacctaaatggtgtttctagaaataatttaaaagattggtttatcagaaatgaattactttcaaaacaggaatatgctacagatgttaataagaaaaatatagaatatgcaaaggagtttattacattactaaattctaattatagtttttcttcacttaaacaagatatggaaatctatattaattctccaacaggtgaaattccttatgaatacttatcatctggctttaagagttgcctattcattatgtggggagttataagagaaatccaaattcgtttccccgatatagaagctaaaaacttcaatggggtaattataattgatgaaatagaattacatttacatcctgaatggcaaaataaaatttgtaatgttctgaaaagagccttccctaatacacaatttattgttacaactcatagccctcacgtaattcaaactgcggaacataatcaggtaatagccttagaaggtattaatggtattcttaataagaaagatttagaaagtgcacgtaatggctttagtggatggagtatagaagaaattcttacagatgttatgggaatgagtgatttaagaacagattggttcaaatcaactttatctaagtttaattcagcattagatgaggaaaactttgaaaatgctaaaattatttttgaagagttagaacgtaaattacatcctcaaagtactgagcttgcattatttagatttcagttaaaagcattaactggagaataa

SEQ ID NO: 86507 - DNA, 717 bp, Haemophilus sp. oral taxon 851 str. F0397
atgataccattacaacagctacctaaacctgattatttaacagataaaaaagtacaagagcttacaaataagtatcaattagacactaaaaaggcagtatggaataaagcagaaataaaagaacctttattaaaatcatcaaacaaaaaatgtgcttattgtgaatgtatacttcaagaaacagattcctatagccaaatagagcattttcatcctaaatcgctttacccactggaagtcgttgtttgggaaaatttattgccagcctgtgtgcgttgtaacacgcataaaggtaatcatgatactgtaaacatccctataattaacccttataatgatcttcctaaagagcatctttcaactcaaggtttgcgtctttatccaaaaactgagatgggaaaaataacaattaagcggctaaacttgaatgacaacgatagactttgcataccaaggtttaaattatgcaatgaggttcatgaaaagttagggtatataaaggatactactgatttattagatcaaagaaatcgattacattctctattgactgcttgtagtaaaagtggagagttttctgcattttgttctcatgcgctacattcaaatatagattatactaatataaagaatttgttatcagaaaacgagtattgggatgatgaattagcaaaattagatgaggaaactaaatcgattgctttagaatctagatag

SEQ ID NO: 86508 - DNA, 1350 bp, Prevotella dentalis DSM 3688; identical to SEQ ID NO: 86438

SEQ ID NO: 86509 - DNA, 672 bp, Prevotella dentalis DSM 3688; identical to SEQ ID NO: 86439

SEQ ID NO: 86510 - DNA, 1245 bp, Fusobacterium nucleatum subsp. animalis F0419; identical to SEQ ID NO: 86180

SEQ ID NO: 86511 - DNA, 567 bp, Fusobacterium nucleatum subsp. animalis F0419; identical to SEQ ID NO: 86181

SEQ ID NO: 86512 - DNA, 1311 bp, Methanoplanus limicola DSM 2279
atgataattaaaaaattaaaagtgcataattataaaggcattaaagaccttgaaattcagttcacagagaatataacaatttttgcaggcgtaaacggctcaggaaagactacagttctggacgcagcggcagtattattatcatggtttattgcaaggacagaatcaataaaaaagaatggccagataattcccgaaactgacattaataatgatgaatctgagtcatcacttgaaatatatacagagttaaaagaagcttttgaaccgggaacaaataatacagtaattaactggaaacaggcaaaaacaaggaaaggcagagtaaaaaaagatgagagtgactactcaaatctgaataaagcagtcaaaaaaattcagaaccatatagaatcagggaataatattcctttaattgtttattacccaattaacagaagtgtaattgacattcctctcaggatcagaaaaaaacaccagtttgatggttcagttacagcttatgaaaattcattaacgggaaaaacaaatttcagaacattttttgaatggttcagagagagagaagattttgaaaacgaaaaaaaagcttcagaatttgatgaaaatataaatattcaaaataaaatatcagaatattctgactattcaggagacatacagcttaatgcggtccgaagtgccatccggacatttaccggatttgaagatctaagagtcaggcgcaatcctctaagaatgcttgtaaataaaggcaataatattttaacagtcggccagctctcagacggggaaaaatgtcttctggcaatggttggtgatctggcaaggagactttcaatcgccaatccaaaaatggataatccactaaatggatcagggataattttaattgatgaaattgatcttcatctgcatccaaagtggcagagaatgattattccaaagttaaaagagacttttccggcctgccagtttatcctgaccacacactcaccacagatcataagccatgttagaccagaagagattatccttctttatccggatgaaaaatcaggaatttcagttaaaatgcctctggattcatatgggatgaattcagacagaatactggaagaaattctggaagtaccctcaagaccgatagaaatagaaaataagatctctgaattattcatgttgattgataaaaataaaactgaagaagcaaaaaaagttcattcggagctaaaagatttaatcggagccgatccagagttaagcaaagcagaaatcattattcgtaaactggtaatgctgaataaatga

SEQ ID NO: 86513 - DNA, 582 bp, Methanoplanus limicola DSM 2279
atgaaatatatcaaaaaaacaataccttcagaatattatgcatgggcaaaaaaatggccttcagattatcctctgcactgggatgaccttgattcagacagtcagataaaatcaaggatgaaggaaggattactcaaagagcagggctttatctgttgttactgtgagatccggataaatgataataacagccatatagaacatttcagaccaagatcgttatttccggaggattcggcagattacaataatcttctctgttcatgccagaaaaacccaccgaaaggcgagccaaagcactgtgggaataaaaaagggaactggtatgaaaaagatcttatcatctcacctcttgagaagaactgtgaagagagattcaggtacacttttgacggaaggatcaaccccgcggatgaaaatgatgatgctgcaagagagaccatagaaagacttggattaaacgtaaaaaagttaacagattcaagaaaaatgattcttgagccatttattgaagaacttaatattaaaagctatgcagatattgtttcagagataaacagattaattgaaattgactcttaa

SEQ ID NO: 86514 - DNA, 1281 bp, Leptospira weilii serovar Topaz str. LT2116
atgcgtatcgacattttaaggataaaaaatttccgcaatttcgcatcggaaacttttaaatttcatccgaatttcaatttggttgtgggcgaaaatggcgcggggaaaacttccttactcgatgccatcgccatcgcggccggaagctggtttttaggaattcaaggatatgattctcgctctatcaaatccgacgaagtccgagttcaacgaaatgaatcggaaagagtaatcaattatgaaggacaatatcccgtatcgattgaagcggaaggtattattcaatccgagaacttaaaatggactcggactttaaacggcccgggaggtagaacaaccagaatcggtgcgcaaaaagcgaaagatatttccgaacaagccgctcgatccgtagcacaaggagaaaaaaatgttcttctacccttaattgctcattacggctccggaagactttgggttcaacctcgtgatatgaccgatttttataaccaagagcagccccaaagctccagactcgacggttatcattatagtcttgatccaagaatcgacttttccgaattatttcgatggatacgtaatgaaaaatatatttctttagaagacgggaaagatagaaaacagtatgtggcggtcaaaaacgcgattatcggctgtttagatcaggggaaatcgattgattataatgtaaaggctcaagatcttatggttgaaatcaatcgccaaggcacacttccctttcgtttactaagcgacggtcaaagaaacatggtggcattggctgccgatatcggattcaaagccgcacaattaaatccgcaattaggggataaagttttgcaagagacgcccggcgttgtcttaattgacgagatagatttattgttgcatcccaaatggcagagacgagtagttcatgatttgaaaaaaacgtttcccaaaattcagttttttgcttcgacacattccccccaagtaatcggcgaaacacctaacaacgaaattattttactaacggcaaacggcccgattcatcccgatatttcgtatggtgtcgattcaaattggatcttaaaatatgtaatggattctcaagatagatccgcggaaacaagggatctaataaacaaaatagaactcgaattatcaaagaatgatccggttagggcaaaagaattgttaaacgaactaagagaaaaacttaacggagaagacggagaatttgccagattgcaagcaaaaatagaacgaatttcaatcctaagtaaaaccgaattatga

SEQ ID NO: 86515 - DNA, 684 bp, Leptospira weilii serovar Topaz str. LT2116
atgagatacattcaaaaaggaagtcccccatactctttgttacattggaaaactcaaagaaatccgccaagtgaaggtttaatcgataactatgaagaattacgccgggatcaaaacgtcctaaatgaattaaaaacttcactcttaagggaacaaggatacttgtgcgcttacacaggaagaaaaatctccgatagtgattttcatattgagcatattatcgcgcaaagccattgtgcaaatggggaggatacggattaccataatctacttgtatgttttcccaaaccaaacacttcttgcgaatatggcgccatagaaaagaaagattggccgtcaccttcacaaaggaatctttttattagtccaataatgtccatatgcaaagactcttttgattttcaaacagacggagaaataattccgattggacaataccaagatgcggcgaaagaaaccataagtagattgaacctaaaccatccgaaactgaaagattttagaaaagaacaaattgacagctttctatttgatgatccgttatcgaaggaagatctacgaaacttgttaaaaggtcttcaagacgcggaagcaaaaatttatgacggagctacggatcaattgactcctttttgctttgtgttttctaagataatagaaaagctactttctttatctcaataa

SEQ ID NO: 86516 - DNA, 2961 bp, Burkholderiales bacterium JOSHI_001
gtgcgcaaggcattgctcggcggatcgatctgcacgaatgggtgcaaacgcagggctgttgcggccatcctggcagccgctgtggcgctgccttgcagcggcgcatcgttgaacccgatctcgccgggcgtgccggcatcgggcgcggcggccgacaaggtcgctgcggcggccgggtttgacacgctggtgctcgacggcaagatcaacagcgtaagtccggcgaatctgagtgcaggcgcaccgatgatggtcaccgtccacctgttactggcgcgcccgaccccggcggtcgtgctggagcggaatctgcgccttttcctggactcggtgccgctggtttcagcgggcgccgaaccgactgccgcagcttcgtccgccggagccgctgcaccccccagcgccgagagcaacttccaagcccagagcccggcctcgaccgctttcacccgcacgatcacgttgatggcgtcggcaccccgcacgttggccacgggcagcagcttcaacctgtcggtctacagcattccggaccgccgccagatcgccgccatggacatccagtccctgccccctcagggcttcgtgcaggaactgctggcgggccagccgaaagcggtgctgcctgctctcggcatcgcgatcttggtcctcggcgcgctggcttggttcctgtatcgccagcaaatgctgaacacccggcgcgagaccctgatgaggcaggaggtcgagcttgaacgccaacgcacgcagaacctcggccgggcggtggtcagcgcagccgatgatgccaacgccgaaccgacgccgccctacccgccgcagctgccgccggaattgctgacagcgctggagcagcgcgacctggtcatcgtcaccggggtgggcgtgtcggcacagtcgggtttgcctggcgccagcaagctgtggctcaacgtcattgatcgccacgccgagcggatctctgcgacacgtttggacagcctgcgcgcgttggtcatgaccggcgacaccgacgccgccgtcgaggcgatcgtctcgctcgtcggccgcgacgaagtgctggccacgctgaagtcggacctgatagattcgcaaccaaaaccgagccacctgcaccgcctgttggccgcgctgccggcggcggggctggtcgacatgacctgggacgacctgatgccgcgtgccgtggtcggcccggacatgcaggtattcgggccgatgcagaccgaaggcatcacgtcgctgctgcggggtggtcagctggcgctgatcaagccgcttggcgacctgcggcacccggccagtgtcgccctcacccagcgcgagtaccgggtcgtgttgagccgggcgcccgaattggaacgcgccatcgcagcgcttttttccacccggaccctgctgttcctgggcttcagcctggagggcctggaacagttcctgagcagcttgccggcccatctggactcttcggaccgcaggcattgcgccgtcgtgccggaaggggccgaccgggccgacctgtggcaggcggggcagggccgtcgcttcggcgtcaagctggttgagtaccggcccagcgccgacttccgcgagcttgtgcaggctgccgaggtgctgaccgagcgcgcggcgcgcatcggcaaggcgtcgcgggccgacgccaccggcatgtcgctggcggccacccgtctgagctaccttcagctggagtcgatcggcatctttcgcagcctgcgggtcgagttcacccccggctggacactgctgctgggcaacaacggcgggggcaagtcgaccatcctgcgcgctgtgacactggccctggccggcaacgatccgcgcgcgaccgcggccggcgcacggctgctgcgcagcggggaaaatctcggcaccatcgaactgggcatgggcaatatccgggtctcaaccagcctggtacgggatggcacccaggtgctgatccgctcgccacagaccaccgccctgcaggccggtcaggttctggtgctcgcgttcccggcactgcgcggggtgctcgcagcgcaaatcaaggggccgacttcggtgccggccgccaatccctcggtggacgatgtcgcaccgctgctcagcgggcaggttgacagccgcctggacaacctgcagcaatgggttgtcaacgcggccctgcgggccgagaccgcgcccaagggccgtgagatgcagatgctgcagacctttcagcaactcatctccgacatggttccaggcggcggcctgaagttcgcccgcatcgaccgccggacctggcaagtgatccttcaagccgactacggcgaggtgcctttcgacggcgtgagccagggcatgagcgcgattctcaattgggtcggcatcctgctgcagcgcctgtacgacgtctacccacagtccgagcatcctgagcgcgagtccgccatcgcgctcgtcgacgagatcgatgcccacctgcacccggattggcagcgccggcttgtgaccctgacgcgcaagcacttcccaagcgtgcaggtgattgcctcgtctcattcgccgctgctggccggggcggtcgagcacaccgaactgcgcgtcgtcgcacgcgacgaagcaagcagccagatccgggcggacatgccgcgcgaggatctgtcggggcagaaggcggaggacatcctggtcagctcgctgttctcgctgcagacgacgcgcagcgtcgaggccgaggagacgatccgccgctacttcgagctgttccagcgagcgtcgctgtcggaccccgagaagcttgaactggacgagctggcgcgacgcttgaaggcgctgaactttggaccgacgctggcaatgcgcacccagatagaccaagccagcagcgcagccgatgtcgcgctggccaaggtgtcgccggcggatgttcaggccctgcaggaaaagctgcgcactatccagcaagcctga

SEQ ID NO: 86517 - DNA, 852 bp, Burkholderiales bacterium JOSHI_001
atgattccgattccccgccccgacctcgcagacgaccagtggaagcactggcacgacagcgcgcagcaggccatggaccaactggtcagccagtacaagcctggccaggaggtcgcgttgcaggacgtggtctaccaggaggcgaagccctatctgatgaagctgtcgcacggcaagtgcgcgtattgcgagaccttgctcgcggccaaccaaccgggcgatgtggagcactaccggcccaagggccggatccgcgacgagaccggcaaggtcgtgaaggtcaagctgcagaacgacgagatcgaacaccccggctactggtggctggcctatgactggcgcaacctcttgccctcgtgcaccgactgcaaccgtcggcgccaccacggcctggagggtgttgcagccggcaaaggcgactacttcgccgttcgcggccaccgggccgccttgccaagtgacgatctggaccaggaacaggccctgttgctcgacccgtcgaagccgggcttcgatcccaagcagcacttcgaatttctgcccaacggcaccctcaagccgctcaccgaagaggcacggcattcttgcgagctgctggggctgaacctgcgcgaggcactggtcagcgaacgtgagctgagttacctgcaggccaaacaggccttcgcctcaatgttcgcgcaactgcttagcgacgcccctgccagcacgctggcgcgtgtgcgccagcagatcaatgacatgtggcagggccgcagtgcctacagcgcgttcgcccggcaggcactggaaagtgttgtggccaatttgcagcggaccacaggcacgcacttcgaactgccgctgccctga

SEQ ID NO: 86518 - DNA, 2853 bp, Beggiatoa alba B18LD
atgaatttcaataaacgcttacggttagccagtgaaaaagctgaagcaggagaacacgcgctaaatacagctaactatcaacaagccgttgataattttttagaagcctcagaactattcaaaggcataaaaggacaagaacaaaattatgcgagctgtttagtcaataccgcgaatgttttaaataacttaggaaattatacaaaagcagaaaccttattaaataaagccattccaattcaaaagaaaatattaggctcggaacatcctgatatggctacgagcctagggaatctcgccaatatttatcaagcccaaggcgactatgccaaggcgatagaatttaacgaaaaagccttagccattgaagaaaagcacttcggttcgcaacatcctgatgtggcttctagcctaggaaatctcgccactatttatcaagcccaaggcgattatgccaaggcgatagaatttaacgaaaaagccttagccattttcaaaaagcactttggttcgcaacatcctaatgtggctacaagcctaggaaatcttgctactatttatcaagcccaaggtgattatgccaaggcgatagaacttaacgaaaaagccttagtcattcgtgaacagcacttcggtttgcaacatcctaatgtggctatgagctttaataatctcgccaatatttatgcagaccaaggtgattatgccaaagcagaagaattttatgaaaaagcgttagccatttggcgaaataaatttggtaatgaccatgttgccattgctgatgggttaaataatctcgctgaatcttatcggaaagagggaaagcacgcggaggcaaaacagttgcatcagcaagcacttgcaatacgggagagcaagctaggttttgagcatcccaaaacaacgcaaagtttaagaaatcttgcggagactattagccaagtagttagtagcttgattagattatcttcaattagtcaattacataatactgttttacaatttctactacaaaaacgtgaaaaaaatccgcaattattttttaccttgcgcacacatcgcaatgatgagcaagggcgactttctagaggctattggtttttagaagaagaagaatttttatatttttctttttggaaaggcatcgatagcaccaatcaaatgccgaccattgctattgaaatcaatcttgagcaacaactaaccattacttttaatggtaatgattcccgcgaaaaagcagaatttttacaagatataacgcaattgctcgacggatttattcaatcaactgatggaaagcaatggaaaaaaacttatccccaagattggcaaagtgctttagacgcatttttaatcgataaaacccaaattgatgattatttagcctttaaaggtaatcaaatagctgattttagttttattcctgaagctgaatttttacaggctttaaaatttactaccttattacgtcaaaaattagaaagtgctgaaataaaaattttaaccgaaatcggtaagccgttaaaacttcattctttacaattagaaaatattgggcattttgaaagtcttggcattgatttaagcaggcaagttacaatttttatcggtgaaaatggtagcggtaaatcaacgattttaaaagcgattgcgttagctttatcaggtgttccgagaacattggacactgaacttattcaaaattatttacgtattttaaacacggattttgatggtacaaaacatttttgtaataacggttctatccatttaaatttacaaattaatgccatacaaagtcaaattattgaattcaatgatacagagttaggcggtatcggtgtagaaacctttgtcgataatgaggatgaatggttattgtccagtgaaaaccgttttattgatttggtgctaggttttccacaaggcaagaaacgcgctcaaaagaatgtaggaaaaattgctgaaccgaatttaaatgacgtaattgatttaatagaagaccgcgacattgcaaactggaaaaatgatttagtggaatggatagttgcattatatcgagaacctgatgctaaaattcgcactgaaaatttagtacaaatcaattgggtttttgatattttctctaaaattatttctgacactgatgcaaccgcgattcgcttaaaaagtgccgttcacgaccccgcaacagggaaaaaagacattattatctgcacccccgacatgcccgacgggatttctttagatttgctcagtcaaggctataccaatattttcatctgggtaggtcgcttagtcatgcgcttatacagtgctttaaaagcccatcaaaccatcgctaaagatgataaaaacctttttttacgcaatccaaacacacgcggaaaacgttacgaagcaaacacaattgaagagcttcatggtattgtattaattgatgaaattgatacttatctgcatccaacccgacaacggaatattttacgggtattagtagaaaaatttcctcatttacaatttatcgttacgagtcattctccaatggttttagcgtatttaacccaatggaaaaacaccactgtttataaacttgaaaataatatagctacttccgttcaacatttttacgggcgtaacgaaattgatttgttttttgagttttatggtatagaagcaagacccccagaaattcaggaaaaaattgatgctctttataatttctttgaccaagaacaattagaaccagcaaaacaacttttaaatgaactacgagagattttaggagataatgaccctattattaatgagttgagtacatctattgatttaatggaaaatttataa

SEQ ID NO: 86519 - DNA, 798 bp, Beggiatoa alba B18LD
atgcgacgaatttataaaaccccttgcccagcattatctgacttcatcaaacaagaaaaagataaaaaaattgaccctgtttataaaaatggtttagattctaaagaagaatataagcagcacttttttaatctccgcaaacagctgttagaggaacaaggttatatttgttgttattgccaatcaagaattaatcttgtagaaaatgaaatgcctaaaatgaaagtagagcatttcaaaccaaaatccaaatataaagatttagagttagattacagaaatttactagctagttgtttaggaaactcaaatagcgaaacacattgtgatagtaaaaaactaggaaaggaattagaagaagttcccaatccagaatctaaagaatttgaacaatttaagataaaatatattgcttataaaattacagcaaatacacaaggtaaagaatcagataagtatattagtgtcatgccattatggaatgaaaagattaagcaagctaaagctgaaaataaagaagaggataaaataggcttagaaaaaaatgaccctttgacaggaatagaagaaggttgtttaaatcttaatcatcaaacattaatgagccgtcgttttggagcatggcaaggcgtgagcaatattttttataaaaaaattggaaagaattggcatatagaaaaaggcaaaaaattagcaacagatttaattgaatattacaacaagacaaatgatagaggagaattaaaagaattttgtcaagttataatagatttacttaaaaaagagttcaaagtttaa

SEQ ID NO: 86520 - DNA, 1284 bp, Beggiatoa alba B18LD
atgtcactgttacccccttttaaaattaacatgttgcaattgcaaaactttagagggattaaatcattaaacattgaatttaatgaacaggtaactatctttgcaggcaaaaatggtgcaggtaaatctagcatattagatgcacttgctatgtctttatcatggataattgcccgtgttcgccacgcgggaacatctggacgtttgattcaagaaaatgacatttataatacagaagcatacgcactgattaaagtagaaggaaaaacagatttaccaatcgtatggcaattgttcaagggaaaaaaaggtaaaccaaaatcaatagaaagctctgtattacacgatgtttctaattacgcaaaaaacctacaagtacaattaactgagcacaatatcctaccattatttgtctattatcctgtcaatagagcagttttagatattccacttagaattagaaaaaaacataagtttgaaatcttagaagcctatgaagttgctttaaccagtgcggcagattttcgtcaattttttgaatggtttcgcaatcgtgaagatttagaaaatgaggaaaaagctttctatcaacaaaagcttaataaagatgatgttcagttaagcgcagttagaaaagcattagaaatatttttgtctgaattaacgcaatttagagttcgtcgcaatccactctgtttaaccgcaatcaaacaagggattgaaattcaagttaatcaactgtctgatggtgagaaatgcttaattgcattaattggcgatttggcacgtcgtttagccatagctaatccatctttattaaatcctttagaaggggctggcatcgttttaattgatgaacttgaattgcatttgcatcctgcatggcaacgccaaattattcgccaattaactcagacctttccaaactgtcagtttgtattaaccactcattccccacaaattttgggagaagtagaaggtaaaaatattcgcttattacatcgtgataacgacactaaagagattgtttgttataccccaaaacaggctttaggcttagactcggcagaagttactagcgaattaatgcaggctgaaaaacgggatatagaaaccacaaacgccttaaaaactatttttgatttaattgataaagaagattttagtcaggcaaaggtagcaattgataacttaaaacaccgtctcaatggggatattcccgacattgtacaggcggaggctttaatcacgatgttagcaatggataacgaacatcatgattaa

SEQ ID NO: 86521 - DNA, 642 bp, Beggiatoa alba B18LD
atgattaaaattgtcaaacatattgagcctaattcgttgatacaacatagatgtcaagacaatgcaacgtataacgatttatcaaaggaagcaaaagatgaactacgtcatcaattgctcatagagcaggggtatttatgcgcctactgtatgcaacgaattgaaaaagagaactcgaaaattgagcattggcattgtcaaagtcgttatcctaaagaacaattagattataaaaatatgctcgctgtttgtcagggaaacgaaggacaagatgaaaaacaacaacattgtgatacaaaaaaaggaaacactgatattacctgtcatcctgctgactcagcatctcaatatttgctggaaaccctaaaatatttaggtgatggacgaattcaatcaacagaatctgaattaaataaacaaatagaaacaattttaaatttaaatattagtcgtttgatggataatcgtaaaaatattgtgattgcagttaaaaaagtgctgaatagcaaaaaaggctcacgcacacaatcagaaattcaacaatatttaaatcgttggaaatcaagagatgttggcggaaaataccaagcatattgtggtgttgctattgactatttagaaaagaaattaaagcgtttttag

SEQ ID NO: 86522 - DNA, 1332 bp, Beggiatoa alba B18LD
gtgtttataaaaacattgagattaaaaaattttcggcaatttcagaattttgaaatcacttttaatcaacaactgactgttataacagcccgtaatgggcagggaaaaaccagcatattagatgcggttacgattgcattagggacttttgtcggggctttcgattttggcaaagcctgccatcttgcgcaaagtgatgctcgttatacaaaaaatgggttttcttcggatttttcatctgatttttatgctgaacgaacccagcagtatcctgtacacgtctatgcagaattcgatgagcctttattaaaaggatttagagagttaacagggaaaaaaaataaaacaacgattaaagatgcaagtgaaataagttcttatggtaaggagttgcaacaaaaagtgagagaaggacaaactgaacctttgcctgtcattgcttattatggttctggacgtttgtggaaaactcacaaaaatatggcgcgtgaacatgtattaagtgaaagtagaaccattggttatgaagattgtttatcacctgtttcaaattttgtccaagttcagcagtggatggctaaagcaacttatgccgaattacaacagcaagcgcgtgctgaaaaagaaaccagtattgcaatccgattaaaaaccgttgaaaacgctgttaatcaggtgttaaaaaaagagggatgggataattttcattatgatttagaactagaagagctagcaatgactggcttgcattctgaaacaggcgatttaccgattagtttattgagcgatggtttacgcgccatgattgcactcgttgctgatttggcgtttcgttgtgtccgtttaaatggtttttggggggaggaggcaacgcttaaaacacaggggattgtgttggttgatgagattgacttgcatttgcatcctgaatggcaacaatatgtcattgataacttacgcaaggtttttccgttgattcaatttattgttacaacccatagcccgcaggttttaagcacagttaaacaggagcaaattcgcgtgattggcgaaaatgtgaacagagagcttattgcaagcattccgctggggatgacttatggtgaacctagtcaaagcgttttgcagggagtgatgtttgttgatccacaaccgcctgttaaagaaaaagtagatttgcaacgcttaacagaattggtcgaccaagggtgttatgaaacgtcagaggcaaaagagttacagcaaaaattagaaacattactgggtaaaacacatcctcaattacaacgtttacaacgtagtattgaaagacaacaacgcttaaaaaaatga

SEQ ID NO: 86523 - DNA, 681 bp, Beggiatoa alba B18LD
atgagatatattttaaaaaggcaatttggagaatatcatctgaacgaagcaaataaaaatcctcctagtgataaagattcagcaacaagtcgttggagtagttttggatataaagatgtagtttgtcagtgtttattagacgaacaaaattttttgtgttgttattctgaagttaaattagaacattgtagctcagatgcgtatgattatcatattgaacatgttcagcctaaaagtttatatccaacccgtacatttgattatcaaaatttagcagtcagtgcattcagtgctgaggatttaaaatcttatcaaagagaggaattatttggcgggcattataaattaggtcattatgaccctgatttatttatctcttgtcatcaagtggattgtgcgaattatttttgttatacatctgatggtcgtgttgttcctgctttgcaattaagcgatgtggaaaaagcgaaagcaatttatactattgatatacttaatttaaactctcatctcttagtcaatttaaggcaacaatattgggatgaattagagaaaatatggaaagagcatgagcaaaaaaattggtctatcgaagaccttaaaaagattcaattagaacccataagtaacagactttatccttttttcagtttgtcacgccaattttttggtgattcttga

SEQ ID NO: 86524 - DNA, 1326 bp, Niastella koreensis GR20-10
atgtgggtagaagagctttcggttgataatattaaatgcttcgataaaataaatttgaaattaggaagtaaaacagagccatacaaatgggtaacacttcttggtgaaaatggagggggcaaaagcacaatattacaagctttaggattattgttagctggaccggagggagctacgcagttgcttaggccaacaggatggctaagaaacgaagaccaatatggtcgtatttcaacaaaaatacacaaaggagcgaatgaccctggtaaatttggagaacaaaaagcaagaacatcatttggttattcttttttaataacaggaagtaagaagattaccatacgtaaaaagctttatacggaaccttcaatagtagaaaataaagacaaaatattaacatggttaaggcaaaatgcgcttacttctaatggacaaggatggtttgcttctggatatggtgcatttagaagactaacaaggtctggtagagtaatagttccgtctttagcaccccaagagagattcaataatttttcatcgcagtttaaggaggatgaggctttatctgcatttgaacaatggatggtttatttggattatagaattgctaagggggatagtggtagttcaaagcaagcggaaaaacaaagagatttaggcgtgtatgctataaatcaaattttgcccccaggagtaaaatttgattcagtaacagatgacgccagaatactatttgatataaagggtatgaaggttgcgactttaaatttaagtgatggttatagaagtgtccttgctttagctggtgatttaatttggcgcttacttgatcaatttccagaaagtgatgatcccctcaaagaagaaggtgtcgttattattgatgagttagatatccacttacatccactttggcaaagaagtattcccgacttattaagaagtcaatttcctaatattcaatttatagttgcaacacatagcccattaattgcggctggagctggcgaagatgccattacatatcgattcacctttaacaatgggtcaactgatgtacatcaaataagaaacattgcttattggaatgttgatagaattttacaaagtgaagcttttggtttggtttctcctttttcacctcaagtagaagctaatatagaaaaatattatatcttaaagaaaaaagcaaaacttacacaggccgaaaaaaatgaattacaaacgaccctgccctttgttgaaaattcaataggttatggagataaagagaaatcggaaacggaaaaaaaactagatgaatatttgaaaaatcattggaaatga

SEQ ID NO: 86525 - DNA, 687 bp, Niastella koreensis GR20-10
atgatacgtattatacgtcctgttgaacctgtagttcttacaaataataaaaaagagtggactcgggtatatcttacagctagagaagtttataatgttacccctactcccaacaacaaaagagctaaagcaagtgctgaatctaagtataatcatatcagtgttaaagaagctttacttatggcatgtaacagtaaatgtgtttattgtgaaagtcatattacgcatattgcttatccccatattgaacattttaaacccaaggctaaattcccgaagctttgctttgaatggaaaaatttattcctaggttgtactatatgtaacggtccaacatataaatcggataaatggcctacatctagcaaaggcggaccatttattaatcctgaaaccgaaaaccccaatactttttttaattttattttcgatgaaaaaactggtgtttctttggtacacccgaagggaaagagggctcgaactactgaaaaagagcttggattaaacaggattgaattactaaaacatcggaatccagttgttaagaagcttgcttatattgctctacaagcgagcaagggagataaggctgcattagctgaacttaaattttgcatggagccagatcaagaatactcagcatttgctaggtctttttttaggaaattcaaacttaaaatgaaataa

SEQ ID NO: 86526 - DNA, 1458 bp, Klebsiella oxytoca 10-5245
atgagtttttatatagagagtgctcttgttgataataagagaatagaactagtgccacaatcaatacataatataggtaatatatatactgtattaattggaaaaaacggaacaggtaaaagtatttttttaagtaaacttgcaaatagtttatgtagtattcaagtggaaaataaatatttaaagcgtgattttgatagtaatgaaaaaaataacgctaaaatgtcttttaatattgtaaatgatggtgttggtaatgaaattagattggaggggcgtaagtttatagatggtgatagtaaatatcttctcccttccgttttgacatgtatatcaacaagcccatttgataaattttcatcagaacgtaggttttataactccaaacatgatattaacacattttatcattactttgggttgaaagatttaggacggaaaaatgccattcatgcttttatagaaaaaatcctatattcaagaattaatagttcattaaaaaatgacagggagtcatttgaaaaaatattgggttttttaaattaccagcctaaaataaaaattgagttcagaactagagttaggcttaaaaaactatttgagcttgatgatgaagagcttataagacaaattgaaaagccaatatttacaccaacgggtatatataagtggagtaaaaatcaatctaattatgatgtgcctagaataagaagttcattatttcttattaacgattatattttagcttcctcagatagacgttcgaattcaggttcagaggcaaggtattttgatgttgagataaatgctcttaatgagaacatgataaatatatctgaacacgtgatgcatgagatgttatatttaatggagttgaatttattatctattagagatatatatctttataaaaaatcaggtgatgaagttatattatatgaagctagttctggtgaacagtgtttactaattaacacatttggtattgctaatagcattgcagataatgctttaatactgatagatgagccagaagtaagtcttcatccagagtggcaggaggtttatattgaattgcttatggatgtctttagtcataagaaaggatgtcactttattattgcaactcactcccctcaaataatatccaatcttaagaaagataactgttttattactactcttgaaaatggcaaaacatatcatgctaaggatttcataaataagtcagcagattttcaactagcaactttaatggagactcctgggcatgagaatgaatatttaaaaagactggcagtaaatatattaagtaaaatttctgccaatgaagagctgagtgatcaagatataaatgatgttctatggcttaaggatatatctaaaaatctagagccgaacgatacagtcatgtttcttattggtttgatcgttaagagcaaggtgtctttaaaatga

SEQ ID NO: 86527 - DNA, 639 bp, Klebsiella oxytoca 10-5245
atgatttctaatgcttatttgtataataatgattttcaggaaaggataaatgcaaaaataagctcagaggggttttgttctgattcatggtctgataatgatattagtgatattaaagagtcaataaagcaattttatatacctgaacaaaaccatatttgtccttattgccaacaaagatttttgactaacaatgggaggcaatgggatatagaacatataataccacgccaaactcaacttggtttcatgtttaccccacagaatttatgtgtctgttgccctgattgtaatagtcataaaggatataaaaaaacaacgactagtgtcgctaaaaaaacgctacctacaaaatcgcacttatatcttatcgttcacccacacttcgataaatatgacgatcatatagaggtcattgaacccggatatctctatagagcaaaaagtaagaaaggtgaaaatacaatgtatgtttgttcattaaacaggttttatcagttttctggttataattcagcagtagcaacagatcatcgtttgatgatgttggcaaatggtttatcttctgcacagagcgaagaagagaaaaggcaaatacgtcgagaaatgatatctatatcactacgggcaaacatatag

SEQ ID NO: 86528 - DNA, 1227 bp, Raoultella ornithinolytica 10-5246
atgctttgtagcatttctaaaataaatataccaatcccatactccagaaaaaaagttaatatacagttagatggaagaagtctgattatcactggtggtaatggttgtggaaaaacaagtttcataacagccatttataactatttaaaaaagggaatagacagccctaacaataataacgtcgaatacttgagccgccagataaataatcatacacgcctcatggaagaggctggacgagatggtagggcttacaattcttataagaatgaggtagagaaaaataaagccagattagaagaaattaataatttcaatatcgaaattgagtctattgacaacaaagacattcggtctttgctcagattccatagcgctacaagacaatccgcaatatcttcgccaaatcaagcaccaaaacactctgttcttatagaggaaaataagcatttttctaatgataaagatggtagtcaattctttgaaagctatttattgagtttaaagaaaaaccaaagctatgcaatagcttttgataaagatgaaaatgaagcaaaacgtattagcctatggtttgataagatacagttagatctacgctcattatttgaagatccagatttagttctagaatttgatacaaaagatgagaagttttatttacatcaagatgggaaagacagatatacctttcagacgttatcagctggatactcttcaatactaagtatctatactgatttaataatgagagttgaaatgtggggggtctctcctgataatatacagggaatcatttttattgatgaaattgatgctcatttgcatgtatcattacaaaagcaaatattacgttttttcattaagtcattcccaaaaattcaatttatcgtaacgactcattctccatttgtagttacatctgttacagactctgttatttatgatcttactgctaatgaacaaattatagatgtttcttcatattcatatggtgtggttatggaggaaattttcggagttctacctgattctcacgcattaacagataaactaactcacatcgaaaatttagttcaaaatataacaccagaaaatatcggtgagttagaaaaagtcatttcgtcttttgcatctgaaaaagaaaatatgagcaatgatactcaagctttccttgacacagcacagttaaagttaattaaaacgaaaaaaagaataagcgagtag

SEQ ID NO: 86529 - DNA, 654 bp, Raoultella ornithinolytica 10-5246
atgttcaatgtagtgagatcaatgcccgcacccggttcactattaactcataaaaaatatgatggtgatgatgttcattcggctctacaggagtgcttccatgaaaaatgttatttatgtgaaacaaaaaaacctttagatataaacatcgagcattttgaccctcatatgggagatataattaaaaaattctcatgggataacttgtatttagtatgctcacgttgcaacaatatcaagctagcaaaatataacaatcttctcgactgctgtgtaataagcgtatgggacagagtaaaattaactcccggattttctccaaaaacaaaaaaattcattattacgccgcaattttctgacgataaaacacttgaaacagcacagctactaaatgatatttacaacaatgataatacaatcaataaaagacttacagctcgttctctacgaacccaagtagtccaaaccacacacaaactaacacaacatatgattgtttattatagcgaagattctacgaatgaagaaaaagaaaattcacttaataaaataaaagttatgattaagaagtcatatccatactctgcattttgtcgctggatgataaaggatgatgaagaacttgataaattattaactcctgtcatggactga

SEQ ID NO: 86530 - DNA, 1653 bp, Escherichia coli DEC1A; identical to SEQ ID NO: 86320

SEQ ID NO: 86531 - DNA, 651 bp, Escherichia coli DEC1A; identical to SEQ ID NO: 86321

SEQ ID NO: 86532 - DNA, 1653 bp, Escherichia coli DEC1B; identical to SEQ ID NO: 86320

SEQ ID NO: 86533 - DNA, 651 bp, Escherichia coli DEC1B; identical to SEQ ID NO: 86321

SEQ ID NO: 86534 - DNA, 1653 bp, Escherichia coli DEC1C; identical to SEQ ID NO: 86320

SEQ ID NO: 86535 - DNA, 651 bp, Escherichia coli DEC1C; identical to SEQ ID NO: 86321

SEQ ID NO: 86536 - DNA, 1653 bp, Escherichia coli DEC1D; identical to SEQ ID NO: 86320

SEQ ID NO: 86537 - DNA, 651 bp, Escherichia coli DEC1D; identical to SEQ ID NO: 86321

SEQ ID NO: 86538 - DNA, 1653 bp, Escherichia coli DEC1E
atgaccaaacaatacgaaagaaaagcaaagggtggaaatttactgtcagcgttcgaactttaccaacgtaatactgataatatgcctagtctgggtgaaatgttggtggatgagtggttcgaaacctgtagggattacattcaggatggacacgttgatgagtcaggaacgtttcgtccagataatgcgttctatcttcgccgcctgacgctaaaggactttcgccgtttctctcttcttgaaatcaaattcgaagaagatctgacagtcattattggcaacaatggtaaaggtaagacaagcatcttatatgcgatcgcaaaaacgctgagttggttcgtcgcgaacatcctgaaggaaggcggtagtggacaaaggttaagcgaactgactgacataaaaaatgacgctgaaaacaggtatgccgatgtcagcagcactttcttctttggcaaaggacttaagagtgtgccgatcagattgtcacgctcagcccttggtacagcagaaaggcgggacagcgaggttaagcctgcaagggatttagctgatatatggcgagtcatcaatgaggcgaagacgatcaacttgccgacgtttgctctttacaacgttgagcgatcgcaaccctttaaccgcaacacaaaagataatgccggacgcagagaagagcgttttgatgcctatagtcaagcgctcggtggcgcaggtcgtttcgatcatttcgttgagtggtatatttacctgcataagcgtaccatatcagatatctcaagttcaattaaagaacttgaacaacaagttaatgacttacagcgttccgttgatggcggtatggtttcggtaaaatcacttctggaacagatgaagttaaagcttagtgaagcttcagaaagaaacgatgctgcggtttcctcgaaaatggtaactgaatctgttcaaaaaagtattgtagagaaatcaatctgctcggttgtacctagtatcagcaagatatgggttgaaatgacaacgggttctgatttagtcaaagttaccaatgatgggcatgatgttactattgaccaattgtctgacgggcagcgtgtatttctgtcgttggtggctgatcttgcgcgaagaatggtcatgcttaatcccctactggaaaatccattagagggacgtggcattgttttaattgatgaaatagaacttcaccttcatcctaagtggcagcaggaagttatcctgaacctgcgcagtgtattccctaacattcaatttattattacaacacacagtcccattgttctttctactattgagaaacgctgtattcgtgagtttgatcccaacgatgatggcaaccaatcattccttgattctcccgatatgcaaacaaagggaagtgagaatgctcaaattcttgagcaggtaatgaacgtacatcccacaccgcctggtattgcggaatctcattggttaggtgactttgaactattgcttttagataattcgggagaacttgataaccagtctcaagagctttacgacaaaataaagacgcactttggcatcgatagtgctgagctgaagaaagcagacagccttattcgcattaataaaatgaagaataaaataaacaagataagggccgagaagggaaaatag

SEQ ID NO: 86539 - DNA, 651 bp, Escherichia coli DEC1E; identical to SEQ ID NO: 86321

SEQ ID NO: 86540 - DNA, 1653 bp, Escherichia coli DEC2B; identical to SEQ ID NO: 86320

SEQ ID NO: 86541 - DNA, 651 bp, Escherichia coli DEC2B; identical to SEQ ID NO: 86321

SEQ ID NO: 86542 - DNA, 1653 bp, Escherichia coli DEC2C; identical to SEQ ID NO: 86320

SEQ ID NO: 86543 - DNA, 651 bp, Escherichia coli DEC2C; identical to SEQ ID NO: 86321

SEQ ID NO: 86544 - DNA, 1653 bp, Escherichia coli DEC2D; identical to SEQ ID NO: 86320

SEQ ID NO: 86545 - DNA, 651 bp, Escherichia coli DEC2D; identical to SEQ ID NO: 86321

SEQ ID NO: 86546 - DNA, 1653 bp, Escherichia coli DEC2E; identical to SEQ ID NO: 86320

SEQ ID NO: 86547 - DNA, 651 bp, Escherichia coli DEC2E; identical to SEQ ID NO: 86321

SEQ ID NO: 86548 - DNA, 1398 bp, Escherichia coli DEC14A; identical to SEQ ID NO: 86108

SEQ ID NO: 86549 - DNA, 606 bp, Escherichia coli DEC14A
atggtccagctcattaacgagcagtatcacctttgttgctacagtgaaatacgctctgatcttcgtggtcttggttatcacattgagcacgttgagaataagagccagcatccagaacgtacttttgattatcagaatctcgctgccagtgcattagattcaggggagaacggcggtttatcttccctgaaaggaaaaaatgcttttggcggtcatgcccaaggaaaacaagatgttgtagatatggcaaaatttatccattgccatattcgcgattgttcccgttattttgcttacctttctgatggtcggatagttcctgctgatgagttaaatgcacaagaaacggagaacgcgcaatacactatcgatctactgaacctgaacagcggattccttcaaacggaacgtcgtaatcattgggaagagctggagcagctttttgatgaacacattgaaaaagattgggatttgcagcaattactccagcttgatttggttccaacaccagaccataaactgcatgaattcttcagcattacacgccagtttttccagcaagaagctgaacaggtattacagagccacgccccagcattaatttaa

SEQ ID NO: 86550 - DNA, 1599 bp, Saprospira grandis str. Lewin
atgatttacccaaaatcttttcccgcctcagaaaatacctcctatttagatgagcaaatttatttgcgcctcaaagaattggtcgatcaaggggaagaactatctgtttcttttcatcatgaggtttatgtaaaaacaactgaagcttttgaaaaagaaagaggaatagtagatataatagcggtattagattttttgatttttattccaactaaaggactcttattgttacaagaggatgcacatgaactcatcccggcagttttgaaacagttgtataattctttaagagaaaaatggcctagtatacctatttatactgcttatagttctgcattttccaatagtagtttgaatttcaaagactggttgatgcaacagtttgcaggggagaccatttctctcactactgaagagcaagagcatattgagcaccacctaaaagaaaataatctttattataccccttctggccgcctatctgcatttacgtttgaaaattttcagggtataaaaagcagtgggctcgaaaacctacccacttcagccaactggatttttctaacgggagaaaatggctacggaaaaacttctttgcttcgagcaatagccacagcactttatgctgaaattcctatggcagaagaaaataagggattctcttctctagatcaaaaagacaaaaaaacaaaactagggctgctgttgcaatctccagatgatgatgaaaaaaattattatgtctatcctagagaaaggttaaaaacggtctatagaaatgtcgttgcttatggtcctgctcgtttagaaacctatgaacaggatgagccttcaaaaacagtggtaaaaaatcccattctcagtatttaccgcagcagtattcccttgcgcagcatagaatattatttaaagctttggaaattgcattcggatgaaacaatccaagaaaaatttaagcagacaattgccctacttgagcaattacttggcgccatgggaatgcagattgaagtgaccaaaagccaaagagttttttatctggaagaaggtaaatcggccattcagtttaatcaattagcttcgggctaccgtagtttaatcgctatggttggcgacttgattattcgaatgtttgaagcacaaccagatgtactcaatccagtagaatttgagggtattgttattattgatgagctcgatttgcactggcatcctaaatggcaacaaaaaatcccacaattattgaccgatctttttccaaagatccaatttattgcgtctacgcatagcccaattcctttattgggcgctcccgaaggatcggtttttctcaaagtaaacagaacggcagaaaaaggcatttgggtagagcggttaagccagctagaaaaagaaatacataaattgactcctaatattgtcttagactccgacatttttgattttgacttttttgaaggcaaaagcaatgaagaattagagcagatttatgtagaagacgactatgaaaccgtccaaaaaaataaagaaattgaggaaaggctaaagaatgtaagcgtagatattttccctaaggatttattttcaaatgaagactag

SEQ ID NO: 86551 - DNA, 864 bp, Saprospira grandis str. Lewin
atggtgcacagaaataaaaaatttgatgctgagcctgttttgcttgtcgatcctaaatggaatgatttaaaagctaagctactaatagaaaagcataatcatgaagtgaagagcagttgttaccgggatacaacaatagaagcgctacatactatttatgccgggaaatgtgcaatttgtgagcgaaaaagaggattggaattacaagtagatcattaccgacctaaaaaaacaagaaataataaatccgagcgagaatataatcaacccggatattattggttagcttatagctggtctaatttgattcccctctgttcaaaatgtaataatgcaaaaaggaataaatttccgttgaaaggatggacagaaatatctagagtagatagccatacgaatactaaaggactagatccttttgagccttataatttaatctggttacaacagcaagagcaaccattgctcattaaccccgaagttgaaacagaaccagaacgtcatttcaaatttttgaagaatggctctattgtcgggcgcacagaggagggaaaagagacaataaaaatttgtaacctaaatcgaacagatttaagaagagagcgaattgaaattagggaaaaatatgcatcaaagattagtgcagcaattcatgattacatctcaagtcgcgaccaagctgagctgaaaggcgcattaaaatctattttcaaagaaattagagaaaatacgcataaaaataaggcacattccctctaccatatttatatctatcattattttgatctgtttattgcgccttatctcccaaattctgttcgcgccagaattagccatttttttcaagaatttaaacgcctttaa

SEQ ID NO: 86552 - DNA, 1200 bp, Saprospira grandis str. Lewin
atgcaaatcacccaactaactatcgaaggatttagaggcttcagagaaaaaaaggatatccttttcccagaagatggcagccctttagttattgtatctgcaaatggtgctggtaaaacatctattttagaagctatcagaattcctttagccataattgcagacaaacaatatgatcgccgtcaatcttaccgtcaagttattggacaaagagacctcaacaggaaaagttcaacactcaaaattgaggcattctttaaaaacaaagaaggactgtcttttagctatactattacatgtgatggtaaaaaaacagaaatcacccccaagcattctagtacaccagctatacaaccgctagtatatttttctactgatcgaattttccgagaaacacctactaaaaactatctaaaccaaggggctaaagacgcacatgtagatgcattaaatgaacttgctaatttcagtcttttttactcctggattagccagtcagaaaaaagtatccgacagcctgccagagactcaaaaacaaaactgtccatagtaaaccaggccattaaaaatttattttgtagaaatgattacgaaatcttcattagaaaaaatgaagatagctcagaccttttttttcgaaaaggagatgatgagttttcgatttttcaactatctgctggagaaaaaaatatagttagcattgctagtgatttagcgatgcgacttttcatggcctatcctaactctaatgcccctctaaatgaaaaaggaattgtacttattgatgagttagaactacacctacaccctaaatggcaagagcaattacgtcatcaactcatagaaacatttccaggcattcaattcattatcaccacacactcgcctataatcattcgtagcttagaaagtgagtctcttattaatttagatagtgagtctgtcatcggcctagaagaagacccttttcgctatagtgtggaggaagtacttagccgagaaatgggtgttaaggatgttcaacgtagtcagcaatttaaggagatggaagccgcagcaacggccttttttaaactggcccaacaaaaagataatcctgaggccattgcagaggcaaaaaagaaataccaagaactatctaaacagtatagtaaagaccccgcttatgtcgccctattggccgccaaactaaacctctaa

SEQ ID NO: 86553 - DNA, 654 bp, Saprospira grandis str. Lewin
atgcgcccccttaataagccaactactgcgcctaactataccgatgattctccttatggagaagccaaagcagatctaattcaagctttaggagaatattgctcctactgtgagcgacatatcaatgataaaaaagcattacaggtagagcatatccaacccaaatctttggtccctaatttagaatgcgtttgggataactttctcttagcctgtgctagctgtaatatccataaaggcataaaaaacccaatcactttaggcattaggttgccccatacaaacaacctgatgttagacctcgaagttgatccagatagttctttaatttcggctaacaatccagaaggccaagcatttatcgagcttgttcgcttatcagatgtagctggaacagccacgctaggcgatgaccgttacgaaaagcgttttgaaacagcaggaattgctcaaaatatacttgaagactatgaaaatggagagatagcctctaagtgggttgtaagagtagcgcaaactcatggcttttttagcctttggtacactatctttcaagggcatccagaagtgattgaagagcttattagtaattttcaaggtacgcatcctgctgcttttgattcgaccaataattatagcttagtagctatctaa

SEQ ID NO: 86554 - DNA, 1863 bp, Saprospira grandis str. Lewin
atgtcgtctaattttgagtttttgagggaagctatgccaaaggcttattattgcttttatcgggcagagcaggcgcttttgacgcatccttttgtggggatgatgtatatgcgtaaaggaagaggacaggtgaatataactctctttactgcattagaaaaatctggaaatacaaagaggtggatagacctttataaaaaatataaaactgcttctttaagctctgatagcctaaatatccttattaaggatagtgtttattggacaactgaaggaaatgcttctttagttaatcagtcgagctgggaagaggaggttaaattatttttatcgaacttttttgagtccttaaagaaaaccttgggacatatagagtatgtccaaggtcaaaagctacttaaggatggacatctaatagaagaaattgaatttgatgcctctattaagcgagctgttaatgcagactttttaagggaagatgaggcgctttttgagttttgggcttcggcctatctccttttgatggagaaggagaagttagctcaagaaaagcccgctattctcaaagcttttgaagaggaggaccttgctttttttgtcaaagaaagcaaggccttttctgcggtttatctgaatgaaaaagtagaggcggggtcgctagcttattttgagtctgtcttaggggatttagatgtttttttggggcaagtcgttctgcctagggcgaaactgaatagtttggtttttagcgatgtatatagcctgaaaaaagttgatcttgattttgaagagagtccctcttggatttttttgactggagaaaatggctatggaaaaactttggtattacaagccatagccgcagatttgtatggagaggatgaggtgacttatgagtttttgaaagaaggattaggtggaggaagtgaaagtcttttgtacctaagatttggttatagttttcttagtcgtatggcaacagccgttaatggtcattatgaccctcatcgcaacgtcattgcctatggttcttctcgtttggttcctcgtcaggtagtcaagcaggcaggggagtacaatatggtccgttccttatttgagtcagatgctcctcttcgggatatagaggatgagtacatcaactggtttgcccgcaaggagattcatcctcgatctaaggcacgttatcagcaggtcaaagctttatttgaggaggtggtgcccgacttagagctagaaatagatgaggaaaactttgatcgtttgtactatcggttcaagggagactgggctgaaacgacagagcgcttgcctttcaaccgcctctctgcaggttaccgaaacatcttggctattttgggagatttggtccttaacttatatgagttgcagcccacggttacggatatcaaggctttggggggcattgtattgattgatgaattagagttgcatttgcaccctaagtggcagcataaattgcccaaattattatctgatgcttttccgaatgtacaatttatagcctctacgcatagtccaattcccttattgggggcgcctgagggggctgttttcctcaaggtagatcgggaccaagagcggggcatctttgtagagcgtctagaggggctagagaaagagatcgaggaccttttgccgaatacggttttgagttcgcctctttttggcttgaaagatttgcggtcgattaagcataaggaggagaatcctgtaaaagtagaggatgattatgcagagattgagcgaaaggctgctcttgaagatgctttaaataaaagattggcagagttcgacttttcagaggacttaaaaaaggagcaggatgagaaaggtgaataa

SEQ ID NO: 86555 - DNA, 960 bp, Saprospira grandis str. Lewin
atgagaaaggtgaataaagatttttcagcagcacctcaaaagttggtagatcaatttgcagatgaagaagcaagtttaatcagggccaaagaagaccattcttttaatccaagaatttataacacagccataaagagtgagttagaagcgctttatcatcataaatgcgcctattgtgagagtccaatgggaacagaacagtttacggtagagcattatcggccaaaaaaggggaggaatggatattggtggctagggtatgagtggagtaatttgcttccagtttgtaaggattgcaatggccctaaggctgatgtttttaaggtaaaggggaaggatctacataactgtagtgaaaggatgaaagctcttaaaataagtcagggagggcctttccgctcattgaaaccaccttatacagatactactaaaactgctttagatagagctcaaatgcgtgctgatagtccatatttattagcggaaggtccttatttgcttcatcctgaaattgatgagcctcgagattatatagaggtccgtaaaaatggtgaaatttattcgattgaaaagggtaatcagagagcggaggaaacaattaagctagtcaatttaaatcgattcaatttgtatatgagtcgattgggtattatcgatgcggctaaatttgctattgttgaagctattagtagctcttttatcttactagatgaacttgatatacctattccagaagggaaacaaaaggaagtgctgctaactatagcaaagaggctaatagcgtcagaaattaagaagcttgaaaaaaaactagccccgaatgccccttacactttaactacttattctttactaaagaatgattgtgctttattagagaaggcattagacgatcagcagcgtgatatttttaagttggcgcttatttattacaagaagaataaagcactaaccccctaa

SEQ ID NO: 86556 - DNA, 1326 bp, Saprospira grandis str. Lewin
atggaattgaaacgcttagtcctagaaggctacaaaggctttaaaaacaggcaggaaattgtttttccagaagatcgcaagcctttggtttttgtggggatgaatggggcggggaaaaccgctttgttggaggcgatacgcttgggctgtgatgcttttgctgcagccttgtttgattcagagagcgaagggttgacaatcaatcaattatcctatatcgctcaagaagttcaatcctcaattcatatcgataaggaggaagcaagcataaagctaagctggagctatcctattgaggagccctcaacgctattttttgtccaaacagatttaaggaatggtccaactctctccgagggctatcgaagaagtcagctagctggaaatttttgggagctaccaaagcggattcttacgaacctaaatgaacgtcgaaaagactattccttgtccttggcggtttattatccctcggagcgtttgattggaaaaggggatgactatgattttgagcttgactattttaatcgcaatcagttgatggcttttaagggagctttagagcgcagtatcaactttcagcagtttttagattggtttaaggagcaggaagatttagaaaatgaactgcggattagctcgaaagatgactatagagatcgtgctctagaagcggtacgccaggccattgcatctgttttagatgattttagttccgttcggatacagcgacatccttatgtagatatggtggtcaagaaaggggagcaaaagctttctttaaaacaactgtcctctggtgaaaaggccttattgactcttgcgggagatttggccatgcgtctatctttggccaatccgggtttaaagcaacccctagaaggtcggggcgtggtgatgatcgatgagatagatttgcatttgcatcctcgctggcaggtggatgttattgggcgtttgcgcaaaacctttcccaacattcaatttattttcactacgcattcgcctctaatcatcaataggctgccccccgaaagcttatattatctggataataatgaatgttatcccgccacaagcatggaggaaataacctatggggccgatattgatcggatattggcttggcagggcgtaaaggatgttttgccaagggatattgtggataagatggatgaaatcagcctcttgattaaagataacgcattggaaaaggcccatatagagctgcagcagctaaaacaaaggatgaacagcgctcatccgactttggctgatttggaaatggatttagagtttaaacaatcagaaaatgaaatggattga

SEQ ID NO: 86557 - DNA, 951 bp, Saprospira grandis str. Lewin
atgaaatggattgataaatcaaaaccaactcctgcagacctaaaagaatggcatgactatcaattatccttggggaaattagctgcagattatgcagattccaatgtaaaaggagctgatatttataaatatctcgatcatagtcgagaaaggtatttgggagatacggaaggctatactaaagaggctctccgaaaaaccttagtcgaggagcaggcttatctttgctgttattgtggaaaacaaatagagcttaatcataaaacgattattgagcatctgtaccccaagtccaaagataaaagcaagacttttgagtacgccaacttattggcctcttgtgatgggggacagcattacaaacccttctataccctcaaggctgcagacattaaggcgagctatgaagagactcttaatactttggaggagcagctaagtttagagcgagatagccttttagccttgtatgtagagattccggtagaggaacatgaaaagtggttaaagcaattatgtgatattgaaaacctaaaatctggggatcaactgtttattgctcgtccttcttccgtacaacctcattgcgacgataaaaagggggggcatattattcccttggatccaacaatgaagactatagccacttattttgaatatctcccttcggggaaaatccaagctgccaatctcgcagacccaataaaagaggaggccgtaaaaaagacaatagatagattggggctagatgctcccctgttagaagacggccgagagagggcttttaaagaggggaaaaagtggaagaggaagcttgggcttgagtatggaagagctactccagattatgagaaggcggtcgctttttacgtaaaaaaatggaatcagcctgatgctgcagggaaattagccccctttgtatttgtgaagatagcggctctctgttcttag

SEQ ID NO: 86558 - DNA, 2256 bp, Saprospira grandis str. Lewin
atgagattttggagtgttaaggtaggtgatgagcttctcgatttgttcatagaggcagaatttattgtttatccccaaaaactaaatgaattagtttctaaggaagacttttggattcttatcggggattatggtgaggctatggcacttgctcaaattacaggagattttattcaggaatttgaagaggccgagtattttgataagcttcccaagctcaataagtatctgtcaacgcctacaagaattaaaatattcaatcctgaagaactgtttagatataagtctaggtatacgtttgaagaagttagcgatgattcaacaatcaaaaaaatactcgaactaggaagggaaagcgtatctatatctagatctgcactatcgactttaaactttttaagaaaagagcagccttctctttactttcgcttacgggctcgaaatacagcgaatatgctcaaaaagggttatttctttttgggggataaagataattgtatcatctccttttggatgggagatgatctattggccaaaaggcctaatatctacttggaaataactttcatgggggatattaagttaattctttcggctagcgataatatgaataaagcggccttctttaaaaagttggcagtaaagctaggggggatgcagtataactctaaggagggtggaaaaggcggctattgggagaaagaatatgaggtaggaaatttttctgtttggctgcaatcttttgtagatggagataaagaaaccatagatgcctttttgttgctagagcagcataagaagagccccttggggaatttgggctttattccgcaagaattttttgagcggcagttggctaaggtcatgccatatcgaaagagccttcgttacaatagttttaatgagctaattcctgactcaaccccaagcagcgccccaagtttgccgcccagaaaagagcagcattttcgcttgcagcgcttagtcttagagaacataggacattttgagcgtttggagttagacttaagcagtcggatcatctgtttattggggcataatggaagcggaaagtctacggtattgcgggctttggccttgggcttagtggggattgatgataatcccgccttagatcttcgagaaaaggaaatacagcgcttgcttcggattgacacagaaacgggaacctatcgtttggagcatccttatcggggcaagattaccgtagattatgagctagagcaagactaccgcaataaagtagagttcagcaaggaggctgggatgttttttgttggggcacataatagcatgcagatagagcgggattcatttggcttagcggcgggccttagtcaatacaagcatttgctcttgggttttccgcaattgcaggccggcagcagcaaggacgatcatgagcccaagaaggtcttagcgccaaactttaatgatgtgagtagcctgatttataatagggatcagaatcgctatgcggccttaggggagtggatcaaagacttggaggcagatagtcataaaaataatggacataatgagggggcggtattaaccttcatctttagcttattgtctaagattttggagcagcaggtagagctccttcaggtagagcatcaagaaaacttgatttggttgcagttagaggggcggaaagtaccctttcatctgcttagtcagggctttcggaatgtatttgcttgggtggggcgtttgattcggcgcttgtatgagtcggcagattatgatgcagaattttatgaatacccagctattgtcttgatcgatgagatcgacacctatttgcatccgaaatggcagcgcaagatcttagatgctttagcggaggagtttcctcgggcgcagtttattgtgagcacgcattcgcctttggtggccagttatttagaggctcatggggagacggccaaggtatacattttggattcgcctattggggggcaagaagcggccaaagcgcctagggagatcaacttcacttatggtcgggacattgccgatattttcttagagtggatgggggttaagcagcgagatgaggaagtgacccaagaaatagatgccatatttgccttaatagaggaggagaatgccgagagtttggctgaggcaaggcagcgaatagaagctttaaaactgcccgccagagatgcggatatgtttaaattgaattttgcgcttaagctagcagaagaggaattagagaactaa

SEQ ID NO: 86559 - DNA, 708 bp, Saprospira grandis str. Lewin
atgaaacagataaacaaaaggccttctgcagaagtaatagagggctataaagaactaagacgaaaaacggcaagtccagactttgaggacttaaaaaaggaagtgggggccgtgctaaaggattccttgttggcagagcagggttatctttgttgttattgtatgaacagcatagaggagcgagtgtatgaggatgggagcacggacctaaagatgaagattgagcattttgagtcacaggatggttatccggataaagtcacagactacaacaacctgtttgcggcttgtaaggggggagaagatttagatgggaaagatcgcttttgcgatagtgctaagggaaatacggaattaaagtatattcctaatcctgctagcatcagaaaaaaggatgaggagcgcagatttaatattagatataattatagaggggcgatcagctcaaaagatccaaacatagacaaggaattgaaggaaacgctcaagttaaatgcgcagaccttagttcggcttcgtaagcaggcttgggatgtattaagtagaaagatagatcgctatgatcagcgaaataagtcatgggaaacagctgaagactatgctagagatctgttagccaagctagagcagcctaaaaatggtcgttatacggcttttcagggcatgcttatcttttttctaaaaaagagatttaaagaactacgctaa

SEQ ID NO: 86560 - DNA, 1623 bp, Vibrio cholerae IEC224; identical to SEQ ID NO: 85886

SEQ ID NO: 86561 - DNA, 618 bp, Vibrio cholerae IEC224
atgattccattatcacacaataatactcctactgaacttgaaaattatgtcaaattaaaaggtcaatctttgaccattcaagatttcagtgcacatgactttcaaggagtaaagaaaattgtaagagatagactacacactctccaaggtgaactatgtgtatactgtgaaaaaaaatatagcgttgatgaaatgcaagttgaacatattaaaccaaaatcgggaagaaatgctcaacctaatctctgtttcacctacagtaattatgctgtttcatgtattcaagaaaatcgtaagactcaaacttgtggacaaaaaaagaaagataacattttatttattgagccgacatcaccatcatgcaatagtcatttctctttagacactgatggttttataaatcctcgcgggtttaagaacagaaaagaaaagcatagtattcaaactacaatcgacatgttaggcttaaataaaccacacctacaactagaaagaaaaaaacaaatagaaagattaatatacattttaaaagcaacaaaacacaatagacatgaactaaccaataaatttataaaaagtggtaattttaaatatattttacgagaacttacaatgtga

SEQ ID NO: 86562 - DNA, 1215 bp, Escherichia coli SCI-07
gtgttacttcctgatacaaataagaacataaatataaatgttgatggtaaaaatgtcataattacaggggggaatggatgtggaaaaactaggtttttaaaactactatatgagcaggtgtctgctcaaatagaacagtatgaatataaaacatatgatcaaataaaacaagaaatatcaaacagacaaaattggatgcaacatacacctccgacggatagaaattatttcagttggaaacaggaaatagctgattatgaaaaacagttaaaaaaaatgagagatatacgcattgaactagctgatttaaataaatactgtatcgatttcaatgagagaaagtctttattacgctatttcggcgctgtaagagaaaataacatatctcattcaggaactattgacagtttaaaaactttaaaggatgaggagatttcagttagtttatctcaggatacaagcaataaatttgaacgttatttggtttcgttttataactatgggagtcatttaattgctagagagaatgataaagttaaaggggataaggtagattcttggttttattttttacaaaaacaatttcggtatttatttgaggatgattcattaaagcttaattatgatgcggaggagcaaacattttatattttgcaggataacaaatctccttatagatttaatcaactttcatcaggctatcagtctattttaagtatatatgctgacttattgatgaaagttgaacttaaaggtatcacatctgatgagttatcgggggttgtatttattgatgaaattgatgctcatttgcatgtttctttacaacggaaaattttctcattttttgtaagtgccttccccaatatccaattcattgtcacaactcattctccttttgttgttcaatctgtgaatgatgcgataatttatgatctaagcacgaatgaacaacttgaagatctatcaatgtattcctatgaggcaattgtcaaaggtttacttggtgtcgatactcaatcagacctgcttaataagcaattagataaattagcattgttaataaatgatgatattattgatacggataaattacaagaggttgtaaatagcattcaaccatatgaaaatcaattagatatgagatcaagaacatttttattaatgggtaggaatgctcttttagatgcgaaagatgcaactgaaggagaatga

SEQ ID NO: 86563 - DNA, 666 bp, Escherichia coli SCI-07; identical to SEQ ID NO: 86209

SEQ ID NO: 86564 - DNA, 1179 bp, Flavobacterium branchiophilum FL-15
atgctaaagataaaaaacataaaaatcactggaataggaccaattaaaaatttggaactaactttcgataatcatttcaacattatttgtggacaaaatggtatcggaaaaacaactattttagactgtttagctcaatcatttgggttaaatgatacttctgttaaaaggacagctggattagaaaaagggaattggaatattaatgtctcaattaacaatgttagtcaatccaaatcttttgatatagttgcattccatccacaggaaaggactaatcaaacacaaggtttttatctaaactcaaatgacattattgtttttaaaacccacagagacattccctatcaacatttatcttcgctaagtattgacccacaaaaaaatattcatcaatttgcaattgaaacaatgcacggttctttacctcacgatttaaagaattggtttgtattaggccatttatggtcagctcacgaaaatcatttagatgaacaacaaatcaaaaatattactcttgcaaaagaatgttttaatattctaaactctcaaatttcgtttagcaaagttaatccaaactctaatgacattctactaaacactccaaatggagaaatttattttgagtacttatcatctggttataagtcttgtatggctgtattaattggtttaataaaagaaatagagcttagatataaaaatccaagtaagtttattaaggattttgatggaatagtatttatagatgaaattgatttgcatttacaccctgagtggcaggccaaaatatatgaagcattaaaaataattttacctaatgctcaagtctttacatcaactcatagcccacatattatacaagttgcaaaagcgaaagaaattattccactaacacttgacgaaacaaatgaggttaaattaaatcaaatcataaatcaggaatatggtttccaaggttggacagtagaggaaattttatccgatgttatgggaatgactgaaacaagaacttccacatatttagatgcaatttcaaatttcaatgttgctattgacagtgaaaattttgaagctgcaaatgcacaatttataattcttgatgctatgttacatccagaaaactcattaaagaaaatattaaaaattcaattaactggaatttcaacaaatgattaa

SEQ ID NO: 86565 - DNA, 753 bp, Flavobacterium branchiophilum FL-15
atgattaagttagacagaaccccaaaacctgtcgagcttacagcagaattacaagttgctttgacagatgaatttaaattaacaggcaaatcagtttggaacattgattttataaaaaaaggattatcaggtttttctaatgacaaatgttgttattgtgaagcaaacataaatgaagaaagtaaatatttggaagttgaacattttcatcataaagacaaatataaagatgaagttttagaatgggataatttactgccttcgtgtaaaaaatgtaatggcacaaaaaataaccacgacaccaaattagaaccaataattgacccaagccaaattgaccccaaagtccatctaaaatattggcgttatagaataaaaggctctgacgactttggtaaattaacagtttcagttctcaacttaaatgaccaagacaggctggttaaaaagagatttgaaatcggtaatgctatccaagttaaattggaacaattaaacgaattgacagacgattacattaatggcgttcagacaagtacactgagaaaaaatagaattataaatggaataaaagaccttatgaaagaagggcttccaaattcgatttattcggcgacatctgcaacagtaattttaacagacactgaatatgatgctttaaagattaaattgacttcgttgagtttttgggacgctgaattatcgcaacttgaaattgacttaactaaaacagcattaaaacttgaaaagtag

SEQ ID NO: 86566 - DNA, 1308 bp, Desulfosporosinus acidiphilus SJ4
gtgcgtatagaaaaattgtacttaaaaaattttcgcggatttgaagaacgtggattcgaattcaaaaaaaacttttctgttatctccggggaaaacgggagtggcaaaactagcatattagaaggactttgcgttgcgctaggtggttggttgtatgcgtttaatggagtggacagcaaagataaaagaaatattgcatcatctgataggagagtaattgttggaaaggttaattccgcacctctacagcagattccagttcaagtcaaatgttgggcggagattgcaggtcaaaacattgaatgggaacgcgcaattaccagtagaaatgggcgcactacacacggtggtctttggtatattaacagactgtctaaagaatataacgagaagatctactcaggaaatgatgaagacattattttgccaatagtggcttattatagctctgcacgactttggaacgaaccgattcagagggaacgtagaataaaaaaagagaaggtccgtttagaaggatataataagtctattagcttttctaattcaataaaagatgccatgaacataatcgacaggattgctcatttagcgtaccgtgaggatgatcctactagcctgcacgagattaattctattctaaatgctatacaaaaaagcattaatcactcgatgcctaatgtgaaggtaacgtacaataccaagattgcagaaatatgtgtaaccgacggaaccggcttatctatcctttattctaaactaagtgatggatatcgatgtatgattagtctgattgtcgacatttgcagacgaatgatcacattaaacccacagttgggtgaaagtgcaatagataaaactcctggtgtagtcttaattgatgaaattgacttacatctccatcccaaatggcaaaaaagcgtagttacagatttaaaaactatttttccaaaaattcagtttatcgcaaccactcactccccgtttattatccaatcacttaaagaagacgagttgattttactttctgacgcagatgatgaagtggaatatgttggagaaagtattgaagatatttcagaaaatgtgatgggagtatcgaatccgcaatacagcaaagaaaaagaagaaatgtataccgtagcacaacaattttataaggacttggatgcagtaaaaacaccagaggaaatggctcaagttgaagaaacacttaaaagattgacggcaaaatatagtggcgatgttgcctactatgcttttttggagcagaaatttttagagaaaaagttaactatggagggatag

SEQ ID NO: 86567 - DNA, 699 bp, Desulfosporosinus acidiphilus SJ4
atgcgaccagtagataaaggtgcatctccctaccaacaaattcgtgaatactcacaggcgttgccttttttggaagaacgaattggctgttactgctcgtattgtgaaatgaacattgggcatgtcccagaagtcgaacacaatattgcaaaagacagaggcggaagcagaacagattgggagaatttgttgcttggctgtaaatattgtaatgcccgcaaaggaacaattattggtgaccatcctaaagataggtggatatggccagatgaagacaatacttttttagcttttacatatgatggtggaattcccaaaataaacgaggaatacttgtgcaaaaatgggcaaacaatttatgctcaagctaaacaaatgcttgaggacttaaagcttgataatatcccgtgtagcgcaagtgataaagatcgtcgatacaaaagccgcatcaatgcctataaccgtgcaaaagaaacgctttccggttgggatagggcaaaaggtactatttatgaagatcatttcaagcgaattatttgcatagcggcaaaagctatgggattcttctcagtttggatgaatgtatataagaacgagccgattatacgtgttgcattaattcacgaattcgaaggcactgccttggattgctttgatgcaaatggtttagcaattcctcgactaaatgggagaatatag

SEQ ID NO: 86568 - DNA, 1311 bp, Corallococcus coralloides DSM 2259
atgtacgtgaaagaggtctacctctccaacatccggtccatcgagtcgctggtgtgggcgttgccggatcagccggggcctgggtggcacgtcatcattggggacaatggcgccgggaagagttcgttcctacgtgccatcgcacttgcgatggtagggccaacggaagccatcgcacttcgacaggactggagcgaatggcttcgtgggaatgagtcgcttgggaccgtcgcagtcatgatcaagccaactcttggttacgacctgctcttccggtttcctcacgttccaaccgaagcaccggtcgctgagtattccctagaactgatgttcaatcgggggcccgacaaccgagttctccctctcgacttccgttcaaacatcccgaattcaatgcagtctatttggggagtcgggccaggttggttcagtgcatcttacggcccgttccggcgatttactggtggcgatcaggagcgagagaaactgttccagtcgagccccaagctcgcccgccatttgtccgtcttcggtgagtccgtcgcactctctgaatgccttgagtggctcaagctcctccagttcaagaagctggagaaggaccccgagggaaaccttcttgagtccttaaagcagttcatcaaccagcccgacttcctgcccaacgaagcccgcctcgactcaatctcgtccaagggcgttcgcttcgtcgatggcaacggctgcgaagttcccgtcgagaacatgagcgacggataccgatccatcctgagcatgacgttcgagctgatccgccaactcgcgcgcgcctacggcgccaacaagctcttcgcgccaggagacgcaacgaccatcatcgtccccggtgtcgtcctgattgacgaaatcgatgcgcacctgcatcccgtgtggcagcgccgggtcggactctggttccgcgaacacttcccgaacatccagttcatcgtcacgacccacagcccgctcatctgtcaggcggcgaccgtgggcagtgtgttccgtcttcccaggccgggcagtgacgaagaagcagacatggtcacgggcgtcgcactggaccgactcctatacggcaacgtccttgatgcctacagcaccggcgctttcggcgacgtgcccctgcgctccccagaagcgttggagaagctcgaacggctcgccatcctcaaccagaaggaactcgcgcagggcctgtcccccgaggaacaggcggaacagcagcacctgcgtgcacaactccccactgcatccagcgcccttccgtccgatacggaggtgccgcagccttga

SEQ ID NO: 86569 - DNA, 810 bp, Corallococcus coralloides DSM 2259
ttgatccccctcccgaatcttccgctgccggagcccgccaacacgcagctcaagggctaccagcaggaaatcgattcactccctgactacgagacgcgcgtcgatcgcgcgcaagagcgattcagcagcctgaacaggaagggccatccgaccttcgacaccgtcaaggcgaccctgtcgaagatgtccgtgggcgtccaacgctgtgcctactgcgaggactcactggccgacgaggtggagcacatccggcccaaggcactgtatccagagctgacctttgcctggatgaactacctgtatgcctgcggtccctgcaacgggcccaagaacaaccgcttcgcagtcttcgctcagggaacaggcgtccatacggacgtgggtcgccgccgtaacgcccccgtggtccctcccgtcccaggaacgcccgtactgctggatcctcgcgtggaggaccccatggagttcatgagcctggagctccggcagacctttctcttcaccgccactgctgcacttggcaccgtggcgtaccagcgcgccaagtacaccatcgagcttcttggccttaacagccgtgaatcactcccacgtacgcgctaccacgcctatcgcgacttcttcatgcatctcaggggatacgtccaggaccgtgccaacggccatgcccccgaacatctcctgcacctggcacacgacatccagacgcgccagcacgccactgtctggcgagagatgaagcgccagcacctgctcatccctgagctcaaacgcctgttcgaagccgcccccgaagccctcggctggtag

SEQ ID NO: 86570 - DNA, 1308 bp, Corallococcus coralloides DSM 2259
atgagaatcgagcgcatcgaggtcaagaacttccgtggattcgcgtcgcgagccttcgagttctcgccctcgttcaacgtgctcatcggcgacaacggcacgggaaagacggccatcctcgacgcgctctccatcgcggcgggcgccatcttcctgggcctggagggcgccacgcctcccggcatccaccgcgatgacgtgcggcgcgtgatgcacaccagcggcgaggtccccacgctggaggccctctaccccgtggaggtgagatgccggggcctcatcgagggaaagagcctggagtgggcgcggacgctcgaaggccccaacaagcacaccacccatggacagacctccgacctgtccaagcggacgctgtcctggcgctcccaggtccgcaagggcaaggacgtcgtcctgccgctcatcgcctactacggcaccgggcgcctctggctgcagcgccgggcccgccagtccacggcgtcggatggagccagggtcctcaagccccgctcgcgcttcaggggctatcacgggtgcctcgacccctcctccaatcacaaggacttcgtctcctggttcaagaccatggagctgatccagctccaggaggggcgggcgctcggcacgttgggcgcggtgaagcacgcgctgcgcgagtgcatgcgggactggactgacgtccgctatgacttgcggctgggcatgctggtcgcgagcaagaaggacggcgcccagctgcccttcgacatgctgagtgacggcgcccggagcatgctggccatggtgggcaacatcgcctaccgcgccgccaccctcaatccgcacctgcgtgagcaggctccctcccagacgccgggcatcgtcctcatcgacgagctggatctgcacctgcaccccaactggcaacgcgaggtggtggacgacctgcgcaaggtcttcccccagctgcagttcgtggccacgacccactcgcccttcatcgtccagtcgctgcgcgagaacgagctcatcaacctggatgatcagtcccgcgagacgctccccagccggagcatcgaggacatcgcgcaggaggtgatgggcgtggagcttccccagcgcagccaccgccatcaggtgatgatggaggcggcgcggaagtactacgcggcgctggagcaggcgaagggctccaagggcaaggagctccagcgcctcaagcaggagctcgacgagctctccgcgcccttcagcgacgacgtcgcctaccacgccttcctggagatgcagcgaggcaaggccgggctccccggagatgactcgtga

SEQ ID NO: 86571 - DNA, 696 bp, Corallococcus coralloides DSM 2259
gtgagaccggtggagcggggggactggcccgtcgacaacgacggcgtgcgccggaccttctccgactatccggaagcgcgcggcgcgctcatcgagcgcatgggtgagtactgctcgttctgcgagggccggatgaacgccagcctcgccgtggagcacatgcttccgcaggagcatcaccccgggctcgcgcgggactggcacaacttcctgctcgcctgcgtgaactgcaacagcaccaagagcgccaagcgcatccgcctggggagctactactggccggaccgcgacaacacggcccgcgccttcgtccacgccgcggacggggtcgtgaccgtggcaccgaacctgagcccccaggagaaacgccgcgcggagcggacgctccagctcacggggctcgaccggttgccaccccacaaccccagggccagcgaccgccgctggcagcatcgcagggaggcgtgggcccgagcggaagaagcccgggactgcctcgccgcctccgacacgccccacatgcgacggctggtcatccgccaggccacggcgctgggccactggtccatctggatgacggtcttcgcggacgacgcggacatgcgccagcggctcatcaccgcgttcaccggcaccgcccgggcctgcttcgacccggtcacccggcccgtcccccgcgcgggcggcgcgctttag

SEQ ID NO: 86572 - DNA, 1791 bp, Citreicella sp. 357
atgcagcttttacatttagcgatcccacattttcgaaacctgaatgatttggtcatcgacttcaaaacgcacgtttctccgatgcctggcgcatccgcggaggccgaacccaagcgcattcgcagccacgctttgatcggtcaaaacggcaccggcaagtcgaacctgatcgaggcgctgatcacgatcttccgcgatatcgacctcaatcgcgacgcctcgcttgactacactctagaatatgaaatccgcgggcacacagtgcgcattcaagccgacacttccaagcagaaacggccctatgtttgggtggatggcgacaaagtcagccaagactacctcctcaccaatgatcgtgtcgacaagtcgccgcgcgatgaacgtcgcggcccacgtctgctgccctcgcatatttttgcatattattctggccgaaatgagcggatcgagtctcttttccaagagcaccagcgccgcttcaatcagcgccaagagatcacagcagacgaggtgctacccgaaaggcttctcgagaatttcacaggtaccgatgccgatattcgtgccgtagaggaagccaaacgccagaacgaggcgcggctaaagcatgcgggcgacgaccgtctgcgccgtttgttttactgtcgcggaggccacagccaactcgtgctgctagcatgcttgctgtcagacgacccagttttccagaaggtcctaaagaaccttcacatcgagtcgctggagtcggcgctctttgttttgaaagagccgcaccgcctgcgcgagaaacgtcgaggcggcaggtttgatgagaacgagcttaacgagggcgatccacgattttggtacgcccgcggcaatgtcgtaagcgaattcctcgacaaactatggcaggtgtcctgggccccaatcgagcaagaagctacaaagcagattgattttcgtggccgaacggaaaagcagcggcagctctatctgtttgtccccagtcaaaaaaatctccaacaactcggcgaactagtagggggtactgacagcttctttcgctacgctgaaggcgcgtatatcggagacttgatcgacgagattcgcatcaccgtcaaaaagcgtgacgaacatggcggcaaggtcggtttcacccagctttccgaaggcgagctacagatcctcacggtcctaggactaatgcgcattactcgggaagatcactgcttgttcctgctcgacgagccagacacgcatatcaatccaatctggaaactccgctactttgacgacattgaaggggttcttggagcggaagaggacaagctaacctcgggcggttcccagattctgatcaccacccatgacccgatgatggttgggagccttaagagggaacaggtacacatactgcgccgcttgggaaatcgaacagttgttgatgtacccgatgaacaccctcaggggatgggtgtaactggactcctcaagagcgaactttttggtctgtcatctacattggatatcgaaacggagcggcgtctcttcaggcgaaatgagttgtttgtgaaatctccacgcactgctgaggaagacactgaactctcccagctatccgctgaattggctgatctcggcttttcgacgtcagatttccgtgacccagactacgcgttattcgttcagaagatggctcagcatcaaaaattccgtaagccttcgcttacactcgaggagcaggctgaacaggatcgtatcgctgaacagatcattgccgaaattctcaacgaggatgtagcagagtga

SEQ ID NO: 86573 - DNA, 813 bp, Citreicella sp. 357
ttgcccgacagtgtccgctgggaagaaaaagattggacggcttggctcgaaaagtcagatacgctcgtcggggagctcgccacacttaatgttgccggaaaacgcaaagagagaaatgagcttattgacgctaacagagcgcactggggaaagctaaagccttggttgctcaccttgtccaatggaaaatgctggttctcggaggtgcgtgagctctattcacactacgatgtcgaacattttcgtcccaaaaaggaggccaaagagctcgacggcgctgagcgtgatggctactggtggctttctttcgactatatgaacttccgggtttgcggcaatgttggcaatcgaaagaaaggtgggtggtttccgctgcatcaaggctcacattgttcgaccttcgacgctccctgcgaggaatccgaagctcgataccttcttgatcctattgatgatgtcgatgtttcgcttatcgccttcgatgaagaaggaaaggcagtgcccacccctggcacgactgcttgggaacaggatcgtgtcaaagaaacgatcaatcgcttgaagctcaacgagcacgctccgctagcaggcgctcgtcgtgatatttggcaaaagattaaccgattaattaagaaatactacatggcaaaagcacgctgcggacagggtaataatgaagtggcaaaagaaagacttcgcgaggttcgatcgtgtattcgagaaatgacggcaacgagcgctgagctatcctctgttgctcgctggtgtgtgctgctacgcaacgacccgcaactgtcacttcttgttggctaa

SEQ ID NO: 86574 - DNA, 1254 bp, Vibrio tubiashii NCIMB 1337 = ATCC 19106; identical to SEQ ID NO: 86442

SEQ ID NO: 86575 - DNA, 660 bp, Vibrio tubiashii NCIMB 1337 = ATCC 19106; identical to SEQ ID NO: 86443

SEQ ID NO: 86576 - DNA, 1371 bp, Thiothrix nivea DSM 5205
atgcgcgttgaaacgatctatctgaaggaaacaggcccttttgccgagttgcggctggatttccagccaaaactggcaaaaaacaaggccgacgtgcatattctggtcgggcaaaatggaacagggaaaagtactatccttactgctattgctgctttattccagccttggcaggctcaaatggatttgggaaagcgtttgttaacgactaatagctgggttgaaggtaaaatttctggcgttcagattggattgggttggaaagctaagagacaggatattgagcagagtagagttacccctgaaatcaagttgaaacatgtaggttcagtacattcaaatgctcccacagcctgggtcaaccctgcttattataaaacaccacttcaaacttatcagaatgcggttcagcatttgcaaacaggtgcgagtaataatcttaatatcgaagattttacttttgctgcatttgcttactctggctatcgaagcatcgcttatacaaaactcaaggctattgaggaggttcaaggtaaaactctagaagacgctttgagtttccataaaaatactcaagctcattatgaaaaattaattaaatggttggctctgactaaatcaaaagcggcacttgccgcttatcgtaatgatcaggaagcagcaaaaagacgtgaaggttccattactcgcattgagaaccttattaaacaaataattgacaaaccaatagcatttgagattaccgatgaaccattggcggtaaacctacgtattgacgggcgtgtaagtgattttgacgtactacctgatggtctgaaatcaatcctcggctggattacggacttgatgatgcgcatggaactgattccatgggaaaatcagcttccgatttttgagcgtcagtttttgttgttgttggacgaaatcgaagtgcatctgcatcctgcttggcaacgcaagatactacctgtattgcaaaatctattccctcacgcccaaatcattttatctacacactcaccctttgtagttggttcggtatctgatgcctgggtttaccctctgcgtctggataatgcgggcaatgcggtattggatacgcccatcaaatccaaggcaggagtgagttatcctgctattgtggaagaggtatttgggattgatgaggaatttgatgacgtcaccgagagccagttggatgtatttgaggaaaagaaaaaagcttatctgcaaggccagttgagtctggatgcgttacaggcatttgctgcaagcatcgctcagggcagtgtggaagtgagcaatattgtgagccgtgaaattcggcaggcagagcggttgcgcaaacagcaagggatacctgctgcatga

SEQ ID NO: 86577 - DNA, 624 bp, Thiothrix nivea DSM 5205
atgagaaaaatgctacgtcccgagtgtcctgattggttggcagaaaaccagtcacgctggacgcaaacctattgccagcgtcgtgaacaaaacccttctgcgaattttgcctggccgcaacatgaaggcagaaagatcaaccataacttgcagcagcttctgggtgaatcgaccgacggccattgttcttattgtgacggcggttttcctttgggcagcgccagccgcgatacgattgaccatttcaaacccaaagaagcctattgtacggaagctttcacgtgggaaaacttgtatctggcttgtgactgttgccagcaagtcaaaagtaaccgctactccgacaatctattgcgtcctgacttactggattttgatttttccagttattttcagttcaactaccggaatggccacttggagccaaacccactggctgatgaggaaaagcaacaacaagccatcgaaactatccgcttacttggcctgaatgagcatgaacgtccatgggcacggctaagtgaactaaacaaatttacctgtttatccatggacaagcagcgcgagttgctgggtacgttcaattaccgtttccttatggaaatggaattacaggatcagtga

SEQ ID NO: 86578 - DNA, 1578 bp, Haemophilus parahaemolyticus HK385
atgaaaaataaagacattcttgaactatataaaaattgggatggagaaacactccctccatataaactaatggaattggtttctcaaaatccatttagtttgcttgatattcagattgttaattacaaagcattttctgataaagtatcagttaagtttgaagacaataaaaaaccaattttatttgtgggcgttaatgctagtggtaaaacaactatcgctgatgctattgctacatcattaagtaaaattaatagtgctatttataataagaatactgattcaggtgatgtaatagaagaaagagatataaacaagaaaaatgatccatatcaaccggctttaatagagttaaatttaggatatgctaaaactaaattaactgaagttatcgttgcaagatcacctaatggctctcctaagacaatttatagcacgctcatacaggcgaaaaaattaggtacgctatatagctatatactagctaaagataatttagatttacctctttatttattttatggagtagaacgctcatcgttaaaaactaaagataaatttgataaagcagattttatatctaaagtagaaagattaaatgcgataccacagaaactaaaaagcacattaaattttaatgattttttattatggtttaagtatttagatgatgctaataatcaagatctagtaaatgcattagaaagtgttaaaagtgaattagctaatatagaagggaaagttaatgaactagattcatatgacaacgatatattaactggattaaatgcagctaatgaattactagaaaaaatgaattcaatagcatctatttattctaaactagaaaacctaaaaaataataatgaagtagacacagaaagaggaaaacaattacagaagattaaagaaattattattacttttattccaaatatcatagatataaaaatagatagaaatctttcctatccatttatagttaaaaagcaagatggttcacaatttcctttgtcagaattgtctcaaggagaaaaatcaatcatatctttagtgggagatcttgttagacgtatgcttatcttaaacccacataaagaaaatcctcttgatactccagcgattgttattattgatgaattagaacttcacttacatccacagtggcaagaagaagttatttctaaattagaacgtacctttaaaaatactaaatttattttaactacgcatactccaactattgttagttcaatcataaatgaaaatctttaccttattaaagataatcagattatagcaggtaaacatcttgattttggtacatatggtgctgaatacgctagtatctatacactcttatataatataaatttaagatcaaataatgaaataaaagaaaaattagagcggtatttatctttagtaaatgaaaatcaatatacttctgaagaagcaataatgcttaggaaggaattagaaaaaaactttaaagggaatgaaccatctctagaagaagctaagttaattatcgaaaataaagaatgggaaaagtctttatatgaagaaagtcaataa

SEQ ID NO: 86579 - DNA, 789 bp, Haemophilus parahaemolyticus HK385
atgaagaaagtcaataagtcaagcataccaaatgctttactaaattatagaagcacaaataaatcttatacttggaaagctttcagaaaaaagaaaaaatcttataaaagagtaaaaaaacaaatttttaaagatcaaggagggatatgtgcttattgtgaacaagatttttcctgttcacaaggagatgatgactatataactcagatgattgaacatttccatcctaaaagagatattagttctaataagaattgggctttagattggaataacttacttggttgctgtacaggaggaacagaatctaataaaattatatttcctagtccagaaaatttaagttgtgataaatataaagaaatcgtattatctaagataaataatgtcgaaggttatcttataaacccaattgatatgccagcatttccttgtttatttaaaattaatcaagttacgggacatattttagcaaatgaaaaaaattgtggaaaagttagttttaacataaataattttaaaacaacagtggaacttgttaacaatactataagagtattaaatttgaattgcgtacggttattacagaagagaaaagcccacattaaaaattataataatctcattaatatagctaagaaaaaccaaaactcagctattttccaagaactatgtagccgttttctaacaaaaaagaatgataaataccattctttctttacaacataccgtattttattgtcttctcatgctgaaaattatttacaaagaaataatttttcaggataa

SEQ ID NO: 86580 - DNA, 1173 bp, Haemophilus haemolyticus HK386
atgaagatagatactatagaaatagaaaatgttggtggtatcacatctattagattagataatttagatcctaatttaaatatcatttgtggtgaaaatggtattggtaaaactcatattattgagtctatagcagcttgttttacaagttattgtgataattatctaaagaaaaaagctaattctgacaatggtctaattcaactagaaataatagatatagaagataaattcaaaaaaatacagtaccaagttgaggatttttctcctagagacaatagaggaggtaattatcatcttactgatttttggaataattattcagaaaacttaatgtattttaaagttgatagatttttctcataccaatgggttaattcattaaaaatatatgacaataaagaaaatcatattaagaaaaatttagatggaatttctaaggaaaatttaaaggattggtttattagaagcgaaatactttctgataaggattatactccagaagtagatagaagaaatatagaatttgcaaaggaggtcattacaaaactaaattgtcaatatagtttttctgcaatcttaaaagatatggaaatatacataaatactccaacaggagatataccttatgaatacttatcatcaggatttaagagctgtatatttatcatatggggcattataagagaagtacaaattcgttttccagatattgaatcaaaaacttttaacggcataattataattgacgaaatagaattacatttacaccctgaatggcaaaataaaatttgtgatgttctaaaagaagccttcccgaatacacaatttattattacaactcatagccctcatgtaattcaaactgctgaacataatcaggtagtagccttggaaggtagtaatggtattctgcataagaaaaatttagaaagtgcacgtaatggctttagtggatggagtatagaagaaattcttacagatgttatgggaatgagtgatttaagaacagagtggttcaaatcgactttatctaagtttaattcagcattagatgaggaaaactttaaaaatgctaaaattatttttgaagagttagaacgtaaattacatcctcaaagtactgagcttgcattatttagatttcagttaaaagcattaactggagaataa

SEQ ID NO: 86581 - DNA, 717 bp, Haemophilus haemolyticus HK386
atgataccattacaacagccacctaaacctgattatttaacagatgaaaaagtacaagagcttacaaataagtatcaattagacactaaaaagacagtatggaataaagcagaaataaaagaacctttattaaaatcctcaaacaaaaaatgtgcttattgtgaatgtatacttcaagaaacagattcctatagccaaatagagcattttcatcctaaatcactttacccactggaagtcgttgtttgggaaaatttattgccagcctgtgcgcgttgtaacacgcataaaggtaatcatgatactgtaaacatccctataattaatccttataatgatcttcctaaagagcatctttcaactcaaggtttgcgtctttatccaaaaactgagatgggaaaaataacaattaagcggctaaacttgaatgacaacgatagactttgcataccaaggtttaaattatgcaatgaggttcatgaaaagttagggtatataaaggatactactgatttattagatcaaagaaatcgattacattctctattgactgcttgtagtaaaagtggagagttttctgcattttgttctcatgcgctacattcaaatatagattataccaatataaagaatttgttatcagaaaacgagtattgggatgatgaattagcaaaattagatgaggaaactaaatcgattgccttagaatctagatag

SEQ ID NO: 86582 - DNA, 1326 bp, Microvirga lotononidis
atgtacgtgaaaagcttgcaggttactgacctgcggtcagttgccgaggggcgccttgatctcgtctatccaggacgtgatcaggacgagccattcgccggcaattataattggcctccgcggcttccgaacgtcaacgtactacttggcgtgaatggagccggcaagagcacgatgcttgacgcaatcgcgctagccgctctttcaccggtcatcgcggattcctcaggttatcggccctatgctctcatccggagggtagcaagaggcaaatctccgcgcgcagcgagtatggaggccgagatagtcattcacggtcaggacgtcgatggcagtcctgggagaacggatcaggttcgaactatctctgctaatgtagaaagacgtggtgatctggagtccctgaaggctgccggctcgatcgatccgatctgggatggcatgttccaggatcgatccccggcgttcctgatggtagggtacggtgcaacccgaagggtggaaagcgtttcctccattgacgaatcgacgcgttccaagacacggcagcttcggtatgaacgtgttgcctccctctttgaagaccattttacacttcgccctctcgccagttggttgccagagtggcaaagcatcaatcccggcaggcacaaacaggtcgtcaatcttattaaccgtctatctcgcaacgacgtggtattcacgggacagagggaaggccgtgaatatcttttccgtgtcgggaacaatttggtcccattcagtgctctttccgacggatacaaggcatatatcggatgggtaggagatctgctctttcacgtgtgcatgggatgtccaccaggcaagaagctggtggacaacaaaggcgtcgttttggtggatgagatcgacctgcacatacatcctgaatggcagcgcaccatgatcccaaccctagcccaagcgctacctaacctgcagttcattttcacctctcacagcccgctcgttgttggaacgctggaacgagccaacatcatccatgtcgaaactgggcctcgcggtcacgcgatcatgaaacgtccaggagaagaggtatacggactgacggccgatcagatccttcgttcagagatctttggtctcgattccactcgcgaccctggtttcaaagcacacctcgataatctggctagcgaagcggcttcaggcaaccgggaagcagcccgtctcttcatgcgccaagcggcccgaggcagcgccgctgccgaggccgtatcaagcgatcgacctgaaatgccggaatggctaacgtcacttgcatccagaaaattcgaggaatga

SEQ ID NO: 86583 - DNA, 918 bp, Microvirga lotononidis
atgatccgctatccgaaagcgactcttgacctcgtgtgcgagttggtcgacgaggaagtctcaaactggcgagcggaagcgaaagcgcgaaccgcggccattattgccgctggagcctatagcgagggccgtccatcgtggagcgacgtcaagccggtcttcatgcggttgcaatccaacaaatgcgcattctgcgagtggccgcttggcggtgaattcgcagggaaggccacccaggacgtggagcatttcagacccaagaacgcagttaaggagtggcccaagaaaccaaagaaaggaacgcctccgacttatcccttttctactggcggaaaaggcgacggttaccattggctcgcttatgatcttgggaactatgcggctgcgtgcaaagcatgcaatacggcacgcaaatcaaactatttccccatcgccggcgctgcacgaggggcctccggagcggacatagctactctcaatgctttggagcaaccttttctcatctttcctcttgggacggttgatgatgatccggaggatctgatcacattcgaaggcatcgtcgcgaaacccacacgcgacgatgacagtcacgagcgccgacgcgccactgtcaccatcgatttcttcgcgctcaattcgcgagaagagctctgggaagaccgtttccgagtgattagagaagttttctacgccttaggccaagcgaaaaccgccaaggatgatatggctgacgctgctctgcgaaccattgccgatgccattagcgaatccggcccccaggcgtcttgcgccaggtcatatcttagactgatagaggacgatccggaactcgcctgggaggcatatctagcggccgaggcttccgttggccgtgagcgtgacaagcggaggcagaaaacccagggaaagcgctaa

SEQ ID NO: 86584 - DNA, 1416 bp, Leptothrix ochracea L12
atgcgtattgaccgactggcactgcaccactttcgtcatatcgagcggcatgagtttgtgctcgcgccgcagttcaacctcgtgatcggcaccgctggcagcggcaaaacgagtcttctcgacgccttggcgattgccttgggcgcatggagcttgggcttgccgggcacccatgatccggcctcgatcggacccgatgatctgcgggcccatgctcgcaccacccgcaaacgtgttcatcctgcaacccgcatcgaagcccacggcgagatccccagccaaggctcagtaagctgggtgcgcagccggacatcgccccaatcaccaaccgacaacagccaagcggccgccttcgtccagagggtacgcattcttctggcccaactgggcggcccagcattgccagacccccccgctaccgaggttgtcgaaacggctcccgccggtttactaccgctgattgcgtactacggcagtgaacgccacatgggaggcgacaaccgccgtgcacgccgacatgctgcggccaccgcatccccccagacgcatcatttacgcgagcgccgcctgacgctgcgcatgcgtcgggcgttggccttggcggatcgcccctcgtccagtagcgcagaacttcggcgtcgcttgagcagttatgccgatgccttcgatattcgcacccaactgtcagagattgaagactggttgctcgacttggaagaacttgaggcccgcgcagtgcttgatgcactgcaaaccctcttgtcaacgggccggcaaggcgaggcggttcaactcagtctgaaccataaaacgcgccaagtcagcgctcaacgcgccgatggttggatggttgccccacgacaactcggcgggagcgaacgacaactcctgaccttgggcggtgacatgatccgccgcatcttgcgactcaacagtcacgttggcgtggaacaagccttggcacaaacggccggtgtcgtgctgatcgacgaactcgaagcccagctgcacccacaaattcagcgccatttggttgagaccctacgcaccctttttcctgcgctgcaatttgtggccaccaccaactcacctttcttggtccagagcctgcgcggcgggcatgaactgttgatgatgcgcggtcaaccaaccgccgagttgtctcatcaatcgctcgaaaccatcgcctccggattgatggaagtgggcgacgacgctcacaccagtggtcgttatcaagccatgcaacgcacggcacgcgactacctgcaaacgttgcaacttgccaagacagcacctttggatcagcgcgcaaactaccaacagcaacttgatcaaaagctgcaaccctttgccgacaaccccgcttttcaggccttcttggacatgcaacgggctgcccgactgggggaataa

SEQ ID NO: 86585 - DNA, 738 bp, Leptothrix ochracea L12
atgagacccgttcgacgaggggcctcgccccaaagcactgatttcgtcccctatgcaagcgcactggcgccgctggtgggacgcatcggtatgtattgcagctactgcgagcgactgatcccaaccaatctggccatcgagcacattcaagccaagagcctgccgaagtacgccgctttggaaggccgctggcccaacttcttgctgggttgcgtcaattgcaactcgaccaagggggataaggaggtgatcctcagccagtacctcctgcctgatcgggataacactgcgctcgcctatcaatacctccccgatggcacggtccaagtggctccgggtttaacggcggtgcgcagccgcaaagccgaagccacgctggctttggtcggcttagataaagccagtgcccaagctgcaagcactgccaatgaggttcaagttgccttggatcgttgtgcccaacgccagcaagcgtggtttgaggccagcgtggcgcataccgagctgcaagcccaacctgataacgacttactgcgccgcatgatcgtgcgtcttgcgcaagccagaggcttcttcagcgtgtggatgacggtctttgcggccgacagggatatgcgactgcgtctggtacaggctttccccggcacgttggaaagcggctgcttcgatcctgtgagcaccgtccccgtcaaacccgcgccaaaccccgacaaactggtcagcgggaagaaaatctga

SEQ ID NO: 86586 - DNA, 1299 bp, Emticicia oligotrophica DSM 17448
atgagaattacacgcctcgaagcaaaaggaattggcccatttgaagacttaaatattgaatttaagccaaaacctgcgggcatggaaaacaaagccgaaattcatattttgactggtgaaaatgggactgggaaaagtacgattttgatgcttctaagttgctatgccgataaaacgaatgacaatttaattctctctagattcagaagtaaaaaaatagtacaaagtgttttagacgagggactgataagtaggtttgatatttactcagatgaggcagaaaggtttcaatctttttttatttattcaaatcaaaatatatcaactgttaattatgactttacaaaaaaagttgatagaataattttaaacaaggaaattaatgcgagatatttattttttgcatactctggaaatagagaattagaaactaaaaatgaaattaaaattgctgaaattaatgagtctccaatttttgatactttaaattttagaaaaaaaataaactttgatactatccttaattggatagcaacaaacaaagcaaaagaagcttttgctttgttgaaaaataataatagttcagcccaaaaatatgaaaacagtttgaaaaaaattgaagattctatttcaaatattacacaaaaagcagtagagtttgatattgaagaccaaccgtttcgagtatttttaaagattgctaataaaagcttagatttcaatattttacccgacggtctaaaatccataatctcttggttatcagacctattgatgcgtttggatagaattgattgggctgataaatctaaaagcattctcgaacaaaactttattcttttcttagacgaaatagaagtgcatcttcacccatcttggcaacgaaaaattttacccgttgtacaagatttatttccgaatgcacaaatttttatttctactcactcgccttttgtagttggttcggttgacggggcgagagtttacaagttcaagttagatgagaataataatagtgttttagatagtgagtattggacagaagatggcaatagttatgaccgaattttagaagaaattttcgatataaaagaacgttttggggttggtgttcaaaagcaattggatgagtttaaagaatataaaatccaaatattgaaaggaaaaaccattgatgaagaggcttttatgaaattagcaaatgaaattgccaaacaaagtatcgaattaaatggaattataagttttgaacttcgacaattaaaaagaaataccacacaaaaactcgaaactgcctaa

SEQ ID NO: 86587 - DNA, 621 bp, Emticicia oligotrophica DSM 17448
atgaggaaattgataagacccaatgctcctaattttttgacagaaaagctacaaatagaattaggtgagcgttataaaaagaatagagaaaaaaataaaggtcaccagttcaactattggcacaccgaaaaagtcggagaatcaacactttacaaagaaatacgaaacaaacttatcgaaatctcagatgaccattgtttttattgtgatggctatcctccactgagcgatgacgacacaattgaccattttaaaccgaaatcaaagccagagttttacgatttggtttgttcatgggaaaatctatacttggcttgtgggcattgtcaaaaagcgaagggttctgaatacaatgatttaattttaaggcccgatgaaatcaactatgagtttgataagttctttaagtatgactctgataatgatgaagttatagtaaatctcggagctgacgacttgagccagttgcgagcagagaaaacaatagaagtatttgatttcaatcatgtcggtttaaaaaagctgcgtggtttctttagaaaagtatatagtcaagacccccaaataaacattaatgaccttggttacagattttgtttaaactttcaacaaacaatatga

SEQ ID NO: 86588 - DNA, 1248 bp, Emticicia oligotrophica DSM 17448
atgcttttaaaacaactttcactccgaaacttccgtggacttgatgaaacatcaattagttttattaatgatacaggcaaacctcgcctccagacattgcttttgggagaaaatggaacaggtaaaagtacaattctaaaagcaattgccttgattggtgctggaagtaattcattaagcgaattgctcggcaaccccgatgaatggattagttttggcgaaaattcttgcgaaatcaaggctgtttttatgacaaaagaaaaaaagcctaaagaacgagaaataagtctgaaaataaacaggggagattcgataaaagatattttggtaaataatactgattcgcttgatgagatagaccgagccttatcacataccgaccgtaattattttattttgggttatggggcttctcgaagactaaataaaaatcagagttttaatcaaccgagtagtttttacaacaatgaccgctcggcaaatgtagccacattgtttaattctgatgctaacttgtacccgttatcggcatgggtaatggagcttgattatagaagtgatggcgaagctcttgaaagcattaaaaatgcactcaacgaatttctaatcaacataaggtttgattcgattgataaacaacaaaaaacattgctattttcaaatggaaaagacttgattccgattcatttactaagcgatggctaccaaaatgtgagtggttggattggcgatttgctctatcggatttttaatacttttggagatagacaaaatccgttaatgactaatggtatattactgattgatgaaattgaccttcatttacatccaacttggcaaagaagacttttgggatatttgaaaactaaactgccaaatttccaaatcattgcttctacacactctccactcacagcccagcaagctggcgaaggagaactaatagttctaaatcgaaccaaaaataatcaaattgatgcccaactttttaaaggaacacccaataaaatgttgctgcatcaagtgttgctatcgcctatatttggtgtacagtctgatgaatcttacgaaacggagcaactaaaaaacgagtacgaaaaccttaaaaacagaaaaggtagcaaggcacaagctgataaactgagtaaacggattcaggcgattccgcaggtaacacgtacaaatatggttgcagatgctggtttggttgatttgttgaacaaaataaatcaagaattacagcaatga

SEQ ID NO: 86589 - DNA, 852 bp, Emticicia oligotrophica DSM 17448
atgatagcattggagcgagttcgaacggcagataaagtgcataaaaatttcacaggggcaaggcgagttgcttggaataaagagttgttgatacggcaaaaagaaattttggctggtaaatttgaagcacataattttgttcaaaataggtggaaagtagccaaagaacaactatttgccgaatcaagtggtaaatgtgcttactgtgaagccgatacgagagtggtaagtcatggagacgttgaacattttagacctaaaagtaaatactggtggttggcatactgctatgataattatttggttgcctgccaagtttgtaattcagtttataaaggtaatgactttccattgtctgatgagttaaaggctttatcaccaccaactttaaccatttcaacaacaaatcaagaaattgatttgttagctcttactattaaccctgaccccattgataatagtggattaaaactaacagaattcgtaaaagcctatcatatcgaacgtcctcttttacttaacccttactttgatgacccatcagaatattttgcttgggaaattgatgctgtcttaaaacatattatcttgattccccaaaaaccaaaatacaaaccttacattgaagctgcagaaaaatactatggtctgaatcggaaagaattgaaagaatcaaggtattttttttatgaaatctataatacactttatcaagtattatttcaaaatattgatagaatcagtgaaaatactcgtcagcaaatcgaagatagaatcgtaaaaatgaaagataaatcagcaccttttgctggcatgattcgctattttgatttgaaaaatcgaggattttaa

SEQ ID NO: 86590 - DNA, 1398 bp, Salmonella enterica
  subsp. enterica serovar Senftenberg str. SS209
atgagaatcgacaaactttcactgcttaactttcgttgcttcagacagctcgatattacttttgatgagcacattacgattctggttgcaccgaatggcgcgggcaagacggcagtgctagatgcgatacgcctggcgctgtttccctttattcgtggttttgatgccagcctctacgtaaaagataaatcgctggcgatccgtacagaagatgtacgtctggttttccgccccgaagcgctgaacatggaaatgtcgtctccggccatgattacggctaccggggaatgggaaagtggaaaaacggcaacctggatgctcgacaagcgaggagaacagccgccgcatgaagataagacagcggcgcagcttacccgttggggtgaacaacttcagacgctggtgcgtgaagagcataatttgcagcaggttgagcttcccctaatgctttatctggggactgctcgcttgtggtatcaggaacgttatgaggcacagcctactgaacagcgtctggataacagcgccttttcacgtttgtctggttatgacgattgcctttctgccacatcaaattataagcaatttgaacaatggtatagctggttatggcttagctaccgtgaacatcaaatcacacaacttgaatcaccttcagcaaagttaaaagaaggtgttcgtgttcagcggatgaaagaagctattcaagccatccagcaagccattaactgtctgacgcaggaagtgacaggctggcacgatctggaatacagttccagccataaccagcaactggtgatgaatcacccgcagcacggcaagatccccttatcccagctcagtgacggcctgcgtaatgcggttgcgatggtggcggatatcgcgtttcgctgtgtcaaactcaaccctcatttgcgcgtcgacacagcgttaaaaacccaagggatagtgctgattgatgaagtcgatatgttcctgcatccagcctggcagcagcaaattatccagtctttgcgcagcgcatttccgcagatccagtttattgttacgacccatagcccgcaggtgctcagtacggtaaaacgcgaatccattcgtctgcttgagcaggatgagaatggcaacgggaaagcgttgatgccgctcggagcgacctacggcgagccgagtaacgacgtgctgcaaagtgtgatgggtgtcgatccgcagcctccggttaaggaaaaggccgatctacaaaagctgacggcatgggtggatcaagggaagttcggcgagccagaagcacagcaactgatggctgcattgcaggtggcgctgggtgatcaacatccgcaacttcaacgcttacagcgcagtattgcccggcagaagctgttgaaagggaaagcgcaatga

SEQ ID NO: 86591 - DNA, 726 bp, Salmonella enterica
  subsp. enterica serovar Senftenberg str. SS209
atgaggcatgtgatcaaaacccgacgtggaacggatgccttactcactgcacatgagcaaccaccacaaaattcagatcaatcaactcgtcgctggcatcgctttggtcgtgagaataaagcagccttaatgactctgcttctcaatgagcaatatcacctttgctgttacagcgaaatccgtgctgatttgcgtggcctcggctatcacattgaacacgtcgaaaataaaagccagcagccagcgcgaaccttcgattatcaaaatttcgcagccagcgcgttagactctgagaatggtttgccccagcttggcatcaacgcgttcggtggtcacgcacagggaaagaataaatctgtggatatggcaaagtttattcattgtcacctccctgactgttctcgttattttgcttacctttctgatggccgaatagtaccggctgatgagctaaatgcccaggaaatggagagggcagagtacaccattgatctactaaatctgaacagcggattccttcaaacggaacgtcgtaatcattgggaagagctggaacagctttttgaggaacatattgaaaaaggctgggatctgcaacaattacttcagcttgagctggtcccttcgccagatcataaactgcatgaattcttcagcattacacgccagtttttccagcaagaagctgaacaggtattacagatccacgccccagcattaatttaa

SEQ ID NO: 86592 - DNA, 1335 bp, Pseudomonas fluorescens SS101
atggaaatcagaaaaattcgactgaataacgtcggtcgttttaccgacttggaagtcgcctttgcgcctaccgaaaagcatgcctcgaaggtgacggtgtttgtggggaataatggggcggggaagacgacgattttgaagtcattggcgacttctctcagctggtttgtagaaagccttcggacagagcacgggcgcggagaaccgattgaggacgagctcattcataatgacgctggtacagcgatcatggaaattgaggttgcttacttcgataataaaaattcgctgtgggttttgactcgtacacagagaggactaaaacccgtaggtcgcaacgacctaactgatgttcgaaatttggcggacaatattagagacgttttaactttctctgatcgcaacgtgtctttaccgcttattgcctattacccaacagaacgctcagtattgaaagtcccgctggaaatcaaaaaacgaagaaccttctatcagctggatggctacgataagtcactcaatcttggcgtggatttcggtcatttttttgaatggtttcgagaccgtgaagatatagaaaatgaaggtgcaatttctcgttccacgatggaaaaattatcaattaaattaggtagaaacaacgcattctggaaagaaattgaatcggtcaacgctcaatctcaggatagtcagctaaccgccgtgcgaaccgccatcgccacctttatgcctggttttagtaatcttcgtgttgtacgccagccaacattacagatgatgatagacaaggccggcagcccacttagtattttgcaactgtctcaaggagaaaagtccctgatggcactggtaggcgatattgcccgtcgcttagccattatgaatccgtcactgagcaacccgcttcatggagaaggcgtcgtgctgatcgatgaggtagacctgcacctgcacccgcaatggcagcgccgcctgatacaccaactcaccgaaaccttccccaactgccaatttatcctgaccacccactcccccttggtaatcagcgataccaaagacgtcctgtgctatgtcctcgacgatggcgaattggaagaacgcaacggtctctacggcctcgatgccaatcaggtactactcagcgtcatggacacagatgtgcgcaacagcgaggttcagtctcgactggatcgcttgttggaattactgcaagacaaaaaactgaaagaagctaaagccctattcgaagagctgtccaccgacctaccctcaggccatatagagttggccaaggccgctcttctgattcgcaagctggagttgcgcagtgcgtaa

SEQ ID NO: 86593 - DNA, 549 bp, Pseudomonas fluorescens SS101
ttgacccacgaagaaagaaacagtattcgcctggcctgtatcgaagagcaacacggcttgtgtgcatattgttgccatgcaattacccaagagactgcccataacgagcacgttgcggccagggacaccactccccagcgcgcgctcgattattcaaacatcgttgccagttgcaaccgcactaaacagtgtggcaaagcccatgctcatcagacgttgccactaaactctctgatggatgaatgcgaaaccgagctgaaattttatctctctgggcgtgttgaaggtttgagccccagggcaatcaagtccatccaagtcctcaatcttggcgattgtcgtgaaaacaatcgcacactgttcagtgccaggaagtccattttggatacgctgcttttcgattacggtatggaaggcaatgaccttcaagccgaaaacggcgatcttctgcaggcgctactggaagacttgaggttgccagatacgcagaatcgtctaaaacctttctctcccgttctggtaaatgtcctccgccagctcaccagctaa

SEQ ID NO: 86594 - DNA, 2310 bp, Pseudomonas fluorescens Q8r1-96
gtgcaacgattcgaacgcagtagtgagccgccacccggcctgttgcagagtgaagagttcaacgctcagcgtcaggagctagtcaattatttccgaatggatgaggagaggagggcccaaactcgtgttccaagtttccggcttggattggatcatgagtcaatcaaaggggcgcttaaaaggctctttcgtggtaaatgcgctttttgcgaaagctcaacaagcactaccccttaccgctttcgtcctactagcgatgcgttgccgatgaggcgtagtccggacgctcacatgtattacgcttggttgagcaatgcatgggaaaatctctatccaatctgtaagggatgttatcccgagcgccccgagcattttcctgtcaaaggtaaacgagctgcactgcccaccgcgattcaattacaaacattcgcggaggaagctctcgggctatggcgtgaccacccccctaaggaaaaaaacctcctgcttgacccttgcgagtcgggctcgtttgttcgtcatctgacggtcgatcttgacggctatttgttccctcatacggaccgtgcccaagaaaccattaaccattttgacctcaatcgcgatgagttgtatgaaatacggggccagcgagttagggcgtatttcgacgaattaattgatagggtgctgcctcagatgcgggaggggcaggatcgaaggattcgactgttcgattttgccgagctggagtttggtgggctgtggtatctaatgtgtcgccagatcattatctttttgacgggaaataacccgcaacgtttgtcgttgtcacctatccgcatagagcaggcatttcagaaggttgctaaaagcgtgattggtcaagaagtcgaccgcgatgctctggaggaatggctcaacgacccgttgcgtgacatgttcactgaagactctcaactgggacgagcctttacagagtctcctcccaccttggtcgccatttcgctgacgaacttcaaagggattgagcgactcgagttaatcgtgccatcggcagaggcctctagcgcagaacaggcagccccgctcaaacccgccttgctgattttgggggaaaatgccgcaggcaaaagctccatcctggaagccatcgctttagcattgtcgagcgatgaggcgcgcgccgagttgaaacttgatgtgtcggctttgccgcttgacccagaactgttgggtgagcgttcggctgcccggcgcgggttggccacagtggatctcagattcgacgacggttcgagccgaacgttgaccatctccgatgcgcgcttctcgatggagggtggttctgaggtgccccctgtgttcgcctatggtgccttccggcaatatcagaagcagatacggcgctacagttatggtaagtcgatctcgaacctgttccagtctgacaaactgctttccaatcccgaaaaatggttgttggggttggaccaggaaaatttcaacaatgtggtgcgggcgctgcgcgtcatcctctccattgagggcgagtttgaggtgatggagcgtgatttcaacaaccaacggtgcctgatcgtcactgctgcccctggccatcatacgcataatcggacgcctctgagcctcgcatcctcgggctaccgatcgatgttggcgatggtctgcgacatcatccaaggcctgatgagcccgcaccttcatacgtttgtcgagagcctggaaacggcgagggcggttgtgctgatcgacgaagtggaagcgcatcttcaccctcgttggaagattcaaattatgcaggccttacgcagtgccctgccgaatgtcacctttattgttacgactcacgatcctctgtgcctacgaggtatggagcctggcgaggtagttgtcatgcagcgggttgctagccagcaaggcgtcgacagcgagtggcctgtgatggtggagcaggtggtaagtttgccggacctaagccaactgaccattgagcagctgctgacttcggacttcttcggtctagcgtctacggatcagccgggtaccgaacgcgagctggccatgtttgccgacctgctggcagcaaaagagaggcgtgaaccgctcaccgcggaccagcaactggcttggacacgctttgagcaggatatccgcgaggccttgccggtgggagctactgaagtgcagcgcctggtgcaagaagcagtgacggaatatctgaggaatcgtcggcagatgtctaccgaaaatctcgggaagttgcgggagcagtcccgacgggacattgtcgctatcttggaggcgctctag

SEQ ID NO: 86595 - DNA, 1014 bp, Pseudomonas fluorescens Q8r1-96
atgcgtttcgtcatccgtaaaaaagcccaaaagcctgacgcgatgactggggacgattcaccggccgcacgtgaattggacaagttcagacgatatttcgaggcgccggatgacaaggctccgtcgttcgcggtgtacaagtccgacagtgtaaagaaacggctcgatgagctattccacggtaaatgtgcctactgcgaaagcttctatgcctctacagcccccgtggacgtcgagcactacagaccgaagggtgcagtccatgaagacgcgacgcaccaaggttactggtggcttggtatggactgggacaaccttttgcctagctgcatagactgcaaccgcaagcgcaagcaaatgatgccaaagctatcggccaagctactgaccctgcaggaggtggggcgcggcttcagccaaggcgtgctgatgtctagcggaaagaaagatagctttccggtgttgggaacgcgtgcaatgaccgaagcctcggctatcgccaacgagtatcccttgctccttgatccctgtcgcgacaagccggacgagcacctgcgattccacattgatcgaaccaaccttattagcttggtccttccccaggctcatgcaggggcagaccttccggtgatgggcgttaacggggcagatgaggcgactagggccgtgatcgacgaagctctagagattgggctgagtctgaagggggtagtgtcaattcacgtctatggactcaatcgtcttgggctcgtacaggagcgaacgcgcctgttacgtcaattggagttcctagaaacgttggctctggatgtcggtgttatggctcaagagctcaagcctgatccggctcagcccaagtctactgatgcccgtgatgagggtattgtccggcgactaaatttgctgcaggagcaagttctgcgagaaatgaaacgcatggcgaatccggaagcaccatattcggccatggtgcggacttggattgaaggattcaaagcgcgcctgcttggctga

SEQ ID NO: 86596 - DNA, 1458 bp, Pseudomonas sp. M47T1
atgggcacgcaggaaaacatgacgagtgccggaagaaattcgctacggctttcccggttgcggctgcgtgatttccgctgctttgaaacgatcgatatcgactttcacccgcagctgacagtgctggttgcggccaatggcacgggtaaaacgtccattctcgacgccatcgccatcgccttcggtccgtatgtaggggcgtttgacgaggctgtgggcaagcattttgagccgagtgatattcgccagtttcgtgccaggcaaaccgctacaaacgaaatggaatacgcccctcagggggctaggctcgaagccacggggtttattcccggcagcctgctcgatcaactgtccgatgatctgctgcccaccatttggagccgtcatctctccagcacaaccaagaccaaaacctcggtcaaagacgccaaggaattggtgaactatggcaagcgcatgcaagaagcgtcgcgcacgccggacactgaagtcgttctgccactcatcgcatactacggcactgggcggctgtggcagcagaaaaaactgacagatgcgaagaacatccaacgcacctcaaggaccgttggttataccgactgcctcgatccggcctccagctataaatcgttcgtgcagtggtttcgctactggagcctgaatgccaagcaagcccaactcaaagcgcttgaagctggagtcagcattgccaatactgaattcgacgcctacgtccagtcagtgagtcgcgcagtgaacgcttgcatccaaccggcaggctggagcggcatcgagtactccttcacccgcgacgcactggttgctcgccatgagcaatttggcgaactgccagtcgagtggctcagcgacggtattcgcaacatgatcggcatggttgccgatatcgcattccgcgcgaccaaactcaacggccacctcagtgcgcaggcggcgcaagagacaccaggtctactgctaatcgacgaagtcgacatgcacctgcatccggattggcagcaagtggtgctgctcaacctggcccaggcgttcccggccatgcagattatcgtgaccactcacagcccccaagtgttgagtacggtttcctcggaatgtgttcgaatcctgcgcactgaaatcgatcccgagaccaccagccgagtcaccaccgtcagtgagccacaatggcagacccgcggtgtcgccagctccgacctactggctcgtattatgggtgtcgacccgataccccatgtgcctgaggccatctgggtttccgattatcaggcgctgatccagcaaaatcttcatgagcaacctgaggggcgcatattgagagacaagctggaggcccatttcggagcggaacatccagtcattcgcgagtctgaccgactggttcgtttgcagggcattaagcaacgtctgccacgtgaccttggcaatggggagcgttga

SEQ ID NO: 86597 - DNA, 660 bp, Pseudomonas sp. M47T1
atggggagcgttgaggtgcgtcatctggatcggcaggacgacccgccattgggcctgaggcgttaccggcacggccaggacgcctggagtgccacttgcccgacacaagaggaacgacgggctatatggctggcgctggacttaatgcaagggtctcgatgtgcttactgtgaggggcctattggtgagggaaatcgacacatcgaacacttccgtcagcgccgaagttatcctcagggtacgttcgactggagtaacctgtttggttcctgtaaccgcgccggcacttgcggcacggccaaggaccgatgcggaacgtacccaccagggacgctgatcaagcctgatatcgaagaccccgacgcgtttctggtgttcacccccggtggcaccgtggagccacgggcgggcctgagcgtgggcgaccatcttcgtgccagcgaaaccatccgcattctcgccctggacggtgccctgaatcagattcgtcgcgctgaactctgtggctacatccagaccatggagtattttgtagagtacgccgaggcgtttcccgacgacgagggttgggttgaggagctggagcgggaagtgcgagaaaccgcgcatttgccatacgcgacggcaataaggcatgtgctgactcgccagagcgagtga

SEQ ID NO: 86598 - DNA, 1251 bp, Escherichia coli CUMT8
atgctcaataaaagcaatgtaataaaacatatacatgtgttacttcctgatacaaataagaacataaatataaatgttgatggtaaaaatgtcataattacaggggggaatggatgtggaaaaactaggtttttaaaactactatatgagcaggtgtctgctcaaatagaacagtatgaatataaaacatatgatcaaataaaacaagaaatatcaaacagacaaaattggatgcaacatacacctccgacggatagaaattatttcagttggaaacaggaaatagctgattatgaaaaacagttaaaaaaaatgagagatatacgcattgaactagctgatttaaataaatactgtatcgatttcaatgagagaaagtctttattacgctatttcggcgctgtaagagaaaataacatatctcattcaggaactattgacagtttaaaaactttaaaggatgaggagatttcagttagtttatctcaggatacaagcaataaatttgaacgttatttggtttcgttttataactatgggagtcatttaattgctagagagaatgataaagttaaaggggataaggtagattcttggttttattttttacaaaaacaatttcagtatttatttgaggatgattcattaaagcttaattatgatgcggaggagcaaacattttatattttgcaggataacaaatctccttatagatttaatcaactttcatcaggctatcagtctattttaagtatatatgctgacttattgatgaaagttgaacttaaaggtatcacatctgatgagttatcgggggttgtatttattgatgaaattgatgctcatttgcatgtttcattacaacgaaaaatcttctcattttttgttaatgccttcccaaatatccaattcattgtcacaactcactctccttttgttgtccaatctgttaatgatgcgataatttatgatttaagcacaaacgaacaacttgaagatctatctatgtattcctatgaagcaattgttaaaggtttacttggtgttgatactcaatcagatatactcaataaacaattggataaattagcattgctaataaatgaggatgttattaatacagatgcgctgcaagatgttataaataaaatccagccatatgaaaaccaattagatatgaggtctagaacttttttattgatgggcaagaatgctcttttagatgcgaaagatgcaactgaaggagaatga

SEQ ID NO: 86599 - DNA, 666 bp, Escherichia coli CUMT8
atgtttaatgttattagaacttatccagctccagactgcatagctcgaaatcgttataatgatactgacgttactgaggttctgaagccattattttatgcaaaatgttatttgtgtgagagaaatgaagttcaagatgctgaagtagagcatcttataccacatgaaggtgatgataatttaaaatacaattgggataatttgttttattcatgtagtagatgcaatggaataaaagggaataggcataaaaatatcctaaactgcactgattcatctattaatatctttaatcagataatttgtaagatgccatcaatgcctgatgatgatgttgttattcttccaaatataaatccaccaactttaagcataatcagtactgtaggtctattaaatgaatgctataacttgaaaaatactggtctcagaaaaataagcagagaaagtctcatcgaacaaatgtttttttattactcaagatttattgaggctagaatgactctcaaagatcctagcaaaggttcttctagaaagagagatgcagaggaaatgctggaggcaatgttaaagactgagcatccattttcaattttctggcgttggcattacttgggggatggtttcctaacagcaaattatcccgatttaagagttggtttttaa

SEQ ID NO: 86600 - DNA, 822 bp, Rhodanobacter sp. 115
atggttggctacacgcactgtctggaatccggttcggacttccgcttgatggcggactggtttcgctactggagcatcagtgcgctggagcaccagcagaaggtgttgcaaggcctgcgcgaagctttgccatccagtgccgatgacgccatcgaagccgtgcgcaaggcaaccgactgctgcctgaaaccctcgggctggagccatctcgacttcagtcttgatctgcaggaactggtagccagccaccccgatcatggcgagcttcccgtgggcatgctcagcgacggcatccgcagcatgctgacgctcgtggctgacattgccttccgcatggtcaagctcaaccccaatctcggcccatatgccacaagccggaccaatggcatcgtactgatcgacgaagtggacatgcacctccatccgtcatggcaacaaactgtgttggggtcgttgcgcgaggcgtttccgtgcatccagttcattgtcaccacacacagcccccaagtggctacgaccgttccggcagagtccttgcgcatcctgaccagcgatggcgtgatggcagctcccgcaggcacggaaggcgcggaggccggacgccttcttgaaagcgtattcggcgttgatccacggccagagcacaacctcgctacgaaagaattgcgccggtacttgaaactggtagatgacggccagtggaagaccgatgaagcgctgggtctgcgaaagaggctcgatcagcgctatcaaggcgaagagcccgcactgctcgaagccgaccttctgatcgaaaacaaggagtgggagcaacaagcgtga

SEQ ID NO: 86601 - DNA, 735 bp, Rhodanobacter sp. 115
atgcgtaatgacgcacactggggcggccagatggcatacaccgattgccgtgacagggtgctcactgatcaaggtggtctctgcgcgtactgcgaaatcgacatcggcggctacgatccgttgaagtgtcgcatcgagcactttcatcccaagtcggatgtgaatgccgcacacaactgggcgttggactggggcaacatgcttgccgtctgcagtggcggcagccaatcagcgcttagcgatccgacatacttcctgaaaccgctccctgaaaacctcagctgtgatgcctacaaagacaggcaagtccagtctggtgcgctcaccgccgactgcgccggatggatcctcgacccgcagcagatttttgccttcccgtgcctcttcaaagtaaacgcatcggacggctcgatcgaaccagatgacgttgcctgtggcaatgcaccaccggcgccggacaatcatcacgccagcacgttcgatttggtcaagcacaccatcgacatgctcaacctcaactgcaatcgactcatgcgcgctcgccttgtggtggtacgcgctatcgagagagccaagaagcagcagcgcgacaaagggttcaacgctcaacaaggcttggccaatctcgcaaagagctacctccaacgtccttggcccggattcttcaccacgatcagattgcaaatcggccaagccgccgagcaatacctgcgtcagaacaatttccaaggctga

SEQ ID NO: 86602 - DNA, 1335 bp, Pseudomonas chlororaphis O6
atgagtagaagactgactgcaatcgactttgatggtggaatggtaaggctgacccccgaacacgagtcagcagggattaccaatactttcactgttattgtcggtaaaaatggagttggtaaaagtcggctcctagcagaacttaccaatgtaagtgtcgggttagaataccattctaaggtaattgcagtatcaactagtccttttgacaagtttcctagtccgcgccgacgaaatggtgtctcgaacaagatttatcggtatgtgggaatgcgtagtgaaggtgtttatcaagtctcatctgcggtgtctctaatttcttctgctgctaaagggcttcttgagaaactatctagttgcaatggcaaccacgatctggaagcggtatttgaatcgctgagtttttatccggtcgttgattttgtacttaagccgggataccttaaatccggtgttgacaattatgatgtttcccgagtggaaggaagtagcttagccatcgaactaaggcggctagatcgtgagtatggaattcaagttgatgagcgctattatgatcttctggagaaccttccattcggacgaaggcttgaagtttttgattcaatggtgaaaatcaatgaggttctacagcaccgtagagctctcgagttgaaagctcattttgcagtttcgttactttcgatcgatggtaaagatgctgatagttcctatgttcgtgcgattatagttctcatggatgtaggtttaatgcgtttgatagatttaagattgcaaaaaaagaacttcggtgaattgtctctcaaaaaagctagttctggagagcagtgcctgttggtattgattcttggaattgctggacatattactgatggagcactgattctgatagatgagcccgaaataagcctgcacccgagatggcaggaagagttcatgattcttctaaccacttctttcgcaggttaccgaggctgtcagtttgttgtcgccactcactcgcctcaagtcattgctagactcaaagggccaggttgttacattacctcactgtcaaaaagggagctctatagtgcggagcaatttcacgataagtctgccgatttccagttagcagagttatttgatgcccctggtataatgaatgaatatatatcaaggctagctttcaatttgctggcaaaggtcaagtacagcaagaggatggatgaagcatcacatgaggagttgaagcgcttgctcgagtttaatactcagcttgagcaagacgatcctgtcaaagaactcatccattcggtcgccacgctgtgtgagacttatgccgataataaatga

SEQ ID NO: 86603 - DNA, 606 bp, Pseudomonas chlororaphis O6
atgccgataataaatgatgccgtaactcttagtgaagaggcactgagcctgattcaaggcaaaatgcaagctgaagatttttctcacgaaagttggagcgatgaggatcttcttcctgtaagacgagaaattcgagagttttatcgaaatgcccagcgattagtttgtgtgtattgtctcggtccagtttcaaaccgttctgctgctggcgcgcctatagaacatatcgtgccaaaatcccagcacccgggtttcatgtttgaaccgaaaaacttgtgtgtgatttgtccggactgtaacgaatataaatccaagcgggagacattggcggatcccgttttgatagccagtagggtcaattatcctaccaatacggacctatttcgcatagtgcacccacactatgatgagtatcatgaacacatctttaagtgtgaaagactgtatgtagagtgctctgataaaggaggctatacaatttatgcttgtaatcttaataggttttataggcgttttgggcgatgtgatgaactcgttaatgatgtagcgctggttcaacagtcagagcgattttatgaggaaggggttgtcgcgatacaaatatag

SEQ ID NO: 86604 - DNA, 1599 bp, Belliella baltica DSM 15883
atgagaatagacaaggtttatatagagcaatttaaaaatctgaatcaatttacgattgatttggatgagaccaaaatgcagacagtgcttttgggtgaaaacgctgctggtaaatcaaactttttggaagccttggtaattatctttagagatttagaccttgaggaacaaacaagtttcaattacaccattgaatacaaatgcaaaggcaacttgataaaagtaaatggtggtccagatgttaaaaacaagtatggtttattccttggtgagaataaaggagatgaaattatttactccacaattgtatccaaggctgcggtcaaaaagaataaggagctttatttgccaaaatatgttttttcatactactcaggagttagcaaccgactattagaacattttgacaaacatcaattcaggttttatagagaccttttaaaaggcatagattcccctcctcgcccgcttttttatgctagactaattcacagccatttcgtgttaatggctttttacggattccccaacgaaaaaatcaatacgttcctagaagattatctgaatatcgttggactagaatcagtactgtttgttttgaaaaagccgaattggaaaggagatacagaagaaggagacccgaaattttggtattcaaaaggagtagtaaaagaattcctaaatgacttgtgggatgcctcaattgctccaatctaccatagagacaaagtaagagaggatttcaacaaacatccagaccaagaacatttgtatttgtacatttccaatgaagaaaaactaaaaaaaatagctgagaagtatgggacaaatacagaattctttaaaagtcttgaaagcacttacatatcagatttaattcaggaagtacgagtaaaagtcaagaagaaaaatattgatggtgaaataacctttaaagaattatctgaaggcgaacaacagttattgactgtcttgggtttgttgcgattcacaaaagaagaggaatccttaatcctattagatgagcctgacactcatcttaatcctttgtggaaatggaaatatatgaatttgttggaagatgtggtagaaagacccgaaacaagtcaaatcatcatgaccactcatgacccattggtaattggggggctaaccaaagaagaaatcagaatattctataccgagaaaggtaaagaccaagaaggtaaagacattatgcttgtcaaaacaatcgcacccgattttgacccgaaaggactgggtgttgccggaattttaacgagtgagttttttaagttgccaagtactcttgatgaagatactcttgatattttaaatagaagaaatgagttaatcgctaagcaagatgacaacaaactaactgataaagagtctttagagcttaaagaaatattttattatctaaacaatcttggaattaatacaactgacagagacccactctatgagaaatttattgtggctttgtcaaaattggagaaaccagagaacataaaaagctctcctgttgagttgaaaaagcaaaacgaaatagcttttgacattttgaaacgaataattaatgagtcagagaaatga

SEQ ID NO: 86605 - DNA, 807 bp, Belliella baltica DSM 15883
atgatttttattgatttagaaaacaatccaccacctcaagattggatagacagagcagatgctttaactcaacaattaatagcggcaccgacaattgtggctaaaaacgtaataattgatgcaaaccaagccttgtggaatgagttgaaagatcatttgtctgcattaagtaatcagaaatgttggtatacagaatctattaatgcaggtgctcattgccatgttgaccattttcgtccaaaaaaagaagtagttgaagaagacggcaatataacagatgggtattggtggcttgcttttgattggatgaattataggttttctggccctgctccaaatgtgaggaaaaggtcatattttcaggtcgttgctaatagagcattaatttatggagacaattgcaacatagaggatatattatttattgacccaataaaagtacgtgatccagaatgcctagcttttgataatgagggtagagtaaaacccaaggaaacagttaaaactgcaaggaattataagcgggcagattattcaatccgaagactaaatctcaacgcaccaagtttaattgatcagcgaaaggataaatttagaaaagcttcaattctcttaatgcaattggataaaaaaatacaactgcaatctgttacatgggatcagtcaagagaaaatgaaattgaaataggatttagggagttaattcagatgtgttctaagaactctgaattttctgcggctgtaaaattctgcttaaaaagttctacctatgcttgggctttggaaattgtaaatgcagccgcctaa

SEQ ID NO: 86606 - DNA, 1641 bp, Rhizobium phaseoli Ch24-10
atgcggatcgatcgcgtttatatcgatggttttcggaacctacacgacgttgaggctagcttcgacgaagggcggctcacgacggtaatcatcgggcaaaatggttcaggaaaatcaaacctaatcgaagcgatcgtggaaatcttccggcacgtcgatctgcccaccggtagcgttcggtttacctttgaaatcgactatgtgatccgtgggcgcaagatccgggtacataatcgcgatagtatgacctcgttcgttgttgacggcgaaccaatgagtttcagccgattcaatctcaacaagaaaagcctcttccctgatctggtgttcggttattattcgggcacgggacgacggctcgaaaagctctttgatgatcatcaggcccgttattacagtgtcatcaacaaggatcgcgacgactctgaatatgcgaaagccaaaacagaacggcgactattttattgtcgccctgtccatggtgttttcgggttgctcgctcactttgccaagccgggcaaaaagggcgatgtttcgaagcttctgaacgaaaagctgggcatcacaggcttccactcagcacttgcacattttaaagaaccgtcatggttcaatcacgcaacttggaagaagggccgaaagccaacgactgccggccgcggccgacgcacatttgatgacctcggtgaacaggctttggatatctggggcgctaaaggtccggctggcgaatgtgctcgagcctttcagaaggcagcgttccatcccctcgccatcaccgggaaggttgtggacgactatcgcagcaaagccaaaacagaagctcagctcgcctgcttcattcgcgatcaggacgcactgaacgcgttcgcaacacaatatggtgatgatcaggatttgttcgcggggctggaagcagcggatatctctgacttgtttcgcgacatgcttgtttgggtgacccgcaaaggcaacgatagcggcgatgtcagctttgccgatctctcggacggcgagcggcaattgcttatggttcttggcctcatccgtgtgtcgcgcggtagcgaggcagtttttctgctggacgaaccggacactcacctcaatccagcatggcaactgacatatcttgacctgatcaaggaatggaccgaaatcgcagctgacgaagacaagtgtcagattatcatgacgtctcacaacccgctgaccatcgccgcgctggttaagcaagaagtgcgcgttttgcaggtcgatgacgatgccaaaatgaaggtgacgcaaccctatgccgatccacgcggtatgggcttcacggctacacttaccgagatatttggtctgccgaccacgcttgatccaggaacacagcgccagattgatgagcgcaatacactcgctaagatagagcagcgaacgaaggaacaggaaaagcagctcattgagatcaatgataaattgaataggcttggcttcacgaacgaaagtcgcgagccgctttaccaagatttcttgagagcctggcacgatgtgcggtacgcggaccgtcccccaatgacgccggaagatgttgaaggacgccacaacgcgatgcaactgttgatcaagcaactcaccgctaacaagggaggagcgtattga

SEQ ID NO: 86607 - DNA, 852 bp, Rhizobium phaseoli Ch24-10
ttgatctacgtgcggcgtgatccggcttttatcccggaaaagatactgaaagttgctgaacgtgcgcaggcagctttggaaacacttccgccagccgatcggatggcattcatagaaaagaaggcccacgtttggcgtggcttcaaaaaatacttgtcaaaaatgtcgtatggtaaatgttggtactccgagagcccggatccacagtctttttttgacgtggaccattttcggcccaaatctgaggcgaaacgctcggaaacgattaccgacgagggttacccttggttagcatttaactgggacaatttccgctattccgctggccggtcgaaccgtttgagcacggacgaggaaacggacgaaacagccggaaaatcgagttggtttccgttgatcgatggcagtgttgttgcatcctgggatgatcggcgcgttgctgacgagcgtccgttgctcatcgatccgaccgatcaggatgatgcccggctaataaaggtggatacgaatggccggattgcccccagtaggttctgcgtaggcaccaataagaaacgcgtgacagcgtcaacaaaactatacgggttagacttgcccaacctcactgaggcaaggcttcgggtaatgcgcgatgtatctaggcgcgttgatgatctgctaaaatgtgtcgctgccgcggacgcatacgagccagttgcagatgctctgcccatccctgaacagcaggcggcgatcacgaatttaaccctgcctagcagcgcatattcgctcgccgccaggtcaaaactgcatgaacttggcttagctgaattgatcgcaaaacccgaggactatccagtcgtcgccgcgtga

SEQ ID NO: 86608 - DNA, 939 bp, Kitasatospora setae KM-6054
gtggtgccggtgtacgtgtcgcggatcagggtctccggggtgaagtgcttcgacggcgcgcgcgaggtcgacctggcgatcccgcccggcccgggctggacggtcttcgccggcccgaacggcagcggcaagaccaccctgctgcgcgccctcgcgatggcgctcggcgccctgccctccggcccgcccgcccgctggggcgcccgcggctgggtgcgcgccgaccccgcgccgcgctggcgggtcggcgacccgcccggccccgcccgggcccgctacccgctgcccgccgagggccgccgtgtcccgctggacgccgacctgctcgccgaggtgctgccggccggctggcgggtcagcgacccggagcgccagcacgtcgcccgcgccggcaccgacctcccgctggacgaactcggcgacggcaccgccgcgttggcccgcctggtcagctggctcgcggccgcccccgagacccccggcccggtcctgctcgacgacgtcgaccggcacctgcacccgcgctggcagcagcggctcggcccctggctgaccgcgcgcttcccgcacacccagttcctggtcgccacccacagcccgtacgtctgccaggccgccgaccccggcgccctggtccggctgcccggccccgacgaggaccgcgccccctaccggctggacgaggagatccggcagcgggtgctctacggcagcggtgaggacaccgcgctctccgaactcttcgccctgcccagcgcctactcgcccgccgccgaggccgaacgccggatgctggtccggctggagcgcaagatgtacgccgggcaggccaccgacgccgagctcgccgcgtaccgcgaactcggcgccaggctcaacagctcgctgaccgcccggatcgacgaggtcaccgcccggctgctcggcagggacgggtga

SEQ ID NO: 86609 - DNA, 729 bp, Kitasatospora setae KM-6054
gtgatcccgctccagcggccgccgctccaggcccggctggccgccgaactcgcccgcgccaccgaccggatacgcgccgacgggcccgacaccgccaccgggcgcgccgcctggcgccgcgccgtccgccccaaggcccaactccggctgatgctccggcagatggcgcccggcctggaacgctgcatgtactgcggcgacaacctcggcaccgacatcgaccacttcgaaccgatcgcccaggccccgctgcgcaccttcgactggcagaaccacctgctggcctgcgcgcactgcaacagcaaccgcaagcgcgacctcttcccgcgcgaccccgccaccggcgacggcctgctggtcgacccctgccgcgaggacccggccgaccacctgcggctctacctggactccggcgcgtacgacccgctgaccgtccgcggcgaggccaccatcgaggtgttcggcctcaacgagcggcccgaactcgtccgcggccgccggatgatgttcgccgtggtcaaggccctgctgctggcccaccgggccgccggcaccccggccgaggccgccgagtacgccgccgcgctgcgcgagatccaccacgccgacgtgctgcgcaccgtcctcgcgctgcgccgcagccgcccgctggcacacgccgtgctcggccccgaggtgctcgcggcgctcgaacaactggtgtcccggccaggggggttcggcggctga

SEQ ID NO: 86610 - DNA, 1338 bp, Rhizobium leguminosarum bv. trifolii WSM597
atggtcatggtcaccgagacgatcggcaacaacctaccgagactcacaatgtatgttcgacagctttccatcaaaaatatccgttcgataactcagtttgagatttcttttcaggccggtgcactaccgggctggcacgttgtcctcggttcgaacggagccggcaaatcaagcgtgatccgctcgctagcacttatactggctgggcctaaagaggcgcttgcacttcgccaggattggcggacatgggcccgttttggaacggcagacggatcgatcaaggctgagatcgaagttggacctgatgacatcttcaccaaacgagggaagccgaccaaatctgtgaaagcggagctgcagttggttcctgccgaatctacactcgatagccgcgtcaatccgttggacctgactgctccaagctcgacgacagccctcagatcggtctgggggacaaattccggctggttttctgcatcgttcggtccgttcaggcgcttcaccggtggcgatcagacttatgatcgactttactactcgaacccgaggctggcttcacatctctctgcattcggcgaagatgtcgccctgaccgaaggtttacgctggcttagagacctgcgcgtcaaggaactggaaaacgaccccgaccaggcacagcttctcggcccactgatcgatttcctcaatgtctcgcaacttcttccgcatggcgcacggatcgcagaggttcgcagcgaggaagtgatcgtgaccgacgcgaacggggcgcgtgttattgttgagcagatgagtgacggttatcgatccgtgttgtcgatgatcttcgaaatcctgcggcagatgacgcgatcctacggcgtcgagcgaatgctcaagtccttgaaccttcataccggtcaggtcgatctgcctggtgtcgtagcaatcgacgaggtcgacacgcatctccacccttcgtggcaacgggatatcggaccttggttcacgcgctgcttcccgctcgtccagttcatcgtgacgacgcacagcccgattatttgccgcaatgcatccaccgtttggcgacttgccaatcccggcaccgatgagccgtcggaaaaaatcgaaggcatcgcattgaataggttgatccacgggtcaattctggaggcctacgggacggagtttttcggccgcgacatcgcccgctcggcagattcaaaggagatggtccaggaactggcgcagcttaaccgaaaggctcttcgcgccaaactcgagcctgctgagacgagcaggctcgaggaactgagaaaaacgctgccgacggtcgcgacaagtgctggtgtggagtaa

SEQ ID NO: 86611 - DNA, 852 bp, Rhizobium leguminosarum bv. trifolii WSM597
atgcttcaaatcgctaatcgcgaccttccgaccacggcatcaggcgtgctcgcccagcttcaagcgctcgtcgatgcgggcgcagattacccgactcgcgtcggtttggcaaagaagcaatgggacgcaaagaccgggtctgttgcgaaggcgaccgcattccaatccattcgcgccacattggacaagatgtgcgtaggaccccgcagatgtgcatattgtgaagattcattggccgacgaaatcgaacacatcctgccgaaagatctgttcccgcagagtgcgtttcgatgggcaaactaccttttcgcttgcgggccctgcaatggtccgaaaagcaatcgctatggtgtcgttcgagggacgggtattttcgagttccagcgcggcaggggcgatgcgatggttgcgcccccagcaggcgtcgctggatgtattgatccgcgaagggaagatcccatgcagttgcttgagctcgaccttggcggaaccacgccagacgggactgtccttgagggcactttcagcttcatggccgccgacgggctccaaccggtagattccgcgcgcgctatatttacgatcgatgtgttgacgctaaaccgggagattatgcgggttgcgcgcgagagcgcgttcacgggtttccgtgcgcgccttaaagagtatgtggcggagaaaaaaaatggtgcgacggaagtgagccttgcacgattgaaagatgcgcttctcaattcgcctcatcttacggtattcgctgaaatgcgccggcagcgcacgtttttgcccgatatcaacgcgctgttcgaagacgcgcccgaggcagtagaatggcctgtcattcgcaaatga

SEQ ID NO: 86612 - DNA, 1248 bp, Rhizobium leguminosarum bv. trifolii WSM2297
atgaagatcagacggctcagcgttgccggccttcgcggcttcgaccatgcgacgttcgaattcgatccgcacttcacgttactggtgggtgtcaatggcgtcggcaagagcagcgtcctcgaggctctgcgggtctcactgtctcgggttttgcctaagttcacggcgagccgctcgacgcctctggcattcgccgcccaggatatccggcaggtaagcgcctcgctgaccgtcgatctggatctcgacttccccgaagggcaacggaacctactgctgcacaagccgagagaacagtttattccggatgaagaggggtctgttcggaacgcgacgttagacacgcctgaaagggaagagctgtcacccccacactggccgaaggtcgatccgtcaggcaatcaacccattgcaatctacttcggaacgcgcagatcgcatcccaccgatgagcaaatcaagattggtcgaagccgcggaggtcaggctgcggcatttgccgatgcgctttccgatgtccggccccttcatctacgagacatggcgtcgtggatgctggcgcaagaggcgttggcggaagaactgccgcgtgcaagactccatcttgaggccctgaaatccgccgcagcccgtttcttgccgacttgcacagggctgcgggcgaccaacggcgcggacaagccacggctgttgatctcaaaggacggcgttgaactcgacgtgcggtatctctctgagggagagcgaggcgtgcttgcgctggctctcgaccttgctcgccgcctctcgcaatccaatccagtcttagacgacccagtcagagacggcgtcggagtcgttctgatcgatgaaattgatatgcacatgcacccgctttggcagcgccagatcgtgcctcttctgacggagacgttccgtggctgccagtttattgccaccactcattcgccgcaggtgattggagaagtggctcacgacaggatcctgctcatcaaggacggccatgtctattcgccagcgcgctcattcgggatcgattcaagccgtgtcctcgaagaggtaatggacaccaaatcgcggaatgcaggcgtggaagccaagatagcgaaaattgcgaagctcataggcgatggaaaagtagacgctgcaagggctgaaataaaaaagctttctgcagatatcggtgaggatgacccggagattacgcgcgcaatgacccttctcgatttcatggagggggatgcgtga

SEQ ID NO: 86613 - DNA, 609 bp, Rhizobium leguminosarum bv. trifolii WSM2297
atgatcactaaaggcgccgaaccgaacagtctcacgtaccaccgggctcaggcgcatagcgactacgataactacgctcagaaagacgacctacgcgcagctctggtcggcgagcaaaagggcctgtgctgttactgcaccgggcgtgttcgggcggaatcgaccgcgatgaagattgaacactggcaaagccaggcgaactatccccagcagcaacttgtctacgcaaatctgctcggcgcgtgccttggcggggaagggagatcgccgaccgctcagcactgcgacaccaaaaaggccaatcgcgatcttaattggaatccggcagataccgctcatgccattgaaacaaggctgaagtatctcgccgacgggacaatttcaagcccggacgaagacttcaacacacagttgaatggcactttaggtttgaatttcagttacttgaagagcagtcggaaggccgtgctggattccgtactccaatggtggcgttccacaccagatgctcgacaaaaggtccaacaacagatcagttaccgcatcaacgcggcggagtatcagccgtttagtccagtcgcagtctggtttcttcggcagaagctgtga

SEQ ID NO: 86614 - DNA, 1248 bp, Rhizobium leguminosarum bv. trifolii WSM2297; identical to SEQ ID NO: 86612

SEQ ID NO: 86615 - DNA, 609 bp, Rhizobium leguminosarum bv. trifolii WSM2297; identical to SEQ ID NO: 86613

SEQ ID NO: 86616 - DNA, 1233 bp, Salmonella enterica
  subsp. enterica serovar Newport str. Levine 15
atgcaacatgctattgataaaatttatgctgttaaaaacaacaacccatcgataccatttattgttaatttagaaggcaaaaatcttatcatcactggaaataacggtagtgggaaaacagtttttctaagaaaaatatttgattttttaaatcagagtatagtaaaaactggaaacgatcatcatgtagaatatatcaagtccgaactattaagaatggaggaacgattatctagagttaaccctggtgatgatcattacgagtatcgaaaaaaccaagttgctgaactacaagaaaaactgaacagcagaaattatttcaacattacctttagagatgaaaattcattaaaagttaattatcatcaaaaaaaatcaataatacgattttatgaagccacaaggcaagcaattatatccagtgatggaagaataacaagtttagaaactcttactgatgagtataaatctcacggacctcaagaaaactcaggaatcttctttgaaagatatttagtaacaacatggaattatgctttactccaaaaggggttaaacaaaatagaagaagcaagcaaagctgaaaagtggattgaacgaataatagaagatttgaaacagttatttgaagaccccacattaactcttgaatttgatattgaatcactacgcatcaatattaaacaagagggtaaagaaaaatatcggctagaccaactttcttcaggtttttcatccattctttcaatttatgctgacttattggttagagttgaactgggcaagatagaaagagacgaaatatcaggtatagttttagtcgatgaaattgatgcgcatctccacgttactctacagaaaaaagtgtttagcttttttaaaagctcatttccaaacattcaattcataatttccacccactctccattcgttgtacagtcagtttctgacgctataattttcaacttaacaacccttgaacagatggaggatttatctttatattcatacacctcaatcataaaagggttgctgggtgaaagaagctcatccagtatcttactggaaaaaattgaagagttatcctctctgatgtctggtgaaaattttaacgacgcagattatatagagataatgagcgatttagagccttttattcaagatatggatgcaagatcacaagccataattctttctgcaaaaaataaatttattgaaaaacagcagggatag

SEQ ID NO: 86617 - DNA, 675 bp, Salmonella enterica
  subsp. enterica serovar Newport str. Levine 15
atgtttaatataattagagatgttgaagccccggaatgtctttcgcacggaatttataacgacccgtcagtgactgacgcattaaaaaaaatatttcatgggaaatgctatttatgtgaacagtcgagaatcagcgatccagaaattgagcacttcattccacatgaaggagatgcttttttaaaatatgactggaataatttattctactcatgcagtcgatgtaatagcattaaaagcaacaggcatgtaaatttattagattgttctgatccaaccattgacatctcaatggaaatagttcatttagctccatctttaacatcagaagacgtcactattcgtccatcaaccgaagataatattaatgaaaagacattaaataccataagattattgaaggaatgctataactcaaagtcaactggcctcaggggtataaccagagaaaatcttttagagaaccttttgaaaaactacactaactttcttctgtcaagacaaaccctaataaaccttgaaagtacagaagatgaaattgactacgcaaaagcaagaatgaaagccatgtgtaaaattgccttccctttttcagtattctggaaatggcatattcgattagataattttttgctcgaacaataccctaacttatttgaagatctaggcatctaa

SEQ ID NO: 86618 - DNA, 1602 bp, Salmonella enterica
  subsp. enterica serovar Newport str. CVM 19449
atgaaagtcgataaactacatattcgctcacgctttaaaaatcttgagaacgtggaagtggattttgacgaagatcacctcatgacggtcgtcgtgggccgaaatggttccggtaagtccaacgttctcgaagcattggtggcaatatttcgcaatcttgatcttggtgaagcgccccctttttcttatgagctagtttatcgattaggtgagtgccacaaacctaatcacccgagtgagcgatggctggaaattgccattgatgccgatccaaatcgcggcacactagcaaagcaatatgaagtgcatgtgcgcgatcttttgagtgacgatatatcaaaggatatgttcggtgaacattctttaggtattcccattccgttttcaaaagttagtcgagataaaggcggtaaagcaccatacctacctaactatgtctttgcatactattccggccccagtgatcgccttgaaaactactttaaaaaacaccgtacagatttctaccgtaggttacttgaagataaactggatctgaaaggcgatattcgcccgttattctacgctaaacctcaccatagccaatttgtactgcttgcttttttcctatctgagcgagacagcaaagataaggcatttttgcgtgaacacttaggcattgaagaattagacagcattcattttgtgatgcggaaaccgagatgggctaagaagaaagaagagcttttttggggggcttatggtgtcgtgcgccgttttcttgatgaactcataagatacagcttatctccagtgaaagtgacgcgtaaagaagatttatctttgactggcaaagacattcgtaatgagttcttccacttatttttaccggatgcaaatgccttacgtgagttcgctaaagagcttagtgccgacgaactgtttaaaatgcttgaaagcactcttctgtcggagattatctctgaagttagcattcgagttaaagtatccagcagcaaagaaccccttacttttcgtgaactcagcgaaggtgagcagcagctattgaccgtgttgggcctactcaggttcactggcggaaaagattctttgtttttactcgacgaacctgacacccatcttaacccctcttgggccgttaaatatcttaacttcttgcatgaatttgtacctaatcatgaaaccagtcacttgctgatggtaactcatcaccctctagctattgccgagctgaagaaagagcaagttcaggtaatgaaacgcgatgatgaaaagcaaatatcggccaagatgcctgatgaaaatccgcgaggaatgggaattaacttaattttgcgtagcgatatgttcggtctgcagactacgcttgatgatgatactaaccaaaggcttacaagcagaaatgcgctcgctgcaaaggaaactttatctaaagaaaaacttgttcgggagcaaggatttccgcctgaggatgaagagcagtacctggctaggcttaatgctcaactcgagcatttgggtttcaacctggcaacggatgacccagattaccttgagtttcttcgtaataagtaccacgccaaacatgaggaaagtcattaa

SEQ ID NO: 86619 - DNA, 810 bp, Salmonella enterica
  subsp. enterica serovar Newport str. CVM 19449
atgcgttggatttgtaaggatgagattgaggaatgcttgactcaggcgtggaaagatatggctgagcaagcaaatgctgaattaattgccgccccggacgaagaagcaaggaaagcgatattaagaagagtcgcttcctcaaatatttggcgtgaattctataaattgctaccagagcctttaaagcgaaaatgttggtattgcgaagccgaggagatccggtcagatatgccggttgatcatttcaggccaaagaataaggttgaagatgataagcaacatgatggttattggtggttagcattcgattggcaaaattatcgttgcgcttgcacgttctgtaatagtcgtagagttttcgatgacactgagggggggaaagcatgccgtttcccacttgaaaacccagacgagagggcccttgtacctgcggaccaagacaaactgaacaatgaacgaccgtactttcttgatcctttcaatccggatgatgagaagttgctttggtttgataacgatgggctgccactcgctaagccatcagcaacagtagagcagcaaacaaaagtacaaaattctattgaaatatttcacctccacgaaagcagaatagtcagagccaggaacatagtacgcttagaagtggagaggcaggttaggaaaataaagactaatgataatgtgcaagaagccaaagctaagctgcgtcgaatggtaagagatactgaaaagttatcgcgcgcagcggtagtgtacttgcgggcgcatagagagcttcctgaggtgaaagacatattgaacttggattag

SEQ ID NO: 86620 - DNA, 2130 bp, Bacteroides salyersiae CL02T12C01; identical to SEQ ID NO: 85898

SEQ ID NO: 86621 - DNA, 948 bp, Bacteroides salyersiae CL02T12C01; identical to SEQ ID NO: 85899

SEQ ID NO: 86622 - DNA, 1236 bp, Bacteroides xylanisolvens CL03T12C04
atgggtaattttattacgagtatcaaggttaatcatatttttcatttggagaacttttgtataccaatctctgaaaatgaaaaaaaacatctgattattacgggaaagaacggaagtggtaagactattttgttgaatgcaattgtggagcatttaagcaaggtttgcaatgataagacattgagctttttagattatgagaaacatttagagtcttgccgaacacggttacagcaatataaagttgtaggtgattcacagaaaataatatctaaccaagatagtattgaattatataaaacttggattgaagaagtttatggaaaagtagaactttcattccatgatatatactccatctctaaggatttttttagtcagaactttattatagcttactatgctgatgaacgtaagtctctttttgtagaaccgaagaatcctgttaagccagatttgaagatgaagactgatctgaaacataataaagtagatcagttcttgaactttatggttgactgtaaagtgcaagaggccttagctcgtaatgaaggaaaaacggaggatgctgattatattcgtcaatggtttgtcggcttccgaaatatccttcgtcagatatttgatgatacaaccttagaacttgatttcaattataaagattactctttcctcattcaaacacgcggaaagtcgtttaaattcaccgaactatcagcaggatattcggctgcattagacattgtagctgatttaattttaaaaatgcaatcacagaataatgtggtccgtgcatacgagaaagaaggaattgtgttgattgatgaaatagaaacgcatcttcatttggaactacaaagagtgattttgccgatattgactactatttttcctaacatacagtttgttgtcactactcattccccttttattcttaattctttagagaatgctgttgcttttgatttggagcatcgtgaaccaattgaagacttaacggattattcttatgaagcattagcagaaggttactttggtgttcgtacagactccagtgagattcaaatgcgtttacaacggatggaagaattgattcgttctgatcggctttctatttcggataaaagtgagttggaaatgtatctacaggattttgataagattccggaagcagttgctcctgctattaaagctaaatattatgatctgaaaagagagtggcaaaataagaattaa

SEQ ID NO: 86623 - DNA, 642 bp, Bacteroides xylanisolvens CL03T12C04
atgattagaatttgtaaaaatgcagataagccacaaactttagataagagttataatacggacgaggtctgcaaacaattactgatggatcagaatgataaatgttatctatgcgaacggcgtttgacaactgattatcaagtagagcattttaaatcgcaagccaataatggagacttgaagcaaacatgggaaaacttatttgtagcttgtggatactgtaacaataaaaagtcgaataagtatgatgatatcttagatccgactcaatatgatatcgaaactataatagaacattcaaatgattttgttaatcagaaagcaatatttgatagtgataatagaacttctgaagtactttcaacgataaagttattgaatttattatttaatggaaaactatcttataggaattgtcgtgagcaacgattttatgatgaatttattcaaaaaatgaatttcttttcttatgttgttgatgaatatatgtcaggtaagaaagaatattattatccggttataaaagaacagttggatattcgtagtgaatatttgggatttaaatatgcaattattcatagtaacgatttgctgaaacatgattttggagatatgacgatttggaataagaaaggagaatga

SEQ ID NO: 86624 - DNA, 1509 bp, Saprospira grandis DSM 2844
atgagaattaagcagttaagattgaagaattatcgctgttttgaagatttagatatttcgttcgcagagcactgtataaatgcagtaggcgagcaagaaaatatcaatgttcatcttttgttagcagataacatgatggggaaaagcgccattttaaaggccttacgcattggcgtagctactgttttttccaatatgaaaggggctaaagtagctaataatagacacaaagggattactcaggaagaacatcgcttattgggagaggatatttttgcagaatattcaccttcagtgagtattgctattaaaagtaaacaacagctttatctgaagaagggccaacaaggcagctgggaagaaaaagagttgaactgggaacgctataagagtagtcctaatggcaaaacgaaaacaaagccacctacaacaagaaaaaatcatgttgctggcttgtttagagagagttataatcaaatcgtaagcaaaaaagagcgcttaaatcccctttgcttatatctcggggccgagtatgtgcatattcagcaatcgagtcgaaaagattataattttgctggccgctccgctatggagggatactggtattgcttagatgacagcaatatggagagctatgtctttaattggttgtctaaattagaactgagtagaagagaagcagaagcaactgctggaggggcacagctttatggtaggctacccgctcatgtacataaaatctttaagcgagcagttcaaacagttttgcccgatattaaggatgtagattttgtgaaaatgacgcagcctaaaaaaggtcgcctatttgaagccgttttttcttttaaagaagagggctaccgaaggtatgaaatgcttagcgatggctaccgctatatggttttgctattaggggaattagttgtacgctctactttgctcaataaacactatttggaggaagatatcctagatagacaagagggggtggtcctcatagatgagtttgggatccacctacaccctcgtctacaaaggcagagcttgagccgattatctaagctttttcccaagctgcagttcattgtgagtacgcattcgccactattggttaatgggctctacaaagaacagattcacttaattgtagaggatgcagataaaaaacgaattagcattcagcccgatacagatgctattggcttaggtgctgaaggggtattaagagagatgtttgctgttccggttagcttagaccagaaaactttagattggcaaaaagaatatattcagcttttggccaagatgaaaaagaagctgtcttctgaggaggaaaaacaacgctttagagagcttagtggtttattggccaaacaaagagcttatgaaggtttagagcagcagctggccaagcaaattttgtccttgctcgggacagaagaacagctcgctgaagaactaagagaagaaaaactcctcgattatctggctcaaattttaaatgattag

SEQ ID NO: 86625 - DNA, 939 bp, Saprospira grandis DSM 2844
atgatagcgattaagttccccagagaagatctaaaagatgatcctgagcttgcagcttggttggctaaagcggaaagtagaagcgattggaaagaactccctgcctttttactccgacaacttgtccattacggagatgagcccagtccatacaagtgctggtatacagaaatacagcaaacagatagaaatgctcaagacatagaacatttttggccaaaaggaagtggtaaacctttgtctacagcaaagaaacaaatgattgaagacgagctctccttcgagttttttcaggaggaagaggagcagccttacccttggctagaaaaagaccatcgaaattatcgacttgctaccgccttggctaatcgctttactggaaaacgtgactactttcctttggcccttaatagcccaagacttactacaggagagctgccctgggagaaagaggtttatcctcttttgctagatcccgcagagcctcaagatgctgcactacttatggtggttcctaatggtcaaattgaacctattacagcagctgtagatgatttgcctcgctctgcctataatgatttggcggctaattggcggcaagatggatttaattatttaagggcgaagattagtattcatatttatcaattgaatgattctggcttggtacagctccgaaagaaaaagtatgaggaaactatggctaaattggaagaactagaacgacaaatcgacagtgcttattcagggaccaattacttgattgatgaactgaagaaaatgggagctgtagatcaagctttagcactaacggcccgttctgctgtagaagattttaaatttcgtagtcagcatccagaaatgattcctataattgatgaaattcaaagccattggcaggatttttttgatcgttacaactcttcttgggagctctaa

SEQ ID NO: 86626 - DNA, 1674 bp, Saprospira grandis DSM 2844
atgcttctaaaaagaataaatatccccaaatttaaggttttaaaaaacattaatgtcgattacacaagacaagaagatgacaggatataccctattgtcagcttaaatggtggaggaaaaagttctcttctacaatttattttcacaatgcttcattgctcttttgtcgagcataggaaatttgcccttgacaatcttttgtctgaatttgactttacagaaagttcagacaaactggcttcatttactttagagtacaacaactaccaagtagagctaaactttactatcgagactgatgatgaaagttatcgagctatgatagattataaagaactagaagagaagaaaaaggagaccataacaattatggatcgacttggagagcttcagtatattgaacaacaaataaaagatacaaaaagagttagtactttaatccatagaaaattaaggaggttcataagaagagaggaagaacacgatcttattattgatagagatccagaagatagtttaaacgccattgagttaattaaaaaccgaatccaagaagaatatatatcagacgaggaactagaaagaattttcaaaaagacaaaaatcctaaagagtaatttagaaaaaactctttataaaaactctcagatatacatacaccacataaatgacaataagaacgtcttaatttgtgaagctttgatcccacaggagctactagcgactgaattcccccaacaaaaagaacatcttgaaaagcagagaacacaacttctggaaaaaatttctaaccaagtttttctagcagctcctcgtactcaaatttttcactttttaacagatgattctaacgaagagctttttgagcaacccgcaggctactcctttaactcctacgacagtattcttcgtcgaataaaagaaaaattgagcggctttttcacctatgaatttgcttctaatcaactaattattgactcgttcaaacaggctagagataaggattttgagcaagcgcttttaaccggagaatatggtaagaacctagaagaaacaaaaaaagaattaaataactttcttacaggtaaagagattaccgttgacggtaaaatctctgaggtaatatttaaagaaaaaaatacaggctacaaattgctccctagagaccttagtcatggtgaactaaaaaagctgagtattttcatctgggtcaaaagaaatgctaacaagcactcacctccattatttttaatggatgaagtagacataggattacaccccagctggcaatatgaaatctctgatgatttgcaaaaatggggaaaaaacagccaatttataattgccacccactctcctcaaattataagtgcagcgcatcatcgaaacctagtcgtattaaatcaaattgaagatagtaactgctctacctctcgacagtatgagcaaccatttgtagagcctgatttaaatactgtcatcaaaacgatcatgggatcagattatgtccctaaaaaagtacagcgactccgcaaagagtatctacaactcatagaaaaccgacaagaagagagtgagagaggcaaagagctaaaagcaagattattagaacatgaaagtgagcaatcagcatttttgcaagagatgaagtttttaattcaattcagagactaa

SEQ ID NO: 86627 - DNA, 630 bp, Saprospira grandis DSM 2844
atgaaacacatcaaaaagacgagccctcctcctttcttttcttctacagttgctggcttgacagcatggagacatttctccaaaaaaagaagtacaaagcagcatattcttcaggaagaacaaaactatctatgttgttactgcgaaaaacgagtatctcttgacaactctcacttagaacacatctaccctaaaagtaaatatccttctcaaacttttgactataacaaccttattgtttcctgcgaaggaacccattgcaacctagatgaaagtaccagcaaaaacatctgtgggcataaaaaattaaatgaatttaatcctataaactttttagaccctacgactacaacagatattggagagtattttatttacaataaagaaggagaaattcttgcatcaacaaaagactcagtaaaagccgactacatgattaacacccttaatctgaattactctgggttaattgaaagccgaaaaaacacagtgcgcgccttagttaatgcatttagaagactatcattaaatcaaggacagcaagaacaaaaactaaaaaccattttagcaaatgaatctcaagactttattagctttcttcgccattatttcaatcctatagtttcctaa

SEQ ID NO: 86628 - DNA, 1866 bp, Saprospira grandis DSM 2844
atgtcgtctaattttgagtttttgaggaaggttatgccagaggcatattattgcttttatcgggcagagcaggcgcttttgacgcatccttttgtggggatgatgtatatgcgtaaagggggaggacatgtggatacaattctcttcgcagcattagaaaattctcaaaatagagagctgtggttagatcctgaaaaaaaatatgaaactgcttttttaaactatgatagtttaaatgctctagtcaagaacagtgcatattggacagctggaggaaatacattcctagttaatcagtcgaactgggaagggaaggtgaaattgtttttatcgaactttttagagtccctaaagaaggctttggggtatatagagtatgttcaaggtcaaaaactacttaaggacagacatttaatagaagaaatagaatttgatgcctctattaagcgagctgttaatgcagattttctaagagaagatgaggcccttttcgagtttttgacttcggcctatctcctttttatggagaaggaaaagctggcccaagaaaagcccgcttttctcaaagcctttgaagaggagaaccttgctttttttgtcaaagaaagcaaggccttttctgcagtttatctgaatgaaaaagtagaggcggggtcgctagcttattttgagtctgtcttatgggatttatatgcgtttttgggacgagttgttttgcctagggcgaaactgaataggttgttttttagtgatgtatatagcttgaaaaaagtatctcttgattttgaggaggctccttcctggatttttttgactggagaaaacggctatgggaaaaccttagtattacaagccatagcggctgctttatatggagaagatgaggtgacttatgagtttttgaaagaaggaataggagtctcagctcatgggataaatagaggttttttgtttctacgactccgttatagtttttttagtcgtgcagtaacagcagttaatggtcattaccacccccaccgcaacgtcattgcctatggttcttctcgtttggttcctcgtcaggtagtaaagcaggccggggagtacaatatggtccgttccttatttgagtcagatgctcctcttcgggatatagaagatgagtacatcaattggtttgctcgcaaggagattcatcctcgatctaaggcacgttatcagcaggtcaaagctttatttgaggaggtggtgcccgacttagagctagaaatagatgaggaaaactttgatcgtttgtactatcggttcaagggggactgggccgaaacgacagagcgcttgcctttcaatcgtctctccgcaggttacagaaacatcctagctattttgggagatttggtccttaatttatatgagttgcagcctacggttacggatatcaaggctttgggcggcattgtattgattgatgaattagagttgcatttgcatcctaagtggcagcataaattgcctaaattattatctgatgcttttccgaatgtacaatttatagcctctacgcatagtccaattcccttattgggggcgcctgagggggctgttttcctcaaggtagatcgggaccaagagcggggcatctttgtagagcgtctagaggggctagagaaagagatcgaggaccttttgccgaatacggttttgagttcgcctctttttggcttgaaagatttgcggtcgattaagcataaggaggagggcgatttgcaaacagaaagtaattatcaggaaatagaagataataaagcgctaaataaaaagctgtttgacctcttgaataagaagaaacagcaagattttaatccctcagataaaaaggattag

SEQ ID NO: 86629 - DNA, 948 bp, Saprospira grandis DSM 2844
atgaggagtattaacaaaaactttaatcttgcgcctgaggaatggaaacgaaagctaaggaataaattagccactttaattagggaaggggctaatcataggccgactaaaagaatttacaatcatgctttaaaagcagacttagctgtttattatcatgacaagtgtggctactgtgagcaagcattaggaaatgtacaaagaactgaaaacttttactctattgagcattatcgacctaaaagagggccgcattcctattggtggctagggtatgagtggactaatatttttcctgcttgtcagacctgcaataactcaaaggatcgagactttccgcttttagatgaagctttgcgtcggacagggccccagtctcctttaactcagaacatagaagattatctgaacgaccaaagccgaaaagctgatcatgattatctattagaagagcaagcgcttcttttacatcctgaggtagattcggtagaagattatttagccgtaaactttaatggtatgctggttcctcgtccaaaacttactgatgtaaagacgaagcgggcagaagttacaattaactgtttaagtctgaatcggtcatctttacaagaaaagcgaaaaaagattatagatgacttccaattgcagttgaaaaatgagttggttaaatctggttttgcagagcctactaaagccgttttagagggctcgtttttcccaatttaccaatcgctcatagagggactaagagaaatacaggtattccatttggtctatgaatgcattataacggaaatagaagcgatgctatttcaagggatcattaatgacttaataaaagattacctgccattagatgaggagatgaaacaaatgcttttattttttctaaataggagttgggagctttatatagaagagctaaataaagcactaatcccctaa

SEQ ID NO: 86630 - DNA, 1281 bp, Saprospira grandis DSM 2844
atgagaattagggaacttgaaatttataattttagagggtttgaacagttaaagctcaaattagacccccactttaatatcattgttgggaataatggaagtggtaagaccgctatcttagaagcattgacagtagctatggggtcttatttcttagggattagaaatacggatagccgacatattctaaataaagatattcacatcaaaacttttgaacacaatgaagagtatgtctttcctgttgttgtgcgtgctcgtggagaggttcagggagtttcggttgattgggcaagaagtttaaagggaagaaaaaatagaacgacctctagaggagcttctagcatcaagcggattgctactgaagcagaaaatcaagtaagaacagggcaaaatgtagaattgcccctgcttgtctattatgcgacaggtcgtctttttgatttggcacaaaaaaataaatcgacaacaacaaagcaaattagcagcagatttagagcttatgatcgttgtctagaagcaaagtctacacacaaccaatttcaaaagtggtttaaagctaaagaaatatcaattatccaaaaaagacaagaagaccttagctttaacttagttaaaaaggcaattgtagaaaatgtgcccgactgtaaggacttgtactatgagtttgatcctgataaaccagaaggactcaaaatgctgttagaggatgaacgaattctatcttttaatgcacttagtgatggtagccgaaactttctagctattatggctgatttagcccataaatgtgttaccctaaaccctcaactacaagaagaagcacttaaagaaacaaagggaattgtcttgattgacgaactagatttacatctgcatccagaatggcaacggagaatgattaaggccctcaaatctactttcccaaatttacagtttgttgtgagtacgcattcgcccttccttattcaagaagctgccgaaaacgaactgattaaactaaaaaataatcaagcaactattggctctgctaaccatctgtctatagaggatattgcagaagaaattcaagatgtggaaaaccctcaatggagcaaaagccggcaatatatgtttgagcaagcaactgcttattataaagcagttaaagagggcagagccacccccgaaatgaaagcagagctggacaaggccatgaaaccttttgctaaagacactgccttttatgcaatcttagaacaagaacgcatcattcaagagagccaaaaaggaaaggaatga

SEQ ID NO: 86631 - DNA, 675 bp, Saprospira grandis DSM 2844
atgagaaccgtagaaaaaggaattgcgccaaatgtctatcaaaaatacggagatgctaaacatgatttggctggccgaattggctactattgctcttattgcgaaatgtctgttcacaatatgctggaagtagagcatgttcatccgagggctaatggtggagcggacttagattgggataattttctactttcctgcaaatattgtaataccataaaatctagtcgcaatcttaaccgaataggttatttatggcccgatcaagataatacagatttggcttttgagtataactcagctaatgaagtaagcgtaaagacagggcttactggaaccttagctcaggccgcagaaaataccattcatctaatgggcttggatcgtttacctggacatgcagccccaactcctgcagacacaagatggcgctctagacaagaagcttgggacaaagccaatcgaagcttgaataattggagacgagcccctatccccgaaatggcagcgcaaattgcccttagcgcactagaaagtcattattctgtctggatgactgtctttgagggaatccctgatgttcttgccgctattgatcttgagtatggacgttttggactatttaaagatagggatgccgccggaaatcgtgtaattcgtactaatgggcagatttaa

SEQ ID NO: 86632 - DNA, 2343 bp, Saprospira grandis DSM 2844
atggctaagcaactagcagagattaaggcgctctttaataagcgctttggttatcgagaaaccaactggcagaaagagaaggtacaggccttgggtggcttggagctggatggcttgtatttggatggggagcatcgtttattatgggccaatagtgagtctatcgctaagcctgtttatgatgaacagattttagcgctaaaagctagttaccctaagttgcagtttttgttgttgtcgaaggctgatatgctttttttgagagaaatagagcaacagtcaggtgttggctatgataagtggtggtttattcacaattcggagttggctattcaagaatcagatatacttttgtcaaagctaaagtggcggacaagtttatttgatcggataaaagaccttagactcaagccttccgaacgctttggagaaatcattagtgccttagtagagaaggtagagcaatttaaaggagaggactttatttacaagtactatttttatgtaagtacagttggtcagcagccagatgagctgaagatttccttttggaagaataaaaaaaggaaggaaaactcagaagagccagagtgtttttatgaaatcaatacacggacggaacgagaaaccttagttattcgacctaaggagtatgatcagggagataacaatagtggtaaagataatcctttttcaatagctgctaaaatagccaagacaataggcgctgttcaagttagaaatggggagtgggaaaaagaatatacttatcattctaagccagcagagggcatattatcctttttaaagggggttgattttaatgcgattaactatgggcttcttgcagggggaggagatttaaagctaattacagaggaggaggattggatacgttatcgcaatgaaatagataggcatttttcaagggaaggaggcaaagtttcagataaagcgataaaagggttgacgttagagtccttatccttaaaaaatattggtcattttgaagagctagagatagatttaagtcatcgagttagttgttttctagggctgaatggttctggaaagacgactattttaagaagtattgcattagcccttacaggtgtttatcagctggaagcaagggagcctttaaaaggttggttgaaagtagatagagttgagaaaactacacaggcatcttcatataaagaaatattagctcttgatggatcaattgagttgtgttttagttcgagaactaaagaagaaaaacgaaagcacctacatcgaatactatttaaacctcatgaagagccgactgaagaccataaggctgaggaaaaagtagagaagtttagacttcttaatggacgagaattccctataccaatattaggctttgcgcaaggacgtactcgacctttgtcaactaaaaaagaagaacaggctagtgcaaaaaattataaagggcgttctactatctccgatttagaaaacttgattactgaagagggggataataagttggaagagctgaaacgctggttgatgattacgcataatgaagggctaaacttagaagaaagtattgagcgggaggaggatctcacgaaaaagaaaattagtcaaagaaagcgagatgggtataagaaagcattctacttagtctttgagttgatgactgagatcataggtcgggaaattacttttaatgtagccaataaagacactttatgggttaaacttggagcatccaaatcagaagatgatgatgaggaattaaaggaacaagtgatttcttttagtcgtctgagtcagggctataagtctgtctttgtttgggtgggacatttagttatacgttatgcagagcattatgattatagtgaaggttttgaaacacaagagggaattatttttattgatgaaatagatctctttttgcaccctctttggcaaactagagtcttaaatatcttagtagagaagtttaaccgtgctcgttttatagtgactacgcattcgcctttggtggtgagttatataactgatgagagtactgatttagctttgtatagaatagtaaaagaaactgttgaggaggagctatatgtaaaaggtaatggtattgaagatacttatggttactggatgggtataaagaggttcccacccaaaataacagctctgatagctgaggcagacaatgcgataagtatagatgcttttgatgaagcagctgaggttattgaaaaattagatggctgggtgatgcctgaatcaatggtagttagaaaacttcaagctcgattaaataggcggaaaatcatttttaaattccgaaaaaagtag

SEQ ID NO: 86633 - DNA, 750 bp, Saprospira grandis DSM 2844
atgctgcatattaaaaaaactgactctttaccagagtctattgaggggttcctagcagatgattcagagtgtaggtctaagaaaggaaatgttagggagtattttaattgttttaaaaaaaggtctttaaaaggaaatctaaatgtaagaaataaggtttcgctgcagagtcaccttcttggagaacaaggagggtgttgttgttattgtggtattcgtatagggaagcctgcttcagtaagcatagagcattttacatctttaacagttaatagtgcactagttctagaccatggtaacttgttggcatcgtgtacttctaggagtagatgtaaccttggtcgaaacgataaagaacaacgtaaaaaggtacaattaaaaaacgttttaaaccctaaaaggggagaggcaagtgatttttatcaaaaaatgaaaattaaatatatcctgcctggggagaaagttaaaggtgtgggtaagatcagctctggtaacacagaaatagataaggaattaaataatattttaagcttaaataattctgaccttattaaatgtagaaaagaagcgttgaatgtttttatttcatcatatgaaaaacttttagtctgtcttcgtagtgatgaattaattttagatgaaatttctactctttttgaaaaagatgattttttagctataaagatgtattggcttggagtagaactttctaagtcagactatttagatcccacaaatttaaacctataa

SEQ ID NO: 86634 - DNA, 1416 bp, Saprospira grandis DSM 2844
atggaagaatttaaaatagagttgaaattaaaggagttgcaaattcagggatttcgtccttttgaagaaaagatactattgccatttcagccagacataacagttattgtaggaaataatgcttcggggaaaacatctatattagatgttttagccaatttgttgaaagctgtacctaatatgttaaataataataggttggaccagcatgtacttttgggtgcagaagacatcaactataatataaagcctcgggagtcggtaagtcagcttagcttaattgctgcttatcctgaggtgaattttgaggaagaagaagagttgatcaatcaagaagaggagatatcttttgaattgaggttgaatccgagtcaatctgtaagagagcaaaaaataaggctgacatcatctgatgaggacaccgctaatggggacaccgccttaggggatagttaccctatatttcagcgggcaaaagctgaaaaaaagaaagtttccttgcctattttggcttattatgccgctaggcgtttagatcgggcggtagattcgcaaaagggaaacattctaaatatagatgtatttgcaaatttcagaaatgatgagcttagtcaggattcttttgatttagagcgtttgcgaagttggttaaattatttagagcaaaggcagctcaagcaacaatatgagacagaagaaaaagagagggaagaggaggtttggaaaaatattcagcaagtagttattgattttctttctggtaatggagtggtctatgagggggtagagacaatttacaatacaaaatatcctaatggtaccttagctgtaaaaacgaataaggggtctagatctatacaacaactttcttcaggagaaaaaaatatacttttattagtcattgatatagcaaggcagctagtcattgccaatccagatgcaacaaatcctttacaagagggaactggaattgttctgattgatgaagttgatttgcatttgcatccagcctggcaagaacagttgtttgataagttgaaaaaatgttttccaaaattgcagtttgtcgtgagtacacatagtcctcatgtagtgcgtcatttgaaaaaagaaaatttagtcatcattgagcaagaggaagatgggccacttttactgcaagtaggtaaaaagtatatagaagagcgatcagtagaatcaattttagcagaggtatttaaaatttctttagaaggtaagcatgatactaaagtgagagacttttatgacttattggcggagggagatttagagaaagcgaaagaactgctttctgagttagagaaattttggggagaagatgatcagcagataaaagcaaccactgcggcctatgatttagaaatgaaatggctagaagatgatgaggaggaataa

SEQ ID NO: 86635 - DNA, 705 bp, Saprospira grandis DSM 2844
atgcaagcgataaacaaaaaacgagctcatgagccgacttctttaaggctgtatcgagagacaacagatgcagcctcttatacaggattaccttcagacgttaaaagaaaaataaaggatgttcttctaaaaagtgagcaattttatttatgtgcttattgtctaggaaagatagaggtgtcaagcgctacgatcgagcattactcagcgcaaaatggggaagaagaaaatagcgaagaggaagacttaagctatatgaatatgttggctgtttgtgctggaaactgtaaaaataaacagtcgaaaatagagcaacactgcgataaggctagaggaaataaaacacttcaatttatagaccctagagaaaaaagtaaatcggaagctatattgacctatagctcagatggaagaattctacctaacaagaggaaagtagttgatgaagagcttcgatcaaaaatagaagaagacctgaaagcgcttaatttaaatgcagcttgtttggtttcctctcgccaaagtgcgaaagaagcagcccaaaggtatctagatgctgaggcaaaaaaagaagaatggtccgttcgggatatagaaaaagcaattgagaaatgggaaaccttaaaaaaaggcgctaaacctgcgcattacttatatgtagtactttacctaaagaaaaagctaaaagccgctagaagacggtaa

SEQ ID NO: 86636 - DNA, 2121 bp, Saprospira grandis DSM 2844
atgataaaagttgatcgcggaccagtacctgatttttttgtaaaatatgatactatttctaaggaaagttctctcagaggagaatcaagttacgattttaggagagtatggaggaacgattatcatttgcgtccgcaattaaaacatgtacttttaaaacgcttcaatagaaaatgtgcatactgtgaatccccggtaggtgaaaataataactttcatatagaacattttaagcctcgaagcctctacccctcattgactttgagttgggacaatctcttattagcctgtaatatttgtggaagcatgaagtctgctgaatttcctctagatgagaaccgcgaagcattattagtagacccctgtaaagacaatcccgaagatcattttgcctacacaagagatgggcttatttttggaattacagagaaaggaagaattacaatagaggttttgcaactcaataggaaaaacttagtaaatataagagaagttgctatgggcagctatgtaaaaatcctatacacccataacaattcccttaaaaaaataacaaaaaagttaaaagaatctcccttttcaggaatagctctttttttaatgagaataaaaaatagtaatattgtacttgacggccccagcttgattaacgagaggaaacaactcaagagtgaaacgatatggaatgaggttatttctaaagtaaaaatcaagagcgaaacgatatggaatgaggttatttctaaagtaaaaatcaagagcgaaacgatatggaatgaggttatttctaaagtagaaattcagaactttaaaagcataagagagactagtattaacttcaatcctttatatgaagaagaaaatgagcgagtagaaatgccaatcctttttcttcttggagaaaatggtgcgggaaaaagctcaattctacaagctttaaccgtttgcttgctcggggaggaaaaagttttgagcaaaacaggaattacggttgatgatattttgcgaaaagatggtgctcccaaaaaaggattcgtcaaagtttattttgagcagggaggaagtataacgcttcattttgagcgaggaaaaggatttcgttttgagttcgtagatagacagaaagctccttctgttcttttagcttatggagctgttcgtttagctagaagagcacatgaatcgaaatttgcttttaatattaaagaaggtgtcaatattcagggccttttcgacccttatttcgggctatccaacgccaagaagtttttattgaatttgggggatgttgatttcaatatcgtttcagaaaagatattaaagcccgcattatctttgtcttttgaagacagctttaagagagaaaaaggccaaattttcttagtaaaagaatcaggagaagaaatcagatacgaaacactcagttctggctatagagtaattattgttttgatctgtgatatcctaaaaaccaccttagaagtttttgagctagatttggagaaacaaggatttgaaaaaggagcctaccttagtacagataaaatgaagggagttgtaatgattgatgaaatagaaaatcacttacatcctagatggaaaattgaggtaatgaaaactttaagaaaagtttttcccaaaatgcaatttatttcgtctacacatgatcctctctgcattctcaactcttactatggggaagttaatgtagtagaatatattaagcccaaaaattctgatgctcaaaattctgaaaccattattttaggaaaagaaagcttaccggatcatgaaggactcagtgttcaagacattttaacttcagcgtttttcggtttactatctactagagccgatggaatggaggaaaaaatgaggcgtttttactatttaaaaagtcgaaacttatatgaaggaagcgatgattttcatgaattagcaactcttgaaaaagaacttaaagcatataatttccttggacgaaatcagcgagagcgtttaatgctagaagctatagatgactacttagaggagcaaaaaagaactgcaaacccagaagaacgtgccgcaaaaaaggctaaattaaaagcactattaaaacaaatcatcaaagacaaatag

SEQ ID NO: 86637 - DNA, 801 bp, Saprospira grandis DSM 2844
atgatttttatagataaagggaagaataagcctaagttttacgcatctgatcgctataaaaaaaagctgtttaatgaactaaaagtacttaaaactattctagacacaagaaagtataaatttgtttatagaggatacgcaaatgcattacgtaaagggtttagaagttatagagagaatgatgtttactactcaaaatgcgcttattgtgaaacggtaatgaggacaaatgacattgaaattgaacattttagacccaaaggtcctctaaaaacatgggatgcaagtaaagacagagctcaaaataaactcagcaacacggttattccagatacgggttactattggttagcctgtgattgggataatttattaccaagttgtccagggtgtaacaagtcaggcacagggaaaggatcttggtttcctctagtggaagaaagtactagaggacttagaagcgctggtcaaggagctgaagtcgatgaagaacctcttctacttaatcctacaaaaaacattgactttggaaaattcctatcttttaaagaagatggaacagttaaaccttctttaggacttagccctgaagatttaaggaaagctcaagcaacaatagatatttatggtctagggcgtgaaggccttgttgatgctagagctgcagtaattttatctctcaaactagaattaagcaaggattttgaactgtctgaaattcaacaaacttatttagcctcttcaagtgaattctccttaatggctagtcaagttattgaaaatctaattgaagctatgtaa

SEQ ID NO: 86638 - DNA, 1572 bp, Saprospira grandis DSM 2844
atgatttttcctagaactgtagataaccgctttagcaattacttagaagctagccttttccaaacatttagtgaattgggcgaacactacagtgttttttataaagtttggttacaagattcaaaaacagaaaatagtagtggatcatctgtgatgtcttttatcctcttagataagagagcgggaatcattatattagacataaatcaaggaggaattattaacactaatttccaaaatatagaaccactgctaaaggaagaacttcttcagcaactcccctcaaagaaaattccccccataaaaattttttctttttctaaaaatgatgaagctgcaataagcaaattagtccaagagctgctaaaccccttagctgaagaagctcaactaattgatgccgaggacttttctatcttagagcagttttttaaagttaaaagcgcattttacgcctatcccatccagttagaatcattgcgatttgaaaattataaaggaataaaaaaaattgccttaaatgggcttcctaaagaagcttcttggttttttataacgggtgaaaatggctttggaaaaacctcttttcttcaagctcttgctgtttcactagatggtaaactccccaaaagtgagcttcaaagagaacgctttgaggaatccccttcacctcttcaagcaaatctttggacgattattcataaaaacgaagttacagcttgtcccccattttttgtcttcagtaagggacagtcagatactagctaccacagcgttctagcttatggtgcatctcgtttagatattgataaagaccccaatcctcaaaggcatgcgagcaaccctattgagagcttgtttaatagtcaatatgtaatgagaaatattgaagacaaactcttagaatggaatctcttagaccgcgagcgttttgagaaaactaaacaaatactagaggagctactacctgccataaaaattgaaatcgtagctaagaaatcgatttggtacaaagaaaaagctccagaagaaagctattttgaggccgttagttttgatgaactagccgcaggttatcgcagtttgttggcgctttttggggatatgattatcaggttatatgaacgtcaacccaatgttattgaccccaaagagtttgttggccttatcattatcgatgaaattgccctgcattggcatccaaagtggcaaagaaagctgcctacaatactaagtcagctttttcccaaattgatttttgtagtatccactcatagccctatacctcttttaggcgctcctaagaatagtgtcatccttacgcttaaccgaactcaaaaagatggaatcacggtaaggcgcttagagagactagaacaagagctcccaaaactacttcccaacctcatcctaagctctgatattttcaatatggatgatttggctccaatcagtgcacaacaagaggaaatccttaatttcagtgcatctatgcaagacaaaaatgctagagaacaagctaaagagcatttaaaagcactattcaaagaattagaagaggaagaagactaa

SEQ ID NO: 86639 - DNA, 891 bp, Saprospira grandis DSM 2844
atgattcctgtccaaaaaaaacctctttcgattccagccaaactaagctcggaaagttgcctcaataatagacggcaaattattggtccacctataaataaaggtaaaattagtgcctactactatggtgatacttctgtaaaggaaaagttgaacgaactctattataataaatgtgcttactgtgaaagtttattggacggttttgatgtagaacactatcgtcctaaaaaaggagttactgaaaatactactcacccaggttactactggctagcttatgaatggaccaatttactccccgcttgcataagttgcaatcaaagacaaaaagggaatcatttcccagtgaataacagccataaaacaattccctcctgtaaccatctcagcgaaattattgagtcagaccaaaaattaaacgaactctaccttagccaagaagtgccccttttactacatccagaagagcaaaactttgatccctttgactattttgattttaatcttgagacagcagcaataatagtcaaaaaagatctaagtaaaacagacttaaaatataaacgggccgatgctacaataaaaataataggacttgatagagactacctaaagactcgacgagccaacattataatagcattatccaatgaattcttgttccatttatcccaattggcaacaggaaaaatccaactgcccgatctacaaactatcttttatcgcctcttagctaaactagaaagcaattctcaagtaaataacgaatatgctttcttctggcagtatttaaagacaaatgccctatatctaatcaacttatcagttaataattttattcctgacccaaggtttcaaaacctacttattcgacgctttcagaaatga

SEQ ID NO: 86640 - DNA, 1266 bp, Pseudomonas amygdali pv. tabaci str. 6605; identical to SEQ ID NO: 86100

SEQ ID NO: 86641 - DNA, 759 bp, Pseudomonas amygdali pv. tabaci str. 6605
atgagacgcgttatcaagggaactgagcctgcgtcactcaccgaatggaaagccagcgcaaacgaagactggacgcccacctatccaaccttgcagaacccgcaaaaacgcgacttgcataattgcttactgcaagagcagaacttctcatgctgctattgcggcagggaaatagagcttgatagcagccacatcgaacatttcagaccgcaggatcattatctgccattggcactggaatacagcaatcttcatgcgtcttgcctgcgcgagaccacaccaggaaacccgttgcactgcggccactataaaggcaactggttcgatgaggacctgcacatttccccgacagaggacgattgcgagcagcgcttccgttatctgctcacagggaaaatccaaagcacgtcccacacagatcttcccgccacgacgatgatcgaaaagctcgcactcgatatcgcgtatctgacaaaaagacgccaagaggcaatcacgcgcgtgtttgatgagcaaatcttagccagcatcagcgacacagagttgacacttttggtacaaggcctccgctctggggatgccaacaaacagctcgcctttagccacgttgtcgcccgctatgcggagcagtttctggcgtctttaaaccctcctcccgaaaaaaagctcggtcgggaatacgtgacacgcgtcgtcctgcgcacgtacgcggaaagaaaattactttcatatatttgtttatatttcattttcgtgtaa

SEQ ID NO: 86642 - DNA, 1359 bp, Pseudomonas amygdali pv. tabaci str. 6605; identical to SEQ ID NO: 86098

SEQ ID NO: 86643 - DNA, 651 bp, Pseudomonas amygdali pv. tabaci str. 6605; identical to SEQ ID NO: 86163

SEQ ID NO: 86644 - DNA, 1296 bp, Thiovulum sp. ES
atgaaaaattttattacagacttaactattaaaaatgttcgtggaattcaaaacttacatattcctttaagtaaaacagacaaaaaacatctcctaattactggaaaaaatggaagtggtaaaaccacaactttaatagaacttaataatagtttaaatggtctaattagtggtagttttgcacaatttatagaaaataagcaaaagcatattttaaaatttcaaaaacaaattaaagattataaaaagcaaaaagagaatttaactgatccaatgcaactaaaaaatattgaaaaatggatatcggatcttcaaaataatattttgtattctaaaagagctattgaaaattggcaagaacaggtagaagaattttcaaacttagatttaaatttcaatcaaaccgaagtttataatgaaatttcaaatggttcttttattcttgctttttttcaagctcaacgaatgaataaaccaactgttccaaaaagtattgaaaatgtaaatcttcctaaaaagaaccagacagctacaactttacatatgcagtttataaaatttcttgttcgtctccgaaatacaatgttaaatgaacagttcgatggagataaaaatagagccaaaaagataaaagagtggttcgatagttttgaaaatactttaaaagatatgtttggacataaagatttaaaactcaaatattttaatgatactttaaactttaagataaattatgaagataaagagtttgcattaaatgaactctctgatggatactcttctcttttggcaatcgtaacagagataattttaagaatggaggcacatggagtaaaagcttatgatatggagggaattattttaattgatgaaattgagacacatcttcatattgagttgcagaaaaaagtttttccatttttaacaaaactatttccaaatattcaatttattgttacaactcattcaccttttgttcttcactcaatgcctgattctgtaatttgtgatttagagagaagagaaattacaagtggagatagatttaaaaatagttcatattctcacattgtaaaaaactactttgaagttgatagtgaattttctcaaattctcctaaacgacattgagaaatttgaaaatttggtaaatcaatttgaaaatggtgaggtttcagaagaagcagaagaggaacttttagaaatggatattaaactcaataaaatttctcctatgctctccgatgaggtctatctacgatttaaaaatgcacaagaaaaaattttggataaataa

SEQ ID NO: 86645 - DNA, 621 bp, Thiovulum sp. ES
atgcacaaaattgatagaaaagagaaacctatttttcagaaatacagtgaagagagtgttaaaactgctctaaaaattgactttaagaaaaaatgctatctttgtgaagaggtaacacgacattttgaagttgaacatttctatccacaaaaagattttccacatctccaaaatgattacgaaaatctattttatagttgtcaaaagtgcaataaaattaagcccaaaactataaatacaagttcagaagatgaagttttaaactcttgtgatattgctgttgaaaatctaatttctctaaaatataactcaaaaaaatgtcatgtagagattttagcaacttctcaaaaaccagatcaaaaaacaataaatacagttaaattacttaagagaatttataacggtgaaaactcaaaaagtagttcctgtgaagatttaaaagatgatattggtgaaaaagtagagaatttttataaagttattgacgaatatcacagaacaaaactaaaaagagttgctttgaaaaagattaaagaagagttagagattgataagtcatattcaacttttaaactttggattatccgaaatgacaaaaaattaaaagaagtaattgcatga

SEQ ID NO: 86646 - DNA, 1410 bp, Citrobacter sp. A1
atgaaaattgaacaagttagcttaaaaaacttccgatgttttgagcagctagatgtgactttccacccgcagttgacggtgttaaccgcccccaatggtgcgggcaaaacgacgatccttgatgcagttcgcattgcgttatggccctttgtcaaaggctttgatctgggtagccaaacaggcaagtcagccaccattcagattgaagatgtgcgtcttgaacgccgcgagcaagagatggaaccgatattaccctgccagattacagctcaggccacaggtatccccattcgtgaaaaacagccacatctgttcgaatggcaacaggtccgcgagcaagtcaagccacgaactcaaagcaaaggtgataggtcgacacaagttctgacccggctcgccaagagctaccagtctgtcatctacaaggggcagcaagccgaagcagatactatcgagttacccttgattgtctatttaggtactggccgtctatggtatcaggggcgctatacctcagaagcggaggataaaaagctcgatgccagcgtattttctcgtctttggggttatcaaaactgcctgacggcgacctcgagctataagcagtttgaatcctggtatggctgggtatttcgcagctatcgcgagctgcaaattggtcagctagaaaatcagatcaagccccaggatcagagctcgttggcctactttgccgctgccattgaggttgtgcagcgtgccatcaacactctcacgagctcgctgaccggttggcacgacctgcaataccgggccagcatggggcagcaactggtgatggaacactatcagcatggctatatgccgctcgcgatgctcagtgatggtctgcgcaacatggtggccactgtgtcggatatcgcttttcgctgtatcaagctgaatccacatctgaaggacgaagctgcacagaaaactgcaggcatcgtgctgattgacgaagtggatatgttcctacatccggcatggcagcagcaagtacttggggcgctacaagaggcgtttcccttgctgcaatttattgtcaccacccatagtccgcaggtcctcaccactgtagccaaagagaatattcgtcaacttggctctgatgagcacggcacctatgccagaatgccgccttttagcccgctggcccatgagaacagtgatgcactggccaaggttatggaaactcatagccagccaagcctgccgctgcaagagaccattagtgaatacgaattactggttagatcaggggaggaaacatctgaacgcgcaacaacgctgttggcaacccttgagcaggcgggatatcagtttcatgagagtgatctggccacttggcgattcttggcacggcgtaagctggcagcaaaagggtcataa

SEQ ID NO: 86647 - DNA, 594 bp, Citrobacter sp. A1
atgatagaacttcagcatcgtgcgataccaaccccggcgttgacgcaataccgcacagctaacccggcagctacagccgcagattttgatagcactgcatttaaagcggtgaaagatgcagtaaaagccgatctgcatcaagaccagggggggctgtgtgtttattgtgaacagcatcttaagtcaactggggggcaagtcgagcatatcaagcctaaagcgggggcaaatgcacatcctcatctctgttttgactatcacaactatgcccatagctgtatcaataaccagacctgtggccagcgcaaagggaatggcttgttgcccatagagcccggtccaggttgcaatcagcaatgggccatagccagtagcaacggttgggttgaaccgctacccacactaaccagaaggcagcgtcatccagtcgtacaaacacgtgacatgctggggttgaataaggatccaaatctggttagtgaacggaaaaaatggttcacccaagctgttactgtgctacaaacggcgccagacgatatcgaccaatttttgcaattagcgccatttcgcgcactgattgctgcatccatttaa

SEQ ID NO: 86648 - DNA, 1698 bp, Vibrio cholerae HE-45
atgcgcttagcttcatttactatcggttcagatcgtgaaggtgaacgccaacgatttaaaaacctcaaaaatgttactatcgactttgaagaacaagagtggatcaccttagtcataggttggaatggcactggtaagtcaaatgtacttgaggccttggcaacggcttttcttgagctgataggcaagccccaaaaaaagggtacacacactaaacctgaaactcctagttttgcttacgatattgagtacatttgccatggtaagtacgtaaaaattagtgcagatccagatagtaaaaaagccaaatatatcatttcatacaagatggctgatgatgcaccagccgagcaaaaagaattgtttgagaatgaagatacttataaaaaaatatcgctaacggattttactaaacaaagagatgactttttgcctaagtatgtctttggctattattctggtcatagcgagcgtatgcatgatgtgtttcttccctatcttgagaaatatgatgagaatctgaggaatggtataaaccctggattgcgaaagttattctatgcaaagcctgtacatagccagtttgcattgctggcttttatgctaaatcgtgatgattttattactaattttcttgaaaaccactttggtattgacactgaagttggtatcgattcggtattgtttgttttaaatcagccaccttggaagtctagtgcaccggatggagatcctagattctggatgtctagaggggtggttaaagactttttatctaacctttatgatatagcaatagcacctattcgcgtaaaaagaaaaactcaaaaaagcctttggaattcgactgagcttgagcatctttatctatacgtaaaagatcttgagtctttagaacgtttagttggtgataaattaccaagcgagtttttccaagatcttgaaagtacttacgtttctgagcttatcagcgaagtgcgtattcgcgttaagctgaaaaaaaatgatggtagcgtgacttttcgtgagctgagcgaaggtgagcagcagctattaaccgtgttaggcctactgagatttaccgccgaagatgaaagcctgtttctactggatgagcctgatacccacttaaatcctaagtggagcgtcgattatattgattatctcaataagtttgtcacttctggctctaaaggcgaaaacaacagccatatagtactcacgacccataacccaattgccatcgccgaattaacacgcgatcaggtacaaatattgagtcgtgatgatgagactcgtactattgagtcgcataagccacattatgatcctcaaggcatgggatacgcaggcatcattactagcgatatgtttgggttaggctcaagtcttgataagcgaactcaaaaacggcttgaaacatatcgagcattggccagtattgaaaataaaacaaaatttgaagcacttcgttttcaagtcatttccgaatggttggacaatgataggtttagcatgtctcaacgtgacgatgattatgagcgctacattaaaatcagaaactcacttttggaagaacaatctggaatggatgattaccagcagctagtaaacttcgctctaagtttatcgcaagaaaaacgtgatgaaattgcgaagcaagctatcacaaaattgctgcaagaggatcagcgatga

SEQ ID NO: 86649 - DNA, 876 bp, Vibrio cholerae HE-45
atgagatttgttgataatgcctttattgatttacctgacaattgggaagatagggctgagactgccacaggtgcgttattggctggtgagattgttgcagatgatcgtagtgccatctggaaagacttaaaagaaagcctagagaccctatcaaatggtaggtgttggtattgtgaaacaaatatcccgagaaccgataatgcagtggatcattataggcctaaaggcaaggttcagggtgttgcattagcagatgaaggtaagtctttaaccagatatgacattgtgcctgaacactctggttataagtgggcagcctttaaggctgaaaactttcgtttttcttgtcaacactgcaatgagtacagaaaagaccttcaaggcaccgcaggtggtaaatggaattactttcctttggtaaatgaaccacaaagagcctatgaagagttagatgaagacaacgaagtgccagccttgcttgatccatgtaaaagattggattggaggttactttcttatgacaaatcaggtatgccattttctcgatttgaagagggatcgcctgaggataaaaaagtcaaactctcaattcggctgtatcaccttgatcaaaagaggttaaatgaaggtcgtatcgctcagtggaaacttttcaaaccattgttagatgaagcaaaaaagtggtacttaaaaaagctccggcaagatcaaggcgcagatgcttgctttgaaaaagagcttcgaaaaataggccaatggtttcaccctaagagtaagaatacttatttggggtttcttgtttatcaacttgaacaagacaaagataaggatatgctccatccttggataagcgaacttattagaactgtaggatga

SEQ ID NO: 86650 - DNA, 2064 bp, Caulobacter sp. AP07
ttgccggtggggcgctccaagacgcctcacctctattatctgtggctggccgatgcgtggcagaacctcttgccgatctgcggaacctgcatcccgaccgagccgcagtttccggtcggaggcaagcgcgccaggttgccctcgatcagccaggtcgatgcctacgtcgaccgggccgatggacggtggaacacgcacccgcccggtgacgaagaccccctcctgctcgatccggtccaggttcgcaatttcgagcagcacttggcgccaaagctcgatggagagctgatcgcaagttcatccaaggctgagcacacgatcgcggtcttcgacctcaatcgcgccgaacggcgtcatcagcgctatcaggcctatcaaaagcgcctccaagcgcttggagccttcctggcgcaagccgagcgggaaccggaggaggagcggacggtccaggcgtcgctctttgacttcgcggacatggagtttggcgggacctggtttttgctgcttcgtcgcatagccttgcggatcgccaagcttctggaggtccggtggagcacctcgcgcgccaatatcttcaggttcttcttgagactggcggcccaagagagggccgccgccggcttcaacacggcgcttgaggccgtggcgctcgaggacacctcagtgcgggcgcggcagtggagccttggcgcggtctactcagtacgcgcgcccatcacccgtgttgaaatccagaacttcaaggcgatcgagcatctggagctgaacctgagcaccggagagatcaggccggaggagggcgcttcgttcgtgaccccctccctggtcattctcggcgagaacgcgacgggcaagagttcgatcctggaagcgatggcgctcagccttaccacgccggccgcccgtggcgccctggatttgacttggccagacttcatcctcgatccctcgcaactgggccttgagcaagggcatgacgatcgccgcgcgaccgtgtcgatccgcctagcgacggggcaatcggtaaaactcacgatcaacgacaacggtccgtcggtgagcagcgagctgggcaatcaccaggtgccggtgttcgcttatggcgcgtttcgtcggtattcgaggcgcgctcttcggcccgcggcgcacaagcacgtgcgcaacctcttcgatgccagcccgctctccaaccccgaaccttggctcaagtcgctgagcaaggaagcgttcgacatggttgtccggtcgctgcgggacctcctgtcgatcgaaggcgacttcgacgtcatcgagcgcaagcgcggcgtcaagcatctgcgcgtggtcacgtcagtgaccgagcccgacggagtgatccgctacagcaagacgccgctgcacgcggtttcgtccggatacagatcgatgttggcgatgctctgcgacatcatgcggggcttgcttgacgagcgggtctacgaaggcttcgaaaacttccaaacggcccaaggcgtggtgctgatcgacgaaatcgaagcccacctgcatccgcgttggaaggtccaggtcatgaccagcctccggacggccttgccgcgcatgaccttcgtcgtcaccacacacgatccgttgtgcttgcggggcatgggcgaaggcgaggtggaggtgctgcaacgcgtggcgaccgtggatagcggccacgagagtcagctgcccattctcgtcgagcgcatggaaaacctgcccaacgtcgccgatttgcgtgtcgagcagctgctgaccagcgatttcttccagctcctgtcgtcggacgatgcggccgctgatcggcggcttgcgcacatcggcgatttgatcgccgcgcgccgccgcgacgcgctctccccagccgacggcaagatcctcgacgacttcgagcaggacatcgccagcgctctgcccgtcgggtcaagtgaagtgcatcgcatggtgcaagaagccgtagcgacctatcttgagcagcgccacgaggccagcagccaaacccttcaccggcttcgcgacaaggccaaggccgacatcctcgccgcgctacaggcgctctga

SEQ ID NO: 86651 - DNA, 951 bp, Caulobacter sp. AP07
atgcgccgtgttgatcgcgccgccgtcgatgtcccagcctcgctccagcccggaggcgctggccctgacgaattggtcgcggccagggcgtttcgtaacgccccgcccgctccaccgcgcacggacggcaagaacaagaagaagaccttcacctacaccgcctacaagggcgacgacgtgcgtctggcccttgaagcgctgttccacggcaaatgcgcctactgcgagaccttctacgcggccgcggcgcccgtcgatgtcgagcactatcggcccaaagggggcgtggccgacgagccgggtcatggcggatattggtggatcgccatgagctgggaaaatcttcttcccagctgcatcgactgcaatcgaaagcgcggccaggtgctggtcgccccgtccacgagccttgcgaccctggccaagacctccaagcgagcggtcagccaggcgggcaagaaagacagtttccccctggcggcgaccggcgtgcgtgcccaggccgaagccggcgactttagcggcgaacatgcgctgcttttgaacccctgccaggatgatcccgccacgagcctggcctacagcttcgatcccgcccatcccgccggccttatcgtgcccacgggcaacgtctcgcaacagcaacgcggggccgcctcgatccaagtctacggtcttaatcgacaacggctggtcgaagatcgaacacgagtgcttaggaacctggaattcctgggtgatacggtgatcgagctttccgcgacgatcgaggagctcgaggggcaggcggacgcggcgaaccctcaagaggcggcattgacccggctactcgccatgcgaaatcagacgctggcccaaatgaaagccttcacgcgggacgaggcgctctatgcatcgatggccagcgcctggctggacgacttcatggcgcgcctggcgtcgcccgcctag

SEQ ID NO: 86652 - DNA, 2421 bp, Burkholderia sp. BT03
atgctttcggaaggcgcactgcacgcaaaacggatttgttgggaacttgccaaattttctaaagcccgcgggatcccagaacatgatctcgaagacatcgcatatattctactcgtagcgctaatacttcgggacgaacgtcgcacaggcaagtacttgcctgcctctcacgccaaagaactagaaagcctgatctcggacatccttgatgttggcgacccgagccatgttgaaggacaactgcaaggcgttcgagatctcttggcagctgcgacaaatacccgaccagagagcaacccacgagagactcgcagatcagctctcgcaatccgacacatcgccgggatgcttgcgcacgaattaagagacttggatcgaaacggccgaatcgacgtctcggacgcgttgttttataaacaatttgcacgacttgcaccgtcgcatccgcgacatcatgctctagtagcacgattcgcacttcccctaatcgaccttcatggcggcgtttcagaaagccaacccggtccgggcgaagttttcgttatctccggaatgcctgatcaggcagacttcaattaccaacaacggaccgctagactgccggaccatctcaccacttcactgcgttttatcaggaacttgcgcctcgtcgcatacgacattgcgtttcagacgggcaatgtcatccaaacgccaaccgccttaagtgtgatcgacacgagcttcgatttcggcaggagcgcatatggtgacgttccagtgatttattccaacgcaggagcacctaatgacgttctggggctccgacgagaacgcgcttctccaatgttggtcgtcgcgggagttaaagatcggcgtttgttgaaacgttctgcagaagcgcgcagagagctcgtcgaatatcacggactgcgcgccgtcgttgatttcggcagtttcaactcgaaagccatgacaacgttgagcttttggtacttcggaccgcctttcccaggcttcgaagaccgtatcgctcacatagatgcgcgccagctacgcccgaatgcaaagtcggacgaaatgctctcatgcgcaaccctggttggcacgcttctgcgcatatggtccggaggggagactctttccaaatcacggatggaagaaactggcgccccacgacgcatcatcgcatttgttgaagaggccttcagtggcggaaatactctcgtccccggtttcgcccgtttcgtaaccagacatgagatgagcgagcgagactactcgttgcgggctgaggactatgtcggacgcaacgatgaccactcatggcggccagatgttgagatcaatccgattcttacacgccttcgcgaacatagacagggctcagcggtatttctgataggtgataacggcgccgggaaaagtttggcgatgcgcgacactgcaatggccctcgcactcgagggacatcatagctttggcgtctcgttcggtagcacagatagattcgaaagatcaccgcgcgctgagccgctaagctctcatttcacctacgctggagctcgttcgtttcgaagtggaccaaacgtccaacactcgctcggcgagcttggtgacatggtcaaggatatctatcggaacactcaacgtctggattgcttcgaggccgcattggacacgctaggatttcggccgaggcagttcctagtgcccgttgtgatgacctccacatcggaccctttggagcggctactcgccgatgttcatccactgtcgacgctttcgaccactgaacgagaacgacaagacctcaacagatggcagacgcttccggatggcgcctacaagcttgcctttatacgccgcgattcaccagaaatcgtcgttttcaactccttgagttcgggagagcagcagattctgacaatggtgataaagatcgttgctaaagttcagcgagacatgaccgttctcctcgacgaacccgagatcagccttcacgtcgcgtggcagcgccaacttccacaaattctacgtgaattctctcgtcggctcggttgctcattcgtcgtagccacacattcgccagttgtcatagcatcggcgacggattcagacgaccattgctttgtgatgcgagaccgacgcctttatgagctaaaagcagatcaacggcgatccgtcgagtccagtttgtttgagggtttcgaaacttacacaccatacacacatcacgtacaggagcgttgcgcggaaatcgtatcgagactaatcggtgaatccgatgagaacggcctactccatgacgagactactatccttgatgaacttaaacttctcaagcggaggttagatcaggtaaaggggatgagttccacgcaggatatcgtacttgtcgacaaagccattattgcagtacaagagatcctggcccaatga

SEQ ID NO: 86653 - DNA, 768 bp, Burkholderia sp. BT03
atgacaccacactcagaacgcgatggaatgcgcgagcggttgcgtaaagaacttgcagagtatctggctcgcccccatcgaacaaagaaatatcgcgaagacgcgcgcgcgacgctgtccaaattcttcagggaaacgagaaatggaaaagatggttgggtacttctcgaatcactggacaaggccaatggtgacaccgtaacagggtcggaactcaaggctgcgttacgcgatcagctagtaaagattcagtctaatcgctgctgctactgtaggaggtggcttgttaataccgcgtacgcacgtcccattgagcacatactaccgcgagcccacttccggaaattctccctacatttctggaatttggcacttgcatgtactgactgcaatacattgaagagcgacaaattatggggtgccgtcaacccgaagcgtcgcagctatcctcagccaaacgaaatcaatgattggtaccaccctcgatttcatgtttacgatcaacacatccgctttatccgacttgaatctaacgggactacattcgtcgtgtttctgggattgacgacacaggggcgcacgctatgcaaatcattactgcgccatatcgcggctaaggaaatgctaatttccaataacgcgacgctaagttcctgcatggcaactctcgacgaatatggtgaccgcttcaacacggaaaaagctgaaaaactacgtgactttcaaaacgagttgagcgcttctgtagtccgcatgatcaagacatag

SEQ ID NO: 86654 - DNA, 1356 bp, Pseudomonas sp. GM18
atggaaatcaaaaaaatccgactgagtaatgtcggccgttttaccgacctggaagtcgcctttgcgcctaccccgacacatccttcgaatgtgacggtgtttgtaggtaacaacggtgctggtaaaactacgattttgaagtcgctggcgacatcgctcagttggttggtggcgagaatcaggacggagaatgggagtggaagtccgattcccgaggacgccatcaacgatgaggcttcgactgctgtcattgagatctttgttgatgtgacctatccggacgcaacaccaccagtcaaacactttgactggacacttgcacgatcgaaaagaggtcgtaagcccactagaaccagcaagctttctgacgcgactcaactagcggaaggctacagagaatacctatcttatattgatcaaaccgtttcacttccactgattgcctattacccggtggagcgttcggtgttggagatccccttggggacaaaaactcaacgcagctatgatcaatttgatgggtatgacaactcactcaataggggtgtcgactttggccgtttttttgaatggtttcgcgaccgcgaggacattgaaaatgaaaatatcggctcagccattatgttcagggatctacccgagacttcttctctggctacagatgcattgttgggttacttgaaaaaggcatatacagactcgcgtgaccgtcagctaacagccgtccgttctgcagtttctgccttcatgacagacttcaaaaacctccgggtgctacgcagacctcgattacatatggccatcgacaagtcaggcaagactctaaatgttgctcaactatcccaaggcgaaaaatcgttgatggcgttggttggggatattgcacgtcgattggcaataatgaatccgacactggaaaacccgttagaaggcaggggcgtagtgttgattgatgaggtcgacctgcatttacaccctcaatggcaacgtcgcctcatccatcagttgaccgaaacattccccaactgccagtttatcctgacgactcactcaccactggtcatcagcgatagcaaaaacgtcctgtgctacgtcctggatgacggtgatctggtggagcagaacgggctatacggtctggacgcaaaccaggtgctgctgggtgtcatgaacaccgaagtccgtaacaaagacgttcaagagcgccttgatcggttgtttgagctgttgcaagacaatcatctgaaatccgcaaaggcgctgtttcaagaactgtccaatgagcttccgtccgggcatatcgaactggccaaggctgccctgctgatccgcaagctggagatacgcagtgcgtaa

SEQ ID NO: 86655 - DNA, 630 bp, Pseudomonas sp. GM18
gtgcgtaaaatccagaaaggcaatgaaccagagtcactcaggcagtggaaacgaacccaccctcagcaacgatacaccgacctcccccctacggagcgtcaatcgattcgtgctgcttgtcttgaggaacaacatgggctgtgtgcctattgctgtcacggcatcacactcgagaacgctcacaacgaacatgtcgaggcgcaagactcagccccgaatcgaactctggatttttcaaacattgttgccagctgcaatcattcaaaacagtgtggtgatgctcacaagtcccagtctctaccactgacctccctgatggatgaatgcgaaaccgagttgaagttttacctctcgggcgctgtagaaggccttacccccagagcagcaagcgccataaaagtactcaatcttggcgagacacgtaaaaacaatctggcgttgttcagtactcgcaaagcaataatcgaatcactgcttttcacacacagcattaagccctcggaactcagactggaaagtgatgatgttctgtcgatcctgcttgaagagttgcaacaacctgatcaaaacaatcggttgcagcccttcgctccaatactcgtcaatgtccttcgtcaaatccgggactga

SEQ ID NO: 86656 - DNA, 1356 bp, Pseudomonas sp. GM30
atgattgattttatcaaatttcaagattggggtgaggtttggagaacaataccgttcgtggctgcggaggacttattaggtcagtacggatttagaagcaccatcgttactgggcagaacggttcctataaaagtacgatgctgagagagttggtcgcgggggtgattgctcctaaatctacgtcggccatggtaagtgtaagtgatggcttgagcatgaagcatgtcatttgcgcctcaggttccgttgcagacagattcccctctaaggaaaaggcgggtggcggtagcaccgagttcgcgacagagcagtatgcttacattgggcaaagggttggggcgaatctgctcagcaagaaaagaccctttgagacggtgctagtatttgctttggatggaaacaagtccgagcgctatgagtggccgttttataatagagcacatgagtttgccaatattgttccggagctggaagtttcagtttttgtgaacaaagataaaatcactcggactacgaaagctccttcaagaatagagcagggtgtttcagttgaggcgctgaggcgctcattggatcttgacgattttaagttttcgcggtatttctcagaaagcgtggctattaacattttaaatgagtttgatgagcatgtgtttaaggagttttccgaattcatacgttcgtctagatctacatttgttttgaatatgggtagtggtggtatacgctgtaaaactgcgtctaatgatgtggttcgcctaggctttatgcttgatattttttcgcttcgagatgtgaaagttcaaagggtaggtagccaacagcctttctcaatatttgagttaagctctggtgagtatcatatgtacacgaacctcatggggcttggttttggtgtggaagaaggttcgctgatgcttttggatgagcccgataatagccttcacccccagtggcagcgagatttcatggccgcagtccatgggatctgccaagtagggatgaagtttgggcatttgattgtatgcacccattctccgcttattgtcggtgccgcgctggaaggtagcacgattgtggacttgtcaaatgatgagcccatcgtcagtgtggcttcatttggcgcttcttctgatgacattctactggagcagttcggtatcacttccagccgaaaccggatcgtagtggatgtggttcagcgcgcggtgtctattatagaaaaagatgggtttgaacatccagatttgctcgccttgaccgatgaattggtgtctattaagtcggctctgaaatccgaagaccccctcgttgaagtgatcgaggcgattcttggagcatctggagatgattaa

SEQ ID NO: 86657 - DNA, 726 bp, Pseudomonas sp. GM30
atgattaatattggttttgaacggattcatccgatcccagttctgcccgatggtattgtggttgcagacctgttaggtcttgattgggatagtcagggtaacgcagttaaggcattcaagagtgccttgaagccattgttgcgcaaggtgcaaaaggcaaaatgtagtctctgtcggcgtatgctctacgatgattatgccgtccacttggagcacttcatcgaaaaaaatatacatggagattacacgttcgaggtaagaaatttatctttgtcctgcgggacgtgcaattcgaaaaaacaagggtacaaccgaactttaaatggtttgattagaaagcgtgcaaaacgtaaggagctggaagctgagaagcactgccctgcgcttgccgtgaaaattcctgccaatgcaccgttacccactacgcccgaaagctatcgttgggttcatccttactttgatcagtactcggataacattgaaatccagaaaggttggatttttatcggcaaatccaggaaggggatcaggactattcgttcagtgaagctcaatgccttggctcagattgagcgcagagccctcatggagcggtttgaggcacggccaggtcgattatcgatgctgatgggtgcaactgctgagctcgacaatcaccgagcggggcacattttacaactggtagccaagaaattgtggcaacgccgagaagcctccggcgtttaa

SEQ ID NO: 86658 - DNA, 1272 bp, Pseudomonas sp. GM41(2012)
atgcgcctggaccgtctcaacattcagaattttcgttgctacgaagatgccactttcgactttcagccgggtttcaatctggtggtgggggttaacgggagtggcaaaacctccttattacaagcgatagcaacttgccttaccgacttcagtaacgcgttcaatgggtacttcgtacctttagacgaagagttgatacgtttcgcgattgacaaacaccaaggaagagtccgatttgaaagatgttatccgatgcaacttaaagcagagggatgcatcttcggtttatcaaactgggttatcgaaaaattacgtaacgatggatccgcgagtgcagatgcgaacgtacttaaagtactcacagagaaaaagaatctgctgggcactgaaaataatctagatctaccaatacttgctttttatagagcaaacagacggtgggcaatatcaggtgtgaccgcggaatcagctgccagtcaacgggtatcacgcctgcacggctatgagaactggttcgatgccgcggcgaaccttaccgactttgagagctggttcattggaaagaccctagaacgccttcaaaaagtttcggaaaccgaaggggcgatcaaacatttcgatgatgagttatccctagtaaactcagcgctcaaaaaggcacttcctaattcacatggacttcgctacgacataacccttcgcagcctgatggtcgaccttgatacaaaggagtcacttcctttcaaccaactgagcgacggccagcgcgcaatgatcgcattaatggcagacattgctcgtcgaatctgtcttctaaatcctcattttggccaaaaagcattagctgaaaccgtcggtattattatcatcgatgagcttgatatccacctgcacccctcttggcaacgaagcatcgtagctgcattaaaatcagccttccctaaggtgcagttcatcgccgccagccattcaccgcaaatcatcggtagcctgaaaccggaagaagttatcgtgctgaataacggagacgggtctcacccccgcgtaacttatgggctggactctagcagcgtgcttgaggaggtgatggacgtctcccaacgtgagccaaaaattgaagcgctgttgtctaagttgttttctacactcgaggataacgaccttaaaaaggctaaagtacaactagaagcgctcaagaaacaagcccctgacttaccagaatttgcgggtgcggaagctttgatcaggcgtaaggagatcctcggtaaatga

SEQ ID NO: 86659 - DNA, 645 bp, Pseudomonas sp. GM41(2012)
atgaaacgagtgatcaaaggaactgaacccgcgtcgtttacaacctggaaatctacagcgaacaatgactggagtccaacgtactccaacttacaaaatccgcagaagcgtgatttgcacacgaatctactgcaagaacaaggctacttttgttgttactgcggtagagaaatagatgctagcagcagtcatatcgagcatttcaagccccaagaacactatggggagttggcactggagtatcaaaacctccatgcctcttgccttcgcgagacaaaacctggcaatccattgcactgcggccaccgtaagggcaactggtttgatgaagcgcagcatatctccccaatggacgagcaatgtgaactacgttttcgatacctgagaaccggtgaaatccaaccgacagtatctaccgatctgccggcaacgaagatgattgaagtgttagcactcgacattgcatatctcaacaatcgccgtcagaacacaatccgactgttgttcgatgaggagttcatcacacaggccagcgaggaagagctgacccgtctcgttgctgcaattcgttctaccgatatccgcgaccaaaaacctttcgaccacattatcgcccgctacgccgaacaactcctaggccgctaa

SEQ ID NO: 86660 - DNA, 1371 bp, Pseudomonas sp. GM50
atgaagctagaaaaacttacgctggcaaatttccggggctttgatcagattgatatcgaattttcccatgatgtgaccgtgattgccggcgtcaatggcgtaggtaaatcgggcgtactcaaagccatagcgagcgcaatgtctctggcgctgccgaaattcaccgtgtccagggaagcgcctattggcttgagcgatactgacgtccaatcgggtaagcccgggctgtcggtggcggtcatattgggacttgatgcggcaaaggtcattgtcgatcttacccacgctgcaccgctggcagccgacaaagcagagagcctactcaaacgccgtgatgacttacgttttgctactcgagaattgaagaagggttcaaaggaagagcaggacgtcaatgaagagatccgccgaatagaaatgcagcttgatgagacttcagacattgccgctgtacgcatcctgcccaatgatgctgcggtcaaatccgaggacctgatcgcagccagcaaggccggtatacaacaaccgcttgcagtgctctattcaacttcgaggtttctgtcgcgactgccacctgtactaccgaaggcaaagagcattgactcagcgacggcttacgacaagtctcttagtcagttggaagtgtcgttgaacgactttgccaactggttccgcgtagttgtatcgggagcgggatcagaaactagagagcggctgtttcagcagttggagcaagcggtcaagacgtttctgccagaagtttccagcttggcgctgcacgagggacgacctccgcgattcagtgtgatgaaaagcggccgtcttctatttctggagcagctttccgacggtgagcgcggtctgctggccctcgttttcgacctcgtccgtcgcctggctattgccaattctgacagtcgcaaccctattgctgagggtgtggctttggtgctgatcgacgagatcgagctgcatctgcatccgaagtggcagcgcgatgtgttgccccgcctgcgcgatattttcaaggcttgtcagtttgtggtgactacccactcgccgctggtgttgggcgaggtgcctgcacgctgcgtgcgttttctagaatttattgatgacaagatatgcgcgactgtacccactgaggcgtacggtatggatgccaaccgcatcctccaggagttcatgggcgctccggttcgcaatcggcaggtggatgccgagctaacgacactatttgagctaatcgatgaggagcactttgatgaggctcgcgccgccatcgcgaacctggctcgaaagttaggcgaagacgaaccggaattgacccgagctagttcgttgatacgttttctggagggcgccgagtaa

SEQ ID NO: 86661 - DNA, 627 bp, Pseudomonas sp. GM50
atgcggacgatccagaaaggtatggagcccgtctcgctgacacgacatcgccaacagccacatgctgattacgacaactacaccgacaaggccggcttgcgagcggcactcgtagctgaacagcagggggtttgctgctactgccaatcgcgcatacgtgctacaccggacggaatgaaaattgagcattggaaatgccaagccttgcatcctgcacggcaactcgattatagcaacctgttgggagcatgccttggtggtcagggaggagcggggaaaaatcggcattgcgacactcaaaaagggaattccaatttgtgtttcagtgtttgcgacctagcgcatcccgtagagagacagatcaagtttcttggtagtggcaagatcacttctgatgatgctgcggtcgacgcagctctgaatgacgtccttaacctcaattggtcccggttggtgagcaaccgaaaggctgttctggatgcgttcaaacaaaaactggggaaaggcaatcttaatattgtcgccgaactgcaaaaatgggacggtacccaagcgggcgagttgccagaattcgcgcaggtcatggtctattggctaaagaaaaaacaagcgagggggcgcgtatga

SEQ ID NO: 86662 - DNA, 1368 bp, Pseudomonas sp. GM50
atggaaatcaccagcttcaagctcaaggatgtcggtcggttcaccgatttgaccgtttccttggcccctaccgcgaaacacccctcaaacgtgacggttctggtggggaacaacggcgccggtaaaaccactcttttaaagtcgctggccacctcactgagttggttggtcgccagaattcgtactgagaaaggcaatggcaatcacctggcagaagaagacattcgaaacggtgcttcatctgcattaattttgattggcatagaagacgagtcacaggcgcgctcgagtcctcccgatgcgaaccccgaagatgctctgttcacgtggggcattgcccgcggcaggcaggggcgcaaggctcatatccatagctcgttaggaggtgtgagtcgtctggcggaccactaccgaaaccaacttaccgcgtttgataaagcatcacttccgttgattgcctactatccggttgaacgttcggttctggaaatccccctgaaaatccgaaccaaacatacatttgatcagttggacggctatgacaactcgttgaatcgtggcgtagattttcgacgtttctttgaatggtttcgcgagcgcgaagacagcgaaaatgaaaccggcgtgtccgacgcagccttggcagagatctccgacaaattcggcaaggacagtaaggtctggaaagccctttcccaagtgaaagcctcctcccgcgatcgtcagctgacagctgttcgctccgccatcgccgcgttcatgcccggtttcagcaacttgcgagtgcagcgcaagccacgcctgcacatggcgatagacaaagacagcgcgacgcttaacgtctcccagctctcacagggtgaaaaatccatgatggcgttagtcggggatatcgcgcgccgactggcgatgatgaatcagtctttggacaatccgttagaaggcgatggcatcgtactgatcgacgaagtcgatttgcacctgcatcccaaatggcagcgcagtttgattcggcagttaagagagacctttcccaattgccagtttgtgctgacaacgcactctccgctcgtcatcagcgacgcaaaggatgtgctgtgttacgtgctgaatgacggggaactacgagagcacaatggtctttatggacttgatgctaatcaggttctgttggaagtaatggacaccgacatccgcaacagcgaggtgcagcagcgcttgaatcggttgatggagcgcttgcaggacggtgatctggacgaagcgaagaaattgttttccgaactctcactggagctttctgacggtcatctggagctggcgaaagccgcactattgatccgaaaactggagttgcgtcgtgcgtaa

SEQ ID NO: 86663 - DNA, 633 bp, Pseudomonas sp. GM50
gtgcgtaagatcaacaagggtattgagccggaggcgctgactcgatggaagcgcttgaacagcacattacgttaccgggatttacccgttgaagagagtcggtccattcgctcagcgtgtatctcggaacaatacggcttatgtgcgtattgctgccaggcaatcacgattgacgacgctcataacgagcacattgaggcccaggatcgcgcgcaaaatcgcactttagacttatccaacataatcgcaagttgccaacgctcccatcaatgcggccacggtcgaggcacgcgagcactgccactgacacctttgatggatgaatgcgaaaccgagttgaagttctatctgtctggactggtgaaggggcataccgaccgagccaatacttccattgaggcgttgaatctgggtcataccgaggaaagcaatcgtggtcttgtcggcgcacgtaaaactctggttgatgcgttgatttatacccagaacctgccacccgacgagctgcagaatgaggacgaagatttcttgggcttacttctggaggacttgcaaacgcctgatgccgggcgcctgcagcccttctcacctgtattggttaatgtaatccgtcatttgctggctcgaccttaa

SEQ ID NO: 86664 - DNA, 1338 bp, Pseudomonas sp. GM74
atgcacatcaaagatctacagatagaaaaattgcggtctttcgagagtgccacccttgagttcaatctgccgggggccaaagatctgcaataccccaacgttaatgtgttgctgggggacaatggcctcggcaaaaccagcgttctaagggccgttgcccttgcggtattggggcccctcctgagtggcagttccggctttgtacctgaaggtcttatccggcgcgcaccgggaaaagtcgctggcaaaatcaacctcaacaaaaacaaggcacgactgactgcgcaaatcctctcgacagtggaagaaagaccaccacttaaaaaaagcgcattgaccatgcccgaagagttttcggtaagcacagaaatccgcaccgtcagcctggttgagaggatgagttggagtatgtcgccgcaagactacgatgaagccatcgaagcaatgcaactggatgaaaagagccctgcctttttcattgtcggctacggcgccacccgtcgcgtagaagcggcagcccgagttgacgaaagcgcccgaacccgctctcgcttgcgtcgttatgaacgtgtcgccggcctcttcgaagatcacttgacgctcatgccactgtcttattggctgccagccttcgccgaagagaacaagggtcgatacacgcaagtcatcaacctgatcaacgatctgcttccccccgtctgccagattcaaagtgtgcccacggatcgagagcacctattcgaaatgaacggaacagtactgccgtttcgcgccttatctgacggattcagggcctatatcggctggattggcgatatgttgttccatgtttgccaaggtgtctccagtggtttgaaactacgagagatgcgtggcgtcatcatggttgacgagattgatctgcatcttcatcccgagtggcaacgcagtgtggtccctacactagccaaagctcttcccaatgttcagttcatcctgacgactcacagcccattggttgtaggctcattgacttcgcaaaacctgttcgtactggcagatgaaaatggctcaaccgttgtcaagcgcctacccgaacatgtacggggtaagagcgccgagcagattttgctttccccctacttcggccttgaaagcacacgagcgactccaactgcggacaccctgatcagcttggcgcgcagtgcagtttccggagatgccaaagcttctgtcgactatctgagagtcctcgccgagggtatgaccttcgaagaaatggcaaaacctcaaaaaaccaaaactaccgctactcgtgtccgacgcccgcgtgtgacgccgtcagagtcgaaagaatga

SEQ ID NO: 86665 - DNA, 888 bp, Pseudomonas sp. GM74
atgatccgctatccaatctcggaagctgagctaattgcgttgatcaacggagtacaaccgaactggataggccgtgctcaaacgcgaatccagcactacattgctgccggtggctataccgatgactcggacttttggggggaaatcaaacacgtctacatttcgctgcagcatgaaaaatgcgcgtattgcgaaaccaagcttcagggagccgtattggcgagcaaagtccatgaagtcgagcactatcgccccaaaagtgaagtcaaaccgtggcccaatcacaaggttgttcactggaaagacttcaagcctgcctggcccacaggagcaggcagcaaggtgggttattacaagctcgcgtatcatcatctgaactatgccatcgcctgcacccgctgcaattcgacgctcaagtcgagttactttccaattcgtggcaaacgcgacattcagaatagtgacccggcgaacatgcaaaaagagtctgccttgctgctctacccaatctcatcggtcgatcccgatgacccgcaagaactcattacgttcaatggagtactggcggttccgcgacacagtgatggccccgcaaacgaacgcgcagtcacgactatcgagttttttcaactcaatcatgaagacctcacatcacgcagagccgtagaaatcaggacgctttggttcgcactacagttggctaaaatcaatccgcaagacaaacaactatacgaagacacaatcgcgttgatgtgcagtccgcaaagtcctttcagttcctgcgtatcagcctttcttgaactcaccaaaacggactatccaacggcagaagcgatggcaaagctcatcatcacggcattaacggcaaatcaaccactaaccgcctga

SEQ ID NO: 86666 - DNA, 972 bp, Pseudomonas sp. GM78
atggcggatcactaccgcaaccaactgactgcagatgataaagcctcgctcccactgatcgcctactacccagtcgaacgttcagttctggaaatccccctaaaaatccgcaccaaacactcctttgatcaactcgacggctacgacaacgcgctaaaccggggtgtcgatttccgacgcttcttcgaatggttccgcgagcgcgaagacagcgaaaacgaaaccggcgtatccgactcagcattggccgagatttccgccaagttcggcaagaacagcgacatctggaaaaccctttcccaactaaaggcttcatcccgagatcgccagttgaccgctgtacgttccgccatcgccgccttcatgcccggcttcagcaaccttcgagtgcaacgcaaaccccgcctgcacatggcgatcgacaaagacggcgtaaccctcaacgtctcccagctctcgcagggtgaaaagtcgatgatggcgttggtcggcgacatcgctcgccggttggcgatgatgaaccagtctctggacaacccgctggaaggtgacggcatcgtcctgatcgacgaagtcgatttgcacctgcacccaaaatggcagcgcagcttgatccggcaattgagcgagacgttccccaattgccaattcgtcctgaccacccactcgccactggtcatcagcgacgcgaaggatgtgttgtgttacgtgctcgacgacggggagctacgggaacacaacggcttgtacggactggatgccaaccaggtgcttctggaggtcatggacaccgatgtacgcaacagcgaagtacaaaagcgcctgaatcagctgctcaagcatctgcaggatggtgatctggaaagcgccaaagggctattcgccgtacttgccaatgagctgccagaggggcatctggagctggcgaaggcggcactgttgatccgtaagttggagctacgtcgtgcgtaa

SEQ ID NO: 86667 - DNA, 621 bp, Pseudomonas sp. GM78
gtgcgtaagatcgataaaggcaaggaaccgggttcgttgactagttttaagcgctcaaacaggacgttggcttatcgggatttaccaccgcaagagcgtcagtcgattcgatcatcgtgtatctcggagcaatacggtttatgcgcgtattgctgtcagtcaatcacggttgataacgcccataacgagcatcttgaagcccaggacagtgcaccgaatcgaacgctggagttttccaacatcgtcgccagctgccagcgccctcaacaatgcggtcatggtcgaaaaacacggcagttgccactcacaccgttgatggccgaatgtgaaaccgagctgaagttctatttgtcaggactggtggagggacaaaccgaacgtgccagggtttccattgaggcattgaacctagggaatcgaggccttgtcggtgcacgcaaacagatgctcgatttgctgatgttcaatctaagcaaccagcccgccgaactgcagtttgaggaggaagagacactggcaatgtttctggatgatctgaaaactccggatcccgcacaacgtcttcagcccttttcacctgtattggtcaacgtaatccatcacctcctgacccagccttga

SEQ ID NO: 86668 - DNA, 1332 bp, Pseudomonas sp. GM79
ttgaaaattggaagttttgatcatgatgggactatggttgaattaattcccgctgaagcattatcagcttcgagcaattcatttaccgtggtagtgggtaaaaatggcataggaaaaagccgtttactgtctggaattgcaaaagagctcacacagcgttacgactatgattatgacgatgaagatgagccattggttatagcgatttcaacaagcccctttgataagtttcctgctatttccaggagcagaagcaaaaattacagtaatttccgctacgtaggtctacgcggagatagttcagcttctgcctcatcattaatatcccttatgtcttctgcagctcgcggtttacttaaaagcgctctgcatggtcataatggagctagctttctggaagttttttcttcactacacttcagacctcaagccaatttcatactaaagcctgcctttgacaaaaccgcacattccactgccaactcaacagaagaatatttctttgtagagccagttgaaagtaccggcccgatacgagtcgataaaagatacaagcatgtctatgacgggttaggcactgaagagaagtcttcagttgagtatgcgatgtccaatgtcgcctcttactaccaagctcgcaaggcaattgagcttgagtttgatttcgcaacaagcacgtcctacattgacggcaaaaagctatccccctccattttaaactcaatcgtcatcctcatgaagcttgggcttatgcgactaatggatatcaccctagagaaggaagaccacggatctctgagcctacgccgcgctagctccggcgagcagtgcctattaattataatgctaggaattgccgggcacattagagacggctcagtaatcttgattgatgaaccagaaattagccttcaccctcgttggcaggaggaattcatgccaatgctgacatcagctttttcggggttttcggactgtcagtttattatcgccacacattcgccacaggtggtttcccgagctacatccaaattttcttacattttagtactggaaagtggctcgttacttaactccaaagacttcaataacaagtctgcagactttcaattggcagagcttttcggtgctcctggcagaatgaacgaatatgtatcccggctaggattcaaccttatagcaaaaataagggccagaaaaagcatagacatcgagatcttaaatggcctcgatgacctattgatgtttaagtcgagattgtcagacgaagatccagtaaaaaaacttattatctcagtagaggagttagttgccagccatgccactcattaa

SEQ ID NO: 86669 - DNA, 591 bp, Pseudomonas sp. GM79
atgccactcattaactctgctgtaactttcagcccggaagctattttaaaaatcgcgacagtcaagtcggaaccccagctcagtcacacgcgatggggcgatgacgaccttgaagaactgcggcgcgaaatcagaaacttctaccggcgagagcaaaagctgacttgcgcttactgcaaggaagaaatcggcgtaatcgccgccgcaaatgctccaattgaacatatcttgccaaagtcgaaatatattcaattcatgttcgagccaaaaaatctctgcgttatatgtgccgactgcaacacctacaaaaaagacagggaggggctcttagacccccccttatacagagacgctgtaagaatctaccctctggattcaagtcgctacagattattccatccacattttgatgagtatgatcagcatattaaaaagatcagatatatatacctgccaggatcaaataaagggagctacacaatatttgcatgcaatctaaatagggttatcgtggagctgggtgtatctgacgaactcttcaatgacgtcgccactgccctcgagcgagctcgctttggcggaaacggctag

SEQ ID NO: 86670 - DNA, 1527 bp, Pseudomonas sp. GM80
atgttgcgttcgtttgaaataaccacaagcaatttagatgctcaagtaaatttgtacgaagatgaaaatactactttcgatacttggatctcggttctgatcggccaaaacggaagtagaaaaagcttcatattgaggcaaatactcgacgcggcgactggggagacaaataaagccggggcgaaaacagtaagctttgagagcaaaggcaccaattggggtgacggttgttttcctgattctattacttgtatatcgggaactccgctggatcgatttccacggatgcggaattactctttaggcatatctgtttccaaagcgaggcaaggggttcgtaaggagttcttatatctaggacccagagcgtcgaacgggatgacgggaacggcccccagcgaaagagcattgatgaccgctttatttttaaacgctgacaaactggctgggcgagcccacctgtttagtaccatttttagtgaggttggtttcaggcctaaaataagaatcttgctgcgtttggaaagagagttgtcaatgcatgggcggagattcaatgcaaaggagccgggccgcattagtggccctcccgaacgagcaatggagcgtatttataaatactctcttcgcccttttttggattctagttatgttcacaatcttggaggtagactagaagcagcacttggacgaattatgaatcttgatttttacggtttttttgagctggttaagatttttaattctgatgagcctcctgtatttgtctttaaggatggtcgaattcagctggagagtccagcgccgcagggatgtcgtatcggaggtgatgagcttgaggtctacgtgcgggcaggtgttgttttaattagtcataccacattttataagattcaaaatgatacttgcgttggtgcagaaagtgctgcagttgatttagaactcaacggagaggatctaagctcgggacagtggagttggatcgcgggttttgctggcttatgcgctgatgtaacgcaagaaagcctaattctagtcgatgaacctgagaacagtctgcatccgatctggcagcaaacctatgtaccaacactaaataagcttcttcgagagtttaaaggttctcaggccgtcatcgtcacacactcccctctgatcgcgtcaggggtagaccctgaatggggcagagtagaagcgctagtgaatcacggtgttgacgaggaagggcggcaggtcgtcaggtcgaaaaccgtcaataatacgtttggctggcgagcttctgacgtttatgaagaagtgttccaggtaccgtcttcgcgagctccagcttttacgaaaaccgcggatattgcgttggggttgctcaggagtggtgaaccggtcaccgtagacgaatacaagttgtttaaagacgaactatctcgggacttgcagacattgccggtcacggacccattgagaaatgtgctcgtaagtatcatcaaagatcttgaagcgaggctggcccaggagaacatggatgtttga

SEQ ID NO: 86671 - DNA, 876 bp, Pseudomonas sp. GM80
atgtttgaaattatcgatttctcagacgatgacgatgcgctacttgaaggagtccgtggccacaaaggaaaagcctggtctgccaaagccgaagtcgttgcatatcgaaaaagactgcttgaattacagggttatcgatgcgcttactgtcagggtgtaattgatcttgacgaggtgggtcatcgtgagttagatcatattttaccgaagtccaccacaaaagactgcactatagataagggtcgaagcaatgacgataagcatcgtcaacatacatttgggtatccccagttcacattcgagcctcttaatttaatcgtgacctgtaaaatatgtaatgcatttaaaaaaagccacgatccactgcttgatcgttcgctggcttatgagagcgacgactatcctgttctcggatctattctttggttttacccctattcacatcgttacagtgatcatattagtcgcacagaaaattggacatataagcgtttgagttgccagggcgaagcggtgataagagtgtgtaaactggataaggctgaagtgctcgcatctcgttttgcaattcgagcattaattcaagccaaacggtcgaagaatgcaagagctgcttttacaagcttggcagcccacgttcataatgaggtgtgcagcatggaacaagcagtcgacgctctggcggggactcttgatatcagcgaaaatatttgtgagcaattgattgagttgtggcttttctatttgcgcggaggtggagttcggcatgtagaaaagtttgaatctattttggccgccattgtttttgatgagtccctcggcattgatgaagcagcagagccatttgcgcgtgcagcagaagtgcaaacagcttaa

SEQ ID NO: 86672 - DNA, 1272 bp, Pseudomonas sp. GM80
atgcgcctggaccgtctccacatacaaaattttcgttgctacgaagatgctacgttcgacttccagcctgggttcaatctggtggtgggggttaatgggagcgggaagacttcgttgttgcaggcggtggctgcaagctttgtagacgtgccggcttgcatgggtttctacaacaattctctcagcgaaagcgatgctcggtttgtcatcgataactatgctggacgagttcgattcgagcgcaagtacccagtaacgctgaaggcaaatggtgatatttttggccctcgaacatggttattaaccagactcctcgcagacgaaatcacttacggcgactcttcacttgtggaagcggtaagggaatacgtggatggtttaaatcaaggcaagaacgctgatttaccgcttcttgccttttatcgaggtaacagaagatggtcggtaactaacgtctctgccgagtactcagctactcagaaaacttccaggctcgacggatataaaaactggcacgattgtgcggctgacattcaagattttgaaagctggatcatcggtaaaaccttagagcagttgcaatcaatccatcggtcctcggggattatgtcgattttcgatgatgagttgacatggattaatgcagcgatcaaatgcgctctacctgactcaaccggactttattacgatctgcccctgcgtagcattttggtaaacttcggaagtggtttagtcataccattcaacgagttgagcgacggtcagcggggcctgattgccctcattgccgacatcgcccgccgcatgtgcattctcaacccccacatgggtaaggacgttctgaaaaatacttctggcgtggtgatcatcgacgaactggatatccacctgcatcccgcctggcaacgcagcattgtgcccgcactgagacaggcattccccaaagtccagttcattgccgcgagccattccccgcaaatcattggtagcctgaaacctcaagaggtcattgttctgaacaatggcgatccctcccatccgcgggtgacctatggtctggactcgagcagtgtgctcgaagaagtcatgggtgttaaccagcgtgaacccgagattgagagtctgctttcggagctcttttcaaccttggaagacaacgatctgaaaaaggcaaaatcgcaactcgccgcgttaaagaaaaaagcacctgaccttccagaattcgcaggggctgaagccttgatcaggcgcaaggagatcctcggcaaatga

SEQ ID NO: 86673 - DNA, 645 bp, Pseudomonas sp. GM80
atgaagcgagtgctcaaaggaactgaacctgcttcatttacggattggaaaagctcggcgaacgatgactgggctccgacatatccaaccctgcagaacccgcaaaagagatatctgcacgcagcccttttacaggagcaaggttttctttgttgctactgcggtagagagatagaagcggccaccagccacatcgaacacttcaggcctcaggaagacttcgaagatttagcactgaactatcagaatctcttcgcttcctgtctgcgcgaaaccaagcccggcaatccgctgcattgtggacatcgcaaaggaaactggttcgaagagacgttacatatttctcctctgaatgagcaatgcgaattgcgcttcagataccttcagaatggcgaaatacaaccagcagattctgctgacctgcccgcagccaagatgattgaagtactggcactcgacattgcctatctcaccaatcggcgtcgagacacgatccgtaggctgttcgatgatgagttcattactagtgccagcaatgaagaccttgcccgtctcgtcagtgtgattcgagctgccagagtttcagatcaaaagcccttcgaccacatcattgcgcgcttcgccgaacaacttctcgatcactaa

SEQ ID NO: 86674 - DNA, 1299 bp, Pseudomonas sp. GM80
gtgttaaagagcttgaaactcagccacgtagggccgctcccagaactggatgtgaagttctccagtcggttgaatttgatcactggtgataatggtctgggtaaaagctttctgctcgatatcgcgtggtgggccttgacgcgtaaatggccaggagatttaaaccgtgccttgacgggggcgggcatggttcgcccaactgatcccgccaaggccagcatcgaattttctgtgtcagcgaaaacaaaggatgtttcctacaaaacatctttttcgccattggaccaagcatggacgggcaaggcggggcgtccgatcaacccgggcctggtgctttatgcaatggccgatggaagttttgctgcctgggatcctgcaagaaactattggctgaaaaaaggtaatctcgatgtgcaggaccgagtgccaggctatgttttcagcgcacgggagatctgggatggcttggtcgatagtgagcgcggtctgctatgtaacggactgatcgcggattgggcaagttggtacaaagagaaaggtgaatcctatgaccatttgtgtgcggcgctcgccaagttgtctcctgaggaaggcgaaagtcttgttctcgggccgctgacgcgtatcagtctggatgatccgcgggacattccgactttgaaaatgccttatggtcaggacgttcctgtcgttcatgcgtcttcggggatgaagcgcgtgctcgcaattgcctatctgttggtctggagttggcaggaacatgtcaaagcctccgcattgcttgggcaggagacaacgcctcgtctcaccttcttgattgatgaagtggagtctcatcttcatccgcgttggcagcggtcggtcgtcggagcattacttgacgtggtaacggcattatccccgaatgcgcaggtgcagatcttgctagtcactcactcgccgttggtcatggcatccgtcgaacctcgttttgatgattctcaagatgcatggtttgatcttgatctcgcaaaaaatcgtgaaaccggagaaacggaagttcagttcaaacaacgtgaattcgttcgtttgggcgaagtgtctcggtggctgaccagtgatgcatttgacttgggaagcgctcgctcgatcgaagcggagaaagcgctggaggaagcttccagaattctgtcagaagaagtccttgatgagcagttggcaatctcccttgatttgaagctgcgtaaacttcttggagataccgatcctttctggattcgatggcgatatatcgggatgaagcagggctggttgaaatga

SEQ ID NO: 86675 - DNA, 597 bp, Pseudomonas sp. GM80
atgattccagtacagttaaaacctgagccagcgactttcgatgccagggtccgtgtcaggggactggcatatctcaagaaaaacggttttgctctgcatcttgggcttccgtctgggacagaaccaccgtcttattggcgagaaagcctcgatgatttacatgtcgcctatgagggcgtatgcgcttatctggggatctactttgagcgtgtaagtggattaagtgtcgatcattacattgccaagtctaccaatgcgcagggtatctacgagtgggataattatcgcctcgcttgttcaactctcaatagcagaaaacgcgactacagtacggtgctggatccttgttatctggccagcgatctttttcgtctgcaattgtcgagtgggcatatttaccctaaaccggggcttgcggcggctccgacaagggtgattgaacagactattgaaagactgggactagatgacgccacttgtcgagaaatgcgtgcgaggcgttttcaagagtacattcagtacaatttgcctcaggcctatctaaaaatgatgtcgccctttatatgggcagaagcctaccgacagggacttctatga

SEQ ID NO: 86676 - DNA, 1404 bp, Pseudomonas sp. GM80
gtgaaactgatcaggctggagctggaaaactaccgttgtttcccatcgctgacacttgaactcgatactcagctgactttgttggtcgcgcgcaacggtcaaggcaagacaagtctgttggatgctatcaaggtggcgttgtggccttacgttcgcggatttgacctcggcagcactaccaatgacatcaccggaattcatccggaagacgtttttttgcgccccctaaaagcgcatcaaatggaaccatctcttcctgctcgactgtctgctcaagcaactctgcatggacaaaactgggagtggactcggcgccgtgaaagcattcgtaaaggcacacagacccgcggtgatgacgcggccaacaagcttgaggcagcagccgaagccctagaggtccagattttcaaccgcgcagtttcggaccagcctccattcgacttacccgttctggcctactacggcactggtcggctctggagtcagaaaaagctgaccgctgcattcgagaaggcggaaaacgccgaattttccaggacgtacgcctaccgcgattgtctggatccggcatccagctataagcacttcgctaagtggtacacgcgaattttccgcagttaccgcgatgagcaaattcgcaacattgaacgcggacatctaagtattgatgtcaaggatgagttcgcgcatccggtactggctgtccagaatgcagtaaatgctgtcctcgcgactcaaactggctggagaaatctggcttatagcagtgagttttccgatcttgtacttgagcatccaattcatgggatgctgaaagtcagccaactcagcgacggtatccgtaacatcgtcgctttggcggcagatattgcctatcgctgcataaagctaaacccccacttgggcattaccgcacctcaccaatgcacgggtgtggtattgatcgatgaggtcgacatgcaccttcatcctgcgtggcaacaaacggtcatacctgatctgctcggtgcttttccaaatattcagttcattgtcacgacacatagtccgcaagttattacctcggttcaggcaaagtgtatccgtgtcctgcacaccgtaactgaagacaaattgctgcaagtaaaaatcagcaatgtcgatcaacagactcaaggggtcgccagttcacaagtcctggcatacgtgatgggcattgatcccacacctgacaatgagccttctcgcaaattaagcgagtacatggcgctgattcagcaagaactgcataaatcacaacaaggtttggtgctacgcgaatacctgaacttgcattttggtactcagcatccggacatgcttgactgtgatcggttgattcgcctcgaaacattcaaacgcaaacaactgacacaaaaaaaataa

SEQ ID NO: 86677 - DNA, 648 bp, Pseudomonas sp. GM80
atgcgaaaactgattcgaggtaccactccaaactgtcttgctcgttataggcatggaataaataaatgggctgatgtgacacatgcagacaaagagcagatccgccagtgccttcacgctatgcaagatactcgttgcgcctactgtgaagcggatatcagcacgataggacattcgcatatcgagcactttcgacaaaggcacggatatacccaaggtacattcgaatggaccaatctcttcaattcatgttgtcgggaagaggcctgcggaaaattcaaagacaattgcccaccctacgatcacaaaaacctgcttaaacctgacgtggatgatccagacggttttttgctttttatcagtgacggcacaatcagcccactcattaatctggatgaccgggcgcggacgcgcgccgtcgagacgctgcgcatattcaatctggacgcgcaaaacggggccttgcgtgccatgagacgagaggcaatccgccctcaccagaaaacggttgaggatctgatggcgatagccgaagaactgtcgtcagacgatcttcaggagtttctgcaagacgagattcagagcatcgcccatttgccattctctacagccatacgacacaccctgtcgaaatctcgggctgtttaa

SEQ ID NO: 86678 - DNA, 1404 bp, Pseudomonas sp. GM102
gtgaaactgatcaggctggagctggaaaactatcgctgcttccccacactcactctcgagatcgatgagcaactgactttgttggttgcccgaaacggccaaggcaagaccagcttgctggatgccatcaaagttgcattgtggccctatctccgtgggtttgacctcggtagcaccaccaatgacatcactggcatacacccagatgacgtttttttgcgtcccgtcaaagcgcatcagatggagccttcgctccccgctcgcctgaccgcccatgctttttttctggaaaaagaatggcagtggtcacgtcgccgggaaagcatccgaaaaggtacacaaacccggggggatgccgacgccaccaggctagaagccacagccgaagtacttgaagtacagatctttgacagagcggtttccgggcaactgaaaccgttcgacttacctgtactggcttactacggcaccggacggctctggagtcagaaaaaactgacggcagcttttgaaaaagccgaaaacgctgagttttctaggacctatggctatcgcgattgccttgacccggcctccagctataaacactttgccaaatggtacacacgaattttccgcagctatcgtgaagaacaaattcgtaatcttgagcgtggaaagctcagcattgacgtgaaggatgagttcgcccatccggttctagcggtgcagaacgcagtgaatgctgtcctggcaactcaaacaggatggcgagatctggcctatagcagtgagttcgccgatctggtgctagaacatccagttcacggagttctgaaagtcagccaactcagcgacgggattcgcaatattgtcgccttggctgccgacattgcctaccgctgcgtaaaactcaatcctcacttgggtatcctcgccccccgtaaaagtactggagtcgtgttgattgacgaggtcgacatgcaccttcatccctcgtggcagcaaaccgtcatacctgatctcctcggggctttcccgtgtatccagttcattgcgacgacacacagccctcaggtaattacttcagtgccagcacgctgtatccgagttctacaaaccgtgactgacgataaagggcgtagggtcaccgtgagcaatgtggatcaacagactcagggcgtagccagttcgcaggtgctcgcctacgtcatggatatcgatccgacgccggacaatgaacctgctcaaaaactgagcgagtacatggcgcttatccagcaggaccttcatgagtcagcaaagggcttagccctccgtgagtacctggatgaacatttcggcactcaacatcccaacatgcttgactgccagcggctgatcagactggaaacgttcaaacgcaaacagctgacaaaacagtaa

SEQ ID NO: 86679 - DNA, 651 bp, Pseudomonas sp. GM102
atgcgtaagctcgttcggggtgaaggaccacgctgtcttacccgctacagacatggattgcacaaatggtcgctggactcgccgacgctgccggagcgtgcgcagatctgggagcatctgcgagccatgcaagatactcgttgcgcctactgcgaagccgatatcagcaaacacaccaatgcgcacatcgaacactttcggcagagagaaagataccgccagggtattttcgattggagcaatttgttcggctcatgtaaacgggaagaatcgtgtgggaatttcaaagaccggtgtcgtccctatgatcacaccgtcctgataaaacccgatgaagacaatcctgacgactatttcattttcgtcagcgacggcacaattgcagcacgtgcagatctcgatgccccattgcgccacagagcagtcgaaaccttgcgcatcttcaatctggatgctgagaatggtgcgcttcgtgaaatgaggcgagaagctgtgcgtcgctgcctggatacggcggaagcactccaacaactgtttctggagaatccggacagcgagggctttcagcaatttcttgaagaagaaattctggaaaccgcccaacagccctttgcgacggcgattcgccatacattatcgatgtgcctttga

SEQ ID NO: 86680 - DNA, 1368 bp, Pseudomonas sp. GM102
atggaaattttcagtttcgatctcacgaatgtcggtcggttcaccgatttaagcattcacttggctcccacccccaagcatccctcgaacatgacagttctggtgggaaacaacggtgccgggaaaaccacacttttaaaatcgctggccacctcactgagctggttggtcgccaggattcgtgccgagaaaggcattggcagctaccttacagatgaggacattcgaaacgatgcctcagtcgcgatggttgcgattgccgtagtagaccgtttacaggcacgtccagatcttcctaaggttacccctgaagatattctgttcgtttggaccactgcccgcggcaaaaaaggacgaaatactgctgtccatagcgaattagcgggtgccagtcgccttgcagatcattaccgcaaccaactgacagcagatgataaagcctcgctcccattgatcgcctactaccccgtcgagcgttcggttctggaaatcccgctaaaaatccgtaccaaacattcctttgatcaactagacggctacgacaattcactaaatcgaggcgtagatttccgacgcttctttgaatggtttcgcgaacgcgaagacagcgaaaatgaaaccggagtatctgatactgccttagccgagatttccaaaaagttcggtaacgacagtgacatctggaaaaccctttcccagttgaaggcctcatcccgcgatcgtcagctgacagcggttcgctccgctatcgcagcgttcatgcctggcttcagcaatctgagagtgcagcgcaagccgcgcctgcatatggcgatagacaaagacggcgtgacgctcaatgtctcccagctgtcgcaaggtgaaaagtcgatgatggcattggtcggagacatcgctcgccgattggccatgatgaatcaatcgctggacaaccctttacacggtgacggaatcgtactgattgatgaagtcgacttacacctgcaccccaaatggcagcgtagtctgatccgacagctgagtgaaacctttccaaattgccaattcgtactgacaactcactctccactcgtcatcagcgacgcaaaagatgtgctgtgctacgtgctggatgatggggagttacaagagcgcaatggcctttatggacttgatgcgaatcaggttttgttgagcgtcatggacaccgatattcgcaacagcgaggtacagcgaaaactgaatcgattgtttgagcgcctgcaggatggtgacctggacgaagccaggaagttgttttccgaactatcactggagctttcggatggtcatctggagctggcgaaggccgcactgttgatccgcaaactggagttgcgtcgtgcgtaa

SEQ ID NO: 86681 - DNA, 633 bp, Pseudomonas sp. GM102
gtgcgtaagatcaacaagggagttgaaccggaggcgctgactcgatggaagcgcttgaacagcacattacgttaccgggatttgcccgttgaagagagtcggtccattcgctcagcgtgtatctcggaacagtacggcctatgtgcgtattgctgccaggcaatcacgattgacgacgctcataacgagcatattgaggctcaggatcgcgcgcaaaatcgcactttagacttatccaacatagtcgcaagttgccaacgctcccatcaatgcggccacggtcgaggcacacgagcactgccactgacgcctttgatggatgaatgcgaaaccgagctgaagttctatctgtctggactggtgaaggggcataccgaccgagccaatacttccattgaggcgttgaatctgggtcatacagaggaaagcaatcgtggtcttgtcggcgcacgtaaaactctggttgatgcgttgatttatacccagaacctgccacccgacgagctgcagaatgaggacgaagatttcttgggcttacttctggaggacttgcaaacgcctgatgccgggcgcctgcagcccttctcacctgtattggttaatgtaatccgtcatttgctggctcgaccttaa

SEQ ID NO: 86682 - DNA, 2301 bp, Pantoea sp. YR343
atgctatttcataacagaaacgatgttgcaccaccactcccattccaaagtcaagaagcaagagctgaacgtagtgatctagttgagttcatgagcctttctgatgatagaaaagctcaaacatcagtacctccaacgcgatttagaataaatgatgaatcgatacaattagcgttgaataagctttttcattctaagtgtgcattttgcgagagtaaaaatccgctatccatacacctttttagaccaactgatggcgcaatgccattattgaagtctgacttttctcatgtttattatatttggctcagaactgactggggtaattattactcagtatgctcacagtgtaatgctaattctcgaaatacattcccagtttcaggtaaaaaccgtggggaactcccttcggtagaagatgtaaaaaatttcgccaatgaaaattttggactgtggcgagggaagcatatggatagagcattattattgaatccctgcgaagttaaaaatttcggcatgcatttttctgtcgactattccggtgaaatcttagcactaacgcgtcgcgcagagataacaataaaactctttaatttaaatagtcagtatttgattgaagagagaggtaaagcatacgataattatatgaatatattgttatctaatcttgttagagaaatcgagtcacctctttttgaatttaaaactatagagtttggtggtacatggtttttgttacttaagcgacttattaaagttatagaaataaaactcgataaaaaactgttaaaagctaaaagtaaactttattgtatattacaagatgtttataaaacccccattggaattaaggtgcttaatgaatccattaatgaattaaaaaacaagcaaatacttaaaaaagaaatgaaaagtagcacgcccgtctcacgcatagaatatataacaccatcattctttgaacttaaaaactttaagtcattacaaagcattaagttgaaaatgcctaaagttaggctcgcagataatgtatataactatcaagatgaagctgcagctttactaatattaggtgaaaattcatcagggaagagttctattcttgaggctattgcattagcactatgtggagagatacaacgtagccagctaggcaaatcaccattaacatttgttctttcacctgaattaatgggtagtacaaatggttatagtccaaaatcagcttcagtcatcgttgaattcactaattcagcaattctagaattacaaattgagaatgattttaagttgaaagttactggtgaaatcgatgcgataccaccactctttgcctatggtgccttcagacagtatggagctaataatagattaaagaattcattaggtaatattgggacgctattttattctgatcgtgttttggtaaatcctgaagtatggttactcagtcttccagataatgaatttttgatggttgtaagagctctaaggaaaatactatcagtggatgaagactttgatgttttaattcgtgacaaagaaaataatcgctgtcttatggtcactaaagttggtgactataataatattacggaagtaaagacaccattatctgttgtatcttcaggtttcaggtcagtgctggcaatggtttgcgatgtactaaaaggattacttgcaggacaatgccggagtgggacagttgagtttgataaagctaaagctataatattgattgatgaaattgaggcgcaccttcatcctcgctggaagatgcaaataatgaccgccttaaggcaaacatttccaaatgcatacttcatcgctacaactcatgaccccttgtgtttaaggggaatgtatgaaaacgaagtggttgtatttaatagaattagaatttcaaaaaacaaaaataatgaaattcctataatggttgaattaattgatcagctacctaatattgaaaatcttactattgaacagttattgacatctgatttattcagtatgttcagtacagactcaagtggggcagaagctaaactagctcatttagctgaccttttggctaaaaaagcaagtggtattgttttaaaacctgtagaagaagaagcgctaaaagagcttgaacagcaagtgagctcttcattacctcttggctcaaccgaagtagaaagaatagttcagaaagcagttgcagaatatttgcagcgtcgtaaacatgaaagtaaaaccggtttacacattcttgaagaagaaactcgccgttcaataattaaggcattagagggatattga

SEQ ID NO: 86683 - DNA, 987 bp, Pantoea sp. YR343
atgcgttctgtaaaaagagggaataaacccccaccaccttcactcatgtcaacaaagaaagatggaacaacagaacttgaaagggttagggctcacatgacgaagccgttaaaacccaatgaaaaaagagagtcatttaaattttcagtctataaatctgatgatgtaaagaaaaggctcgaagaattattccatggtaaatgcgcttattgtgaatctttttatgctagccaagcaccggtggatgttgagcattacagacctaaaggtgctgttgagggtgagcatcagcacccaggatattggtgggttgctatggattgggaaaatttactaccaagttgtattgactgcaatcgacgtagaaagcaaataataccagttgtggtcaataatatgagacaacttcatcaaaacatgcagacaggaaagaaagattcttttccaatattaggtgtaagaagtttagccgaaaacaaaaatttctcacaagaaaaacctttactgctggacccgacacgagataatccttcggagcacataacatattgcattaaaaatgataacgcagtcggattgattatacctcaaatgattcatgatgttgatgaaaataatcatgattacgctatgttgggtcaagagcggttagaaagaaatattaatataagaggtgcgatctcaattcaagtttatggattaaacagaattaagttagttcaagaaagaatttcattaattaatagaatgaggtttttagaggaggtagttgtcgagttagggactataattcaaaatctcaataattcagagttaaataacttccctgacgtaattaatgcaataaaaagtatcaaacttcttcaggaaaagatattaactgagatgcgaaatcttacaatgcctcatgcgccattcagtagtttagcaaaagcttatttagacgattttaaagatagactgcgggctgagttattaaatatctaa

SEQ ID NO: 86684 - DNA, 1662 bp, Pantoea ananatis LMG 5342
atgaaagtcgacaagttgcacgttcgctcacgctttaaaaatcttgaagacgtgaaagtagactttgacgaagatcacctaatgactgttgtggtgggtcggaatggttctggtaaatccaacatcttggaagccttggtgtctatttttcgcaatcttgatttaggtgaagagccaccattttcttacgaattgatttatcgactgggcgagccacataaacccaatcagcctagtgagagatggttggaaataaccattgatgccgatccagatcgcggtactttgacaaagcaatacgaagtacgtgtacgcaatcttttaagtgaagacatgtctaagagcatgtttgatgacctgccttcaagtaccaccattccgttttcaaaagttaaacgagataaaagtgggaaagcaccatatctgcctaactatgtttttgcctactactcaggccccagcgatcggcttgaaaaccattttaaaaagcatcgtacggatttttaccgtaagttacttaaagatgagctagacctaaaaggtgacatccggccgctgttctatgcaaaacctcatcacagccaattcgtactacttgcctttttcttatcagaacaagacaacgcagaaaaggcatttttgcgcgaacacttaggaatcgaaggattagacagcattcattttgtaatgcgtcaaccagggtgggctaaacagaaaggtgagttattttggggggctcgtggcgtcgttcgccgctttctggatgaactgatacaacatacactgtcaccgataaaagtgacacggcaagaagatacatcgttaaccggaagtaatatacgcaacgagttcttccacctgtttttacctaatgtaaacgcattgcgcgaatttgccaatgaactcagtgcagatgagctgtttaaaatgctagaaagtactctactttcggaaattatctctgaggtaagtatacgtgttaaagtttccagcagcaaagtgcctctcactttcagcgagctaagcgaaggagaacaacagttactaactgtattaggtctgcttaagttcactgggggtaaagattctttgtttttgctcgacgaacctgacactcatcttaatccgtcttgggcggttaagtatcttaaatttctgcgtgagtttgtacctaatcacgagaccagccatttgttaatggtaactcatcaccctctagctattgcggaattagagaaacagcaagtacaagtcatgtggagggactctaattttcaggttcatgcgcaggagcctgaggaaagtcctagaggtatgggttatggtggaatactgactagtgacatgttcggtctacgaacgacattagataattctactgagcgcttgttgcgattacggcgtagtttcactgaaaaatcagagctaacaccaattcaagctgggcgcctaagaaaaattgatcggttgatagaaggtcttggctttacgacggcacattgggatgaagagtacgctctgtatttacgtatgcgtcgagaagttgagatggaaactgaagccgttaacgtcaccccagaccttaaacgcgttcgaaaagaacgtgctaaagcgattgttacacgcatactcgctgcagaacgggaagaaaataataaatga

SEQ ID NO: 86685 - DNA, 864 bp, Pantoea ananatis LMG 5342
atgaggcacttaaatattgatttcaaccgactcactcttccagagggttggcaagaaaaagcacgagatttgttaaattcacttgtagcggcggaaaatgcaaaacagcgttctgagattattgagaaaaaccaggaccactggaaagctgtgaagcctgtattagcgtccttgtttaatcacaaatgttggtatacagaagcgccgcagcagggaacggatgtcgatgttgatcattttcgccccaaaaaacgtgtgcaagaaacactatcgacgacagtgcctcataatggttactggtggttggcattcagccttcaaaattatcgttttagttgcatcgttgcaaaccgtcgaagaactgatgtagctactggggtaactggtggaaaagctgatcattttcccttgtgtgacgaaagcgtgagagcaaagactcctgaatgtgacctggaggaagaacaaccaattttgctggacccattaaaggctactgacgtacaattacttcagttcaaacctgatggtgaagccatgcctcgtttttcagaagaaaaacatgcacgtaaatttatgcgagcagataggtctattttatattacaacctcaatcattcggattttgttcgatgtcggatagagttaagagatcagattgaaaaagatgtaaaagcggcgaaaagatatttcaataaattggagtctggtgatgcaaataatgattttgcgtatgaacagactattcgtcgtttgcgagagatgagaagtaaagaagcacctttttcaagtttttgtattgcttgcttggatgattatagacacaagccagagtatgatggcgttcttgatgccgtttatttataa

SEQ ID NO: 86686 - DNA, 1566 bp, Acinetobacter radioresistens WC-A-157
atgagaatttttaatgctaagttaaataataaaaattttaattttttaaaagaaaaagacttaattgataataataataaatatacgattattttaggtgagaatggaactggaaaaagtgaactgcttcgtcagataattaataatttactaagaataaaaatattaaatatctcgccagaacataatgaacttggtaaattttcttacagagatttattggatagttatttatccaataaatataaaagcaatttagtagaaaaatctataagtacatctttaaatttatatttacatgatgatgcagatatttatttaagttatgaaaaatctaatagtcaaagaaaaattaaaaattttaaaggagaagaaattagtatctcagatgggcagtttcgacataaaacaagattagagagtcatggttttattttattagatactattttagcaataaatattattgccatatcagaaagtattcatataaaatttcctataattcaagatgatagctctttaagctattactatcctggacatttaaaagaaagtgattctgactattttttttcaaatataaatacaaataaaaatataaatcaaaaagaaaagtccataattttatcaatattattagctagtcttcgatctgaaaatattgacttaaaatcaatatttgatctccttaaatttgattttaaaataaaaatagacgtcaattctcaaacagatatcgatgtgaaattgaaaagactacatgactttagatttaatagcataggtattgagaagatctctaattttaatgatataaatgaggctgtaaattggtattcaaatactaaatctaatataaatgaagatatttttaaaaaaaatattcaagaaaactacacattctttttagatttacttaaagataatgaaagtataaattatctttatcatcttatttcatataatttaatagatgtttctaatatttacttttataaaagtagtgaagatctgatagaaataccaatacaagatatgagctctggtcagttatgccttataagcagcttttcctctattgcagcacatataagaaatggaagtctaatttttatagacgaaccagaaattagtttacatccattatgggcatctcaatatattgaattactacaaaataaattttctagttttcagagatgtcactttttgatagcaacccattcaccgcatatagtttctaatttacctgacgacaatgcttatgtaataactataaaaaatgatggaacttctaaatgtatagaatctaatgtttttaatttcaagtcagttgattttcagttagctgaaatctttgatttccctggaaatagaaatgagtatttaattagagttatcatggtcattttaactaaaattagcgagaacgaatcattaaatgttgatgatcttaagactatcgatcacttaaaacaatttattcctaaattaaaacctaatgatcctgttaagcatttaatcaatcagatatcagtattgacctctaatgaacaaagttaa

SEQ ID NO: 86687 - DNA, 645 bp, Acinetobacter radioresistens WC-A-157
atgaacaaagttaatttttcagaaacgcttcaaacttatatagataattatgatggtgaaaactataggatatggaatacaactgaaggattagtagccgaaattcgtaaggaaattcgtaatcactataagatagagcaacgttacaagtgctgttactgtcgccagcaaaacttacaagatcatgggttagtgtgggattgtgaacatatccttcctaaagctatttatcctgctttcctttttgaaccttttaatttagctctcagttgtaaggagtgtaatcaagcgaaagaaaaatataagaatgaactaattaaagtatcttgttcaatatactctcttaaaagtgaagattatcgaattatccatccccattttgatacttacagtgatcatatcgaaatttctagtttaaatggaacaatcatatttaaagtattagaaaactctgagaagggaaaattcacatatatatgttgtaattttattcgttatgagaagaaattagtaggttatagtgaagtaaataataatgttgctcttaccatcaataagttattagaagaaggtattgcagtggaaaatatcttagagggcttattaaataaaaatactccaattcatatggaaatagatttttag

SEQ ID NO: 86688 - DNA, 1224 bp, Haemophilus sputorum HK 2154
atgaaatatatacacaatatatctggaaaaattgagcatctcgactatgaaataaacattgatttaaatggtaaaaacttaattcttgttggagctaatggagtcggaaaaacatcaatattaaattcaatttataaagctattactatagagctagaaaaaaacaactctcaaatagagaatttgaaatcctccttagcttattataaatgcaatataaaaaattatcctgaaggatcaaatgaatatatagacgtattaagttcaatacaacgttgtgaaagaagactaaaagagtttaatttaccattaacgctttcaattcctaatataagcgattttattagagattttaatacaaaaaaagcaatcaattctaatttttccgcatacagaacaagtagaattcaagcgacatcttcatcaacatctttagaggaggagaagaaaacttctcttaatctagaatatgtgggttctacattagaacaacatcttttgaatataagagtcactaaatcattacttatgacagaggctaaagatcatgtaaaagctaataaattctcacaatggtttgataattttgagtgccagttaaaatatctttttgaagataatgacacaaaattagagtttgatgtttcatcaatgaaattctatattattcaaagaaataagaaatttacatttcaaaatctctcatctggctatcaagccatttttgacatttatgcggatctgttaatgagaaccgaactgtttgatataactccagatgaattaactggtgttgtactaattgatgaaatagatgcccatttacatatatctttacagaagataattttaccttttttcattaactcctttccaaaggttcaatttattgtaagcacacattctccatttgtaattagctctagttctaatacagtaatttatgatttaacaacacaagaacttattacaaacaatataacatattattcaaatgatgctattgtgaaaggattgtttcatgtaaatacaactcatagcatagaactccagaatataatcgatgaactgaaagaagttatagattcagatattaatgactcgaataaattaagagaacatataaaaaagctagaaccatttaaagaaagcttaactaattcagcgaaagtaatcctattattagcagaaaacaaggttctagatatagaggagaatagataa

SEQ ID NO: 86689 - DNA, 660 bp, Haemophilus sputorum HK 2154
atgttttttgttaaaagggatccacaagtacctaatagtttatcaaacactagaaaagattatcgtactgacgaggttgttaaaaagttaaataaaatgttttttggtaaatgttatttatgtgaaaaagataacatctcagatattgaagttgaacatctcataccacatcagaacaatgaaaatttaaaatatgattggaataatctattttattcttgttctagatgtaacagtataaaaggcataaaagagaaaattttggattgtacaaatattgatgcaggtaaagcaatagaattacgttgcccttcatctgattcggatccagtaatcgttagtttaggtttgcttaatgaaaacgaagaaatattagcgacaaaaaaattattagaagaatgttacaacagtcgctctactggaattagaggtataagcagacaagctctcattgatgaaataattaaacattatgcatgttggttagaccttaaactcaaattacggaacaatcttctctcaactagagaagaaaaagaaattctagaaaaactagagaaaatgtgccaatcaaattatcctttttcggctttttggaagtggcatatttatcgcgataatgttttaaaggataaaatttccatttttaatgaagaataa

SEQ ID NO: 86690 - DNA, 1263 bp, Bacillus cereus BAG1O-2
atgattaataatttaactattacaaattggaatcaatttgataatgtaaacattgatttccatccacaagtaacaataattactggtacaaatggatcaggaaaaagtactatagttaggttgataagtagaaacctagggtggaattataaggagattgcgacaccgataaaattacataatactaattcttttttttcaccaggtattggaatagaaaactttacgaatttggagcttgcttttaaactcctagacgttaagcatataacagtaggtagcttaactactgacgaaggaattattgaattccaggctcctaatcaattggatcatgtatcttatgcattaaaaatatcttcaaataaccatccctttacgttgcatggtgttagtgtagcatctcatagatttccatttacatattccgttttaaagtctattcctgtcaaaccgataacaacagaagatgcctattttaaatataacgaatcactaaagagaaaaacactatccaatgaatattataatcctgaagaagaaatgcatatctctcatatgaaggctacccttatgtcttgggctttatttggacaggacagtgatttcattaaaggtgacagaaattcttatagaagatttaaaggatttgtatatgttcttaaaactttattacccaaaactctaggttttaaagaaataaatattcgggatggagagctaattctaataactgatacaggagattttttaattgactcagtttcaggaggtatagggtctattattgatctagcttggcaaatatatctatatgataaagatttggaaccatttgttgtagtaatagatgaaatagaaaatcatctacatccatctatgcagagaagtatcttacctaaccttataaaagcctttccaaatgctcaatttattgtaactactcatagtccatttgtagttaattccgtggctaattcacatgtgtatgcgcttaagtacaataaggacaataaagtttgtagttatagacttgattttaatgataagtcatcaaatgcattaggaatattaagagatatattgggggtaccagtaacacttcctatttggcttgaagaggaacttaatattgtaactagaaaatataaggataaggaattaacagctcaaacatataaaggtttaaaaaatgacttaagtgaaataggtcttagtgatcacttacctcaagctttagattttttgcaaaggggtgagtag

SEQ ID NO: 86691 - DNA, 660 bp, Bacillus cereus BAG1O-2
atgatatccttaaaaaaagaaaacatcccagaaattttaaagaaaaatggaacagaatggacacgtaagtatatggaatttattgattctaaacaagaagttcctaatagccttaaaagtaaatattcacatcaaaaaatcaaagcaacccttttagaggaaacaaaaggaaagtgtgcctattgtgaaagttcttttacagctacagactatggacatgttgaacatatagaacctaaaagtaaagttcctaaaaagatttttttatgggaaaatttaactttatcatgtagtaaatgtaatttaaagaaagatgtctattataatgaaaagttaccattactaaatccttatattgataaacctgaaaaagaattagtatttttaggtcctttagtttctgcaagaagtaagcgagcacttatgacgataaaaaaacttgaactcaatagaccagaattatatgagagaagaatggcgcatttagatcatatacaatctttgatatatgcatatgcaaccgctgatgatattgaactaaaaaaaatgctatatgatgatttgattaagtatacagaattagataaagaatatgtctcaatgatgcgaagcattattaaaacaattgattctcctgtactagtaaagggtataagttaa

SEQ ID NO: 86692 - DNA, 1338 bp, Bacillus cereus MC67
ttgaaactaaaaagtctgtatattgaggaattcaggaatcttcagcagtttacaattgattttcagaaaactactagctttattcaggcaataattggtaggaatggatcggggaagtcgaacctcttagaagcaattgtgactatttttaaaggaatggtgttagaagagcgtccgcaatttaactttgatatgtcatatatatataattcagaagaaataaaagtaagtggtgtgaaaggtgaaggtttcactgtaaattatcgaggaattgatagtgacttgggaacgctaacagctagtttattacatcatgggaaatcaatttatccagaaaatatcgtactttattactcaggtgttaatttaaggttaagagaattggttaaagtttttgaggagagttttactggagatttagacaagaagttgtttacccctaggcgttttttctatgttgtagaagaacactataacttatttttattagctctattgtcatcagaactggagcatactaaatcaatgctaaaagaaaaatttagtatatatggactaaagtcttttgaaataatattaaatacaaactatagacatattgggggagagctggaacaattcattaatctcctatgtgaagaatcttcagaggaaattgttaggaagaatggggttcatttaaggtttaatgatgctgagagaagtctgtacagtataagaaacaaagtgggatatgagagagatatattaaaatggttagatgcttgcctatactctaattgtattgtggatgtgcatattgaactaaagaaggatgaatctagtagtacaattatctctcataagcagttaagtgaaggagaacaacagctcctattgttaactggtttagctgaatttttcagctataaagagagcttatatttatgggatgaacctgatacatttctgcatccgaagtggcagagggaactaacaagttatattgaaggtttagaagtaaagcagcaatttattcttacgacacattctcctaatctattaacaactatggatcgcgagaatgtgtttatgcttgagcaaggccaggtgtgtgaagtgactccttatacactaggacgggatataaactcaatcctctatgaattaatgggtgtatcattgcgtcataagcctacgcaaaataatttagatgagttttatagtctcgttgataatgctcaattcacagaagcagaaaaaattctgaaaaagttaatttctcatatgggggaagatgatactgagattgtacatgcacagaatatattggcgttagaaaaggagtttaacgaatga

SEQ ID NO: 86693 - DNA, 633 bp, Bacillus cereus MC67
atgaaacatatagtcaagggatcggctcctggttctctcgtgtatcataaaaaacaattactggctacatatgataattatagagaaaaagatgatgtcagaatatctttattaaatgagcaaggatttatttgttgttactgtatgtctagaattgaaaaggagaatatgaaaatagaacattggttaccacagagcaaacatgaggacagtaccctagactataaaattatgtttggagtttgtcaaggttttcaaaagagcccttttcatcggcagtgttgtgactcacatcgcaaaaatgataagcttactatcaatccaactaatcgagctatggtagatactattaagtattctggaggaggggaaataagctctgaaaatgctgttcttgacaaggatcttaatgaaacgttaaatttaaacactgaacttttgaaagagaatagaaaagctactcttcaagcagtgataaaatttattggaaaccgggatgcatggagtgaagctggtattaaacgtgctattaagttctacagcagtaaagatgaaagaggggcgtacgtgccctattgtcaagttgctttatatttcctccaaaagcggctgagtagacaattagctaagtga

SEQ ID NO: 86694 - DNA, 2190 bp, Bacillus cereus BAG5O-1
atgatttctataaatagaggaccagccccaccagttttacattcaaaaaaaataaaaacagaaatagagaagatgaattactattacagtctccctatttcagctagagatagatctagttatgaaacaaaaactcctttccctcttgaattgaaattagcattagaggatgtatttcaaggtaaatgcgcatactgtgaatcgattataaaaaatgtaaactcttatggtcgaattaatcattaccgtccgtcaaaaggcgcctactttaatgagtattatagccctgaccactattggtggctaaaatacgagtggagtaacttgtattatgtttgtcctttatgtaatagcaaaaagcataaaaaattcccgatattaggtaagccagctcctattggggcagtcggatctgaactactaagcgaagaccctttaattttagatccatgctccgatatacctgaaaaccatttaatctacaatgagaatggggaagtacatagtaaaactcgtaaaggacaatatacgatttcattactgggtttaaatcgtgaacaactagttgacgaacgaaagcactctttacagcgtttcaaaaataattgtgatacatttatcatgttattaggtagcaaccttaataaaaatgaagagttattctggaactcatataaaaacttattaaaagaggttgattcctcctcggagtattgcggaataaagcgacaatttttacgtgaatggattgaacgagattctgaatataaggaaattttttcgaacgaaacatctagttttttgaatgaaacgcctttaataactaaagaaaaacaattaaacagcaacacatcatttatagaacatgaagatgaaatagaagattacaatctaatagaaaagaataaattgataaattactatgctaaacaacgtttggtaacacgaatagtcatttcaaattttaaaagtattgaaaaactagatatcgaattaaatattgaagatgatcaagcaccttggttaatgttattaggtgaaaacgggtcgggaaaaagttctattttacaagcgattgctttatgcctaatggataattcacaacgaaaaaattaccaattggatgcatcgcagtatttgaaaaaagaagctaaatcaggattcgtacgggtatatataagtggtagtagtaaccctattgaaatacaatttaataaacatagcaatgaatttattagtaatcaaaaatcacaaaaagttttggttcttggctatggtgatacgcgcctgttacctaacgataaacacaaaagtcctgaattatccatatctcggactgaaaacttatttgatccttactcaccattaatagatccaaatgtatttttatataacttaagtattgaagagttccattacgttcgttcatctttagaatctttattggttcttaaagaaggagaatcgataaaaaagggtaagaaattaaatcaaattcttataacaactaatggtgcaacagtagagttagatagattaagtaccggatttcgatctgttattgctcttacaacagatattatgatggcaatgaaggagttttggaaggacagcaaagatgcacagggaattgtgttattagatgaaatagatgctcatttgcacccccgctggaagttacagatagttgataaattaaggtgtactttccctagaattcaatttattactaccagtcatgatccactttgcctacgtggattaaaaaatcatgaggttgctgttcttagacgagcgggtaacaataagattaaagtgaaacgtcatcttccaaatgctgataaatttgaaatagatcagatccttacttctgaatattttggactgcatagtactgcttcaccagaatacgataagctaatgaagcgttattatgaattactttctattccaaattctaaaaggacggatgacattgagaaagagatagaaaaggtgaaaaatgtccttggagaatttgagcttcttggccaaacaccaagagatcaaattgtatatcgactattagatgaatatattgccaaaaatcaaggttttgagaatgaagatattaataagatggacgataataccaaagatgatgttcttaatcttttacagaaatatcaattagatgaaagtgaggagtaa

SEQ ID NO: 86695 - DNA, 870 bp, Bacillus cereus BAG5O-1
gtgatttatgtaaatcgatctaatgttcctataccagcagtattagataccagcaattcctcctcgctaggttcaattgagactcagaattgtatagcttattatgttaatagtccatcaaattcttttaagtttaaaatttataaagaccctgaggttattagaaaactaaatgcccttttttatgggaaatgtgcatactgcgaaagttctgtccagacagttaataatattgaagtagagcactatcgtcctaagggacgtataagggttataaaagatgataaatggaaatggactcaaactgggtactattggctaggtgctgtttgggaaaaccttcttccttcatgtacattttgtaaccaattacgtagacacgaattagaagacggacgaattaaaaccgctgggaaatggtcatattttcctctagtgaatgaaaatcagcgcgtatattcacctacaggaaacttggaagaagaagagcctttgctactaaatccttgtgtagatgatccaagtaaacatcttgattttcaaaccgacggtacggtcacctatcgtactgaaagagggaaggaatcattaaacacatttgggttatggcgacgtgatttaaaacggagaaggcacgaaaaagcaaaagaaattgaatttttaaccacgcgcgtaagagaaaaactaaagatgctagcaatatgtaaggaaaaagatatgagagtgcttctactacaagatcttgatgccttacttgctcatctaaaaacttatacagaacctgataaaatatatgcaggtgtagcaaagcagttagtaggcactttttttaacgaaatttctcaagatttaactaaggtttctaattag

SEQ ID NO: 86696 - DNA, 1626 bp, Pectobacterium wasabiae CFBP 3304
atggaacagatcttaccgagtaggataatcaaattaataaaaaaatcggaaagcggcgattttgcttcctcttaccaactttttaaaatatttggctcagatgagtacggagttgatccagatgaaaaaatgtctagccattataaagaattatcagccaagcaactcgaaggtggtcaactaagggttgcggatatccatttggaaaactataaaggatttgagtccctgattatggatttttccatgaaaaaaggctctacaattttagtaggaaataatggttgtggaaagtcgacgattctcgatgcaatccaaaagggactgacacatctctcctcaaggctatctactcgctcacataatggcgatggtatcgaaaagcatgagctaaaaacaggtaaaaattatgcatcgatagctatcaattacgactttatgggagttcgttttcctatgatcatagctatgactgaacctggttatgaggatagtgctaaaagcaactatagcggaattaatgagttagggaatattttcaaaacagcccattcaatcaatccaaatgcatcttttcctttaattgcaatgtatacagttgaaagagcgaatgacgtttctactaaagatattgagaattctgacgaaatcaaagaagctcaaatctgggacaaattcaaagcatataataaaagtcttacaggaaaagctgattttaaactattttttagatggtttaaagaattaatagaaattgaaaactctgataatgctgaaattaaagcattaagagcagagattcgagctaaagaaaaagacttagataatccattactaaaggctctcctggcagagaataagaattctgatactactaaaaaattgttagaagatcatgaaaattccctgaaatttttaagaagtaaattaaataactattattcaattaatagtaaaacattacacactgttgaagatgcaatttattcttttctgcccggattcaataatcttaaacttcaaagggcacctcttgatctcatagtggataaagataatgtgtctttaagcgttctgcaattatcacagggtgagaaaaccattttagcattaattgccgatattgctcgtagattgacattattaaaccctaacaatgaaaagcctttggaaggcaccggaattatcttggttgatgaaatagacctgcatctgcatccgtcatggcagcaaaatattattccacggcttgaaaaaacttttaagaatattcagtttatagttacaactcatagcccacaagtttgtcatactattgatagtcaaaatatatggttattaaagaatggccaaaagtttaaggctcctaaaggagttaggggggcaatatcttcttgggtattagaaaatttgtttgaagttgctcaacgaccgccagaagataagtatacaaagcttttgcaggaatataagagtttagtgttttcagaaaaatattctagtgaagaagcaaaaaagctaggcactactttatcccgacatttcggtccggatgatgaaaccttagtagagttaaagcttgaaattgaaaaaagagattgggaggatgattttgaaaaggattaa

SEQ ID NO: 86697 - DNA, 783 bp, Pectobacterium wasabiae CFBP 3304
atgattttgaaaaggattaataaaacaggagaagaccaattctttattgattttaaaacgcagaatccaaatggaacttgggacgaatttagaaatcatgaaaaaagcgttttgtataagaggctcaaacaacacatttgcaatgaccagatgtacctttgtgcatattgtgagatagatttagatcgtaaaaatgaacatcaaataaaaatagagcatttcaaatctaaatctggctcgctccccggtggaagtaactggcatttagaatggtctaatctcttaggtgtatgtcttggtggtacaaatacaggtgataattatgaattaccagctaacttaagttgcgattcatataagtcacactatgaagataaaaataaaattactgacaaagactggacaggtaaaattctccttcctctcacgcttccgaatgcgcacaatttatttaactttgacaaggtcacaggtaagttgctacctaatgaatcgtactgtaatagcataagtatagatggtaaacctgcggtagaaacactaggtattgttacaaaaacaatagaagttttaaatttaaattgtagcaggctaaataacgccagaatgaagttgctgtttcacttcaacagttgcgcacgagaaagagatttgaggaaaattcataatttattgatgcaatggagtcaaggtgaaccaaaattttttcagacgacacgagatataataattcgagaaagtagaatttgccgaggattgctggatggaacaataaagtattag

SEQ ID NO: 86698 - DNA, 2151 bp, Rhizobium sp. CCGE 510
atgcgctacgtcgatcggagcaggacgtctgtaccgaaagcactgctatctgatcgagtaagagccgcgatcgaggacgtgcagcgatttatgagacggtcggaggacgaaaaggcacagcggcggagtccatacgacgaatccatcattcaccggtccgaagttcctcaggctctatctgagctcttcttccataaatgcgcctactgcgagagtcgctcagccaacacgatcgaccacttccgccccaaatctctgtatccgtggctcgcctacgattgggaaaacctctacccaacatgtttcgagtgcgatcgcagaaagggtggggcatttcccatggcggcggcgcctgcccctccattttcaacgattggagaggcccgtgctttcgaacacgtcctgtttgtcgacccgtgtttcgacgatccaagggcgcatctgcggttctgctctgatggccgctatcaaccgctgacggacaagggacaaggaacgatcgggtacctcgatctcaacaggaagaacctggtttggaggcgcaacgaggttattgaaaggatcataacacggctcgaattcggtttgcaaaacagccctgctctggaaacttttatcgagccggaagcagaattttccggagcggcgacccagtacctaagtctacttctcgaaacggcgatcgggcgtcgtcctgcgtggcggagatacggtccctcgggacaaaggctgatgcaggaattataccgtgtcgaggagaatgcgcttcggagcgcggccgcacagttacgagaagggtctgatgccttcgagccagactataatccttctcgggtgatgagaccggcgcatgaggttcgacctcctgctccggctgccatcagcgtagtcgagatcaacaatttcaagagtattggcaacctaacccttcatgttcctcctctcagaaaagacaaaggaacggccggcgcgcttatgcttcttggtgagaacgcggctgggaagagttccgtacttgaagccatagcactgacgatgcttagcgagcgtgaatcctctggtttggtcgaggcggaggatctgttgcgtcgcaaaggcgcgcagcggcttgagctggtagacactgagccggtatctgtgaagatcagcttccatgatcgtccagagccagcagtcttgaatgtcgatccgctaaagagacgcatcgaaagtactcctcagccgcgatctgtcgtgattggctacggcccccgccgctattcaaaggacggcgcgccctggttaaagtcgaaatctgcccgcgtccggagcctcttccacccagccgttgctcttccagacccggctgcgtggttgcgcgagatcgcggtgagcgagtccaacaagttcaatgcggtcgcccgcgggcttcgggagatccttgcgcttcgagagagcgatgacctcgttctcgatgagctaatgggcgtttgcgtgcgagtgcagggtcgacttgaacccgtcggccgactgagcgagggataccgctctctgttcgccatggctgtcgacattatgcgtgaacttttgcaagaccagcctgagctggagaacgctcgcggcgtcgtactgatcgacgaagtggaaacccatctgcatccccgctggaaaatgagggttatgtcagctctcagacgcgccatgcccaatgtcacgttcatcgcaacgacccacgacccattgtgcctccgcggcatggagaacggtgaagtgatcgtgcttttcaaagacgtagaccgacaaatcgcggtgatggaagacctccctgatataaccggcatgcgggcagagcaaatcctgacgtcggattattttgggctcaacagcacagcggaccccgagatcgaggcaaacctgactgactatgtcgaggcgctaaccagggcgaactccggagaccaacgggctcaagaagatgcaagccggcttggtcaagcgcttcgtagcactttggttcttggcgacacggccgcggatcagattattcaggaagcgctaggccgtttcctgtcggagcgacgagacctgcctccgattgaaagatcaagctccagaaaagaagtggtggagcgcatgctcggtgctttccgcaaacctttggatggcgcatga

SEQ ID NO: 86699 - DNA, 918 bp, Rhizobium sp. CCGE 510
atgaggtacgttgaccgctctacgagacccgcgcccgaaagcttgagtgctgccgatggcgggggactcaaggaatacgccaaggcgaaggcgtactatgcaaaggtgccgcctcacaagaaggcgtatcctttcaaagcctataaagctgacgacgttgcgctggcccttcgcaacctctttcacggcaaatgcgcctactgcgagcttcgttatgagggtggccagccgatggacgtcgagcactaccgacccaagggcggcattcaggagagggacgatcaccgcggctactggtggctcgccgccgattggaacaatcttcttccatcctgcatcgactgcaaccgccgcagaggtcaaatatcggcggacgctgtcatgacgctcgcccaactcgaagctgcgttcgcgtcgataggagatacggaacctggcggaaagcaagacgccttccctaccttggacggtgtttgggcggacccggaaattgacccgaacaccatagagagccccgcgttgatcgatcccacccgaacggatccaaaaaaccacctgcattggccgcaggctgatgtatccgtggtattgccggtggtcgatctgcttggaagcgaatgtccccgcgcaactgcgtccatccttatctacgcattaaaccgcatagggctggtacaaagtcggctggaaatccggcagtcgtttgacgcccaaatacgcttgatccgagaagtggcgacggcagcaatggagctcgttgacccgcgccgtgagatattcatgaaaatcgcggaagatggaattctaagcctacgccgccaaaccgggatcgagcacgctttctcagcaatgctttcggcgagactagaagcattcgaagccgaattcagtaccctgctcgaagccgaactgatttga

SEQ ID NO: 86700 - DNA, 1242 bp, Fusobacterium necrophorum subsp. funduliforme Fnf 1007; identical to SEQ ID NO: 86156

SEQ ID NO: 86701 - DNA, 483 bp, Fusobacterium necrophorum subsp. funduliforme Fnf 1007; identical to SEQ ID NO: 86157

SEQ ID NO: 86702 - DNA, 1314 bp, Bacillus cereus BAG6O-2
atgattattcatgatctaaaattggagaatttccatggttttgaagagagatatatcacattttcagataaatttactgtattagttggagataatggaacaggaaaaacagctgtgttagatggtttagctgttgcgttaggagcttttttaagtgggttagacggtgtacattctagacatattagacgtgatgaaatacataggaaaatatataatcagggtagtttaaccgatattcagatgcaatttccagtgagaataagctgtacaagtactgtagaggggcataaattagattggtcaagagcggtaaatggtaaaaaaggaacaactactagtaaagaggctcggtctattatagagtatgcttcttatttgcaaagagccgtaatgcatggtgtagaagttaaactccctgttatttcttattatggtacgagccgattatgggtacaaagaaaggaacaaaataatattagaagaaacaatgacaggctggaagggtatgaggattgtttagatccagcttccaatgaaaagcattttttccgctggatggagaaaatgacgtatattgagttgcaaagaggagaaacaccaccagttttgaaagctgttcgtaaagcaatttcagagtgtatgaggacgtggaagaccattgggtatgatgtggattctcaggaagtacatgcgataaaaaatgataatacagcgatatcttttcacttgttaagtgatggggtaagaaatatgctaggactagttgcagatttagcgcatcgaatggctcagttgaatcctgcattaggagatgctgtgataagagaaacaccaggagttgtattgattgatgagcttgatctgcatttacatccaagttggcaacgtagaattgttgaagatttaaaacgaacgtttccggaagtgcagtttattacgactacacattcgccatttattatccagtctcttgaagaaggggaattacgccgccttcatgaagaggacgacgatgaagtagtgcgagatgaggagtttgtcaataagagtattgaagacatcagtgaaagtgtaatggagattgaaaatgtacaaagaagtgaaaaatataagaaaatgtatgaggcagcacaaaaatattattcacttcttcaagaaggaaagcaagcatctgatgctgaagttgagaagttaaaaaatgagttagacgagattgagtccttatatagtgatgatgtggcatattacgcatttctgcaaatggaaagaagagcagccggattagcgagggatacaaatgaggccgattga

SEQ ID NO: 86703 - DNA, 708 bp, Bacillus cereus BAG6O-2
atgaggccgattgatagaggagacgttccagtagatgaagatggggagcctattcagttcaaaaagtatcaagagtctagaggacatttaatggacaggataggatcctattgctcttattgtgaaagaagtttggggggcaatgtggcagttgaacatatacagcctaaaagtttacatgaggaattagcgttaacgtgggacaattttttactcgcatgtgtaaattgtaattctatcaaaagtaatcaatctataaatctagaagaatatttatggccagataaagataacacactattagcgtttcactatatggaaggcggcttaataacggtttctactgctttaactccagaggtaaaacagctagcagagagaagtatgcagttaacaggactaaatcgttatcctagcgtggatccaaatacaaacccagaaagaacggatacacgttggagggatagacgtacagcatatgaaagggcgatgcgtgcaaaggagaatctaacgagttttgataatccgccaatgagggaacagatagttgatacagcagttgctactggctttttttctgtatggatgtcagtttttaaacatgacgtggacatgctactgaggttaatacatgcgtttcctggatcgagcacgaattgttttgatgaaaatggcgttccagtcaatagagatggtggaagtgtttaa

SEQ ID NO: 86704 - DNA, 1341 bp, Fibrisoma limi BUZ 3
atgtacatccgacgtattgagatcaataacattcgctccattgagcattttgagatgacttttgctgaagggcaggaggctggctggcacgtactgattggggataatggagcaggaaaatcaacaattgtacgatctgtagcattagcaatgcttgacattactgacatcaatgccgccggccaaaattgggatgattggctaaatcgaaagcacgatcttggaagtattgatgtgcaaatcgcgcctgacggtcgctacgagacacaaactggactggttcagaatagaattacatttgagtgggagcaatatggcaaagaagaatcgagagctacattacttgaagtaatttttaggggccgcaagagctattctaaaacttcgtatgctacaccaacaataacaactgcttcggctccaccgcccacgccttccgctccatcagagcatcttagggtagatgcttggttttcggctgcttatggaccatttcgacgattcacaggggggagcttagaaaaagataagctataccaaaccaacccaaggttgggagcccatttatcggcttttggcgaagatgtagccctgtcaggagcgttagcttatttacaggaattatacgtcagacaattggaagatagatataatgatagacccgtaaatccatctttagattatctgaaaacgttcataaatgaagcaggacttttacctcatcagaccaaactcgaaagcattagtgtcaaggatggcgtgtattttaaagacggtaatggaagtatagttcgagatgttcaaatgtcagacggctatcgatcagtcctcagtatgatgtttgaactgattcgccagttgattcgtgtctacggggcagacgtcgtttttcaacagattagcaggaataacttagttattgatctgcccggtgtcgttttagttgacgaaatcgatgctcatttgcacccgacctggcagacacggatcgggcagtggttcaccagatattttcctaatcttcaatttatagtcacgacacatagtccattggtttgtcgggcggccgaaaaaggctcagtatggcgattagcagccccaggtagcaaccagcagtcaggtgaggtaatcggtatagagcgtgaccgacttatctatggcaatgtactggatgcgtatggcactgaggtcttcggagaaaatgtatctcagtcgaacgaagggcaagagttagcggagaaattagcgaagttgaatgtaaagtcattcaaaggaatcattacagaggaagagcggcaggagctatatgaactgaaagccaaactacctactgcccgatga

SEQ ID NO: 86705 - DNA, 816 bp, Fibrisoma limi BUZ 3
atgattcgcttatcagtacctgaattgccagtcactactctgcggaaattagcagaataccaacggcttgtgctggatgcgggtgattatactttacaggttgcaaaagccaagtcgctgttcaaacagcacaataaggcggataacgcggcttttaaaattgttagagagaaacttgccgaaatgtgtgttggaccaagacgctgtaactattgcgaagatagcgtcgccgatgaggttgaacacattgcccccaaagacttatttcctgaacagtgcttttcctgggataactactgttacgcgtgtggtccatgtaatggcccaaaaagtaatagatatgcggtgtttcgtcaggaccagaatgagtccttctacgagatacccgagcatggcgatccgcctttgatcaggccaccattaggtcaacatgtgctaattaatccaagggtggaggacccattgcagtttatgctgttggatttacagacgaaaacgtttcggtttgcaccgttaatggatgaagattcactatcgtaccagcgtgctgactacaccattcgtatcctaaatctgaacacgcgcggtgatcttataaatgcccggcgtaacgcatacactaactttagagctcggcttcgtgaatacattcatgatcgggaccatgacgccaccgaaagtcatcttggcgaacttaagcggaattttgctgatgaaagccaccagacggtctggcaagaaatgaaacgccagcatcaatttctacccgagctacaacaattatttggagaggcacctgaggctttgatgtggtaa

SEQ ID NO: 86706 - DNA, 1263 bp, Fibrisoma limi BUZ 3
atgtggattaagaaactacaaatcgctgggcttaggtgtattaaaagggctgaatttacttttcaacctggtatgaacttgctggttgggataaatggtatgggtaaaaccacagtgttggacgctctgcgtgtctgcctgtcgaaggttttatctgaaattgaaaatatgccaaatcaacgggtaactcttactcctgacgacattaatttaggttttaaggcaacactgttattttgtgaattggaaatttatgggaggcagtttagctattcctttcaaaggtcaccacgatacgttaataaatccaatgaaagtgatttaaagaaccgcatttccgttgttcaatacaaggatgatctatatccctctttaaaggaggctaactttagtgcagataaaaagataccattagctatttacttttcaacccgtcgtgctgtaatttttgaaagggagctaacaattgcaggccgtagcgtactcagtggtcgagcagccgcatatgacagggcattagctgaaaaaagagagtcaaggttacagcccatagctgagtggttcaaagcacaagaagcactagggcaagaatcgccgaaagctttgaagcacattgaggttatccgatccgttgtaaagcagtttttgccagagtttggcgagctacaggtagcaggtaatgatagaactccattctttagaattacaaaagatggagcgtctcttcgtattccaaagttgtcggatggacagcggggtgtcttagctctggtacttgatttagctcgtcgtctctctcaagccaatcctgatttggaagaccccgtgaaagagggtgaggctgtagttctcattgatgagctggatttacatcttcaccctaagtggcaacggtctatagttgagaatttaacccgcacattccctaactgtcaatttattgctacaactcattctccacagattattccggcggttgaaccagaacaggttcagttaattaaagataacgagataatccggccagaccgaacattaggtatggatactaactggatactacggaacctaatggagacagatgaacgacccgagggggctgctgaagccatcaggcaagttgaagacttaataaccgagggcgactatgaaattgcccgcgaggcaatggttaattttagacaagataaaggttttgaccttcctgagtgggcgatgctagaagctcgtattgcccgtcttgaaatgtttgatgaagaatga

SEQ ID NO: 86707 - DNA, 720 bp, Fibrisoma limi BUZ 3
atgaagtacataaccaagcagggcgccccccgcaattatcttgactggtgcaaagccaacgagggattgaataacgaagattatcgctgtttacagaaccccgaaaaagccagtttgcacgaaaccctgataaaagagcaaggaggcttgtgcgcatacaccatgcgacgaattgctgtcagttcatcgcatattgagcatatcaagcctgaaacgctctgtcgtgctgaattgagagggtcagatttggattataataacttggttgcttgtttcccgaaggaaggaatgacaaatccatttcgatatggtgctcaggaaaaaggcgattggtgggaagatgatggtagagattttgtatcgccactgcataaaaattgtgagccaaaattcatcttcaacttgaaaggagaagtagcaccttttaagggtgaccatcaggcaaaaaaaactattgaggttcttaaacttgaccataatagccttattgaagaccgagaacgggctatcaaagagtttattttcggtccagccggcgatagtcctttgtcacccaaaaaagtagatcaagctattcgggcagtttgtgaacgtaacaaaagcgggcagtttcgtgagtattgtgtggctattaaacatgcattgatggaatacacccgtcaacaaaagaaagccgccaaaaagaagaaacacattcaagcccaacaaaaaaagaagtaa

SEQ ID NO: 86708 - DNA, 1722 bp, Pseudomonas pseudoalcaligenes CECT 5344
atgcgcctagataggatcaccataggtagcccgaaaagcagccctacgcatcaattcaaaaatctaaaaaatgtctcaatcgactttgatcagcagcattggattacggtcgtaattggatggaatggcacgggaaagtcaaatgtacttgaggcgcttgctaccatcttccgggacttcattcaaggggcgcgaaaacctgcatttgcattcaatcttgaatacaggatttcttctggttcaactgcgttgcacgtcaatattgatgctgacccggatcggccgcgtgattcacttattattcatgtcgcaacagacgcagaggctaaaagcgatgagttattcgacgcctctttcgagataagttcgaaaacctccgccctacgaggaaaaagaattccgctgaagagtttcttcgatcctaaattcgggtatttgccgcgatatgtatttgcctattattcaggtgaaagtgaccggctctatcaagtattccgtccatacttggaggattttgataaaaaattaaggcggggggaggatcctggattaaaaagactgttttatgccatgccagtacatagccagtttgtcctgctggcattccttattcagcagtccgatgatgtaaggaattttttggccgaacacttgggtattgatccagatgaggggatcgagtcggttttatttgtactgcgagagcccccttggacatctaaagaaggagaccctcgcttttggcgtgctaagggagtcgtcgcctcttttctggaccgcctctacaatattgcattggccccagtcgagctcagccgtcgtgagcgcgtttccctttggagcgacaaggtacttcaattcaaatatttatacgttaaagacatcgcctcgctccgcaaactggtgggtgagcagcgtccggctgaattttttcgtgacatggaaagcacccacgtttcccagctaattgatgaagtacgcattcgggtgcgcctccaaaagaatgacgggacagttacctttcgtgaacttagcgaaggcgaacaacagctattgacggttttaggcctgcttagatttacggctgaaagtgaaagtcttttcttgctggatgagcccgatacgcacttaaatccacgttgggccgtcgactatttcaactatctacgaacctttgctggtcaaagtaatgatgatcgggaaaatagccatatactgttaaccactcataatccgctggcaattgcagagcttgtgcgggagcaggttcaaattctgcagttatcaaaggatgcagaatcgacgcgcattgtcgccgtgcacccggaacttgacccgcgcggcctgggctacgctgcaattgtaacaagcgatatgtttggtatcgcctcaacgcttgatcagccgacgcatttgctcctagagcggcaaagggcatacgcaggtaaagagcacttgacacctgaagagctcgcagccctatctgaaattaactctaaattggaacgacttgggtttcgatttttccatcccgatgaagagtattcccgctacctacgcttgagaagcgctgcactgcgcgctaagtttgagtcggacgatccggagcagttagctaaccggtcaatagcaatggagtccgaagagcgggaggagttggggcagcgactcattcgggaactacttgccgagcagcgcgataagcaggagtccgatcagtga

SEQ ID NO: 86709 - DNA, 813 bp, Pseudomonas pseudoalcaligenes CECT 5344
gtgaggtacattgactcgacgcgattgcgtttgcctgatggttggctggagcgtgcggctgcggcaaaaattgcagtcgagaatggtgcgaatccagatgattatgcccggatctggagagaactgaaagacggattggcgaatctttttaatgacaagtgttggtattgcgaagtttcagttcctcgctcggataacgccgttgatcattttcgaccgaaaggccgcgtaagagacgctgagaatgagcatagaggttatcgctggctcgcttttgaacagtcgaattttcggtatgcctgcacgttctgcaattctcgccggaaagatatcgagggtgacactgccggtggaaaggctgataggttccctctgttagacgaggcgcgccgagtttatgagccaggggctgtcactggcgagcgaccaattctggtcgatccttgcgaagtcggggattggcggcttttaggatgcagaaaagagaatgggaagccttgtgccacgagtgatattcccgagcaacgccagcgtgcagatatttcgatagaaatataccatttgcatcacgagccaacttgcaaactgcggcattcagaagctgtaaagcttttaggggatattgaggaggcaaaggcactgttcattgcgacacaatctgatgctttacaagagccagcgttcaaaagggtggctgcgcgaatattgaaatctattcatgtcgacagtgctttcagcggcgaaatgcggtttctgttgagcggagagagggatatggctcactcttggatccagaccttgttggaaacttga

SEQ ID NO: 86710 - DNA, 1224 bp, Yersinia enterocolitica subsp. enterocolitica WA-314
atgctctgtagtatttccaagataaatattccaatcccatattcaagaaaaaatgttgatatccaactggatggaatgagcctaattattactggaggtaatggttgtggtaaaacaagttttataacagccatttataaccatctaaagaacggaatagataaccctaataataatagcgaagagtttttaacacaacaaattagcatatatgaatctgaactaaataaaataggcagagatggtgtaaattataatcattatagttctgagttagaaaaacataaaactcgactaaaagaaattaatgattttagtatcaaaataaattctatagagaacaaaaatattcgttctttactgagatttcactcagctacacgacaatctgcaatatcatctccaaatcaagcacccaaatactcagtgcttattgaagaaaataagcactttgctaatgacaaagatggcagtcaattctttgaaagttatttgttaagtttgaaaaaaaatcaaagttatgcaatagcatttgatgagaatgaaactgaagcaaatcgtattaaagaatggtttgataaaatacaaatagacttacagtcattattcgaggattcaaatctaattttggaatttgatacaaaagatgaaaagttttatctacatcaagatgggaaagataggtatacattccaaacactttcagcagggtattcatcaatattgagtatttatacagatttaattatgagggttgaaatgtggggtgtttcacctgataacatacaaggaataatattcattgatgaaattgatgctcatttacatgtatccttacaaaaacaaatattgagatttttcattaaatcatttcctaaaattcaatttattgttactacgcattctccttttgttgtcacctcagtttcaagagctgttatttatgatcttacaaccaatgaacaaataacagatgtatcctcttattcatatggtgtcgttatggaggaaatctttggtgtcataccagaatcacatgtcttgacagacaaacttactcatatagagtacctaataaataatatatcgcctgagaatattgatgaattggaggcaataatatcatctttagcatccgatcaagaaagtatgagcaacgacacccaagcatttcttgatgctgcgcggttaaaattaataaaaacaaaaaaaatcgataagtag

SEQ ID NO: 86711 - DNA, 654 bp, Yersinia enterocolitica subsp. enterocolitica WA-314
atgtttaatgtgataaggtcaatgccagcacctgaatcgctgcagagcaagaaaaaatatgataatgaagatgttcactatgcactacaagattgtttttatgaaaaatgttatttatgcgaaacaaaaaaacctttagatattaacattgagcattttcaaccacacaaaggcgatgagaataaaaaattctcttgggaaaatttatatctagcgtgctctcgttgcaacaatatcaagctagcaaaatatgataaccttcttgattgttgttctattagcgtctgggataaaataaaactaatacccggattttcacctaaagcaagaaaattcattattaccccactatctactgatgataagacgcttgaaacggcaaaattactagatgatatctacaataatgataatactataaataaaagacttacagcgcggtctctacgatcgcaggtagtccagaccacacacaagctaacacaacatatgattgaatattataatgaagattcaacagatgaagaaaaaaaagtagccattagtaaaatgaaaataatgataaaaaaatcttatccttattctgcattttgtcgttggatgataaaagatgatgaggaattagataaattattatctaatcttatgaactaa

SEQ ID NO: 86712 - DNA, 2316 bp, Pseudomonas fluorescens BBc6R8
atgcaaaagcttgaaaggcctgacaagtcgccggcagttctgcggtcgaaagccgcgcatcaagcgcgacaacagatgcgcgacttttgggcgctcgatcgacaacgccgcgctcagactagcgtgcccgctattggactcagttcaacagaccaacgtttaattaccgcggttgccggaatgagcctaaaccggtgcgccttttgcgaagcaaaggacgtgctttcggttcaccgtttccgtcctgcaggtaacgcactgccattcgctgaaacgagtaacgcacacctttactacctatggctcgctgacgcttggcaaaacctactgccaatttgcactagctgcattccgcgtgagacgcagtttcccactgacggtgcccgtgcgccgctgccatcgcttcgccagatcgatgcctatgtcgaacgagacgatggtctttggccgtcttatcctcccaaagagtccattctcctgattgatcctgcgcgggaccgtgaattcgagaaacacctcgttcccaagctcaacggtgagatcattggaagctcgcgaaagggcgagactacggtcctcctattcgatctcaatcgtgccgagcgccgtcaccagcgccaccaggcttatcaatcgctaatcgaccgcctcctagtactgctccgggaaggtaagaagttcaatgactcgcccgattggaagttgatcttcgattttccgatgatagagttcggtggaacttggttcttactgttgcgtcgcattgcgaggtggattgcagtttcgaaagccgtgagatggcaaacttccagcaatctgatccgtgcgttttttttgcggcttgctgacgatggtgacgctatctatcacctagaggccgctctttcagcaatagcagaggaggatgagggactacgcgcccgtcgctggtcaatcagcccaatgtatacggcacgcacatctatagcagccgtcgaaatcagcaatttcaaagcgatcgaggggctgcaactgaccttgagcgaacctgctgcacggcggggcgatctagtcagtcggcgcgtgccatcactgatgattcttggtgaaaatgcgaccggtaaaagttcgatacttgaggctatatcgctcgcgcttactaccccggctgctcgcgccgcactcaatgtgccttggacccagttggttcttgacccctcgcaactcggccttgaacacgtaaacacggcgttgcccgctggagtgcgcgttaagtttacgaacgatcagtcggtgacgttgacgattgaacatggcgcaccgaccgtacgaagtgatctcggaaaccaccacgtaccagtatttgcctatggtgcattccgacgcttcctgaccggtacgcgcaggcctgcaccacataagcatatccgcaacctcttcgacggcagcacgctttccaatcccgaaccttggctcaaagccctgaaacaagatcagttcgacatggtgattcgcacattgcgtgacctgctatcgatcgagggggagttcgacgtcatacagcgcgagcgcggttcgcgccaactgcgcatggtcacctcgctgacagaaccagacggtgaaatacgttacagccgaaccccgctgcatgcagtctcgtcgggctatcgttcaatgctcgccatggtgtgcgacatcctgcgcggaatgcttgatccccaggtatacgaagggtttgagagttttcggactgccaaaggagttatcctgattgacgaaatcgaggcccacctacatccgcgctggaaagtgcaggtcatgtccagtctgcgtaacgcgcttccggggatgacattcatcgtcacgacacatgacccgctgtgcctacgtggcatgggagaaggtgaagtggtagtgctccaacgaatcgcggccaccgatagcgcgcgtgaaagtcagatgcctattatcgtaaagcgcatgatggggctaccgtcagtcgctgatttgcggatcgaacaacttctaacttccgactttttccagatgctctccacagacgatgctgcagccgaccggggtcttgcagggatcgccgatctcattgccgctcgcgcgcgcggcgatgaactgtccttggaagatagccgtattctcgcggattttgagtgcgacattgccagtgcagttccagttgggtctagtgaagtccatcgtatcgtgcaggacactgtcgcggagtatcttcggcgtcgtcgcgacgccagcagcgaaacactccagcggctgcgtgatgatgccaaagctgagattctcgctgcgttggaatcgctctga

SEQ ID NO: 86713 - DNA, 978 bp, Pseudomonas fluorescens BBc6R8
atgcgtagggtagatcgcggcggtgtagacgttccaaaatcactcttgctcgacggcgcaggcccggcagagttgatcaaggtgaaagaacaccacaacgcaccaaatccgccggccgaccaaaatggtggcaaaaagaagagtttcacttttacagcgtacaaaagtgccgatgtacgggccgcccttgaaaagctgttttacgacaaatgtgcctactgcgagacagtctacgccgcctcagcacctgtcgacatcgaacactatcgccctaaaggtgccgttgccgaggacgtggcacacggcggctactggtggatcgcgatgggttgggacaatttgctaccaagttgtatcgactgtaaccgcaagcgtgggcaggtcttggtcgagccatcttctagtcttgccgtacttgctgcgaacgtaaagccggcggtcacccaatcaggcaaaaaggacagtttccctcttgcagttacgggtgtacgcgcaatgggagaggaagcagaacttgaggacgaacaagcgctgcttatcaatccgtgctgcgacgacccagcaactagcttgatgtacagctttgacccagcgcatccggctgggctggttgttccgacaggagatctggatcagcaggtacgcggcgcggtctcgatacagatttatggcctcaatcggctaaagctcgtacaggatagaaccagattgctaagacggcttgagttcctcggcgatctcgttatcgatctcgcatcctcgattactgaacttgaggcgcctgctgtccagagagcattgcaagggacatcagcagagaacgtcgcatcgaggctacgtctactacgtgaccggactttggccgagataaagtcttttaccaaagacgatgccccgtattcatctatggcaagcgcttggctcgagcactttaaggcgcgaattcgtcctgttactcccgtcgaagcttttccttag

SEQ ID NO: 86714 - DNA, 1368 bp, Microcystis sp. T1-4
atgtgggttgaaagtataaaactcgaaaacattaaatgcttccagaatcaagagattaaatttattagtaatcccgataataaacgtcgtcaggatgctaaaccttgtcgttggatcactttattgggagaaaatggagtaggaaaaagcacgattttacaggctttagctttgctgctcgccggaccagaagcagcgaaagaattattaccacgtccgactggttggatatgtaatcccaagacaccgggtaaattaaccgcagtgcttcatcaagaagatggggatgcgggaaaatttggtacggataaaactcgaaaaacttttgcttattcctattttgttacaggcaaggaaaggttagagttaggaggcagtaaggacaaacaaacctatacagaaccagcattaatcgaagaaaatactaaaattttgagttggttgcgagccaatgcttttgcctccgataatcatggttggtttgccgtcggttatggagctttccgtcgtttgacacgagtgagtcaagtgattattcctagtcttgaacctccgaaacgctctagcaactttttcagccaatttaatgaggatacatctttaagttcttttgagagatggatggtgtatttagattatcgaatagccaaaaatcccacagatattcaagccaaacaaatgaaaaaaatcggtgaagaagcaattactaaactgttacctggtaatgtagaaattgctgaagtaactgccgatggcttgattcagtttctagttaacggccaaaaagttccaaccattagtttatccgatggttttcggagtatgattgctttagctggggatttaatttggcgattattacaatccttccccgatctagataaccccacagaggcttctggagtcgtcttaatcgatgagttagatattcatttacatccttcttggcaaagggaaattgctggatggttacaggaagtttttcccaagcttcaattctttgtcgctactcatagtcctttaatcgctgccggtgcggggccaaattctttaaccctacgaatcgatctggtagcgtgtgaattagagattgtagaaattcattataaagaattagcggctaatgttgatcgtactttaacaagttctgcttttggtctgaaatcaacctatcccactgatacagaaaataaaattaagcgttaccaccaactaaatcgtaaaaagaaaaatctggcggcagcagaaaagcaagaatatgaacaactgtcattatttgttggagaagttaaaccctttggcgaaatcagtcaacctaatagtttagaatcccgaattgatgccttactagaggagcgtttatcttga

SEQ ID NO: 86715 - DNA, 690 bp, Microcystis sp. T1-4
ttgattgctgtcaccagaatatcagagccacccgtattagctaaaaatgtcgctcgttggctagaggctttagaatcaataaaatcaaacaacaaggcaactaaagctcaaattaaccaagcacaaaataaatacagtcatccgcaagttaaagacgcattagttaaaatgtttaatgggaaatgcgcttactgtgaaagtaagattatagtggtaacttacggagcgatcgaacatttttatccaaaaagccagtatcctgatctgacttttacttgggagaatttactgctttcttgtgataaatgtaatgatgccaatcacaaaggcacaaattttcctctcgatgatatcacaggaaatcctctgttaatagaccccacggatggagtaaccgatccgaatacacatcttgaatttgtttgggatgaaatggcaaaattggccagtgtttatggtcgggatcgacgtggtcaaattgttgaagatttgttcgatctcaatggtatgcgtggacgaaaagaattaattaactatcgtagtcaatatattaaaaggttgttagcattattacgtttcgcaaaacaaggagactcggaggctttatctttactgcaagaagcttgtcaatcgggagcggaatattatgcttttgctagtatttatatactgcctcatttgcctccctaa

SEQ ID NO: 86716 - DNA, 1287 bp, Microcystis sp. T1-4
atgaaaattaagtctataaagcttattaattatcgaggtgcagtcagtttaaacatcgactttcatcggcaactcaacgtattcataggagttaatggtgcgggaaaatccaccattttagacagtttggctattatgctttcatggttagttaatcgcctaaaaaatactaatgccagtggacgacttccagagattaacgaaaccgagattaataatggtcagtggacggctataattgaaatcactggggtgacggaagatagtcaagagattacttggaaaatagtaaaaactaggactggatatatccacgctggggaacggagtaattttagccaattaaatgaatacagtcaagaaatacaacgacaaattactgatcatcaaggacaaattaacttacctttatttgtttattattctgttaatcgagcagtgctggatatacccttaaaaattaaaacaaaacatcaatttgaatctctaagtgcctacgaaaatgctttaaccagtggatcagattttcgcactttttttgaatggtttcgcgagcgcgaagatttagaaaatgaaaatagaaaatatcaggattatctaattaaaccagaaggtttttgttttcctgatccccaattggaagcggttcgggaaacgatcgaacgttttctacccgattttagtaatcttagcgtccgtcgtaatcccttgagaatggaagtaacaaaaaagaataaaatagttactgttaatcaactttctgatggagaaaaatgtctgattgctatgcttggagatttagctcgaagaatggcgattgctaatcctcaaaatccttatcccttaacgggtaatggtgttattatcattgacgaaattgatttacatttacatcctcaatggcaaagatttgtagtacctaaattactagaagtttttcctaactgtcaattttttatttccacccattctcctaatattatcactcatgttcaaccagaaagtttacacttcatggaacaaacagaaatgggaataaaaattcatcccgtgcaggagtcctacggcaaaaatgttgatcgaattttagaagatttgatgggattagagacaactcgtcccaaggaaatcgctgaagctttgaaagatatctatgaacaaatatctcaaaatcaattagaggcagctaaaaataatatcaatgatctcagagctaaaattcaaaatgatccagaattaattaaagctgaagttattattcgacgcaaggaaattatcggaaaatga

SEQ ID NO: 86717 - DNA, 213 bp, Microcystis sp. T1-4
atgaagtatattaggaaaagacaagaaccaccggagtttaagaattggaaagagcaagctaactcagattggcagcccgactttagaaatttagcgggaaaaccaaaagaaatactaattaaagcgttgatgacagaacagggagaaatatgttgttattgtgaaaatcgattgattgatggtaaatgccatatagaacattttaaaccttaa

SEQ ID NO: 86718 - DNA, 1242 bp, Fusobacterium periodonticum D10
atgaaaattgaaaaagtccacataaaaaatataaaaggaataaaagatttagaactttcatttaagaaagataataaaattttagatgtaattgtcttagctggagtaaatggaagtgggaaaacaactattttagaatctataaaagattttttttataatacaaatattaattatgatgaaccagaaaaatcaaatgttaatttagatatattttttgaagattttgaaaaaaagaatactgaagatcatgaaaaaacttctaataatgatgaacatgaattattaaatttttctaatatttttgaagcatatcattatggaaagtataacgatagtaaattttatcaagatttaatagcaaaaagatttgaaaatccacctaaaataatatatgttcctgcaaataatagttttgaagaagttgaaactaaatcaacaactttatcaagaaattatgaatttataaatattgtaaattctgaacttatggaagatatcccatcatatatagcaactagaagaaattatcttgctactattgaagaagatctaactatgaaagaagttacaaatataattgtaaatgagataaatagtatttttagtattttagaactagatgttaaattgaagggattttcaaaagatgaaaaaactatgcctatttttgaaaattctgttggtgaagaatttgatataaatgatttgtcctctggagaaaaacaactatttttaagaactttgtctataaaaatgttagaacctaataactctataattttgatagatgaaccagaattgtcattacatccaaaatggcaacaaagaataatagaagtgtataagaaaattggagaaaataatcaaataatattagcaactcactctccacatatattaggaagtgtttctaatgaaaatatttttattctttatagagatgaaaaaggcaaaatagaagctaaaacaggagatgagttatattcttcatatggacaacctgttgacagagttcttaaagatataatgggtttagaatcagttagaacaccgaagatagaaaaagatttagaagaactaagaaaattagtagatgaagataagtatgatacaaaagaatttaaagaaaaatacagtgagcttctagaaatattaggaaatacagatgaagatttatttcttatagatatggatgcaaaattaaaacaaaaggtgaattctaatgttgaaagtaaataa

SEQ ID NO: 86719 - DNA, 597 bp, Fusobacterium periodonticum D10
atgttgaaagtaaataagaaaagtgaaccagaagaatttacaaaatataaaagtaaaaataaaataataaattgggatagttttactgtagaaattaaacaagtcttaaaacaatatctattagaagagcaagaaaatagttgttgtccttattgtgaaacagaaattaatttaaaaaatagtcatattgaacatattagaccaaaggaaaaatttcctaaactgttgtcagattataataattttattgcttgttgtatggaaagtggaagatgtgggaattcaaaagagaataagtggaatgagctttttatcaatcctgttatagaaaatccagaagattattttatatatgatataaaaactgggaaaataatttcaatatttaaggatggagaaaaatatgaaaaggctaagtatacaataaacttattaaatcttaatgataacagattatgtgaaatcagaaaaaaatatatatttgaattcttgagttatagtgaatataataaaaatagtttaagtgattatccaataaagtttccatctctaagaagatatttagagctgttgcaaaagttaaatcttcaattttaa

SEQ ID NO: 86720 - DNA, 1563 bp, Myroides odoratimimus CCUG 3837
atgagaattgataaggttcaaattaaagcatataaaaatctaaccgattttgaaattgatatagacgaagagaagatgattacggtactgctagggcagaatgctaccggaaaatctaatttcatcgaagcgcttgttcttatattcaaacatttagatttaaatacagagacaaaacgctcatatccaaattttgaatacacaatcaaataccaaataaaaaataaaatgattgaggtggtatttgaaaataaaaaatatgcgattacagtcgatgataaatcattaagtttaaaagaatttttcactgtagaaaataaaaaacagtttcagcctaaatatgtatttacctactattcaggtatcagtaataaattaaaagaacatttttgggaccatcaaaatacattttacgataaaataattaaagaaaatttcgacaaaagtgaaattgatgagttacgtaaattattttatgtacaattagtgcattcttactttgttcttttaggattttatacacataaaaccgaatcaactaataatttcttaaaggatgtgttagggatcgaagatattaattcagttctattcattcttaaaaaaccagaatgggcaaaagataatgaagatgtattttggggagcaaaaggtttagttcgtgaatttttaaatattttatgggacttaagttttgctccaatctataatgctgaaagaatcagaaaagatttcagagagtacgattcacaagaccgattatacttgtacttaaaaggggaacaagaaatcgaaagtttagcgaatcattacaacaccaatgtagaattatttaaagccttagaaagtacatacatctctaaacttttagaagaggttcgcattcgtgtacaaaaacgtaatgtagatcaatccattacatttagagatttaagtgagggtgagcagcaattactgactgtactaggcttattaaagtttacaaaagatgaagattcattgatcttgttagatgaaccagatacacatctaaatccattatggaagtggcattatatgaaatatttggaagaagtggtacaaaaacctgaatctacacaaatattcattaatacacacgatccgttagtaattggatctttagtgaaagaagaagttcgcattttcacaaaaacggagaatggaaccattaccaatcaacccgatgtagatcctaaaggtttaggggtagataatattctaaaaagtgaattatttggtttaccatctacactcgacgagccaactttacaaaaaattgaaaaacgtaaccgtttatcaattaagaatgctaataataaagcttctgaagaagaattgttcgaattaaatcaattacataacgaattacaaacattaggctttacaaatccatttaacgatccactgtatcaaaagtttgctgtagcttatcaaaaatatgaacaagaagaacatagtaccatctatagttccgagcaacttaaaaaacaagaagaaatagcattaagtattattaatcgtttaaaaagcgaagaaaaatga

SEQ ID NO: 86721 - DNA, 789 bp, Myroides odoratimimus CCUG 3837
atgatatttatagatattacacaatatagaccatccccagattggttagacagagcacaaaaagttaaagatttagtcaaatcggagccagactataaaaagaaacttgaaataatagataagtataaaaatttgtggggagaacttaaagaagatttgagaagtctgtcacataataaatgttggtattcagaatcagtagatgcatctgcacactcgcatgtcgaccattttagaccaaaaggaaaagttgttgaaaaagataaatcggaaagagaaggatattggtggttagctttcgaatatttgaattatcgctattgtggtggtgcaggcaatgtgcgaaaaaaagataaatttgaagtttttaagaataaatgtactaaggaagatgatgatttagatgatgaagttatttaccttttggatccttgcaaaagatccgatgtagcattacttagttttattgataatggtgaaattacgtatagctctgaattaacagcatggaataaagagcgagttatttatacgattgaaacactgaatttaaatttcaatatgcttattgaagaacgagcaaaagtttggcaaaattgtaatagtttaataaaagaagctcaagatattcttgataaattatctaaaaaccaatcagttaaaaacaatactctttttgaacaaaaattagatcaaattgcaaaattaaaagataaatcaaaaccattttcagcagtagcacaatcttgtatttatagttcaggattaggatggttaaaacaaatttaa

SEQ ID NO: 86722 - DNA, 1230 bp, Aeromonas veronii AMC35
atgataagggaaattgattttaaactatctgggagtgtagataagagagtaaaaataccgttaaatggtaagaatcttattattactggtgcaaatggctgtggtaaaacaagatttttacgtcaattaaatgactatctgcgcgggattcttgaacggaaaattcaaccggaagatgtaatattacgtgagttggaaagcgcccaagaaacatttaatagcatagatctgtctcatcagtactatcaatatcataaagatagagtagatgagatttcaaaaaagcatcagcagtcaataaatgaaaaaatagaatttgaaggcctcatggacatattttcattgctaaatgaaaaggcatttgttcttaggttttttgaggcgaatagattagctaatcaattggcaaataatgggcaagtagaaaatatcgcatcgattaaacaacgtggcatgcaagaggatatattacaggactcaagtgataaatttgaaagatatcttgttagttattataactatggtagccatgtaattgctcgtgaaaataacccagagaaagcaaagcaaatcaacagctggtttgataaagtggaaagcgatcttcgtaatttatttgaagataatcaattgtctctgaaatataatcctgaagaacaggctttttatatacatcaagatgggaaagaaccatttagatttgacaatctttcatctggttacagttctattctcagtatttatgctgacttattaatgaaggttgagcttcgtgatgtaccatcaaataaaattgcgggatttgttttaattgatgaaattgatgcacatctacatgtctcaattcaaaggaagattttctcattttttgacaaagccttcccaaaaattcagtttattattaccacgcattcaccatttgttatccaatcagtaaatgattcagttatttatgacttaagtaaaatggagtgcttagaagacttgtcgatgtattcttatgagtcaattttgaaaggtttactaggtgttgatagtacatctaatctgttaaatgaacagctagagctgatggctcaacttatacagcagaggccgattaacaaagatgagttgcaaaaggttgttaatttaattgagcctcatgaagcacaattggactcgaagtcaaaagcgtttcttcttcttggtaagaatgcacttcttgatgctaatgatggtgaggagtag

SEQ ID NO: 86723 - DNA, 666 bp, Aeromonas veronii AMC35
atgtttaatgttactcgaatttatccggcacctgcatgtatagcaagaggtcattacactaaagaggaagttctcgtagtgttaaaaccaatgttctttgaaaaatgttatctttgtgaacgtgatgagattcaagatgtagaagtagaacattttgttcctcatgagggtgatgatgcgttaaaatattcttgggagaatcttttttactcttgctcgcgttgtaatagcatcaaaagtaatcgacatgtcaatcttcttgactgtacagatggtgccttggatgtaggcacattaattagttgcaagatgccatcagcaccatcagatagggtgatggtcggaactactagccagaatccgactcaagaaatgataaacacggcaagattacttgatgaatgctttaaccttgaaaatactgcattgcgaggtataagtcgtgaggctttgatggagcagttatgggatcactacacagacttattgaatgctagacgcgttttaagaaataaaaaatctccagaggtggacaaaattcgtgcagagcaaactatttctgcaatgttgacagtgaaacatccattttcaatattttggcgttactactatttaggtgatacctttttggttaatacatatgctcacttaagagtcggtttttaa

SEQ ID NO: 86724 - DNA, 1299 bp, Alcanivorax dieselolei B5
atgcactacaaaacgatatcaattgataaatggcgtcaatttcgaaaggtgcatattgaattgcataaaaacttgacacttttgactggaccgaatggttccggcaaaagtaccttattgtctctccttgaattgagcatgcaatcaaactatcgagagcctttcctcgccacgcctgtcaatgaccagaaaacagggaaatctggttactcactgggtacgctctttgcccgctttaatccctttataaagactgaagagagtaatgagcagtctgtacagcacgaaatcggagcaatagtttacagttcgggtgcggtagctaaattacggacaagcaactcggacgccttgcagtatcatgtcaacctgtctaatcaaaatacagttgtcggctttaagattgcatctcaccgagcgctaccaaggtaccaggctgttcaatctttacctgtttcgggaatgcggccgaaagaagcgttcgaatatttttctcaagctcaaagccactaccaacgtggcgatcgctaccatcgcgagggcaaaacagttcaaaatcccgttgccccaatgaaggaaactctgatcggatttgccgcgtttggagctgataatgcgcacatgaaggctgttccagaactcattggtctgtatgacgattttcagaacctcctgagcactctgctacctgaagaaataggtttccagcggctagaggttcgcagtccagaaatagtggttgtctctaaagcgggcgagtttcccatagactctgcgtcaggcggacttatgtctctggtccaaaccgcgtggcaaatttttctctatacaaaaggacatggagaagcggcggtcgtactaatcgatgagcctgaaaatcaccttcacccatctctgcaacgagactttcttgggaaccttgtaagagcgtttcctagtgtccagtttgtcgtagcaacgcactccccattcgttattacttccgtgagagattctaaggtatatgcgcttcgatactcacaattcgacaaaaatgcgaatgagtctggatcagccgtgacggcccaagagatcgattttgtcagcaaagcgagaaccgcggataagattcttgatgaggttcttggggtatctgtcactatacctgtctgggctgagcatgaccttactctgatcgtaaataggtttgaaagaactgaattgtcagaggtcgctataaataatctccgcgcagagctggaatcagcagggttgtctgagtttcttcctgaagcaatagggaggattgctcgtgattaa

SEQ ID NO: 86725 - DNA, 627 bp, Alcanivorax dieselolei B5
gtgattaagcttaccaaaggccctgagccagaagtcttgattaacaataaggggaggtggacgcgtgatcttctcgctgctatcgaggagggaaatgcggagaaaataagggcggtgacgaagcgttataatcattcagaagtgaagaccgcgctaaaggaagaaactcgccaaaaatgcgcctactgcgaagcaaatgtcacagatgtggcccatggtgacatcgaacacgtcgccccaaaatctataagtagggataaaacatttgagtgggaaaatcttaccttcacctgccaaatctgcaatcaaaataaatcgaataaagaaggttttgtagatccatataaggaagaacccgatgaacatatcttcttcgccggggcatttgccaagggcaagagtttaaaggggactctaacagtagctgaactgaaattaaatagaattgctctgatcgagagtcgaaaccgcgaaattgagcgctatgccgaccaattggaaaaggtttttctaatcccggatgagcgcactaaagaattgctcctagcgagcatgctgaatgagttagatggcggccggccagaatttattgcggcttgccgtatggtattaagtcaatacagatag

SEQ ID NO: 86726 - DNA, 1257 bp, Tolypothrix sp. PCC 7601
atgaaagtcaaacgcttgataatgcaatcattccgtggaatcggtgatttgacactagatttcgatgaaaccgagccaacagtactgattggtattaatggtgtaggtaaatcgagtattctggattgtctcgctattcttctgtcgcgttttactagctcaattcaacactcgacaccttctggaaggctatttacagaagaagatatttctaatggaaaaaaggagactcataacgagattgtcatttcatttgattatgaagaagcaatatggtctttaacaaaagttaagaaaggacgcaagaaagatactagcagtaacttatctacactgtcaaaaattgtcgaacatatcaaacaaaatttatatacatctcatcaattcaatattcctctagcagtttattattctacgaatcgtgctgtattggatattcccttgaagattcgcacaaagcactcatttgaacaaatagatgcttatgaaaattcgcttacaggagtaggtagtgaattcaggatattttttgaatggtttagaaagcaagaagatttagagaatgaattacgtctagaagataatgccgcttatcgggacaagcaattacaagcagtgaggcaagctatatcttcattgatacccagtttttctaacttaagggttcgtcgttctcctttaaaaatgacgttacaaaaacaaggtgaagaactcattgtgaatcagctatctgatggcgaaaaatgcctgttggcaatggtaggagatttggcaagacgtttagcaatcgctaaccctgggttacaaaatccgcttcaaggtagcggtgtagttcttattgatgaaattgaactgcatctacacccaaattggcagaggagaattattacatctttaataaaaacttttccaaattgtcaatttattgttactactcattcacctcaggtaattagttatgttaaacctgataatatttatattttaaaaaatacagatcaaggtattgttgctaatcgtccgcaaagttcgtatggtagagatagtaatcaaattttagaagatgttatggatgatataaaacgtccagaagagtttaaaaagagtttacacgacttgtttcaactcattgacgaaggtaatcttgatagtgcaaggcaattgtgtcaacaaattagcgatgatatcggagaagatgatccagaattaataaaagcacgtgtatctattagacgaaaagagattttgaagcggtga

SEQ ID NO: 86727 - DNA, 636 bp, Tolypothrix sp. PCC 7601
gtgaagtacattagaaagagtgaggagccacagagtttttcaaattggaaggaactagcaaatgatgactggacaccaagctggagcaacttcagtaagccgcagaaaactgatgtacatcactcattgctacaagaacaatattttatttgctgttattgtggaagtcggattactattgctaacagtcatattgaacatttaaaaccaagaacaacttatcctgaattagcactagaatacacaaatttactggcatcatgccaaaaagatacggtaccaaatgaacctctacattgtggtaagaaaaaagataaatggtatgatgataacctaatggtttcacctttaaatattaactgtgctgatttttttagatatacagaagatggacagattctatcaataacatcagatctaaataaaaagtatgctgccgacaccacaattgataaactaggtctgaatattgataagctacaaaaaatgcgtattggagcaatagaagctatattggaaggtcttgaagatctcactgaaaacgaaagacaaatattgtttcaaagcttctgtcaacccaatgaaaatggagaaaatgaagagttttgtgctgcgataacttatatactccagtaa

SEQ ID NO: 86728 - DNA, 1419 bp, Kosakonia sacchari SP1
atgaaattgaaaagtttaggactgaccagcttccgagggtttgatcggctggatatcaattttgacgagcggctgaccgtgattgccggtatcaacggcgtaggcaaatcaaccatcctgcaggctatagccataacgtattcccattccttgccagaatttacggtttcgcgagagaaagcactaccgatacttgatgccgacatacagcaaggcaagtacacctgcatcattgaaatggaaagcagtggcttgggtgcagcgcagttgatcaccttcctatccaaggaaagccttgataagggtgaaaagctggcgcttgggcataagcaagccaagatgaagaaggatttggctcgtctggaaaaggggacgcctgattacaaaaacttaaaaaatgagatcacttggatagataagcgactggaaggaaattttgagaagcgtctgaactggctttttaccgacactcatgaaacagaggcaaggctgaagcgctacctaaaaagcagcccgacacaaccacttgttgtctactactcaacacaccgcttgctttcaaggcttccgacaaaacttcaaggcacattgcctttcaagcagggggcggcattctcaaaatcgttgacgcaacttgagatatcgctgaacgaatttgccaagtggcaacgtgctatattctcgacccgcgtgcttcgcaaagaaactgtgcagtatggggaacggattatgaagctgcttcaggaagctatttccagcctaatgccccagatcaaagaattttggtttcatgaagaaaacccacctcgttactctgttatgaaagacgcgacgatagctgagcagatcaacgacaaaaaagtgggaaagcagttatttttggagcaattatccgacggcgagcggggattgattgctttggtttttgacctaacccgccgtcttgctgtcgccaatcctaatctcaaaaacccaatagccgagggtgaggcgctggtgctgatcgacgagatcgagctgcacctgcatccgaagtggcaacgcgaggtgctgcaacgtctgcgcgacaccttcaaggcttgccagtttgttgtgaccactcattcgccactagtgttgggcgaggtgccagcaagatgcgtacgtttcctcgaaattgtggatggcaaagtgagtgttaccattcccactgaggcctatggcatggatgccaaccgcatccttcaggagttcatgggtgcgccggtgcgaaaccggcaggtggagggtgagctaaagagcctcttcgaactgatcgaccaggagcgtttcgacgaagctcgctccagcattgcggctcttgaacaccagctcggcgaggatgaacccgagttaacccgggccagttcgctgatccgctttctggagggcgacgagtag

SEQ ID NO: 86729 - DNA, 627 bp, Kosakonia sacchari SP1
atgcggaccatacagaaggggcaggagcccggcagcttgacccagcatcgcctgaagccacatgccgattacgacaactacggtgacaaagccgccttgcggcaaacattggtggcggagcagcgcggcctgtgctgctactgccagtccagaatccgtgccaatgaagatgaaatgaaaattgagcactggcagagccagactgggtttcccgcacgtcaattggactttagtaacctgctaggtgcttgtcttgggggcaaggggcgcgctgcaaaggatcaacattgcgacacccgcaagggtaattctgtcctttgcttcagcgtgagtgaccccgcgcatcccattgagcgaaagattaaattccttggggatggccaaatcaagtccgatgatgcaacgatagatgcagcattgaacaatgtactcaacctcaattggtcacgtctggcaaacaaccgtaaggcagtgctagatgcgttcaagcagcgacttgggaagggtaacttgaacgttgcgcaagaactcaagaaatgggatggaacccaaactggagagcttccagagtttgcgcaagtgatggtgttttggttagaaaagagaatgtcgagggccaccaaatga

SEQ ID NO: 86730 - DNA, 2262 bp, Kosakonia sacchari SP1
atgttattcgtagacagggggcgtgtcgccattccatccgtgttactgcctggtggtgcggcagaggcggaaaaagagaaagcggcggtgttttataagcaggcgcatcatttgcagagtcgctttgaatttaaggttttcagaagcaaagaggttaaaagtgcgctgtatgatctctttcagggtaagtgtgcgtggtgtgaatcacggataaattcaacggcgtccggggatatttgccattacagacctaagggcgctgtcgcagaaagccgtaaacacccaggatactggtggctggcaagccagtgggaaaatttgctgttaagttgccccgcatgtaatcggccgcatcaatataacggtgtcatagcgggaaagtcgagccgctttcctcttgaagatgaagcacagcgcgcctttgagcctggatgggaagaacgcgaaaagccgttattgttggatccgacttctgatgatcctgcccggcattttgtctatgactgggaaggaaacatcctcagtgagacgccagaggggcagatgacgatcaccattatcgggcttaatcgcccggcattggtcgaggcgcgaagaagtgcgctggctatggttcgtagtgtcctgaatttgcttgctactgcctccagcgtcggctcagaagagcagcggatgtttatacttcgtcatctgcaagagttgaccgctgataatgctgagtatgcagcgataaaacgccagttcatttcggcagagcttaaaaagatcgtacgcgatactggatacgatgctttccattggttgaaatcaaccctgccagttacaaagaaaagcgtgagcggtatatgggaaaaactcagggattttgagttaaaacaatctgatttctccttacttaacagtcgggggattgctatttcgcggtcgcaaagccgaaaaatacaaaaagtgacgatcactaattttaaaggcattgatgagttaacgtttaatgtcgccagtaactggcaaatgctgttgggcgaaaatggcgcgggtaaaagttcggttttgcaagccatcgcgctctgtttggggggcgcggacaacttcgccaaagtggtgaacgaaaacggtatcgatcctaaaacctggatcaggtctagacggcaaaaagccactattgaaatccaggtgagcggttttgttaaacctcattttttgcatatttatcgtgaccgggctgtgtttttacgtgctgcaaataaatcagcattggtcgactatgcaaaaggcagcgccacggcgaccggtgcaaaagaggccaaagatgtccagtttgttcttcttggctacggcgcaacgcgtttattaaaacctgcgccgaaattgtcggaattgcgttttcgtgaagcagggccagtgcgctatgcgcgcttcgataatttgtttgatccgctttcgttactgatttccgcagaggagtggctgttaaagcagaaacgagagatctttgatctcagcgcgcgcgcgttaaaagatttgttaggcctggataacaacgacattttggtcaagcgaaataacaccattatggtcgttatggatgacaaaaaacctttaccgctggccgcgcttagcgatggttacaagacggtgattgccttgtgtgtggatatcctcgcgatagcaacggagttttggggcgatcctggcagcgccgaaggcatcgtgctggtggatgaactggattgtcacctgcatccaacgtggaaaatgcgcattgtaagcgcgttaaaacgggcattcccagaaatgcaatttatttgcaccacccatgatccgctctgtttacgtggcctgggcgctggagaggtgtgtgtgatgcagcgtgatggtgaaagtatcaacttgctgagcgatttgccaaacccggcggatttccgtgtggaacagttattaacctctgcattttttggcctgaatagtacgcaggatccggaaaatgaggcgatcttcgatgaatattatgcgttgctcgctttacctgaaaaggatcgagaacaatttcagcggcttgagcaattaaagactgagttgaaggagcgacgctatattggcgagacgccgcgcgaacagctgatgtttgaagcagtcgatcatattattgccgacaataaacagaaaggctttttgcaaatccatgacatgaagcaggaagctattaatacagtcagcaacctctggcgaaacgctttaaataaaaggttgctaaagaaatga

SEQ ID NO: 86731 - DNA, 1059 bp, Kosakonia sacchari SP1
atgattaaaataaatcgtagccaggcaacgccaaatattccggtttacgtgagagcgatgactcgtggtagaagcattgggcttactcaagcggtgcgggaatataatgaatcgattgattttcacactaatgcatctcactacctcaatgaagagaaaataactgacagtaaatttaagtttaatgtttataaagacaaagaactggttgctgaactggggaaaatatttggtaataagtgcgcctattgtgaaagctgctttggtgccgtcacaccaaaagatatcgaacacttcaggccgaaaagtgaaataaaaacttatggcgaagcaatacttcgtccaggctattactggctggcgactgagtggctcaatttactggtgtcgtgcccggattgtaaccgccgacgagaacatgaggttcccggtcaaccagcaatggtaaaccttgggaaggatatacagtttccgatagctgatgaaaatgcgcgtttgcgtgtccatacttgcagtgccgttcaaattgctaacgaagaagcgcaacgcctgctgatcaatccctgcatcgaagacccggaagattacttcacatacgacgacgaagggctgattcaccccagaaacgccagtgacatgaaagctatctgttcaatacatgtctatgccttgcagcgtaaggcactggtcgaagcaagaaaagcaacgctggtacggttacagcgtctcttttttcatcttcgcttaccgattcaggagttaacgcaaatatctgccagacatgtcaacaaacgggcaatcaaacaaaaccaaattaccgagttaatgaacgatgttttggatatgtttgagccggaaaaaccttacctggggttgcttcgggattatatccgtcgacatgccgtgtcaggtacttatctgagctatcgaacggctggtattcgcgttgaggatcttctgcgcttacccgtatctcgcccgcttccggcgccgcgtcttaacctgaataatttcagaagcatgagctcaagaatccccattgggttgcggttgagataa

SEQ ID NO: 86732 - DNA, 1239 bp, Bacillus thuringiensis MC28
atgttcaaaataagaacgatggatatccagagaatcaatggtattcaagacctattcataggattcaatccaggattgaattttatttgtggacctaatggaattggtaaaaccaccatattaaattgtatatccagcgcatttcgtaaattaccgtcctacagaatatttccacataataatgctagatatggtgaatttactattgatatggaatatgaggagcattcagaaagtagtattttttatattggagatcatcgagaaaatatattcgacttgcaaagaaatggaattagagaacacagatataataatgtttttaagggaaactgtattgatttcaatattcagtccagattttttgattataaaccatcaggagtagggtcagcatttgatcgtattaagtcctggttttatagaaattattataagggagatatgaatctcgataaattctataatttgcagcttgctcaagaatgtttcaatttattagatcctaatattagttttggtagagtctcggaaacaattattactgatgggcatccgttgagtagatttccaaaatatcaaaatatattgagcaataataatagtttaaaatatgaaagtaataaattgaaaacattagatatgtttgtaaatactacccaaggtgaagtttttgtggaatgtctatcttcgggatataaatcatcgctaactgttttgttaggaattattaaagagatagaaatgttttcaacaagcattttggttaatgagtttaccggtataataattatcgatgaaatagatttgcatttgcatccacaatggcaagctaaacttgtgtatgccattagggaattggttccaaaagctcaagtgatttgtacaactcatagccctcatataattcaggttgccaaaccagaagaagttatagttttaggaggggataatgatggaaatatttatgttaaggaaattccatctcctagtgaatatggttttcaaggatggaccattgaagaaatcctcacagatgttatgggtttagaacaatccatgtcacctttatttttagattcattagaaaaatttaatgtagcattacgaaaaaatgataaagaaatgcttatgtacgaatataagggacttcaaaaaatgctacaccctaaaaatccattagcgacattgctcagtgtacaagccggagaactaatgatttgggaggatttaaaatga

SEQ ID NO: 86733 - DNA, 768 bp, Bacillus thuringiensis MC28
atgatttacatagaaagaccttcaaaacctttagaactaactgatgagcgtaggaaagaacttacggataaatttgagaaaactaaaactgctgtatggaaaagtaaatatataactcagcctcttatagaaatgtctcatagtaagtgtgttttttgtgagtgcagacttggagaagaagggaaatatatggaagttgagcattttcatcctaaatcattatatcctagtaaagttgttgtatggggtaacttatttccaatttgtagtcgttgtaataaagcgaaaaataatcatgatacagtaaggtatcctattattaatccttgtttaaataatccgagagaccatttatattttgagaatttcaatatatttgggaaggattctagtccgttaggattattaactgagaaagtattgaacttaaatgatatgttacaagtagtaacccctcgttttcaagttggtatgcttgtaatacaaaaacttcaaggaattgcacaaatggttaaaaggtatgatcatcaatatgcacctgtgggtgatgaccatgatatcataaataaaacaaaggctcttttacaacatgcattacctcaaatggaatatagtgcaactatagctactgttatagtttcttcgaggttttatgatcagatgaaagatgaaatgatttctaaatctttgtggaatgaggagttagatcagttagacagcgtagcgagagaaatatcattagaagtggcttttgctgagatggcttaa

SEQ ID NO: 86734 - DNA, 1869 bp, Nitratireductor indicus C115
atgtatctaacagccgaagccgtgcttcatgctatcgccattcttcgcgccaatgtacatccgttcattggcatcacttttgttgcatgcaagcattacgggctcagtgttggctctttagacgctttaagcctggacaaactcaccgaagagcatcttgatggccatcaccggcttgatcatcgtagctcctactatttccagcctttcaaaagcgcttcgtcgtgggtcaaacaacgatatccgtcaacaggtttacagacagtcaatacgcagacgttcgcatcggtgtttgaacatcccagagggaccccgaaatggggcttttcgcgcgagtatcttgatcgaattacgaccgtcctggaagagaaaaaattcccatctaacgttgccgcagacgcattggcggtgtggctttataaggatacagacgtaggtagcgtcagcaactacgaggaacttgttgaattatttttctctgaatacaagataaatgaagccgagaaggaaagactgttctctatcaggatgatggaggatgttctggcctttgaaggtgcattttcatttgagccgctcgcgatgacggcaattacgcgcgaattaccgcctccgcctgacgcaaaagctgaaggtggtcgaaccataaagtcgctacggttgcgcaacgctgggccagcccgcgaaatggaacttgattttgggcagcgccttagcgttatcaccggcgataatggcttaggtaaatcgtttctgctcgactttgcctggtgggcagcgactggcagctgggctgatcgcgaagcgcttccgcaactcgataatccaacggtggtatcagaggtggattactccttaagcggaagctcaggaaggatggtaagtttcaaggctaagtatgataggaagagctttacgtgggtacggccgaaagaagcggcgacagttgaggcgattgcgatcttttcccgcgctgacggttccttcgcgtttgccgatcctgtacgtagcaggttcaacaggaagtcatcgatatccaatagcttatcggcgaaggagttgtgggacgggcgtccaggaactattgaggggctaataagagattggatcaagtggcagacctctattgatcggaagacattcgatcaatttgcggcggtacttaaaaggctgtctcccgaggatctaggcactctgacgccaggggagccggttcgaattccagacgaacctcgagatatccctaccattcggcaccgttacgacaccgtgccagtaactcacgcatcttctggcgtgcagagagtgctactcttggcttacctcatcatttggtcatggcaagagcatgagcttgccgcgaagcagatgggtgaaattccgcttcgccggatgatggttatcgtggatgaactcgaggcacatcttcatccgaagtggcaaaggatagtccttcctgcactcatgagcgttggagagcttctgagtagcgatttagcggtacaaatgatcgcggctacccattccccaatgatactagcctcgatggaggcgagcttcgacacctccatcgatgttctttaccatcttcatggcgtgggaccgacggtcaagctcgaggaaacgccgtttgtaaaatatggcgatgcctcgggttggcttacctctccgttgtttggactacgtcacgccagatcaagagaagctgaagagacaatcgagcgggcgaaggccctccagctggccgaaaatccgagctccggtgatgtcgcggcgatcacagagcggctcaaatcgcagcttgctaacgacgataaattttggccgcggtggctctattttgctgagcagcatggtgtaaagatatga

SEQ ID NO: 86735 - DNA, 621 bp, Nitratireductor indicus C115
atgatcggcgtagtttttcaaccggaatacgtgggttttgacgatgaggtcagaaaacctggcgccgcattcctcacatcctgtccaaagcccacttcaaagcaattcaagaagtatgcctactggagtagagcgctttctcagcttcacgaggcctattcaggcgtctgcgcatacaccgctatgtaccttccagaccgaggcacggtcgatcacttcctacccaaggccggtgaaaatggcagaccagatcttgcatatgaatggaacaattttcggttggcaggcgggaaaataaatacatcaaagggcgatctgactgacataatagacccattccacgtacaagacgattggttttttattgacttacccgcttgtcttatccgtccaaatcccgagcttgataaagaattgaagagaaaaattgcaaatacaattaactctttgcgccttaaccaagatgacaattacgtgcaagagcgttgtaatatcctaatggcttacgccaccaacgatgtgtcgctgaattttctcgaacggaggtacccattcttggcaaaggagatcgcgcgacaaggacttaccctggagcggctaagggagcttttcagaatttag

SEQ ID NO: 86736 - DNA, 819 bp, Pseudomonas syringae pv. avellanae str. ISPaVe013
atgagtgtaaccgctgagcatgctgcacagagcaaaccatcaagactggatgcctacacctcttggtacgatgccgcttccaacttgaaaaacttcgagacctggttcatcggcaagacactggagcgctttcaaagactatcccgagcaggttcttccagcgttttcaacgacgaactgacctggataaactcggccatccaatgcgcactacccgacgccaacggaatagagtacgacatggagctacgtgcgttggtagtcgaaatggatgaccgaaaaatccccttcaacgacctgagcgacgggcaacgcggaatggtcgccctcttcgccgatattgcccgccgtatctgcctgctaaatccgcacatggggaaggatgttctaagcaagacaaacggcatcatcgtgatcgatgaactggacatccaccttcaccccggctggcaacgcaccattgcacccgcgctgaaaaaagcatttcccagcgtccagttcatcgccgccagccactcgccacaggttatcggcagcttacagccgggcgaggtcatcctgctgaataaccatgacggctctcacccaagagcaacctacggcctggactccagcagcattctggaagaagtcatgggcgtgcctcagcgtgagcctgaaattgaagagttgctcgatcagctattcagcactctggaaaacaacgagcttgaaaaagccaggtcgcagcttgatgcactgaagaagaaggcgcccgatctaccagagttcgcgggtgccgaggcgctactcaaacgcaaggagatcattggacgatga

SEQ ID NO: 86737 - DNA, 648 bp, Pseudomonas syringae pv. avellanae str. ISPaVe013
atgagacgcatcatcaaaggaactgagcctgcgtcattcaccgaatggaaagccagcgcaaacgaagactggacgcccacctatccagccttgccgaatccgcaaaaacgcgatcttcatgacgggctgttgcgagagcagaacttctcatgctgctattgcggcggagcgatagatctttgtagcagccatatagagcatttcaggccgcaggagcactacctgccacttgcacttgaatacagcaatctccatgcgtcctgtctgcgtgataggaaagcaggcggtgtgttgcactgcggccactacaaaggcaactggttcgatgaggacctgcacatctctccgacagagtacgattgcgaacagcgcttccgttatctgctgacagggaaaatccagagcacgtcccacatcgaccttcccgccacgacgatgatcgaaaagctcgcactcgatatcgcgtatctgaccaaaagacgtcaagaggccatcacgggtatgttcgatgagcaattcatatctagcgccagtgatgcggagctcgctaacctcgtagacagcctgcgctcgggcaccgctaatacctctattgctttcggccatgtcgttgcacgctatgcggagcaattgctgacgcaagggtag

SEQ ID NO: 86738 - DNA, 864 bp, Pseudomonas syringae pv. avellanae str. ISPaVe037
atgcctgtattcgccgtctacagagccaatcggggctggctgaccatgaatgtagccgccgagcaagctgcacagagcaaaccatcaagactggacgcctatgccaactggttcgacgcctcctccaacttaaagagttttgagacctggctcatcggcaagacactggagcgctttcaaagactgtccagaacgggtttctctggcgttctcaccgacgaactcacccggatcaattcagctatccagtgcgcactgccggagtccaagggcatagagtacgacatggaaatgcgggggctgatggtggacattgatgaccgaaaaatccccttcaacgacctgagcgacgggcaacgcggaatggtcgccctcttcgccgatattgcccgccgtatctgcctgctaaatccgcacatggggaaggatgttctaagcaagacaaacggcatcatcgtgatcgatgaactggacatccacctgcaccccggctggcaacgcaccattgcacccgcgctgaaaaaagcatttcccagcgtccagttcatcgccgccagccactcgccacaggtcatcggcagcttacagccgggcgaggtcatcctgctgaataaccatgacggctctcacccaagagcaacctacggcctggactccagcagcattctggaagaagtcatgggcgtgcctcagcgtgagcctgaaattgaagagttgctcgatcagctattcagcactctggaaaacaacgagcttgaaaaagccaggtcgcagcttgatgcactgaagaagaaggcgcccgatctaccagagttcgcgggtgccgaggcgctactcaaacgcaaggagatcattggacgatga

SEQ ID NO: 86739 - DNA, 648 bp, Pseudomonas syringae pv. avellanae str. ISPaVe037
atgagacgcatcatcaaaggaactgagcctgcgtcattcaccgaatggaaagccagcgcaaacgaagactggacgcccacctatccagccttgccgaatccgcaaaaacgcgatcttcatgacgagctgttgcgagagcagaacttctcatgctgctattgcggcggagcgatagatctttgtagcagccatatagagcatttcaggccgcaggagcactacctgccacttgcacttgaatacagcaatctccacgcgtcctgtctgcgtgataggaaagcaggcggtgtgttgcactgcggccactataaaggcaactggttcgatgaagacctgcacatttctccaacagaggacgattgcgaacagcgcttccgttacttgctgacagggaaaatccagagcacgtcccacaccgaccttcccgccacgacgatgatcgaaaagctcgcactcgatatcgcgtatttgaccaaaagacgccaggaggccatcacgggtgtgttcgatgagcaattcatatccagcgccagtgatgcggagctcgctaacctcgtagacagcctgcgctcgggcaccgctaatacctctattgctttcggccatgtcgttgcacgctatgcggagcaattgctgacgcaagggtag

SEQ ID NO: 86740 - DNA, 1041 bp, Pseudomonas avellanae BPIC 631
atggagtcgcaggtacccagcgttatcgaggcaaagggtgtctggtgggaaagcgccgttgaaagtagctggctgcagcagcgcgtcagcttgaaaaaatccactaacaccattggcgatgctggatcgaaagcgttgactttgtatggtaagtcgcttcaggacagtgtgcgaagcgatgcacatgtcactctgccaatgatgacttacctgggcacttccaggctatggttcgagggacgcttcagttcggcagcggctcagacaacactcgataaaagtgagtactccagaacgtccgcatacctcaattgcctgtcttattcatccagcttcaagaccttcactgcatggtacatctggatgtaccgcagctaccgtgaagctcagttgatcgctctggagcgcggtgaagaagtgtccgataccgggcagcgctttgagaaaatcatctcagctgtcaaagaagccatcgacaggttgataaaggctcctacgggctggcacagactggaatacagtgccagtcatcaacaacaactggtcatgcaccacccggaccaggggattttacctgtcgaaatgcttagcgatggtctgcgtaacacgatcgccatggttgcggacctcgcttttcgtgcctgcaaactcaacccgcacctcggcgagcgggcacccttgcaaacgccaggtatcgccttgattgatgaagtggatatgttcctgcatcccttctggcaacagacgatagtaggttcattacgtgcggcttttcccgccatgcagtttattgtcaccacgcacagtccgcaggtgttgagtacggtccgacgtgaaaatattcgggtgatcggtaaagatgcccaagggcgtctgattgcatcccggccccttgccatgacctacggtgagccgagcaacagcgtgctgcgaagcgtgatgcaggtcgatccgcagcctccggtggatgaaaagccgggcctgctacaactcacggaatgggtggacaaaggtcgctatgacgaacctgtagtggtctaa

SEQ ID NO: 86741 - DNA, 570 bp, Pseudomonas avellanae BPIC 631
ttgtgttgctacagcgaaattcgacctgaccgggttggcctgagtttccatatagagcacgtcgaaaacaagagccaacaccctcagcgtacgtttgactacaacaacctcgctgcctgcgcgctggacagtcagagcgatctggaagtgttgaaaatacaaggcgctgaggtatttggtgggcacgcgtcaggtaagtcgaaaggggtcgacatggctcgcttcgtctcgtgtcacatgcccgactgttcgcgcttcttcgcctatttgtctgacggccgtgtagtgcctgctgacggattgtcactggatgaagttgaccgagctgaatacaccatcgacctgctaaaccttaacagcccttatctccaggacttgcgacaagcctggtgggatgagttggaagggctttttgaagatcatgttgatcaagatatgagtctgcattgcctggcggggattgatctcatccctgtgggtgcgagtttaagtcagtttttcagtattacccggaattttttcggaggtatcgctgaagaggtccttgatcaagaggctggtcgctggtaa

SEQ ID NO: 86742 - DNA, 1359 bp, Pseudomonas avellanae BPIC 631
atggaaatcaaaagcttcaggcttatcaatgtgggacgtttcagcgatctggaagtcgctctggcgcctaccgaaaggcacccatcgaaggtgaccgtgctggtcggcaataatggggcggggaagactacgctgctcaagtctgtcgctacagcattgagctggctggtagcgagggtcaaaacgcctaaaggtgttggaatcagaatcaacgaggatacgattcagaacggcgcggcgacttcttcaattcgtgttgacgcttacaatgaccagattatcgacccgctgatttgtggagctgatttttactgggagattgccggaactctcaaggggcgcaaagctacttcgtctactgtgctgggcgagctgagtatgctggcagaggggtaccgctcacagttgacggccaaaagcgattcatctcttcctcttctggccttttatccagttgaacgctcagtgattgagataccgctcaaagtccacgccaaacacaccttcgatcaactggacggctacgacaacgccttgggtcgtggagtggactttcgccgctttttcgagtggttcagggagcgcgaagacagcgagaatgaaacgggtatctcgacagagctgctgaatgaactgtctcaaaaaatcctggttgatacagaactctggaaagtactgtccagagagcatgcctcgtcgcgtgaccgccagctgactgcggtcagaaatgcggtcgcagccttcatgcccggcttcacaaacctgcgcgtcaaacgcaagccgcgcctgcatatggcgatcgataaaaatggcaagacgctgaacgtgtcccagctgtcgcaaggcgaaaaatcgatgatggcgctcgtcggcgacatcgccagacgcctcgctatgatgaacccggcgcttgaaaacccattgcacggcaatggcatcgtcctgatcgacgaagttgatctgcacctgcaccccaaatggcaacgcagcctgatcgcccagctcaccacgacgttccccaattgccagtttctcctgaccacgcattcgccgctggtcatcagcgacagcaaggatgtgctggtgtatgtcatggacgatgggcagttgcgtgagcaggatggtctttacgggctcgatgccaatcaggtgttgttgagtgtcatggacacggacatccgaaacgaggcggttcaggcgtctctggatgaaatgcagcactttttgatcagaggggagcttgatgaggctcgaactatttatggagtgctggctggcgagttatctgcagatcacatcgaattggccaaggcttcgctactgatccgcaagctggaattacgtcgtgcgaaagattga

SEQ ID NO: 86743 - DNA, 612 bp, Pseudomonas avellanae BPIC 631
ttgctggaaaaatggaagcgtgcgaacaaaggaaagaaatacaccgacctcgtggggcgtgaagatatcaaggatgccattcgtcatgcctgtgtcaccgagcagcatggtttgtgtgcctattgctgctgcagaatcaccactgagaaagacagtgcctgcaatgaacatgttgaagcacagcatctagcaccgaatcgaaccctggatttcggcaacattgtcgcgagctgcaccaagcccgggcggtgtgacgatgctcatggccatcagccgctaccgctcacgccgctgatgatcgaatgtgaaaaagagttgcagtttgagctttcgggtctggttgcaggcaccacgcctcgggcacgcgaatgcatcaaggtccttaacctgggcgatacccgtaagtccaataaaggattaatcgaggagcgtaaaaaaatgattgatgcgttgttactctcctacggagtagatcccgccgagccggttgttgaggaagatgggattcttgatctcttgatagaagacatggtgagggtagatatccagaaagagcttcaggccttttcccccgttctggtcaatgtgattcgtcggctcaaggcttggtag

SEQ ID NO: 86744 - DNA, 1326 bp, Pseudomonas avellanae BPIC 631
atgaacctgaccaggctttgccttaagaactaccgtcgctttgcagagttcgatatcgaattcgatccccaattgacggtaatttccgcacgcaatgggcaaggcaagacgtcggttcttgaagccattgttgcggctctaggccccttcgtcggctcgttcgatcagggaatgtccaggcacatcgagcgcactgatgcccgttatgcgcgggtaggcgaaggttttgaaagcgagcagcaatttcccgtgatcatcagcgcagaaatgtccaaccctgcgaagcgttggcaacgagcacttaacggtcccaaaagccgtacaaccaccaaagaagccgagccgctggcggcgtggggaaaagaacttcagttactgctgcgcagcgattcggcaatttcactgccggttgtgcgctattacagttcacggcgcctctgggtcagtcacaaaaacgtctccagcaaagcgatcctgaccgagagtcgcacggcaggctacgaagattgtctgtccgcgttctctacttatgtgcagttacaggagtggatgaggaaggcgactctggccgtcattcagcaaaaacagcaggtcggttacgagcattcaaatcttgagccacgtttgcagggcatcagaaatgcggtgaacgaggtgatggcggaggaaggctggagcgacttccattacagcctgacgtatgaagagttgtccatatctcatgccgaccactccgcacttccactgggcctgctcagtgacggtgtgcgcgccatgattacgctggtcgctgatctggcattgcgttgctctcgcctgaatggccacctcaaggaacaggcatcgctaaagacgacaggcatcgtattgatcgatgaagtagatctgcacttgcatccggcctggcaacaacgtgtggttgccagccttcgtaaagcgttcccgaacatccagttcattgtcagcacgcacagcccgcaggtactctcgacggtaaaacgtgaatgtatacgcatggtatttcaggacgccgatgaaaactggcaaactgcatgcccgccacaggaggtcaaaggcgttgaaagcgccattgcgctcaacgacatcatgggcgtgaaccccattcctccggtagctgaagcactttggatagccgaatacaccgcaaaaatcgaaaatggcccccatgaagatcacaacggcctggctctgcgcaaaaagcttctcgatttttatggagcacagcatcaggtgattctggacgctgacaggctgatccgttttcagacgttcaaattgcaaaaacactcgaacaccaagggctga

SEQ ID NO: 86745 - DNA, 507 bp, Pseudomonas avellanae BPIC 631
gtgcgatgtgcttattgcgagggggccatttttcatgaaggccatatcgagcattttcggcgcaagaatccggatcactttccggaactgacatttgcctggagcaacctttttctcgcctgtggcagtacccaacattgcggccaccacaaggatcgacgctcggctcctgcctacgacccaggccttctcgtcaaacccgacgaacatgatcctgagcattacctgtatttccattcttctggaaaggtgctcgcccgtaacaacctgagtgatcacgaaaatagctgcgccaccgagaccattcgcgtgtttggtctcgacaatccagcgcttgagggcgctcgggcaaacgcagtgcgcagctaccgcaagatgcacgatgcggatctgtccgagatcgcttcgtggtcagacgctgagcgtgacgcgtatttccggggggagatcgaagccacccgctggctcccctacgctacgacgatcagacacttcttgcagaagtga

SEQ ID NO: 86746 - DNA, 1386 bp, Vibrio cholerae HE-16
atggaaattaaacaatttcgccttactaatttagggcgttttagcgagttagaagcagaacttgcgccaacaccagagctaaacagtaatgtgacggtttttattggtaacaatggcgcgggtaaaacctcaatattaaaagcgcttgccaccagtctaagctggtttgttgcgcggcttcgcagcgaaaaaggcagtggcagcccaatacctgaaggcgtaattttaaatggacaagcatccgcattgattgatgtatctgtttttgacgatcatggacagtcaaataatccagatctggagagtgagaacgcgatttatcattggtcgttagcaaaaactcagacgagcaaaaaagccagattcaattctaatttaaacgatgccagccgtttagccgacctctacagaaccgcgattacgcacaacgaaaagatcagcttaccccttatcgcattttacccagtagagcgcgttgttttggatgtgccattaaaaatcaaagaacgacacagctttcttcaagtggatggttatgacaactcattaaatcagggggtcgattttaggcgcttctttgagtggttccgcgagcgggaagacgcagaaaatgaatcggggttaccacaagatgtgctagataagctcttagaaacgctgggggataataatgatgtttggcacaagttgcagtcattaatggcctcttcacgtgatagacagttgactgctgtacgtactgctattagcaactttatgccgggctttagcaatttacgggttcgccgtaagccacgcttacatatgtcgattgataaagatggccagacacttaatgtgttgcagctttcacagggtgaaaagtcgctgatggcgctagtaggggatgtcgcccgccgtttagcaatgatgaaccccgcgcttgaaaacccgctgcatggtgatggtgttgtgcttattgatgaagttgacatgcatctgcaccccacttggcagcgcagcattattgagcgactaacgtctaccttccctaactgccaatttattttaaccactcactcacctttagtgattagtgattataaaaatgtactggtttattcgttagacgatggcgaggtaagacaggtgccatcgcagtatggagaagatgcaaacagcgtgttgcttaatgtgatggatacacacataagaaatgcaaaaattgcctcgcagctaaatgatctactggatttaattcaacaaaccaacgattcaagttccgtatcacaagctaaagaagcactcagtaagctagagaaagagctgccgtcgaaccatctggaaatcgtcaaagcaaaaatgttattgcgtaagcaggagctaaaatatgcgcaaaataactaa

SEQ ID NO: 86747 - DNA, 591 bp, Vibrio cholerae HE-16
atggacgaaaaccaatggtttcaagcgctgtatgagcaaaagcaatggcaagtagtgtcagatttaagtagccataatgcggctgaacagttttatttgtgtgcttattgctgcgattgtattactggcgaaaccaccgatacggtaaatgaacatgtagaagctcgggctgtagcaactagacgaagcttagatcataacaatatcgttgctagctgtaagacgacaaaccaatgtgatagcgcacataaaagccaagtttttactttaacgcctctgatggacgaatgtgaaaccgaactgaaatttaaaatcagtggtcgcgttgaaggttcaacagatagagcccgcgaaacaatccaagtactgaaccttggcgacaatgaagtaaataacaaatctctgattgagaaacgcaagcaactttcacacagtttgatgtggagtaatggaattaaccctaccgatggcctcgaagacgaagagttactgcttgccgttatagatgatcttatgacgcctaaagacggtaaattggaagcttttgcacctgtcgttgccaacatacttcgcaattggatagctgcttaa

SEQ ID NO: 86748 - DNA, 1698 bp, Vibrio cholerae HE-16; identical to SEQ ID NO: 86648

SEQ ID NO: 86749 - DNA, 876 bp, Vibrio cholerae HE-16; identical to SEQ ID NO: 86649

SEQ ID NO: 86750 - DNA, 1233 bp, Escherichia coli N1
atgattatcgaaaaactccatctgaaaaatttcaggcatttccccgaagttaacattaattttaacagaggctttaacttcatcagtggacctaatggttgtgggaaaacatcgatcctggcggctatcggacatactctcaacagtaacacagaatattcacgccatggcgaaaactgtgaatactggattgatgtaactgaacagggaaggaaatttcgcccgggaaaaggggctggctccattcgtcccgcaggctacagaaaagacgctctcatctcccacattttacccccaagagagcagggacgtgaatcaattgattactacaatgctagaaacatattgaaactgccgccattgattattggtgcgcagagaaaaataacatataaaaacattacaggaatgaccagggaaacagatgtaacaggtagtcgaaatcattattgtgacaactccctcaaatatctttacaactcagttgaaagaaatattaaacaatggatgattaaccgatattttataatcgataaggactgggctgttgaggaaaaagaaaactgggagcatctcatcaaaacacttcctgaaatagccccattcaacagtaattttaaatacatcagaaccgggcgggatcttgagcctgttttttcgatatatgaaaaagaatgctaccttgaagaactttcttctggttttcaggctattttatacataataataaccatatttgagtggatagaatcctgcatgccggaaggtgaaaggtgtgtaaaaaatgctgaaggcactgtacttattgatgaactggataaccatctgcatccggaatggcagctgaccatccgcaacggtatatcagccttgtttcctcaattgcagtttattgtaacaacgcattctccacaccttctggcctctgcgaataaaaacgaaatcattctgcttcctccgtcttatgaaaaagagaaatataatatctgtccactggataagacatattcagggtggtcgacggatttaatcctgacgggattaatgggggttctcagcctcgacagcaaggagtatgaaaaacttgttgaagcctgttacaaaaacattgaagaaaatgatattgatgaactgaagcgtaattattcacgacttgaatctgtcagtcatccggatgacagtatcctgattgtacttaaaacccggattgcaggtatggaggctatcagatga

SEQ ID NO: 86751 - DNA, 759 bp, Escherichia coli N1
atgataaaactgaatcgcttaccatcgccggtggtcctcagggataactgtaacgcctggacaaagaacttaatggcactggttgataaatacggcgggtataacaaaattcctgccaaagaaaaaggacctgccctccggttctaccggcacgaagatatcaagcagacactgaaagccagcacacatggaaaatgtgctttttgcgagggcatacctgatgaaacaggttacgctgaggtggagcatttttatccaaaatcgttgtacacagaaaaaacatttgaatgggaaaatctgctctacgcctgcaaagcatgtaataaccaaaaactcaatcatgatacatatcatttgcctattgttaatccgtatgataacgatcctgatgaatacttcacttataatgatatcatgatcagacctaaaaaaggggcttaccaggaagttgcagaaagaacaattaaagtctgcggattaagctcacccagacttattactgccaggagtgatattcttgtcagctttcgtattttcgaacaagaactctccactgctttaagcaaattccatgatgccagaacagagaaaagtaaagaagacagagcaagaaagatcagtgaagcattagataccattgaaagcatggctaaacctgatgcaaaactctcacatttttatcgttttttgttgaacagttcagctgtttaccaccaggcgaaagatgaactgaataattatctctgtgaggtgttgtaa

SEQ ID NO: 86752 - DNA, 1653 bp, Escherichia coli ARS4.2123; identical to SEQ ID NO: 86338

SEQ ID NO: 86753 - DNA, 651 bp, Escherichia coli ARS4.2123; identical to SEQ ID NO: 86321

SEQ ID NO: 86754 - DNA, 1209 bp, Acinetobacter baumannii Naval-72
atggaatgtattattggaactactagttataatgatttaaaaacaatgaaagttaagtctttaaagattgaaaatattggtggaatacctaatcttgaattgcaaaatataaatccccaaatgaatattatttgtggagagaatggggtcggtaaaactaatattctagactcaatagcgtatttattttctattggagatgataatgtaattaataaaagatcgggaagtgaaaaaggcaaaattacattaaatctagatattttgcaaaatccaatttttactactgtaagtgagtttgaaccatcaaggtacacaaggtcaacccaacacttttacaatactatagatactgcaaaaattatatatttaaaagtcaatcgtgtttttaactattattttcaaaacactattggtcaaagagatacttcagaccatagaaaatcatttcatactaaagggatagataataaagatctaaaagagtggtttgtacataggattttacttagcaatactaatggtgctttaagtgattctgaattgttaaatattaaaatggcaatcaaaagcttttctgttcttgatgggagtgtaacatttaaatcagttactaagtttaatgaaattattgttaatacaccaacgggtgaaatttatttcgaatacctttcatctggatttaaatctactttatttattattttaggaataattaaagagttagattatagataccctgattctcatcttaactgttctgaatttgatggagttatacttattgatgaagttgaactacaccttcatcctgagtggcaaggaaaaatttcaaaaattttaaaagatatttttccccaagcacaatttttcataacaacacatagtccacatattgttcagagtgctggtctaaatgaagtaatagcacttgatagaaaagaaggtgaagtatctaaaagacatttgccaaattcagaatatggatatcaaggatggactgttgaggaggtattaaaagatgttatgggaatgaaagacttacgcaccgaaatgtacgattcgattagaaaagaatttattgaggcattcaaaaatcaaaacaaggaagatgcaaaacaagcatttgctaagttaagtagcatgttacatccaacaagtgaactaaaaacgatttatcagatgcagcttgacagtcttggagaataa

SEQ ID NO: 86755 - DNA, 726 bp, Acinetobacter baumannii Naval-72
atgattaaattgcgtcgaatagaaaggccatcttatttaactgaagagaaagttaaagagctaactgataaatttaaaagtactggtaagcctgtttggaatcatgatcaaataaagattcctttatctactagttctaataataaatgtgcttattgtgaatctgatttaacagaacctactacatatatggaagttgagcactttatcccaaaatcaaaaaatgctgatttagtggttaattgggataacttactcccttcatgcaaacgttgtaatggtactaaaaatgatgaagatattgtctcaaaaccaattattaatccatttgatcaggaacctaaagaagaattttattttgatctcttttacatttttggaaaaacaacagtaggaattaattctgttgaaacattaaatcttaatgatgaaagtctctttttaaaaagatgtaaggttgctggcgcggctaagaccagtttaaagcttatgaataatgaattctctttagctcataaacttaatcattttaaccggaatagattaagagcagtattattagctgcacaacctgagcgtccttattctgcatttgttgctacaattattcatacgacaatcgaatatgatcaattaaggaagcgttttatagacgaggggctatggacgaaagaacttatgtgccttcatgagacttcattaaatttagtattacctcaaagttaa

SEQ ID NO: 86756 - DNA, 1293 bp, Vibrio sp. HENC-01
atgaaactcaatacattatctgtcaaaaacttccgttgctataaggagaaaactttccagtttaaccctcaagttaaccttatagttggacaaaatgcgacgggtaaaacagctgtgttggatgcagtagcggtagctattgcaacttggatacttggtttcaaaaaaaagaatgataaaaaaagtctatatccaactgatgccaccttgtcttatgttgaaaaagaaggggagtctcagttcgttgaagcatggcctgttttagtctctgcaactggagtggttaaaaacaacgtcgttgagtgggaacgttcgaaggactcaccaacaggtaatactcgttatggtaatgcaacctctctgaccgctttagcaaaaacttgcgatgagcaactttcagaaaatatcaatcttcctttaataagttactacggcactatgcgcttgtggcaagatccaaaagcctataaagcaaaaccatcattaacgaaatctactactaaaccttctcgcctagatggttataagcactgtgtcgaccctcgtatagctttaaaagagctagtagcatggtttgctcgccaagagtggcaggcttttcaagaaggtaaagaatctaccatgcttacggttgtgcgtaaggcggtaattggctgtatagaaaatgctgagcatttacgttatgacccaaaaagagaagagttacttttaacccttaaaggttcagagccacaacctttcaacttgctaagtgacggtcagcgatgcgttttagctttggtcgcggacattgcacaaaaagcagcacgtcttaatcctcacttaggacatgaggtgcttaataagacagaaggcattgttctaattgatgagcttgatctacaccttcatcctaaatggcagcgccatgttattgaggacttgcgtaatactttccctaaagtgcaatttatttgcacaacgcactcacctttcttaattcaatcactacgctctagtgaagagttgatcatgcttgatggcttaccaccagctcaattagcgaataagactctctcggatatagcggtaggggttatggatgttaactcgccagatacgagtagccgttatgaagagatgaaaggtgtagcaacagaatatttgaagttattagatgaatctgaatcagcccctgaggataagcttcaacagtataaagagaggctagcagaatcgatagctccttatgatgacaatcctgcattccaagcattcctagagatgcagcgagttgccaaattaggagagtaa

SEQ ID NO: 86757 - DNA, 738 bp, Vibrio sp. HENC-01
atgcgaccaataagaagagatacttccccggaggctgacgattatgatgactataccaaggcaaaacctgcgttaataggtcgtttagggagttattgttcgtactgtgagcgtccaataaaaactaatttggctgtggagcatattcaacctaaagctggcgatgatggacaccctgagttaattggcaggtggacgaattttcttttggcttgtgttaattgtaattcgactaagaaagataaaaaggtcgacttagataaactcttaataccagatcgcgacaatacttttagctcctttcaatatactgaggatgggaaagtttcggtttctgaggcattggctactccaatcagtggatatgcaaaagcaactttagagcttgttggccttgacaagaaaatactccgcgcactcgatgcaaatggtgtacaagttgagattgaccgtgtttctcaaaggatgcaagcgtgggcaaaagctcaaagtgcagaagcgatgattcaacagcaaccccaaaacgacttactaaaagaaatggctattggctgggcggtttctgaaggtttctttagtatttggttgactgtgtttgcagattgtcctgatatgaagcttaaacttgtgcgtgcattcaaaggaactgaagagagtggttgttttgatatgacaacaggtgactcagtaaccccagccccaaatccagatttacttgcccatggcggtaaagtttaa

SEQ ID NO: 86758 - DNA, 1371 bp, Parabacteroides johnsonii CL02T12C29
atgcgaaagataataattacaaatttcagatgttacgaagagaaaaccatgagttttcgacgtagcataaatctgttgataggtgacaactcagtaggtaagacatctttgcttcgtgcatgtaatcttatcataaacgcgtttttctcgggttatagtgatgaaaatacagtatggaagagtgccgctaacgatgatttccgtgagagacgaagcgaagacattgtggatactgatttgccaatcaagatcactttttggcttgataaatcagattgtcctgacatcgtgctggaagatggcacgacaaaaagcctgcaatccaatgagccggaagcaaaggctgaatgtgcacggttctatattgaaaaaaaatcaaagaagaatgcacgtaacctcataacgggcataaatacgctgaaagatttcgcatcatcgctacaaaacagttcacacataattgtggacggtaaagctgtgcaaaaaaatgcactgcctttgttcgcttattttacaacagaggatattcataccacccggaaattcgacaaggaaaagaagaaattcaagaagtatcctcagaaaccttcatttggttattttgagagctatgacagcaaagggctccttgattgttggttaaaacgattgttggtactgaaagaggcaaaaaaaggtgaacaagaaatagagtgtgtaagaaaggctgtaatcagcgcattgggccccagcggatgtaacattattgacaattttgaaataaggcataatgacggaaatgttttcttccattactgtgatggcagagaggttcgctccgatcttttatcggatggttataggcgtcttgtcagcattgtggttgaccttgcctttcgttgcgcattacttaacaaagtaatgtatggcgatgaagccttcaagttgacacatggtactgttattattgatgagattgatgaacacttgcatcctgatcttcaggttcgtattttgaaagctttgcatgaaacatttcctaagcttcagcttatagtcagtacccacgctccattggtaatgtcttctgttgagaacaacgaaaacaatgtggtgtatagattggattacaaggacggcaagtacagccatacagaggtggacacatacggattggatgcaaatttgttgctcaaagaaagaatgaaagtttctgttcgcgatatcaaaacatcttcgctgtttgaacaattggatgattatctgaaaaacaaggatattgaacacgcaaaatcagtactgtatgaattggaaaatttgactgacccgcagcaaccggaattagtaagagtacgggcaatcattaatcgtttggaattgataggaaaatga

SEQ ID NO: 86759 - DNA, 726 bp, Parabacteroides johnsonii CL02T12C29
atgaagtgtattcaaaaggactatacaacagatgttgtacgtactcataatgccgagttacgtgctcagtttttagatgagcagagtttgcttgaccctgccacgtactctggatttacggggaaaaaactttacaaacttgtccgtgatataaaaatcatccctcatttttggaatttgaaacaccaaatgatggaagaacaaggaggtatttgttgttattgtggcctgaaaattgcttttgacggtctccgaaaaccaagtgtagagcacttgattcccaaaggaacatatagggagcttgtaggagaatataaaaacctgttgttgagttgctctctaacaacggaagaaaaatcggatattgaggacggaaatgccattgaagctgatgttcagcattgtgatgataccaaaggagaccaacaactgaatcatacgcctttgcaacttgattgttatgattatttcgtgtatgatatcaatgggcatgtggcaggcaggaacgttgattccaatacagatatcgaaaccctcaatcttgattgtagggctctggttgatagacgaaacgcagcattgagtattctgtttgatgagaatggtgattttctctcagacagagaacttcaacagattgcaagtactataatggaccgagatgcagacgggaatttccgggagttttgctttgtcattaaaagtgtgattgacaatcttccatag

SEQ ID NO: 86760 - DNA, 1230 bp, Acinetobacter baumannii OIFC0162
atgaatattcgtggagatattccacatgcaaaaattgaaaatattaatattccattaaatcgaaggaatttaattattactggtaggaatggaagtggaaaaaccagttttttaacgacattggaaagaaatatattaaataaccttgaaaaaaaagatcagcaattattacagtctcaaagaaatattgagagttggataaattatcgtaatactcttgcgaaaacatcggagcaatatattagtatatctaaccagatagaaagggaacaagaaaaaattcaattattaaataatggttttcaattagattttaatagctttgatgaattacaatcaaattatgatagttttaaagcaatttttagaagttttcctgctatgcgtatttcttcgatagatcatgcaacacaaaccacgtccctgatagaagaaaaaactattgcaaagcaaaatttcaaacataacttaggatcaaagcttgaacaacatcttataaatgtaaaaacatctgaagcttttgctaaaggtattgaaaaagatgaaattaagggtaagaaatttgaagaatggtttaacctatttgatacatctttaaaaaaattatttgaaaataataatgctaaattagttttttcaaatgaagaaagaaaatttcgaataactgatggtaaacttatctcatcttttcaagacttatcatctggttataaagctatttttgatatttatgccgatttattattaagaacagagttttttgacattacaccatctgaacttcaaggtattgttttaattgatgaaatagatgctcatttacatatctcacttcaaaaactaatattaccttttttcagcgaatcttttccaaatattcaatttattgtaagtacgcactctccgtttgttattacttcaacagataatgatactgtagtttatgacatttctagcggtgaattttttgaggatgacttaagctattattctcatgaatcaataataaaagagctatttcatgtaaaagaagaaaatgaaaatctaaaaaaactttcaggtcaacttttagaatttattgaattgaaagattcacccaaagacctaaatacaattcaagacttattaaatgaaattcataaaaattttgaaaaattatcagtagaactacaactccagtacatggttgctaaaaataaacttgctaaattaaaacatgagggaaactaa

SEQ ID NO: 86761 - DNA, 672 bp, Acinetobacter baumannii OIFC0162
atgttttcagttactcgacctactacttttcctaaaagtttaacaaaatctactaaagactatcgcgccgcagatgttgttgaagtacttcaagatatattttttgcaaaatgttatctatgcgagagacaaggatttcctgatgtaaatatcgaacaccgtgaccctcatttaggtgatgatacaaaaaaatatgactggcataaccttttttatgcttgtgtaagatgtaacagtattaaaggtgatacacatataaatattttggattgttgtcaatctattgatgtatctcaagcaattgaattacattgccctcttgtcaataatgaagctcataaaataactgtacaattaggaaatttacctaatagtttagagatttcatcaactattgaacttcttaacagatgctttaatgaaacaaatactgcattaagaggtataagtagacattcattaataaaagaaattcaaaaatatcaaatccaattgtccattttgaaaaataaactactttatcccgaattacctttaacatccaaagcaaaaactgaaattctcgaacaacttaaagctatgtgtgacaaggaatttccattttctgcattttggaaatgggctattactcgtgatgatgacttatctaaaatagtaggtaatgtattttaa

SEQ ID NO: 86762 - DNA, 1212 bp, Arthrospira platensis C1
atgcaaattaacaaccttagcctgagtaactttagagggtttgaacaggcagaatttgaatttcagccaggaatgaacttgattgttggcattaatggagttggtaaatctagtgtcttggatgccttgcggatttccttctcaagaatcctccctaaattgacagcttgtcaagagagacggattaattttaatatcgatgatattatgattggcaaaaatgaattaacggttgaaataaatgtggatatatcaggaatcccttttcgatgtaaagttagccggggaaaacgccatgaacaggaacttaaacctgacggttaccaaattttaggacttataaaagatgatccaaatcaacccctcgttgtatattgtgcaacccggcgctcaatagttacagaacaagacttaaatcctaatcgaagtttaggtaatcaatctgcggcttttgttgacgcactcattcctagaatgctacgtcttcgggaatttatagattggtggttagtccaagaggaacttttagacgaaaaacctcagttaacccagggtcgcattgatgctttaaacgatgccgtcacctgctttttagattggtgtaataatgttcgtgctgttccagcctcggacacctacaaaaaaccaaccttgctacttgacaaaaacggggtaacactaaatattaatcagctttcagacggcgaacggggtattttagcattgatacttgacctagtacaacggctgttgcaggcaaatcccgaactcgaaaatcctgtacaggatggaaaagccgttgtcttaattgacgaattggacttgcatttacatccacagtggcaacgcatggttgtccataagctgacagaaatctttcccaactgccaatttattgccaccactcattcaccgcaaatgattggagaagtcaaaccagaaaatattattattttagaccaagataaacaaccctatattcccgaccaatccttgggtatggatagtaattggattttacgctttcttatggaaactcctgagcgtgatatggacacccagaaaaaattagaggacgttgaatcattgattgctgacaagaatttttcagaagcaactgaaaaaataaatagtctccgccaattaggagaatttcccgaattggtacgcctgcaaactcgcattgatcggatcagccgattaggtaaatag

SEQ ID NO: 86763 - DNA, 720 bp, Arthrospira platensis C1
atgaaatacatcaaaaaagaacaagaacctgaaaaattacgttcctggtttaacaatcaatatgatcaagaaggaaatcgcctgggttgcgactactataatgacgtgccaagcgatgtcaaaagggatttaaaagatcatctactgggagagcaaggctttctatgttgttatacaggtatcttgattgatacagatacttcccacattgaacacctcaagccttattctatatgtcgggacgagaaaaattatgaagatgtcaactatttgaatcttgtaacggcttatcccggtagaaattataagtctcaagatgatgaagttaatcaacctagcaaaaaaagcaagaagaatagcaagaaatgtccttttggagcgcacgctaaagacaattggtatgaactggacaattttgtaacaccgttagagtcggattgtgaagacagattcaagtttgataattctgggaaagtcgaagctacaaatcatcaagacacggcggcacaaataacgattgaaaaattagtgttaaatcatcagcgattgatagatttaagaaaggcagctattgatgaagccatattccctaccgatactgaattagatgaatcaaacatcaaggaaattgctaatggcttatattcccaaaagaatgcagagggaaaattttctcaattttgcttcgtgattgaacaaattgccaaacaactggtataa

SEQ ID NO: 86764 - DNA, 1425 bp, Microcystis aeruginosa PCC 9432
atgtggccgaataagctagaattttatcgactgctgttattctctgggggaatgtccatgtgggttgaaagtataaaactcgaaaacattaaatgcttccagaatcaagagattaaatttattagtaatcccaataatcaacgtcattggcgcgctaaaccttatcattggatcactttattaggagaaaatggagtaggaaaaagcacgattttacaggctttagctttgctgctcgcaggaccagaagcagccaaagaattattaccccgtccgaccggttggatatgtaatcccaagacaccgggtaaattaaccgcagtgcttcatcaggaagatggggatgcgggaaaatttggtacggataaaactcgaaaaacttttgcttattcctattttgttacaggcaaggaaaggttagagttaggaggcagtaaggacaaacaaacctatacagaaccagcattaatcgaagaaaatactaaaattttaagttggttgcgagccaatgcttttgcctccgataatcatggttggtttgccgtcggttatggagctttccgtcgtttgacacgagtgagtcaagtgattattcctagtcttgaacccccgcaacgctctagcaactttttcagccaatttaatgaggatacatctttaagttcttttgagagatggatggtgcatttagattatcgaatagccaaaaatccccaagatattcaagccaaacaaatgaaaaaaatcggcgaagaagcaattactaaactgttacccggtaatgtagaaattgctgaagtaactgccgatgccttgattcagtttctagttaacggtcaaaaagttccaaccattagtttatccgatggttttcggagtatgattgctttagccggagatttaatttggcgattattacaatccttccccaatctagataaccccacagaggcttctggagtcgtcttaatcgatgagttagatattcatttacatccttcttggcaaagggaaattgctggatggttacaggaagtttttcccaagcttcaattctttgtcgctactcatagtcctttaatcgctgccggtgcagggccaaattctttaaccctacgaatcgatctggtagagggtgaatcagagattgtagaaattccttataaagaattagcggctaatgttgatcgtactttaacaagttctgcttttggtttgaaatcaacctttcccactgagacagaaaataaaattaagcgttaccaccaactaaatcgtaaaaataaaaatctggcagcagaagaaaaggaagaatatgaacaactgtcattatttgttggagaagttaaaccctttggcgaaattagtcaacctaatagtttagaatcccgaattgatgccttactagaggagcgtttatcttga

SEQ ID NO: 86765 - DNA, 690 bp, Microcystis aeruginosa PCC 9432
ttgattcctgtcaccagaatatcagagccacgcgtattagctaaaaatgccgctcgttggctagaggctttagaatcaataaaatcaaacaacaaggccactaaaactgacattaacaaagcacaaaataaatacagtcatccgcaagttaaagaagcattagttaaaatgtttaatgggaaatgcgcttactgtgaaagtaagattatagtggtaacttacggagcgatcgaacatttttatccaaaaagccagtatcctgatctgacttttacttgggagaatttactgctttcttgtgataaatgtaatgatgccaatcacaaaggcacaaattttcctctcgatgatatcacgggaaatcctctgttaatagaccccacggatggagtaaccgatccgaatacacatcttgaatttgtttgggatgaaatggcaaaattggccagtgtttatggtcgggatcggcgtggtcaaattgttgaagatttgttcgatctcaatggtatgcgtggacgaaaagaattaatcaaccatcgtagtcaatatattaaaaagttgttagcattattacgttacgccaaacaaggagactcggaggttttatctttactgcaagaagcttgtcaaccgggagcggaatattatgcttttgctagtatttatatcctgcctcatttgcctccctaa

SEQ ID NO: 86766 - DNA, 1230 bp, Acinetobacter baumannii OIFC111
atgagtataagtggaaatattccacatgcaggaattagtaatataaatattccattaaatagaagaaatttaattattactggaaaaaatggaagtggtaaaacgagtttcttaaaaaagctaaatgaaaaacttgatcttcacttctctaaacaaatacaacaaaatcaatctgatcaaaatgctgtaaaacactatttaacacaacttcaaagttatcctgaaggaagctatgaacatagcaatgctcaacaacagctttcttttttccaagccagaatagataaagctaatgatgccttaactttaaatattgataatgaattagaactaatacaactatacgacaataataaagctatttataaatcatttgaagccatgagaacttcatctattttatcagtaacaagttcaacttcaattgaacaagaaaagagttcagccaagcaaaataaatcccttaatttaggacaaaaattagaacaacatttaattaatattagaatttctaaagcattctcatttgaaagaaatgacagtactcaactaaaaaagctaaattcatggtttgaaaaatttgataataatttaaaattattatttgaaaatgattcaacaacattaatatttaaagaacagagtttgaagtttaaaattaaattaaatgatagagaatttgatttccaaaatttatcctccggatatcaagccatctttgatattttcgcagacttattagtacgtactgaattttttgatatttctccagaagaattacgaggaattgtattaatagatgaaattgatgcacatttacatatctcattgcaaaaaaaaatactgcctttctttactaatttatttccatctgtccaatttatagttagtacacactccccatttgttattacatcaacagatgatgacactgtggtttacgatatttctagtggtgagttttttgaggatgacttaagtcgttattcttatgaatctgtaatcaaaggtttgtttcatgtcgaaacacaatctgaacaattagcatcagaaactaaagctatcgctgaaattttaaataatgaacctaataattatgaaaaacttagagagattttacgaaatatctcaccattcgcaaaacaacttgatgttgaatccaagtccttttacttcaaagcattaaatcatttattagacaatcaagagttaggtgatcttgatgtttaa

SEQ ID NO: 86767 - DNA, 663 bp, Acinetobacter baumannii OIFC111
atgtttaaagtaatgcgttcagaagtacctgctgagtggactaatggtaattatagagatcctctagttgtgaaccaactcaaaaaagattttttatcaaaatgttatttatgcgaacaaacagattttggtaatgtcaatgtggaacattttgtaccacatctaaatcaaagcgaagaattaagaatcgattggaaaaatctttattactcatgttctcattgtaatggcatcaaaggacctagacatcaagaactactcgattgttgtgacgaaaatcataatgtagatgttgttattgccctagaagcccctagtgtcccaaatgggaaaattgtattaactaatactttagacaatagctcggatttatttgaactaacgaataaaaccatagcattattagagcaatgctataacaatgctaatagtggtattcagcaaatcagtcaccaatacttaaaagaaaaaatcttagaagaacatgcttatttgcaaaatttacgttttcaattgaaaaatggcctaaatcgcatgttgcaaaaagaaaaagatgagttaatagaaagaataaagaatatgcttaaacctagctatccattttcagcattttggaaaacctatgttcgaaatgatccttttttatctgaaattttaaaataa

SEQ ID NO: 86768 - DNA, 1284 bp, Acinetobacter baumannii Naval-82
atgaaatttaagaaaattctgcttaacgattggcggcaatttcaaaatatagatattgattttcatccaaatgttacaattattacaggggcaaatggttcaggcaaatcaacaatattaaaattactttctaaacactttggatggtatcaaccatttttaggcacccctattttatcgaaagaacaaggagtgttctattataagacggtatttcgaccattaaataaagaatatcaaacatctcactatggtcataatatccatatattaggcaatattttttattctaatgatgcttcttctgacatttttattcatgaacaaatatacagcgatgctcaatttgacttgcaatttggggggaacatccctgtagttaagggggtccatatcagttcccatcgacctattcctaaatatgaaagattgcaaaatattcccactaatcctatggatgcgtcgcaggcttttaatagttactttcaagaaactgttaacttatttaataataattatacacagcacaccccaatttatagaatgaaagaagcaattgtttcaatggctgcatttggtccaggaaatcaatttgtacagaaaaatgaaaagattgaaaagcaattttccgactttaaagatattctaaagcagatattacctgctgatcttggttttaaagacttaagtgtacggataccagacctagtattggaaacggaaacaggagattttctattagatgcctcttctggaggaattatgtctattattgatctagcatggcagatttttctttattctcatgacaaagatgaatttgtcgtcactattgatgaaccagaaaatcatttacatccgtctatgcaacgttctctattgaatgattttgttaaagcatttcctaaagctcaatttattgtggtaacacatagcccgtttattgtttcttcaattcgtgaatctaacgtatatgctttaaaacatgaaaaaaataatgtaagcgatcaacaaagtggatgggcaaaaaaagttgtttcttataagttagatctgaatcaaaaagcagctactgcaagtgaaattttgcgtgatgttttaggtgtacccgtaacattgcctaaatgggctgatgatgagttacaaaaaatctgttcgacctttacagtccaagatattacaacagacggtttatctagattgagagctgagttaaataatgctggtttaggagagttctatccagaagcattaagtaatatcgtaggagagagtgggttatga

SEQ ID NO: 86769 - DNA, 669 bp, Acinetobacter baumannii Naval-82
atgataaaaataattaaaaaacagaaacctgctgtgttaattaaaaatgccagtaaatggaagtcacaattacttgatgatattaaagcagaaaaaaaatcaacaaagtacctcttaacaagatatagtcatcctgagattaaagagacattaatcgaagagacacatggtaaatgtgcttattgtgaaagtaagcttttgcatattcatcatggtgatattgaacatatttttcctaaagcactagatcaatccaagcgttatgaatggaataatttaactctttcatgtgaaatatgtaatcagaataaatctaatcatgatcctaatttgaatcatattttaaatccgtatattgataatcctgagagtagccttattttttttggtaccttcgcgcatggtatggataacaaaggtgaagcgacaagatttttattagagctaaatagaacagctttggtagagaggcggcaagaacgtctagataaaattagactgatagtgaaggagttaaataacacaggtttaccaatagtcgctagaaaagctatttatcaggacttaattgagaacgaggcttctcatgagagtgagtatacttctatggttaagctcgcgattaggtgttttgatgcaagtattccaactgaagtaaaagctgcataa

SEQ ID NO: 86770 - DNA, 1593 bp, Thauera aminoaromatica S2; identical to SEQ ID NO: 85996

SEQ ID NO: 86771 - DNA, 528 bp, Thauera aminoaromatica S2
gtgatcttcgtgcgccgagacccgaaactcattccggagaaggtgttgcgcgtcgccgagcgagcacaagcggagctggaggcgttgcctgctgaacaacgtgctgcattcattgagaagaagaagcgcatctggcgtgcgttcgctcgctacctgtccaagatgtcctacggcaagtgctggtactccgagagtgactgcgtccactccttcatggacgttgaccactatcgtccgaaaaagcaggccaagcgctccgacaccgatagcgacgacggctacccttggctcgcattctcttgggacaacttcaggctctcggctcagcgagcgaaccagatcaatcacgatgacgcaaccgacgaaacggtgggcaaaggtgcttggttcccgctaatgcaaggcagtaggcgtgcaacatgggatgaccggtgcattgaagatgaacgccccgtgttgctggatccagccaagctggcagacgtgagactcatcgaggtcaccgccaccgtggccggcgacaattaa

SEQ ID NO: 86772 - DNA, 1290 bp, Thauera phenylacetica B4P
atgctgaaatcgctacacctgtcgggtgttgggcccgcccgtgagtttggaccggtggagttcgcgccccggctcaacttcattaccggcgacaacggcctgggcaagagtttcgtgctcgatgccgcatggtgggtgcttactcgcacctgggcacgcggctcagaggcggtgccgcaacgagatgcaaagcgcgcgagcattgcgtatgcctacacaaaatcgactaggggggatttcgtagagcaaagcgtctatagcaggctcgatcaggcatggccggtcaaacagggccgaccaccgattccgggggcggtaatttatgccggtgtcgacggcagcttctcggcgtgggacccggcgcggaactactggagtgacaaagaggcgctcgcgagcgaacggctcagagcgttcaatttcacgccggggcaggtctggacggggctgcaaggccccagcggaattactcactgcaatgggctcatacaggactgggtgctctggcagaaaagcggtgatccggcttttgacgacttggtcaaggttttggatgctttatccccatccattaacgagaagctggcgccgggcaagccggtgaggatcgggctggatgtgacggattacccatcgttgcgcatgccttacgggcaggacgtggcgctgattcacgcctcggccggcatgcgtagaattgcagcgttggcctatctgctggtatggacctggcgcgaacatcggctcgcttgcgagcagaccggacgcaagccggcaaaggaaatcatttttctgatcgacgagatcgagtgccacctgcacccacagtggcagcgccgcatcgttcctgctttgctgcatgtcatgaaagcgctgaccgggaagaatgtgcctgtgcaagtcctcgtggcgacgcattcgccactcgtactggcctcggccgagccgtcgttcgacccctcgcaggatgcggtctttacgatcgggctgcgcgaagggcaggcggtgatcgcgcgggactcctgggcaaagcaaggtgacgtggtgaattggctggtgtccgatgcgttcggtttgcagcaggcgcgctcggtagaggccgaagaggcgatagaggcggcagaagcatggatgcgaggcgagcgcgatgcgcttccggcgcacctggccaacgaacgggccatccatcgagcgctagagcatgtgctgccagggggggatcatttctggccgcgatggatcgtttgggtcgagagccggaagacggtgcagcgaggagggggtttgtga

SEQ ID NO: 86773 - DNA, 582 bp, Thauera phenylacetica B4P
gtgattccggttgccaaccccatcaccgaacccgcggattttgatcaaaggtgccggaagagaggtctgcaatggctgaatcggaacccggacaccaagcgccccgccgattattggtccgaattccgcgctgagctcgctgtggggtttcaagaccgctgcggcttcggtgcgatgtggatttcaagcggaacggtcgaccacttcgtgagttgcagcgagaacaggttgaaggcatatgaatggtccaactatcggtatctcgacgggtggatcaacagttcgaagagcaagaagcggtcacaggatctgctcgaccctttcgaggtgggtgaggggtggttcgagatcgagttgccctcgttacaactcaagctgacagatgccgtgccgcccgagtatcggagacgggccgactacaccttgcgcaacctccccattcgggatgacgagcgactgatccggcagcgccgcgcgtggtatgaactttacgaacagggaaagttaaccctcgacggactgcgcgaaaaggcgccactgattgcggcggccgttgaaaagcatacggctggcaaggcgtga

SEQ ID NO: 86774 - DNA, 1368 bp, Microcystis aeruginosa PCC 9717
atgtgggttgaaagtataaaactcgaaaacattaaatgcttccagaatcaagagattaaatttattagtaatcccaataatcaacgtcattggcgcactaaaccttatcattggatcactttattgggagaaaatggagtaggaaaaagcacgattttacaggctttggctttactgctcgctggaccagaagcagccaaagaattattaccacgtccgactggttggatatgtaatcccaagacaccgggtaaattaaccgcagtgcttcatcaagaagatggggatgcgggaaaatttggtacggataaaactcgaaaaacttttgcttattcctattttgttacaggcaaggaaaggttagagttaggaggcagtaaggacaaacaaacctatacagaaccagcattaatcgaagaaaatactaaaattttaagttggttgcgagccaatgcttttgcctccgatagtcgtggttggtttgccgtcggttatggagctttccgtcgtttgacacgagtgagtcaagtgatcattcctagtcttgaacctccgaaacgctctagcaactttttcagccaatttaatgaggatacatctttaagttcttttgagagatggatggtgtatttagattatcgaatagccaaaaatcctgaagatagtaaatccaaacaaatgaaaaaaatcggcgaagaagcaattactaaactgttacctggtaatgtagaaattgctgaagtaactgccgatgccttgattcagtttctagttaacggtcaaaaagttccaaccattagtttatccgatggttttcggagtatgattgctttagccggagatttaatttggcgattattacaatccttccccaatctagataaccccacagaggcttctggagtcgtcttaatcgatgagttagatattcatttacatccttcttggcaaagggaaattgctggatggttacaggaagtttttcccaagcttcaattctttgtcgctactcatagtcctttaatcgctgccggtgcagggccaaattctttaaccctacgaatcgatctggtagagggtgaatcagagattgtagaaattccttataaagaattagcggctaatgttgatcgtactttaacaagttctgcttttggtttgaaatcaacctttcccactgagacagaaaataaaattaagcgttaccaccaactaaatcgtaaaaataaaaatctggcagcagaagaaaagcaagaatatgaacaactgtcattatttgttcaagacgttaaaccctttggcgaaattagtcaacctaatagtttagaatcccgaattgatgccttactagaggagcgtttatcttga

SEQ ID NO: 86775 - DNA, 690 bp, Microcystis aeruginosa PCC 9717
ttgattcctgtcaccagaatatcagagccacccgtattagctaaaaatgccgctcgttggctagaggctttagaatcaataaaatcaaacaacaaggcaactaaagctcaaattaaccaagcacaaaataaatacagtcatccgcaagttaaagacgcattagttaaaatgtttaatgggaaatgcgcttactgtgaaagtaagattacagtggtaacttacggagcgatcgaacatttttatccaaaaagccagtatcctgatctgacttttacttgggagaatttactgctttcttgtgataaatgtaatgatgccaatcacaaaggcacaaattttcctctcgatgatatcacaggaaatcctctgttaatagaccccacggatggagtaaccgatccgaatacacatcttgaatttatttgggatgaaatggcaaaattggccagtgtttatggtcgggatcgacgtggtcaaattgttgaagatttgttcgatctcaatggtatgcgtggacgaaaagaattaattaactatcgtagtcaatatattaaaagattgttagcattattacgtttagcaaaacaaggagactcggaggctttatctttactgcaagaagcttgtcaatcgggagcggaatattatgcttttgctagtatttatatcctgcctcatttgcctccctaa

SEQ ID NO: 86776 - DNA, 1281 bp, Microcystis aeruginosa PCC 9443
atgagaattaagtctataaagcttattaattatcgaggtgcagtcagtttaaacatcgactttcatcggcaactcaacgtatttataggagttaatggtgcgggaaaatccaccattttagatagtttggcgattatgctttcatggctagttaatcgcctaaaaaatactaatgccagtggacgacagatgagcgaaaccgagattaataatggtcaggggacggctataattgaaatcactggggtgacggaagatagtcaagagattacttggaaaatagtaaaaactaggactggatatatccacgctggagaacggaataattttagccaattaaatgaatacactcaacaaatacaacgacaaattactgaacatcaaggacaaattaacttacctttatttgtttattattctgttaatcgagcagtgctggatataccattaaaaattaaaacaaaacatcaatttgattctctaagtgcctacgaaaatgctttaaccagtggatcagattttcgcactttttttgaatggtttcgcgaacgtgaagatttagaaaatgaaaatagaaaatatcagtatgatctaattaaaccagaaggtttttgttttcccgatccccaattggaagcggttcgggaaacgatcgaacgttttctacccgattttactaatcttagcgtccgtcgtaatcccttgagaatggaagtaacaaaaaagaatgaaatagttactgttaatcaactttctgatggagaaaaatgtctgattgctatgctgggagatttagctcgaagaatggcgattgctaatcctcaaaatcctgatcccttaacgggtaatggcgttattattattgacgaaattgatttacatttacatcctcaatggcaaagatttgtagtacctaaattactagaaatttttcctaactgtcaattttttatttccacccattctcctaatattatcactcatgttcaaccagaaagtttacacttcatggaacaaacagaaatgggaataaaatttcatcccgtgcaggagtcctacggcaaaaatgttgatcgaattttggaagatttgatggggttagagacaactcgtcccaaggaaatcgctgaagctttgaaagatatatatgaacaaatttctcaaaatcaattagaggcagctaaaaataaaatcaatgttctcagagctaaaattcaaaatgatccagaattaattaaagctgaagttattattcgacgcaaggaaattatcgggaaatga

SEQ ID NO: 86777 - DNA, 633 bp, Microcystis aeruginosa PCC 9443
atgaagtatattagaaaaagacaagaaccaccagagtttaagaattggaaagagcaagctaactcagattggcagcccgactttaaaaatttagcaggaaaaccaaaagaaatactaattaaagctttgatgacagaacagggggaaatatgttgttattgtgaaagtcgattggttgatggtgaatgccatatagaacattttaaacctcaaagtgatcccactgttgatcccttagattatgccaatttgctatgttactgtcaggcaaatcttaagcttggtgaacctcggcactgtggtaatctaaaaaatagctggtttgatgaaaatctcttaatctctctacttaatcccgattgtgagtctcactttgcctttaactatgatggcacaattaaacctgcacaagaagatgatcaaaaagcgattaatactatcgaaaagttgggattaaacctcaataaaatcaacgactttcgtcagaaagccatcgaaccttttttggatgaggagatagataatgctcaattaaaagttcttgtcaatggatatttatgcttagatgatcaacaaagatacagtcctttctggacaacaatcaaatatctgttcagcgatttaattgaataa

SEQ ID NO: 86778 - DNA, 1368 bp, Microcystis aeruginosa PCC 7941
atgtgggttgaaagtataaaactcgaaaacattaaatgcttccagaatcaagagattaaatttattagtaatcccgataataaacgtcgtcaggatgctaaaccttgtcgttggatcactttattgggagaaaatggagtaggaaaaagcacgattttacaggctttagctttactgctcgcaggaccagaagcagccaaagaattattaccacgtccgactggttggatatgtaatcctaaaacaccgggtaaattaaccgcagtgcttcatcaagaagatggggatgcgggaaaatttggtatagataaaactcgaaaaacttttgcttattcctattttgttacaggcaaggaaaggttagagttaggaggcagtaaggacaaacaaacctatacggaaccggcattaatcgaagaaaatagcaaaattttgagttggttgcgagccaatgcttttgcctccgataatcatggttggtttgccgtcggttatggagctttccgtcgtttgacacgagtgagtcaagtgattattcctagtcttgaacccccgcaacgctctagcaactttttcagccaatttaatgaggatacatctttaagttcttttgagagatggatggtgtatttagattatcgaatagccaaaaatcctgaagatagtaaatccaaacaaatgaaaaaaatcggcgaagaagcaattactaaactgttacccggtaatgtagaaattgctgaagtaactgccgatgccttgattcagtttctagttaacggtcaaaaagttccaaccattagtttatccgatggttttcggagtatgattgctttagccggagatttaatttggcgattattacaatccttccccaatctagataaccccacagaggcttctggagtcgtcttaatcgatgagttagatattcatttacatccttcttggcaaagggaaattgctggatggttacaggaagtttttcccaagcttcaattctttgtcgctactcatagtcctttaatcgctgccggtgcagggccaaattctttaaccctacgaattgatctggtagcgggtgaattagagattgtagaaattccttatttagaattagcggctaatgttgatcgtactttaacaagttctgcttttggtctgaaatcaacctatcccactgatacagaaaataaaattaagcgttaccaccaactaaatcgtaaaaataaaaatctggcagcagaagaaaagcaagaatatgaacaactgtcattatttgttcgagaagttaaaccctttggcgaaattagtcaacctaatagtttagaatcccgaattgatgccttactagaggagcgtttatcttga

SEQ ID NO: 86779 - DNA, 690 bp, Microcystis aeruginosa PCC 7941
ttgattcctgtcaccagaatatcagagccacccgtattagctaaaaatgccgctcgttggctagaggctttagaatcaataaaatcaaacaacaaggcaactaaagctcaaattaaccaagcacaaaataaatacagtcatccgcaagttaaagacgcattagttaaaatgtttaatgggaaatgcgcttactgtgaaagtaagattacagtggtaacttacggagcgatcgaacatttttatccaaaaagccagtatcctgatctgacttttacttgggagaatttactgctttcttgtgataaatgtaatgatgccaatcacaaaggcacaaattttcctctcgatgatatcacgggaaatcctctgttaatagaccccacggatggagtaagcgatacgaatacacatcttgaatttgtttgggatgaaatggcaaaattggccagtgtttatggtcgggatcgacgtggtcaaattgttgaagatttgttcgatctcaatggtatgcgtggacgaaaagaattaattaactatcgtagtcaatatattaaaagattgttagcattattacgtttagcaaaacaaggagactcggaggctttatctttactgcaagaagcttgtcaaccgggagcggaatattatgcttttgctagtatttatatcctgcctcatttgcctccctaa

SEQ ID NO: 86780 - DNA, 1368 bp, Microcystis aeruginosa PCC 9807
atgtgggttgaaagtataaaactcgaaaacattaaatgcttccagaatcaagagattaaatttattagtaatcccaataatcaacgtcattggcgtgctaaaccttatcattggatcactttattgggagaaaatggagtaggaaaaagcacgattttacaggctttagctttgctgctcgccggaccagaagcatccaaagaattattaccacgtccgactggttggatatgtaatcccaagacaccgggtaaattaaccgcagtgcttcatcaagaagatggggatgcgggaaaatttggtacagataaaactcgaaaaacttttgcttattcctattttgttacaggcaaggaaaggttagaattaggaggcagtaaggacaaacaaacctatacagaaccagcattaatcgaagaaaatagcaaaattttgggttggttgcgagccaatgcttttgcctccgatagtcgtggttggtttgccgtcggttatggagctttccgtcgtttgacacgagtgagtcaagtgattattcctagtcttgaacccccgcaacgctctagcaactttttcagccaatttcatgaggatacatctttaagttcttttgagagatggatggtgtatttagattatcgaatagccaaaaatcctgaagatagtaaatccaaacaaatgaaaaaaatcggcgaagaagcaattactaaactgttacccggtaatgtagaaattgctgaagtaactgccgatgccttgattcagtttctagttaacggtcaaaaagttccaaccattagtttatccgatggttttcggagtatgattgctttagctggggatttaatttggcgattattacaatccttccccaatctagataaccccacagaggcttctggagtcgtcttaatcgatgagttagatgttcatttacatccttcttggcaaagggaaattgctggatggttacaggaagtttttcccaaccttcaattctttgtcgctactcatagtcctttaatcgctgccggtgcgggggaaaagtctttaaccctacgaatcgatctggtagagggtgaatcacagattgtagaaattccttatttagaattagcggctaatgttgatcgtactttaacaagtgctgcttttggtttgaaatcaacctttcccactgagacagaaaataaaattaagcgttaccaccaactaaatcgtaaaaataaaaatctggcagcagaagaaaaggaagaatatgaacaactgtcattatttgttcaagacgttaaaccctttagcgaaattagtcaacctaatagtttagaatccagaattgatgccttactagaggagcgtttatcttga

SEQ ID NO: 86781 - DNA, 690 bp, Microcystis aeruginosa PCC 9807
ttgattcctgtcacgagaatatcaaagccacccgtattagctaaaaatgccgctcgttggctagaggctttagaatcaataaaatcagacaacaaggcaactaaatctcaaattaacaaagcacaaaataaatacagtcatccgcaagttaaagaagcattagttaaaatgtttaatgggaaatgcgcttactgtgaaagtaagattacagtggtaacttacggagcgatcgaacatttttatccaaaaagccagtatcctaatctgacctttacttgggagaatttactgctttcttgtgataaatgtaatgatgccaatcacaaaggcacaaattttcctctcgatgatatcacaggaaatcctctgttaatagaccccacggatggagtaaccgatccgaatacacatcttgaatttgtttgggatgaaatggcaaaattggccagtgtttatggtcgggatcggcgtggtcaaattgttgaagatttgttcgatctcaatggtatgcgtggacgaaaagaattaatcaaccatcgtagtcaatatattaaaaggttgttagcattattacgtttagcaaaacaaggagactcggaggctttatctttactgcaagaagcttgtcaaccgggagcggaatattatgcttttgctagtatttatatactgcctcatttgcctccctaa

SEQ ID NO: 86782 - DNA, 1368 bp, Microcystis aeruginosa PCC 9808
atgtgggttgaaagtataaaactcgaaaacattaaatgcttccagaatcaagagattaaatttattagtaatcccgataataaacgtcgtcaggatgctaaaccttgtcgttggatcactttattaggagaaaatggagtaggaaaaagcacgattttacaggctttagctttgctgctcgcaggaccggaagcagccaaagaattattaccacgtccgaccggttggatatgtaatcccaagacaccgggtaaattaaccgcagtgcttcatcaagaagatggggatgcgggaaaatttggtacggataaaactcgaaaaacttttgcttattcctattttgttacaggcaaggaaaggttagagttaggaggcagtaaggacaaacaaacctatacagaaccagcattaatcgaagaaaatagcaaaattttgagttggttgcgagccaatgcttttgcctccgatagtcgtggttggtttgccgtcggttatggagctttccgtcgtttgacacgagagaatcaacggaatgttcctagtcttgaacccccgcaacgctctagcaactttttcagccaatttaatgaggatacatctttaagttcttttgagagatggatggtgtatttagattatcgaatagccaaaaatcctgaagatagtaaatccaaacaaatgaaaaaaatcggcgaagaagcaattactaaactgttacccagtaatgtagaaattgctgaagtaactgccgatgccttgattcagtttctagttaacggtcaaaaagttccaaccattagtttatccgatggttttcggagtatgattgctttagctggggatttaatttggcgattattacaatccttccccaatctagatgaccccacaaaggcttctggagtcgtcttaatcgatgagttagatattcatttacatccttcttggcaaagggaaattgctggatggttacaggaagtttttcccaaccttcaattctttgtcgctactcatagtcctttaatcgctgccggtgcgggggaaaagtctttaaccctacgaatcgatctggtagagggtgaatcagagattgtagaaattccttatttagaattagcggctaatgttgatcgtactttaacaagtgctgcttttggtttgaaatcaacctttcccactgagacagaaaataaaattaagcgttaccaccaactaaatcgtaaaaataaaaatctggcagcagaagaaaagcaagaatatgaacaactgtcattatttgttcaagacgttaaaccctttggcgaaattagtcaacctaatagtttagaatcccgaattgatgccttactagaggagcgtttatcttga

SEQ ID NO: 86783 - DNA, 690 bp, Microcystis aeruginosa PCC 9808
ttgattcctgtcaccagaatatcagagccacccgtattagctaaaaatgccgctcgttggctagaggctttagaatcaataaaatcaaacaacaaggcaactaaagctcaaattaaccaagcacaaaataaatacagtcatccgcaagttaaagacgcattagttaaaatgtttaatgggaaatgcgcttactgtgaaagtaagattacagtggtaacttacggagcgattgaacatttttatccaaaaagccagtatcctgatctgacttttacttgggagaatttactgctttcttgtgataaatgtaatgatgccaatcacaaaggcacaaattttcctctcgatgatatcacaggaaatcctctgttaatagaccccacggatggagtaaccgatccgaatacacatcttgaatttgtttgggatgaaatggcaaaattggccagtgtttatggtcgggatcggcgtggtcaaattgttgaagatttgttcgatctcaatggtatgcgtggacgaaaagaattaatcaaccatcgtagtcaatatattaaaaagttgttagcattattacgttacgccaaacaaggagactcggaggttttatctttactgcaagaagcttgtcaaccgggagcggaatattatgcttttgctagtatttatatactgcctcatttgcctccctaa

SEQ ID NO: 86784 - DNA, 1374 bp, Microcystis aeruginosa PCC 9808
atggaaattcaacgggtcatcttaaataacatcgggctatttgaaaagctggaaatttccttggcgcctacagagcaaaacccaagcaacattactgtttttgttggtaataacggggctggtaaaactgctatactaaaagcattagcaacttctcttagttggtttactgctcgtttacttacagaaaaagggagtggtaaccctatttctgaagatgccatatttaatactgctaatgctggcagcattgaaatcgaagtctgggattcctccaaatcattaaacaatcctgatcaaagcgatattgaccattatttcagatggattcttgccaaaagtagaaaaggacgtaaagcccaatataatagcaaccttaatgactgtacgcgcttggccaatcgttatcgtgatgccctcacccatgatgacaaaactagcctacccctaattgcgttttatcctgtcgagcgtgtcgtactcgatattccactaaaaattaggaataagcatacctttttgcaattggacggttatgataactccttaagtcagggcgttgactttcgccgcttttttgaatggttccgagaacgggaagataccgaaaatgaatcaggagttcctgaagacgttctcaaccaactaagaccaataatggctgaaaccaatcaagacttatggcgatggttaaatgaacgcaatgcctccgctaaagatcggcaattaacagcagttcgcaccgccattggccgatttatgccccatctggataaccttagagtccgtcgtaaacctcgtctctacatggcagtggacaaaaatggtgaaaccctcaacctagcccaactttcacaaggcgaaaaatccctaatggctcttgttggtgatattgcccgccgtctagccatgctcaaccctgccttagaaaatcctttagcaggtgatggtatcgttttgattgatgaagtcgatttgcatttacatccctcttggcaacgtcgcctctgcgagtgcctgaccgaaactttcccaaattgtcagtttgtgctgacaacccattcacctctagtgatcagtgattgtaaaaatgttttgatctacactttagctaatggcgaattgcgacagttaccatctcaatatgggcaagatgctaatactgtcttattagatgtcatgaataccagcattcgtaatgagaaaattgatactgaattgaacgatctgctagatgccatacaagattcaaagctaaccgaggctcaacaattgctggcagaattaagtgaggaactacctgccaatcatctcgaattggtcaaagcaaaactactgctccgtaaacaagaattgcgtcatgggaaccattag

SEQ ID NO: 86785 - DNA, 645 bp, Microcystis aeruginosa PCC 9808
atgcgaaccattagtaaaggggctgaaccttgttgtttaacagcttggaaaaggaagaaccctcatggggcatacgatgatttagataaaacagaagaagggaaagtcgttcgggcaaagattcgagactatgctcttaatgagcagttttatctttgtgcctattgctgccagcgaatcgaagaaattaatgcttgccataatgagcatttagaagctcaaaagctaaatcctaaacgtacgctcgacttttcaaatattgttgctagttgtaatacccctaatcaatgcggtgatgcacataaatctcaacacctacccctaactcccctgatgacagaatgtgaaacagaactgcgattcaaaattagtggtcgggtagaaggattgagcgatcgggcagctgtcacgattcgagttttaaatttgggtgaccatgaaaaaaataaccgtgctttgatcgaaaaacggaagcagttgtctaatgctttattatgggcaaatggtataaatccagatgacggcttagaggatgatgaaatattaaatatattaatcagtaacctatcacaacctcagcaagatcaaatggaacctttcactccagtagtaattaatatcttgagaagttggctccaggcttaa

SEQ ID NO: 86786 - DNA, 1371 bp, Microcystis aeruginosa PCC 9809
atggaaattcaacgggtcatcttaaataacatcgggctatttgaaaagctggaaatttccttggcgcctacagagcaaaacccaagcaacattaccgtttttgttggtaataacggggctggtaaaactgctatactaaaagcattagcaacttctcttagttggtttactgctcgtttacttacagaaaaagggagtggtaatcctatttctgaagatgccatatttaatactgctaatgctggcagcattgaaatcgaagtctgggattcctccaaatcattaaacaatcctgatcaaagcgatattgaccattatttcagatggattcttgccaaaagtagaaaaggacgtaaagcccaatataatagcaaccttaatgactgtacgcgcttggccaatcgttatcgtgatgccctcacccatgatgacaaaactagcctacccctaattgcgttttatcctgtcgagcgtgtcgtactcgatattccactaaaaattaggactaagcatacctttttgcaattggacggttatgataactccttaagtcagggcgttgactttcgccgcttttttgaatggttccgagaacgggaagataccgaaaatgaatcaggagttccagaagacgttctcaaccaactaagaccactagctgaaaccaatcaagacgtatggcgatggttaaacgaacgcaatgcctccgctaaagatcggcaattaacagcagttcgcaccgccattggccgatttatgccccatctggataaccttagagtccgtcgtaaacctcgtctctacatggcagtggacaaaaatggtgaaaccctcaacgtcgcccaactttcacaaggcgaaaaatccctaatggctcttgttggtgatattgcccgccgtctagccatgctgaaccctgccttagaaaatcctttagcaggtgatggtatcgttttgattgatgaagtcgatttgcatttacatccctcttggcaacgtcgcctctgcgagcgcctgaccgaaactttcccaaattgtcagtttgtgctgacaacccattcacctctagtgatcagtgattgtaaaaatgttttgatctacactttagctaatggcgaattgcgacagttaccatctcaatatgggcaagatgctaatactgtcttattagatgtcatgaataccagcattcgtaatgagaaaattgatactgaattgaacgatctgctagatgccatacaagattcaaagctaaccgaggctcaacaattgctggcagaattaagtgaggaactacctgccaatcatctcgaattggtcaaagcaaaactactgctccgtaaacaagaattgcgtcatgggaaccattag

SEQ ID NO: 86787 - DNA, 645 bp, Microcystis aeruginosa PCC 9809
atgcgaaccattagtaaaggggctgaaccttgttgtttaacagcttggaagaggaagaaccctcatggggcatacgatgatttagataaaacagaagaagggaaagtcgttcgggcaaagattcgagactatgctcttaatgagcagttttatctttgtgcctattgctgccagcgaatcgaaaaaattaatgcttgccataatgagcatatagaagctcaaaagctaaatcctaaacgtacgctcgacttttcaaatattgttgctagttgtaatacccctaatcaatgcggtgatgcacataaatctcaacacctacccctaactcccctgatgacagaatgtgaaacagaactgcgattcaaaattagtggtcgggtagaaggattgagcgatcgggcagctgtcacgattcgagttttaaatttgggtgacgatgaaaaaaataaccgtgctttgatcgaaaaacggaagcagttgtctaatgctttattatgggcaaatggtataaatccagatgacggcttagaggatgatgaaatattaaatatattaatcagtaacctatcacaacctcagcaagatcaaatggaacctttcactccagtagtaattaatatcttgagaagttggctccaggcttaa

SEQ ID NO: 86788 - DNA, 1281 bp, Microcystis aeruginosa PCC 9809
atgagaattaagtctataaagcttattaattatcgaggtgcagtcagtttaaacatcgactttcatcggcaattaaacgtatttataggagttaatggtgcgggaaaatccaccattttagatagtttggctattatgctttcatggttagttaagcgcctaaaaaatactaatgccagtggacaacagattagcgaaaccgagattaataatggtcaggggacggctataattgaaatcactggggtgacggaagatagtcaagagattacttggaaaatagtaaaaactaggactggatatatccacgctggagaacggagtaattttagccaattaaatgaatacactcaacaaatacaacgacaaattactgaacatcaaggagaaattaacttacctttatttgtttattattctgttaatcgagcagtgctggatataccattaaaaattaaaacaaaacatcaatttgattctctaagtgcctacgaaaatgctttaaccagtggatcagattttcgcactttttttgaatggtttcgcgagcgcgaagatttagaaaatgaaaatagaaaatatcaggattatctaattaaaccagaaggtttttgttttcctgatccccaattggaagcggttcgggaaacgatcgaacgttttctacccgattttactaatcttagcgtccgtcgtaatcccttgagaatggaagtaacaaaaaagaatgaaatagttactgttaatcaactttctgatggagaaaaatgtctgattgctatgctgggagatttagctcgaagaatggcgattgctaatcctaaaaatctttatcccttaacgggtaatggcgttattatcattgacgaaattgacttacatttacatcctcaatggcaaagatttgtagtacctaaattactagaagtttttcctaactgtcaattttttatttccacccattctcctaatattattactcatgttcagccagaaagtttacacttcatggaacaaacagaaatgggaataaaaattgatcccgtgcaggagtcctacggcaaaaatgttgatcgaattttagaagatttgatgggattagagacaactcgtcccaaggaaatcgctgaagctttgaaagatatctatgaacaaatatctcaaaatcaattagaggcagctaaaaataacatcaattatctcagagctaaaattcaagatgatccagaattaattaaagctgaagttattattcgacgcaaggaaattatcgggaaatga

SEQ ID NO: 86789 - DNA, 597 bp, Microcystis aeruginosa PCC 9809
atgaagtatattagaaaaagacaagaaccaccagagtttaagaattggaaagagcaagctaactcagattggcagcccgactttaaaaatttagcaggaaaaccaaaagaaatactaattaaagcgttgatgacagaacagggggaaatatgttgttattgtgaaaatcgattgattgatggtaaatggcatatagaacattttaaacctcagagtgatcccactgttgatcccttagattatgccaatttgctatgttcctgtcaggcaaatcttacgcctagtgaacctcggcactgtggtaatctaaaaaataactggtttgatgaaaatctcttaatctctccacttaatcccgattgtgagtctcactttgcctttaactatgatggtacaattaaacccgcacaagaagatgatcaaaaagcaattaatactatcgaaaagttgggattaaacctcaacaaaattaaagaacttcgtcagaaagccatcgagccttttttggatgaggagatagataatgctcaattcaaagtttttgtcaatggatatttatgcttagatgatcaacaaatcagcgatttaattgaataa

SEQ ID NO: 86790 - DNA, 1425 bp, Microcystis aeruginosa PCC 9809
atgtggccaaataagctagaattttatcgactgctgttattctctgggggaatgtccatgtgggttgaaagtataaaactcgaaaacattaaatgcttccagaatcaagagattaaatttattagtaatcccgataataaacgtcgtcaggatgctaaaccttgtcgttggatcactttattgggagaaaatggagtaggaaaaagcacgattttacaggctttagctttgctgctcgccggaccagaagcagcgaaagaattattaccacgtccgactggttggatatgtaatcccaagacaccgggtaaattaaccgcagtgcttcatcaagaagatggggatgcgggaaaatttggtacggataaaactcgaaaaacttttgcttattcctattttgttacaggcaaggaaaggttagagttaggaggcagtaaggacaaacaaacctatacagaaccagcattaatcgaagaaaatactaaaattttgagttggttgcgagccaatgcttttgcctccgataatcatggttggtttgccgtcggttatggagctttccgtcgtttgacacgagtgagtcaagtgattattcctagtcttgaacctccgaaacgctctagcaactttttcagccaatttaatgaggatacatctttaagttcttttgagagatggatggtgtatttagattatcgaatagccaaaaatcccacagatattcaagccaaacaaatgaaaaaaatcggtgaagaagcaattactaaactgttacccggtaatgtagaaattgctgaagtaactgccgatggcttgattcagtttctagttaacggccaaaaagttccaaccattagtttatccgatggttttcggagtatgattgctttagctggggatttaatttggcgattattacaatccttccccgatctagataaccccacagaggcttctggagtcgtcttaatcgatgagttagatattcatttacatccttcttggcaaagggaaattgctggatggttacaggaagtttttcccaagcttcaattctttgtcgctactcatagtcctttaatcgctgccggtgcggggccaaattctttaaccctacgaatcgatctggtagcgtgtgaattagagattgtagaaattcattataaagaattagcggctaatgttgatcgtactttaacaagttctgcttttggtctgaaatcaacctatcccactgatacagaaaataaaattaagcgttaccaccaactaaatcgtaaaaagaaaaatctggcggcagcagaaaagcaagaatatgaacaactgtcattatttgttggagaagttaaaccctttggcgaaatcagtcaacctaatagtttagaatcccgaattgatgccttactagaggagcgtttatcttga

SEQ ID NO: 86791 - DNA, 690 bp, Microcystis aeruginosa PCC 9809
ttgattgctgtcaccagaatatcagagccacccgtattagctaaaaatgccgctcgttggctagaggctttagaatcaataaaatcaaacaacaaggcaactaaagctcaaattaaccaagcacaaaataaatacagtcatccgcaagttaaagacgcattagttaaaatgtttaatgggaaatgcgcttactgtgaaagtaagattatagtggtaacttacggagcaatcgaacatttttatccaaaaagccagtatcctgatctgacttttacttgggagaatttactgctttcttgtgataaatgtaatgatgccaatcacaaaggcacaaattttcctctcgatgatatcacaggaaatcctctgttaatagaccccacggatggagtaaccgatccgaatacacatcttgaatttgtttgggatgaaatggcaaaattggccagtgtttatggtcgggatcgacgtggtcaaattgttgaagatttgttcgatctcaatggtatgcgtggacgaaaagaattaattaactatcgtagtcaatatattaaaaggttgttagcattattacgtttcgcaaaacaaggagactcggaggctttatctttactgcaagaagcttgtcaatcgggagcggaatattatgcttttgctagtatttatatactgcctcatttgcctccctaa

SEQ ID NO: 86792 - DNA, 1281 bp, Microcystis aeruginosa PCC 9701
atgagaattaagtctataaagcttattaattatcgaggtgcagtcagtttaaacatcgactttcatcggcaattaaacgtatttataggagttaatggtgctggaaaatccaccattttagacagtttggctattatgctttcatggttagttaagcgcctaaaaaatactaatgccagtggacaacagattagcaaaaccgagattaataatggtcaggggacggctataattgaaatcactggggtgacggaagatagtcaagagattacttggaaaatagtaaaaactaggactggatatatccacgctggagaacggagtaattttagccaattaaatgaatacactcaacaaatacaacgacaaattactgaacatcaaggagaaattaacttacctttatttgtttattattctgttaatcgagcagtgctggatataccattaaaaattaaaacaaaacatcaatttgaatctctaagtgcctacgaaaatgctttaaccagtggatcagattttcgcactttttttgaatggtttcgcgaacgtgaagatttagaaaatgaaaatagaaaatatcagtatgatctaattaaaccagaaggtttttgttttcctgatccccaattggaagcggttcgggaaacgatcgaacgttttctacccgattttactaatcttagcgtccgtcgtaatcccttgagaatggaagtaacaaaaaagaataaaatagttactgttaatcaactttctgatggagaaaaatgtctgattgctatgctgggagatttagctcgaagaatggcgattgctaatcctcaaaatccttatcccttaacgggtactggcgttattatcattgacgaaattgatttacatttacatcctcaatggcaaagatttgtagtacctaaattactagaagtttttcctaactgtcaattttttatttccacccattctcctaatattatcactcatgttcaaccagaaagtttacacttcatggaacaaacagaaatgggaataaaatttcatcccgtgcaagagtcctacggcaaaaatgttgatcgaattttagaagatttgatgggattagagacaactcgtcccaaggaaatcgctgaagctttgaaagatatctatgaacaaatttctcaaaatcaattagaggcagctaaaaagaaaatcaatgatctcagagctaaaattcaagatgatccagaattaattaaagctgaagttattattcgacgcaaggaaattatcggaaaatga

SEQ ID NO: 86793 - DNA, 633 bp, Microcystis aeruginosa PCC 9701
atgaagtatattagaaaaagacaagaaccaccagagtttaagaattggaaagagcaagctaactcagattggcagcccgactttagaaatttagcgggaaaaccaaaagaaatactaattaaagcgttgatgacagaacagggggaaatatgttgttattgtgaaaatcgattgattgatggtaaatggcatatagaacattttaaacctcaaagtgatcccactgttgatcccctagattatgccaatttgctatgttcctgtcaggcaaatcttaagcctggtgaacctcggcactgtggtaatctaaaaaataactggtttgatgaaaatctcttaatctctccacttaatcccgattgtgagtctcactttgcctttaactatgatggtacaattaaacctgcacaagaagatgatcaaaaagcaattaatactatcgaaaagttgggattaaacctcaataaaatcaacgactttcgtcagaaagccatcgaaccttttttggatgaggagatagataatgctcaattaaaagtttttgtcaatggatatttatgcttagatgatcaacaaagatacaatcctttctggacaacaatcaaatatttgttcagtgatttaattgaataa

SEQ ID NO: 86794 - DNA, 1368 bp, Microcystis aeruginosa PCC 9701
atgtgggttgaaagtataaaactcgaaaacattaaatgcttccagaatcaagagattaaatttattagtaatcccaataatcaacgtcattggcgcgctaaaccttatcattggatcactttattgggagaaaatggagtaggaaaaagcacgattttacaggctttggctttactgctcgcgggaccagaagcagccaaagaattattaccacgtccgactggttggatatgtaatcccaagacaccgggtaaattaaccgcagtgcttcatcaagaagatggggatgcgggaaaatttggtacggataaaactcgaaaaacttttgcttattcctattttgttacaggcaaggaaaggttagaattaggaggcagtaaggacaaacaaacttatacagaaccagcattaatcgaagaaaatactaaaattttaagttggttgcgagccaatgcttttgcctccgataatcatggttggtttgccgtcggttatggagctttccgtcgtttgacacgagtgagtcaagtgattattcctagtcttgaacctccgaaacgctctagcaactttttcagccaatttaatgaggatacatctttaagttcttttgagagatggatggtgtatttagattatcgaatagccaaaaatcccacagatattcaagccaaacaaatgaaaaaaatcggcgaagaagcaattactaaactgttacccggtaatgtagaaattgctgaagtaactgccgatggcttgattcagtttctagttaacggtcaaaaagttccaaccattagtttatccgatggttttcggagtatgattgctttagctggggatttaatttggcgattattacaatccttccccaatctagataaccccacagaggcttctggagtcgtcttaatcgatgagttagatattcatttacatccttcttggcaaagggaaattgctggatggttacaggaagtttttcccaaccttcaattctttgtcgctactcatagtcctttaatcgctgccggtgcgggggaaaagtctttaaccctacgaatcgatctggtagcgggtgaatcagagattgtagaaattccttatttagaattagcggctaatgttgatcgtactttaacaagtgctgcttttggtttgaaatcaacctttcccactgagacagaaaataaaattaagcgttaccaccaactaaatcgtaaaaataaaaatctggcagcagaagaaaagcaagaatatgaacaactgtcattatttgttcaagacgttaaaccctttggcgaaattagtcaacctaatagtttagaatcccgaattgatgccttactagaggagcgtttgtcttga

SEQ ID NO: 86795 - DNA, 690 bp, Microcystis aeruginosa PCC 9701
ttgattcctgtcaccagaatatcagagccacccgtattagctaaaaatgccgctcgttggctagaggctttagaatcaataaaatcaaacaacaaggcaactaaagctcaaattaaccaagcacaaaataaatacagtcatccgcaagttaaagacgcattagttaaaatgtttaatgggaaatgcgcttactgtgaaagtaagattacagtggtaacttacggagcgatcgaacatttttatccaaaaagccagtatcctgatctgacttttacttgggagaatttactgctttcttgtgataaatgtaatgatgccaatcacaaaggcacaaattttcctctcgatgatatcacaggaaatcctctgttaatagaccccacggatggagtaaccgatccgaatacacatcttgaatttgtttgggatgaaatggcaaaattggccagtgtttatggtcgggatcggcgtggtcaaattgttgaagatttgttcgatctcaatggtatgcgtggacgaaaagaattaattaactatcgtagtcaatatattaaaaggttgttagcattattacgtttcgcaaaacaaggagactcggaggctttatctttactgcaagaagcttgtcaatcgggagcggaatattatgcttttgctagtatttatatactgcctcatttgcctccctaa

SEQ ID NO: 86796 - DNA, 1263 bp, Anabaena sp. 90
atgctaaaagaacttcatttacagtctgtaggaccatctcctcaatttgatgttgaatttgctgatagagttaacatttttacaggggataatggattaggtaaaagtttcttactagatgttgcttggtgggtacttactggaaactgggtagaacaacccgtttatccgcaaagaaatacagaaaaacctccagaaattatctcccaaattatcactctagatgatgatgaaggaaaaaattattcctttaaatttaatttttctaaacaaaaatggcaagatttaagagttccctttcatagtgttcccttattaaaaggaataattatttttgttcgcgttgatggaagtttctctatttttgatcctgctcgcaacgatgaagatgcctataattttacccccgatacactttggaatgggttaaaattaaaaggaaaagttatttgtaacggtctgattcaagattgggtaacatggcaaaatcaaccccaaaaaacgccatttcaacttttatcagatgtcattaaacaacttgcacctcatcctgatgaatggatagaaataggagaaccaacgcgagtatctgttgatgatgtgcgtgatattccgacaattaatctttcttatgggaatattcccattacccaagcatcagcaggaatgaagcggattttgggacttgcttatttattagtatggacttggtatgaacaccaaaaggcttctgaattaaagcagcaagaaccaatgaatcaaatagttttattaatagatgaaattgagtctcatctccatcctcgctggcaaagagcgattttaccatctattttatcagtagtcaatcagttaaaatcaaatatcacaatacaagctttagttactactcattctccccttgtgctggcttcattagaaccaatatttgatgaagaacaagataaattatttttatttgaactacaaggaaaagaggtcgaactaaatgaaatattgtggactaaacagggagatactgtaggatggttaacttcagaaatattcggactaaaacaagcgcgttctcaagaatcagaaaccgcaattgaagcagcagaagcgtggatgcgaaatgataatatgaatacttttcctgaacatttgagaacacaatcagaaattcatcagcaattgcaaagacttttaccaggacatgatccattttggccacgttggatagttacagcagaaagaagaaatcaaaaatcatcagactcatag

SEQ ID NO: 86797 - DNA, 585 bp, Anabaena sp. 90
atgttaaagtttaatcctccagcagaaccggaaaattttgatctaaaagcacgacaaccaggtaataattggttagaaaaaaatacagatcctaaaagaaaactcagagattattggtcaaattttaaaagtgatttagctgatggttttagtaatctttgcggttatagtgcaatgtatgaacctgttggtactgtagatcatttcttatcttgtgacaatcatcgtcatttggcttatgaatggagtaattaccgttttgcttccggttggatcaatagcagtaaaggtactcttgatcagcaggttcttgacccatttgaagtggaaaatgactggtttgaaattctgttgccttccttgcaattaatcataactgataaagttccactgcacgaacgtcaaaaggctgaatttactctacaaaaattgcatctacgggatgatgaacgagttcttcgtcagcgtcaagcatggtatcagatgtatattgatggtgatcttaccctaacaggattagaaaagaaagctcccttgattgctcgtgcagttagaaaacaacaagcaaattctcagttagaataa

SEQ ID NO: 86798 - DNA, 1281 bp, Microcystis aeruginosa PCC 9806
atgagaattaagtctataaagcttattaattatcgaggtgtagtcagtttaaacatcgactttcatcggcaattaaacgtatttataggagttaatggtgctggaaaatccaccattttagacagtttggcgattatgctttcatggctagttaatcgcctaaaaaatactaatgccagtggacgaaagattagcgaaaccgagattaataatggtcagtggatggctataattgaaatcactggggtgacggaagatagtcaagagattacttggaaaatagtaaaaactaggactggatatatccacgctggggaagggagtaattttagccaattaaatgaatacactcaacaaatacaacgacaaattactgaacatcaaggacaaattaacttacctttatttgtttattattctgttaatcgagcagtgctggatatacctttaaaaattaaaacaaaacatcaatttgattctcgaagtgcctacgaaaatgctttaaccagtggatcagattttcgcactttttttgaatggtttcgcgagcgcgaagatttagaaaatgaaaatagaaaatatcaggattatctaattaaaccagaaggtttttgttttcctgatccccaattggaagcggttcgggaaacgatcgaacgttttctacccgattttagtaatcttagcgtccgtcgtaatcccttgagaatggaagtaacaaaaaagaataaaatagttactgttaatcaactttctgatggagaaaaatgtctgattgctatgctaggagatttagctcgaagaatggcgattgctaatcctaaaaatcctgatcccttaacgggtgctggcgttattatcattgacgaaattgatttacatttacatcctcaatggcaaagatttgtagtacctaaattactagaagtttttcctaactgtcaattttttatttccacccattctcctaatattatcactcatgttcaaccagaaagtttacacttcatggaacaaacagaaatgggaataaaaattgatcccgtgcaagagtcctacggcaaaaatgttgatcgaattttagaagatttgatgggattagagacaactcgtcccaaggaaatcgctgaagctttgaaagatatctatgaacaaatatctcaaaatcaattagaggcagctaaaaagaaaatcaatgatctcagagctaaaattcaagatgatccagaattaattaaagctgaagttattattcgacgcaaggaaattatcggaaaatga

SEQ ID NO: 86799 - DNA, 633 bp, Microcystis aeruginosa PCC 9806
atgaagtatattagaaaaagacaagaaccaccagagtttaagaattggaaagagcaagctaactcagattggcatcccgactttaaaaatttagcaggaaaaccaaaagaaatactaattaaagcgttgatgacagaacagggggaaatatgttgttattgtgaaagtcgattgattgatggtaaatggcatatagaacattttaaacctcaaagtgatcccagtgttgatcccctagattatgccaatttgctatgttcctgtcaggcaaatcttaagtctggtgaacctcggcactgtggtaatctaaaagataactggtttgatgaaaatctcttaatctctccacttaatcccgattgtgagtctcactttgcctttaactatgatggtacaattaaacctgcacaagaagatgatcaaaaagcaattaatactatcgaaaagttgggattaaacctcaataaaatcaacgactttcgtcagaaagccatcgaaccttttttggatgaggagatagataatgctcaattaaaagtttttgtcaatggatatttatgcttagatgatcaacaaagatacaaacctttctggacaacaatcaaatatctgttcagcgatttaattgaataa

SEQ ID NO: 86800 - DNA, 1410 bp, Citrobacter sp. L17; identical to SEQ ID NO: 86646

SEQ ID NO: 86801 - DNA, 594 bp, Citrobacter sp. L17; identical to SEQ ID NO: 86647

SEQ ID NO: 86802 - DNA, 1080 bp, Acinetobacter sp. WC-487
atgcattggaataatgctatttatgaaaaaaattatatctatcgaggtggaaaaataaaagtaaacagtcaaaaagattatttaaaaaataaattcgatcaacttggggcatctttaataaattttttcctaagatcagatagaacacaagataaaacttcaatcttacttgaagcaattaatctagatgaaaagataaacatgtatttttcttttccttggcctttttcaccgtccgaaataataaacaataaaaatcctaaaccgattgcggattcattaaactctattcgtttttttaaggataaaggtgatagaataattctttcacaagatgaagaaatagcacttattgaaaatcttaaatttgttctaaattattataaatttaatgaacataatagaactgaaatatttgacctagaattgaatttatcaaacagaagtaaagatgaaaatacaaatcttctcaacagcttatcatttttagccaactatgacctaattgaattaagagatataaaatttagtaaaaataataggagtttttatttaacagattcaagttctggagaactatctttaatattcaatttattatcgattgcaggtgaaatagaaaatgactcattaatattaattgacgaaccagaaattagtttacatcctgaatggcaaagtaactttcttcctctactaagtaaaatgtttagtaattaccaaagatgccactttattattgccactcattctcctcaaatactttcatcaactaatgataaaaatatttttattattaatctagaagatagcaataagttaataagaagcgaagaaatctctaaaatgtctgctgattatcaattagcatatgtttttaaagaaccaggctataaaaatgagtacttaacgcgtatcgctttaactactttcaccaatgttaataagaaaaaattatttagtgaagatgacctaaattctttaagcttacttttagaaaatatgagtcatttagatcaaaatgatcctctacatcaattgattctatctttaaaagaaatgagaaatttgtatgcctga

SEQ ID NO: 86803 - DNA, 672 bp, Acinetobacter sp. WC-487
atgcctgatattaaaaaacaaatttctttttccattcaaattagaaattttcttaaaaagaaaagtaaagatcctgattttaagtatactgattggtctgaaagtgacttagaagaggtacgtaaaattataagaaatttttatcgagatgaacaaaatggtaaatgttcttattgtcgaaaagatatatctctacaatctgcaagtaattgccatgttgaacatatcttaccaaaatcaaaatatttaaaatttatatttgaacctaaaaatttatgcgttatttgcgccgattgtaatgagattaagagagaaaaggaaactttcgactactctaatgaaattttaaaaaatacagatattaaattataccctagatcaagtagttctttcttaatagtccatcctcattttgacaactacaatgatcatataaagatcttgaatggcggaaattatattgatctaagtcccaaaggtaatagaactattggcgtatgtaaactaaataagattttacataaatttggctggccagatgaaccaagtactttagaagaaatattaacaacggctaagaaactatttgagaatgatgaccctctaactcaaataagagtaatcaaacaattaggggtacaaattaatagtaattcagatatcttaacctaa

SEQ ID NO: 86804 - DNA, 2355 bp, Glaciecola pallidula DSM 14239 = ACAM 615
atgacaaactccaataatgcccacgagtttaattcaggtaaaatattacaaaaattacgtgagctacaaggtttgtctatccccgagctagctaaagtgctggacatcaattctactgacttaatgaaatgggaaagcgacaaaattcccagccataaaattcaagcatgtagcatgtattttgaagtgcccgtctcattatttaatacaatatttaacaacaaagcgacactaaataatatagtggagtctcatttatacgcccaaccaaatgataaaatacaacaaatactaaaagaaaatagtattagccgagagccgcaattaaacttatcaggacttgctttaaaccggattcccccagaggtattcgaattttcatggttgcaatatttagacctaagtaacaacaatatcaagagattgctgcctagtgaactatttcagcttccacagctaaaaaccctaaatatcagtgctaatttaataacttatctccccgggatattaattcacttagatagattaacaatgcttgattttcgcgacaaccccatgagtttgcaaccaaacctattgcaatcagcaatgaacttcgacgcttttaaaaactttgtatatagtcgcaatatgactttagttatctttgagccaactactggtattggtcatactaggtatgatgcattaagcgctgagatagaaaaaaagcaaccactgttgctcactacggccgatgaagcagaagctcaattatcactgtataaagagcatataaatagtatcctttatcttacccccagcagccaacccaaaatctcggctgaacagcttaaaacattacttcaaccttataattgccacatgattatatatactcatgaatctaatttcaaagaacaatatgatgcgatcaggagggagttgatattatccttgcctagtcatactggcttaatttaccaaaccaatacactagcagagtttattaagctctttgctgatattcagcgcggtttgaccatgaataagccttcaatagagattaaattcgaaaagttaatactcgaaaatataggagcctatgaacatctaacaattttattgaacccaaaattgactgtactcataggcttgaatggtgcaggtaaaactactattctcagagcattagcacttgcaacattaggaccagaacacgccggagtagatgattcaacagctgcggacttgttgagaattactggaaatagtaacgctctgacccagtgggagccaaaggggttaataaaattagaagctaaagtaaatgggaaatcatacacaaacactattaatattttatataatagtgatacggaaaaagtagaaataaagggtcaacgtttttcctcattgttcgatagtgaaggatatttaattaacttgattattggcataagtgagcaacgtaatacaaaccttaaattgtcaggttattcaccacatgacaagataaggcctaaagttaaagatttattaccactaataaatggtgaagagcaagcttgtattgcccagtttagcagttggctaagtaaacaagcatttgatatttcacaaggtgacgagtcaaaacaagttttgattgatattatatttgcagtcttttctgcgttgacgcaagaggacattaagtttgcaggacttaccgacgttgagcctccagagttatggatagagcaccaagatcctaaacaacgaataccattgcggttggccagccaaggctatcaagcggtcatgggttggattggctttattcttaagcgtatgtttgaagcttacgaatactatcagcagccattacttcaatcgagcataattataatcgatgaaatagatcagctattacacgtaaagtggcaacaaaaaataattaatgtactggcaaatcagtttttccccaattgccaatggattattacaactcactcaccgatggtggtaaatgggttagaccaagatcaagtactgacactgcaacagcgtgggggtgttctaacagtcgaggcttgtccttctgatttatggttgtggcaatatggtgatgtagttaattacttattcaacgtacctcaagagcaaccaaaacagcaagaacagcaattgcttcaagatattgcagcgctcaatgatatagaaatatccatacggactgaagaacaacaacaagaattaaataagctagaattaaggcttgaaaagacccaaaaaagtttagcctttgttaatgaactctattcggagcaacaaaggttgcatgaaagagagcaagagttagccgcattaatcgaaaaactgactcagaaatag

SEQ ID NO: 86805 - DNA, 807 bp, Glaciecola pallidula DSM 14239 = ACAM 615
atgcattatattaagcgcagtgaattacctgagttattggaaaatagtacagaaagttggactcaaccatggatcgattattatagatggataaaaagcgacgaccctaaaaatgtacacccagtaaaaccgaccgatggccactggcgtaaagatgatatcaggttaaaactgatcaacgattttcataataattgtggctattgtggtaatgcattacccaccccttctctttttgctgacatagtcgacgaactgaatgaagaaggtgagagggtatttgcaagtaagggggatgtagaccattttttgccaaaggccatttatccggaaaaagtttacgattggataaattatatttggtcatgtaagccttgcaatcaattaaaactagaatttgaggatattaaatatccattattaaatccttgtgagaaaagtgattgtcagcagcttatctatcttgagtctagcggacaatatggtttgaaaaatgtaatgcgtaataacaagtattggcaaaaaagatttaaaaatagccaaataaagacgttgatgaacgctatagaaacgggacaagaacgggcactcaaaattagtgttttaaggcaatgctttgagtctatagtagtgggattaacgatgttaaaaaaattacaactcccagaaatagaaaaacacatcgataaagatgtgaggttgatcaaaaaaaccatcgttagcccaaactttcactacctattacaagagtactatcaattgctgcaggacgactatccacaagtagtgcccttgctgaacgaataa

SEQ ID NO: 86806 - DNA, 1440 bp, Acinetobacter sp. WC-136
atgaaatatataaatacaatcctacttaaaaatataaaaataccgttaaatggtaggaaccttgttcttacaggtaaaaatggcgtaggtaaaacgtattttttaactaaactttatgaacaactacaatttgagttcagagataaatatatatctacagatgatcagtttcattcttctaaaatatacgacacagtaaatattttttataatgaatttatagcctactcagacatacttgaaataaatagtaaatatgtaaattcaatttcaagcttagcaagcgaaaaaaataaaaaaaatagcaataaaattaaagaattaaaagaattacaacatatatataacgagcatttaaaaattttccttcaggaagtaaatatatttactaatagcaatgattccaactttaaaaacaaatctaaaaattattactccacaaaacctgaacatcttattagatcaaatgatttattaaaaaaagctttagatgaacttacatcctttcagaaattctttaaaataaactttaatgaaagagaaaccaataatagtactatttttagttttttcgatgtaaatagtagattgcaagttccagaaaaatatatacatatgggaaacatgtatgatgtgaaggaccttacttactatttagaggaactaaaattaaattttgactcagatattgaaggagcattagaaagatatctcttggaaaaacgagaagaactacgaaatagtgaggacaatatttgcgaggaaatctataagatatttagtgatatagataatgacttaaaactaatttttgatgatgaaactacagtactttcatttgatgacttcaataatcgcgttttaataattcaaaaaaatgaaaatatctcttttggatttgatgagctaccttctggttttaaatcaatttttaaaatatactctaatcttttaattaaatctaaattaataaaaacaagaaaaaacaaactgaatggaattgtcttaattgatgaaatagactcccatctacatatttcacttcagcaaaaagtcttacctttcttcacaaaggcatttcctaatcttcaatttatagttagtacacattcaccttttgtaatcacttctacaaatgataacactgtagtctttgacctttctaataatgagtttttcgaagataatttaagtcactattcgcatgaatctataataaaagaactctttcatgtaaaggaagaaaatgaaaatattaaaatactatcagatcagcttttacaattcattgaatcaagaaacttaactcaagacctaaatgcaattcaagaattattaaatgaaattaataaagattttgaaaagctatcagtagaactacaactccagtatatgattgctaaaaataaacttaccaaattaaaacatgaggcaaaataa

SEQ ID NO: 86807 - DNA, 672 bp, Acinetobacter sp. WC-136; identical to SEQ ID NO: 86189

SEQ ID NO: 86808 - DNA, 1524 bp, Acinetobacter sp. WC-136
atgcgtattagaagtatttcttttgatgataaaaaatatgaactttctgatagcagtgtctcatcagaagaaaatacattcactgttttggtgggaaggaatggttctgggaaaagccgaattcttcaaagaatatgtaatatttatataaactctttaggtattgatggccgacatattctcaatactcctattaatttaaacgcgtataatgatattaacaacacctcttctcttaattatggtaaaatcacgtatgaacagaataagaatacttatgaaatttcctcacgccaattaaacggattatataattttcatattagccaatttattattgagaaaaaaatcaaaacctctgaatgcaatattttctgtgatattaacaaaattattgctgtttcaaccagcccatttgataagtttccagttattgaaagacatatgcattggaatagtaacatttatgaaaaaaaatatatttatagaggtggaaaaataaaagtaaacagccaaaaagattatttaaaaaataaatttgatcaacttggtgcctctttaataaatttttttctacggtccgatcgaacaaaagataaaatttctattttacttgaagcgatgaacttggatgagaaaataaatatgtatttttcttttccttggcctttttcaccatctgaaatcataaacactccaaacccaaaatctatttcagattcactaagttctattcgtttttttaaagataaaggtgagagagtaactctttcacaagatgaagaaaaagcacttactgaaaatcttaaacttgttctaaatcattatcaatttaaagaacatcatagaagagaaaactttgagctagaattgaacctattaaaccgaagtaaagatgaaaatattgagcttctgaatagtttatcttcattagcaaactatgatctaattgaactaatagatataaaatttagtaaaaataataagagtttttatttaacagattcaagttctggagaactatctttaatattcaatttactatcaattgctggtgaaatagaaaataattcattaatactaattgatgaaccagaaattagtttacatcctgaatggcaaagtaactttcttcccctactcagcaaaatgtttagtaattaccaaggttgtcactttattattgccacgcattctcctcaaatactttcatcaactaatgataaaaatgtttacattatcaacttagaatatagcaataagttaataagaagtgaagaaatctctaaaatgtctgctgactatcagctcgcatatgttttcaaagaacctggctataaaaatgaatatttaacacgtattgctttaactactttcaccaatgttaataagaaaaaaatcttcagtgaagatgatataaattctttagaattacttctggaaaatatgagtcatttagataaaagtgatcctcttcatcaattaattttatctttaaaggaaatgagggatttatatgtctga

SEQ ID NO: 86809 - DNA, 672 bp, Acinetobacter sp. WC-136
atgtctgatataaaaagacaaatttctttttccgcacgcattagcaatattcttaaacaaaaaactaaagatccctgttttaagtatacagattggtcgggaaatgacttagaggaagtacgtaaaactattagaaacttctatcgaaaagaacaaaatggaaaatgttcttactgtaggaaagatttatctctacagtctgctagtaattgccatgttgaacatatattaccaaagtcaaaatatcttaaatttatatttgagcctaaaaatttatgcgttatttgtgctgattgtaatgaaattaaaagagagaaagaaactgtagactattccaatgaaatattaaagaaaacagatattaaattatatcctagagcaagtaattcgttcttaattgtgcaccctcattttgataactacgatgatcatatcaaaatcttgtgtggagggcattatattgatatgagtcccaaaggccatagaacaatcggagtatgtagactaaatagatttctacatgaatttggctggcctgatgaaccaagtactttagatgagatattaacaacagccaagaaattatttgaaaatgatgatccacttactcaaactagagtaatcaaacaattaggagtacaaattaatagtaattcagatatctttacttga

SEQ ID NO: 86810 - DNA, 1401 bp, Leptolyngbya sp. PCC 7375
atgactcaacggatgaaaattcttggtttacgaattaaaaactatcgtcagttcaaagatttctacttagatttcacagaaccaaataccgatcaagcgttagctcaggtctgtttaattggggcaaatggtacaggtaagtctagcctcctaaatctcatcagctcatttttacaaaatagtcagtctgtctggcttgaaaaaaaaggaccaaagctgaaacaattcgtttcacagttgagtgcgatcgcaatacgcatccagttgaattctcaaaaattctggattctgaaacatcatttcaatgacccagttattcttccagatacattgactgatcaggaacaatggttaagcttttggaatgcatcaacggatctggaacttacttcagcaaaaaatcaaatatatagatttcggatatcagatcaagagcaattatttgatcaaattaggttaaaagccaattcatcagacttagcaatttatgcaacaccagatggacgaagccatttacctactggattgcccaaaactagcttagataaagcattagtttttttcaatgattttaaggcatttcacatatcatcttacgatcaagtagaagacttctggaatataatcatctatcaaataaaaaagcgagagcgtgatgagttacttttctttagtgataaagaagtacaaaatctgactgttttagatgctaaagagaaatttgattctaatcatcccgagattttaactgaattagctaaacaatgggacttgattttaggaaaggctggcttagcgttcgatatagatcatgccgtgattccagtacaaacaactgaaaatctacaagcatatgttaagtcaatcagatcagggcatcagatctcctataacgcattaagtacaggcatccgaaattttatatttcggataggacatatttacagcctgtactttaatcgagaaattcaacgtggttttttactactagatgaaccggaagccagtctatttccagatttgctttatgacattattgaacgatatcaatcaatcattcaaaatactcagttttttgtagcaactcaaagccccattattgcagctcaatttaagcctgaagagcgcataattttagagtttgatgatgaccactatgtcacctgccgtcggggaatttctccagaaggggatgatcctaatgacttgttagtaaatgactttgtagtgcgtagtctctatggcaaagaaggtctaaaacagtggaaccggtatttagaattacgtcgcacgattccaactattgaaaacccccaagaaaaacgggaacgattagcagagtacgcccgcatcggtaatacttataactttgctgagcatgagatatctggggaaacgtaa

SEQ ID NO: 86811 - DNA, 606 bp, Leptolyngbya sp. PCC 7375
atgagatatctggggaaacgtaaagactcaaaagttatccaggcagcttggcgttatgagataaccaaacatcgaccccaaatacgcaatgagctattaaatgagcaaaagggcttctgtgcctacagcgagcgctatgttgacccaatggatgcttgtgatattgagcattttgacccacgcaagaagggtacaacagcagacgattattggaattggtatgccgttcaccacagcgtgaacatgagcaaaccgagaaaaatcgagcactatctacccatgctgtgtccctatagtgatgatgtgtcccaacggattcactacatctacggtcagtttgaacctatagaccctgcagatcaagaagctaaaaacttgatcgattttttagggctaaaccatccaaatgtggctgaatccagggctcgacacattcaacgaaccaagtcagatagagaacgctttttcaaggatgatttgcctggttttattgagcacctgaaagctgagattaccaatctgagctacattacagcgctagaagcggaatttggcataagcttgacaataccttataccaaatccgaattcattaagcccgattaa

SEQ ID NO: 86812 - DNA, 1635 bp, Cyanobium gracile PCC 6307
atgcggatcgactggctttggatagacgaatacaagaatttaagggatttgacgatcaatttctctcaagaccatcttatcacggtcctgattggtcgaaatggtaccggcaaatcgaatgttctcgaagctttgacggttatatttagagatctcctgactaatgagaaaatcccaacgatcaagtatcgaatcgcctacgagattcgagatcgttggatgtttatcgatgcggatcctcatagaaaagtttcttataaggcaaagacaattcgcaagagtgatcagcagaagccttatccggtgggtgcctcgttcgatgatttgggtggcgctccgatcagtcgctcgaagctggtaggcgaaaagtcagagcacttgccgcaatttctctttggctattactcgggcgagaataaaaggataaagccccttttttacccttatctcaggggttacgatttcaaacttagaggcggcatcaacccgggaccgaagcgcatgttcttcgctgaacctgtgcacagcaattttgtgttactgacgttcatcgtgaataacaaaaggcagaccgaagatttcttgcaaaagcgacttggcctggaggagggcggaattgagtccgtgctgtttgtgcttaagcagccctattggtacaagaagaatgctgccgacggtgataaaagattctggaactctagaggtatagtacgtgattttctcgccaggctgtatgaactctcattggcaccaattcgcattaggagacgggaagtgtatagcctaggccgatctcggacgcttgagtatctatatctttttctcaaagatatcgacgccctcaaggagctgtcaaaagagaagacatttgctgagtttttccgcgaccttgagagcacccacgtgtccgacctaatcgatgaggtgcggatcaggatcaaactgaagaagaacgacggctctgtaacgttccgcgagctgagcgaaggggaacagcagttactgaccgtgcttggattacttcagttcacctctgcggaggaaagcctattccttttggacgagccagatacgcatctgaatccacggtggagtgttgaataccttcaagatatccgtgattttcttgccgatgctaatgacattaaccagaccagtcatgtacttctggctactcataaccctattgccgttgcggagctggtgaaggagcaggtacagattttgaagagggatagcgagtctcaagtgattactgctgttcctcctgatattcatcccagagggatgggctatgccggtgtcatgaccagtgatatgtttgatctcagtgctgcacttgacacctatacccaggcacttcttcaaaacaagaggagcattagctcgaagcaggttttaagtgacgatgataagcaagagctgaagaagctcacagaagagcttgagacctacggattcaggtaccaagtacgtgatcccgcaatacgagatcagctgatggctggtatgaatcgtagtgctgccctgtcaacttattccagttctgacctccttgattctgaagaagagaaagctgacagactcatcaagaaggctctaggtgatctgccagggagtgatagagatgcgtga

SEQ ID NO: 86813 - DNA, 783 bp, Cyanobium gracile PCC 6307
atgcgtgaaatcaagcttgacagtattgcattgcccagcggatggaccctcagagcacatactgcaattggcgcaggtcatgcgaatattcataagcattcaggtgtttggcaagaatgcaagaaacctctacaaagcctgtcttatgataagtgttattactgcgagactgttcaagagcgttcggataatgcggttgatcacttccgacccaagtcattatacccttggtcagccttcaggtgggagaactaccgtttcgcctgcacttactgcaatagtcgtagacgcgatatagagaacaatcgaattggtggtaagggtgacgactttcctcttttggacgagacaaaaagagcaacttgcctcgcagaagaagtggatgaatgcccgcttctacttgatccttgtcagccggatgagcccggtttgatcgactttgatgagagcggccagccatcaccaacttactcaaatgatgaaagcgaaactcgccacttaagagcagctatctcaattcgactgtaccacctcgatcatcaagatcttgtcgatcgaagaatggtgttggcaactaaacttgttcggattattcatgcggctgagaagctttttccatacacggagactgggatgcctgcgatcgacgtatcttttgaggagcaccttaggagtctggcagaggcgattaaccccgaagcggagctctcttcattctcaagacgaatcctcgacggttatcgttataataagtggatccctggcttgcttagaacagtttaa

SEQ ID NO: 86814 - DNA, 1257 bp, Rivularia sp. PCC 7116
atgaaaattaagcgtattgaaatgcagtcttttcgaggaattggcgatatggcgctggaattccaggaagatgaaccgaatgtaattattggtattaacggtgtaggtaaatccagtattctcgaatgtattgcaattctattatctcgttatacaaaaccagttcagtttcctacaacttcgggaagattatttcaggaagaagatatttctaccggaagtgaagaaactcgtaacgagattacagttgaaactgatgaaggtgaagtaacttggtgtctttctaagcaaagaaaaaagcgtagtaagactgtcggtagcgatttaagcgagttacgcaaattaattgacgaaactcacgaacaattaaaaaatgattctgaatttaatttaccagttattgttcattatggcgtaaatcgcgccgtacttgaaattcctttgagaggtcgtaaaaagaattctaacgaacgtgcaagcgcttacgagcaatccttagacagcgtacaaataaactttaatagcttcttccaatggtttagaaagctagaagatttagaaaacgaacaaagactagatgattctaattttgttaaccatcaattagaagcagtcagacaagcaatttattctttgattacaggtttatctaacttaagaatccgtcgttctccattaagaatgaccgtgaaaaaacaggatagagaactgaatgttaatcagctatccgacggagaaaaatgcttgctggcaatggtgggagacttagctcggagattagcaattgcaaatcccggacttgaagatccattactaggtgatggtattgttttaatcgacgaaattgagttgcatttacatcctagatggcaaagagatattatcccagcgttgaaaaaaacgtttcctaactgtcagtttattgttaccactcattcaccacaagtaattagtcacgttcgtgctgagggagtcttcattttagaaagagatgaagaacaaggactgattattatgagtcctgaaggttcctacggaagagacagcaatagcatcttagaagacttaatggaagttcctgaaagacctcaaaaaatcaaagatagtttacaagaattattcagatttattgacgacgggaatttagaaggtgcgaaagaattacgcgaagaattagcatcagaaattggcgacgacgaaccggaatttgttcgagcggatgtactgattcgacgtaaggaaattctcaacaaatga

SEQ ID NO: 86815 - DNA, 642 bp, Rivularia sp. PCC 7116
atgaaatatattgaaaaaggaccgcagccaaaaagtttagcagcttacaacaaaaaagtaagcgcaaatacaaagtggaagtccttcaatcgtagcgttaaaaatgacacttacgattccatacttcacgaacaaggttacatttgttgttactgcgggattaaaattagtcgcagaaaatgccatatcgaacattaccgaccaaaaagcaaatatactcatctgacatttgattacagcaacttaatttcatcctgtcagggagaagacgaacaaagaccaactaaaccagtacattgcggacataaaaaaggtggttggttcgacgaagagttgatgatttcgcctttagatcctaattgcagcagctacttcagatatacgggagcaggagagattttaccaacagaagatcccgaacatcaggaagctgccgaaactaccatcaaaatgctagcgctagatattaataagttgaagaaaatgcgtcggaaagcagttgaaggagttatacaagcaacacaaggtttgtcagaaaaggaagttaagcagctagctgaagcttatttagagagagacggaagcgagagttatgctcccttttgggcgactattgattatgtgatgcggcagttttattga

SEQ ID NO: 86816 - DNA, 1209 bp, Oscillatoria acuminata PCC 6304
atgcagataaaccagcttacactcactaactttagaggctttgaacaggctgaatttgaatttcacccaggaatgaacctgattgtgggtattaatggagtcggcaaatctagtgtcttggatgccttgcggattgccttttcaagaattctccctaaattgacagcttgtcaagagagaaagattaattttaataccgatgatattatgattggaaaagataaattaacggtagaaatgaatgtggatatatcaggaataccttttcgatgtaaatttagccggggaaaaagccatgaacaggaacttaaacctaacggtgaccaaattttagaacctttaaaacaggcgcaaaatcaacccctgattgtatattgtgcaacccggcgctcaatagttacagaacaagacttaaatcctaatcgtagctcaggtaatcaatctgcggcttttgttgacgcactcattcctagaatgctacgtcttcgggaatttataaattggtggttagtccaagaggaaaatttagacgaaaaacctcaattaaagcgtcatattaatgctttcaatgatgccgtcacccactttttagattggtgtaataatgttcgtgctattccagcctcaaacacctacaaaaaaccaacgttgctacttgacaaaaacggggtaacactaaatattaatcagctttcagatggcgaacggggtatcatcgcattgatacttgacctagtacaacggcttttacaggcaaatcccgatctcgaaaatcctttaaaggatggaaaagcgatcgtgctaattgatgaattggacttacacttacatccactctggcaacgcctggttgtccacaaactgacagaaatctttccaaactgccaatttattgccaccactcattcaccgcaaatgattggagaagttgaaccagaaaatattattattctagaccgagataaacaaccctatattcctgaccaatccttgggtatggatagcaattggattttacgctttcttatggaaactcctgagcgtgatataaacacacaaaaaaccctagagaagatagaatcattgattaaacagaggaattttccagaagcgactgaacaaatcaatagtctccgtgaattaggaaactttcctgaattggtacgcctgcaaactcgcattgatcgaatcagactattagggaaataa

SEQ ID NO: 86817 - DNA, 747 bp, Oscillatoria acuminata PCC 6304
atgaagtacatcaaaaaagaacaagaacctgaaaaattacgttcctggtttaacaaccaatatgatgaggaaggaaatcgccttggttgcgactactatgatgacgtgccaagcgatgttaaaagggaggtgaaagagcatctactaaaggagcaaggctttctatgttgttataccgggatcttgattgatactgaaaattcccacattgaacacctcaagccctattctatatgtcgaaatgagaaaaattatgaagatgtcaactattttaatcttgtaactgcttatcccggtagaaattataagtctcaagatgatgagaatgatgaagatgatgaagatgatgaacttaatcaacctagcaaaaacagcaagaagaataacaagaaatgtccttttggagcgcacgctaaagagaattggtatgaactggacaattttgtaacaccgttacaatcagattgtgaagacagattcaagtttgatgattttggaaaagtccaagctacaaatcatcaagacactgcggcacaaataacgattcaaaaattagtgttaaatcatcagcgattgatagacttaagaaaggcagctattgatgaagcaatattccctaccgatattgaattagatgcctcagatatccagaaaattgctaatggcttatattcccaaaaggatgaagagggaaaatttcgtcaattttgcttggttattgaacaagttgcaagacaactaatataa

SEQ ID NO: 86818 - DNA, 1347 bp, Oscillatoria acuminata PCC 6304
atgagaattgataaattaattatccataactttaaaaaattctcagagtatagtttagaacttcatcccaaatttaccctgctcatcggtgacaatgggacggggaaaaccagcctattagatgctttggcgattgcggctggggtatggctggtcaatccaccggatagcactctttctaatagcaaacgaaatatattgccgaatgagattcgattaaaacctattaaacacgctggaattaccaggttttttgaatgtaaacctgtgattattcaagcaataggaatgattcacgaggattattcttattacaatcattggtgtagacaaatcaaaataaacggttctcggacctcgaatacagaggcaaaacgagtcattgattcgattagcatactgttcaaaagagaccaatttggagaaatgatttggttcccggtgattggttattatggagcgggtcgaacttggctgccttctaacgtaagtcgtaaaaccgctaaattggagcaagggataaaccgcagatgggaggctttttatgattgctttgaagaacgcatccgcctcgctgacttgcaaacttggttccagaaagaggcgatcgcagctttacaacgcagtggaaaaatgcgccccagctatgatgtggtgaaatgggccattttacgctgtattccgggagcggatgacctttggtttgatggcgatcgggccgaaattgtcatttctttggaacatcaacccatccccttcagcaacctaagtgcagggcaaaaaatgatggttgctctaattgctgatattgccataaaagtcgtcaaccaaaatactaaatttttgcctgaagttattgaccccaatcccgaaattattccccctattctgcaacaaacaccggggttagtcctgattgatgagattgatgtgcatctccaccctaaatggcagcggcgtatcgtcaatgacctgaaaactacttttccttccattcaatttgtttgtaccacccactccccccaagtcattggtcaaattgaacccgaatgcctgcggattctctatgaagataatacaggtaaaatctgtaccattacccctaagcaagggttggggatggatagctcatggattttacaaaatttgatgggagcatcagctagagatattaaaattgaacaagatttagagcaaatatttgatacaattaatgacgaaaactattcccaagctagagaactgattcaaaccctcaaacaaaaagtgggtgactttcctgaactgcaagaagctacttcatttttagatagacttgaactcttaaaggactatgaaacggattag

SEQ ID NO: 86819 - DNA, 681 bp, Oscillatoria acuminata PCC 6304
atgaaacggattagaaaaacccatccccctagagaatttttagagtggcttaaggaaaatgaagggctagactgtagttatgcagcactccaaggaaaagaagcacatatagttttaaaaaatcatctgttaagagaacaaggattcatttgtgcttataccggggtcagcatatccgaggaagagtctcatattgaacatattaagccgcaatcagtttgtagaacagtccccaatccgggaaagacctatttagaggatgttgaataccgcaatatggtcgcttgcttcccacaagatggcggggatgtctctcatggttatggtgcgccaatcaaaggaggatggtggaatgaggaacaatttgtttcaccctgccaagaagattgtgaaagaagatttatctatggatggcgggggaaaatttctccctctcaggagaatgacacggctgctaatacaacgattgatatcctagaattaaatgctaaatcgttaaaagatagacgttaccgagcaattgtgggtttctttggctttagcagtaaatataaaacaaaggagttaggtcaacgagaggctaaagcgctattaaccataattggcaagcccaattcaggggggaaacttcaagaattttgctttgtttttgagcaactgtcgcccaaatatatcaagtag

SEQ ID NO: 86820 - DNA, 1254 bp, Oscillatoria nigro-viridis PCC 7112
gtgaaagtcaaccgtctaaaaatgaactcattccgaggcatcagcgatttgaccctggagtttgataccgatgagccgactgtgttcatcggtatcaacggtgtggggaagtccagcatacttgagtgtttggctattcttctctcctggctgacaaagcgaattcaaactcccaatagtaatggacgttctttcaacgaagatgatatcaaaaacggatgcaaagaaactcacaacgaaattacaatttcaatcaatgactgggaattggtatggtctttaaccaaggtcaggaaagggcgaagccaggatactagcagcaaccttgtgggcttaaaaggagttgtcgataacatacacagtcagttagatgctaattcttacgcagcattgcctctggctgtttactacccaactaaccgtgccgtacttgatattcctttgaagattaggacgaaacattcgtttgagcagataactgcttatgacgaggttctcacgggagggcgaatcgattttaggcgcttttttgaatggtttagagagcgggaagattacgaaaacgaattacgactaaatgattccgatcggtatcgcgatcgccaactagaagcagtcagatatgcgttcgctaacttactagacggcttttcaaatttacgggttaggcgatcgcctttgttgcgaatgactgtaaacaaacaaggcgaggaactgatcgtcaatcaactatccgatggtgaaaaatgcttgttagcactagcaggagatttagcaaggcgtttggcgatcgcaaatccgaatccagattgcaatccgcttgagggttccggcgttgttttgattgacgagattgagctccacttgcacccaaaatggcaacgggcgattattccgaatctgaaaaaaacattcccaaattgccagtttataattacgactcattcgccacaggtaatcagcgatctcaaatgggttcatcttttgaggtcaacatctgaaggaattgcgatcgatcgagtaccatcctttgggaaagatagcaatcggattctagaaacgcttatgggaactcccgaacgtccgcaggaaattaaggaagatttacgcgaattgtttcgcttgatagacaagggcgaactcggaaaggcgcgggaatttcgccaagaattagcacacaaaatgggagaagaagaccctgaatttgtgagagcagattggctaattcaacgcaaggaaattatcaataaatga

SEQ ID NO: 86821 - DNA, 636 bp, Oscillatoria nigro-viridis PCC 7112
atgaaatacattcaaaaagggaaagaacctcaaaatttttccgactggaaggctacacagatgtctctcggtgtcaactatgattacaaaagtctttccaaccctgagaaaaaagcggtacacatttctttgctaagtgaacaaggctatatttgctgctactgctgtaagagagttgagcaaagtaatagccatattgaacatctacaccctcagagcaagactgatttagaattatctgttgattacacaaatatgctagcttcttgtggcagagatccagattggccagagtattgtggcaataagaagaagaatcttgcgatcggagtttcgccactacaaaccaactgtgaagaattttttgattactctagcactggtgagatactgccaactgcaaataatttagctcatcaaaaagatgctcaaagaactattgaagttttgggactcaatcattatgacttaatgcagggacgaattcaagcacttgaagcattgcaaggaatcatgacacaggaagaggcagaattattagctcaagtttgtcaacaaatgaatgcacaagggcgataccagcctttttgtaatgctgttttgtattatctcaaaaattattttggtgtttcttaa

SEQ ID NO: 86822 - DNA, 1224 bp, Oscillatoria nigro-viridis PCC 7112
atgctgaaagaacttcatctaaaacaagtcggaaccgccccccagttcgatgtagaatttgccgatcgcattaatttatttactggcgacaatggtttggggaaaacttttttgcttgatgttgcttggtgggtactaactggaaaatgggcggatagtccagcttggccacagcagggacagggcaattccccggaaatcacttctcttttaagcaatcaaaaaaaatccgataaatatcgaagtctgtttagtttttccgaacaaaagtggttagacattggcaagtattctagtttcaaagggttaattatttacgttcgtgttgatggattttcagtcttagatcctgcccgtaaccgcttagcagcttatcacttcaattatgatagtctttggaatggattgattaattcagaaggaaaatttatctgtaatggtctaattcatgattgggtgaactggcaacgtcaaccagaccgatctcaattccaactattatctcgcgtcattaaacaactttctcccgatgctgatgaatggatggaaccgggagaacccatcagggtttctgttgaggatgtgcgtgagattcctaccttgaattttccctatggcaatgttccgattatctacgcatcagcgggcattaagcgaattttaggattagcttatttgttagtatggacttggtatgaacacacaatggcttctaagttgcggcaacaagaacctctggatcagataattattttaatcgatgaagttgaagctcatttacatccacagtggcaacgctcaatcttgccagctatcttagaagtagcgacaaacctcgaaaatgaaatgaaacttcagctaatagctacaactcattctccgctgctacttgcctcaatcgagcctcaatttgatgaggagcaagataagttatttttgtttgagttacaaggtaaaaatgtaactcttaatgaagttccttggacaaaacatggcgatgctgttggctggctaacttcagatatttttgggttaaaacaggctcgttcccgcgaagcagaaatagcgattgaggctgcgtatactttcatgcgaggagaaagcatggaaacttttcctgaatacctcagaactaaagagcaaattcatcaggaactcctgcgagttttaccagaacacgatcgcttctggcctcgatggattgtgagcaccgaggtagagtaa

SEQ ID NO: 86823 - DNA, 576 bp, Oscillatoria nigro-viridis PCC 7112
atgatgcgatttactccgccaccggaaccagcagattttgatcgacaggtgcgaaaagcaggcaataattggttagttaaacatcctggcaaagaaccaaaagatttttggtcgagcttcaaacctcaattagctaaagagttccaaaatctttgtggctattcagttatgtacataccgagtcggatgggtactgtagatcattatttgagtaaaagtaaagcagaaaatcggcatttgatttatgactggaaaaactatcgctatgctttgcaacgggtaaatagctgcaaaggaacttacgatcgacaaattctcgatccgtttgaagtagaagataattggtttgagattatcctaccttcttgtcagttgattttgactgatgcgattccttcccacgagcgcgatcgagccgaatttaccctcaaaaagttacagcttcagaatagtgaatgggttatagaacaacgtcaggagtggtatcggatgtatctagagaacgaacttaatttagaagggttagaaaagaaagcgcctttaatcgctcgtgcggttaaaaaacagcttaattag

SEQ ID NO: 86824 - DNA, 1119 bp, Microcoleus sp. PCC 7113
atgattcattctttatgcttgaaaaacttcaaaccttttgagtccgagttccttgagtttagagcgctaaacctgctttctggtcttaacagcacaggcaaatcttcagtacttcaagcactcctgctgctacgtcaatcttaccagcaaggcttattaccgaagataggtttggcactgaatggggaatgggttcatattggtacagctcaagatgctttttgcgagagggcaaaagaaaactatgtcggatttgagattgtttggaaagataacaataaagggatatggcgtttcaactacgactcaaaaaagaaagaggctgatgttttgaatcttgctttagaaccaactgattctgaagtctatcaatcaagtctttttagcaaaaaattccactatcttcaggcagagcgtatagggccgcgtccttttaatgacatatcagattatcaagtgcagcgactggggcaacttggaactagaggtgaatacactgctcacttcctctcacttaatgaagataaagatattcctaacaatcaactgagtcatccgatggcaaagtccaacgatctgagtaaccaggtcgaggcatggatgagggaagtcagccctggtacacgtatcaaaattaattccaacccagatatgggtctgataaacttacaatacttttacggagatagtaacccctatcgtgctaccaatgtggggtttggaattagctacaccctaccaattattgtggcggcgcttgcatctcctccaagcacactgattctgattgaaaacccagaagcccatctgcatcctaaagggcaagcaaaaatgggcgagttgttagcgcttgctgctagttgtggtgttcaggttgtgatagaaactcatagtgaccatgttttaaatgggattcgtcttgccgttcatgacggaaagcttaatcccaaagatgttcagttgcactacttccagcgacaagagaaacaagggcaagcttttactgaagtagtttcaccacacatcgatcgcaacggacgaattgatcaatggccagaaggcttctttgatgagtgggataagagtttggaggctttattagaaccagcaggagaataa

SEQ ID NO: 86825 - DNA, 408 bp, Microcoleus sp. PCC 7113
gtgacatatatctctgaatccctacgtcgtttggttcaagagcgatctggatattgctgcgaatactgccaaatttcagcagatgtcacattctatgctcatgaggtagatcatgtgattgccctcaagcatggcggtgaaaccattgctgaaaatttagcctatgcctgctggcggtgtaaccgttacaaaggaaccgatcttggctccttcgatccacaaaccaaccaatttagttttttgtacaatccccgcactcaacaatggagcgaacatttctccttaagagacgacgaaattagtggcttaactccggaaggaagaacaactgtacaactccttggattgaacagcgttgagcgtcgtgcagaacgcagacgagcagaggaactaaaagaaactgaataa

SEQ ID NO: 86826 - DNA, 1266 bp, Microcoleus sp. PCC 7113
atgcaactcaaccgcctcaccctcacccagttccgcgctttcgagcaggcagactttgattttcatccagggatgaatctgatcgttggcattaatggtgtaggcaagtcttctgtactggatgctcttcggattatgttgtcacaggtactaccaaaattcacagcatccaaaagtaagcctctcgacttcgagacaaccgatattacagttgggcgtggtgccctcactgccgaacttgaattcaacgcagcagagattgacttccaatacctcgtacataaaccacgccaagattatgtaatcgacattagccgagaaggagaagttcgtgaccaaacctataatttggttgaacggcaagatttgactccggatgagaaggaaattccaaagagtcttaaaactcgacgggaacaacctcttgtagtgtatttctcaacgcgccgctctttatatagtatggctgcaccttctaagcaatttacagcaggtggtcaggcagttgcctttgctgatgctctaaagggtgatcgtgaactgcgtccgcgtgagttcgctgagtggtggttggtacaggaggtgcttatccaagaaggtaaaacagaggcacaacggtattttgatacatttgagagcttagtgagatattttcttgaaaactgctccaatttacgtgccgtcagagaaccacaagttactctaatgcttaataaagcaggggtatcatttgatgtgcgtcagttatcagatggagaacgtggcattctggcattggtgcttgacttagcaagacgcctttcatgggctaatcctaagctagacgaccctttacagaagggtaaggctattgtactcattgatgaacttgacctgcacttacatccccgttggcaacgctcaattgtagaaaaattgactcgaacgtttcagagttgtcaattcattgctacgacccactcaccacagatcattggtgaggtgtcacctgaaaatatcctaattcttgaaaatggtgagcttccataccaaccagaacaatcgcttggtatggatagtaattgggtgctgagctatctaatggaggcttctgagcgtgatatagaaaccaaacaaaaattaaaacgtatcgctgacctgattgaagatgaggagtatgacagggcgactgatgcaatcgatgatttacgagtagaggttggtgaattcccagaattagtacgtttgcaaacacgcattgataggatacgtttgctaggggattag

SEQ ID NO: 86827 - DNA, 720 bp, Microcoleus sp. PCC 7113
atgaaatacatccgcaaaggttctggaccaagagaactgcgtcagtggttcaggactctaccactaaatgaaaatggcaagccaattaattgccgctacgatgatgacatttaccaagatttaaaagaaaaaattatcaaggctctgctagaggaacaagggtacttgtgctgctatacgggtatccgtatctcggaagaaaatacccatattgaacatttgaaaccacagagtatttcacagcaggatgagaacgatcacgatgatgtgatgtacagtaatatgctagcagcctatcccaaaggtgattgccaatttggcgctcaagcaaggggtgattggtacgagcttgacttctttattcatccactagatggttcgtgtgaaacaaaattccactttgatatggaaggaggtattaaacctgtttcacaaactgatcttgctgcaaaaaaaaccattgcccacctaaagcttgcccaccctttgctagtggatctgagaaagcaggcaattgacgaacttttatttcctgaagatgaggtcttaagcgaagccaaattacgaagaattgttgaaaacggttacagcatccgtgacaagaagggacgataccctcatttctgtttcataatcgagcaggttgcacgacaacttttgcacaaggtcgaacaagatcgtaaacgtaggcaggctattcacaagcaaaagcgcaaatga

SEQ ID NO: 86828 - DNA, 1380 bp, Microcoleus sp. PCC 7113
atgcatatcaataaattacatattcaaaactttagatgtttgaaaagaattgattttaattttacacctgataatatagttgtaataattggtattaatggagcaggtaaatcatcagtattagattgtatagctagccttttaattcaactcgaaacacgaataattaaaattgaaccatttgaatattctgaaattgacagtatcaatattaatcaaaaaataaatagttttttgacagtagatgatattaatgacaacgctaaacaagttgatgtgtctattgaaatctcaaccgattttaatgacagtatatcttggaaggtcacaagaagtttaattgagaaaggccttgaaggagattacaatcaattaaatcattatattgagtatctgcgtcgaaaattagagtcaaattcaaactttaatttgcctttaatgatatattataggactcgtagaataacattagattctaaatctagaataatattagatactaaatctattgatttggataatttagatagtaaagtttacccattcaaaattaatcaattgagtgcttacagtggaagtttcaatccagaagtaaataattttcaaaggttttttacttggttcagacaagaggaagattacgaaaatgaaattcggttaagagaagatgataagtatagaaatccaaatttagaggttataagaaaagctttagaaagatttctagagggatttccaagcagccatttttctaatctgcgggtagtcaggtcaacatcccagagaaacctgaattttaatcatagtaggattccctcttttttaacaattactaagaataatcaggactttaagttagagcaactctctgaaggagaaaagatgcttttaatgttggttactgacttggcaaggcgtttgtcaattgctaacccaggtttgggagttgaggctttacatggtaaaggcatagttttgattgatgaaatagatctacatttacatcctcagtggcaaagaatggtgattcctagcctgacgcaaacctttcctaattgtcagtttatagttactactcactctcctcaagttttgagcaatgttaaaagagaaaatgtctttattttagaagattataaactagtagaggtaacgccttatacttacggcagagatagcaattcaattttatatgaattaatggatgtgagcgcacgaccaaaggaagttcaggataaaattaatgcttgttttgatttgataaatgaagaaaaattagaagaagcaaaaagtaaactgcaagaactagcagatttactgggtgaatacgattccgaaatcgttagggctaaaacactaattaattttttaaccgagtaa

SEQ ID NO: 86829 - DNA, 651 bp, Microcoleus sp. PCC 7113
gtgaagcatattgtcaaaggtaaggaacctcaatcattactggaacatcgcttaaaatctcatgccgattacaacaactattctgaaaaagatgatctgcgacaatcattgctgactgagcagggatacatttgttgctattgtatggagcgcattgccaaaaacaagatgaaaattgagcattggcgatcccaaagtatttatcataatttacaattagattaccaaaatctgcttggtgcttgccaaggcaatcaaggccaacctcaacatttacaacattgtgatacaagaaagggtgaaatcgaaattacgattaatcctactgacgctagtagaagatgtgagaatttaatcaaatatcgcggcaatggtcaaatctactcggatgatgtaactattaatcgcgaattaaacgaagttttgaacctcaatctagaaactttgactaaaaatcgtaaagcagttctggatgctgttattctcggcttgcagaaaaaatatccatctaagtcttggacagtagccattttaagtaaagaaattgccagatatagtaatataaatgagaagtctcaatatgaaccctactgtcaattcatcattttttggttgaacaaaaggttgtcggtagaatcaaagaaaaagtaa

SEQ ID NO: 86830 - DNA, 1251 bp, Microcoleus sp. PCC 7113
atgttaaaagaacttcacctcaagcaagtcggacctgcacccaaatttgatgttgactttgccgatagactcaatatcttcacaggcgataacggcttaggcaaaacctttttattagatgtagtttggtattccttaaccggaacgtggatagataatcctgtatttccacaacttactgaagaaactcccacaatttattgcagctttattaatcaaaaaacgggtggatctacaacttttgatagtcattttgattttgaaaaacaaaaatggattggccgcactttgccacctttactagggagtctagtcatatacgttcgtgtcgatggtggattctcagttttcgacccagcccgtagtctttcaactgctgctccgttaattgcttatcaatttagtcattacacactttggaacggtttaagatccgagggtggtcaagtcttatgcaatggtcttatccaagattgggtcaagtggcagaaccaacccgaccgaacaacttttcaactgttatctcgcgtcattagacaactttcaccccatccaaatgaatggatggaacctggggaaccgatgcgagtttcagtggaagacgtgcgcgacattcctacaattcaaatgccctatgggacagtacccgtcatccaggcatcagccggaatgaaacgtattttaggactcgcttatttactagtctggacttggtacgaacacctgcaagcctctaaactgcgtaaacgacaacctttagaccaaattattttgctaatggatgaagttgagtctcacctccatccccagtggcaacgttcaattatgccagccgttttagaagtagccacaggattacagaaacagatgaaaattcaagcatttgctactactcattctcctctagtacttgcttcattagaaccgatatttaatgaagaaagcgacagattgtttttatttgaattgcaggaagaggaagttacattaaatgaatttccctggacaaaacaaggggatacagttggatggttaacctcagaaatttttggactaaaacaggcgcgttctaaagaagctgaaatcgccattgaagcagcagaagcctggatgcgtcatgacaatatgaatactttccccgaacacttgagaaaccagccacaaattcagcagcaactcgaacgacttctccctggacatgatcccttctggcctcgttggattgtcacagtggagaaacgacgggcatga

SEQ ID NO: 86831 - DNA, 603 bp, Microcoleus sp. PCC 7113
atgatgcggtttaatcctccaccagaacccccagagttcgaccaaaaggctcgacaaccgggaaatacttggttagccaaaaatccaggaaaaagaccaaaagatctctggtctcccttcacaagtcagctagctgatggttttcaaagtctctgcggctattcagctatgtatcagcctacgggaactgtagaccactatttgagctgcaagaattatccagaacaggcttacgagtggagcaattatcgctttgcttctggctggattaacagtagcaaacgcacagtggatgaccaagtactcgacccttttgaggtcgaagatgattggtttgaaatcctgctcccttccttgcagttaatgttaaccgatgctgtgccacctcaggaacgggaaagggcagaatttactcttcacagactgcatctacaggatgatgaacgagttatccgccagcgtcagcagtggtatcagctttaccttgatggtgacctgacactggaaggactcgaaaagaaagctccattgattgctcgtgctgtcagaaaacagcaacaaaacagttcagccaacgaatcttccccgcatacaccgccttag

SEQ ID NO: 86832 - DNA, 1245 bp, Cylindrospermum stagnale PCC 7417
atgctaaaagaacttcacttaacgtctattgggactgctcctcaatttgatgttgaatttagtgataggatcaacatttttactggggataatggactaggtaaaagctttttacttgaggttgcttggtgggtacttactggaaattgggtagatcaacccgcttatccgcgaaaactaacagaagaacatcctgaaattatctccaaaattcacaccaaatatggtgtaagggactatgagagcggctttaatttttctgcacaacaatggctgagtaggcatttacttcctgaattaaacgaggtagttatttttgttcgtgttgatggtggcttctctatttttgaccctgctcgcaaccataaagatgcgtatagttttactccaaatacactttggaatggcttgaaattaaagggaaaagttctttgcaacggtctaattcacgattgggtaacatggcagaatcgaccacacaagatgccatttcaacttttatctgatgtaatcaaaagacttgctcctcatcctgatgaatggatagaaataggagagccaacgcgagtatctgtggatgatgtgcgagacattcccacaattaatcttccttatggtaatattcctatcacccaagcatcagcaggaatgaagcgtattctcggacttgcttatttgttggtatggacttggtacgaacacgaaaaagcttgtgaactacgaaagcaagaaccgatgaatcaaatagttttactaattgatgaaattgagtctcacctgcatcctcgctggcaaagagttattttaccatctattttatctgtggtaaatgagttaaagccaaatatgccaatacaggctttagtcactactcattctccacttgtgctagcttcattagagccaatctttgatgaagagcaagataaattatttctatttgaattgcaagaaaaagaagtagcattaaatgaagttaactggactaaacaaggagatacagttggatggttaacctcagaaatatttggactcaaacaagctcgttctcaagaagcagaaacagcgattgaagccgcagaagcttggatgcgtgatgatgatatgaatggttttccagaatatttaagaacccaatcgcaaattcatcaggaactcgcaaaactattaccaggacacgatcaattttggccgcgttggatagtcacttcagagaaaagaaattctcggttatttggggcatag

SEQ ID NO: 86833 - DNA, 588 bp, Cylindrospermum stagnale PCC 7417
atgctaaatttaaatcctcccccggaaccaccagattttgatgcaaaagcacgacaattaggtaatagttggttagcgaaaaatccagatacaaaaaaaagaccgaaagaatattggtcagtttttaagagctatttagctgatggtttcggtaatctttgtggttatagtgctatgtatgaacctgttggtactgtagaccatttcttatcttgcgaaaattatcgtcacttgacttacgaatggagtaattaccgttttgcttctgcttggattaatagtagcaaaggtactcttgatgataaagtttgtgatccgtttcaagttggggatgactggtttgagattctgttaccttccctgcaattagtcttaactgatgcagttccagcagaggaacaccaaaaagccgaatttactctacaacgattacatctacgcgatgatgaacgagtcattcgtcagcgtcaagcatggtatcaaatgtatcttgatggtgaaataaccctgataggattagaaaaaaaggctcctttgattgctcgtgcaattagaaaacagcagcaagaaacttctttgccagaataa

SEQ ID NO: 86834 - DNA, 1287 bp, Dactylococcopsis salina PCC 8305
gtgtatattaaaactctgactctcaccaattatcgtggcgtaaaatccctctcccttgacgtcgacaagcagttaaatgtttttgtaggggttaatggtgcgggtaaatccaccgtccttgatgcgatggtaatgatgctttcatgcgttgttagtcggattggagaggtaataggtaaacagagtgaagatcgtcaaattgtagaagatgatatcagaaatgaggctgattttacattaattgcactctgttgtattgataaaaatcgaacgtttcagtggcgaattgctaccagtcgtagaggagatatttctctagaacagcccactgatttaacacaattagaaacttatactgaacagctaaaaagagaaattatagatcatcaagaaagcatcaatatccctttatttgtctattatcctgttaatcgagccgtcttagacattcctttaaaaattaaaactaaacatcgttttgatttattaaacgcttatgatgaatctttaaccagtggggctaattttcggaaatttttcgagtggtttcgagaacgagaagatttagaaaatgaaaaagttgctgaaacgagagagaaacctttatttcataatcaaattccttatgatccacaattacaagcagttagaaaagcgttaaatcaatttttgccaaactttaaaaacctcagagttcgccgtaatccattgcgaatggaaatagaaaaagatggggagatattaaccgttaatcaattgtctgatggagaaaaatgtttaattgcaatggtgagtgatttagcgagaagatgtgccattgctaaccctgaacgtcctgatccgcttcaaggagagggagtcgtccttattgatgaaattgacctccatcttcacccaaaatggcaacgaatgattgttcctcaacttttagaagtttttccaaattgtcagttttttatttcgacacattctcctcatgtgttaactcatgttcaatcagaacaaatttttcttttgaagcaaactgaagacggaatcgaatggagtcaacctgatgaatcttatggaaaaaatgtcgatcgcgttctagaagatttaatggaattagacacaacacgaccgacagtagttagtaatagtattcataatatttatgaaatgattgacaaaaataatttacaggaagcacaagatcaagtcagtgaaatgagaagcaaaattggcaacgatccagaattattaaaagcggaagtcctcatcaaacgaaaagaacgtattgggaaatga

SEQ ID NO: 86835 - DNA, 630 bp, Dactylococcopsis salina PCC 8305
atgaaatatattcaaaaagacagtgaaccccaagaatttacagattggaaaaatcaagaaaattctaattggaaacccagttacaaggaaatggataaatctgtcaagaaagcagttaaacaagcattgatgacagaacaaggctatatttgttgttattgtgaagatcgattaaatgataatgactcgcatattgaacattttcaacccaaaagtgatcctgcaattgatcccctagatttttctaacttgttgtgttcctgtcaaaataatttaaaaaagcgagaacctgttcactgtggaaaactcaagggtgactggtttgatgaaaaacaattaatttcaccccttgatccgacttgtgaagaacgatttgcttttacggctgacggttcgatcaaacctgctgataatcgagatcaggtagcgctgacaacaattgaaaaattaggtttaaatattccgaaattacgaaacttacgtcaaaaggcgatcgagtcttttattgatccttctttatcagatagagagttggaagactttgtgaatagttatcttgaacctgataatttgggtcagtttaatcctttctggacaacagttcgttacttatttggaataagggagtaa

SEQ ID NO: 86836 - DNA, 1929 bp, Anabaena cylindrica PCC 7122
atgttccttagtattgaccaaatcagagagtctcttaaatatttagaaaaggtcgattctttttggggaattacttttttaaaatttaagcaattacaattaccagtagataatactattaaaatatcgctatattcagagattcaagattttttagagaaaaactataaaccctgtaaggaatcagcattttcttatagatgttttcgtttatcaaaaaatcaaaaaagatggatggaacttgatagatatgcaaagttcattatacaagatattcgtaaaaaaacatttatagaagccttgattgacaaagtctttgaaaaagaatggggttggaaagataactatatcgaaatcttaaaatcttgtttatctcaatatgataatcaagtaatttcaatttttcatttagctgtttggatctatcgtgaaaaagaatggacatctgaaacaacagcagaaagcattattgaaaatctcaaaaatgtttttttattaaatgaacaagaaatcaatcaattatttgatattgctatccctgaaaatattaatgtaaaccagctttttcaagataaagtagtgtcttgggaagaattaaaaactgttattggtaaacctccagatgttctacccgaagaaggcactttaacttatttagaaatacaaggtgtaggtgctgcaagtaaactttgttttgaaccagcagaacaactgaatttaattacaggtgataatggactaggtaaaacttttttactagagtgtgcatggtgggctttaactggacagtgggcaaatttaccagcatatccaatgcaaactataagtgaagatgaacctaaaattatttttgaaatttctggagattctgaatctgataaagaaagtatttcttatgattggcaacttcaaagatggaatgaaattaaaaatcgctcaactattcccggtcttgtaatttatgccagagtagatggttcttttgccgtatgggacacagcaaagcagtatttgtcattttcatctcgtgttcaagatattaagaaagtaccacttccttttgtgtttactaaagatgagttatggaatggtcaaaaagatgaaaatggcaatacttttattaatggattattacaagattggattcaatggcaaagtagaccagataaatatccatttaacaccttagtaaaagtattagaacgtttatctcctccctctgaaggtgatttaggaattttaaaaccgggagaacctgtcagactgccttatgatgctagagaaattcccaccatagaacacccttatggaactgttcccattattcatgcttcggcaggggttcagcggataattacaatggcttatttgatagtttgggcttgggaagaacataaaatacaatcaaaacttatccgcatagaaccacagaagagaatggttattttagtagatgagttagaagcgcatcttcacccccaatggcaaagggctattttacctgctttgttagatgtcagagatgatttagctgctgatttacaagtacaaatcatggttgctactcattctcctttagtaatggcatctgtagaacctagatttgatgaaaaaattgataagttatttagtctagaactagtgaaaagcgatttattaggtaatgaagtccaaattgaggaacttccttttatacgtcaaggtgtggtagattcttggttaatgtctgatgtttttaaattgcgtcaacctcgttccttggaagcagaaaagacattaaatgctgccaaatctttgcagttttcagataatcctgactcggaatctgtagcaaaagtatcagaggaattgaaaaggtatttagcagaagatgatgagttttggccaagatgggtttattttgcagaaaggcatggagtagagttgtga

SEQ ID NO: 86837 - DNA, 627 bp, Anabaena cylindrica PCC 7122
gtgatacctgtgcagtttcagcgtaaacctgatgattttgacaaaaaagtcagaaatccaggcttgactttcttaagtaaagttcctaatcccaaaactgaagattggaaaaaaggagcatattggcaggaatccttagatgatttatgtaaggtttatggtcgtatttgtgcttattctgctcaatggatgcctagaactgaaggaactccgactgtagatcattttgttcctaagtctgcaaaaccagaatgggcttatgaatgggataattttcgccttgcttgtttaaagttaaatgctagaaaacgcaattttttagacgttatagacccttgttcattacaagaagattgttttattctcgattttccttctttatttattcaacctaatccaaatattttagatcctcttcaaaacagattagttactacaattaaacgcctcaaacttaatgaagatgataattgtgtaaaaggaagactagattggctactaccttattgtcaaaaagattatccttttgaatatttaaaaagcaaagctccatttattgcttatgaattagaacgtcaaggtttagtagaggtagaaaaaatagcatatatcatgggagtacgataa

SEQ ID NO: 86838 - DNA, 1341 bp, Anabaena cylindrica PCC 7122
atgagagttaagcagcttaaaatgcagtcttttcgcggtattggcgatttgactttggattttgatgaaaaagagccgacggtgcttgttgggattaatggagtgggtaaatctagtattcttgattgtcttgctattttgttgtcacagatgatgatgcggattattagtcctgaaatagggggattcggtatccctttcccttttatcccttctacacatataggacccagagaaaatgcacgagctattcctggaaaccctgatattaaacttcgttcttttggcgaacaggatattaagaatggaagtaatgagacataccaagagattggaattttattggaatcaaaattattaaactggtctattaaaaaaaataaaattagtggtagtgaagatagtaaatataagcaattaaatacttttacagaaaatctttatctaaaatgggtagaaaatcctcgattcaacttacctctagcagtttattattcggtcaaacgttctgttgttgatattgatttagaaatcattgatattagttcatttaaacaaatagatgcttatgatcaagcactaaatggtatcaaaataagttttgagagattttttcaatggtttaggtctatcgaggatttagaaagcgaaatgttgagagataatcgtgactataaagacaagcaattagaagctgttaaaagagctatatctttattaattcccgaattttataatttgcgtgtgcgtcgttatccaactctcagaatgactttacagaaaaatggtgaagaactaattattaatcagctatctgatggtgaaaaatgcttattagcaatggtgggagatttagccagacgtttagcaattgctaatccaggtttagaagatccacttcaaggttatggtgttgttttaattgatgaaatcgaattgcatttacacccaaaatggcaaagaatgattattccttctttaacaagaacatttccaaattgtcaatttattgttaccacccattcaccccaggtaattagtgaagtaaaacctgaaggaatttatgttttaaaaaaaacagataatggtattattgctgtgcatcctcaaagttcttatggtagagatagtaatcaaattctagaagacgtaatggatgatttcaaacgtcaaaaagaacttcaagatagtctacattatttatttcaattaattgaaaaaggaaatctggatggtgctaggcaattatctcaacaaattgctgatatcatcggagaagatgagccagaattagtaaaagcgcgtgtatctattaaaagaaaagagattttaaaacggtga

SEQ ID NO: 86839 - DNA, 642 bp, Anabaena cylindrica PCC 7122
gtgaaatatatcaataaaaatgaggaaccaaaaagttttactgcttggaaaaaactagaaaacgacgactggaaaccaacctggggtaacttcagtaaaccacagaaaactgatgtacataattccttattacaagaacaaggtcatatttgctgttactgtggaaggttgattaatattgacaatagtcatattgaacatttacaaccaagaggaggctatggtcaattatctttagattacacaaatttacttgcatcatgccaaaaagatactgtacccaaagaacctttacattgtggtaagaaaaaagataaatggtatgataaaaagttaatggtttcaccattagatattaactgtgctgagttttttagatatacagaagatggacaaattttatcaacagaaaacccagataaagcacttgctgctcaaacaactattaataaacttgacctcaatattgataagcttaaaaaaatgcgtgttggtgcaatagaagcaattttagaaggtttagaagatttgacagatgatgagagagaaatactacttcaacgctttagtcaatctgatggaaatggtcaaaatcaagagttttgtgctgcaatagtatatatccttaaacaatatatttaa

SEQ ID NO: 86840 - DNA, 1305 bp, Anabaena cylindrica PCC 7122
atgaaaatacaacagcttgaacttcagaattttcgatgctttgaacataaaatttttgagttctccgatcaatttaacgttattatcggtgataatggtactggtaaaactgcattttgtgacgcgataggattgataattgcagtatttatatatcgtcttgctgagattagagaaaatacatttcaagataaaagtcgaatccaagattcagatattagacaagttagaaatcagaaaattgaatggaaactacctgttggattattttgtaaatctataattaacgatgttcaacttcaatggtcaactactcgtataaattctagaataaattctataaaccaatctctaaatattctccaatttgcagattatctaagagaaaaagtgaacaattctcaaaacatcaaccttcctttagtagcatattatggaacaggtaggctttggtggaagagccagaataatcaagcgttagaggataatcaagcgttagaggatatgagaaattcaccaacaagacaatctcgtttttggggatacacagagtgtcttgatcgtagatcaaatttaattcttgattggtttaaatttgaaattcgcttcggagaaggatctgtaacaactcatccagcaattttaaatgctctatctgtttgtcaaatagataattggattgagataaaatacgatgatcgtgaagataatttagttgtgagatccctggatggaaactcccaaatttttaataaactcagcgatggtgtaaaaaatatggttgccatggttgccgatattgcttatcgtgcagcagtcctcaatcctcatcttgaatctgaagctgcgcgacttacaccaggtattgtactgattgatgaacttgatttacaccttcatcccaaatggcaacgtcgagtagtcgaagatttaaaaagaacatttcctaacattcaattttttgcaactacccattctgaacatatcatccaatctttaagagacggagaacttattgatctcaataatccagatttaataccagcagatgaatatgaaaacaaaaatatagaatacataacagaaaatgttatgcacgttcctcatccatatagaaatgaacgatacgaaaggatgatgaaaacagcagaaagatactatcaaatgttagaaaatgctaataattcatcaccagaagaattggaaaaattaaaaatggaactggatgaattaatagaaccatatagtgatgatgttgcctatcatgcttttttaaaaatggaacgtcttgctagaggattataa

SEQ ID NO: 86841 - DNA, 747 bp, Anabaena cylindrica PCC 7122
atgaggccagttattcgaggtaagaatactaaagtttttaaagattataaaaatgcacgaggagatttaattaatcaacttggtgaatactgttcttactgtgaaatgcgtattggctcatctatcgctgttgaacatatattaccaaaagcaaaagagcaatttcctgatgaagaaactaattgggaaaatttgtgtttagcttgtaataactgcaattcaactaaaaaaggggctatggataagagatggaacagttcatggaaacatcttcacataacctctgctaaaatagccgctagaagtgaattttattggattgatcaagataatacttttcgatgtgtagaatatagccaaggtggattggttacgataaatccttctttaggtattgaagaacaaaaagtagcacaagcaactattgaaatggtgggacttgataaaacacctaagcctgatatgcaaatgaaagatcgccgatggataaatcggaaagacgcttgggatacagcagaaaaatatttaaaaatacttcgtcaatataatgataaagaatcactaaaacaaatgcaagatatcatcgttagtcatgcagttgataagggatttttctcagtttggatgacagtatttaaagatgatcctgaaatgctaaaacgttttatttttgcatttccgggaactgctatagattgctttgatcaggaaggaaaggctattcatcgtcccaaggcaagaatatga

SEQ ID NO: 86842 - DNA, 1227 bp, Capnocytophaga sp. oral taxon 332 str. F0381
atgagatatatccataaaatacatatcaataagatacgacaccttcagaatatagacattcctatagagaatgacacttaccctcatcttatccttacaggaaaaaatgggagcgggaaaacatctgtacttcaggctatagctaatcatttggaaaatatagtatataactcttataattttttagacctcgaacagaatataaaatactatgaagataagttaaacaatggggataatggtgttgaaaatgagagatggttagcatcttacaaagaacaatgcgctttttattttggcgaagtaaaagttgatttctacaatatagatgactttataagtaaataccaaaaaggggaatttatcattgctttctatcaagccacccgaaaagtagtgattaatgaacccctaaaccctaccaaaccgactattaaagaagtatggaacactaaagaaatcgctaccatagagtttttaaactttttgtccgaccttaaaatacaagaagccttagctcgtaatgaaaaattagatagcgaagctgatatcataaaaacttggtttgttgattttgaaatacttctaaagaaagtatttcaagatgaagcacttcagttgctatttaattataaagattattcttttcagatacttacccaaggcaaaacatttaaatttactgaaatgtctgatggttttgcggctgtgctggaaatcattatagaccttatcctaaaaatgcagcgtaaggacaccctcaccagagcttaccagcagaaaggaattgtgctgatagatgaggtagaaacgcatttgcacttagaactacagcgcttggtattacctttgctcacccagctattccccaacatacaatttatcgttactacccattctccttttgtactaaactctataggtaatgccattgcttttgatttagagcaccaagagttggtagatgatcttaccgaatattcgtatgaatctttggcggagggatattttggggtaagaacctcttctagctatgccgaaatgcaattggataagctcaaaaaactcttagaaaaagaaacacttctgagcagtgaaaaaagcgaactaaaaagccttatcaatgattttgataaaatccccgaagttgtttctcccttgatagtaggcgaataccttcgcttgaagaaccaatatatagctgttataaactctttggaagtatga

SEQ ID NO: 86843 - DNA, 651 bp, Capnocytophaga sp. oral taxon 332 str. F0381
atgataaaagtattcaaaaaaacaacaccgcctgaatccttatctgctcaaaaaaaatatgattctgaagaggtaaaacagcaacttatcgccgatcatcagggtaaatgttatctgtgtgagcgagtgctaactactgattttcaagtggaacaccttcatagccaagaacattttcccgaagaaaaatacgattggcataatctttttttatcttgtagttattgtaatggcaagaaaagtaatctctttgatgatatattgaatcctgcccaagagcctatagaaagtcttattactcaagagttagattatctcaataaaaaagcagtctttaagcaggtgggtacttcagcttctacagaagtacaacaaacgctctctcttttagagagaatttttaatggcactcataaaatgagaaaaacaaaagaagaacgcttttttgaagattttctcagtaaaatgaatgcttttcagaaagccatcaataacttcttgatggctgataatgaagaaacaaggcttgttttacaagaggaattaaccataaatcgagagtttttgggttttaagtattggatcatacaaaataatcctaagctcctcagtgaatttgctcaagatattatttggaataaaaactcctaa

SEQ ID NO: 86844 - DNA, 1206 bp, Enterococcus faecium EnGen0026
atgacaaaaataagtattttgggagacaaaatgaaaataaataatttgcatattactaacgttggaaatatttcagatttagatttaaatttcaaccctagaatgaatgtaatttgtggaactaatggaattggaaaaaccacaatattaaactcgatcgcagcctgcttttctgttcaaggaaataatcttaagaaaaaatatggcagtgaagtaggaagtgttgatatttcgattgatagccaaatgaccaatcaaactggtctaagtattgttgtaaatgctgttgaacctttagaagaatacagggtaaggaatagagaagagtatctatacagacagttaattaatttttctattgcacggagtattaattatagagagttatcaagtctttctaagtaccctaatagagattattggcattctataggaatcactcaaactggattgactgatgatcaattaaaaaattggttgataaatagatatatggcaagtggacactgggatgacttagaattttatgagcaagaaaattttaaactcatgaaaaaagtattttctataatcaaccctgatatacaatttaagaaagcagatgcaaaaaaatttgaaattttacttaataatcgaggaaacgaagtatattttgaattcgaatctgctggctataaagcgattgtttttatcttattaggtattatttcagaaatagagtttagaatgttagataataaaaaaccggctaaagaatttgctggagtaatattgatagatgaagtagacatgcatttacatccggcttggcagcgtgaaatagttagagcattgaaagaaacattccctaatgcacaatttattatcactactcatagtccaagtgtattacaagatctcgaaagcgatgaaattattcctttggagatagacgagaaaaataatgttaaaataagaaaattaaatttgagtaaatatggactaaaaggatggaccctagaagaaattctttctgatgtaatgggtgtcgaatatattaacagtaatttatacaaaaaaacaatggcagaatttgaaaatgccttgaataattcaaattcaataaatttaaaagaagcgtatcacaaattagacatgatgcttcaccctcagaatcctcttagacaaattttatctattcaaatggtggggatcgaagatgattaa

SEQ ID NO: 86845 - DNA, 747 bp, Enterococcus faecium EnGen0026
atgattaagcttgatagaatagatccaccggaaaagttaacatctattgaaatagaaaaattaacggaagagtttaaaaaaactaataagagtgtctggggaaaagaatatataaaagaacaattactccgtatgagtaataataagtgtgcatattgcgaagcgcctttggatatttcgggttcttatatggaagttgaacatttttttcctaaaagtaagtatccggataaagtagttgaatgggaaaatcttcttccgtcctgtaaaagatgtaatgtaaaaaaaggcaaccacgaccctaatatagaggggatcattaatccagcatatcataatcctaaagaacatttatatttaaaaaggtacaatattattggaagtgatgaattgggttcttctacagtttctatacttggtttaaatgatatggatacactagttcttaatagatttaaaattagcgaagaattaataagtaaattggattctatctgggatgatatccaaatatgtaaagtgactgaagtgaaaccgtctagaataaaaaaaattagaaacacgatggaaagtcttttgaaattaattcaaaaaaataaaaactatagtggaactttatcagcaatattattgaatgaagaaaattatagatacatcaaaaattattttatagaaaataatttatgggatgaagaatttgttgcgttagaaaagtctgctgaaagtatatgtttaaatataaaataa

SEQ ID NO: 86846 - DNA, 1431 bp, Pseudomonas putida HB3267
gtgaaactgaatttgctgcgactgaagaatttccgctgctatgccgatctggagatatccctgcattcgcagcttactgtgctggtagccgagaatggccagggcaaatcgaccctactcgacgctgtgcgcattgcactctggccctatgttagcagcttcgatctctcctccacggggtacaacgatccggccaatagcattgccatcggcgatgcacgcttgcaacgaatgagtgatggcagcatgtcgcgttgcttgccaagtagtgtgcagatgaccggagactacgggggcgggctgtgcagttggttgcgttatcgcgacagcgaagctgaaaagaccaagaccaagagtgatggcgaaactcgacgtatggagcagtgggtcagtgctctgcaacaaagtatccgcgatcctcaggttgggtcgcagactttgagcgtttttggttactacggtaccggtcgtctgtggtcagagaagaagctgacaaaggcgcagaaggctaaggacgagacgcaggataccgatttctacatccgcaccttcgcctaccgtgactgcctggatcctgcttcgacttacaagcatttcagagcctggttcatctgggcttcgcaaagctaccaggaacagcgtctcaagaggctggatgggcgggacaatcaagaggagttgcagcaagcagaattgcgcctacaagttgtacggaaggccatcgacactttcctgcaaccggctactggctggcactcgctcgaatacagcatcagccgggagaaaacgctggtgctgcaacatgaccagcacggcacgctcaatgctgaccaacttagtgacggcattcgtagcgtactggccatgatcggcgacattgcctatcgctgtatcaaactcaatccgcatctgggcgccgaggctgctcgccagaccagcggtgtggtgctgattgatgaagtggacatgcacctgcacccacgctggcaacagatcatcctttcccagttgcaggaagccttcactcgtatccagttcatcgttactacccatagcccgcaggtgcttagcactgttcccgccgaatgcatccgcgtgttggtggcggagcgagacgaagacagcggccagcagcgtatggctgttcatcccgtcactcaacaaacccagggtgtggctagttccgatgtgctggccgaggtgatgggcaccgatccggtgccggatatcgcagcagcccgccagctcagtcgctatatggcgtttatccagcagaatctggaaggcagcgacgaggcgcagcagttgcgtgctgagttgaatcagcacttcggcgccgatcacccgcaaatgctcgaatgccaacgtctgagccgccttcaggctctcaagcgccgacggccgttacgcccaagcggcgcggaggactga

SEQ ID NO: 86847 - DNA, 642 bp, Pseudomonas putida HB3267
atgcaccgacttcaacgtggcgcagcgccgatctgccttgcccgctacaggcatggccgggacaactggagtgccctggatggtgcagataggaccgaaatctggcaaacgctggaggccatgcagagccagaggtgcgcctattgcgaggcggccattgcagaaggcaatcggcacatcgagcattttgtgcagaaggggcgtgaccctcgggtcacattccagtgggacaacctctttggctcctgcaaccgcgaggactcttgcggcaagtacaaagatcacggagctggggcctacaatcctagcgacttgctcaagcctgatatcgatgatcccgaccattacttcgtcttcgtggccgacggcactatccagttgcgcgttggcctgaatgacaccgaccggcagcgtgccagcgaaactctgcgtgtcttcaatctcgatgcggaacacggtgccctacgccatatgcgtcagagggagtccgccggttatgtgttgatagctgaggaattgtggacgcttctcgatgaatttcccgaggatgagtggaagcagttgctggatgacgaactggctgccactacccatctgccttttgttagtgccatccgccatacgctatgccggatgagctga

SEQ ID NO: 86848 - DNA, 1398 bp, Escherichia coli KTE124; identical to SEQ ID NO: 86202

SEQ ID NO: 86849 - DNA, 732 bp, Escherichia coli KTE124; identical to SEQ ID NO: 86109

SEQ ID NO: 86850 - DNA, 1398 bp, Escherichia coli KTE137; identical to SEQ ID NO: 86202

SEQ ID NO: 86851 - DNA, 732 bp, Escherichia coli KTE137; identical to SEQ ID NO: 86109

SEQ ID NO: 86852 - DNA, 1398 bp, Escherichia coli KTE153; identical to SEQ ID NO: 86202

SEQ ID NO: 86853 - DNA, 732 bp, Escherichia coli KTE153; identical to SEQ ID NO: 86109

SEQ ID NO: 86854 - DNA, 1398 bp, Escherichia coli KTE160
atgagaatcgacaaactgtcactgcttaactttcgttgcttcaaacagctcgatatcacttttgatgagcacattacgattctggttgcaccgaatggcgcgggcaagacgacagtgctggatgcggtacgcctggcgctgttcccctttattcgtggttttgatgccagcctctacgtgaaagataaatcactagcgatccgtaccgaagacttacgtctgatttaccgccaggaggcactgaacatggaaatgtcgtctccagccaagattacagctaccggagaatgggcaagcggaaaaacggcaacctggatgctcgataaacgaggagaacagccgccacatgaagataagatggcggcgcagcttacccgctggggtgagcaactccagaaacgagtacgtgaagagcatagcttgcaacaagttgaacttcccctaatgctttatttggggactgctcgcttatggtatcaagaacgttatgaaaaacagcctactgagcagcgcctggataatagtgccttttcacgtttgtccggctatgacgattgcctctcagccacatctaactataaacagtttgagcagtggtatagctggctatggcttagctaccgtgaacatcaaatcacacaacttgaatcaccttcagcaaagttaaaagaaggtgttcgtgttcaacggatgaaagaagccattcaggctatccagcaggccattaactgtctgacccagcaggtgacaggctggcacgatctggaatacagcgccagccataaccagcaactggtaatgagccatccgcaatacggcaagatccccttatcccagctcagcgatggcttgcgaaatgccgtcgcaatggtggcagatatcgcatttcgctgtgtcaaactcaatcctcatttacaaaatgatgcagccttaaaaacgcagggaattgtgctgatcgatgaagttgatatgttcctgcaccctgcctggcagcagcaaattatccagtctttacgcagcgcatttccgcagatccagtttattgttacgacccatagcccgcaggtgctcagtacggtaaaacgcgagtccattcgtctgcttgagcaggatgagaatggcaacgggaaagcgttgatgccgctcggagcaacctacggcgagccgagtaacgacgtgctgcaaagtgtaatgggcgtcgatccacagcctgcagtgaaggagaaggcagacctgcaaaaactgacaggatgggtggatcaggggaaatacgacgagccgaaaacgcagcaactgatggtcgcattggaagttgcgttgggtgagaagcatccacagcttcaacgcttacagcgcagtattgcccggcagagactgctgaaagggaaagcgcaatga

SEQ ID NO: 86855 - DNA, 732 bp, Escherichia coli KTE160; identical to SEQ ID NO: 86109

SEQ ID NO: 86856 - DNA, 1272 bp, Escherichia coli KTE94
atgaagctcagaaatatttcgctgacaaattttcgtggcattcagcaggctgatgttgccatcgctgataccccgacggtgattgtcggggtaaacggtgcaggtaaaacaacgctccttgatgctttagcaattacgctttcgcaggtcacgagccgtatttatgacagtgctcaaagagcgcgcagcttttcccgggatgacatttttatcgccagtgactacacacgcgcagtggtggatctggaactcgaaaatcagagcgtaacgtttgcgctagcgttaaataagcgtgcggggaaacatccggcagaacggtcaagttatttcgatgttctcaacgcggttgtacagcccctgacagagagaaataaaaatttccttgaaagtgagccgacagccatcagtttgcctttggctatctattacgatgttcaccgcacagtgatggagatccctcttcgcgtcagagaaaagctgaaaaatacgccagctgaaggctatgaagatgccttagcaaatgggggggcagattttaaacgtttctttaactggtatcgtaacgaagaagatctcgaaaatcaggctaaacgacgcgaccattattttacggaccccaaactcgatgccgttcgtcgtgccatcgagacctttacccactttagcgatcttcatattgaccgtaaaacgccattacgcatgatagtgacaaaaaaagggatggagctgagcgtgaaccagctgtccaatggcgaaaaatgcctgcttgcacttgtgggtgatttggcacgtcgtctggcactggttaatccgttatcatccaatccgctgctcggtgaagcgattgttctcattgatgaaattgatctccaccttcatcctaaatggcaacgtgatgtactgaagaaactgacggaaacctttcccaattgccagtttattgtttccacacattcaccacagattattggcgaaattccgcctgaaaatgtgcttctggtgcgtgacggttgcgttttagggcatccctcttctgcacgcggtctgagcagcgatgaggttctggaattgatcatggaaggcgactcaagaaatcctgcgattaaacagcaaattgaaagcattgaggcgtgtctcaacgaagatgatgttgaggaagcccatcaacaattagcgcaactggaaaagcaaataggcagtacgcctgatgtaatgcgtttacagagtagtattgagacactggaactgttactcaacggtgatcgtcaatga

SEQ ID NO: 86857 - DNA, 783 bp, Escherichia coli KTE94
atgaagtcacttgtccgaggggctgaaccccgtgagttgcttacctggaaatcggataaccggttaacacctgaaaatctcaaatatggcagagccggttttccctcagaggtccttcgttgtgcgctgttgcaacagcaacattatttgtgcgcatatacgctcatcaggctcaaaaaaccgcaagagtgcagtgccgattaccaaacacgcgaaagttgccatattgaacatatcctaccgcaaacgcgcggagagttagtcgaaaaaaagcgttctggagatgaggtaaaagaggttgtcaatttcacacccggtgaagacattgattttcataatatggtggcatgctaccccccaagccagcataaaacacattgtgcttttggtgcacagcataaaggccattacgatccttatgataatcccttgtttctctcaccgctgacgccctctgtcgagtcgcatttttcatttttttccgacgggcgtattgaagccaagacagaaagggggcaggaaacaattagtgcgttacgcctcgatcatgacgaactctgttatcgacgaaaatcggtgataacaggcgcaatatatcccaaaggcagtaatcgtgaccccatttcagcttcagaagcgcgtcgccttgccgcggaagtattacaccctgcgccggacggccggttacgcgaattttgcattgcgattcatcaggtggctctgtggcatgcgaataaacttgaacaacgtgcaaggcgaatggccgcccggcgtcgaggctga

SEQ ID NO: 86858 - DNA, 1398 bp, Escherichia coli KTE174; identical to SEQ ID NO: 86854

SEQ ID NO: 86859 - DNA, 732 bp, Escherichia coli KTE174; identical to SEQ ID NO: 86109

SEQ ID NO: 86860 - DNA, 1398 bp, Escherichia coli KTE167; identical to SEQ ID NO: 86854

SEQ ID NO: 86861 - DNA, 732 bp, Escherichia coli KTE167; identical to SEQ ID NO: 86109

SEQ ID NO: 86862 - DNA, 1608 bp, Rhodopirellula baltica SWK14
atgcgattggatcgcgtctacatcgacggttttaagaacctgaaggacgtgaacgtcgatttcgacaaagaccggctcactacggtgttgattggtcaaaacggcgccggcaaatcaaatctgattgaggcgattgtagaggtgtttcgatccgtcgatctcaaagaaaaagcgtacgttcccaaattcgtctacgacattgactaccgcatcaacggacaaagcatccgcctatcgaacaaagacggcaagccgacgatctttgcgggtgagagcgtcgaatcgctgaagccgctgtcacgaaaggcgttcgacgacgacaaagccaactattttcccgatctggttttcggctattactcgggtggcagtcgccggctggaaagtctctttgaccgacaccaacgaaagtactacgacgcgatcaagttgaatgatgacttggatgcatgccgcgaggctctggtcaaccggcggctgttttattgtcgtccgattcacggcgtcttcgcattgctggccttctacgcctaccccgctccagcagtggcgaacctgctcgaggaaaagctgggaatcacgcaatttgattccgtattgacggtcttccgaaaaccatggtttgccaaaggagcaaagaagaatgcgttgaacgacgctctgaatttgtggggagcgaaaggacctgccggttggtgcggacgcaaattccgcgacttggcgcttcacccgctcgccttgatggatcgtcccatcgacgactaccgagataagggcacagatgagccacagttcgcagcgttttttcgtaatgccggaccactaaaggaactagccagccagtacgaagacgatcgcgacttctttgctgcgatcgaagcaatggacatttccgatcttattcgcgatgtgcatttgtgggtagatcgcacgaacaacgacacgggcgatgtaagcttcaatgacctctccgatggtgaacgtcaattgctaatggtgctgggattgattcgcgtgtcccgcgggcgaaacgccctgtttttgctcgatgaaccagacactcatctcaatccgcattggcaattaacctacctcgacttggtccaggaatggacggaagttgcttccgacgaatccgattgccatatcatcctgacttcacacaatccactgacgattgcagcccttgatcgcgaggaagttcgagtaatgacccagcgagaagacggcacaataacggcacaagctccatatacgcacccgcgcggcttgggcttcaccgcaacactgacagaaatttttggattggaatcgacgctcgacccagccacgcaagaagacatcgacacgcgaaacagtctggccgcaattgacaagcggacgaaagggcaagaagagaaactcatcgagatcaatgacgagctcaaccgacgagggttcatgtttgaggatcgtgagccgctctacaacgatttccttaagtcttggcacgacgttcagtacgccaatcgacctccaatgacgccggaacaactcaagacacgccgtgaagcaatgaatgacctcatcaagaagctcattgcaaagaaagccgagggcgagtcatga

SEQ ID NO: 86863 - DNA, 867 bp, Rhodopirellula baltica SWK14
atgatttatgttcgtcgcgacagttcgattatccccgccgaagtcttgaacaaggcagaaaaggctcaggaagaactcgagaaaatctgcgatccagcaaagcgtaaagagttcatcaagaagaagtcggcaatttggggagcattcaaagcatgcctcgccaagatgtcgtatggcaaatgctggtactccgagagcgacgatcctcagtcgttcttcgatgtcgaccattttcgcccaaaaggcgaagcgaaacgcagcgacaaacacgttgacgactttgggtacgactggctggcgttctcttgggagaacttccgttattccgccacaaagtcgaatcgactcttaaccaacgatgaaacaggagatgttgacggaaagggaagttggtttcctctggtcgacggtagccgaaaagctcactggggtgatcgttgtgaaaagaacgaaaaacccgttctgattgacccgtgcaacaacgatgacgtcaaactattggacgtagatgcaaacggacgcattgtcccaagcgtattcgcggtgggaaccgcagtgcaacgcgtaaaacgttcggctgagatctacgggctgaaccatccgagcattgtcggcaaacgaaaacaactgatgcgagaactctcacaattgctcgaaactcttgccgacactctggttgctgccaaggccagcggcacccttgactccgtcgccgacacactcccagtcgaaaaacaactgaagttcattgagtctaagacaaagcgatcaagcccttacgctcttacagctcgttcgtacttgacagacaacgggtacggacggctttgcgtttcccctgaggaagactgcgaatcaatcaaatga

SEQ ID NO: 86864 - DNA, 1422 bp, Microcystis aeruginosa TAIHU98
atgtggccaaataagctagaattttatcgatcgctgttattctctgggggaatgtccatgtgggttgaaagtataaaactcgaaaacattaaatgcttccagaatcaagagattaaatttattagtaatcccaatcaacgtcgtcaggatgctaaaccttatcattggatcactttattaggagaaaatggagtaggaaaaagcacgattttacaggctttagctttgctgctcgcgggaccagaagcagccaaagaattattaccacgtccgaccggttggatatgtaatcccaagacaccgggtaaattaaccgcagtgcttcatcaagaagatggggatgcgggaaaatttggtacggataaaactcgaaaaacttttgcttattcctattttgttacaggcaaggaaaggttagagttaggaggcagtaaggacaaacaaacctatacagaaccagcattaatcgaagaaaatagcaaaattttgggttggttgcgagccaatgcttttgcctccgatagtcatggttggtttgccgtcggttatggagctttccgtcgtttgacacgagtgagtcaagtgattattcctagtcttgaacccccgcaacgctctagcaactttttcagccaatttaatgaggatacatctttaagttcttttgagagatggatggtgtatttagattatcgaatagccaaaaatcctgaagatagtcaagcaaaacaaatgaaaaaaatcggcgaagaagcaattactaaactgttacccggtaatgtagaaattgctgaagtaactgccgatggcttgattcagtttctagttaacggtcaaaaagttccaaccattagtttatccgatggttttcggagtatgattgctttagctggagatttaatttggcgattattacaatccttccccaatctagataaccccacagaggcttctggagtcgtcttaatcgatgagttagatattcatttacatccttcttggcaaagggaaattgctggatggttacaggaagtttttcccaagcttcaattctttgtcgctactcatagtcctttaatcgctgccggtgcagggccaaattctttaaccctacgaattgatctggtagcgggtgaatcagagattgtagaaattccttatttagaattagcggctaatgttgatcgtactttaacaagtgctgcttttggtttgaaatcaacctatcccactgatacagaaaataaaattaagcgttaccaccaactaaatcgtaaaaataaaaatctggcagcagcagaaaagcaagaatatgaacaactgtcattatttgttcgagaagttaaaccctttggcgaaatcagtcaacctaatagtttagaatcccgaattgatgccttactagaggagcgtttatcttga

SEQ ID NO: 86865 - DNA, 690 bp, Microcystis aeruginosa TAIHU98
ttgattcctgtcaccagaatatcagagccacccgtattagctaaaaatgccgctcgttggctagaggctttagaatcaataaaatcaaacaacaaggcaactaaagctcaaattaaccaagcacaaaataaatacagtcatccgcaagttaaagaagcattagttaaaatgtttaatgggaaatgcgcttactgtgaaagtaagattacagtggtaacttacggagcgatcgaacatttttatccaaaaagccagtatcctgatctgacttttacttgggagaatttactgctttcttgtgataaatgtaatgatgccaatcacaaaggcacaaattttcctctcgatgatatcacaggaaatcctctgttaatagaccccacggatggagtaaccgatccgaatacacatcttgaatttgtttgggatgaaatggcaaaattggccagtgtttatggtcgggatcggcgtggtcaaattgttgaagatttgttcgatctcaatggtatgcgtggacgaaaagaattaatcaaccatcgtagtcaatatattaaaaagttgttagcattattacgttacgccaaacaaggagactcggaggttttatctttactgcaagaagcttgtcaaccgggagcggaatattatgcttttgctagtatttatatcctgcctcatttgcctccctaa

SEQ ID NO: 86866 - DNA, 1326 bp, Pseudomonas syringae pv. syringae B64
atgtggattaaagaattctccatcgaaaacatcaaatgtttcgagcagcagaccttgaagctcgatcaggagaatactccctaccagtggattacatttctcagtgagaacggctgcgggaaaagtacaatcctgcaatctcttggcttgctgcttgcagggccagacagcatccccagtctgctgcctcgccccactggctggctgcgcgatgaacggatggcggggaaaatatctattcgagttcaccaaggtcctatggatccaggggactttggcgaggaaaaacgtcgacgcgttttcgcctacagctaccatattacaggtgaccgggctgtcacaatccggaataagatccacaccgcaccgggtgttcacgaaaacccggatcgggctttgagctggcttcggcagaacgcattcacgagcaaggggcaaggttggttctgcgcaggttacggaccttttcgacgacttactcgctctcatcagatcattgtgcctaccctagaaccgcaagctcggcataacaacttcatcagccaattccaagaagacgaagcgctggcggtttttgaacgctggatggtctacctagattatcgaattgctaaagacggtcatgaaaaagaccgcaggaccttgaagtacggtatcgaggccatcgacagtctcctaccggatgatgtgcacttcgactccatctcctccgaaggacgcatcctctacagcgtcaacggagagaaagtaccgacgctctcgctcagtgatgggtatcgaagcatcttggcttttgcgggcgacttggtctggcgcttgctgctagcgtttcctgatagcaaaaacccagctcacgagcaaggcgtggtgctgattgacgagttggacatacacctgcatccgctgtggcaaagggacatagccctcaagctaagatgtgcgttccccaagcttcaattcatcgtgaccacccacagtcccttggtcgccgcaggcgcgggcgaagacgcgttgacagttaaaatttcgaagggagacaagggcgctacgttccatacagtggataacctacacaagctatctgtagacaagatattgactaccgaggcgtttggcttggtgtcagcatattcgccacaaaccaacgaaaaaatggaacaatactcccagttattcaataaaccagataaaacgcgtgcggataaggccgctctgaaaaagctccagccccagatcaaggatcttacaggcatcccatctggcgcacaggaactggatcagaggattgataaactcctggcgagctttatagatgatcaagcttaa

SEQ ID NO: 86867 - DNA, 666 bp, Pseudomonas syringae pv. syringae B64
atgatcaagcttaagcgaccgttaaaacccaaaattctcacacagaatgaaacaacttggacggctgattacatagcagccaaggcatctggtgatactagcgcgattgacgctgcagaaagtaaatatcgccataaagaaatcaagaatgctttacgcgacatgcaccagcgtaaatgtgctttttgtgaatctttcattgagcatgtttcttactctcatatcgagcacttcaaacccaaaagtcgctatccgaaaatgcttgtcagatggagtaatctcttgctggcttgcggcgtgtgtaacgggacggcctataaaggtgaaaaattcccgactgcggctcaagatgggccacttatcaacccggctaacgaaaatcctgacgatttcctaacttatgtatttgatcctgtgacgaatgtcgcgctgatcggttacaaacatccccgagggaaaaccaccattgatactctaggcctaaatcgtccagatttagcaagggacattcgatgccaagttgtcaaaaaactattcgccttgcgaaaaattatcgatcaaccaaacgttcaggacgatgttcgacagccaatgctggacatcctgttcgaagcggctgacagcggccaacattactccgcatttgcaaaggcgttgctaccctga

SEQ ID NO: 86868 - DNA, 1296 bp, Pseudomonas syringae pv. syringae B64
atgaagtttcaggttgaggcagttaatgttggtggagaatttgttcagattagctctgaaacatataattatcaaaatgtatacaccttattggttggtcgaaatgcggtaggtaagaccagggcgttgagtaaaatcgcaaacgcatatattttttcagatagacgagaaaactcagctcatgatgtggccgagtcgcctaggtctgtttcgcagccatcacaagtgattgctgtatcgaatagcaggtttgaccgattcccaaagccgaatccatattttactagagagcgtgagctgaagggatatcattatctcggcctctcaggctttcgatcatcacctacctcagtgatatcaaaatcgatagcgaatttgatttcaagatttgaaatcgaaagagaccggtctgttaggtttgactatattttagattacattggattccttccgcgcgttattctagagctgaaaatcaattcagcgctttcgtcacaaagaaactggaactcgcaagcgtacttggaagatgcaatccgtcttacagagagtggctctaagtacgattttgaaaaagaaattttgccagcgatttcgtttttttctaatggattcaaaacaagtcgagcttcgactgttaggtacgatttcgatacaggtatgtggggtcaagatggtgtgggcgagtatatgcatattttgcctgtgctaattgagaacgggctgctcaaggttttccgaatacatctctatgacaagaaaactaaagatagagtgcagctggatcatgctagctcaggccagcaatgcatgtttttaatgttcttgggaatgtcctctttgataaaggatggctcactgatttgtatagatgaaccagagataagtttgcatcccaaatggcagtctgagtttattgagatccttcaaggggcgttttcaaactatcgagggtgtcatttcattattgcgacacactctcctcaactagtttcgggcttgacatcggagaacgggttcgtcgcagatttagaaaccagtaatcttttgcgcccagaggattatgcaaaaaaatcagctgactatcagctgagcgaagtttttcatgagcccggctataaaaacgaatatctcatcaggactctcctcgttatcctgtccaaaattaataaggggcagcctctttcaaggttggataggtcaaagcttagggagttggaatatgtgagaggccgcctagatgaaacggatccagtgcttcatcttcttgatcaagtaaaagttatggctggttaa

SEQ ID NO: 86869 - DNA, 636 bp, Pseudomonas syringae pv. syringae B64
atgatcaaggtgaattatgaaggcgcgatcaaagactttgttgatgcatatgacaaagttgatcatgatctctggaatggcactgctgggccaattttggcagttcggaagtacattcgtgatcactacttgatacagcaaggctatcggtgtgcatattgcaagattgagaaaaaagaagagcatggttatacatgggatatcgagcatatactagccaagtctatttatcctgagtttctattttatcctgagaatctcgcgatcgcttgtaaggagtgcaataatcctaaagatgatcacgatattttagttggggtgaggtcagtctcttatccgcggggtgttggacgctataaaatcattcatcctcattttgatgtttatgaagatcatattgagattgctgtggtggatggaaggcgtatttacagggttctcaataacggcaaaggaaaagctacatatacgctgtgcaatttgagtaggtttgactataaatatgccggttgggattcatttgattcggcaatggttgcggagttttcgcgcttcctcgacaattgcccagctgacgcaaatccggccgagatcaagagaatgctcggtcatctgagtttcgttgagcgccactag

SEQ ID NO: 86870 - DNA, 1266 bp, Myxococcus stipitatus DSM 14675
atgtatctgaagaaagtcgtcctcgagaacatccggtcgatggctgagctggagtgggagccgtcctcgcatccggggtggcacgtcgtcatcggagacaacggcgcgggcaagagcgccttcctccgcgcggtctcgctcgcgctgatggggcgcgacgcggcgatggcgcttcgtcaggattggagtgagtggctccgcgcgggctcgccgtccggctcgattcaggtgtcgttgagtggggactcgcgctgggaccaggccggggcctccgtgtcgtcggaggtctcggcggagctgcgactccagcgcgcggggaatgccacgcagctcgtgcccggggcggcgagcctggccgcggcgcccgcgctctggggcacgggccggggttggttcagcgccgcgttcggtccgttccggcgcttcacggacggcgacgcggggcaggaggcgctcttctcctcgcagccgaggctcgcgcgccacctgtcgatgttcgatgcctccgtggccctgcgcgcgagcctcgggtggctggagcagttggagacggggcccgacgcgggcttgctggagccgctcctggcgttcatcaaccagcccgacttcctgccgcatcagacgcggctcgactccatctcctcgcgaggcgtgcgcttcgtggacggccagggcaacgaggtctccgtcgcgagcctcggcgacagcttccagtcgctgctgagcctgacgctcgagttgattcgccagctcgcgagcacctacggcgccaggcgcctcttcgcgccgggcgatgcgctgtcgctccagccgccgggcgtcgtcctcgtcgacgagatcgaagcccacctgcatcccacgtggcagcgccgggtggggttctggttccgcaagcacttcccgcacctccaattcctcgtcacgacgcacagcccgctcatctgccaggccgcggcggaggggagcatcttctggctgccgcgtcccggcatggacgagccgccgagcatggtgaccggcatcacccgggagcggctcctctacgggagcggggtggatgcctatggcacgggtgccttcggcgacatgtcgacgcgctctccggaggcgctcgcgcaactggagcgcctggccctcctcaaccagaaggagctggagggagggctgagcgcggaggagcgtcaggagcaggagcgtctgcgcatgcgcacgccgaccgccgcgagcgtgttgccgtcccccgcggtggagcgtctgctcaaatga

SEQ ID NO: 86871 - DNA, 810 bp, Myxococcus stipitatus DSM 14675
atgattcgcctgcccgagaagccgttgcccgcggaggcgcgcgagggactggtgaagtaccagcgggagctggacgcggcgggggactacgcggagcgggtggcgcaggcgaagaagcgcttctccgcgctcaacaagattggcaaccccatcttcgaccacgtgaaggtgacgctgtcggcgatgtgctcgggcgtgcgccgctgcgcctactgcgaggactccgtcgcggacgaggtggagcacatccgcccgaagacgctctacccggaggtcgccttcgcctgggcgaactacctgtatgcgtgtggcgtctgcaacccgcgcaagaatgaccacttcgcggtcttcgccgaagggacgaatgtcctgacggacgtgcggcgcgagcggggcgcgccggtggagccgcccattccaggcaggcccgtgttcctggaccctcgcgtcgaggaccccacggagttcatggagctggacctgcgcgacacgtactacttcgtcccgcgggggcgcgcggggacggaggcgcaccgccgcgcgcagtacaccatcaccgtgctgcaattgaaccagcgtgaggtgctgcctcagtcccgccgcgccgcgtactgggactacctggcgcacctggggaactacctccgcgcgaagacgcaggggttctcgcgcgaggagctggacctgctggtgaagcaggtgcggacgcgtcaacacccctcggtgtgggcggagatgaagcggcagcatgcccggctccccgcggtgctgcgcctgttcgaccaggtgccggaggcgctgggctggtga

SEQ ID NO: 86872 - DNA, 1260 bp, Xenococcus sp. PCC 7305
atgaaagttaaacaactaaaaattaattcttttcgaggaattagtgaattgacactagacttcgatttaaatgagcctacagtctttgttggaattaatggggcaggcaaatccagcatccttgattgtcttgctattttactatcttggtttactgcccgtgttcaaaatccacaagggtcaggtagttactttagtgattcagacatcaataataaaagtaaagaaacacacaataaaataacagcctacacatctaatttacaagatattagctggtctttaactaaagttaaaaagggatacaaaaaagagactaatactaatttaagtggcataaagcagttagcagaccatattaaatgtcatcacttagctaatcatcgagcaccattaccattagcagtttattatccaaccaatcgagctgtccttgatgttcctttaagaatcaagcaaaaacacttatttgagcctattaactcttatgatctagcattgactaaagggaaaattgattttagacgcttttttgaatggtttaggaatcgagaagatttagaaaatgaaaactataaatatcatccagaacaagggcaagacaaacaattagaagcagttagaacagctatatatcaaatattggaagggttttccaatttaagagtagaacgctcgcctttacaaatgactcttgaaaaagaaggtcaaaaattaattgttaatcaactatctgatggagaaaaatgtttattagcaatggtaggagatttagcaagaagactagcaattgctaatccttattcccaagatgtactaaaagaagaagcaattgttctcattgatgaaattgaattgcatcttcatcctaaatggcaaagagacattatttcagcactcaaaaggacttttccagaatgtcaattcattgttacaactcattctcctcaagtattgagtcatattaaacctcaaaatatttatcttttagaaaaaaatactgaaggaattattttcagaaaaccgaaaagctcttttggtagagatagtaatagtattttagaagatattatggaggtttcagaacgcccccaagagatcaaggaagatattcttaatctgtttcaacttattgatgaaggcaacttagggaaagctcaagaattacgtcagaaaattgctcataaaattggctctgacgaaccagaattaatcaaagctggaacttctattcgacggagggagattcttaatcgttga

SEQ ID NO: 86873 - DNA, 648 bp, Xenococcus sp. PCC 7305
ttgaaatacatcaaaaaaaatcaaccaccacaagactttattcaatggaaaaatttagctaatgaacattggcaaccaaactgggataactttcaaaaaccacagaaatcttcagttcataagtcattattaaaagaacaaggcttgatttgttgttactgtggaagaagaattaatcaaacagatagtcatatagaacatttaaagccaaggaataaatatccagatttgactttagattacataaacttaatagcttcttgtcaaggaaaaagtgatgctatccactcaattccagtacattgcgggcataaaaagggagaatggtacgaagaaactttgatggtttctcctttagatgaaaattgtactagtttttttcgctatacagatgatggacaaatattagctaccgcagattcagataagcaaacagcggcggaagaaactattaaaagactagctcttgatgtcaataaactaaaaaagatgcgcgaaaaagcaattgaaggaattttagatgatatagatttactttctaatcaagacttaaataaccttatagatgcttttgaaaaccctagtgacaatggagtatatgaagaattttgtagtgcaattgtttatgttctcaggcaatatttatga

SEQ ID NO: 86874 - DNA, 1275 bp, Xenococcus sp. PCC 7305
atgcatatagaagcactggaattagaaaattttcgaggctttaataaaatattcttagaaaagataccaaaaaaattagttataattgttgggattaatggtgctggaaaatctagtatcctagatgcaatttcttgttttttatcctacataatttattgcctgaatccagaaaagaatcttattaatgtacctaaattattggaagataaagatattaacaatgaaagtttattcacgaaattacaaataaaaactaattttggttattgtcaaattcacaaaaaaaagggaactcaatggcaagacactacagtaagtgagaattcacatgctgatctcaaaaaacaccttgtattcatacaaaaaagttggcaagaaaattctcaatataatattcccttattcgtttattatcctgttaatcgcaaagttgctaatatatctttagaaactcctaagaaagattattccagacaaattgatgcttattctcaaggaagaaaaggattagttattgattttagtggctttttccagtggtttcgacaaagagaagatatcgaaaatgaattcaggctaaatcaagacaataattatcgcgacaaacaattagaaactgtgagaaatgcgattttgcagttaatgcctaattttaccagttttagagttagaagatctcccccacccttaagcttaacgttaataaaaaatggagaatccttagtaataaaccaactttctgatggagaaaaatctttaatcgcaatgatcggagatttagcaaaaagattagtaatcgcaaaccctagtttagatgatcctttagagggagaaggtatagtactaatcgatgaaattgaactgcatttacatcctcaatggcaaagagaaattattcccaaattactaactatttttcctaattgtcagttttttattactacccattctcctcaagtcttaagtaatgttcaaaaagaaagtatttttattttagaggatttcaaagtcttagcagagactccccatagttatggtagagacagtaattccattttgtatgatttatttaatgttcctaatcgcccgcaacatacccaggaaattattgataaaatgtttgatttgatgaaaaatgaagataagtatagtcttagtgaagcgaaagaattattgagagaattagaagctagtttaggggaagaagacacagaaattattagagcaaaaactcatttagactttgtggagagtttcaatgaaattgattaa

SEQ ID NO: 86875 - DNA, 540 bp, Xenococcus sp. PCC 7305
atgaagcctatctctcaagataaaatgaggattgaacattggacacctcaaagtgatcctctcttagtacaaaatacccagttgacactagaatattccaatttacttgctgcctgccaaggtggtgaaggaggattcaaagctcaatatcattgtgataaaagcaaggagaatgatttgataactatacatcctcaagatagaattaatttgccttttcaacaaggtaaatctagcggcattagttgtgaaaaattagttaggtttaatttgggtaacggcaagatttcctcagataacaaagtaataaaccaagaacttaatgaaattctatgtttaaacaatcaaaatttaaaagaggcaagaattatagtactaaaagagtttcaagagctcctgaacaaaaaataccctggagagtggaaaaaagatactttagaaaaatggttggaagtttattctagtaaatctaatggcaaatataaaccctattgtcgagtaataataagttttttagaagaacgcctaaaaaaaacataa

SEQ ID NO: 86876 - DNA, 1353 bp, Pseudanabaena biceps PCC 7429
atgaaaataaattcccttaaaataaaagattttcgtggtttcagagattgtgaaataacctttcctaaaagctctaacattgttgtatttattggcgtaaatggagcaggtaaatccgcaattttagatgctatgagtattatattagatgtattagttggggatatttgttatagaaaatacacggagaggagaacaacaacaaataaatttaatcaggacgatataaatttaaatgcagaaaaatatgtgcttgacatggaattttccactaaaagatatgagaaatatagtttgagtaaaaaccagttagttaatacttatacaatatctttaatgtctttaactgcgctgtcattgatcaataaaatttcattaaatggtacatataatgatttcactaacgagcttgaattaactagtcctgaatcattaaatttgccaatattaatttattatcaaatcaatagaaatattattaataacagcaaacaaccaactcctaagcacactcgtaaatataaatattcacaatgttttgcttatgaaaacacctttaacaacaatataaatccatttaatgatttttctaaatggtttagagaagaagaagatttagaaaatcaagagcaaataaatctaaaagattttacttatcggaatcaacgtttggaaattgttagaaatgctatcaacaattttttaaataaatttgaatttgccaagttttctgatttaagggtagagcgtgagcgcattcctagcaaacgaaataatcctagtgaagaatccattgtaagttcacttattattgataaagatagtcaaaagtttaaattttcacagctttcttctggcgaaaaaatgatgttgtctttggtggttgatattgcgcggagattagcgatcgccaatccaagcctagaaaataaattagaaggtgaaggtattgtattagttgatgaaatcgatctacatttgcatccccaatggcaacgcaaacttttaccagcacttacgcatactttcccaaatattcaatttatcgttacgacacattcaccgcaagttttaagtcatttgcctaaagaaagtgtctttttactggaagacaataaaattagcgatcgggaaatttatacagaagggcgcgacagcaactcaattttactcgatgcttttcaagtccccgaagttgacaaggaatatgaggtagagattaaagaaatatataatttgatcagtaaatatgatgtagaaaatgcactaaaaaagctagaaaatcttaaagaaaagcgtggggaatatgatcgtgaagtaatgcggatgcaatcatatattgacattttatga

SEQ ID NO: 86877 - DNA, 765 bp, Pseudanabaena biceps PCC 7429
atgagatatatcaaaaagaaaaaagagccaaaatcattaacagctaaacgtaatacggagggagcttgctacgatgctccacaacttgattggcaagagcaattgcttgatgaacagggatatctttgcgcgtattgcatggggcgaataagtttaaaacttaataaaaatttcgagccatctattggaattgaacattacttgtctgaacaattatgtagacaaagagggcttgactcagaattacgatgggaaaacatgttaggtgtttgtaatggagcatctggatcaaaatttcattgtgataaaactaacggcacaaaaaaaggcaaggcatacgggaatattgaacttaatatacttaatcctctagatatcacaaaatcagaaaaacttattacttacgatttgtttggacaaatattaccaaatactaataatgaagacttacagcaaaaaatagctgaagatttaaattgtatccttaatttgaatgatgaaaagttaaggcaatttcgtatagatgcgatggatttagctaaaaaaattttaaaggagaaatatccaactggtaactggacacctaaacaaattgaaaaagaaattaaggaatggaaaagtaagagcaaagagttagttaaagaaatagacggagatagcagtaagaaggctgttattaaaaggggtggtgaatatagagcatattgtcaagctgctatttggtttttagaatatctcaaatctaagcctattcataaatcataa

SEQ ID NO: 86878 - DNA, 1323 bp, Pseudanabaena biceps PCC 7429
atgcatatagaaaaattgcggatgcaaaattttaggggattccaagatgtcactatagattttccctcaaatcttgctgtttttattggtgtgaatggctcaggtaaatcaagcattattgattgtctagacaacttattatttgaattagtgcgtcaagttcttatagttcaaagaaatggtaaaggagattctttatatgacttgaattccagttttgcagaaattgatatttctaacgaatgtcgggaaactataaatgagttaacactctcatcttcagatctaaagcaacaattttctagaaatcttcaattactatatttttttggatatccgtcaagtagcgacgaagaacctcggcgtaattttgaacttagcaaatttgacgatgcagaaaatttcaaaaaatttattcatgctcaaatagatagtaaatcaaaccgaagcattccgattgtggtttgttattctaccaaaagatcagttacatattatagtttatctggaagcgatccttggtcaccgaatagagctaagccatctcaacttcattgttatacagatgctactaatcagaataaaattgatttccacacattttttgcatggttcaaacacaatgaagatttagaacaagagcttaaattagatggtgatttgaattatcaagattaccaattaaactttgtaagacaagcaattttatcaatattacccgactatacagatatcaaggttaagcgatcgcgtatgcagatagtcctaaaaaaacaagaccatgaactagtgcttaatcaactttctgatggtgagaaaaatttgttggtaatggttgcggatatagcgagaagattggcgatcgctaatccagatcctacaaaaaatgcattagaaggcgaagggattattttaattgatgaaatagaattacatttacatcctcagtggcaacgtgacattattccacggctgacaagtactttcccaaactgtcagtttattgttacaactcactctcctcaagttctgagtaacgtaaaaaaagagaacgtatttattgttgaagattttcaagtttatcctgccgattcctatacctttggacgtgatagtaactcgattttatccgaactaatgggagtcactgaaagacctgtagaaattcaaaataaactaactgaatgcctgtataaaatcgatgatggtcaaatcgaagaagccaaaatattgctgcatgaattatctgatttacttggtcataatgactcagaaattgtgaaggcaaatactctgattagttttttgtctaaggtgaaatga

SEQ ID NO: 86879 - DNA, 630 bp, Pseudanabaena biceps PCC 7429
atgaaaaagatcatcaaacaatcagagcctagatctcttgtagaacatcgatctcaagctaatgctaactatgacaactatccagacaaagataaacttagagaatctttgctaaaagaacaaggatatatttgttgctattgtatgagtcgcatcaaattagatgaaatgaagatagaacattggcaacctcaaaccaaatacatatctcgtcaactcgactataggaatttgctcggtgcttgcatgggtaaacaaggagcgcgtcctcaaaatcaacattgtgatactagaaaaggggatagtgaaattacgatcaatcccatcgaaggcgataaaaattgtgaaagattaatcaaatatcgtcctgatggtgaaatttattctactgatgaatctataaatcgtgatttgaatgagactttaaacttaaatctcgaatttctaaaaaagaatcgtaaagctgctctgtatgtcgtacttgatcaacttcagaaaaaatttccaaagacaaattggactgcaaatatccgacaaaaagttatcaatgatctgagtgataaagatgcaaatggttactatagtgaatattgccaaatagccatttggtacttgaaatataagttatag

SEQ ID NO: 86880 - DNA, 1656 bp, Escherichia coli O5:K4(L):H4 str. ATCC 23502
gtgaactcaaagtatactaaatcaccaaatgacattcgtacattattgcagtcttatgtaaataaaactgaagatggtttagaattcagtaaagagaacattcctgaagaggtatcttcgttatataaggaaattgaagatgcaccatttcttataaataaagtcgccatctcagactataaaagagtcagggatctttttgtttcgatcgacaaaaaactaacagtgtttgttggtgataatggttacggtaaaaccaccattcttgaagcattatttattgctttaagttggtttagagcaaatgttcaaaaagaagataaaagcggttttcatataaaagatggtgatattaacaatcataatgatgtcaattatgctgcaataactgcgcagtttaaacttaaaaaaataacgtcaaatattttagttacacgtgttaaagatggagtatcacaaaaaagaaataatgagttgctttctataaaagagatggcgtcattctttcgtgttgtgaattcatattatgaagatgtaagccttccggttcttgcatattactctgtatcaagatcttcaaatggtgcaggcatagataataaaagaaatgttaataattctgtgcgtcgatggactaagcttgatgcttatgaagatatagagtttgatcgccgtgacttcggtgagtttttaaattggtttatatttgttaataataaggcattgtctgaggagtccttgataccagaaaaacaaagagatcaacttgttattgatatctcaaagcttaaggtatctttggaggttttgaaatctttcagtgatgttgatagaagaacattaatagatatagaaacacaaattgctaataaagagttgattcttaatacgttaccgtctacaccaaatggtttaagtcgttcaaaagatattgttgctaatgttaaaagggcaataattaatttccttcctgaaattagctctgttgaacttcaatatactgaaaatgaagttcgtttagttttagcaaaagatgatttactattagatgcccagcaactctctcaaggggagaaaactatacttacattagtgggggatttaacaagacgcttggtgttgctgaatcctaagttaaataatccacttcaagggaaaggtatagtattaattgatgaagttgatcttcatttgcacccaagctggcagcaaaacattattgagaaattgcagcatacatttcctaacgtacaattcataattaccactcatagccctcaaattgtatcgacagttccaagtaaatgcttgcgcatccttgaggaaataaaaaacccttcgacaggcatgaaggaattacgtgtgcttttaccatcatctcaaacaaaaggtactaagaattcgtacgctttgctttatgggatgaaaacagatcctgtacctaatgtaaaagaagtcgcatggctgagcacttataagaaatttattgaaaacaggcagcaggattcggaggaagccataatgataaggaaaaagttagacaagcattatggaattgatcacccattattacttgagtgtgatggtataattcgtgtattaaagctaaaagacaaagtgcggggtgagtctggcaataaggaatctaaacaatga

SEQ ID NO: 86881 - DNA, 669 bp, Escherichia coli O5:K4(L):H4 str. ATCC 23502
atgaaattccttgctagaaatcccattggtccaggtgttttagccgagtttgactacaatattcatgactggaatgcttttaaacggcgacataaacaattagtctgggtcggtttagttgaaatgcaagggaagagatgtgcgtattgtgagcggaaaatagatattcacaatagtgatgataagcatatcgagcattttttgcgtagaagccagcataggcatttaacatttgaatggtcaaacttgttcggctcttgtgctgaaaataatcactgcggtttttacaaagatgaacagagctatcaggagcaagacctaatcaaggccgataatgatgaccccacacattttttccatttcgctattaatggaaatatggatattcgtccggggttatcgcgaaacgatgagcgaagagctgaggttactataagggtttttaacctgaatggtgaaaagggcggcgtgaaaactgagcgcatcaatgcaatatcagaaacatggtcattgatagagagatttgtttctacagctgaagagttcatcgaagagggactttatgatgatagtgtccgtaacgaacttcgagacgagtattataaagaaatagaccccagaccattctctactgcgttgcgtgatgtttttgatacgatgcttccttaa

SEQ ID NO: 86882 - DNA, 1398 bp, Escherichia coli Nissle 1917; identical to SEQ ID NO: 86202

SEQ ID NO: 86883 - DNA, 732 bp, Escherichia coli Nissle 1917; identical to SEQ ID NO: 86109

SEQ ID NO: 86884 - DNA, 1359 bp, Pseudomonas syringae BRIP39023
atggaaatcaaaagcttcaggctcgttaacgtggggcgtttcagtgatctggaagtcgctctggcacctaccgaaaagcatacgtcgaaggtgacggtgctggtcgggaacaatggggcggggaagactacgttgctcaagtctgtcgccacatcgttgagctggttggtagcgagagtgagaacgccgaaaggtgctggaatcaggatcgacgaggatacgatccagaacggcacggcgacttcttcaattcgtattgacgcttacgatgatcagattatcgactcacttatttgtggacctgatttttactgggagattgctggaaccctcaaggggcgcaaagctacctcgtctactgtgttgggcgagctgagtatactggcagagggataccgctcattgttgacggccaagagtgatgcatctcttcctcttctagccttttatccagtggagcgttctgtcattgagataccgctcaaagtccatgccagacacacgttcgatcaactggacggctacgacaacgccctgggtcggggcgtagattttcgccgtttttttgagtggttccgggagcgtgaagacagcgagaatgaaacgggtatctcgacagcgctgcttaatgagctgtctcaaaaaatagcacccggcacgccagtgtgggagttgcttgccaaagagcatgcctcgtcgcgtgaccgtcagctgaccgcggtcagaactgcgattgaagcgttcatgcctggctttacaaagctgcgtgtcaagcgtaagccgcgctcgcatatggctattgataaagacggcaagacgctaaacgtatcccagctgtcccaaggcgaaaaatcgatgatggcgctcgtcggcgacatcgccagacgcctcgccatgatgaaccccgcgctggaaaacccattacacggcaatggcatcgttctgatcgacgaagttgacctgcacctgcaccccaaatggcagcgcagccttattgcccagctcactgcgacattccccaattgccagtttctcctgaccacccattcgccgctggttatcagcgatagcaaggatgtgctggtgtacgtcatggacgatggtgagttacgcgagcaggacagtctttatggccttgatgccaatcaggttctgtcgagtgttatggacaccgatattcgaaatgaggcagttcagaactgtctggacgagatgcagcacttcgtgatgagaggggagcttgatgaggctcgtactctctacagagtgctggccgaccagttgcccgcagatcacattgaactggccagagcttcgttactgattcgcaagctggaaatacgtcgtgagaaaaattga

SEQ ID NO: 86885 - DNA, 621 bp, Pseudomonas syringae BRIP39023
ttgctggagaagtggaagcgcgcgaacaagggaaagaaatacgcggacctcgtggggcacgacgatctcaaggatgccattcgtcatgcctgtgttactgagcagcatggtttgtgcgcctattgctgttgcagaatcaccgtcgagaagggcagtgcctgcaatgaacatgtcgaagcacaatatcttgcgccgcaccgcacgctggacttcaacaatattgttgcgagctgcaccaaggccggacggtgtgacgatgcccatggtcgtcagcctctaccgcttacaccgttgatgatcgaatgtgaaagcgagctgcagtttgagctttcgggtctggtggcaggcgtaacgcctcgggcatgcgtcagtatcaagacacttaatctgggtgatactcaagcctcgaaccgaggccttgtcggtgagcgcaagaggatgattgatgcgctgttgttctcctgcagcatgaatcctggcgaactgttggctgaagaagatgatgttcttgacctgttaaaggatgaactccttgaatcagacgctcagcgtttgcttcaggccttctctccagtgctggtcaatgtgattcgtagcatccaggccgctcgccattcctga

SEQ ID NO: 86886 - DNA, 1365 bp, Cystobacter fuscus DSM 2262
atggccacgaaaagccggggaagagcacagcaggccaagagggtacgggcgggctcgcgcaagcaactcccctcgaggcccctgcccgtctacctgctttcgttgaccctcgagaacgtccgctgcttcgggccctcgcagaccctacggctcgccgatgcgcagggacgtccggcgaagtggacggtgattctcggcaacaacggcatgggcaagacgaccctgctgcaggcgctcacgacggtcgaacccgagtcgacctccagtggcgggaacttctacatgcccaaggcattcacctcccagtggcatccgaatcgtcatcaaacggatgtagcccgtttgtctgtcgaagccatgatgggcggactcctggcaggtgatgaacaagaagaacctgcccggatggaatgcaaattcggccccaaggggcaaaaatactcatggaaaggtgtctttgagccctatctctcgctggtgtgctacggctacggagcgactcgccgcatgggagctggcgcattgtccgcgccgaaagaagcccagcgcaacgacagtctcttcttggaagatgtacccctgagaaacgccgaggagtggctcctgcaagcggattacgccgccagcaaggcctcaccccaacgcggaggagccgcgcgaaagcgcgaccgaatcaaacaacttctcattgacctgctcccagaggtgagcgacctgcgcttcactcctcccgatgcgagcaaccccgatgccagggtggaggtccaaacgccctacggatgggtcccgatgcgcggcttgagcctgggataccggacgctcatcgcctggctggtagacctcgcgagccgcctgttcgagcgctatcccgagagccccaacccgctcgccgaaccggcggtggtcctcgtggatgaaatcgacctccacctgcatccgacctggcagcgacagctcatcggctacctgaccgagcgcttccctcagacccagttcatcgtgaccgcgcacagcccgctcgtcgttcagagcgccacggatgcgaacatcgtggtcctgagacgagagggcgaccatgtcgtcatcgacaacgacgtggaatccatccggggctggcgggtggaccagatcctcacgagcgacctgttcggactggagacggcccggccgccccagatcgaggaactcctcaaggagcggaccgcgctcctctccaagccccggctgacccagaaggacaaagccagactgaacgagttggagtccatgatcggccctcttcccacgggcgagacgaagaccgagcgcgaagccctcgaactcatccaacgcgccgccgagcgcctgaaggatggccggaagtga

SEQ ID NO: 86887 - DNA, 741 bp, Cystobacter fuscus DSM 2262
gtgatccgcgtcctcaagccgaccgagccgcccgaggtccttcggacgaaaggagcgcgcgccctgcgtgccatgagggcggcgcattcacgcgcgccccggagctacgagaccggcaagaagtcgttcgagttcgacccgggtatccatggacatgagaccgtcaaggcggcgctccgcaaagcacagcacctcaagtgcgccttctgtgaatcgaacttcgcccacatctcctacggggacgtcgagcacttccgccccaaggcggggtggcgtcagaaggagaaggagcccctcggtcgacctggctattactggctcgcctacgagtggacgaacctcttcctgtcctgcacgctctgcaatcagcagttcaagaggaacctgttccccttgaagacgcccaagcgaagggctcgcaaccacaaggacgatgtgtcagtggaagaccctctgctgctcgacccggcggcggacgatcccgaaaccttcatctccttccggcaagaagtgccctacgcagtggagggcaacaagcgcggggagacgacgattcgcaccctggggctccggcgggaggaactggccgagcaacggagaaagcacctgagtcatgtgaaggcgctccgaagcctcatcaggctcggagcccccgaagccccagaggcacaaactctgctccaacgcatgcagcaggactccggtgaatacgccgcgatgacccgcgccttcctgcgctga

SEQ ID NO: 86888 - DNA, 1458 bp, Cystobacter fuscus DSM 2262
atgtacatccgccacctcaaggtcgagcacctgaagcggctcaggagcttcgagctcgacttcacgcaccgtgaccagccgcgcatgtggacggtgctgatcggagagaacggaacggcgaagacgacgctcctccaggccatcgccctggcggcggcaggatacaaggaggtgagcgggcttgcgggttcaaccgtcaagcacatgtccgaccggcgcgacgagagtcgcatgtccatcgacgcgacgttctcgtttggccccatgtcgcttgggggtggcaaggcgatccacccgcatctgccacccacgagcggacacaagccgcgggagccgctcctccgctcccgggtcagtctcgaggccggctcgacctcgctcgatgcctcttccttctacggcagcaagcccttgaagcagaaggagcagcatcccgacccgctcgcggaggcccgcgccatgaatacgcctctctggttcgtcgcgggctacggcatctcgcgcgcgctccccaatgcgcttgagatccccaccctggcgcgtccttccatcgagcgactggagcccttgttccggcagatacagctcgtgtcgaccggcttcgcgaaccacttcttgcagaaggaccagaaagagggccgcaggctcggagagacatcacgccaattcagtcgcatgctgaatcaggcggtccagctcggaggtgcagatctgttccccagcctcgcgcgtctcgaactgcgggggaagggaggcgcccggtcgagcacctcgctcatcgagagcgaccgcttctaccaggtgatggccaggggccaggctccggtcgcggtcgcgggggtagcgctctcccatggctaccagtcgaccttcgcgtggatcgccgacctcatcggccatgtgctgctcgaatcgaagaccgaactcgacacgaccgacatggaaggtctcgtcctgatcgacgagattgacctctacctgcacccgacctggcaggccagcttcatccccgctctgcgccgcgtgtttcccaacatgcagttcgtcgcgaccacacactcgcccgtcgtgctctcgtcgctggctccacacgaggtcgtccggctcgtcgtcgacgaggagaccggcgacatcgtccagggtggctggtcgcgtgaagatgggcggttccaccccggcatccaggacaccgagctccagcccgatccacgcatcatgacgggtggagagctgtacaggacctggttcgggctcgagggcaccacgcccaatccgatcggggaaaaactgcggcgtctccagatcctctcggcacatccagccccgtcggcggagcaacagagggagttgaagcgattgcgtgacgatgttcgcaaggagttcacccagcgcctcggagcagccgagggaaagaaagccttcgaagagctcaagacgaattgggggaccactcgatga

SEQ ID NO: 86889 - DNA, 897 bp, Cystobacter fuscus DSM 2262
ttgggggaccactcgatgatccgcatcgaccggggcgcggaacccaggggcctcaagatcgcggcgccgaagcggctgagagccgccgcgaaggtcttcaaccggcgcggcgctctgtcgaaggccctcacgaagaagttgaccggatatggcacggagaagacgaagcaggcgctgttcctcgctcaacacgagaagtgcgcctggtgcgagcgccacacggatttcagtagcgcgccggtcgagcactaccgtccgaaggacggcgcctggaggcatctgccgaaagcgacgatgaagcacgtcgaccagggccactattggtggctcacctggacgtggtccaacctgctgttctcgtgcgcacggtgcaacgacagagcccacaaggcgaactacttcccgctgcgtcccacgacagtccccgcggccgttcccaccgcgcctctgccgcgcccactgccctcgcccatcgtcgatgtgtctggcgagcaggccttgctgctcgatccggcggggagcgaagacccgctcgaccacatcacgtggcgacccgggttcacacacctccaccggcgtgaatggatctggtctcccttcggtctcaccgagaagggcgaggcgacgatcgaaatcctgaagctcgaagagctggccggacgggcacagggacacgtcattgatgccctgctgccgagtatcgaggaggtcgagcagcacctgggtgccagccgcgtcctgcaagcgcgccagcgctggcaacgcttcctcgaggacagtctctctccccgggcggagtggaccgccttcacgtggcacgcactcgcctacctcgtaccagtcgcctacaggctccagcacgggcttgccgttcccccgaggcccggcgctccctag

SEQ ID NO: 86890 - DNA, 2280 bp, Cystobacter fuscus DSM 2262
atgtacgtccgttcgctgaccatccagaaccttcgcagcttcgagtcggtggaactgccgctgtgccatccgggcgatggggccccacccgcccccacgggcgtgccgtacctggacaacgtcacgttgctgctgggtagcaacgggtcgggcaaaacgagtgtgctccgggccgtggcgctgagtaccctcgcgcccgtcctcgccatggggtcgggctacgtcccctatgcgctggtccggagggtcaagggtcgtcccaccgaagcgcgggtgaaggcccacgtcgtcctgcatgagcaggatggactgggggaggggacggatgaggagatcgcggccaccctcgtggcctcaccccgtgggtacacggatcgcttcctgatcgaggacaagccgccgtcctggcacatccgtctctgggacgaagagtcccctgccttcctggtgctgggctatggcgcgacgcgccgggtggagacgggagcgggcagcgtggagggccgcgccaaggagcggatccttcgctaccgccgggtggcggggctcttcgaggagcacatgacgctcatgcccctggccgcctggttgccgcaggtggcgcgcaaggacaagaagcggcaccaggagatcgtgaacttgatgaacgagctcctccccgagggcacgaagatgctcgggaagtgggatgaccgcgaggacccggagagcctgtttcaacggggcggttccgtattgcctttccccgcgctctccgatggttaccgggccttcctttgttgggtcggggatgtgctgtaccaccttcatctgatttgcaagaaaggtcagcggctggtggatatgcgaggggttgtgctcgtggatgaggtggatctgcaccttcatccggagtggcagcgccacctggttcccagtctgtcgcgtgcgtttcctcggctccaattcgtcctgacttcgcacagtccgctcgtcgtgagcacactctcctcccagaacgtgctcctgctggaagagcgcgaacgggcaggtggtgtgacggccacggaggtgatgcgacccggcgaggaactctacggcttgagcgcggatcagatcctcacgagccagtctttcgggcttgagtcctcacgggacgagcgcttcttcgaacggctcaaggatgtggccgacaaggcccgtgaggggggagcggaggacgcactgcgcttcatgcggatggtcgcgggtggagctgtggcggaggatgccccggtgtctgaactctcaagccgcgaactgctggttctgcgaggccatgaatctagggtagctgaggtggcgtgggacccaacaggtcgcaggttggccagtgcctcctgggacaagacggtgcgggtatgggatggggaaacgggccgggagttgtcggtcctgcaaggtcatgaggacgctgtggtttgcgtggcgtgggacccaacaggtcgcaggttggccagtgcctcctgggacaagacggtgcgggtgtgggacggggagacgggccgggagttgttggttttgcgaggccatggggacaaagtgattggtgtggcgtgggacccaacaggtcgcaggttggccagtgcctcctgggacaagacggtgcgggtgtgggacggggaaacgggccaggagttgtcggtcctgcgaggccatgaggacgctgtggtttgcgtggcgtgggacccaacaggtcgcaggttggccagtgcctccttggacaagatggtgcgggtgtgggatggggaaacgggccgggagttgtcggtcctgcgaggccatgaggacgtggtggttggcttggcgtgggacccaacaggccgcagggtggccagtgcctccttggataagatggtgcgggtgtgggatggggaaacgggccgggagttgtcggtcctgcgaggccatgaggacaaagtgattggtgtggcgtgggacccaacaggccgtagggtggtcagtgcctcctgggacaagacggtgcgggtgtgggacggggaaatgggccgggagttgtcggccctgcgaggccatgaggatgatgtgattggcgtggcgtgggactcaacaggtctcaggggggcgagtgcctctggcgacagtatggtacgagtatgggagatcagctcgaaaccaggagttctcaagccgcaaaagcaacctgcaaaagaatcgtccgtgagaaagcctatctcaagaacgtcgacgaagagcgcgaaagtcaaacgcaaggcttctcgtcgaccggtccggaagtga

SEQ ID NO: 86891 - DNA, 765 bp, Cystobacter fuscus DSM 2262
gtgaaaagcgtctacatggcgctgcaacaccacaaatgtgcctactgcgagcgccccatggccgagggggcgcatgcgaacatcgagtacgacgtcgagcacttcaggccgaagagtcgcgtcatgccctggcccgatgagaagaccgccaaggaacttcgcatccggtacaaggttcgtagcggaaaccccaagggttatccactgctcgcgcatgacccccgtaactacgtcgtcacctgcaaggtctgcaattcgcctctcaaggccgaccacttccccatcgacggcgagccgtcggacgagggcagtgacatcgcgaagctgaatgcggaggagaagccactgctcatcttcccgcttggcgtggcggatccctctcccgaggaactcatcaccttcgagggtatcctccccgtgccgacgaagcgcggaggccatgaccggaaacgagcacaggtgaccatcgacttcttccggctacacctccgaactgagctgcgcgatgggcgggctcacctgttggttttgctgtggcagaatcttgagcgtatgcaggaggggacaccggagcagcgccagcgcgccagggaagtgcttgcggcggcacgtggcaacagcttcccgcattcaagatgcgctcgtgccttcctcgacctgtacgagcgagatcccgcgaaggcgaaggattactacctggcggctcatgagttgatggttcgcaaggagcctggattgtacggccgtggcgcatcccgttcctga

SEQ ID NO: 86892 - DNA, 1230 bp, Acinetobacter baumannii OIFC047; identical to SEQ ID NO: 86760

SEQ ID NO: 86893 - DNA, 672 bp, Acinetobacter baumannii OIFC047; identical to SEQ ID NO: 86761

SEQ ID NO: 86894 - DNA, 1083 bp, Janthinobacterium sp. HH01
atgatcaatcttgagccatcaggcaaaaacactgccaatcaatttttttatatcatcggcgacaatggttcggggaaaagccaatacctgagcgatagcgtcgcccgccatcgcgaggaattcgacaagatactggccctgccctgcgggatcttcgacaggttcgatcccaaatcgagcggcaactaccactatctcggattcaagagcaaaaggaactccgtgttcttgagttctgtcggcagaaccatcaccggtctcgttctgaatctcatcaagaatagaaaattcgatgcgatccagcggatactcgacaatctgcagctcaaactgagctttgaaggcgcggccactctgtgggacaaccgtccggcaaaagagaggcgcgccagcgaggatcagatgttgctggccgaggccgccatcgaaaaatatagaaaagccaaaaagggctggaccaggtttcccaaaaaggaagcggccctgctggaaagctgtaccaatttgaatttgaagtttttcgcaaagttcaaaccgcacaatcgcaagaactacgttcatcccgaggatttaagctccggctatgtgcaaaaactcaagatgctgctgttgatcgccaaggaagccgagaataacagcctgatattaatcgacgaacccgaaatcagcctccatgtcaaatggcaggcggaactgcccaaactgttccgcgacgccgtcgaaggcctcaccggttgcagaatcatcgtcgccacccactcggcggtcattatctccaacacgactcaggagcatgatttcatatacagcattccagaggatcagactctgcagtcggaagatgtggctgagaacatagaaactctgctttttaataaattcaagtatctaccgctctccagtcacatcatccccgatacctgcgcaaaaatcatccaccgcgtcacgcacggcacggcgtctgttagcacctgcaaagaagaaatcaaagaactaaagaagaatacgctcagtgacagggacgagaagttattgtcaaaaacggccgaggttatcgaaattgtcgaaaaaaacattcaatga

SEQ ID NO: 86895 - DNA, 783 bp, Janthinobacterium sp. HH01
ttgctggatgatccgaccggaacagataaggcaacggtagaaatattcgacaagcttcgggtagcggcaagcaacggcaaaattagcacgacgcatgcctgggcgttcttcagcaccggcggcgaagtgccggtcctgaaaaaaaatcccaaagatactccgcaagtcatcaaagaaaaaaaagataccaccgcattcctgaagaagttaaaaaatggcaattcaaggtgcctgaaagcattaaaggaaaaattaaagtcgcatttgtttgagaaacaggacggcttctgttgttattgcaagcgccagctttacatgcatggcagggcgatcaatatcgatcatatcttccccaagaatcctgccgaaggtgcatctcaagtcgatattctcaagggaaaaagtctatgcttcgatatacgcaacctcacgttatgctgcattgattgcaacacgcaaaagaataacaagctgcacatttacaacccgaatctccacgagtattcggactacatagattacagaattgtcctgaccaataaaataaaaatagtatcgtacaaaagcaatacccggccagtctattgcgatatcggcgataacctgctcgacgtgttcaagctggtgcactacgaatatcgaaacatactggccacactggaactcgacgccatgctaaaaatcattgaatcaagcatcatcaatacagaggacgatgaagaactgtcgatgaagatcagggaattttacaattcttatatcaacgaaataaccaggtactga

SEQ ID NO: 86896 - DNA, 1398 bp, Salmonella enterica subsp. enterica serovar Rissen str. 150
atgagaatcgacaaactttcactgcttaactttcgttgcttcagacagctcgatattacttttgatgagcacattacgattctggttgcaccgaatggcgcgggcaagacgacagtgctggatgcgatacgcctggcgctgtttccctttattcgtggttttgatgccagcctctacgtaaaagataaatcgctggcgatccgtacagaagatgtacgtctggttttccgccccgaagcgctgaacatggaaatgtcgtctccggccatgattacggctaccggggaatgggaaagtggaaaaacggcaacctggatgctcgacaagcgaggagaacagccgccgcatgaagataagacagcggcgcagcttacccgttggggtgaacaacttcagacgctggtgcgtgaagagcataatttgcagcaggttgaacttcccctaatgctttatctggggactgctcgcttgtggtatcaggaacgttatgaggcacagcctactgaacagcgtctggataacagcgccttttcacgtttgtctggttatgacgattgcctttctgccacatcaaattataagcaatttgaacaatggtatagctggttatggcttagctaccgtgaacatcaaatcacacaacttgaatcaccttcagcaaagttaaaagaaggtgttcgtgttcagcggatgaaagaagctattcaagccatccagcaaaccattaactgtctgacgcaggaagtgactggctggcacgatctggaatacagctccagccataaccagcaattggtgatgaaccatccacagcacggtaagattcccttatcccagctcagcgacggcctgcgtaatgcggttgcgatggtagcggatatcgcgtttcgctgtgtcaaactcaacccccatttacgcgatgaagccgccttaaaaacacaggggattgtgctgatcgatgaagtcgatatgttcctgcacccagcctggcagcagcaaattatccagtctttgcgcagcgcatttccactaatccagtttattgtcactacccatagcccgcaggttatcagcacggtaaaacgtgaatccattcgtctgcttgagcaggatgagaatggcaacgggaaagcgttgatgccgctcggagcgacctacggcgagccgagtaacgacgtgctacaaagtgtgatgggtgtcgatccgcaacctccggttaaggagaaggctgacctacaaaagctgacggcttgggtagatcaagggaagtacgacgagccagaagcacagcaactgatggctgcattacaggtggcgctgggtgatcaacatccacaactccaacgcttacagcgcagcattgcccggcagaacatgctgaaagggaaagcgcaatga

SEQ ID NO: 86897 - DNA, 597 bp, Salmonella enterica subsp. enterica serovar Rissen str. 150
atgactctgcttctcaatgagcaatatcacctttgctgttacagcgaaatccgtgctgatttgcgtggcctcggctatcacattgaacacgtcgaaaataaaagtcagcagccagggcgaaccttcgattatcaaaatctcgccgccagcgcgttagactctgagaatggtttgcacctgtttggtatcaacgctttcggcggtcacgcaagagggaaacaagaggccgtggatatggcaaagtttattcattgtcacctccctgactgttctcgttattttgcttacctttctgatggccgaatagtaccggctgatgagctaaatgcccaggaaatggagagggcagagtacaccattgatctactaaatctgaacagcggattccttcaaacggaacgtcgtaatcattgggaagagctggaacagctttttgaggaacatattgaaaaaggctgggatctgcaacaattacttcagcttgagctggtcccttcgccagatcataaactgcatgaattcttcagcattacacgccagtttttccagcaagaagctgaacaggtattacagatccacgccccagcattaatttaa

SEQ ID NO: 86898 - DNA, 1233 bp, Salmonella enterica; identical to SEQ ID NO: 86616
  subsp. enterica serovar Javiana str. ATCC BAA-1593

SEQ ID NO: 86899 - DNA, 675 bp, Salmonella enterica; identical to SEQ ID NO: 86617
  subsp. enterica serovar Javiana str. ATCC BAA-1593

SEQ ID NO: 86900 - DNA, 1398 bp, Salmonella enterica subsp. enterica serovar Tennessee str. 4535
atgagaatcgacaaactttcactgcttaactttcgttgcttcagacagctcgatattacttttgatgagcacattacgattctggttgcaccgaatggcgcgggcaagacggcagtgctggatgcgatacgcctggcgctgtttccctttattcgtggttttgatgccagcctctccgtgaaggataaatcgctggcgatccgtactgaagatgtacgtctggttttccgccccgaagcgctgaacatggaaatgtcatctccggccataattacggctaccggagaatgggaaagcggaaagacggcaacctggatgctcaacaagcgaggagaacagccgccgcatgaagataagacagcggcgcagcttacccgttggggtgaacaacttcagacgctggtgcgtgaagagcataatttgcagcaggttgaacttcccctaatgctttatctggggactgctcgcttatggtatcaggaacgttatgaggcacagcctactgaacagcgtctggataacagcgccttttcacgtttgtctggttatgacgattgcctttctgccacatcaaactataagcaatttgaacaatggtatagctggttatggcttagctaccgtgaacatcaaatcacacaacttgaatcaccttcagcaaagttaaaagaaggtgttcgtgttcagcggatgaaagaagctattcaagccatccagcaaaccattaactgtctgacgcaggaagtgactggctggcacgatctggaatacagctccagccataaccagcaattggtgatgaaccatccacagcacggtaagattcccttatcccagctcagcgacggcctgcgtaatgcggttgcgatggtagcggatatcgcgtttcgctgtgtcaaactcaacccccatttacgcgatgaagccgccttaaaaacacaggggattgtgctgatcgatgaagtcgatatgttcctgcacccagcctggcagcagcaaattatccagtctttgcgcagcgcatttccactaatccagtttattgtcactacccatagcccgcaggttatcagcacggtaaaacgtgaatccattcgtctgcttgagcaggatgagaatggcaacgggaaagcgttgatgccgctcggagcgacctacggcgagccgagtaacgacgtgctacaaagtgtgatgggtgtcgatccgcaacctccggttaaggagaaggctgacctacaaaagctgacggcttgggtagatcaagggaagtacgacgagccagaagcacagcaactgatggctgcattacaggtggcgctgggtgatcaacatccacaactccaacgcttacagcgcagcattgcccggcagaacatgctgaaagggaaagcgcaatga

SEQ ID NO: 86901 - DNA, 597 bp, Salmonella enterica subsp. enterica serovar Tennessee str. 4535
atgactctgcttctcaatgagcaatatcacctttgctgttacagcgaaatccgtgctgatttgcgtggcctcggctatcacattgaacacgtcgaaaataaaagtcagcagccagggcgaaccttcgattatcaaaatctcgccgccagcgcgttagactctgagaatggtttgcacctgtttggtatcaacgctttcggcggtcacgcaagaggaaaacaagaggccgtggacatggcaaagtttattcattgtcacctccctgactgttctcgttattttgcttacctttctgatggccgaatagtaccggctgatgagctaaatgcccaggaaatggagagggcagagtacaccattgatctactaaatctgaacagcggattccttcaaacggaacgtcgtaatcattgggaagagctggaacagctttttgaggaacatattgaaaaaggctgggatctgcaacaattacttcagcttgagctggtcccttcaccagatcataaactgcatgaattcttcagcattacacgccagtttttccagcaagaagctgaacaggtattacagatccacgccccagcattaatttaa

SEQ ID NO: 86902 - DNA, 579 bp, Pseudomonas poae RE*1-1-14
atggtcagcactcctgccggtgaaatactatatgaatacttatcatcaggcttcaaatcttgcctttcaatattatttggcatcgtaaaagagttagaattcagatttaaggaactggaggtaaaggccgatgagttctccggagtaatacttattgatgaaatcgaacttcacttacacccagactggcaagccaaaatagcaaaaatcctgactattgcgtttccgaagtcacaatttattgtgtcgacccacagtcctcatgtaatacaagcagcacagttagatgaggtaattgcactacaaacagataatggtcatgtgtttagaaggacccttccagaaactcagtatggctttcaagggtggacaattgaagaagttctaaaagatgtaatgggcatggaagacactcgtactcttatttatcacaaaactctaaaagaatttgaaaaagccgttgatgacgacaattacagtgacgccagcgccgcttatgaaaaactcgacagtttactacacccagaaaatcatttaagaaagcttcttgcctttcagttaggcgcactgaaaggataa

SEQ ID NO: 86903 - DNA, 741 bp, Pseudomonas poae RE*1-1-14
atgataaaacttgaaaggataaaaaaacctacattcctctccaacgaaaaagccgcagagttaacgaggaaatttaaagaaactggcgatagtgtctggaatcaagaagaaataaaaaagccacttttacaatccagccatgaaaaatgtgcttactgcgaatgctgcgtctccgaagaaagcaaatacatggaagttgagcatttcaagtacaaaaacaagtatcaagacttagtcatcgaatggcttaatcttctcccatcgtgcaaaagatgcaacatcgccaaaggcgatcacgacgtcgaagacgaaccattaataaacccctacgacataaatccaagggagcatctcaagcttaaactctataaactgaagggcgtcactgagcttggaaagtccacgattgacgcagcagatctaaacaactccgaacggctagttataaaacgatttgatatcggacaacaactacaaacatcaatcgaaaccgctacagaaagactagaactttggatcaacaccaaaacaactcgtagaagaaacaaattagccggaatcgttgaaactattcttctagaatgtcaaccctctgccatatactcagcaactacagccacaatcgcattaaacgacgacgacctcttggaggttatcgagaagatgaagaaccataacatctggagccaccatcttgacattttacttaaatccgcatcaactctaacattaagcacatag

SEQ ID NO: 86904 - DNA, 1188 bp, Amycolatopsis azurea DSM 43854
atgtacatcgagcgggtccggctggagaacatccgcggcttcagcggcgcccgcgcggtcgacctccggctgcccggccccggctgggtggtgctcgccgggcgcaacggttccggcaagacctcgctcctgcgcgccatcgcggtcgcggcggcgccggacgtggcctgggggctgctgtcggacgcgggcagctggatctcgatggaccagacctccgggtcgatcgagctgtcggtgatgcgcgaggaggggccggcgccggtcgaggtccgctggctcgactccggtctgttgccgatttccggacttccgcctggtcagccgttctgcgcggcgtacgggcccttccggcggctcgcgggcggcagcggcgaggccgagtcgtggatgcgcggcgcgggctcgctcgcgcggatggccagcctgttccacgaagacgcctcgctcgccgagggcgtcacgtggctgatcaaccagcatctccgtgccctggaaggaaaagcgggcgcccgcgaactaaaggacactgcgctcgagatcctcggtgacggtctcctgcccggcggttaccggatccgggacgtcgattcggacgggctctgggtcgagtaccgcggcgaccggttcccgttgcgcgagatgagcgacggctaccgcacggtgaccgcgctcgtcgtcgacctcctcaagcagctcaacggcgcgggcctcgatcacgagagtcccggtgtcgtcatcatcgacgaggtcgacgcgcatctccacgtgtcgtggcagaaacgcatggggccttggttcaaggcgcatttcccgcggatccagttcatcgtcaccacgcacagcccctacgtctgccaggccgccgaccccggcggcctcatccggctgtccggacccgacgaggaggtcccgccgcgggtggtctccgaggagctgtacgagcgggtcgtgttcggcagcggggacgacgccgtgctgtccgacctcttcggcttggacacgccctattcgccgcaggccgtcgaactgcgcgaacacctcgccgaactcgagttccaagtggcttccgggcgggcggacgcgaacggcgtccgggaatgggaacgccttcgcggcatgttgagcagctcgccgccgagccgggtggacgaggtggccaggcggttcgaggccgacgatcggtga

SEQ ID NO: 86905 - DNA, 741 bp, Amycolatopsis azurea DSM 43854
gtgatcgggatccgccggatcgcgctgccggggcgggtggtggccgatctcgaagacctgaccgcgcggatccccgccggtgacagcaaagaagcacgcaggctctggcgggtttcccgtgccgtacggcgttctctgcgggcgggactggacgtcatggccgccggccgcggctactgcatgtactgcggcgacggccttgggtccactgtggaccatttcgagccgatcgcgcggaacccgggtcgcgcgttcgactggctcaaccatctgctcgcctgcgagtactgcaacagccatcacaaacgcgacctgttcccggtggacgacgacggcggcagcctgctgatcgacccgaccgccgaagacccgctggaccacctgttcctggtgctgtcgatcgggacctaccgcgcgttgaccgaaaagggcgagcagaccatcaaggtgtgcgggctgaaccgcgcgcagctggcgcgcgggcgggaaacagcggtcaaccaggtgagcgcgctcgtcacggggtggtggaccgcgcgcgaactgggggacgacgtgaaacggcgcgcgatggcctggaccctgctcgaccagccgcacgccgacgtcctccacgcgatgctccggcaggcggggatgcccggagcccgcgccgttttccgggccgacgacgaactgatcgaactgcttcgcaccccggaactcgccgaagaccttcagctctccggcgacgccgtgtag

SEQ ID NO: 86906 - DNA, 1272 bp, Nodularia spumigena CCY9414; identical to SEQ ID NO: 72170

SEQ ID NO: 86907 - DNA, 651 bp, Nodularia spumigena CCY9414; identical to SEQ ID NO: 86231

SEQ ID NO: 86908 - DNA, 1239 bp, Edwardsiella tarda ATCC 15947 = NBRC 105688
atgacgatagaacgattgcatgttaaaaacattaaacacttcccagaagttaatgttagatttaatgagcgatttaattttattacaggaccaaatggttgtggtaaaacatctattctcgcagctattgcgcactgcttggcgtggaatggtgaatattcaagacatcaagatgatagtgagtactggatagatgtaaacgaacatggtgaaagatttagattcggtttggggcccggttttttacgagtcaaaaaatatagaggcgacaagatacacatttatatcactccgccttctgaagatgggcgtcagtcattaaatttgagtgatgttaaaactagatacaaactacctcccttagttatcggtgcacagagaaaaattacttataaaactataaacggtgttaccagagagaaagacacccaaggaagcatcaacgaatattgtgataatgcattaagctctctttacaataattcttcgcgagacataaagcaatggcttattaaccgatactttgtcatagataaatcttgggcagaagaggaaaaagcaaactgggaacatttgatcaaatcgctaccaataattgggccgttcaacagtgaatttcagtatttagacaccgggcgtgatcttgaatctgtattttcaatatatggaaaaaaatgcttccttgaggaactttcatcgggatttcaggccgttttatatattattattgcgatatttgaatggattgaggcttgcttgccagttggtgaaagagatgtaacaacagctcgtggaacagtgcttatcgatgagctggataaccaccttcatcctgaatggcagttaacagtaaggcaaggaattgcggcaatattccctaatatacaattcattgttacaactcactctccccatcttctagcctcggcaaaagaaaatgaaatcatcatgcttccgtcatcatatactgatgaagtatatgaatttcagccttcgaagaaagcatattcaggttggagtacggatttaatcttgaccgagctaatgggggtaagaagtctcgataacaaagattatgaaaaattagtgaaagcttgctatgaaaatatcaaggaaaataatcttaaagcccttaaagaaaactattttcgtcttgaatccatctgccatcctggcgacacggtgttaataatacttaagactcgcatagcaggcatggaggcgaaagcgaatgattaa

SEQ ID NO: 86909 - DNA, 759 bp, Edwardsiella tarda ATCC 15947 = NBRC 105688
atgattaaattgactcggccacctgagccacaagtattatgtgataatcgtgcagtatggacacagggattaatggcactggtcgccaaatataatgagtacaaaaaaatacctcctaatgaaaaggaggcagcattaaaacattatcgtcatgatgatatacgtaatgcattgaaagaaagctcttttcataaatgtgctttctgtgaaggtattcctgaggaaactggctttgcggaggttgaacactttcatccgaaatccatatatacagataaagcttttgagtggacaaatcttctttatagttgcaaggcctgcaataataacaaacttaatcatgatactcaaaaacaaccaataataaatccttatgatttcgatcctagtgattgttttacgtatacagatataattattgagcctaaagcgggggctaaccacgatattgctgaaaaaactattgaagtgtgtgggctctcagacaaaagacttttttcggcaagaggtgatattttagtaagctttcgtatttttgaggctgacatccgtgaggcaatggaagaatttgacctagcacgtacttcaccaaataagcagaaacgagcaggaaggataaacgatgcgctacgcacgattgaagagctgtcgaagcctagtgcgagactctcaaacttttgtacctatctgctcgctaattctgaaatatatcaggaagccaagcaacgtctgcaggaatacactagcgaaaacttgtga

SEQ ID NO: 86910 - DNA, 1311 bp, Prochlorothrix hollandica PCC 9006
atggaactgatttctctagaactccaaggttttcgcggccttgctgaccaaaccattgacctagaaccggaaccctttcgatcgggggggctacagccgatcgtcttcatcggcaccaacggcagcggtaaatccagcctcctcaaggcgatcctgcggctgctttcctggttcacccggcggctcaaaaatgctcgcaccaacggcctaccctttcagccggaagatatagccctcgatcgatcccaggttgcagcggccctcaccctggtgtatcaagatcaaagctatcgctggaacgtcagcagaaatcgccctaaggctttcaaaacccacaaagacagccgtaaaacagacactaaaggcagtttctacacggaactgaaccagcttgtcgaatctttccacggtttaatggaacaggacattcaaaccccgctgccggttttggtccattattccaccgatcgcactgttccccaggcccgcgttcacctccccaaaaaacgggacaatcccattcccctcaatgcctacgatcgggccttggacgaggaagccacgaccttcaaaagcttttttgagtggtttcgcatccgggaagattacgagaaccaacggcgatcgaaggaagatccccgctatcaagacccccagctagaggctgtgcgacgggcctgtacgctgttgaccggcctgacggatctccagatccggcgcgaaacccccgtgcgcatgacggtcaccaaaaccatagacggactcccgcaaatcttccgcattgaacaactgtccgatggtgaaaaaggattgctcgcgatgacaggggatattgcgcgacggctggcgatcgccaacccccacctcagcgatcccctccagggcgaaggcgtagtcctcattgatgaaattgagctacatttgcatccccaatggcaaagcagcatcatcgaaaacctctgcaccaccttccccaactgccagtttatcctcaccacccactccccccaggtcatcaccaacctcgattgggtctacctcctcgaacccaccccccagggcacccgctgccaacccatccgcacctatggcaaggacagcaaccgcatcctggaagcgatcatgggtaccccggagcgatcttcccaggtgaaagatcacctggatcatctcttcaacctcattgatgatggaaaactaaccgaggctcagaaactccacttagaactgctaaatacacttacaggcaacgagccagagttaactcatgctgaatggctgattgagcgtcgtgaggctctaggacggtag

SEQ ID NO: 86911 - DNA, 699 bp, Prochlorothrix hollandica PCC 9006
atgaaatatatccagaaaaatccagagccaaaagaactcaagcaatggcgagaagatcagcttgcccaaggagtcaactttacctatgagaatttcaaaaatcctgaaaaacgcatcactcgccagtctcttctgcaagaacagggctggatctgctgctactgttgcaaacgcatcagcctagaaatcagtcaccttgaacactttgacccccaaagcaagagtgatccggtgctaacggtgacctatagcaatatgctggcttcctgtggcccattagaacgggatcccgcagatagaaagaaatcagtgaagtggccagaacactgcggttatcaacgcggtcgtgaccataaacataacaatgaaacgatacgcaaaaacgcagctttaccgatcgccccacatcacgatccccaatgcgaaacctacttcacctatcgctccaatggtgagatccaagccgtgaaagaccatccccgtgctgctgatgcacaagagatgatcaaaatcctcaatctcaatgaccctgaccttattaaagcccgtcaactaatcttgcgaacgctccaggggctgacggacacagaagctcagattctctggcagcgtaaccagaacagaaaccaacagggtgaatttcggagcttctgccctgcggccctggactacctccgccaaaactttaacctgccctag

SEQ ID NO: 86912 - DNA, 1188 bp, Amycolatopsis decaplanina DSM 44594
atgtacatcgagcgggtccggctggagaacatccgcggcttcagcggcgcccgcgccgtcgacctccggctgcccggccccggctgggtggtgctcgccgggcgcaacggttcgggcaagacctcgctgctgcgcgccatcgcggtcgcggcggcgccggacgtcgcttgggggttgctgtcggacgccggcagctggatctcgacggaccagacgtccgggtcgatcgagctttcggtgatgcgcgaggagggtccggcgccggtcgaggtccgctggctcgactccggcctgctgccgatctccggacttccgccgggcaagccgttctgcgcggcgtatgggcccttccggcggctggcgggcgggagcggcgaggccgagtcgtggatgcgcggcgcgggatcgctggcgcggatggccagcctgttccacgaagacgcctcgctggccgagggcgtcgcctggctgatcaatcagcatctccgtgccctggaaggaaaagcgggagcccgtgaactgaaggacacggcgctggagatcctcggtgacggtcttctgcccggcggctaccggatccgggacgtcgattcggacgggctctgggtcgagtaccggggcgaccggttcccgctgcgcgagatgagcgacggctaccgcacggtgaccgcgctcgtggtcgacctgctcaagcaactcgacggcgcggggctcgaccacgagagtcccggtgtcgtgatcatcgacgaggtggacgcgcatctccacgtgtcgtggcagaaacgcatggggccgtggttcaaggcgcatttcccgcggatccagttcatcgtcaccacgcacagcccctacgtctgccaggccgccgacccgggcggcctcatccggctttccggacccgacgaggaggtaccgccgcgcgtggtctccgaggagctgtacgagcgggtcgtgttcggctccggggacgacgccgtgctctccgaccttttcggcttggacacgccttattcgccccaggcggtcgaactccgggagcacctcgccgagctcgagttccaggtggcttccggccgggcggacgcgaacggcgtccgggaatgggaacgcctgcggggcatgctgagcagttcgccgccgagccgggtcgacgaggtggccaggcggttcgaggccgacgatcggtga

SEQ ID NO: 86913 - DNA, 741 bp, Amycolatopsis decaplanina DSM 44594
gtgatcgggatccgccggatcgcgctgccggggcgggtggtggccgatctcgaagagctgaccgcgcggatcccctccggtgacaccaaggaagcccggcggctctggcgggtttcgcgtgcggtacggcgttctttgcgggcggggctggacatcatggccgccggccgcggctattgcatgtactgcggcgatggtctcgggtccactgtggaccatttcgagccgatcgcgcggaacccggggcgcgcgttcgactggctcaaccacgtgctcgcgtgcgagtactgcaacagccatcacaagcgcgatctgttcccggtggacgaagacggcaacagcctgctgatcgatccgaccgccgaagacccgttggaacacctgttcctggtgctgtcgatcgggacctaccgcgcgctgaccgaaaagggcgagcagaccatcgaggtgtgcgggctgaaccgcgcacaattggcgcgtgggcgggaaacggcggtcaaccaggtgagcgcgctcgtcatgggctggtgggccgcgcgcgaactgggggacgacgtgaaacggcgcgcgatggtctggaccctgctcgaccagccgcacgccgacgtcctccacgcgatgctccggcaggcggggatgccgggagcccgcgccgtgttccgggcggacgacgagctcatcgacctgcttcgcgccccggagctcgccgaggatcttcagctctccggcggcgcggtgtag

SEQ ID NO: 86914 - DNA, 1626 bp, Serratia marcescens VGH107
atgaatgatgtcaaaagaagagttgataatgttttttcagattttattgaaataattaatgatgataattttgaaaaaagcagtaaattctctcatacattaaatttgttaaatgaatctctcaataaagagaagctttatctcaagaaagtagcaattgtagacttcaaaagattaagggatgtcatagttaatcttgaagatgacctaactgtttttgttgcagataatggttatggtaaaactacattgctcgatgcaatcgcgatatctctaagttggcttcgctctaacatacagaaaaaagataagcccggttcatatattcgtgaaatagatataaacaattctaaagatgcattatatgcatcagttgtagccacatttaaagtgcagaatttgaacgccaatattttaataacaagtgcaaaagagggggtctcctttaaacgcagtaatgatttacaagaagttaagtccttagctacaatgtaccgttatgttaatacttttttagataactctagtttaccagtgatggcttattattcaatagttcggtctgttgtgggtggtggtatcgataataaaagaaagagcaataaaaacaaaacttcttggtcgaaattcgatgtttatgacgactttatatttgatagaaatgactttggcgagttcttaagctggctcatgtttctgtctaataaatccacatatgagaatgcatcgcctaccgatactctagaatcattagaaaaagaaatagaaaggattagtaacacaattgaacaactaaagaccatttcaaatattgattcaaatattataaataacttaacaattagccgggaagaaaaaaaattacaattaaaaaaagttactggtaatgatactctaagctcatcatctttatataaaaatgtaataaatacaatattaaaatttctacctgagttcgaaagtattaatctagtctatagtgaaaatgattttagattagtccttttaaagaatggcattgaattagatgcccaacaactctcacagggtgagaaaaccattcttactcttgtcggtgatttagctcgtagactctcccttcttaacccaacgctacaaaatccttttgaaggaaaaggcatcgttcttattgatgagattgatttacatctccacccaacttggcagcaaaaaattatagagcgcttattaacaacttttccgaatgtacaatttgttctttccactcatagcccacaggtcttatctactgtttcagctagatgcataaggatattagaagaggttgaggacgagcttggctatacttctataaaggctactaaacctcgctaccaaaccaagggcttaataaatagtgatgcattactttatggtatggggacagaccctaccccaccgattaatgaagttaaatggttggaggagtacaaaaaaaacattgaacttgacaagtttgacagtaaacctgctattatcttaaggaataatataatcaagcattttggtgaagagcatccattggtgattgaatgtgatcaaatgattgctttaatgaaaatgaagagagacataagaaatagaaaaaataataaggagagctag

SEQ ID NO: 86915 - DNA, 660 bp, Serratia marcescens VGH107
atgaaatttcttcgcagagagtaccctggtccagaggttttattaaaatatgactttaacactcaaaattgggacaacgtttcatcatcagacaaaagagaaatttggaccgaattagtaaaaatgcaaggaaaagtgtgtgcatattgtgaaaggaagattgattttaataaagctggtgacaagcatattgaacatttcaaacgaaagggaatatacaaggaactgacatttgactggggaaacatttttggttcttgcggtgaaagaaaaagatgtggattttacaaggacaagcaaaaatataacgatgacgacttattaaaagctgatgtgcaaaaccccaatgatttcctcctatttgtctctagtggtgaggttgttgtaaaacccgatattattgagcgttcaaaaaaaatagcagaggttactttaacagtatttaatcttaacggggaagttaaagccgaaaggaggagtgccattgaaaaaggaatgagcactatgaaaaattatatagaaatagctcacgaattaattaattccggtgatgacattaatatcgttagagaatatgttcgcgatagttattatgagcacattgataagatggaatttatgtctgcaagaaaacatgtttttgaggcattccttccataa

SEQ ID NO: 86916 - DNA, 2340 bp, Serratia marcescens VGH107
atggaaaatatagatgaacgcgatatcgatgctgcgcgctttgagaggcagattttagatatctggcgagaagagactaatcagacgcctgaggggggactcaagcttgccatatttctgctatttactgagcagagctcaaaacacatagtgcttccttggtcatgggccgatacagagacgatttatggcttgatggatgccaagcgtcgtgctgacgactggttaagacttaaggactctgatgtaacagagcgtgaatgggcacgtcagtcacaatatgtgctggaaaagctacgacatcttgttagctatagcggtaactctacggcaaacttgcatcgattggattttcttgtcaaaagtttgtgcgccaggagatcttcaaacaactgggctcggaaagtcgaaagcttcgtcgccgattttgcacatggctggtcagttagcggtcgggcaatcgttgatatgaacacgatgacgacaggtgagctaggggttcgtctaaaagacgttcaggccggtgacgattacgtattgccggctgagcttcagccccatcttttcgaggtctgtcttcgtcttcatgctcataacgtgcaattccagttagtagcagaacagggggcagacagttcttggcgcggcgtaggggcagcctacaaatttgcttggccgactcgctatcgttcggagtggacaaatgaggtgcgtccctttgagctcaacggtcttgagttcgctcaatggttccttgaccatagacatggccaacgtatcacgatcgtagtcctccccacagctgatttacgaggcaaaggtcgaggggccgagattcggcatgatctgctacagcgtaggtgtgttctgggtgtagtagagattcctgctcgagtgtctggtcgtacacgactttcgatgctgataatggcgaaggagcggtccagtaacgatgaatcagtcctgctgatgaacggtcgcgcggtagacggattgcgggacgagcctctggatcgcttggctaaatttctctgtgccccattcttggacgcaatgaagggggatacattgtctcggcttccttatgagtccgatctgggtgatgcgctattaaatcgtgctcggaagatgttcggggcgaagttacacgaggtgcctggattttttcgctatgtgcagttagaagagattctgggcaaccagaacgcggttctcgatccatctctgtggatttccgagcgtgatcctatggtcgcgagcgatctgctggatggttcccctgtttacaagctgttggaggaacgagagcgaccctgctgcgtttacgtcattggaaacaacggtgcgggaaaaagcatgctcttgcgtcagcttgctaaggcatatgtgacgtctgggcggcctgtgcgtgctatcgcttctgcaaccagtgacagattcgaggccaaaatgggggtaacagccgactacgtttacctaggggcgcgcactagtaatatgtccacacagccgcgaagacttggacgtaagttagccgagttgatggttgctatccatgccgaccgcgacaagatcgctgcggtgagcagagttctcgaccaactgtcttttgcgggtcaacattatctattgccggagtccgctacctccgatgttctggagtctgtgcgtgaactcggtgtcgatggggctccaagtaacatgaatgggtggaagctcggctttcgaaaaaaccatgagaattcgatagttccctttgatcatcttagtaccggcgaacagcagctactgcttctgacggcaaggcttgttgaatacgcccggcccggtgttgtcttcctgatcgatgagcccgagactagcttgcacgtcgcttggcagcgagcactgccatcggtttttcagactatcagccgagacttcaattgccagatggttatcgctacgcactcaccgattctaatttctacctcgcgtggggacgacacataccgatttatggctgatggtggtgtgctagaagcaattggggagcaagctgcaagtagtgtcgaacgagtgctttttcaggggttcgatacctacacaggcaacaaccgagaggttcacgaacgctgtgctgagttggtttcgcgggctatcgagtttgccaacacggagcgaactgaaatgttgtcgagcgtctttgatgaattgcaacagatggaggagaaggttactagggctgtaccagcgcttggttccgaggtacctgcgcggcaccttgatctcatacggagagctacgctcgcgatagaggaactgactagctccgataagtctgaggaggccagatcgtga

SEQ ID NO: 86917 - DNA, 726 bp, Serratia marcescens VGH107
gtgaatcaactagtgaccgcagagaaagatttcgggaagaacgtattgacctcggtcgaggctagagctttctatcgtgaatggcgaaaacttgcatcaagcagagccagcccctggtctgccatacgtgctgcaacatttatggtggagggtcaaaaagatggtaccggtattaagatcatatcagcacttcgatcccaccttgctgctctgcaagctgaacgctgctgttactgtcgacgtcgccttgttgggattgcttatgcgcggcccattgagcatatcctgcccaagaacacctacgggcagtacacctttacataccgtaatcttgcagtggcatgcttcgactgcaaccatgtcaagagcaaagccaattggtcaatttggccacaaaatcgtaggcggtacatcaatgaaaagagctgcaacagtttttttcatgctcgcctccatgattatgactcccatgtcagatattttcatttggagacgaatggtgcatcaatcagcgtctacgttggcttgactccccagggacggcatctttgtgttgagctactgagcaaatcctcggagagaacccttgcggaaagtgccaacccaaggttttctgccgcaatggacaaacttcgtggccaagttcaacagatggcagcgacaactgacgacaccaagttgttggacttcatggaagcgttggaacttgctgttgacccgctgtaa

SEQ ID NO: 86918 - DNA, 1320 bp, Gordonia malaquae NBRC 108250
atgtcagatcggaatcggtgggcggtgcaacggctccagctggagaacttcaggtgctttgatcggctcgacatagacttcgatcccgacctcacagtgttcatcggtgtcaacggtgcaggcaagacggcggttctcgatgccctttcggtcatgctctcgacggctctgtacgagctcggggatgatcgtcgtgggttcgcaacatctgatgtccgcttggttgcggacgtcgacagcgcttcgtccgtggcctcgatggaggcagagtatccagtgtcggggctcctacaggctgagcttgcggggcgtcagtgctggtggcgacgagtgaagacgagccgttcaggccgtacgagttgggcggagaagaaggcgatcgatgcaatcgtcacggatgcgtggaacgccgccaccgccgacgatccgatttcgatgctgccggtcgtagcgatgtacggcgtggagaggctcgtcggcgtgcggaacgcgcgcggtgccattcctcgttctcgcaagtccgcttatgctgcggcactcgacgggaagtcagatctcacacgactgtcgacctatattcaaggattgacagtcgacgactacaccgccacagtcgagcgcggcatcccggattctcccgagtcgcgtcagctcgcagcgatccgcctcgcgtgtgaccgggtgctcgaaacgacgggctggcgagggccgtactggcggcagaacgtcggagaactcacgatggcgcatgacgagcacggagagctcccgctgtcatttctgtcgagcggcttgaagatcgccgccggactgacgatcgacctagcgagccgcgccgctcgtgcgaaccccgcgatcggtggagcagaactgttggactcggttccggggatcgttttgatcgacgaggtcgacctccacctccatccagactggcagcagcagatcatcccgtcgatgcggaccgcgttccccaatgttcagttcatcgtcacgactcatagcccgcaggtcctatcgacagttccggccgaccagatccgagtcttggacggcgacgccgtgtcgcacgtcgatttctcggagggactgcgcagtgatgtcgtgcttcgtgaagtaatgggcactgacccgctccctgatgtggcagtgacgagaagactccgaaagtatgtggaactcgtcggagacggccacggattgggtgacgaggcacagggcttgcggagggcactggacgatgagctcggtggggcagcgtttgtgcccgcgctggcggacgccgacgccagcatgacgttctacgacctggacgagtga

SEQ ID NO: 86919 - DNA, 729 bp, Gordonia malaquae NBRC 108250
atgaggcggattccgaagggggcggagccgaacatacttcgcgaggcgaatgcacgcggtgtccactacgacgactgggacggcaaactgcgcaccgcgatacgagcggcgcttcatgcagagcagaacggggtgtgcgcatactgcgagcgtcccgttcgagtcgagcggtccgacgatgtgtcacggatggtcgtcatcgagcactttcatcctcgttccggatcgccgcgcaccggcaaatggaagagctcgcagtgtcgagcagcgtcaggagcaacgagccatgagtcgtcgagaaccgcgtggtcgaacttgttgctgtcgtgtgacgggtcagggccgcacggtgcgcgcacatgtgattcgaagaagggcggctcggacatctgttcccgattcgcgaatccgaagacgacgcatctcgaccgcttggtggacatcggccgagatggccgtgcacggcccgtcgacagtctgcctcccggtgccgacgccgtggtcgacagcgaactgaacctcaatgcagaattcctgtgcgaggcgcgcaggtcgtatttcgcagttcaactccgtgagtacaacaaagccaagacacggcacagaggactgtcttcggtgcagaagcagatcctcgtcaaccgatttcgagagcgagcaagccggccgggcaccccgcacccgtcggttctgctcgcggtcgcgaacagcatcgaggcgaaaatctaa

SEQ ID NO: 86920 - DNA, 1332 bp, Sinorhizobium meliloti 2011; identical to SEQ ID NO: 85888

SEQ ID NO: 86921 - DNA, 648 bp, Sinorhizobium meliloti 2011; identical to SEQ ID NO: 85889

SEQ ID NO: 86922 - DNA, 1533 bp, Bdellovibrio exovorus JSS
atgtttgtgttagagaaaattgtcattcaaaaacatgaaattttgggtgactgcactattgactttttagataacagagattctgggtacattaattataagactataattatcggaacaaacggttctggaaaatccacccttttgtatttgttaactgacatttttatcaacctagataaaatgcgtaacgccgtactagataaagtatcaaaacaaaaataccggtgtgattttgaattatcttattctgttaataataatagatatgtgatcgattgtagagatgaaataattgcaattaaaaaaaatgacaaacctgtgatgattgaaaatatagagttgccatcaaaaattattgtttcgacaaataccgtctctgagagatttcctttaaagtatgaccgtataagattttttgagaaccacttcgacgaatattaccaatactttggaacacgttcacggcgagggcagttggtttatgggatgcatatacgtaatgcttttgaagtctttattagtaggtcgaacgatactttttacagaagaaacattaaaagactccttgagacgttagattttcaatcacatatagatataagatatgtaatacataaattaactaaatataagcaaggtttcgatgaaaagataagtaagaaaacggcgcgacagatagtagaggatgcgataaatggaagaagttcttatagaacttctgaattagtgcggttaggttatttcaatgatgaagttttaaaagataaaatttcgaaaactttatttgaaatgatagaatgctcgttccgagatagaggtattaactggcgaagtgagctgaagtttgacttgcttggtggacatcttgagttaaatggaaaaactttaaataatgaaatggaagaatttaaagttttgcaagagttagggataattaggttacaggatcttattttatataaaaatggaaaggccgtaaattatcgtgaagcaagcagtggtgagcttcaacagctggcaacatttatggctttacttggagtggtagaggacgacgcattagttttaattgatgagccagaaataagcttgcatccagagtggcaaactaggctcgtggacaatttggatcagatcttatctaaatttagaggcctacattatttagtcgtgacacattcgccgtttattatttcggatgtaaaatcagatgaggccaatattcttagaatggaaaaaaagaatggtaaaattttagttagacaatataaaggtgagacatacggactttcggttgaagaaattatattaaatacattcaatatggcaacatctagaaactattatttaaacgataaagttggaaagatttttcaatcgttaaaagatcataaaggaatatggacttccagcgatagaagtaacattgatgagcttttggatctgactaaaaaacttaatacgagtgatccgatatatttactagttcaaaaaatatcgaaggctatagatgggcaaaaacagaattga

SEQ ID NO: 86923 - DNA, 645 bp, Bdellovibrio exovorus JSS
atgggcaaaaacagaattgaaaatttatatacactaagcaattctgaaaaagaattattgaaattgcctgaatcgaaaaaaaaagattcctgggatacccataccttccaagatttaaaaaaaaacttaaaaagccatttgtatgtagagcaagagaatctctgtgtttattgtaagcaggagttgtctaaagagacccggcttacgcacatagagcatgttattgctcgcgacaacaatgaaaaattctgttttgctttaaaaaacttagcactttcgtgccgagattgtaactcagccaaaagtgctaagtatgtgtaccacaatgaaaggaccgaaaaatctttatcaagatacccgcaccgatccgtaagatttctcattcctcaccctcactatgataattttgatgagcatgtgagtttttttttagatttttatccgattgaagtaaatcaaagtagcaaagggataaaattaatagaaatatgcaatttgcgcagattcgggttgatggctaataaaattactgctgaattcaaaaactctgcaggtggaatggaagaaaaaatatataaattatctgcgaagtctccagaagaagcgctggcaggaattgatgaaattatcgctgagttgctttga

SEQ ID NO: 86924 - DNA, 732 bp, Azoarcus sp. KH32C
atgaagagcacactcttgggttggatgatcaacggctacggagtacgcagtccaactaaaaccatcatgcctccggatccgcaacaagtgaggaacttcgagggttttcgggacgtgctgagagttgtattgccggaatcgcttgggttcgaggatctcgaggtcagggactacgagattgtcttttgctgcaacggcggtgcggatgaatttctgttagagacagcctcgggtggaatttcagcactgattgacatcgcgtggcagatcttcatgttcgacactgacgcaaaagagccatttgccgtcgtgattgatgaggttgaaaatcacctacacccaagtatgcagcggacgttgctgccgaatctgctaaaggcatttccgcatgcaaaattcatcgtcacgacacacagtccactaatcgtgacttcggtagaggatgccaatgtttatgcgcttcgatacgatcacaccaaaaaggtgcgctcgcatctgttggatttcaagagcgaagtcaagaacgcagtcgatgtactagacgaggtacttggtgtatcaacgaccatacctgcatgggctgttggcaagctttccagcattcttgcgaggcatgtggcaagtgatcccaccaccgagtcgttagcggcattgcgcacggagcttagggacgccggccttgggagactatttccagatgctgtggcaagagtcgcggaggcacgtaaatga

SEQ ID NO: 86925 - DNA, 591 bp, Azoarcus sp. KH32C
atgaggcggctccatcgtcccccgtgtccgaaccccgacgccctgcgaacaaattacaagcaccctgacaacaaagacgcgttactgcgtgcttcgcacggaaaatgcatgtactgcgagagccaagtcgcacacatttacttcggagatgttgagcacattcgaccaaaggccgaggggaaataccctcacctggagttcgagtggaccaatctgggctattgctgcgcgcggtgcaacaacgcaaagaaggaccagtttgacgaaacgtgtccagtggtcgacccttactcggaagatcccggcacccatcttctcgctttcgggacaactgttaggcacaaagcaggaagcgaacgcggcgctatcacaatagccactacggacctaaatcgacccgaacttatcgagaggcgggccattcgcttgacgcaactccaaaacgctttggacgcttgctatcgaacttcgagtgaggctatccgagcaacgctgcttgctgccttgaaagaggagggagcagcggataaagagttttccatgtttgcggctgccttaattaacgccaatcaaccggacggagcgttgtag

SEQ ID NO: 86926 - DNA, 1398 bp, Escherichia coli KTE39; identical to SEQ ID NO: 86108

SEQ ID NO: 86927 - DNA, 732 bp, Escherichia coli KTE39; identical to SEQ ID NO: 86109

SEQ ID NO: 86928 - DNA, 1398 bp, Escherichia coli KTE201; identical to SEQ ID NO: 86202

SEQ ID NO: 86929 - DNA, 732 bp, Escherichia coli KTE201; identical to SEQ ID NO: 86109

SEQ ID NO: 86930 - DNA, 1398 bp, Escherichia coli KTE214; identical to SEQ ID NO: 86108

SEQ ID NO: 86931 - DNA, 732 bp, Escherichia coli KTE214; identical to SEQ ID NO: 86109

SEQ ID NO: 86932 - DNA, 1398 bp, Escherichia coli KTE220; identical to SEQ ID NO: 86854

SEQ ID NO: 86933 - DNA, 732 bp, Escherichia coli KTE220; identical to SEQ ID NO: 86109

SEQ ID NO: 86934 - DNA, 1653 bp, Escherichia coli KTE234
atgaccaagcaatatgaaagaaaagcaaagggtggaaatttactgtcagcattcgaactttaccaacgtaatagtgataaagcgcctggtctgggtgaaatgttagtgggtgagtggttcgaaatgtgcagggattacattcaggatggacatgttgatgagtcaggaatatttcgtccagataatgcgttctatcttcgccgcctgacgttaaaggattttcgccgtttctctcttctggaaattaaactcgaagaagatctgacagtcattattggcaacaatggtaaagggaagacaagtatcttatatgcgattgcaaaaacgctgagttggttcgtcgcgaacatcctgaaggaaggtggtagtggacaaaggttaagcgaaatgactgacataaaaaatgacgctgaagacaggtattcagatgtcagtagcactttcttctttggcaaaggacttaagagtgtgccgatcagattgtcacgctcagcccttggtacagccgaaaggcgggacagcgaggttaagcctgccaaggatttagctgatatatggcgagtcatcaatgaggtgaatacgatcaacttgccgacgttcgctctttacaacgttgagcgatcgcaaccgtttaaccgcaacataaaagataataccggacgcagagaagagcgctttgatgcctatagtcaaacgctcggtggcgcaggacgtttcgatcatttcgttgagtggtacatttacctccataagcgtactgtatcagatatctcaagttctattaaagaacttgaacaacaggttaatgacttacagcgtaccgttgatggcggtatggtttcggtaaaatcacttctggaacagatgaagtttaagcttagtgaagctatagaaagaaatgatgctgcggtttcctcgagagtgttaactgagtctgttcaaaaaagtattgttgagaaagcaatctgctcggttgtccctagtatcagcaatatatgggttgaaatgataacgggttctgatttagtcaaagttacaaatgatgggcatgatgttactattgaccaattatctgacgggcagcgtgtatttctgtcgttggtggccgatcttgcgcgaagaatggttatgctgaatcccctgctggaaaatccattagagggacgtggcattgttttaattgatgaaatagaacttcaccttcatcctaagtggcagcaggaagttatcctgaacctgcgcagtgcattccctaacattcaatttattattacaacacacagtcccattgttctttctacaattgagaaacgctgtattcgtgagtttgagcccaacgatgatggcgaccaatcattccttgattctcccgatatgcaaacaaagggaagtgagaatgctcaaattcttgagcaggtaatgaacgtacattctacaccgcctggtattgctgaatctcattggttaggtaattttgaactattgcttttagataattctggagaacttgataaccactctcaagtgctttacgaccaaatcaaggcgcactttggcatcgatagtattgagttgaagaaagcagatagccttattcgcattaataagatgaagaataaactgaacaagataagggccgagaaggggaaatag

SEQ ID NO: 86935 - DNA, 651 bp, Escherichia coli KTE234
atgagagagttagcccggctggagagaccggagattcttgaccagtatatagccggtcaaaatgactggatggagattgatcagtctgcggtatggccgaaattaactgaaatgcagggcggattttgtgcctattgcgagtgccggttgaacagatgtcatattgagcatttcaggccaaggggaaagtttcctgctctgacgtttatctggaataacctgtttggttcttgtggcgattcaagaaaaagtggcgggtggtcacgttgcggtatatataaggacaatggtgctggcgcctacaatgctgatgatcttataaaacctgatgaagaaaatcctgacgactacctgctatttctcactactggagaggttgtaccggctatcggactcacggggagagcgcttaaaaaagcgcaggaaactatccgtgtttttaacctgaacggtgacataaagttgtttggcagtcgcagaactgcagtgcaagcaatcatgcctaatgtcgaatatttgtatactctactcgaagagtttgacgaagatgactggaatgaaatgcttagagatgagctcgaaaagatagaatctgatgaatacaaaacggccctaaaacatgcatggactttcaaccaagagttcgcataa

SEQ ID NO: 86936 - DNA, 1614 bp, Escherichia coli KTE51
atgaatgattctaaaaaaagagtggataatgttttttcggagtttattggtctgattaatgatggcgtgcctgaggataaattaaaatattcacctgtattgaatttgctaaatgaatctttaaataaagacaacttataccttaagaaaatatcaattgtagacttcaaaagattaagggatgttattgtaaatcttgaagatgatctcacagtttttgttgctgacaacggctatggtaaaacaactttgcttgatgcgatcgcaatttctttaagttggcttcgttctaatatacagaaaaaagataaacctgggtcgtatataagggaagtggatataaataactcaaaagatgccttgtatgcatctattgctgcaacatttaaagtacaagagctgaatactaatgttttaatcacaaatgcaaaagatggtgtgtcttttaaacgcagtaacgatttacaagaaattaagctgctagcaacaatgtaccgctatgttaatacgttcttagataattcaagtctacctgtgatggcttattattcaattgttaggtctgtcgttggtggtggtattgataatagaagaagaagcggtaagaataaagtttcttggtccaaatttgatgtgtatgacgatttcatgtttgatagaaatgattttggcgaatttttaaattggctcatgtttttatcgaataaatccgctcatgagaatccagtggtcactgataacccagagttactcagaaaggaaatagaaagtatcaataacacaattgaacaactaagtattgtttctaacatcgattttagtattattaatcagctaaagagtagtcttgaagagaaaaaaaaccaattaaataagtttagtagtgaagggtttttaagttcatctgtcttatataggaatgtaataaatgctatattgagatttttgcctgaattcgaaagcattaatctggtttatagtgagactgatgttaagcttgttcttatcaagaatggtattcaattagatgcgcaacaactctcacaaggtgagaaaaccatacttactctggtaggtgatttagctcgccgactttcccttttgaatccagagctacaaaatccatttgaaggtcaaggcatagtattaattgatgaggttgatttgcaccttcatccaacttggcagcagaaaattatagagcggctattaacaacctttcctaatgttcagtttgttctttctacacacagccctcaagtcatatctactgttcctgccaggagcataaggattttagaggaggtggaagatgaatttggtgatatttcgataaaagctgttaggccccgctttcaaactaaaggggtgatgaatagtgatgcattactttatggaatgggagcagaccctgcgcctcctgtagaagaagtaaaatggttggaagagtacaaaaaatttattgaattggatcagtttgatagcgattcagcgcttaaactacgccagaatataataagtcactttggggaagatcatcctttagttgtagaactcgatcagatgacttcactcatggagtttaaaagaaaaattagaaataaaaaacaatga

SEQ ID NO: 86937 - DNA, 669 bp, Escherichia coli KTE51
atgaaatttcttcgaaggatatatcctggccctaacgtgctaagtagttatgattttaatactcaaacttgggatgatgtatcatcatctgacaaaaaagatatttgggtagatttagttaaaatgcaaggcaaagtatgcgcttattgtgaaaggaaaataaacctaacaaaagagggggataagcatattgagcatttcaagcgaaaaggtattcatcgcgaattaacgtttaactgggagaatctgtttggttcgtgtggggaaaaacaaagatgcggattctacaaagacaaacaagaatataatgagggtgacctgttaaaagctgatgaaatggatcctgaagatttttttgtttttatctatagtggtgatgttattgtaaaacctgagataaatgaacgaaataaagtaatagctgaggttaccctgagggtattcaatcttaatcccgagaacggtggtgttaaagccgagagaagaaatgtcctcgagaaaggcttaggcactataaaggggtatgttaagattgctcaagacttaattgatagtggtgaggatgcagaagaagttcggcaatatgttcgggatgagtattatgaaaaaatttcacaaatggattttaaaactgcaaggaaacatgtttttgaagcatttctaccttga

SEQ ID NO: 86938 - DNA, 1398 bp, Escherichia coli KTE53
atgagaatcgacaaactgtcactgcttaactttcgttgcttcaaacagctcgatatcacttttgatgagcacattacgattctggttgcaccgaatggcgcgggcaagacgacagtgctggatgcggtacgcctggcgctgttcccctttattcgtggttttgatgccagcctctacgtgaaagataaatcactagcgatccgtaccgaagacttacgtctgatttaccgccaagaggcactgaacatggaaatgtcgtctccagccaagattacagctaccggagaatgggcaagcggaaaaacggcaacctggatgctcgataaacgaggagaacagccgccacatgaagataagatggcggcgcagcttacccgctggggtgagcaactccagaaacgagtacgtgaagagcatagcttgcaacaagttgaacttcccctaatgctttatttggggactgctcgcttatggtatcaagaacgttatgaaaaacagcctactgagcagcgcctggataatagtgccttttcacgtttgtccggctatgacgattgcctctcagccacatctaactataaacagtttgagcagtggtatagctggctatggcttagctaccgtgaacatcaaatcacacaacttgaatcaccttcagcaaagttaaaagaaggtgttcgtgttcaacggatgaaagaagccattcaggctatccagcaggccattaactgtctgacccagcaggtgacaggctggcacgatctggaatacagcgccagccataaccagcaactggtaatgagccatccgcaatacggcaagatccccttatcccagctcagcgatggcttgcgaaatgccgtcgcaatggtggcagatatcgcatttcgctgtgtcaaactcaatcctcatttacaaaatgatgcagccttaaaaacgcagggaattgtgctgatcgatgaagttgatatgttcctgcaccctgcctggcagcagcaaattatccagtctttacgcagcgcatttccgcagatccagtttattgttacgacccatagcccgcaggtgctcagtacggtaaaacgcgagtccattcgtctgcttgagcaggatgagaatggcaacgggaaagcgttgatgccgctcggagcaacctacggcgagccgagtaacgacgtgctgcaaagtgtaatgggcgtcgatccacagcctgcggtgaaggagaaggcagacctgcaaaaactgacaggatgggtggatcaggggaaatacgacgagccgaaaacgcagcaactgatggtcgcattggaagttgcgttgggtgagaagcatccacagcttcaacgcttacagcgcagtattgcccggcagagactgctgaaagggaaagcgcaatga

SEQ ID NO: 86939 - DNA, 732 bp, Escherichia coli KTE53; identical to SEQ ID NO: 86109

SEQ ID NO: 86940 - DNA, 1398 bp, Escherichia coli KTE60; identical to SEQ ID NO: 86108

SEQ ID NO: 86941 - DNA, 732 bp, Escherichia coli KTE60; identical to SEQ ID NO: 86109

SEQ ID NO: 86942 - DNA, 1398 bp, Escherichia coli KTE67; identical to SEQ ID NO: 86108

SEQ ID NO: 86943 - DNA, 732 bp, Escherichia coli KTE67; identical to SEQ ID NO: 86109

SEQ ID NO: 86944 - DNA, 1653 bp, Escherichia coli KTE119; identical to SEQ ID NO: 86320

SEQ ID NO: 86945 - DNA, 651 bp, Escherichia coli KTE119; identical to SEQ ID NO: 86321

SEQ ID NO: 86946 - DNA, 1359 bp, Escherichia coli KTE143; identical to SEQ ID NO: 86204

SEQ ID NO: 86947 - DNA, 660 bp, Escherichia coli KTE143
atgcgcgaaataactaaagggcaaccgccggctagtttgcaacagtgggtgagagcaaaaccacgggataaaaatgccaatcagtggtttcaggaactttatgcgcaaaaaaaatgggatatcgttggcgatctcagccagcagtgcgctcaggaacaattttatctctgtgcttattgctgcgatcgcgtgacaggtacaaaccgcgataccgttaatgaacatgtcgaagccagggatttagctcctgctcgcagtctggaattcacgaatatcgttgcaagctgcaaaacaaaaggccagtgtgacgactcgcataagaaccagccattgctgttaacgccgcttatgccggaatgtgaaaccgagtttatcttcaagatcagtggtcgaattgaagggacgacgccgagagctatcgatgcgattaaggtactcaaccttggcgatagtgaacgtaataatcgggcattaattgaaaaacgtaagcagctttccgacagccttctgtgggctaatggcattgacccttcagaggggcttgaggatgacgatctgctgcaagtggttatcgacgaattactcacccccgtcgacggttatctggcacctttcgctcccgtggtggcgaatattctaaaaaactggatgaccgcatga

SEQ ID NO: 86948 - DNA, 1251 bp, Escherichia coli KTE45; identical to SEQ ID NO: 86208

SEQ ID NO: 86949 - DNA, 666 bp, Escherichia coli KTE45; identical to SEQ ID NO: 86209

SEQ ID NO: 86950 - DNA, 1251 bp, Escherichia coli KTE46; identical to SEQ ID NO: 86208

SEQ ID NO: 86951 - DNA, 666 bp, Escherichia coli KTE46; identical to SEQ ID NO: 86209

SEQ ID NO: 86952 - DNA, 1398 bp, Escherichia coli KTE63; identical to SEQ ID NO: 86202

SEQ ID NO: 86953 - DNA, 732 bp, Escherichia coli KTE63; identical to SEQ ID NO: 86109

SEQ ID NO: 86954 - DNA, 1329 bp, Escherichia coli KTE115
atgaaaatagccaatattagacttacgaattttagatgttttgacgagtttagtgttgattttgacccaagacttacagttctcattgctcgtaatggtagagggaaatctactctgcttgacgcggtagcattagctttaggaccatttttaactcgtttgccagggatcaaagggctaagtttcaagaaaaccgatttccggatcgacgaaaatggagaccagccgtcctatatgcgagtaagttgtactagtacaacgggtataacttgggatagaactgagcgaagagatctgacaaaaaaaacgttaggtagcatcccccaaggggcagcccttaaagccttgaatgattacgtcgatacgttcattgattctcacaatgagaataaacactatacattgccaatttttgtttattacggaactgggcgtggagtgtttgatataccactcagaaaacgtgcatttaacaagcatttttctcgatttgaggcccttgacggtgctcttgaaagcaaaacaaatttcaaaagatttgtgcaatatttttattttcttgaagaaaaagaaaatagattacagaaagagcaacgatcatttgaagtagaaatccctgaattaagggcaatacgcttggctgtggaaaaattactgccagagtttagcaatattcgctcggcagtacctgctggaattatggtcgattggtgtaagcctattggaaatggtgaaacaaccatacaaaagctaaggattgaacaacttagtgatggctatagaacaactttagctatggttatggatattgcagcaagaatggcagaagctaacccctattcgagtgatcctctaagttctgaggggataattctcattgatgaggtagatctgcatctgcatccggaatggcaacgtgagtttctccctagattaatcaacgttttccctcatcttcagttcatagtatcgacgcattcaccatttatcatccagtctgtcaaagaggggatgttggtcgatcttgataaagatgacatttcggatagcccctctttgaataaagaactcagcatcgaagatattgctgagggtgtaatgggaatggaaaaagttcaacgaagtgaattgtttaacaaacaagtcgcagtttcagatagatattatcagttactgaatgaaggaagaagtgaaagcgacccagaggtaaggaagctctccgctgagcttgataaattggaagagttttttggagataacccagcttatgtagccttacttcgtgctgagcgccgaaaaataatggggacacaaggaagtaaacaatga

SEQ ID NO: 86955 - DNA, 612 bp, Escherichia coli KTE115
atgagacctgtaaatcgacctccatataatggaactgtttatgcagattataaatcatttttaccttcgctattaactgcatatggcggatattgttcttattgtgagcggccggataaggttgatgtggagcatgttgtcccaaaaacgcatgcaccacttttgattactgattggaacaattttttactgggttgccctcgctgtaaccgagattttaaaaaaagtaagaatactcaacgtataggctatgtttggccagatgttgagaatacatttaatttattgacataccatccagatggtagagtagagcctaagcaggggctgtctgccggactaactgcgcaggtacaggctactattgatttggtatgtcttgatgatggtaaccaagtacaaaaaactttaaatcttggtagaaggagatattttggactcgcgaataaggccaagactctttatctgagtaatttattgagtattgatgaggtcatggatatggctcagttaggatattggtcgatctggtataatgtgtttcaaggtgtacctgctgtcctttcagctttggagaattcctatcctaataccgctataaaccgcccatga

SEQ ID NO: 86956 - DNA, 1398 bp, Escherichia coli KTE209; identical to SEQ ID NO: 86202

SEQ ID NO: 86957 - DNA, 732 bp, Escherichia coli KTE209; identical to SEQ ID NO: 86109

SEQ ID NO: 86958 - DNA, 1398 bp, Escherichia coli KTE218; identical to SEQ ID NO: 86202

SEQ ID NO: 86959 - DNA, 732 bp, Escherichia coli KTE218; identical to SEQ ID NO: 86109

SEQ ID NO: 86960 - DNA, 1398 bp, Escherichia coli KTE223; identical to SEQ ID NO: 86854

SEQ ID NO: 86961 - DNA, 732 bp, Escherichia coli KTE223; identical to SEQ ID NO: 86109

SEQ ID NO: 86962 - DNA, 2292 bp, Escherichia coli BCE002_MS12; identical to SEQ ID NO: 86352

SEQ ID NO: 86963 - DNA, 927 bp, Escherichia coli BCE002_MS12
atgagacacgtccctcgtgggtcagcccaaccgccgttatcattatcggcgttggattctaatggaaaaagtgaattacagcgagcgcgggaacattatgctgagccagaacaggcaaagcgatttgaatttaaagcctattcttccgacgatgtaaaatggcgattaaacacactattccattttaagtgtgcctattgtgagacttttttctctgcttcttcaccggtagacgtcgaacactaccgcccaaaaagtagagtgagtgaagatgctgcgcatccgggatactggtggctagcgatggactgggagaaccttttacccagttgcattgactgtaatcgtaaaaggcggcagcacattgttaatcagtccagtagtcttatttctcttttggagaatagccggagagcagccacttctggagggaaaaaagacagctttcctctagccaataggggggtacgtatgcagcctgaaagcagagatcactttgaagaacaggctttgttacttaatccctgcgaacaccaaccggaatcattcctgcattttgtcagcataggcgcaccttctcttagtctggtagtgcctacaggagatagagaaagtccacatggcgcaacgtctattcatgtctacgggctcaatcgtctcggtttagttcaggaccgcacgcgttacttacgtcgactcgaatttttgggtgatatgatgatatcgctcggtgagcttattgatcaagtggatagaatggcgttagaagaagttcagagggacgaaatcatacgcccattgagattattattggataaaaccggtaaagaaatgactcagatggctagaccggatcagccatattcagtgatggctgaaacgtggatagcccaattctttcaacaaatagccaaccggggagtatga

SEQ ID NO: 86964 - DNA, 1398 bp, Escherichia coli 2848050; identical to SEQ ID NO: 86108

SEQ ID NO: 86965 - DNA, 606 bp, Escherichia coli 2848050; identical to SEQ ID NO: 86549

SEQ ID NO: 86966 - DNA, 2292 bp, Escherichia coli BCE001_MS16; identical to SEQ ID NO: 86352

SEQ ID NO: 86967 - DNA, 927 bp, Escherichia coli BCE001_MS16; identical to SEQ ID NO: 86963

SEQ ID NO: 86968 - DNA, 1752 bp, Stenotrophomonas maltophilia RA8
atgcaattgcgccatttggccatcccagagtttcgcaacctgcagagtgttgcgatcgacttcgccacccagctggaacctgggcagggggctatcccagctacggcgctcgaggtcatccgcagccatgctcttatcggccagaacggagtgggcaagtccaatctgattgaggcgttgatcaccatcttccgcgacgtggacctggaccgcgatgccactctggactacacgttggagtacgaaatccgcggccgcagcgtacgcatccaggctgacacaactaaacagaagcggccattcgtttgggtggacgggcagggtcaatctcaaggttacttgcttaagaatcgagagctgttgccttcacacatatttgcctattactccggccggaatgagcgtatcgagaccttgttccaagagcaccagcgtcgcttcaaccagcgtcaggagatcaccactgacgaagtgctacccgaacagctgcttgagaacttcacggctagcgatgctgacatccgcgcgctagaggacaccagacgtcgtcgcgatgcgcggcttaagcatgccggtgacgaccgcttgcggcgcctgttctattgccgtggtggacacagtcagctggtgcttttggcttgcctgctgtcggatgaccctgtgttccagaaggtgctgaagaacctgcatatcgagtccttggaatccgcgctgttcgtgctgaaggagccgcatcgcctgcgcgagaggcgccggggcgggaagttcgacgagaacgaactcaatgaaggcgatccgcgcttctggtatgcccgaggcaatgtggtgagcgagtttctcgacaagctttggcaggtggcctgggccccaattgagcaggaaatcactcggcagatcgacttccgtggtcgcaccgaaaagcagaaccagctttacttgttcgtacccagtcatgccaagctcaagcaactgggtgagctggtgggtggtaccgacagcttcttccgctatgctgaaggcgcctacatcggcgacctaatcgatgaagtgcgtatcacggtgaagaagtgcgatgagcacggtggcaaggtgaatttcactcagctatcggaaggtgagctgcaaatgctcaccgtgctgggcctgatgcgtattacgcgggagaaccactgtttatttctactcgatgagcctgatacgcatctgaacccaatctggaagttgcgttactttgacgacatcgaaagcgtgctaggtgcgggcgagaatcaggtggagcagggcgagtcgcagattctcatcaccacccatgacccaatgatggtgggaagcctcaagcgcgagcaggtgcacatcttgcgccgccggggtgatcaaacagtagtggagcagcccgatatgcacccgcaaggcatgggggtgacggggttgcttaagagtgatctgtttggcctctcttccacgctggatatcgagactgagcggcggctgttccgccgcaacgagttgtacgtgaagtcaccacggacgttggaagaagacgccgaactcagccgtctgtcgacggagctggccgacttgggtttttctacggccgacttccgtgatccggactacgccttgttcgtgcgaaaaatggcgcagcaccgcaagtttagaagaccaaccctcacgccggaagagcaggcggagcaggatcacatcgcaggcgagatcattgatgagattcttcgcgaggaggctgataaatga

SEQ ID NO: 86969 - DNA, 858 bp, Stenotrophomonas maltophilia RA8
atgatcttcatcgaccttgaacacaagcggccgacggacaacgacataccgggctggatgccctggacacaggcgcagtgggacgcttggctggcgacatcaaagcaattgatagaaagactggcagccctagaggccgcaggaggtcgtgaagagcgcaatgtcttgatcgataagaataagccacattgggatgcgttaaagccgtggttattggcactttctggcgggaaatgctggttctccgaagtccgcgagttgtattcgcattacgacgttgagcactttcgaccaaagaaagcagcaaaggcattgaatggcgtcaagcgagatggctattggtggctggcctttgattatatgaaccttcgcctctgcggcaatgtgggtaaccgaaaaaaggggggctggtttccgttgaagcagggctcgctctgttcaacctatgcggagccctgcgaggagtccgagtcccgctacttgttggacccgattgacgatgatgacgtttcactgattgcatttgacgaagaaggcaaagtcatacccgtgccgggcgcctcagattgggagcgggagcgcgtgagcgtgacagtccagcgacttaagctaaacgaacatgtccccctcgctgaggagcgacgcaaggtttggcagaaggttgatgcattgattgatgaatttttcgcagctaaggccaagtgctctacgggcaacaaccctgcggccaaggcaaaactgctggaggtccgctcgcgagtgagggaaatgacccagcgatcggccgaactatctgcggttgcccgatggtgcatccaagtgcgcaatgaaccgcagctatcaagattggttgcctag

SEQ ID NO: 86970 - DNA, 1635 bp, Escherichia coli 179100
atgataaataaaatgaatttagagacttgctatgttgattttttagagttggaatcacatgtgataaacgaggattatttgaaggagtctgttgagcttcaaaagctaatatctactttaaatgagagtaagtttcatttaaataaaataggtatacatgattttaaacggataagagaactacagatttctttagaagatgatttgactgtttttgtcggggataacggattcggtaaaagcactattttggatgcaatagcaattgttttgagttggttgagatcaaatattgaaaaggagagtaagcctggtacttatattaaaagccatgaagttaataactctgttgatgttgagtatgcatcaattgatgcaaatataaaactcaaggactttaataccagtattttgattactaaagcgaaagagggggcatattattctagaaataatgaattgttggaggtaaaaaaacttgcaagtatttatagacttgtgaataaatatgttgataatgcaagcttgcctttgatggcatattattctattgcgcgttcttatataggcggtggggttgataggaaaagaaaaaatgctaaaactaaaactgtatggtcaaaattcgatgtgtatgatgaaatcgagtttgacagaaatgattttaccgatttttttcaatggcttgtatttcttcataacagagcttcacaagagaaattgagtgagtcacaaacgacaatcaatgcgttattttcagatattcagagtttgaaagcaacattaactcaactatctgcgattgataatattgattcaacagttataaaaggtttagagctttcgcttaaagaaaaattgaactacatgaaatctctgcaatcaggagaacataagtttaataatgcagtatcactttatgatagtgttataaataccattctaaagttcttgcctgaatttcagtggattaagcttgtttatggtgatgatgattataagattatccttaaaaaaggagaggttgaattagatattcaacagttgtctcaaggtgagaaaactatatttactttagttggtgatttggctcgacgtttaattttacttaatcctaatttatctaatcctctattgggatatgggattgttttaattgatgaaattgatttgcatttgcatccgcaatggcaacagacaattattgagcgtttgacatctacattcccaaatgttcaatttgtaattactacccatagcccacaggttttatccactgttagctctcgttcagtgcgtattctacaggaagtggaagtagatggtgttaatgatttgatagtgtctcaccccgactatcaaataaaaggtgttagtaatcaggatgcacttttatatggaatgagaactgatcctataccctctactaaagaaaatggttggcttgaagaatataaaaaattggttgagcttaatcgttatagcagtgacgaggctcttttgttaagagaaaaagttattaaacatttcggattagaccatcctttagttcaagagtgtgatgatcttatatctgttttggagttcaaaaataagataaatcagcacttttctggaagtaaggatgtaaaatga

SEQ ID NO: 86971 - DNA, 561 bp, Escherichia coli 179100
atgcaaggtaaattatgtgcttattgcgagaaaaaaatagagcatcataaaagtggtggcaaaaataaagttgagaggcatattgagcatttttacaggaaaagttattacaaaaatttaactttcgagtggtctaatttgtttggctcatgtggtgagccgcaaaggtgtgggttttataaggataagcaaaaatataacgatgatgatttaattaaagctgatagacaaaatccagatgtttttttccattttttggaaaatggtgatgttcatattagagaaggcttgaatgagaaagaacacaaaatggcagaggttacgttaagagtatttaacttaaacccgtcctcaggaggagtcaaggcggaaagaagacgtgcaatagaattaagcatgacattaataaaggaactggtcggatgtgcatctcagcttattgaatcaggatgtgaaattgaagatgttagatctatggtctttgatgagtttaaaaagaatgtaaaagatagatgctttaccactgcgataaagcatgtttttgagaatagaatgccttaa

SEQ ID NO: 86972 - DNA, 1752 bp, Escherichia coli 179100
atgcaactgttgcgcatctgcatccccaactttcgtaatctacgtggtctcgatattgccttcgcgacgcatttgtcagccgctttaggcgcgccagctgatgctcaaccaaagccgatccgcagccacgccctgattggccagaacgggaccggcaagtccaacttgatcgaagcgctgatcaccatcttccgtgatgtcgacctggatcgtgaagctgcgttcgattacacactggaatacagcattcgtgatcatgttgtacgcattgaagcggatacggtcacacaaaagcgcccttacgtgtgggtcgacggcaaagctgaaacgcagggctatttgctgaaaaatcgcgagctgctacccacacatatctttgcttattactcgggccgcaacgagcgcattgaggccttgtttcaagagcatcaacgccgcttcaacctacgacaggaaatcaccaccgacgaggtgctttcagagcagctgttggaaaactttaccggatctgaggcggatatccgcgcggtggaggaagccaaacgccgccgagaatcacgactgaaacaagcaggcgacgaccgcctgcgccgtctgttctactgccgtggtggccatagccagttggtgctgctggcctgcttgctctccgatgaccaggtgtttcagaaggtactgaaaaacctgcacattgaatcactggaatcggctttatttgtactgaaagagccacatcgtctgcgcgaaaaacgccgcagcggcaagttcgacgagcaggaactgatcgagggcgatccacgcttctggtattcccgtggcaatgtggtaagcgagttcctcgacaagctctggcaagtatcttgggctccgattgaacaggaggcaactaagcaaattgacttccgtggccgtagcgaaaaacaaaagcagctgtatctgttcgtgccgaatcaggacaagctcaaacagttgggcgagcttgtcggcagcactgatagtttcttccgctatgccgagggcgcttacatcggtgacttgatcgacgaggtgcgcattacggtcaagaagcgcgatgaatatggcggaaaggggagtttcacccagctctctgaaggcgagctacagatgctcaccgtgctgggcctgatgcgcataacccgagaggaccactgccttttcctgctcgatgagccggatacccacttgaaccctatctggaagctgcgctacttcgacgatatcgaaggtgtgttggcctctgatgaaggtgcactggtacagggcgagtcgcaaatcctcatcaccactcacgacccgatgatgattggcagcctcaagcgcgagcaggtgcatattctgcgacgcgacaagggacgctctatcgtggatacgcctgatgaacatccgcaaggtatgggagtaaccgggctgctcaagagcgagttgtttggcctctcgtccacgctggatattgaaactgagcgacgccttttccggcgcaatgagctgttcgtaaaatcaccacgctccccagaggaagatacagagctatcacgactttccactgaattggccgatttgggtttttctactgccgattttcgcgatccggactacgcgctattcgtgcgcaaaatggcacagcatcgtcgtttccgcaagcctacgctcacgcccgaggagcaagccgagcaggacgccattgccgattcgattattgatgaaattttgcgtgaggaagaggaccaatga

SEQ ID NO: 86973 - DNA, 858 bp, Escherichia coli 179100
atgatttggattgaccttgagcacaagcaacccaccgataccgacattccgaattggacaccgtggacacaagtgcgatgggaggcctggttggcgaaatcagctcaactggtgacagatttggcagctctagatgaggcgggaaagcgtgatgaacgcaacgcactgattgacgccaatagtgctcactggggagctttgaaggaatggctgctagccttgtcggccggtaaatgttggttctcagaggtacgcgagctttactcgcattacgacgtagagcattttcgacctaagaaggaagctaaggctctggataccaccctacgtgatggttattggtggctagctttcgattacatgaattttcgcgcctgtggcaatgttggtaaccgcaaaaaagggggctggtttccactcaaggatggttctctttgttctacttattcagcaccctgtgaagaatctgaaacacgctatctgcttgacccgattgatgacaatgacgttgcgctgatcgccttcgacgaagaaggcaaggtcattcccataccgggctcttctgagtgggagcaggagcgtgtcaacgagacggtaaagcgccttaaactcaatgaacatgtaccattagcagaagcacgtcgcaaagtatggcaacaagtggatcggctgattgacgattttgccaaggccaaagcccgctgctgtgctggtaataacccagccgctaaggcgaaactaaccgagattcgagcgcgtgcccgcgaaatgaccaaccctacagcagagctatctgcggtcgctcgttggtgcttgttaatgcgcaacgatccacagctttccagattggtggggtaa

SEQ ID NO: 86974 - DNA, 1398 bp, Escherichia coli P0299438.11
atgagaatcgacaaactgtcactgcttaactttcgttgcttcaaacagctcgatatcacttttgatgagcacattacgattctggttgcaccgaatggcgcgggcaagacgacagtgctggatgcggtacgcctggcgctgttcccctttattcgtggttttgatgccagcctctacgtgaaagataaatcactagcgatccgtaccgaagacttacgtctgatttaccgccaggaggcactgaacatggaaatgtcgtctccagccaagattacagctaccggagaatgggcaagcggaaaaacggcaacctggatgctcgataaacgaggagaacagacgccacatgaagataagatggcggcgcagcttacccgctggggtgagcaactccagaaacgagtacgtgaagagcatagcttgcaacaagttgaacttcccctaatgctttatttggggactgctcgcttatggtatcaagaacgttatgaaaaacagcctactgagcagcgcctggataatagtgccttttcacgtttgtccggctatgacgattgcctctcagccacatctaactataaacagtttgagcagtggtatagctggctatggcttagctaccgtgaacatcaaatcacacaacttgaatcaccttcagcaaagttaaaagaaggtgttcgtgttcaacggatgaaagaagccattcaggctatccagcaggccattaactgtctgacccagcaggtgacaggctggcacgatctggaatacagccccagccataaccagcaactggtaatgagccatccgcaatacggcaagatccccttatcccagctcagcgatggcttgcgaaatgccgtcgcaatggtggcagatatcgcatttcgctgtgtcaaactcaatcctcatttacaaaatgatgcagccttaaaaacgcagggaattgtgctgatcgatgaagttgatatgttcctgcaccctgcctggcagcagcaaattatccagtctttacgcagcgcatttccgcagatccagtttattgttacgacccatagcccgcaggtgctcagtacggtaaaacgcgagtccattcgtctgcttgagcaggatgagaatggcaacgggaaagcgttgatgccgctcggagcaacctacggcgagccgagtaacgacgtgctgcaaagtgtaatgggcgtcgatccacagcctccggtgaaggagaaggcagacctgcaaaaactgacaggatgggtggatcaggggaaatacgacgagccgaaaacgcagcaactgatggtcgcattggaagttgcgttgggtgagaagcatccacagcttcaacgcttacagcgcagtattgcccggcagagactgctgaaagggaaagcgcaatga

SEQ ID NO: 86975 - DNA, 606 bp, Escherichia coli P0299438.11; identical to SEQ ID NO: 86549

SEQ ID NO: 86976 - DNA, 1398 bp, Escherichia coli P0299438.3; identical to SEQ ID NO: 86108

SEQ ID NO: 86977 - DNA, 606 bp, Escherichia coli P0299438.3; identical to SEQ ID NO: 86549

SEQ ID NO: 86978 - DNA, 1398 bp, Escherichia coli P0299438.5; identical to SEQ ID NO: 86108

SEQ ID NO: 86979 - DNA, 606 bp, Escherichia coli P0299438.5; identical to SEQ ID NO: 86549

SEQ ID NO: 86980 - DNA, 1398 bp, Escherichia coli P0299438.6
atgagaatcgacaaactgtcactgcttaactttcgttgcttcaaacagctcgatatcacttttgatgagcacattacgattctggttgcaccgaatggcgcgggcaagacgacagtgctggatgcggtacgcctggcgctgttcccctttattcgtggttttgatgccagcctctacgtgaaagataaatcactagcgatccgtaccgaagacttacgtctgatttaccgccaggaggcactgaacatggaaatgtcgtctccagccaagattacagctaccggagaatgggcaagcggaaaaacggcaacctggatgctcgataaacgaggagaacagccgccacatgaagataagatggcggcgcagcttacccgctggggtgagcaactccagaaacgagtacgtgaagagcatagcttgcaacaagttgaacttcccctaatgctttatttggggactgctcgcttatggtatcaagaacgttatgaaaaacagcctactgagcagcgcctggataatagtgccttttcacgtttgtccggctatgacgattgcctctcagccacatctaactataaacagtttgagcagtggtatagctggctatggcttagctaccgtgaacatcaaatcacacaacttgaatcaccttcagcaaagttaaaagaaggtgttcgtgttcaacggatgaaagaagccattcaggctatccagcaggccattaactgtctgacccagcaggtgacaggctggcacgatctggaatacagccccagccataaccagcaactggtaatgagccatccgcaatacggcaagatccccttatcccagctcagcgatggcttgcgaaatgccgtcgcaatggtggcagatatcgcatttcgctgtgtcaaactcaatcctcatttacaaaatgatgcagccttaaaaacgcagggaattgtgctgatcgatgaagttgatatgttcctgcaccctgcctggcagcagcaaattatccagtctttacgcagcgcatttccgcagatccagtttattgttacgacccatagcccgcaggtgctcagtacggtaaaacgcgagtccattcgtctgcttgagcaggatgagaatggcaacgggaaagcgttgatgccgctcggagcaacctacggcgagccgagtaacgacgtgctgcaaagtgtaatgggcgtcgatccacagcctccggtgaaggagaaggcagacctgcaaaaactgacaggatgggtggatcaggggaaatacgacgagccgaaaacgcagcaactgatggtcgcattggaagttgcgttgggtgagaagcatccacagcttcaacgcttacagcgcagtattgcccggcagagactgctgaaagggaaagcgcaatga

SEQ ID NO: 86981 - DNA, 606 bp, Escherichia coli P0299438.6; identical to SEQ ID NO: 86549

SEQ ID NO: 86982 - DNA, 1398 bp, Escherichia coli P0299438.7; identical to SEQ ID NO: 86108

SEQ ID NO: 86983 - DNA, 606 bp, Escherichia coli P0299438.7; identical to SEQ ID NO: 86549

SEQ ID NO: 86984 - DNA, 1398 bp, Escherichia coli P0299438.8; identical to SEQ ID NO: 86108

SEQ ID NO: 86985 - DNA, 606 bp, Escherichia coli P0299438.8; identical to SEQ ID NO: 86549

SEQ ID NO: 86986 - DNA, 2220 bp, Mesorhizobium sp. STM 4661
gtgatcaaggttgatcgagacagcgttcctttccctgaagtactgcggcgcggaagaggcggcgcggcggacgaagaatttcaaaaggcaagcgcgttttacagcgagttcgacaagaagcggcaacactcgcgcttcgaattcaaactgtaccgccacaagaccgtaagggatgctctcgcaaaactgttcaacgggaagtgcgggtattgcgagtcgcagattgcggcgatcggctatggcgatgtcgccaatttccggccaaagggcggggtgctcgacgcaggcagcacgtacctcccgctgcactattggtggctgacgaacgagtggaccaacctccacctttcctgctcgatgtgcaatcgagccaagggcgggagattcccgctcgaggacgaaaaggatcgggcgcccgtgctcgcctcggcttccgaccttctaaaggaacggccgctgttgctggatccatgcgtcgacgatgtcgagaatgtcctgctcttttcgtcaaacggcaccgtttcgtccagcgatccgcgtgggctaacaacgatagaaatcctctcactgaaccgtgtcgagttggtcaaagcccggcagcagaccgctcgcgctgtcctcagtcagctcgaagtgcttttgctttcagaaggaagtcctgatgggccgcagatcaataccgagatcgtcaatcgcctgaaggaaatgatgtcgcccgaggccccttatgcgagcatgtgccggcaactcgtcagtcaggcgatagcggcgaagccgaacggcatggttgctctggccttcgcaaatgatcccctcgcggcctcggtcaagccgttcacctcaggtgaggaacgcgccgcgcaaaccgcgcttaacaaattccaggctgatcaagagagttattcgcttgaagccgagaccgagcaaactgtcgcggcctatgtcagcacgcgagaccgtctgatcgagtctgtccggatcaagaatctgcgcgctatcgctaacctcgacctcaacgtggtcgacgggagtgaacgcgcgccttggctaatgctcttgggcgaaaacgcgaccggcaagagcacggtcctgcactctattgctcttgcactcgtcggagagcgctatcgagggaaactcgtcgatgccttgcacctagatgttcccaggatggtgaggaacggggcagactttggggaagtcagtatcagactgacaggtgccaccgagccgcgaaccctacgcattcaagccgacggaacgatcacagcgacgggaagagaggcgcagctcatgctgctcgcctacggatcgacgcgcttgctaccgcgcaaaccggattccgaggttcaaggcacgaactatgctcgcgtcgagaacctattcgatcccttcatccctctggttgatgcccagcaatggcttctcacggcaccggctgaagcttttgactacgccgctggtgcaatcaagaaggccctgacagtcgacgtcgaacgcgagcttatccgccaggatggagaagtcgggataatcgaaaggggcgcccttatcccgctccccaggctctgcgacggctatcagacggtgatcgcgctcatcgccgacatcctctcagtcgtcttgccggcttggaagactccggacttggcgcagggcctggtcctgatcgatgaggtggggaatcatctccatccctcctggaagctccgctttgtcgagagcgtacggagtatcctgcctgggatgcaggtcatagcgaccacgcacgagcccctatgtctgcgggggctgcaccatggtgaagttgccgttctgcaacgcgggccacgcggtggaatccatatgcgcgccgacttgccggcgatcgacggaatgcgggtggaccagatcctgatgtccgagcactttggtctgcaaagcaccctcgatccctcgctccaatcacttttcgacgagtattacgcgcttctccgggaggacgaccccagccccgatgaccgccaacgaatggaaacactgcgcaacgatatcaatcaaaagcagaagcttggcgtgaacgaacgtgagcgccgcatgctggaggccatcgaccgatttctcgcgcgccgcattgaggtgcccgacccgattgagctcgccgaacgcgaacagtcgctcgatgccgagctttcgtcgatatggagcgaggcactggttagggtggagggagcagcatga

SEQ ID NO: 86987 - DNA, 1071 bp, Mesorhizobium sp. STM 4661
atgatcccgatcgttcgagaccaagccgtggcggcgtgcgcggcactgaacaagatcggttcaaacgggttgaccgaactcgaacatgcgctctggttcttcggcgggatagcaccggagaaaaatcccctgccaccaaagccgaccaagccgccggcgttctccgtttacaaggaggagcctgtcagagatgcgttgcgggctctgttcgggacacgatgcgcatactgcgagagcaactacccccatctcgcgcagatggaagtggaacactatcgtccgaagggcgggtacatcgacgaatacggcgttcttaaaaagcccggctattattggcttgcagccagctggggcaaccttctaccgtcgtgcatcgactgcaatcgcgagcgaaagcagcatcatcggtcgagggacggaaagattgtaaagagcaagtcgggcaaggccaatcgcttcccgatcctgcctggaacctcatacgccaccacgccggccgcggttgccctggagcgtccgatgctgctcaacccctgtgaggatcagccccatctgcacctgcaattcttcgccgacggatttctccagcctgcactcacggcagaagaaagggctgccggtcgaggaaagtccacaatcgatgtttgcggtttggcgcgggacgctctggtgggggtgcgccgcgaatgggcgctgcggacgaaaggagcgatggaggcggttcttcgcgctgatcggaataggcgagtctatccacacgatccggtcatggcagcgcagctgacggatgcggaaaccaatctccacacgtttgtcgatggcgaagcgccttaccacgcgatgactgctgcgatgatggcggccttcgtcgaggtccgatcgcttctggacccctacttcaccgcgctcgaagcatggagggcgaaccaaagcgtcggcaaccggcaagcattgttggagcgtgcgaccgccattcagcagctgcgccgcgacgcaaggttcgacgaacagcttgtcaattttctattggataaagcgggggcctccgaagccactccgggcaggacctaa

SEQ ID NO: 86988 - DNA, 1173 bp, Rhizobium freirei PRF 81
atggctcccacgaacttgcagcggcttggactggcagacgattggcctcccgccgagaaggtggcgatccttgttggacccaacggatcaggaaaaagtcgctttctgcgcgaactcgcaattcagatccgtggtgatcgtgatttagccatcatttctaataccgctcatgatcgttttttaggcttgcgcggattgaagcgtatttctgcgggaagaggcaacagatccccgaagagcatcgtcaagcgtgcaattggaaggacgattgaccaacccgattcccgcttctaccagattggagcgatccttgattattgcggttatcggccgcggttcgggttcatcgtcgataccgacccgttctcagctcatcttgacccgagaaatttcctatttgatccaaacgactacgatgcagttgttgcattcttgcagcggcataatccaaaggaagttctttgggtcgatcaaggtgagtcggctttttcgttttctttgggacgcgaatttggcgctatcctccgcagtgaggaaagccttcgtaggcaagggcgcattcgcggaatccaggtgttcctggaaaggcgtgacggggaaatcatcgagcttctgaatgcaagttccggcgagctgtcgctcatctcttccctggtattcctgatcagctccattggccaggaacctgtgatcctcattgatgaacccgaaaacagccttcatccgcgctggcagcgcgaatacctcgaaaagatccttgccgcagtttcctaccgcaacgcaacgatcatcgtcgcgacccatgcccctctgatcgttaccggtgccctcggcactttgcccaatatcgttacagtattccaaattcgagacggcgaaccatcggcgcttgatctgaaggaggccaaggcctccgccgccaatgtcgaaggagttctctggcgagcttttgatgtgatcacaccggcaagccactttgtaagtgaagagatggtcggcgtcgtgacaggcgtagaacgtggtgagatcacccgcgatagcgcgatagcgcttgtcaacgacatggcacgcaatagctttgatgagaaacaacggcaatttttcagcgctgtccgcgatctgattggacaggtcgatgctcagcgacgtgaggccgaaaaacgcgatggctga

SEQ ID NO: 86989 - DNA, 660 bp, Rhizobium freirei PRF 81
atggctgacccttacctgccagcgctcgaggatttcgagctgaacgcggacgaaaccgcagcggttgcgaaagcactggaagacgacaaaccctgggattggaagccggaggatcagaaggagttgcaggcactcaaaagtgccaaggacaagatactcgcctaccatctctcgaggcatggcggaaattgttgctattgccgtctcaacctcaatggcgcgggtccgtacatgaccgaccgtgagcacatccttcccaagggaaagccagtttataagccattcagctattccatttggaacctggcggcggcgtgcaagcgctgcaacatgcaattgaagcgcagcggtgacgcctttgtagtcgatccagatgattcaacgaagttccaggacagtgaaaactatcgcttcgttcacccgaatttcgacgcctatggcaaacacttgatccgccttcaagcacaggctgacgccaagaacatcgttatcttcgtcaaaacgcctggaagtgagaaggcgacctatacgcataattttttcgctctgcacgaactccaagtcgatagtttcgacaaagcgcagggcctcgaggaggaaaacttggagacggagttagcggccagggttcgagcgctcgccagggaattcgatcagtag

SEQ ID NO: 86990 - DNA, 2526 bp, Pseudoalteromonas agarivorans S816
atgcaaacccacaatgaaattaatagtctagctagaaagcaggcaaaagaaatatggaggttacttgaatatattcgaggatcagcgccaatagcaagctaccgttcacttgcttatatggtgctattcattcggtatatgcaagacaacagtgggcagcactttaacgtaccaaggttctattcatttgatgctattgggcaatatatagatgagcttgtactcacctgcattgggttaggactttttcagcgagagttagggtatatagctagcgagtttacaatagatattttacgtaagaataatcgaattgaaggcgacttagtaaagttactcgctcaaagtaatggagtcaatagagacaaatacattgttaagcaaacattggatgagctaaatagactctttgcagaaaacgaaatgagatcaggaagtgaattttatactccaaaggatataaataaattagtaactactttgggtatgcaatattctccaagatcagtttgtgatccttttgcgggggctgggagcactgctttttcattctatgaagctactaatggaaaggttcaaatagacactcaagaagttagcacagatatatatttccaattagtcgttacacgaatattaaaaggaatatatggaacagattttttagaagactccattagccatccaaaatacaaaagtgagctatacgatttaatagtttcatttccgccgtttggtttgaaaataccgagctctacgagggaagctatatataaagatagtttaaacgaatggctggctttaactgaagagcttcctatgactaggtccgattggttgactaccctttcgatgtttccatcattaggtagtaaaactaaattaattataggtatgtctttaagttcattaactcgagttggttccgaagccagaattcgagagtttcttatagataagaatgtagttgatactattattttgctacctaaagctattcactactcgactaacataccgacagtcttattaatttttgacatggcccctcaaaaaaatacaaagtcagttcgctttgtcgatgcttctttgttttacgaacctcacagaggtagaaatttactttctgacgaaaatatagctaaaatttttgatgctaccgtttcagatgggcgttttagcaatacagtaactcgtgaaaaactagctagaaataactttaatcttaaccctagcttatatgtagataagacaataaaggttagtaaagtgaagctaactaactttagagggtacaaagatttcactgtgccacttcatggatcattaacagttttggttggtgagaatggagctgggaaaacttcaattttagaggctattgcatgtggcttaggcccatttttaactgcaatgcccgaggctaagggaaggctgatacgaaaatcagatattcatgtaggtattgatggtgtagctgatttttcccgtatatcgatagacacgaattctagccttagttgggatttagtaactagaggcacagaaaaaagtacacaggcgaaaataggtactcaagccctatctgattttgcaaaacaaatagtaaatacagatacagagtatcctctaattgcttattacggaacgaatcgaacactatcaaacactggcaataaagtatctattagcccttttgaagaacttcaaagaagtgaagggtatgactctgcgcttgaggcgaaaattaattatgggcctttaaaaaactggtttacaaaaattgaagtagatgagctaaagcttagagataaaaagaagaaccacgacattattcacccagctaaggtattagtagcaagagcagtaagagaaatagttaatagagttcaaaatgtcacttttgacaaatcaattaatgatgttgttgttacttgggagaatgaaagcggcgaaaatatttctctaggtttagagcagttgagcgaaggctatcgcaatatggttgctctcacaattgatcttgttagaagagcatatctattaaatccaagctctaaagctccattgtctgtagttggagtagttttgatagatgagattgagcttcatcttcatccccgttggcagcaggttgtattagaagacataactaagttattcccaaatatacagtttgttgttacaacacacagccctcaagtacttactacagtcagaggtgagagtattcgagttgtatcaaattcattatcatttgctgaaactgtaaactctccttttggtggtgaaaatagtcgtgtaatgaaacagattttacatgttaactctaggccgattaccgatgtatcaagaaagcttaaagaatattttgatttaattgagctaggtaaaggagaggatcgggaagctttagttttaagagaagaactttcaaaattaacagatgggactgagccgatgttagtagaggctgatttagcgataaaacgcgttaactggatgaagtctagaaagagtcagtaa

SEQ ID NO: 86991 - DNA, 756 bp, Pseudoalteromonas agarivorans S816
atgtctattaaaaatattccagagcctgaacgactcaaagagttccgcttagccaacccaaatgcaacatggaatcaattaaagagtgattcagatgttaataatgcgttgaaggttacagcaattaaaaaaacggcaggcttatgcgtttattgtgagcataaactaatagctaaaactgattatcagatagagcactttcatccgaagaagggaaataataattctgattttggagctggaaaacctaattgggctataaattgggataacttataccctggttgtttagggggtacggctcaggtagtacatttcaccgagcagtatgacattgattttagaactggcgctaacaggagaaataagggaagactcacatgtggtcagaaaaaaggagagatagatcctgaaggcctaattataaaaccaacagagttgaataatagagatccaatattcttatttaatggtgctgatggctctattagtcttaatgtagaagcctgtagaaggcaaaacatatcaacagagcttggagagagccaaatagtaaggttgaatttaaatagtcaaaggctaaaggatgcgagattagagcttgcaagttctcttcgcactcaatttgataaagcttttcaatttgatggggatgctattgaagagctggttgaagactggctagcgctaaatgaaaatgaaatgtatgagctaccttttattagcatgatttcaagtaagtatgaaagaagttaa

SEQ ID NO: 86992 - DNA, 1170 bp, Eubacterium plexicaudatum ASF492
atggagcagatttttttatcggaaatccggatagaaaaagtcagacacttgcaaaagataacaattgatatttcaaatgaaaaaccaatgcatttaatactgacagggaaaaacggcagtggaaagacaagtgttttggaagcaatatcaaaatatttcgactatattatgactgtgaacgactttgagaatgttcctgctggaacagtggtttggaaagatgagtttgacgatgattgtaaaatagtagacggtattaatctgacgttcaatcgctcacagaaagaattggaagaaacgttaagaaaagggctgtttattgtggcgtattataaagataaacgaacttttcaggcagaaccaccagtacacgttgaaaaaataaaattaaaagatcaatataaaattactgaaaacccaggtcggctgtttataaaatatttgttggatttaaaagtaacggaagcgctggcaagaaacaatggcaatttcgaaaaagcggacaggataaaaacgtggtttacggattttgaaggtttacttcaaagaatttttgaagatctttctttgcaattaatttttgaggaagatacattttctttttttattcgggaaaaagacagggaattatttgatttttattcactatcaagtggtttcgcagcaattttggatattgttttggatttgatgcttcggatggaggctcatttgaatagaacatttgattttacaatgccgggaattgttttgattgatgaaatagaaacgcatttgcatattcatatgcagagatccattcttgacttattaacaacgatatttcccaatgttcaatttgtcattacaacacactcaccttatattttgaattctgtggatcattgtgttgtttacgatctggaaaagaatatccggatagaaaatatgtccggttacccggcagaaggaattgttgaaggatattttgaatcggaatcttattcaaaaacattgatggataaagtgaaaagatataaagtattaatagatattgcgcaaccaactgagaaagaacgaatagaaagagcaaatttgaggatggaattgaaacagatttcaggagatcttgcaagagaagccaaggatgcatttgaagatatagaaagaagcagggggggaacatggtaa

SEQ ID NO: 86993 - DNA, 705 bp, Eubacterium plexicaudatum ASF492
atggtaaagtttaggcgaaatagtacgcaaaaagcgaaagcggcagtgattgccttgaacaaggcaaaatcttctcgtaaatcgtataatacgcctgaagtgaatgctgctttatatgaaatgttttacggaaaatgttatatatgcgaaaataaagaaaatttttcttatcaaatagagcatttaaggccgcatagaggaaatatagaattagaatatgattgggataatttgtttttgagctgtacgcattgtaataatataaaaaatgcaaaatatgatcctatattggattgttccaaggtagatgtggatttaaaaattgcgtttcgaaaaataggatattttgggacggatgagcagtatgagtttacggcattggaagatggtgttgaagttaaaaacacgatagagttattgaaggaaacgtattatgggaatacaccacagaaaaaactggaagcagtgcatatacgacgtaaattaagacggaatctgtcagattttaaaaatttaattcgggaatatgaagaagctgcggacattgataaagaagattataaacatgcaatacgtgaagaagtcagctgtagtgctgcgtttgcggcttttaaacgatggcttctttgggatcacaaagagagatatgaggaattattaccattttgtgggatgagtttggaaagcaatcataacttgaaataa

SEQ ID NO: 86994 - DNA, 1308 bp, Eubacterium plexicaudatum ASF492
atgcagattgaacgattaagaattaagaatttcagatgtttcgaaatgctggaaatgcaattgcatccaaagtgcaatgttttggtgggaatgaatggagcaggaaaatctacaatattagatgcgcttgctgttgcattgggaggatatttatcaggatttgatggtataaagagcaattcgattttatcggaagatgcacattacaaaatgtattgtatcggcagtcgtattgagccacaagaacagtttccggtagaaatatatgctgaaggaattgtagaacaggaaaatgtcatagaaaacgatttgaagacgaaaatatcttggcaaagagaattaaacggaaaagatcgtcgtactacccatggaaatgcaaaacctattgtggattatgctcgagcattgcaaaaccgtgtgcgtgccggagatgtaacatgcagactacctttggttgcatattatggaacggggagattatggttacaaaaaagaaatcgtacaaaatacaaaaagggtgaaaagttaaatcggcaaatggggtatatggattgtattgctgcagaatcaaatgagaaacagatgatgcaatggtttgaggaaatgacttatattcagttgcaggaagggatggtaatagcagagctggaagcagttaaaagggctatttgtaattgttatctgaatgtgaacagttctgtgacagatgcaaagctggcatatgatgtcagaagccaggaattggaaatttatatttatcatcatgatgaggcagtaaaatttcctgttagaatgctgagcgatggggaaaaaggaatgataagcctggtggcagatattgcttatcgtatggctttattaaattctaatttgttagatgacgttttagaaaccccaggcgttgttttgattgatgagattgatttgcatttacatccggcatggcaaaagagagttatgggtagtttgctgcgtatatttcctaatatacagtttgttgtaacgactcattcaccaagtatattgcttaatctttcgagagagaatatttggattttaaatcaaaatgaaatttatcagccgcaagatatgacttatggtcgttcagtggaagaaatcttgagagaagtaatggataccaatgttaaaccggatgaagttgtaaacatgcagcgggaatttgaacatgcaatagatattgaagattattattcggccaagcagattcttgataaaatgaaaaatattatgggtgaaaacgcaaatgtagtcattgaaaatcaaatagtactagatgtagagaaatag

SEQ ID NO: 86995 - DNA, 684 bp, Eubacterium plexicaudatum ASF492
atgatttatattcaaaagaaatctgagccggatcttttattagaatatagatatcaggaaaatgccagatttgataatatggatgcaattgtaaaaaaacagcttagggaatccttattaaaagaacaagggtatctttgtgtgtattgtatgaaacgaattggtgacacgaaagatgtaaaaattgaacatcttgaagccagaacaccggaaaatgaattacaatatcctaatttgcttgctgtttgtatgggtggagagaaaggccctgtgaaagcgagaacctgtgatacaaagaaggggaacaggcctatttttattagtcctttaagtaaatccgatatgcagcgaatttattataataatagtggtgaaattcattcttccgatacgactaagtataaatttgagtttcaggatagtaatgggagatatcattcaggatatacaagcccggaacgggatattcatgaatgtttaaattatgaaaatggtgcgccgatgatcgggagaaaaacggctttgagaaaatttcagaaactgttacatccatataaggataagaaaagtaagcgagcttttttagaaaaaatgaaaaggacatattcggtacaaagtgagtatatggagccatacgttgggatcattcgttggtatattgataaaaaactaagtcagttatga

SEQ ID NO: 86996 - DNA, 1293 bp, Clostridium sp. ASF502
atgaaactcaaatcgattacattacaaaatttcaggggcatagagaagctgaccatttttctggatggaaaaacaacggttttttttggcataaatggtgtaggcaaatctacgattcttcgggctgttgacttgctatatgcaaacattattgcaaaacttataggggctggtaaaagaaggacggcagaattgaattgtgaagatattagttatggtaaatcaaaggcaggtattaatgcagtattttcttttgaagatggaacggaaatgaaatatagtcgttctattgatagggcagcaggaaaaaaacacgatataacggaattgaaattattagtagaaaaatttgaagattcctatcttgtaaaagggcatgacgatggtaatggaaattggatagagcaagttgataataaaaatatgcctgtttttgtcaattacggtgtgaatagaattgtgtcggatgtacctctgcaagtgtctaaagaacagtttgcaaaattagatgcgtttgataaagcaatggaaagtacaatagatttccgaaatttgtttcaatggtttagaaatcaggaagatatagaaaatcaggcaaaagtacgggaaaatgcagagtatgaggacaaaagcttattcgctgtaaagcgggcaatgctggcaatgttggatggatttgaagatattcatatcgatagaagtccattagcaatgaaagtgagaaaagaaagtaagtatttgacaataaatcagttatctgatggagaaaaatgcacgatcgcactttttggtgatttggcacgaagaatggcattggcaaatcagggaagggagaacccactagagggaacaggagttgtattgattgatgaattggatttgcatatgcatacttcatggcagcgtaaggtgctgagtgtattaaagaatacatttccgaatatacaatttataattaccacacattccccgcagattctaggcgaaggagatgatacatttaatttgatgtatatgtttaaggatgaaaagaagatatctctgagatcatataaatcatttataggttgggatacaaatgtaattttagaagaagtgatgaatactgcttccgtaaatcaggatataaaaagaatgattaacaaaatgtatgcacttattgaagaaaaggaatttgataaagcggaagaactggccgatatattagatgacaaatcaaatgggtatgcggaaggagttgcaaaagcaagagttctgatttccagggggcgtagatatgaaaagaataaataa

SEQ ID NO: 86997 - DNA, 669 bp, Clostridium sp. ASF502
atgaaaagaataaataaacaagagtctccgcaatggtttgaagactggaagagaaattttaaagcagagaataatagaaatgcccattataagaatgatttttctgctgatgatgcagatggaataaatagaagacggagattgagagaaagtcttgtaaatgaacaggggaaaatatgttgctattgtatgagaagaatatacacagattcttctcatattgaacattttttacctaaggatttttttgcggatcaagatttatcttatgaaaatctgctcgcttcctgcaatggggaaggaaccatggcaacagaagatgagcattgtgggcatagaaaagacaattggtggagagaggatatgatttcccctacagatatagaagtagaaaaaatattcgaatatcttccgaatgggaaaatgaatagtgttagaggaagggcaacatccaatattgcacaggagatgatacacaatttaggattagatagttttcatcttgaaagagatagacgtcaggccatagaagcgtcggaggtatttgatgatgtagaatattcagaggaagaaataagaagttttatagaatattactccaataaagataatggagtttatgtaccgtattgtaaagctattattgattgcctggaagaaatgttatga

SEQ ID NO: 86998 - DNA, 1182 bp, Escherichia coli SWW33
atgaaaatacaaaaaattgatatcaaagatattggtggtataaaaagagcaataattaattttgattcaagtatgaatattatttgcggaccaaatgggatagggaaaaccactattttagattccgtggcacatagttttatttctacaaacagctacgtccttaaaagacatgctcagtctactgatggtcagataaatatcgtattaaatgattgtgacaatattagagaaagtcatatttctcttgcgaatttcgatcctgaggattgttcatttgttcatgggttaagtgaagctggaaggaaagtgatttatttgaatgtttctaggatgtttaaatatgtatctttatctaatatttctaaagacgaggaaagacaagatcatagcatttacacacttttgactgacggaatttcggttgcggatatgaaaaattggttcgcaaaacgctgtctcttcgttaatacaccagaagcattaagtgaaaataataaggttaatttggagttggcaaaaaaatgcttttcactgcttaatgctgaatataaattttctcgcgtagatgcgaaaaaatttgatgttttcgtatctactccaaatggagaaatttggtatgaatatttgtcatcaggatttaaatcatgtctgagtattttattcggcataataaaagagattgaactaagaatgcctgatgaggaatgtttagcacagcattttgatggcattgtattgattgatgagctggaaatgcatcttcatcctgaatggcagtccaaaattgtttctgttttgcgagacacatttcctgcaacacaatttatagttactactcatagtcctcacattatacaaaatgcggaacctaatcagataattgcattagggacagatagtaatggatatacatacgtcagagaacttccgagtaatgagtttggttatacaggatggacattagatgaggtactcaaagatgtaatgggaatggaagacacaagaagtcagaaattacaaagtatgcttgctgcatttgatcaagctattgatgaggaaaataaaattgaagcagagcgcatttataaagaattagatagggcacttcatccagcaaatgtgcttagaaaaatgcttagtattgatctatcctcaataatcgaggaggacaataaataa

SEQ ID NO: 86999 - DNA, 747 bp, Escherichia coli SWW33
atgattaagctggaaagaaattttacacctctattcttttctcctcagaatgttagtcgtttaactgaaaaatttaagagcagcggtactcatgtatggcatcatgatgatgtaaaaaattcgttgatggagttaagtgataaaaaatgtgcatactgtgaggttaagcttggtgaaaaaagcacatatcatgaggtggagcattttaaagataagaatgattaccctgatgatgtaatagagtggaataacctattaccttcatgtcgtcattgtaatggttctaaagggacacatgatgttgtcgaagaaccaatagttaatccttttgaggaactcccggcagagtttttctatattaaaaattttagaatgaaagggaggaatgagaaaggtattctgaccatagatgttttaaatcttaacgatagagaacatttggttaagccaagatgtgaaacaggatctataattgcggaaaaaatagaggattctttaactttatttgaggggtatcttttaaatccaacaagcaaaaataaaagaaaattaatcggtactgttagagggatactgaaagaatgtcaaagaagtgccatattttccgcagtatcggctactgtattacatacgagtgaggattatctgactttacgggataatatgatggcccataagttatgggatgaagatatggagaaccttcacataatgtcaagtaatatacaattaccaacaacagcttaa

SEQ ID NO: 87000 - DNA, 1011 bp, Marinobacter nanhaiticus D15-8W
atggcaaaaatattcctatctctaataacttctgcccaagaggacatcagtagacctgaaaggatttgtgacgttttggagtatctaggttattcgccaattcttactgctaggtatcacttcgacatacctataattaaggttagagaattatttaactcgaacaacccagttgggcattttatagatgaattccttgctgacaatgaaagatcaaatcctataaggaggagtagatttcgatcgttctattctgacaacaatgagttgtctattgaaaaaattgagcgttttttagatatatataaaaggttggatttttcaattaacaagccaaggcttgaagttgttcttatgagagacggagtgtttttatcagcagactctataaccattcaggatgaccttgttttcctcatagagagtggcttggcaagattgagaaatatcaacctagaaaagagtaaaagtcatgaggcttttagaataggcgatgcaagctctggcgaacaaagtgttgtaatgagtattctaggtattgcgagccaaataactgatggtgctttaatatgtattgacgagccagaagtatgcctgcacccagagtggcaagaaaaatatattgagcttttaattaatacatttagagattacaaacagtgtcattttataatcgcaactcactcacctttaattgtttcaaaattggaagatgaaaattgttacctaatgaagatggaggatggagagctagttcatggctctctagtcaataatcaatcagtcgattttcaactagcaaatacttttaaaacccctgggtacaaaaatgaataccttagtcgggagctaatttcaatgctgtcgtcttttggtgaaagtggcgagttagatcctgatattattaaaaacatcaaaaaaatacttctccttaaagatatgctaaatgactcagatcctgttaagaaacttatggatatggcggaagaagttatgggggaagtttcttga

SEQ ID NO: 87001 - DNA, 696 bp, Marinobacter nanhaiticus D15-8W
atgactgggcgtttagtaaaatattctgatgatattaaagcaaagattgatgcctataattcgttagaacctatggaaaagaaaggaagctactgggataaaactgatgatagtgagttgacaaaagctaaaaaacatatcaaagatcactatattttgactcaagactatacttgcccttattgtcgtcaacgcaatgaagtcgatcataatgctgtttgggatactgagcacattattccaaaggatcagtatccgcaatttatgttttccccattaaatctgtgcgttgcatgcaaggattgcaatcaatcaaaaacaaataaaaacgtattgaaaaaccctacaaggaagactctacccacaaaaagcgaagactatatatttgtccacccgaatctggatgaatacaaaaatcacataaagattttaaaatcttcccttttttttatacccctagactccaagggaaaagaaaccattgagatctgcgggcttcttagatttctatatagattcactgactatgggaatatttcattagaagtaaagaataaaattggacttctgcataaagaactgatggatgctaaaacgggtattgaggagcacttcattctgtcttgtattgaagatgtagtgctgcgcggcaaggaaattgccaaaactagccacctcgaggcaatgagttcatga

SEQ ID NO: 87002 - DNA, 693 bp, Aeromonas diversa CDC 2478-85
ttgactgaagaacagttgcacaacctagaaatagccaaaaaggccttttcattactaagcgaagggtttagctttaaaaaagtactcgcttcatctaatgaaataatgatcgattctccaagcggcgaaatctattacgagtatttatcatctgggtttaaatcttgcctttcgattattttcggaattattaaagacattgaacttcgctttaaatctccttgcatcaaagctgatgagttcgatggaattatactaatagatgagcttgagcttcatttgcaccccgagtggcagtcaaaaatagctgggatattggttgatgtttttccacaaattaagttcattacgtcaacacatagccctcatattttgcagaatgcgaagcctaatgaaattattgctttagctgcgaatgaagatggtgtttatagaaggcagttgagtggaggttcatatggcttccaaggctggaccgtagaagaagttctcattgatgtaatgggtatggaggatacaagaaccgatacgtataaagacaagctttccgaattcgagagggctataacagaagaaaactattctgcagctgaagcagcctatcaggagctagacaaattgcttcattctgaaaattatcttaggaagctccttaagcttgaattgatttccatcagggaggttggcgagtga

SEQ ID NO: 87003 - DNA, 744 bp, Aeromonas diversa CDC 2478-85
gtgattaagttgcaaagagcccccgcccccccatacctaagtgcagaaaaagtcgctgaattaaccgctgagttcaaaagtagcggaaagtctgtgtggaaccagcaccatatcaaagagcctctactcgcttctagttttggcaagtgtgcatattgtgaatgtccacttgaaacggaaagcaattatatggaggttgagcatttcgaagataaaaaaaacaatccagaaaaagtcgtggattgggaaaacctattgccatcgtgcaaaaagtgtaacggttctaagggggctcatgatgtggtggctgacccaattgtgaacccctatcgagatgacccaaaagaacacttggctcttcgtctatacagattgaggggtatttcagaaattggagtatgtacaattcaggtaacaaaccttaatcattcagatcgtttggtatttagtcgctataaaatcggagaaaaaatcagcgagcttattgaaacggcatttgatcggtggcaagtatatcaagaggccggtgatacaagatcaaagaacagacttctgggtgtggttgaaggtttgttaaaggagtgcgtaccacaggcaagttatgcagcatcaacagctacaatgttattgacggatagtagttttctagagctaattgatgaaatgaaagcagcttcagtgtggtcggaagatttagaaaacctgctgcagaatgctttgcctattgtgcttgattgcgcttaa

SEQ ID NO: 87004 - DNA, 1374 bp, Acinetobacter calcoaceticus NIPH 13
atgccttttagaattaaaaatttcttattcgcaaataaagtaatcgaactgtcaaaagatcaaacatcaaattcagagcatactttttcattaattacagggataaatgctgttggtaaaagtagattactcactagtataatacaatcatatttgataaatggtaaaaaatatgaaatgtttaaagtagatagtattttaattgatcacccaataaaaatgccaaataaaataatagctattactaactctttaaatgacaaatttcctttaaaaaattcaaaatcatatatttatgagtattttggcaataaatcaaatggaaatattatatatgatagatatgcatttataaaaaagcttataacaagaaaagatgtaaatcaccattgtatctgccatacattttattatttgggatttttaccttttctagaaatatatttcaaacatacattaaaaaaatccacactatccccattagagatacaagaaatatataatagaaatgcaaatttttttgaaaaggaaaatttaaatttaaatattgaaaaccctagtgaaaaagaattattactcctatatacattaagaaaaatatattataaaaaaaagagtataaagcaaagtgaattccaattagtctataatattttccttggtaataactatataaatttcaataaattttcaatgaaatgttactataattatcccgctagagctagctccctttcccatgaagagctaaatatacttttagataatgatgttttgaaaattacagatgttaatttacataattacactgaggaagatatatttaagaataaaattaatgaaaataatttaattaatttcaacaatctaagttctggacagcaagcacttctaaatatttttctaagcttatcaagttgtattgaggataacagtttaatatgtattgatgaacctgaaataagtttacacccggaatggcaattagagttaattataaaactacaagaattatttcttacatatgaaggatgtcattttataatagcaactcattcacctcaaattgtctctggcctctgctcagaatctggttatattatagatctagaaaataatataacctattccaaatatgaatattcaaaaaaatcatccgattttcagctagctaaaatatttaacactccaggtcacaataatgaatatttgattagaatagctttaactattttatctaaaattactggaaaaattgacttaaataaatccgatgttgacaatcttaacttattaaacaattctttaaatgaattaccagaaaatgaccctgtatcttttttaattgaacaaataaatgcattggtaaaatag

SEQ ID NO: 87005 - DNA, 657 bp, Acinetobacter calcoaceticus NIPH 13
atgaaagtctataattataatccttctgagcaatcaattattgatacatatgataaagaagatcataatttctggtcttttaaagttaaagaacttgctccattacgtctaaatttaagaactcattatttagctgagcaaaaaaatagatgttgttactgtaagatgcttaagcaagaaaaacatggtaatacatgggatgtagagcacatcgtgcccaaagcattatttccaatttttttatttgaaaaacaaaatttaagtctttcttgtaaagaatgtaatgatgaaaagtctaataaacctgttttctctaataattcacatgaatataaaatttaccctactgaatcagatagatattctataattcaccctcattttgataaatatagtgaacatatgagtattcatatgtctccgaatggtcaaataatgcatgtgcctatcactgaaaaaggtgtcactgtttttcatcattgcaaattagtacgctttacaatgcaattttataatgttcaagatttgaatacgaatttactaatcaccttttcggactttattgaacaagttccgaatttaactccggatgtagctaaggcattttttacagcttcattacctagagtcctttcacccgactttattgactgttaa

SEQ ID NO: 87006 - DNA, 1257 bp, Acinetobacter bohemicus ANC 3994
atgaaatatattaagcatatctcaggcattgtgcctcatgcaaataagaatattgatattcctattaacttcaaaaacttaataattacaggaaataattcttcaggtaaaacccaatttttattagcattaaaagagaaattagacatatatataaaagagaaattgattcaagaaaaggataaaatcataagtcgaattaatggttataaaaaagatttagaatcgtttcaaaaaggtagttcagattatagtaacagagaaagatggctggaaaatgagttaaataagcttaataaaattgatagtggaataactattgaaattcctgaaattcttgatattacttataaatttgaaaaaaaagtagcaattatcattacttttgatgctatgcgaacaagcaatatttctcatgcaaatcaaacaacatctataagtaatgaaataaacaatgcacaaaataattttacaaataacctaggaaataagttagaacaacatttatataatattactgttaatcaatccctatctttaactcataaaaaagattcttcattatttgaaaagtataccaattggtttaaaagtttcgatgaaaatttaaaatttctatttgagaatgaatcaactcatttatttttcgaaataaatgacaccgaaaataaatactatatcgttaaagactctcaaaaatttagctttcaaaatctatcatctggatatcaggcaatatttaatatttattctgatctgttaatgcgtactgagttttttaacatcgctccttctgaactggaggggattgtaattattgatgagattgatgcacaccttcatatttcattgcaaaaattaatctttccttttttcactcgatcatttccaaaaatacaatttattgtcagtactcattcaccttttgttattacctcaacagataatgatacggtagtttatgatatttctagtggcgatttttttgaagaagatttaagtcgttattcttatgaatctgttattaaaggactattccacgtcaatcctattagttcggacacaaagaattcaattgaaatattaaaaaacctattaaatgaaaatccaagcaattatgaaaatataagatcaattgtcaaaagcttaatcgaactagaaaaaaatgatctattagataaaagtttaaaaaacctatatttacaagcaatcaatctcctagcagataacaatcaactggaggatttagatgtttaa

SEQ ID NO: 87007 - DNA, 690 bp, Acinetobacter bohemicus ANC 3994
atgtttaaagtatccaaatctgctagaccaacggattggactacgaaggactataaggatcctgtggttgttaagcaattaaagaaagatttctatggtaaatgctatatctgtgaacagaagcatttcccgaatttgaatgttgaacatttcattccacatttagatgatgaaacgcttaagcttgattggaacaatctctattacgcatgttcaagatgcaattcaatcaaaaataaatattatgatgatatgctggattgttgtaatgaaaatcatctagttgaagaatggataaaagtctattacagaatgcctgatgaagatattgaagtaatcaatgcttgtcccgatgatcattcatatcgtgagaaagctgagacttctaaagcactgattgcaagatgttttaataatgcaaatagtggaatccaagaagttagtaaagaagatttaagagaaaaaattattgaagttcataatgaatttctagatttaagaagagaattttttaaagaaatagataattggcaggatgaagataaaattaaaaaggcagatgatattaaacatcggcttaaatcccattatgcgttttcagccattcttcgtggctatttagaaaaggactctaaatggaagaattcccttgatgaaattgaacaacttaaactaaaacaatcagcttaa

SEQ ID NO: 87008 - DNA, 1323 bp, Acinetobacter sp. NIPH 236
atgcagatacaaagctttagtctaaaaaatattgggcgattccaagacctaagcgtgtctttagcacctacgcaacgctatccatccaatatcacggtttttattggcaataatggtagtggtaaaacgtcactattaaagtcggtagcaacggcattgacttggtttgtagcccgtttaaaacatgacaagtctaatggtacgccgatccctgaaagcgtgattttaaatacagccaatgcagcagcagtcgaaatcattgttaatgataaaaacctgcaacaacaaagccaagcctatacatggcgtataacgaaaaaccgcacggcgagaaaagctgaatttactacgcatttaacggagctaaatcaactaaccgaccactataaacaatggcttggggaagatgatcaaagtagtctaccactaattgcattttatcccgtagaacgcagtgtaattgacattccattaaagatacgggaaaagcatcaatttttgcagattaatggttatgacaatgctttagataatgctgtagattttaggcgtttttttgagtggtttagagatagggaagatgtggagaatgaaaattttaaaaatatggtacaagcctataaagaagcgtctattgaagtagttcatcgtgcatatatgtatgaagatgatcaacttaatgcggttcgtagagcaattgaagagtttatgccaactttcagaaatttgcgggtacagcgtaaaccacgtttgcatatgtcagttgataaaaatgacaaaacattaaatgttaaccaattatcacaaggtgaaaaatcattaatggctttggttggtgatattgcacgccgtttggctatgatgaacccgagcttagagaatcctttacatggtaaaggtattattttaattgatgaaattgatatgcacttgcatccacaatggcaacgatcaatcatacaacgcttacaaacaactttcccaaattgccaatttatcttaactacacattcgccattggttatctctgatacccaaaacattttagtgtatgacttagatggacaagatattaccgctttaccatcattatatgggcaagatgccaacacggtattattgcaatatatggataccaactaccgtaatcctaaagttgctgaacaaatcatacaagcaatggatgcaatccaaaacaaccagttggaacaggcaagtcagttaattgaaactttgaaatctgaacttggtagtgatcagctagatgtaatgcgacttgtggctatgttgaaaaaaagaaccatagccaagcaggggaaatag

SEQ ID NO: 87009 - DNA, 648 bp, Acinetobacter sp. NIPH 236
ttgcaacagattaataaggggtctgaaccgactgaattaaccgaatataaacgtaaaaacccaacgcatagatatgatgatttaggggatgatcctgaacaaatacgcctagcaattagacaggcatgtttggctgaacaagcttatttatgtgcttattgttgtcggcaagttggggtaaaagaccatgattgtatgaatgagcatatcttgccaagacagggttatccacaatttagctttgcttttaataatattgtggcaagttgtacgactaaaggctgttgtgatgatgcaaaagaaaatcaagaaatcgccattagtccattgtcaccacgttgtaaaacggagtttaattttaatcttagtggcacggtcacaggcttaactgatgatgccaaacaaaccattgatgtactaagattaggcgatagcttgcagcaaaatcaaaagttggtcgatatgcgtaaacaagcgattgctaactttttatttacccaaagcatcaatatagatgacttgattgaggatgatgagctattaaccttattgattgatgacttgcatcaagtatccgatggtaaattacaaccatttgcccccgtcattagtaaagccttgcaaaattgggttgatggcaataaataa

SEQ ID NO: 87010 - DNA, 1428 bp, Acinetobacter sp. CIP-A165
atgccgtcaatcgaaaaaattatctacaatgaaataactcttcctcttaaaggaaaaaacttaatcatcactggaaataatggttcaggtaaaacatgcttcctaactgaagtatctaataatttgagaggcctgaagagtagtttttataatgatttattacgaaaaaaacttatttccgaaatccagttcggtgctaaaaatttccattctattttaaattttaatgatattgaaaatgaatttatagaagagttattagctgatgctagaactttaagctttaacgagctatacgaattcttaaagtttttttcaaatattttaaaaaacagatatcaaatatttaaaggttccaactcagacttacaagaaaaagggcaaatagaaaaaatagccaaaataaatgaaaaattgagcaataactatttctacattaaagaaccacaacatattgacaactatttcaataataccaataaattaattaattcatatatcaataaagaaaataatttagagattattggaaatgatttaaataaggatatgatttattattttgatgctgctagagtaagtgtaaaagatttttctttcgatcaatttaaaacatatgatgaatatgcacaagagcactctattactgatattgaaggtgctttagaagcatacttattactaaataaattagcacttctatctttatcacgttcaattaaaataaatagtattaataaccaaaaaatttataaactagaaagatggtttaaaaaagttgaatcagatttaaaatggatatttgaaaacaattcaactaaattgatttttactagaactggcaataaagtgcttattcaacaggattcaaacttttttaattttgatgagttatcttctggtttcaaagcaatttttaacatttacgccaacttattaatgcgtgcacaaataaaagatttagctcctgagagtttaatcggcatagccattattgatgaaatagacgtacatcttcatatctctttacaaaagaaagttttgccatttcttattaaagcttttcctaaagtacaattcattgtgagtacccactcgccatttgttattacatctacggataatgagactgtagtttatgatatttctagtggtgatttgtttgaagaagatctaagtttttattctcatgactccataattaaagaactttttcatgttaatccagaaagtaatgagacaattaatatttctaaatttattatcgaattcgtcgaaaaggatatgcatagagataatttacttgaaataaaaaatgttctagacaggatagaggtggatttaccaaaactttctattgaatctcaattacaatatattgttgcaaaaaataaactcgcaaaactaagtcaggaagggcttaattga

SEQ ID NO: 87011 - DNA, 675 bp, Acinetobacter sp. CIP-A165
atgttttcagttagtagaccaaatacagttcctaaaagtctgacaggtactaataaagattatagatccgaagaggtagtggttaccttaaaacaaatgtttcatgggaagtgttatttatgcgagagagctaatatattagatattgaggttgaacatcttgatccacatagaggggatgtaattaagaaatttaattggaataatttgttctacagttgtagtcgttgcaataatattaaaagtcatactcatacaaacatagtagactgctcactaattaatgatgatgtatctcgctatcttatacttgactgtcctataacaaataataaaagtattaaagtaactgttaaagaaagtggtatcacaagccaacaacctattaactttacagtaatgttattggatgaatgctataacaatacatcaactgggattagaggtattagtagaagtgaactaatcaaagatattcaaagatatagttttcagctacaaaagctcaaaaatgaactgctatttcctactgaaccgttagctcaatccgaaattgatctaaaaatcgaaaaattaaaagctatgtgttcacctcaattttcatattctgctttttggaaatgggctattactctagatgaagatttatcgcaattagttggtaatgtcttttag

SEQ ID NO: 87012 - DNA, 1566 bp, Acinetobacter seifertii
atgagtgcacgtcatttgcttaataatgcgcaagatgggaattttgaagccgcagtccaagtgtttttaaattataaaaatggtacaaaagactttgaaaaaagtcaggaaaaaacacaagaagcatttgaggctattattaaaattcttgattcagattttttcttaaatactttaaatatttcaaattttaaaaaaatttcagacttaaaaattaactttaataaaaacttgactgtatttctcggagaaaatggggttggaaaaacaagtctattagaatctatccgtaaaaatttaatgtggatagcggcaactactcgaaaagagaattcaaatggtggcacaattgataaagatgaaattaacaatcaaattaaagaggaaggtgcttttatagattgtgaatttcagataggaagctcttataagttcaaaggccgaatagcacgctcaccagaaggaattaccagtgatttaaaaagtgagcttacacaatatcgtactataggaagatatttaagaattttaaatgaatataagagcttaaatttacctcttttggctttttatggaattgatcgattacctaaagatataacaaaagcgaaattttccgattctgataaaattgatggttatgatggatctttaaattctaaagcttcatttaatatatttaatgaatggttaataaagttattaaagacacgtaatagtgtgggtaatgatagtgaaaaacttaaagttcaagctcaagtggattttttattgcagacgggagcagataaaaagaaccatcctatgaatgagttgtatcaggaattaataactgttcttaaattttatcctgacaatacaaaaaataagtccaaaaatgtgattgaattcttagaagagttatttaggaaaatctatccagatttaagccgtattgaacttattaatgaagatgatggtaacgataaggttgcttgccatttgaaagatgaaattatttttttacatcaattttctgatgggcaaagagttttattaggattattaggagatattgcaagaagactacttttgcttaacgatacatctgaattgccttttagaggtagaggagtagtcttaattgatgaggttgagctacatttacatccaagttggcagcaaaaaattattttaattctaaaagaatcttttccaaatattcaatttattgttactactcatagccctcatgtgataactactgttgaacctgaatgtattcgatccatttatatggattctgaaacaaagaaatttgggtatcatattcctacctttacaaaaggtgctgagtctaatgtagtcttggaagatgtttttgatgtaaatgcaagacctaaagatgttgacgaagttcaatggttagaaagatatactgaattagtaaatgctgatcagtgggattcacaggaggctaaaaatttacggtttaagttagatcaatgggggaaaaacaaggaaattgaattagataaacttgatattgaaatttctctaaaaaaatttaaaagatctaaaaaatga

SEQ ID NO: 87013 - DNA, 723 bp, Acinetobacter seifertii
atgaaacacataactaaatcagaatgtcctgaaggattagcaagatatcttgcagaaaatccagacgctacgtgggaagatttcaaaaatgaagatcaagttagttataaaaatgtttgtgacattattaaaaatgatcagagcggaatatgttgttactgtgaaatagattttgaaatttctgatgagagtccaattaaagattttagggtcgagcacttatatccaaaatctaaaacgcctatacctatcactctagaaaatgctcatttaacttggagtaatttattaggttgttgtcatggtggttctatgaaccatattgatgataatcgttatacagctccgcatttacattgcgatgctgtaaaaggtgaaaatatctggaccgaacagattttaaatcctttaaaaattccacaaaatgagaaactttttacctttgaaactaatggaaaaattattctttccgaccaatgtcctgaagatttcaaagaaatagcacaagggtcgattgataaacttaatttgaatgaaaagtcttatttgttaaaagcaagaggtaaagttagggatactcttaaggctgaatttgctcgaaaagtaagagaaggcggcttatctgaacaacaggcattggatgaattaaaaactgagttagctttaaatacatatagtggtatgaagttctatacatgtaaattagattttgtttcttattaa

SEQ ID NO: 87014 - DNA, 1455 bp, Acinetobacter seifertii
atgaaatatattcaaagtattaatgcaaaattagattttttaaaccacaatgtaaatattgatttaaaagggcgaaatttaattttaacggggaaaaatggtgttggtaaaaccagatttctaaatcaattaaataatacagttctaagtaaacttattcatgatatcccccatatttttcagcatcattatatgcaaaaagttaatattataaatattctaaaatcagaaacatctgatttagaaaatagtttttattataaaaatcatatagaaaatttaaaaaataatataaaccccttaaatcttttaaattttctagaggaactattaggtaaatctgactcctacaaccctcaagaaactgaagaatttattaaaaaagcaacagaattaaaaaatataattttagaatataaaacttttctacaaaatagcaaccttaattatttacctatacactcacctatatataatattgattatcttattaatgaaataggttctactcataatcaagaaaatattagtttagctgtgaatggaataggaaacttaaaccaaaacatacaagcatcaaaagttacttttaattttttccccgcccatagacaatctcaaattacaccctctacaaatactactgacttaaatcaatatattaatagtgcaaagcatgaatattcctctaaattaggacaatttctagaacaatatttattaaatattagaattgaaaaatctcttgctttatctgaagagaatgacaacgaacatgcagatcaaattgattcttggttccaaaaatttgatgaggatttaaaatttttatttgaagatgaatcaactaaattaaaatttgattataaaacaagaaaatttagtctaatgcagtctcatcgtgaatttacattccaatctttatcttcaggctttacagcaatatttgatatttatagtgacttattaatgaggtctagacttttaaatattctgcctaatgaactaaatggggtagttctaattgacgaaattgatgcccatttacatatttcacttcagaagaaaatcttaccatttcttaccaaatcatttccagaagttcaatttattgtaagcacgcattctcctttcgtgatcacttcaacaaataatgatactgtagtttatgatatttctagtggtgaattttttgaagaggatttaagtctttattctcatgaatctataataaaagaactctttcatgtaaaggaagaaaatgaaaatattaaaatactatcagatcagcttttacagttcattgaatcagaaaacttaactcaagacctaaatacaattcaagaattattaaatgaaattaataaagattttgaaaagttatcagtagaactacagctccagtatatggttgctaaaaataaacttgctaaattaaaacatgaggcaaactaa

SEQ ID NO: 87015 - DNA, 672 bp, Acinetobacter seifertii
atgttttcagttactcgacctactacttttcctaaaagtttaacaaaatctactaaagactaccgtgctgctgatgttgttgaagtacttcaagatatatttttttctaaatgttatctatgtgaaagaaaaggattctctgacgtaaatattgagcaccgtgatccacacgaaggcgaccttattaaaaaatatgattggaataatcttttctacgcatgtgttcgatgtaatggtattaaagccaatatatataagaatattatagattgttgccaaactttagatgtagctcaagctattgagttacactgcccaatagtcaataacgatgaccataaagtaattgtaacagttggaagtttagcaagtactatcgaaattgaatctacaattaaacttcttgaccaatgttttaatgatacgaatacagctctaaaaggtataagtaggcacactttaataaagcagatacagaaatatcaaactaaacttttaattattaaggatgagcttttggatgattcattgatactaacttcttctgaaaaaaatctgagaatagaaaagttaaaggttatgtgtgaccctgaattccctttctctgcattttggaaatggtatatcactcgtgatgttgatttatcaaaaattgttggaaatgttttttga

SEQ ID NO: 87016 - DNA, 1563 bp, Acinetobacter nosocomialis NIPH 2119
atgaaagtcgataaattgcatattcgctcacgctttaaaaatcttgaaaatgtgaaagtagactttgatgaaaatcatctaatgactgtggttgtagggcgtaatggctcaggtaaatccaacgtacttgaagccttagtagctatatttcggaatcttgatttaggcgaagcaccaccattttcttatcaattgaactttcaacttggcgaagaaggcggtattaagtggtatgacataaaagtggatgcagatccaagccgcggagcactatcaaagcaatatcaagtttctgtcaaagacaaacacaatagtgaagctggtttcacatctatacccttttctaaagtcaaacgtgataaaaaaaccaagcaagctgagtaccttcctaattttctatttgcctactactcaggaccatcagatagattagaaaaatactttcgaaagcatcgtgataattattaccgagatctactctacaataaggtcgacttaaaagcagatattcgatcactattttatgccaaaccgtactacagccaatttgtactcatggctttttttctatcagaagaaaatagccctcagcgtaaatttatcaaggagcatttaggtatagaaggtttggatagcatccattttgtgatgcgccaacctgagtgggctacacagaaaggtgaactattttggggagcacgaggcgtagttcgtcgctttttggatgaattaatacaatataccctatcacctataaaagttacccgccaagaagatacatcattaacagggagtaatattcgtaatgagttctttcacctattcttacctgacttaaaagccctacacgaatttgcaaaagatctaagcgccgatgagctgtttaaaatgcttgaaagtactttactttcagaaattatctcgaaagttagtatcagagtgaaggtatctactagcaaagaacctctcacttttagtgagctcagtgaaggtgaacaacaactattaacagtgttaggtctactcaaatttactggtggtaaagactccttatttttgcttgatgaaccagatactcaccttaacccatcatgggcagtaaaataccttaaatttctacatgaatttgtacctaaccacgaaacgagtcacttgctgatggtaacacatcatcctctggctatagcagaactcgagaaagagcaagttcaggttatgaaacgtgatgataaaaatcaaatatccgccacaatgcctgatgaaaatcctcgaggaatggggatcaatttaattttacgcagtgatatgtttggtctcaaaacaacgctcgacgatgacactaatcaaagactaattaagagaaatgcacttgctgcaaaggaaacattatctaaagacaaaatagttcgcgaacatggatttccggctgaagatgaagaacaatacttcgctagactcaattctgagcttgaagatttaggttttaatctggcaacggatgatcctgattaccttgatttccttcgaaataaatatcacgctagacatgaggaaaatcattaa

SEQ ID NO: 87017 - DNA, 810 bp, Acinetobacter nosocomialis NIPH 2119
atgcgttggatttgcaaagacgaaatcgaggaatgcttaactcaggtatggagagatctagctgaacaagcaaaagctgagttaatggctgctccagatgaagcagcaagaaaagtgatattaaaaagagtcacctcgtcaaatgtttggcgtgatttttatgatttattacctgaacctttaaaacgaaaatgttggtattgcgaggctgaggaaatccgctcagatatgcctgttgaccattttagaccaaaaaacaaagtcgaagatgataagcaacatgatggttactggtggttagcattcgattggacaaactatcgatgtgcttgcacattttgtaatagccgtagagtttttgatgaaactgaggggggtaaagcatgtcgttttccacttgagaatcctgacgaaagagcctttacacctgcagatcaaatcaagctagataatgagcgaccatactttctagatcctttcaatcctgatgatgaaaaactactttggtttgatccagatgggaagccaacatataaccctctagcaacaactgaacagcaaataaaggttcaaaattctattgaaatatttcatcttgatcaaatcaagatagttagagctagaaataaaatacgcctagaggtggaaagacaagttagtaaaataaagaataatgaggatgtacaaacagctaaagctaggttaagacgcatggtaagagatactgaaatgctatcacgtgctgcaatagtttacttgcgcatgcacagagatataccagaggtaaaaaacatattaaatttagattag

SEQ ID NO: 87018 - DNA, 1290 bp, Acinetobacter guillouiae CIP 63.46
atgaaatttaagagtattcaattaagtgaatggcaacaatttaaaaaaattcaaattacctttcaccccaaagtaacaataattacaggagcaaatggctcaggtaaatcaacaatattaaaactattatctaaacacttcggttggtatttaccatttcttggtactccatatttagttaaggaccaaggagtatttaaatataaaagtattttcagaccgcttattacttatacatttggttccattcaagctgaccatactttaaatcagacacttggatttatatactattcaaataataaatcttcaactattaacattcaaaatcaaaacgttgatcatcctcaatatgaaattaatttttcaatgatgcaaatcgttgatggtttacatattaattcacatcgacctatgcctaaatatgaacaagttcagaacattccgaccaatccaatggatgctcacaatgcatatgaaaggtattcttcagtaactaaagaactactttccaataactatgtttcattttcaccaacgtatcgaatgaaagaagcaatcatctcaatggccgcttttggtccagggaatcgatttgttcaacctaatgaaaaaattgaaaatattttctctggctttaaagatattcttcgtcgtgtattaccaaaagaattgggctttaaagatttaagtatacgagtgcctgatattgttttagtaacagaaacaggtgagtttgtattagatgcctgttcaggcggtataatgtcaattattgatttggcatggcaaattttcctttatgctcatgataaaaaagaatttgtgataactatagatgagcctgaaaaccatttacatccatctatgcaacgatcattattaaatgactttgttgaagcctttcccaatggacaatttattgttgtcactcatagtccattcgtagtttcatcaatcaaagattctcatgtgtatgctttaaaatatgaagattttaatgatttagaaaaaccagaaaaaatagtaaaaaaggttgttgcgcataaattagatttaaatcaaaaagcagcaacagcacatgaaatattaaaagaagttttaggagttccagtaacactacctcaatgggctgagcaagacttacaacgtatatgttcgaactttacacaacatgatgtaactaaagccggtttagcgcaacttcgctcagaattgcatcaagctggattaggtgagttttattcgcaagcattaaataatattgtggagagtaatttccatgattaa

SEQ ID NO: 87019 - DNA, 669 bp, Acinetobacter guillouiae CIP 63.46
atgattaaacttattaaattggataaacctgctgtcctaattaaacactcaaataaatggaaagctcaactattaaaaaatttagacgctggaatagcttcaactaattaccttctttcccgatacagtgatcctgaaatcaaacacaaaattattgaagaaactgcaggaaagtgtgcgtattgtgaaagtaaattattacatatacatcatggggatattgagcatatttttcctaagtctttagatcagtctcaaaggtatgaatggaataacttgactttagcatgtgaaatttgcaatcagaacaagtctgataaagatccaaatttgagaaatattttgaacccatatttagatgagcctgaaaaaagtattatattctttggctcttttgccaaaaatgtaaatatcaaaggtttttgtactattaaatacttagaactcaatcgttcagatttaatttcagaaagaaatgatagattattagacatagaatctatcataaataaattaacagatgaaagaatcccacttgatatgagaaaagctatttatcaagatttaattactactgaaacaaactatagtaaaaaatatgctgctatggttagatctgctattcgatgttttgatataggaataccacctgaagtaaaagtattataa

SEQ ID NO: 87020 - DNA, 903 bp, Acinetobacter lwoffii NIPH 715
gtgcaacaaagccgtaaagatcaagtctttgtttttgatgcatctagagtaaaaaatgatagactaattatgaaagtcttcaaagactatgaagattatcgtttaaataaaaatcgggataatattgaagaggcattagaagcatatttaatttcgaaaaaatcgcagctcatccaattttccgaacagcaaccgaagttacaggaacttaaacgggaagcttcaaaactacttcattggtttaaaaaagtagaaaaagatctgaaattcatattagaaaatcctgatattagaatctcattcaaccatcagagtgatcaggttttacttgtagacagtcaaaagcaatctttttttacttttgactctctatcttctggctttaaagctatatttaaaatatatgcttctcttttaatggaagcacagctaaaaaatattaagccaatagatctttctggtatagcgataattgatgaaatagacgttcatcttcacatctctctgcaaaagaaagttttgccttttttgataaaagcatttcccaaagtccaatttattgtgagcacccattcgccttttgtgattacatccactgataatgacacggtaatttatgatatttccagtggtgaattctttgaggaagatttgagtctttattcacatgaatcaattattaaagaacttttccatgttaaagatgataatgaaaatctaaaacagctatctgatcaacttttacagttcataaactcagaagactcaattcaagacctgaatacaattcaaggcttattagatgaatttaataaagactttgcaaaactatccgttgagttgcaacttcagtatatggtcgcaaaaaataagcttgcgaaattgaaacatgagggtcattaa

SEQ ID NO: 87021 - DNA, 672 bp, Acinetobacter lwoffii NIPH 715
atgttttcagttataagaccacctactttccctaaaagtttaagcacctctacaaaggattatcgtgcatctgatgtagttgaagaacttcaagatatattctttgcaaaatgttatctatgcgagagacagggatttcctgatgtaaatatcgaacatcgtgacccacatctaggtgacagtaccaaaaaatttgactggcataatcttttttatgcctgtgtaagatgtaatagtattaaaggcgatacacatataaatattttagattgttgccaatctattgatgtatcacaagcaattgaattgcattgccctgcaattaataatgaaaatcataaagtgatagtagagttaggtaacttaccaacctctttagaaattgaaagtactattcaacttcttgatagatgttttaatgaaactaatacatcactaagaaaaattagtaggcactcattaattagggatatacaaaaatatcaaacgcagttattaaatataagatttaacttattatacccaaaacgacctttgacacagataaccaaacacaaacttgtgaatgaactaaaggtaatgtgcagccctgatttccctttctctgctttttggaaatgggcaattacacgggatgctgatttatcaagagttgtaggtaatgttttttag

SEQ ID NO: 87022 - DNA, 1524 bp, Acinetobacter baumannii NIPH 146
atgcgtattagaagtatttcttttgatgataaaaaatatgaactttctgatagcagtgtctcatcagaagaaaatacattcactgttttggtgggaaggaatggttctggaaaaagccgaattcttcaaagaatatgtaatatttatataaactctttaggttttgatggccgaaatatcctcaatactcctattaatttaaacgcatataatgatattaacaatacatcttctctcaattatggtgaaatcacgtatgaacaaaacaagaatatttatgaaatttcttcacgccaattaaatggattttataatttccatattagccaatttattattgagaaaaaaatcaaaacttctgaatgcaatactttctgtgatattaacaaaattattgctgtttcaactagtccatttgataagtttccagttatcgaaagacatatgcattggaatagtaatatttatgaaaaaaaatatatctatagaggtggaaaaataaaagtaaatagccaaaaagattatttaaaaaataaatttgatcaacttggtgcctctttaataaatttttttctacgatccaatagaacaaaagataaaatttctatactacttgaagcaatgaacttggatgaaaaaataaatatgtatttttcttttccttggcctttttcaccatctgaaattataagcactgaaaaccctaaatccatttcagattcattaagttctattcgttttttcaaagataaaggcgatagaataacactttcacaagatgaagaaacagcacttattgaaaatcttaaacttgttctaaaccattataattttaaagaacatcacagaggggaaaaatttggtctagaattaaatctattgaatcgaagtaaagatgaaaatattgagcttctcaatagtttatcctcattggcaaactatgatctaattgaactcatagatataaaatttagtaaaaataataagagtttttatttaacagattcaagttctggagaactatctttaatatttaatttattgtcgattgctggtgaaattgaaaataattcattaatactaattgatgaaccagaaattagtttacatcctgaatggcaaagtaattttcttcccctactgagtaaaatgtttagtaattaccaaggctgtcactttattattgccacacattctcctcagatactttcatcaactaatgataaaaatgttcttattatcaatctagaatatagcaataagttaataaaaggagaggaaatatccaaaatgtctgccgattatcaactcgcctatgttttcaaagaacctggctataaaaatgagtttttaacacgtattgctttaactacttttaccaatgttaataggaaaaaattattcagcgaagatgatataaattctttagacttacttctggaaaatatgagtcatttagataaaaatgatcctctacatcaattaatcttatctttaaaggaaatgagggatttgtatgtctga

SEQ ID NO: 87023 - DNA, 672 bp, Acinetobacter baumannii NIPH 146
atgtctgatataaaaagacaaatttctttttctcctcgcattagcaatattgttaaacaaaaaactaaagacccctgttttaaatataccgattggtctggaaatgacttagaagaagtacgtaaatctataagaaatttctatcgaaaagaacaaaatggtaaatgttcttactgtaggaaagatttatctatacaatctgctagtaattgtcatgttgaacatatattaccaaagtcaaaatatattaaatttatatttgagcctaaaaatttatgtgttatttgtgctgattgcaatgaaattaaaagagaaaaagaaactgtagactattccaatgaaatattaaagaaaacagatattaaattatatcctagagtcagtaattcgttcttaattgtgcaccctcattttgataactataatgatcatatcaaaatcttgtgtggaggacattatattgatctgagtcccaaaggccacagaactatcggtatatgtagactaaataggtttctacatgaatttggctggcctgatgaatcaagtactttagatgaaatattagcaacagctaataaactatttgaaaatgatgatcctctttctcaaatgagagtaatcaaacaattagggatacagattaatagtaatttagatgtctttaattaa

SEQ ID NO: 87024 - DNA, 1200 bp, Acinetobacter sp. ANC 3789
atgtcaatacaatctattaaattaaaaaattttaaaagtattaatgaattaaatatagaagcgaataaccaatcacaagtaatatgctttgtgggtgaaaatggtagctctaagacatcattattaagtttaatcgttgattctattattagcaacttaaatattagttttccggattatgacccagaagatggaaaaagatttagatctataagccatatggaaatacatgatgataaagattattactttttaaatttaaaatattcttcaggggatgaaattaataattacgaaagaaatgtttttaaaattactaaaaatcaaaataatgtagatatttataacagtgctgaatgggagggaatttcattaaatcaatttcatcaggaaaaaaactctccttaccaagataaaaactccaattatcttattaataatatatttttatatagacctagttatcgttatgaaccggatgctctagaggtaaatgacttaaatgacagctatgtattcaaaatttctacacaaaagaaaaaacagaccgattatccatttccattcaaagttgcccattcaggaacagatcttgaaagtttaatcattgagttacttttggataatttcattggttttgaaaactctattaatgctttctcaggtatccctaaaattctaaatactgtaaccaacaaagattatggtaattttcaaatttctcgccatccataccgaaaattatggtcatctactcaaggcttaattacttcattgtctcaaggtgagttagacttattggttactataacctcaattgtaactcgacaattatacatatatgataataacgaagaattacgtaagaaatataagtcttttcacgacgttccaggcttagtaatcatcgatgaagttgatctacaccttcatcctaaagcccaggaaaattatttaaaggttttaacaacaaattttaagaatattcaatttttagtaacaacccatagcccttttgtcgtcagaggcttaccaacagactctatagtagttcagttgccatctggtacagttattgaagaaaatttttcattaatggatatcgacagtattactaatagaatttttaattataaaggtcgcttttcagataatattgaaaatgacctgaagaaatttaaagaactcattacaaaataa

SEQ ID NO: 87025 - DNA, 852 bp, Acinetobacter sp. ANC 3789
atgcgccaagtagataggaatctagttaatgctcctaataatttatctaatttatcagctatacaattaggtcatttgtctaatcataaaaatattcgtcaggatatttatgcccatgatgatgttaaacaagctttaaaagctttatatcatgataaatgttatatatgcgaatgttatgttggtgatagttatgatgttgaacattttcttccaaaaaaacattttccaaacctcggttacacttgggaaaatttacataaagtctgtaccccatgcaatctagctaaagaaagtaatcaatttctggtaaaggatacatctggcaatgttactgatatattattactagatccatcatcaccttcttattcaattcatgattatttatcattcaatattaatggtgaaactgtactagttaataaaggtactgacagcacacttaaacataaagcggatattactgctaagtacttaaatggtgagctaaaaaaaactcaaggcaagcctttcgaacatgcatctaaattaaatcatttaagatcttcacgtattgctgcatttgaaagatctttacgagaaaatcgttttatgtcttttcaacaaaatattatgaatattcatcttacacttagtaactatatggttaagactaatttattagaaattcaacatgatagagaaacttatgattttttagcgaaaatttttgagagttttttaaacgaacattgccccttttgttcagtaataagagaatattgttttgtcgctttcaaacttagcttcaatgatttaaaagctgtttcagaatgtttaagattgtcttacggacttccaatttattag

SEQ ID NO: 87026 - DNA, 1767 bp, Acinetobacter sp. ANC 3789
atgcgtcttgattacttaaagatcgggagtgctaaggatagccctacccatcaatttaaaaatttaaaagatgtctttatcgacttcaatgaacatcaatcaatcactgtcgttattggctggaatggaactggaaaatctaatgtattagaagcacttgctattatttttagaaatttaatccaaaaagaaaagataccagcctttgcttatgagcttaaatatgaaatcggatcaggcatcaacaaaaaatatgtcactattcaagcggatcccgatttagagaaagataaatttgttttttcatacatcccatttcaagcagttttagaaccatcagctaaagaacaatcatatgtaaatttagttgagctaaaacaatctgatttattcgaagctgatcataagccgaacattgatcctaaagaacaaagtactgatttacctaaacctattagtgtctcttttacaaaatttacagctgagaatagtgaattcttacctaaatttgtatttagttattattctggcttaagcaccagaatgaaggaaatttttgatccatatatagaaaaatttgataaaaaattgagaaatggtaaaactcccgaggaagtcggtttcaaacacatgttctatgcccttcctattcatagtcaatttgtccttttagcttttttatttaaacaagatgaaatcattaaatcttttttagaaaatcagttaggtattgatgctgagtctggaattgaatcaattttatttgaactgcgccaaccctcttggacaaataaaaatgatgatggcgatccgagactctgggatgcaaaaggagtcgttagagagtttctaagcgaactttacgatctttcattagcacctatcaaattcacaaaaagctctaaaagcagcctgtggaataagaaaactcgtgaatatcaatatttatttctcaaagatatgacgtcttttcaaagactcatggagcacaaagaagcacaaatcctatttcgtgatttagaaagtacttatgtttctgaattaattgaagccgttcatatacgagttaagttaaaaaagaatcttgacgctgtcacatttaaagaattgagtgaaggtgaacaacaattactgacagttttaggcttgctacgttttacgaatgaagatgaaagtctttatttacttgatgaacctgatactcacctaaaccctaaatggtcggttgaatatttaaaatatttagaagatttcatgaaaaatgaaagcagtggagtaagaacaaacagtcatattgtattaactacacacaatccaattgcaattgcagagcttaaaaagcaacaaattcaaattttgcatcgggatttagatcaatcaattaaatctaaagaacctgatattgatccacgaggtatggggtatgcaggaattattacaagtgatatgtttggcttaaattccagcctagacacatatactcagaaattactcgagcgcaagaatatattcacagttaaggaaactcctttaactgatgatgaaagaaccgagttgatgcaaattaataatgaacttgaagatcttggctttaggttttcaatgcgtgattcacaatatgaacgatatctcaaagcgcttcataatcacgaaaaaaataaattacaacaggataatcaaccttatagtgatacgtccgagcaactaaaaatcgcagaagaaattattcaggctatacttaatcaaaacaatgaggatcaaacatga

SEQ ID NO: 87027 - DNA, 783 bp, Acinetobacter sp. ANC 3789
atgagatggattgatctgacaaaactaaacgtatcaactgattggctaaacagggctactattacacaagcgacaatagatagtgaccctgatttgaattcatcaaattaccctaatatttggactgagttaaaagaagaactcaaagcattatctcatggtaaatgttggtattgtgaagcccgagaaaaccgatctgacaatgctgtggatcattttagacctaaatcaaaatataaatggcttacctataatcctaacaatttcaggttcgcatgcactttttgtaattcaagaagaactgaccatgctactgggcaaaagggtggcaaaggaaattatttcccactctttgatccaaccactaaagctaaaaatcatgcagaattaagatcagaaaaatatattctcttagacccttgtgacccatcaagctcctctatcatgatgttcgatgatgaaggaataccaaaaccaagttttttagcaactgaaattgataaacagagattagaagagtctgtccaatactatcatttacatcattctgaattggtcgaaatgcgcaagcaacttgcactacaaattaatgaatggattaatgaagcaaatgattatttttcaactataaacgaacccgtgtctcgaactgcattcaccaataaacttaaagatttatgtagattaattaagccagagagcccactatcaactttcgctagatgtatcattcaagggcataaggacaaaccttggatagatctattatttcaaatgatgtga

SEQ ID NO: 87028 - DNA, 1464 bp, Acinetobacter sp. ANC 3789
atgaactacataaatataattatctacaatgatagtgaaattcatctaaatcaaagacatttaattattacaggtaaaaatggtgttggaaaaacaagattcttaaacgatttacgaacagaattagaaaaagataaaaatacagagtcacacatacaagagattcttcgtgaacaaatttcagaacttcttaaaaaaggaataaataattaccctttatctctcaactttaaaaatcaagaaataaaaaatataaataagtttcgaaataattatgactctgaaatcaattataaaaaccatttattagatatacaaaatttaatctctaataaatataaattttttaataaaaagaaaaagtcctacttcctaaaaacggatagtactacacaatatgagcatctcaagattgagaaccccgattcaattttagaaaattattactactataacaatccacaccacatagataacttttataactcactaatcaaattaatagacaactatttaacaaatactaaaagaattagtgcttatcctatcaatcactctaaaaacatatattactttgaatcatcaagggttagttctaacctatttacaatgacagtttttcaaagttttgaaagctttaaaaacaaccaacagaaacatgatgtagaagatgcattagaagcatttttagttgatcaaagaatggctttttataatttaataaagtttagagaaccccaagagcataatgaaggtgctcttagtaccaggttttttgatacaaatgaaatagaaagatggtttttaaaaattgaaaaagatcttcaaactattttggaaaaccccactattgaactttcttttacaaaaaaaggagatcaagttttaattattcaaaaagataaagatatctcattttcttttgattctctgtcgtcaggttttaaagctatttttaatatttatgccaacttattagtacgtgcacaatttcaagaagttgctcccgaagaattaattggcatagccattattgatgaaattgatgttcatttacatatttctcttcaaaagaaagtactcccatttttaattaatgcattccctaaaatacaatttattgtaagtacgcattcgcctttcgttattacttcgacagataacgatactgtagtctatgacatttcaaatggtgagttttttcaagaggatttgagcctctattcacatgaatctattataaaagaattattccatgttcaagatgaaactgaaaacttgaagaagttatctgaacaactagttcaattcattgaatctgaaattccacttcaaaatttagataaaattcaatcaaccttgagaaatattaataaagattttgataagctttctgtagaactgcaactacagtatatggttgccaaaaataaacttgccaaattaaaacatgagggcaattaa

SEQ ID NO: 87029 - DNA, 672 bp, Acinetobacter sp. ANC 3789
atgttttctgttgaacgaccgagtgaatttcctaaaagcttaacaaaatctactaaagactatcgcgctgctgatgtagttgaagaactacaagatatattctttgctaaatgttatctatgtgagagacaaggatttcctgatgtaaatatcgaacatcgtgacccacatttaggtaatgaaacaaaaaaatatgactggcataaccttttttatgcttgtgtaagatgtaatagcatcaaaggtgatatacatataaatattttggattgctgccaaccaattgatgtatcgcaagcaattgaattacattgccctcttgtcaataacgaagctcataaagtaacggtacagttaggaaatctaccaaatagtttagagatttcatcaactattgatcttcttgatagatgctttaatgaaaccaatactgcattaagaggtataagtagacattcattaataaaagaaatccaaaaataccaaattcaatggtgtattttgaaaaataaattactttatcctgatttacccttaacttctaaagctaaagccgaaattattgaacaactaaaagctatgtgtgataaggaatttccattttctgcattttggaagtgggctatcactagagatgatgatctttcaaaaattgttggtaatgtattttaa

SEQ ID NO: 87030 - DNA, 1272 bp, Acinetobacter sp. NIPH 817
atgaaatttgaaaaaatcacccttactgaatggcgacaattttctaaaatagatattgagtttcatcctaatgtgactgtcattactggtgcaaatggtgcaggtaaatctacaatattaaaattattgtcgaagcattttggatgggatcatccatttttaggtactccttttttttctaaagagcaaggtgctgttcaatacaaatctatatttacaccattagttaaaaataatgaagcttatcattattatggtgattcactcgggaaaattatttattcaaacaatgcagtagcagatatttgtattaaccaacaaatacagtcagaagttcaattcaatctaaatctaacggatcagctacaaattaatggggtacacattaattcgcatcggccggtacctagatatgaacgattgcaaaatattcctacaaatccaatggatgcgtcacaagcttttgatagttatcttagagagacttttaatttatttaataacagttatacacagcattctcctacttatagaatgaaagaagcgatagtttcaatggctgcatttggtcctggaaaccaatttgttcaaaaaaatgaaaaaattgaaaaacagttttatgcttttaaggaaatattaaagcatattttacctattgagttaggttttaaggatttaagcataagaatgccagatattgttttagaaactgattctggtgatttcttattagatgcctcttcaggaggtataatgtctattattgatttggcatggcaaatatttctctattcgcatgataaagaggagtttgttgtaaccattgatgaacctgaaaatcatttacatccatctatgcagcgttccctacttaatgattttgttaaggcattccctagggcacaatttattgttgtaacgcatagtccatttatagtttcatccattcgtgattctaacgtatacgcattaaaatacgaaaattttaaggatgataatgtaaataaagttataaaaaaagttgtgtctcaaaaattagatcttgatcaaaaagctgccactgcaaatgagattctgcgtgatgttttaggggttcctgttacccttcctaagtgggctgatgaggatctacagaaaatctgttcaatgttcacagtagatgatattacagtggacgggttaagaagattaagaaatgaattaaatcaagctgggctaggagagttttatccagaggcactaaataatattgtggaaggtcaaaaactatga

SEQ ID NO: 87031 - DNA, 669 bp, Acinetobacter sp. NIPH 817
atgattaagataaataaacttaatgaacctactgtattagtaaaaaatgcttacaagtggaaaactagattattaaaaattattactgaggataaaactccaactcaatatcttctatcaagatatagtgacccagaaattaagaaaagactaattgaagaaacacatggtaaatgtgcttattgtgaaagtaaattattacatattcatcatggagatgtggagcatattttccctaaatcattagatgagtcaaaacgctatgagtgggagaacctaacacttgcttgtgaggtatgtaatcagaaaaagtcaaatgtggatcctaatttgaataatattttaaatccatatactgactctcctgaggctagcctaatcttttttggtgttctagctaagggagctgataataaaggagagtcaactagaatattgttagatctaaatagaactgctttagtcgaaaggagacaagaacgtttagataaaattatattaataataaaagagttaaataattcaggtctacctatcaaggcacgacaagctatttatcaagatttaattcagaatgaagcttcaaataagcaagaatatgcttctatggtgcgattagctattaaatgttttgagggtggcattgcttcagaaataaaggctgcataa

SEQ ID NO: 87032 - DNA, 1257 bp, Acinetobacter guillouiae NIPH 991
atgccatttattactaaattccacttcgatgaaaaagatataaacctattaccaaataaaaatttaaaaacaacaaatgcttttacggtagttattggtaaaaattccataggaaaaagtagacttcttggagctattatcaattatgtgttaaatgagccttcccttcaaaacaaaaaggtaattgctatatcaaatactttttataacaaattcccaaaaataaaagaagaaatgcctaattacactaaattacttcctttacctactaatgagtctataagtggctttggaataagatcattttattatgaagaaaaaataatagatgattttattaattattcagaaaacagtactttaaataaagaatttaaatcaaacatatacatggatgtaaaaaaattagtaccaaaacttttactaaaaatcaaaggaaatagtcgatttatatatactaatttagctcaagtacttaacttcttaaaacttgataattctttaaggattcggttagttattaaaaaaaatctttttgaaaaaattaaagaaataaataaaaatgatattaaaaatattgatattataaaaaaaatggaagctattaattactcagaactttctttagaggaattagcatatttagatcctgttattattgatttaattttattaaaggtaattgatattttcagaatttaccttcatgataaaagccttaataaaaaaataaactatagagatctaagctctggtcaattagctattctctcaatgggattagccttaatttgtgaattggaagataactcaactatttgtattgatgaacctgaagttaatttgcaccctcaatggcaagaaaaaatcattagcttaatagaatcactttcccaaaattataaaaattgtcaattttttatagctacccattctccccagattatttctaatctaacttgcccaaattcctacatacttgacttgaacaataataatttaaaaagcacaatagaattaagaaatagatctgcagactttcaattaactgaggtatttagttctcctgggaataacaatgaataccttttaagaaagctattaattattttaaataaaataaactgcaatgatattttggataatgatgaaaaaaatactatagatcttgtaaaaagaatatattttgaaaataaatttcatgataatgacaaagttaaaactttagttgaagtattgttagatttagaggattga

SEQ ID NO: 87033 - DNA, 666 bp, Acinetobacter guillouiae NIPH 991
atgaatgtatttattattcctaacgagttgcatacatacatcaattcatatgatcaaaaaaattatacttattggaatagagaatgtagtgaaatattagagctaaaaaagttagttcgaagtcattatttaactgaaactaataatatgtgtttttattgcaaacatcaaataccctcacaacatggcagatattgggatattgatcatattttacctaaatcattgtaccctaaatttttatttttacctgaaaatttaatagttagttgtatagagtgcaacactgctaaaggaaataaaaatcctcataaatctaaaaataagaaaattcaaaaaattccaaagggctcagataaatttacctttatccatccattttacgataattatgaagatcatatacagattaaaaaaactgctcaaagtaatcatcatttcttacttaaaaaaactgagaaaggcgctaaaacaatagagttttgtaatcttaatcgtttctttcagacctataccgattggggcaatgttagtttcaaaactattgaaataactgatgaattaatttcatcccctcaaacactttcaaaacaagatattttgaaacttataaaaacacacaataaaaaaagtgaggaactaacagaattactcgttgaattataa

SEQ ID NO: 87034 - DNA, 1254 bp, Acinetobacter bereziniae NIPH 3
atgaatcagactcaaaacaagcttggaaaaatttcgattgaatgtatgatgaactcatcaaacaacaatggcttagatacaatgaaagttaaatcattagaaataaaagatgtagggggagtatctcatttaaaattagaaaatctcaatgaacgaatgaatattatttgtggagcaaatggtgttggtaaaacaaatattcttgattcgatagtttatgtattctcagagtatgatcctaaaagtgttgtaaataaaagtgttggttctacaaaaggtaacattgaattagaaaccgacgcatttgagaatgttttaattaaaagcattaatgagtatgagccatccaatcaccgtcattcttcaatatcttctgaaccaacaatttttacagaattacttaacgtcatttatctcaaggttaatagggtatttgattatcgttttttagattcgattagctttagtgaaaaaaaattacaaaaacgactaaagagtttagtaaatggaattgatggcgaagatttaaaaggatggttagtatctcaattattacttagtacaagtcctaatgcattagatttatgtgatttagaaaatattgaggaacttaaaaaatctttttcagtattggatagtggtatcaaatataaatcattaaaaaataatgaaattattgttagtactccgactggagatatatactttgaatatttatcatctggttttaaatcaattttatttataattcttaatatttttagagaactttctgagagagcgatttacgttactacaagtcataaactttttaatgggattattttaatagacgaagtagaattacatcttcatcctgaatggcaaggtcgcatttgcacaattcttaaagaagttttccccaatgctcaatttttcataactacgcatagtcctcatgtagtacaaactgcgatcaaaggtgaagtaattgctttagagcgtaaaaatggagtagttgaaagacgtgaattacctgaatctgaatatggataccaaggttggacaatcgaggagattcttgaagatgtgatgggaatgccagatttacggactaaaaaatataatgaaataaaagctaggtttgataaggctctcgatgaacagaataaagatgatgcaaaaaaggcttaccatgaacttgataagatgttgcatcctcaatatccactacgaccagtttttaaaatgcagctagatagtcttggagaataa

SEQ ID NO: 87035 - DNA, 720 bp, Acinetobacter bereziniae NIPH 3
atgatcaagttgcaaagaggtgaaaagcctgaatatctttcagtggaaaaagttcatgaattgacggaaagatttaaaaaagacaaaactaaagtagtgtggaaagatgagagcattggtaatccactacttttaagttcatcaaacaaatgtgcctactgtgaatgcaagttgcaaattgaagattcatatatgcaggtagaacattttaaagataaagactcatatcctgataacgttgttgactgggaaaatttactaccttcatgtggtcgttgtaatagaaaaaaatggacattagatgttgagaaattcccaatagttaatccatatgttgatgagcccaaagcacacctttgtcaagagtcatttaggctttatggtaaagatgaaaagggcaaggcaactattaccaaacttttcttgaatgatgatgatcgcgttgtacttcctagatttttagcttgcaatgaggttaatcggcaattgtcaaaattagccttaaaccttgcaaatattgatgatacaaaggattcagtgaccaatttattattatcatgccaggaagataaagcatattctgcgtttttaacaagcacattacattcaagtagcgattatcaagaaatcaagcatcatcttgaatctataaatgcttgggatcaagatatggaagatctacatcaaaactcttttaatcttattctggataaaagataa

SEQ ID NO: 87036 - DNA, 1284 bp, Acinetobacter baumannii NIPH 190; identical to SEQ ID NO: 86768

SEQ ID NO: 87037 - DNA, 669 bp, Acinetobacter baumannii NIPH 190; identical to SEQ ID NO: 86769

SEQ ID NO: 87038 - DNA, 1524 bp, Acinetobacter nosocomialis NIPH 386
atgcgaattagcagtatttcttttgataataaaaaatataagctttctgatactaatgtctcatcagaagaaaatacatttactattttagtgggaagaaatggttctggaaaaagtcgaattctccaaagaatatgccatatatatttaaactccctaaacaacaacaatccacatggtttttacaatattaataaattaaattcctataatgatattaacaacactaccgacctaaattgtggtgagattatatatgagcagaataataatatttatgaaatttcctcaacccaattaagaggattatataactcttataatgattattatgttcttgaaaagaagaataaaacctctcaaactgaaaatttcgttgatatcaccaaaattattgctgtatcaactagtccatttgataaattcccaattattgaaagacacatgcattggaataatgctatttatgaaaaaaattatatctatcgaggtggaaaaataaaagtaaacagtcaaaaagattatttaaaaaataaattcgatcaacttggggcatctttaataaattttttcctaagatcagatagaacacaagataaaacttcaatcttacttgaagcaattaatctagatgaaaagataaacatgtatttttcttttccttggcctttttcaccgtccgaaataataaacaataaaaatcctaaaccgattgcggattcattaaactctattcgtttttttaaggataaaggtgatagaataattctttcacaagatgaagaaatagcacttattgaaaatcttaaatttgttctaaattattataaatttaatgaacataatagaactgaaatatttgacctagaattgaatttatcaaacagaagtaaagatgaaaatacaaatcttctcaacagcttatcatttttagccaactatgacctaattgaattaagagatataaaatttagtaaaaataataggagtttttatttaacagattcaagttctggagaactatctttaatattcaatttattatcgattgcaggtgaaatagaaaatgactcattaatattaattgacgaaccagaaattagtttacatcctgaatggcaaagtaactttcttcctctactaagtaaaatgtttagtaattaccaaagatgccactttattattgccactcattctcctcaaatactttcatcaactaatgataaaaatatttttattattaatctagaagatagcaataagttaataagaagcgaagaaatctctaaaatgtctgctgattatcaattagcatatgtttttaaagaaccaggctataaaaatgagtacttaacgcgtatcgctttaactactttcaccaatgttaataagaaaaaattatttagtgaagatgacctaaattctttaagcttacttttagaaaatatgagtcatttagatcaaaatgatcctctacatcaattgattctatctttaaaagaaatgagaaatttgtatgcctga

SEQ ID NO: 87039 - DNA, 672 bp, Acinetobacter nosocomialis NIPH 386; identical to SEQ ID NO: 86803

SEQ ID NO: 87040 - DNA, 1773 bp, Acinetobacter brisouii ANC 4119
atgcgtcttgattacttaaagattggtagtgctaaggatagccctacccatcaatttaaaaatttaaagaatgtctgtatcgacttcgatgaacatcaatcaattactattgttatcggctggaatgggacaggaaaatcgaatgtattagaagcacttgctattattttcagagatttaatccaaccacctaaagataaaataccagcttttgcttatgaacttagatatgaaattggatcaggtataaccaaaaaatacgtcactattcaagccgatccagatttagaaaaagatgaatatattttttcgtatgtcccttttcaaccaattctagaaccatcaaatatagataaatcccctatcaatttattcgagctaaaacaatctgatttattctcagaaaaaacaatccctaacactgaaaataaagatgatgcttctgaatcaactaaacctataaatgtctcttttgcaaaatttacagctgataatagtgagtttttaccaaaatttgtctttagttactattctggtttaagtactagaatgcaggatatttttacaccatatatcgaacaatatgacaaaaaactaaggggtggtaaaacttcagaggaagtcggtttcaaacgcatgttttatgcacttcctattcatagtcaatttgtccttttagcttttctatttaaacaagatgaaaccattcaatcttttttagaaaaccagttaggtatcgatgctaagtctggaatcgaatcaattctctttgagctacgccaaccatcttggacaaataaaaatgaggatggtgatccaagactttgggatgcaaagggagtggttaaagagtttctcagtgaactgtacaacctttcgttagcaccgattagactgacaaaaagttcaaaaagcagcttgtggaataagaaaactcgtgaatatcaatatctattccttaaagatatggcgtcttttcaaagactcatggagcataaagaaccgcgaattctatttcgtgatttagaaagtacttatgtttctgaattaattgaagctgtgcatatccgcgttaaattaaaaaagaataatggcacggtcacttttaaagagttaagtgaaggcgagcaacaactactgacggttttgggtttactacgctttacaaatgaagaggaaagtctctatctgctcgatgaacctgacacacacctaaatcctaagtggtctgttgaatatttaaaatatttagaagctttcatgaaaggtgagactaatgggtcgagaacaaatagtcatgttgtcttaactactcataaccctattgcgattgcagagctcaaaaaagaacaaattcagattttgcatcgagatttagatcaatcaattaaatccaaagaacctgatatcgatccacgaggtatgggttatgccggaattattacaagtgatatgtttggcttaaattctagcctagatacatatacacagaaattactcgaacgtaaaaatgtgtttacagtaaaagatacccctttaaccaatgctgaaagaactgatttgatgcaaatcaataatgaacttgaagatctcggctttagattttctatgcgtgattcacaatatgaacgatatctcaaagcgcttcataatcacgaaaaaaataaattaaatcagaatagtcaatcttatagtgatacgtcagagcagcttaaaatcgctgaagaaataattcagactctattaaaacaaaacaacgaggatcaatcatga

SEQ ID NO: 87041 - DNA, 783 bp, Acinetobacter brisouii ANC 4119
atgagatggattgatctgacaaaactaaatgtatcaactgaatggaaaaacaaggctactgccgcacaaacaacaatagatagtgatcctgatttgaattcatcagaataccctaatatttggagtgaattaaaagaagaactcaaaacattatcttataataaatgttggtattgtgaagctcgagaaaatcgatcggataatgctgtggatcactttagaccaaaatcaaaatataaatggctcacgtacaatcctaataatttcagatttgcatgcactttttgtaattcaagaagaactgaccatgctactggccaaacaggtggtaaaggaaattatttcccactccttgaccctacgactgaggctaaagatgatgctggattaagatcagaaaaatatgttcttttagatccttgcgatccattaactccctctatcattatttacgatgatgaaggaataccaaaacctagccttctagcatcagcgatagacaaacagcgattggaaacatccattcaatattatcatctaaaccattcagaattagttgaaatgcgtagacaacttggattacaaattaatgagtgggtcaatgaagcaaatgattattttttaacaataaatgaaccatcatctaagactgctttcacaaataaactcaaagacttatgtagactaattaaaccagaaagccaattatcaacctttgctagatgtattattcaagggcataaggacaaagcttggatagactctttatttcaaatgatgtga

SEQ ID NO: 87042 - DNA, 1326 bp, Acinetobacter junii CIP 64.5; identical to SEQ ID NO: 86174

SEQ ID NO: 87043 - DNA, 657 bp, Acinetobacter junii CIP 64.5; identical to SEQ ID NO: 86175

SEQ ID NO: 87044 - DNA, 1173 bp, Acinetobacter junii CIP 64.5; identical to SEQ ID NO: 86492

SEQ ID NO: 87045 - DNA, 732 bp, Acinetobacter junii CIP 64.5
atgattaagctggaaagaaaagagaagcctgaatacttaagtaatgaaaaagtagctgaactaactgaacgatttaagataaacaaaaaagatactgtttggaaacatactgacatccatagtgccctgcttttatctagttcatctaaatgtgcattttgtgaagcacaattacaaactggtacagcttacatggaaattgagcattttaaagataaggatacatacccagagcatgtagttgattgggaaaaccttttaccatcttgtaagcgttgcaatactacgaaaggaactcatgatgtagttactgaaccaattattaatccttttgataccgatcccaaagaacatttaactcaagctgtatgtaggatttattttaagacacaacttggagagtcaacgagggatgtattaaatcttaatgatgatcgtttattgcgcctccgatttgagacttggaactatgttatcaatcaggttgaaagtatctattatgatatggagagaaaaactactttaaatagacgagaaaggaataaacttgcaaatttattaacttcttgccaatctgatcgtgcattttcgggatttgcatctacagcattgcatcaatcggttgaatatacaaagattattgcgttactaaaaaaccataacctgtgggatgatcatttagagttattgcacactagctcattaaaccttatcctagattgtcgcacataa

SEQ ID NO: 87046 - DNA, 1263 bp, Acinetobacter johnsonii ANC 3681
atgaaatatttatttaatatcagtggtaatattccacatgcaaaaattgaaaacataaaaatcccactggaagggcgtaatttaattattacaggtaagaatggtagtggaaaaactagttttttaaagttattagaacaaaaaattttattacatttagacaagaaagcctatttaactgatggacaaataagctcaataagacattatgaagatattataaacagccatcataaaggaagtattgaatactcccaagcagagtatcaactgaattatttatatcaaaatcgtaagaatatcgaagagggccttatactaaaacttgaaaatgaactagactttttagctttacatgatgagttaaaagctatttttgtttattttaaagctatgcgcatagcttctattactgaaacaaaacatacctcatctattgaagatgaaaaaaatatagccattcaaaacctaaaaaatagaaatagtgaaagttttggtaataaacttgaacaacatttagtaaatatcaaagtaaatcaatcattagctctcactgaagataaaaatcaagaacaagctaatcaatttcaagaatggtttgataacttcgataatcatctcaaatttttatttgaagatgataatgcccatttagttttttatcgtcaaaactttaaatttaaaatctcattagaaaatcgtgaatttgactttcaaacactttcatcaggttatttagcaatttttgaaattttagctgatttattagtgcgctcagaattctttgaaatcacacccaatgaactgcaaggtattgtattgattgatgaaacagatgctcacttacacatctctttacagaaaaaaattcttcctttcttctctaaattatttcctcaaattcaatttattgtaactacacactcaccatttgttattacttcaacagataatgatactgtggtctatgacatttctagtcgcgaattatttgaagaagatttaagtcgttattcttatgaatctgttattaaaggactattccacgtcaatcctattagttcggacacaaagaattcaattgaaatattaaaaaacctattaaatgaaaatccaagcaattatgaaaatataagatcaattgtcaaaagcctaatcgaactagaaaaaaatgatctattagataaaagtttaaaaaacctatatttacaagcaatcaatctcctagcagataaaaatcaactggaggatttagatgtttaa

SEQ ID NO: 87047 - DNA, 690 bp, Acinetobacter johnsonii ANC 3681
atgtttaaagtatccaaatctgctagaccaacggattggactacgaaggactataaggatcctgtggttgttaagcaattaaagaaagatttctatggtaaatgctatatctgtgaacagaagcatttcccgaatttgaatgttgaacatttcattccacatttagatgatgaaacgcttaagcttgattggaacaatctctattacgcatgttcaagatgcaattcaatcaaaaataaatactacgatgatatgcttgattgctgtaatcaagctcatttagttgaagagtggataaaagtctattacagaatgcctgatgaagacattgaagtaattaatgcttgttctaatgaccatccatatcatgagaaagctgagacgtctaaagagttaattacaaaatgcttcaataatgccaatagcggcatccaagaggttagcaaagaagatttaagagaaaaaattattgaagtgcataacgaatttctagatttaagaagagaattctttaaagaactagataactggcaagaagcagataaaattaaaaaagcagatgatattaaacatcgactcaaatctcattacgccttttcagccattcttcgtggttatttagaaaaagatacaaaatggcgtactgctctcgaagaaattgaacaattaaaacttcaacaatctgcataa

SEQ ID NO: 87048 - DNA, 1560 bp, Acinetobacter haemolyticus NIPH 261
atgaaagttgacaaactgcatattcgctcacgttttaaaaatcttgaagacgtaaaagtggactttgacgaaaaccacctaatgaccgttatagtaggtcgtaatggttctggcaaatccaacgttctagaagctttggtggctatatttcgtaatcttgatttaggcgaagcaccattgttttcttatgagttggactttcaacttggtgaaaaaggctcggataagtggtatgacgtcaaggtagatgcagatccaggtcgtggaacgttagcaaagcaataccaagtttctgtcaaggacaaacataacaacgcagatttcaagcttataccgttttctaaagtgaaacgtgataacaaaactaagcaagcggagtatcttcctaactttctgttcgcctactattctgggccgtcagatagattagaaaaatacttccgaaagcatcgtgataattattaccgcgagctactttacaataaacttgacttgagagcagatattcgatctctattttatgcgaagtctcttcatagccaatttgttttgatggctttttttcttaaccctgaactcaaaagagagcgcattttcttacaaaaagaacttggcatagagagccttgattcaatacatttcgtgttaaggcgccctgcatgggaaagagataaagaggacagattttggggcgctgatggcgttgtccgtagctttataaatttactttaccctcatgctttagctcccgtgaaagtgaaccggaatgaggataccagcctaacaggaaaaaataaaaagaatgattttatccatatattcttgccatctgttgaaacccttcatgaaatagccaagcagctaacgccgagtattttctttaaaatgcttgaaagtacggtactatctgaaattatttctgaagtccatattcgagttaaggtaacttacgctcaagatccaattacatttcatgaactcagtgaaggtgaacaacaattactgactgtattgggtttactaaagttcactggaggtaaagactccttgtttctgctcgatgaacctgacacacatcttaatccatcatgggctgttaaatatcttaaactcctgcgtgaattcgtgcccaaccctgaaacctgccatctgctgatggtaactcatcaccctttggctattgcggaattagagaaagaacaagttcaagttatgaagcgtggtgatgaaaatcaaatatctgccaagatgcctgatgaaaaccctcgtggaatggggattaatttaattttgcgtagtgatatgtttggtttgcgaacaacactcgatgatgacactaaccagagacttgtaaatagaaatgctctcgctgcaaaggaaacgttatctaaagataagatagttcgcgagcacggatttccgcctgaagatgaagagcaatacttggctcggctcaattctgagcttgaagacttaggttttaatctggcaacggatgatcctgattaccttgattttcttcgtaataagtaccatgctaaaagtgaggaaagtaattaa

SEQ ID NO: 87049 - DNA, 810 bp, Acinetobacter haemolyticus NIPH 261
atgcgttggatttgcaaggatgtgattgaagaatgcttgactcaggcgtggagaagtatggctgaccaagcaaaagctgagttaattgcagctccagatgaagaggcaagaaaagctatattaaaaaaagcagcatcctcaaacgtttggcgtgatttttataatttgctacctgactcattgaaacgcaaatgttggtattgtgaagctgaagatatccggtcagatatgccgattgatcattttaggccaaaaaataaggttgaggatgataaacaacacgatggttactggtggttagcattcgattgggagaattatcggtgtgcttgtacattctgcaatagccgtagagtttttgatgaaaccgaggggggtaaagcatgtcgtttcccacttgaaaaccctggggagcgagcctttacacatacggaccagatcaaactgaacaatgaacgtccttactttctcgatccttttaacttggatgatgaaaagctactttggtttgataatgatgggctaccaattgctaatccatcagcaacgtctgagcagcaaacgaaggttaacaattctattgaaatatttcatcttcatgaaagccgaatagttagagctaggaacctaatacgcttagaggtagagcgacaagttaggaaaataaggaataaagatgatgtacaagcagccaaagctaaattacgacgcatgacaaatgaaactgaaaagttatcacgtgctgccgttgtttacttatcggcgcatagagagattcaggaggtgaaagacatattagccttggattaa

SEQ ID NO: 87050 - DNA, 1170 bp, Acinetobacter baumannii NIPH 601
atgaaaatccattctattgagttaaaagatgtaggcggaatcccttatttaaaactcgaaaatttaaattcaaaaatgaatataatttgtggagagaatggggttggtaaaactaatattttagatgctattgctgcttctttcagccagtttgataaaaatcatgttagaaaaagggcagggagtgataaagcaataattacaatcaaacatgataaaaaaggttctccggatatttatgtggatattacagactttgaaccgaatgagtctgaatattttcttattaacaataaaaactatgaagaaaacaaacatttaatgttatacataaaaactaataggggaattgattacaaaaaagttaaagctattattgctgacccagattcaacgcataggatgagaaataattcttctggtgtaaaaaatgaggatatcaaagattggttgttaaatagagtgttacatagtaagcattacgatcatttaacagaaacgcaattaaaaaatcttgaatcagcaaaagcgtgttttaatctcttgaatccagagtttaaatttaaacgtcttaatacgagtaatgaaatatttgttgatactcctactggagagatttttttagaattcctttcatctggctttaagtcaacactattcatacttttaggattaataaaagaaatagactttcgttttgataaaaatagaatagcggccaaggattttgaggggattatactaattgatgaaatcgaattacatttacaccccgaatggcaaggtcgaattatcaatattcttaaagaacttttcccttatgctcagttcttcatcgctacacacagcccccatgttattcagtcggcctttgctggagaagtaatcgcattagaaaggcaaaataatgaaatagttcttcgtgacataccaaatccagagtacggttaccaaggatggacaatagaagaaatccttgaagatgttatgggaatggtggatttaagaactaagctttataaatcggttaaagatcgatttgatgaagcacttcaagaaagaaatagagataaagcatatgaagcatattgtgagttagataagatgcttcaccctaactatcctttacgtccagtattcaagctacagttagatagtcttggagaatag

SEQ ID NO: 87051 - DNA, 723 bp, Acinetobacter baumannii NIPH 601
gtgattaaactggaaaggggcaaaaagcctgcatatttgacagctgaaaaagttgaagagcttactaataaatttaaggcaacgaaggctagtgtttggaagcatgcagaaataggagaagcattactggatagtagttcatttaaatgtgcctattgtgaatgctccttgcaaatagaagactcatatatgcaaattgagcattttaaagataaggacacttatccagacagtgttgttgattgggaaaaccttttaccatcttgccagagatgtaatagaaagaaatggacgttagatgttgttgtcgaaccgattgttaatccatatgttgattaccctaaaaatcatttctctttagaagaatttagactttatgcaaaagacttgaaaggggaaacaacgatttctaagctcgatcttaatgatgataaaaggctagttctgcctcgttttcttgctagtaatgaaatcgctagccagttagatagtatttttagaaatatcataaatttggatgaagcaagaaaaagtttgtctaaacttttgaacagttgtcaggctgatagtccttatgcagcctttttatctacttgtttacatggaaagaaagagtatcaaattttgaaggaactattaaaaagtgaggaaattaacctttgggatgatgaaatggaggagttggattttaggtcaaagcaattgacattagaccgcaggtaa

SEQ ID NO: 87052 - DNA, 1419 bp, Acinetobacter sp. CIP 53.82
atgaaatatattcaaaaaatcagtgcaaaattagacttccttaatcatgatgtaaatattgatctaaaaggacgtaacttaattctaactggtaaaaatggagttggtaaaactagatttttgaatcaattaaatagtgtagctctaaataagttaattcatgaaattccacatttgtctcaacagcattattcatgtaaggaacgaattattaatataataagttcagagattcaaaacatatcacctaacttaatattccaacagcatttagaagaattaactaaattacttattaaaacagactcttataacattattgaaaatagaaaatttgtagaaattgcaaaaaaattaaaagctataatcatccaaaatcaaggtttatcaaatgatgagaactacagatacaaacattcacaaattcatgagattgaacattactttaatgaattaggctatatgaattctcatgaaaatattgatttagtcgtaactggcattgggaacctgagcgaaaatattcaagcttctaaagtaacgtttaatttcttccccgcacatagacaatcacaaattaccgcatctactaatacaacagacttaaatcaatatattaatacagcaaaacatgagtattcttcgaagttaggacagtttcttgaacaatatttattgaatatcaaaattgaaaaatcactcgctttatctgaagaacaagatacggatcatgctgaccaaatagatgagtggtttacaaaatttgatgaagatttaaagttcttatttgaggattcaacaactcaattaaaatttaattataaattaagaaagtttagtttgttgcaatcctatcgagagtttactttccagtcactctcatcaggatttactgcaatctttgatatttatagtgatctgttaatgagatcaagattattaaatattttaccaaatgaattaaatggggtcgtgctaatcgacgaaatagatgctcacttacatatttcgcttcagaagaagattctcccatttttaagccaatcttttcctgaaatccagttcattgtaagtacacactccccatttgttatcacatcaacgaataatgatactgttgtctatgacctctcaactggagaattttttgaagaggatttgagccaatattcttatgaatctgtgatcaaaggattgttccatgtaaatcctattagctcagagacaaaaaactcaattgaaacactaaaaaaacttttaaaccagactccaactaactacgaatatataagatctcttatcaaagaattaattccattggaacaaaatgatcttttagataaaaaattaaaaaatctttatttacaagcaattaatcttctttcagaccataatcagttggaggatttagatgtttaa

SEQ ID NO: 87053 - DNA, 690 bp, Acinetobacter sp. CIP 53.82
atgtttaaagtatccaaatcttctagaccaacggattggactactaaggactatagagatcccgtggttgttaagcaattaaagaaagatttttatggtaaatgctatatctgtgaacagaagcatttcccgaacctaaatgttgaacatttcattccacatttagatgatgaaacacttaagcttgattggaacaatctctattacgcatgttcaagatgcaattcaatcaaaaataaatactacgatgatatgctagattgttgtaatgaagatcatctagttgaagaatggattaaggtttattacagaatgcctgatgaagacatagaagtaattaatacctgccctaataggcatgaatatcatactaaagctgagacatctaaggaactaatatctaaatgctttaataatgcaaatagtggtatccaagaagtaagcaaagaagatttaagagaaaaaatttttgaagtacataatgactttttaatcttaagaagggaattctttaaagaactagataattggcaagatgaagataagattaaaaaagcagatgagatcaaacatcgactcaagtctcattatgcattctcagctattcttcgtggttatttagaaaaagatacgaagtggcgtaatgctcttgaagagattgaacaattaaaattgcaacaatcagcataa

SEQ ID NO: 87054 - DNA, 1173 bp, Acinetobacter sp. NIPH 298
gtgaaaattaaaacaatcgaattagaaaatgttggaggcatacaacatcttaagcttgaaaatataaataaacaaatgaacattatttgtggcgaaaatggtgtaggtaaaactacattaatagatagtattggtcatgtttttacaaaccaacatacatatgtgcttaaaaaaaatgttcaatctgaaaaaggaactataagatcaaatatcttagatgatacagaacacccgcatgcagtacagctttatattgataaacataaaccaaatgaaaatagctatattagtggttttggacactattcaaaaaaattaattttattgaaagtagatagaacatttaattatcaaatgttaagttctattaataaagatgagctgaaagatgatggtcacacagcacatcaatcaatgagtggtattgggtaccatgatatcaagagttggtttttacatagacatttatactcagctcacccaggtgctctgcaatctgaacaaatccataattttgaactttccaagcgttgtttctcaattctgaataaaaatttcagtttcagtagagtagatccaaatgaaaatgaaattatgattaatacaccaagtggtgaaatttattacgaatatttatcttctggatttaaatcaataatttctattgtttttggaattattaaagaaattgaattacggtttaaaaatccatttttacatgcagatcaatttgatggaataattgaaattgatgaaattgaactacatttgcatcctgaatggcaaggtaaggcttgttctatattgaaagaaacatttcctttagctcagttctttattacgactcatagtcctcatgtggttcagacagcgaatcaaggggaggtaattgcactcgaaaggaaagatgatcgagtgttacaacgagaacttccaaattctgaatatggttatcaggggtggacggttgaagaagttcttagagatgttatgggaatgaacgaccttcgtacagaaaaatacgaagttatcagaaatgaatttttactagcctttaaaaatcgtaatagagcggatgctgaaattgcttttgataaacttgagaaaatgttacatccgaataatgagttaaagacaatttatcaaatgcagcttgatagtattggagaataa

SEQ ID NO: 87055 - DNA, 729 bp, Acinetobacter sp. NIPH 298
atgatcaagttggaaagaggtaataagccatcatatttaactgatgcgaaagttgaagcgcttacacaagaatataaagaaaatggaaaatctgtatggaataaagatcaaattaaaacccctttatctgaaagcacttcacataaatgtgcatattgtgagactgacctaaattcaccaagtatatatatggaggttgagcattttcttccaaaatcaaaatatgaagatttagttgttatttggaataatctattgccatcatgcaagcgatgtaatggtacaaaaaatgatgatgatattttagctaatcctattatcaacccatttgataaagatcccagagaagacttctattttgatcatttttatattttcggcaaaacagaattaggagaaaatacagaaagtactcttaatctaaatgatgaagtcttgttcctaaaaaggtgtaaagtcgcaggtattgttaaaaatgatttaatacaaatgtcccgagaattttccaaattatctcaattagatggtcataaacgacgaaaattacgagctgttttacttgctgctcaacctgatagaccatactctgcttttgttgctaccataattcacaatacaagagaatatagtctacttaagcaaaggtttattgaggaagctaagtggacagaggaattaactaagctccataatacatcatttaatttaattctacctttacgaaaatag

SEQ ID NO: 87056 - DNA, 1545 bp, Acinetobacter sp. NIPH 298
atgaaatatatacaaaaaattgaaggaacgactaaaggtctctcctcaaaaattaatatccctctaaatgggcgaaatcttataattaccggtcaaaatggtgttgggaaaacattttttctaaatcaagtaaataatactattacaaaagaattattatctaagatagcatcactctctgaagaaagtttcaaagcaaaaagaacttttatgcttagattaaattcaatactggatcaaaatccgcaattaaactctataatagattctgtagatttaaaaaaactcattagtttaagcaaaaacaaaagcgaatttaatgtaaaaaataataatcaattttacacaatatcaaaaagtattttaaatgatatatacatgtttaacaaaaataatatttatacaagaaatagatactcacatgatataaatacaaataatattatcatagactcaaacagcaaatatatagatcatatattcccagaacacattacagatagtctattcgaaaaaaacatattatccgaaacacatgatttaatttataatttagaaaaaatgtcgaatatcttaaataattttgacattttcactactattggaagcgatctaaaagttaaaattgaaagtattgatgaattaaatagagatattcgatcaactaaaataacattcaattatttttcagcatttagacaaactcaaattacacattcaacaaatacgtgctcattagatgattatataaacagtgcaaaaactggctatgatacaaatcttagtcaagcttttgaacaatatctggtaaacatcaaaatagagcgatcattagcaataacagaaaaatctgattacttatatgctaaaaaaattgatcaatggtttaagaaacttgataatgatttaaagttcatcttcgaagatgattcaacttcattgaattttgatcataaaacaaaaaagtttttaataaaccaaactcaaaaaatcttcaactttcaaaacctatcttctggctattcctcaatatttaccatttatactgaattacttatgcggtcgcaattattagatatcttacctgatgagttaaatggaattgttttaattgatgaaatagatgcacatcttcatatctcattacaaagaaaaatttttccttttctcattaaatctttcccaaatattcagtttattgtaacaacccattcaccatttgttattacttctgcaaataatgatacggtcatatttgatttaaccgatggaagttttattgatgaaaatctaagtacctattctgtagaagcaataactcaagaactttttcatgttcatacagaatcattagatttaaaaaaaaccatagattatatatatgagaatttaaatagtgaaaatgtaaattttcaaaccttaagtaatgagttaaaaaaattacaaccatacaaatctaaattaaacattgaagcaaaaaatatttatatgcaggctttaaattttttaattgataatgatgaattaggtgatcttgatgtttga

SEQ ID NO: 87057 - DNA, 672 bp, Acinetobacter sp. NIPH 298
atgtttgagattacacgctcactacctgctccaacagacctatcaagaaataagtataatactactcaaattcttgatgcactttctgaaatatgtcactcgaaatgctatttatgtgaaaatgacaaagttcaagaagttgaggtagaacattttttaccacatgccaaacatccaacactaaagtttgaatgggataatttattttatagttgtaaaagatgtaaccgaattaaaggggacaattacgaatacattttaaatccttgtgatgttaatcacaaagtttttagaaacttgagattcattcctccatcaagagttaatgaccctatcctcatagaaaatttatgtccttctagtgatccttattacccaaatgctataactactgttgaattattaaaaaaatgctttaatgatgtttctactgcggctagaagaatcagtagacgtgaactcgttaataaccttttagatgaattaaatgatattttagttattcggagtaaattgaaatccaaaaagctttctaattttgaagaagagcaagaaatacagagattaattaaaatgatatccccaaactatgcattttctgctttttggcgttggtacgttttagatgatgaaacacttaattccaagatgagctcctatattaatttttaa

SEQ ID NO: 87058 - DNA, 1236 bp, Acinetobacter sp. NIPH 1867
atgtctcaaaactacatttcaagtttttatgcagagaatttcagacaattttcaaaagtttctatgaaatttaatgaaaaatttaatttcattactggccctaacgggtgcggtaaaagtagtatcttagctgggataaatcattgtttaaatgagaattggcaatcttctagattaaatcaagacagtattttttacattggagtagtaaaaaatactgaattttattatataggtttaggtaagaattctttcagcggattaggaacatatagaagaaataatataattgcttataactctcctcacattgaatatgatataggtccttataaaatttatactccacattatagagaatataagatatatccacttttcataggaactaagagaaacattgaatataaaaaagttgatggtttaagcagagaattggatacggaacaagcaaaagctgagtattcaaaaagagggatagagtctaatatttcagatgttaaacaatggcttataaatagatattttattattgataagaattgggcagttgaagaaaaagaaaattggaatttacttttagaaaacttaccaagaatcgcaccttttggtagtaattttagttttgtaaaaattgggagagatttagaaccactttttacactatatgatcaagaatgttacctagaggagttatctgctggttttcaggctatattatccattattgcaaatattattgaatggactgaaaaaacaaatattgatggggctaggaatattcagcaagcttgtggaacagtcataattgatgaattggacttacatttgcatcctgaatggcaatttaacatacgtgatggcctagttgcattatttcctaaccttcaattcattgttactactcattctccacatttattagcttcagcaaaagcaaatgaagttatcatcatggatagaaaaactggaataacggagtattcttttgaaccaactaataaaacttattctggttggagtactgatcaaattttagaagatgttatgggggttaaaagtcttgtaaataaagaatatgaacgtttaattacaaatgcacttgaagcatatgataaaaaggataaacaagcgcttaagagtttaatggtaactcttgagggcattactcattctgatgatacaattttacaagttttaaaaatgaagatggcatcattggagttggatcaatga

SEQ ID NO: 87059 - DNA, 750 bp, Acinetobacter sp. NIPH 1867
atgataaaactttcacgagctgaagaagtaccgcaaatattaattgataatcaaacaaaatggactgacaacttgctagctctcgtagctcagcacggtacctataaagatattccaaaagatattaaagaagcggctttaaaacattaccgtcatcaagatataaaagatgttttattcggcaccacgtcaaataaatgtgcattctgtgaatcttttccagctgatagtggcaatattgaggttgaacattttaatccaaagtcgctgtatcctaaccaagcttttgaatggaataattttttaccaagttgtagaaaatgtaatggggctaaagatgatcacgatactattagtgaaccaatcataaatccttatgatgataatcctgaagattatttagaggttgatacaattcaattaaagggtaaaaatgagaagggaaataaaactattgaggtgtgtggtttaagcggcattcgaatctggcgaccttatgcagatttgctagtacaatttaaaacatacgaattgaatgttacagacgcaatgcaggactacaatgaagctaaaacctcatctaacaagagaagaaagcttcaagcacttcagaactcaattgatacaattaatgatctcagaaatccaaaatcaaagtattcttttttttgtaatcagatggttagtaaaagtgaagtctttgctcaagcagagtcactattgaaagaacatgaagcttctcaagtttag

SEQ ID NO: 87060 - DNA, 1395 bp, Acinetobacter sp. CIP 64.2
atgggcttttatatgcttttacaaaaaatgactctcgaaaattttcgttgttatgaaagtttagaaattgattttagagagagaacgacagtattagttgctataaatggtcaaggtaaaactacaattcttgatgctatccgaatagctctatggccttatattagtcgatttgatctagccaaaactaaatttgcagacccagctaacacaattacgattgatgatgtacgtaccatcaaaaaaaatgattcatcacaattggaaatggcaagaaaattaccttcctctatatctgttacttgtgattttaaagaaaataagttttcttggaaacgtactcgtgatagtgaagcaaaacgttcacaaacaaaagatgatagtgatactaaaaaattaaaggattacgcaacacaattacaagctagaattcgagattttggacaagaatcaagggacttacctgtttttgggtattatggtacagggcgactctggaaagaaaaacgattagtggaaagtaagagggattctcgtactaatattattaatactagaattagaacttcagcatatatcgattgtttggaccctgcttcaagttttaaacaatttgaagattggttcattgctgaatataaacatgattttgataaaaggatgatagctgtagagagaggcgccacaaatttaccgaaagtaaatgatacaattttagttgttagagaagctgtaaatattattttggaaacagttggatgggaaaacttggcttatagtcaacaatatgaatcattagtactagagcataatttacatgggattatgaaaatgtctcagctgagtgatggtattaaaaatatgataggtatgattgctgatattgcttatcgttgtgtcttgcttaatgggcatttaggtaaagatgctgctcgtctttcaaaaggactagttatgattgatgaaattgatatgcatcttcatcctcaatggcagcaagttgtaatttcttcattggaaaaagcctttcagaatatacaatttattgtgaccactcatagccctcaagttttaactacggttagttctgcaagtatttgtataattgaagatggtcaaaagtatgatgctccaaaaggcagtcgtggtgcagagtcatcgcgattgttaaagcgaatattcaatgtgaatacgcgtcctgataatttagaaattacaaataaattagagacctatgctaagtatgtatatgatgataagtggaatttacaagaagctttggcgttaagaatagaattagatgaggcatttggtgatgaggagcccttgttaagtgaattagatttatacattgaaaatagggagtgggagttagagtttgaaaaaaatcaataa

SEQ ID NO: 87061 - DNA, 789 bp, Acinetobacter sp. CIP 64.2
ttgaaaaaaatcaataaatccttacctccgaacccattaaccgttttctattcagtttctgaacataagcatttggattgggaggattttaggctgcatttaaaagctaaaagttatgatcagcttaaagagataatttttcaggatcaggggtttttatgtgggtattgtgaggattcagtaataaatattgataaaagcaagactcaaatagaacatttccatgataaatctgataaagacttaacgataactaactgggcattagattggaataatgttttcggtgtttgtaatgcgggggtagatgaaaaagaagcccatgcattacctaggaatctaagttgtgatggtcataaaaatcatattaaaaataaatcaaaaaagtctgccagcatggagggagagtatctaaatcctttggagattccatatgatcttctctttacttttgataaagccacaggttttttaaatccgaatcttgatatttgtcaaactttgcattcttatactccaaataattatagaagttttgcagagctggtccaaaatacgattgatattttaaacctgaattgtgatcgccttgctcaaaaaagacttacggtgttacatgaatataatcgtcttcttaaaaatgctagaataaataaaaatcctcagcttcttgaacagttacctcaacagtggtttcagaaaaagtggccatcattttttactgtgaggcgctgtttattaggagtaagagcggaaaaatatttaaaagaaaatgggtacggcctataa

SEQ ID NO: 87062 - DNA, 1257 bp, Acinetobacter sp. CIP 51.11
atgacaaaagcgaataaatctgaaatgactaactactttataaaatcttttaatgcagaaaattttagaatgttttctaagatttcagtaaaatttaatgaaaaatttaattttataaccggacctaatggttgtggtaaaagtagtattttaactggtatacatcactgccttcatcatgatttcaactcctctagattaactagtgaatctagttttcatatagaagttgtaaatggaggtgaacttatatttctaggtttagccaaagagtccttcagggaaggtaatgcatatagagaaactcaaatgaaaaattggtttcctcctcgcattgaaaatgtaacacaaccatacagggtgtttgttcctgatggtcaaaataaagaaataatacccttatttttagggacaaaaagatctattgattatgtaagagttcaaggcgcacagcgtgaggaaccacggcaaaattctatagatatatatcgacaaagaaatcttgaatatagtaattcaaatgttaagcaatggtttatcaatagatatttctatattgataaagattgggcatacgaggaaaagattaattgggatattttgcttgaaaacttaccaagaattgctcctacgggaagtgatttccaatatttaagaacagaaagagatttagaacctattttcagattgtatggtcaggagtgttatctagaagaattgtctgctggatttcaagcaattttttctgtgattgctaatattattgaatggattgaaaaaattaaccctcaaggacatagaaatattcaagaggcaactggtacggttttaattgatgaattggacttacatttgcaccctgaatggcaatttaatattagagatggattagaggctttattccctaaacttcaatttattgtaacgactcattcaccacatcttttggcttcagcaaaagaaggtgaagtcattattatgaatcgtgaaactgggaaaacagaatattattttaagcctagtgataagcgctactcaggttggaatactgatcagattttggaagatgtaatgggagttaaaagtcttaagaataaggattatgaaaggcttatagatgaagctctcgatgcttatgaatcaaaagataagactaaacttttatctgtaatggagcatttgaaaaatattactcattcagatgacacgatagtacaagtattagaaatgaagatggcttctttggagcttgaataa

SEQ ID NO: 87063 - DNA, 753 bp, Acinetobacter sp. CIP 51.11
atgatcaagcttgaaaaacaaaatgatattcctcaaatccttcaagataaacaaagagaatggacagatcatttacttgcattagtaagtaaatatggaacttacaagaatattccgaaagaagagaaagcttcggctcttagccattacagacataaggatattactacccctttatttgctagctcacatcaaaaatgtgctttttgtgaaggaagtccaaaagatagtggaaatatagaagttgaacatttctatccaaaatctatctatcatgataaagcttttgattgggataattttttaccaagttgtcgtaagtgtaatgattcaaaacttacccatgatgtaggtgttgaacctattttaaatccgtatgatgaagattttgatcctagtcagcagtttgaatttgtcttagcacgtatgaaaggtaaaactgaaatagctaaacgtacaattgatgtctgtggtttaaaaagtcgattgtatgatccctacagcaaattgataaaagtattttgtgaatatgaacaaaccttagaagaggctcttgaagagctaaacgagaaagatactaatcgaaaacgtttaaaccagatacgtagaatttctgattccattgatagaatcgaatcattaatgaaacctaatgaaaaatattcatatttttgttcttatatcattcgaagtagtgaagtttataatgaagcaaaaaggatactctctttagagcttcaacaagtaggctaa

SEQ ID NO: 87064 - DNA, 1440 bp, Acinetobacter sp. CIP 102136
atgaacaaaatcagtttcttatattatcagagtaaaaaaattgagttaaaagaaagaaatttaataattacaggtaaaaatggatctggaaagactcgttttctaagacaattagaagataatctaataaataatcgatattctgaatatcaagatttagagcgtgaaaatctacttaaagatattaaatatggtatagacaactttcctaagtcactagacttaaagaataatgaaatcaagatttattatgatttaaaaaatcataatttcaatgaacatgaatttcgaaaaaatttatctcaactttacaagattcttttacaaaaagttgaggtattcagaaagaatgctaagagttatataattaatacaaatgaagatttaaaaaaatcacatagagaggaaatcaacccaaataagataagtgaagaatactattattataataatcctgaatatgtcatagagtttataaaccgtcttacaatctcaattgatcagtactataaggtatctgaactatttaaaatttcacctaataattttagtaaagatcaagtctttgtttttgatgcatctagagtaaaaaatgatagactaattatgaaagtcttcaaagactatgaagattatcgtttaaataaaaatcgggataatattgaagaggcattagaagcatatttaatttcgaaaaaatcgcagctcatccaattttccgaacagcaaccgaagttacaggaacttaaacgggaagcttcaaaactacttcattggtttaaaaaagtagaaaaagatctgaaattcatattagaaaatcctgatattagaatctcattcaaccatcagagtgatcaggttttacttgtagacagtcaaaagcaatctttttttacttttgactctctatcttctggctttaaagctatatttaaaatatatgcttctcttttaatggaagcacagctaaaaaatattaagccaatagatctttctggtatagcgataattgatgaaatagacgttcatcttcacatctctctgcaaaagaaagttttgccttttttgataaaagcatttcccaaagtccaatttattgtgagcacccattcgccttttgtgattacatccactgataatgacacggtaatttatgatatttccagtggtgaattctttgaggaagatttgagtctttattcacatgaatcaattattaaagaacttttccatgttaaagatgataatgaaaatctaaaacagctatctgatcaacttttacagttcataaactcagaagactcaattcaagacctgaatacaattcaaggcttattagatgaatttaataaagactttacaaaactatccgttgagttgcaacttcagtatatggtcgcaaaaaataagcttgcgaaattgaaacatgagggtcattaa

SEQ ID NO: 87065 - DNA, 306 bp, Acinetobacter sp. CIP 102136
atgttttcagttataagaccacctactttccctaaaagtttaagcacctctacaaaggattatcgtgcatctgatgtagttgaagaacttcaagatatattctttgcaaaatgttatctatgcgagagacagggatttcctgatgtaaatatcgaacatcgtgacccacatctaggtgacagtaccaaaaaatttgactggcataatcttttttatgcctgtgtaagatgtaatagtattaaaggcgatacacatataaatattttagattgttgccaatctattgatgggcagagtaaaacttga

SEQ ID NO: 87066 - DNA, 1413 bp, Ruegeria mobilis F1926
gtgagttttgagttcaagggaacgcatcagaaattcagactaataagtgatgaagagagaagagcgggaaactttttcaccctaataagcggagagaatggcgttggaaaaagcgtattattgcgagctcttgttgatgccgctctgacaccagccagccagtcattttctaacaaccgcacttctaaggcttccgctaggttttctggcgggcagccgacacgcattttggccctctccggcacaataaacgacagatttcccaacaattcaggggcagaccttcgactaagcgtaaacaaattcgacgtatccaatttctactactttggcccacggcatgccggcggcatagcatcaagcgcgcgagcagcaagcagcatttcccagtcaatagtttcctttatgatttcaggtgggggctggagcaaaggcgcgcatcatctccttaattatttgggattgaccggatctgttgttgtaaaattacagccgcaccccagagtgagaaagaacgtcgatggatacatcgaagaaatgatgcgtcgcctaactggtattactgagaaatttgaaggtgatcagaaggagcgaatagattcagcaaaattcgccctttctattctgcaacaggtcgatgagaaagatgttttccggattcctgagaactggcctatgcgcttgcggttcgagagcagaagcggcgatattattatggagagagatcaaggttaccttttcgaatctcttctgatagaacaccaggaggattggccgaaactaactcttgggctcatctccatcgggcttctcaaagcagatgtcgagtttattaagttcgacaacgaacacgatagtgtcaatcttgatgaaatgagttccggtcaatggcagcttataaactgcctgttcaatttagctgcttcagttcgggataattctttaatcctgatcgatgagccggaaaatagtttacaccctcagtggcagaaaaattatatcagcctagttagggagattatttctcatacgaaagggtgccatgtgctgatcgcaacgcactcaccaatgctcgtgacttcgcttttgccacatgatggagcgctgttgagcttaacgaaggaacaggacagttctcaggtcgatgcggagatcgagggttcagcatatggttggctacctggagacgcacttagggacagattcgaccttgacacacaacgccctcctgaactcacaaaggcaattaacatagcgctctccgcaattcgaagaaatgacgggcggtcctctgatctaaaaaatgcgaagcgccgaatagcccatttaagatcaagccttccggttgatgatccactcaacctaaccctagacgcgattattgagttcaaggtcgataccagggatgaatga

SEQ ID NO: 87067 - DNA, 804 bp, Ruegeria mobilis F1926
atgaatgaagatgtaggcgatgacgccgaaaaaaatggagtcggcatactgtgggaaggccttgtcaacttcgaacaccccgacgagctttccgaattacttcaagaatgcttggaccaaaatcgggagtggggaagctcggccagccagcatgcgaaagtttctcttaggaagactttgctggtagcccaaaaggcgcagtgtgcctactgcaggagaaggataaaggatgagcttggacacgtcgagatcgatcatattcttccaaagtccgcaaaaggtgatatcgcaaaaagcacctccaatgctgaagctgatcgcttttgcacgcaagggtatccccaattttcatttgagaagagaaacttaattctgacctgcaagaggtgcaacaacaaaaaaggttcatatgattccagatcgaaccgttctattgctgcagatcctggctacaccttaaattcaaattactactcttgggttcacccttacacagaccagtattccgaacatatctcacttcataaaggtctaatttacaccccactcaacggatcgatcaagggtgacgccttaatacgcatttgcaagctagatagtatttctgctgtagaggctcttgcaagagaattaatcgccaagtctgcgggtggctacattaaggcgattatgaagcttcttgggggtgtaaatgaaaccggctgggaggttttaacagactctgttattgaggcatttcctgacattgaccccgacattatagcgagaaaggtagatgagttcagaagggcttctggcgaataa

SEQ ID NO: 87068 - DNA, 1644 bp, Streptomyces fulvissimus DSM 40593
atggagctgctccagctgaggctgcccgactaccgcggcctgcggaacttctcccttgacctggaggacgccgtcgacaaggggcaggccatcgccgtactgatcggccccaacggtggcggtaagtcccgggtcctacacgcgctcgcggagctgttcggggccctctaccgctgtgccctcggccattcgggccgtgcggacttcggatacgaggtgcgctaccagctccgcaacacgaccgtcgagatcgtgcagccgtccgccgaggcggatccggtcatgtgggtgacggacgccaccggatcgcgcgacgtgacaccgcgtcatgactggctccaccaccttcccgaccacgtcttcgggtaccaggtgcacggcagggtcccatggggctctgagttcgagcggcacgtgcacttcgccgaggcggagttggccgcatggcgcgagcagtggacggagtcctggttcgcctggcaggaccggccggagaacgaggacggggtgtgggcggaacagctgcagctgccgatcgcgtgcccgctgtacaccccgggattcctttgcacgcccgattggctcccgttggtcctgctctctctggctacccagtgggcggacgtcttcggcgaccatctgagggaacgggcccgggtggacggggtggtctccgccgtgctgcacctgcgcgcccccgcgtccgtcggggaggagctgtctaccctcccgtactggggcctgggtgggccgccgcgcgccctgttcgccgaggcggcggcgtccggacgcttcggaccggtgccggagtcggacccgctgtacagcgcgggcacccccgaggacgggttcgccctcaccatgagcagcgccgatgacgtgctcgccctccgcaacctcttcgacagcgacctgtcgatgttcgggctcctgtcgaccctccagatggccggctacctgaccgtcgatgtgcgcgtctgcaaggcggacggctccgtcgtcggggcggaccaactgagctcaggagaacagcagatcctcactgtgctcggactgctgcggctgcagcggggccaagagtcgcttttcctgctcgacgaaccagacgctcacttccaccccgagtggagcaggcgctggtattcgtcggtccagaggatgctcggcgacgggcagcgctcgcagttcatcgccgccacccacgagcccctcctcgtctcgaacatgctgcggcaacagatccgagtgctcggtacgggcgccgacggacagacaacggtgctcaccccggacaccaacccgcgcggccgcggggccggagggctactcacctcggacctgttccacctccggagccaactcgatgaacacacacaggacctgattgacacccagtaccacctcatacccgtagccgaggatgacccggcggcccgccagaagcttcaggaggtgaccgaccggctcgacggactgggcttcgccacaaggcaccgtgatccggtgctctcctcattcctggcggaactacaccgacgacgcacggaactcatcgagcgagcccgttctggcgacgctatgagcgaggaaatcgagacgacagcacgcttcctcttcgatgagcgcttcacccggggagtttga

SEQ ID NO: 87069 - DNA, 1185 bp, Streptomyces fulvissimus DSM 40593
ttgatcctggtgcgtcacgtggacaacaccaagctcaccccgccgcagcagtggacggacagagccgccaaggaacttgagaagcttcacgaggacgcggtggacgcggacaagaagtttcttttcagcgagatgtggcgggaggacgcaatccgcgaccggctgatcgccctcatggacaaatgctggtactgcgagaccagcttcgttcgatcgccttatcacgtcgaccactaccggcccaagtccgctgtcgccggcgaagccaagcaccgcgggtactggtggctcgcctacgaccccgccaactaccgtctttcctgccaccattgcaacagcggcggcgcccgctacggtaatcagagcgccggactaggcaagggagcccgattccccctactcgggcaacgcgctccggagggtgggagtctggaccgcgaactgccagtgctgcttgatcccgtggcgtcagaggacgccgaactcgtgggattcgatagacaaggcttcgcccgacgcagacccgaacagccctactctggccacgaggtcgcccaagacctctgccgggtggacgagaccatacgcatgctcgcgctcaactccgacctgctcacggagggcaggtccaccttgatcgggagcgtgatcgaactcgtccagttgtacctcatccgcagagacgacgccgtcgtggcgcagtatgcccgcaagcagatcgacagcctgacccagacgactgcggagtggagcgcggcggccgcatcggccgaacgcctggcgctcctcgcccacgaccgctcgggagacgacgcgccccctgcgggagaaacggaggccaacgccgccgaaggtgcagacggcggaaccgagcctcagaccgccaccgcggacggccaccgtgtcgatctgcgaaccctggtggctgctctgccccctgcagcgttctccgcgggcggcatcgcgctaacgggccgggggaagcggggccccgccaaggcgaccctgctggaggatggaaggatcatgtgcttccggcagcccatgaacacacccacgtccgcggcgcgaatggcagccggcgacgataccgtggatgggtgggccttctggtcactgaccgtggacggcaaggcccggacgctcgccgacctgcgcgacaccctaatcgcccaaagaggctga

SEQ ID NO: 87070 - DNA, 1227 bp, Pseudomonas putida LF54
atggctcctcacatccaaaaaattggcggacaaatacccgactctggcatgccgttagacatcccgctgaacggaaaaaacctcatcataacaggctctaacggagcggggaaaacttggtttctaaaacagttaaacggtaatttattatcaaaattaatggtgatcgacccaccgctatctcaattacgacgtgaattgagcgagctaatcaaccaaggtgacccgggcggatacagcgacctacaccacaaccataaccaaaagctaaattatctccgccagcagatagaatactatgagacacacatctatctcgacgtagatcaagagagcccgatcaccggccatcaggtggtgatgtttttcgaagcagatcgaaagtcatctataggacctgcctcatcgataacaagtgttgaaaccagcaaagctcagtggcgtggcaatgtcgatcaaaacgtcgttggcagtgcacttgagcaacacttagcaaatttgaaaagtagggctgcgatcgtcgcaagatacgaaaaaaatgaggcttacgctcaaggtatcgacgagtggttcgccacacaagaactgaacctcaaactactaatggaagatgactccacaaagttagtatacgaccccaagaaagactccttcactataaccagagaggggaaacgagacacaacttttcagagcctgtcatccggctactcgtcagtcttcagtatttatagcgaaatcctgatgcggactgaggtattcgacatatcaccagccgagtttgaagcggttgcattcattgatgaaatcgaaacacacctgcacgtttcattacagcgccttattttaccattcttcaaaaatgcattccctaaagtacagttcattgtaacgacacactcaccatttattcttacctctacaactgatgcagtggtgtatgacatcagcactaatgctgtaatcgacgcagacctttcacttttcacttatgctgcagtaatgaaaggaatcatgcacaccaggccaacctcagtaatcttagaaagcatcgttaagaatatatccaacataataaacaccgaccctatcgacaaatcaaaactccgcctagagctaaacaaactccatgaatcgtttgaactcttagacaatcgcgccaaaaccttctatcggctaggtgaaaaggttcttgctgacagtgagggcgataatgttcaaagttga

SEQ ID NO: 87071 - DNA, 669 bp, Pseudomonas putida LF54
atgttcaaagttgagcggccacatgacgccccagaatgtaatgagcgaaccggatacaacacgcccgaaatcgtcaaagcgcttgagaaaatgtttctggggaaatgctatttatgcgaacaggacgcattgagcgacccagagatagaacattttcaaccacacgaaggaaatacgaaactaaagtttgactggaacaatctgtactacgcatgcagcagatgcaatagcctgaaggggtcaactcacactgacctcctagactgctgcgacccggacactgacgttttttcacctataaagctagtcctcccatctcgttacgatgacgacatacatgtaactcttacagaaaatgaacccagtgaaaaagcagtaaacacctctcgattactcaacagatgctacaacgaagatgccactgggctgcgcggcattaccagagcagtattagttgagaagatgcacggtgaatggcatcagctcgttggctacagaaacatcgtgacttccatcaggttctctgacgaggaaaaacacattccaatgggacgtatcaaggcgatgttgcaaaccaaatatccattttctgttttttggaagtggtgggtgctcggcgatagcaaactgctcgaggtcatgcctgagcttaaagagctggcaaaatga

SEQ ID NO: 87072 - DNA, 1647 bp, Plesiomonas shigelloides 302-73
atgaagcttgataagctctggatcagtgaatttaagaatcttaaagatattgagatagacttcgaccaaaatgaacttgttacagtcgtcattggttggaatggtgctggtaaatcgaatgttatcgaagcgttggtaataatctttcgcgatcttgatttatacaaggctccttcattttcttataagctagagtatctgtgtcgtggcaaccgagtaattgtcgaagcaaagaaaactgcagtgaagagggaccagtacaaggtcctagtgcatgttgaaggtagtcctgagaagtttataaccgataagcatactgatttctttaaggatgaaactcgtcagtttttaccatcgaacgtttttggctattactcgggacctagtgaccgactagccacgcatttttatgaacaccagagaaagtttagagatcaactgctttaccctgaaaagtatggtttgaacgaaacaacgcttccgttaaggccattgttttatgcccagaaagtacatagtaattttgttctgctttcattttttttaggtgcagatgaaaaagtaaaaaggtttctaagagagaagctttttattgaagagattgaatcggttttatttgttctaaataagcccgattggacgagtaagagtggagatcctagattttggaacgcatcaggtgtggtgagaccatttctagaccgattattttctgcatctttagccccaatgcgtagaacaataaaagttcctcatccaatgaagaagaatgctgacaatgttgaagcgctttttttgtacttaaaggatttgagtgcactcaagcaagtaggtgaaaaaacgtcagataaagacttttttaagcttttggaaagtatttatttctccaatttgattcacgaagtacgtattagagtaaaagtaagggacaagaatggttctgatgaatctttgactttcagagaactcagcgaaggtgagcaacaattgatcaccgtgcttggtttgttacgttttacccgtgatgatgaatctctatttttattagatgagccagatacacacctaaatccggcgtggagtatggagtatataagcttcttaaaggaggttgcaggcttcaacctggatgcaaacaaggagaaggtggactctacggctgtagataacagccatattgttttagcaacgcacgatccaattgtgatttccactttgaagcaagagcaaatcaaaatcatgaagcgtgatgaagatagcttgcgagtttttgctgcgtcaccactctatgagcctaaaggaatgggattctcaggcatccttatgagtgacatgtttggcttacgctctgatttggacacaaaaacattagagaagttagatgaacatgcaattctgcttgcaaaggatgagcgtacagatgaagaagagtttcgctataaagaactgcaaaagcatctagataactcagggtttcttcaagcttactcagacccctacttctcggcttttgttaaagcatgggtcagacagcatggagacaaactattcacgcaaacttttctatcagatagagatagacagcaattggcagatatgaccagtgaaattcttgccgagctagatgctgaagaggccggtgagtaa

SEQ ID NO: 87073 - DNA, 918 bp, Plesiomonas shigelloides 302-73
atgcgttatattgatttagatgaggtggaggctgacttgccgggaaataggcaagaacaagttgatgcagcctgggtttacgtcaataggaagatggacgaaagcgaagctaaggttagagctgaaggagcccggaataactggtctgaagcagaaataactggaaaagttgagctggcgaggattagtgcgagaaaggctgctatatcggcaaaaaataatctttggagtgatttaagtgaccttcttgccgaacagtcatctggaaaatgctggtactgtgaatcaaaagaacttaggtcagataatccaatagatcattttcgacctaaaggtcaggttgtcgagtgttctgagcatccagggtattggtggttggcatttgattggtcaaactacagatactcatgcacttattgtaactctcgaagagttgaggctgaatctgcaggggggaagcatgatcattttccgttattcactcccccagactggaataaatctaatacagataacaacgcagaaaggccaatgttattggatccaacaaatgctaatgattgcaaactgttaacgtttaatcaaaacggagaagcttgccctaatgagagtgattcttcatctgataatttcaaaagggcaaaaatttcgattgagctttaccatttaaatcataagaatactacgagagtcagaaagcaaatacatcaagaaataagacaattagtcgctgcaaccaacgaattgctcgatgcgggagcagatcctcgttcattagcaatagaagctaatataaagaatttattaagaaaaattcggtcaacgtgtaaatccactcagttcaatactgctgcgaggctataccttagtcagtttgattgtcatcagtgggtgaaagatattcttgatttgagataa

SEQ ID NO: 87074 - DNA, 1338 bp, Bacillus cereus MC118; identical to SEQ ID NO: 86692

SEQ ID NO: 87075 - DNA, 633 bp, Bacillus cereus MC118; identical to SEQ ID NO: 86693

SEQ ID NO: 87076 - DNA, 1257 bp, Bacillus cereus BMG1.7
atgatactaaaaaatctgcaaataaaggattggaaccaatttgaaagagttgatattgattttcatcctaggttaacggtcttgactggcgcaaatggtgcgggtaaaagtacaattctaagaatgtttagcacacagcttggctggggctataatgaaacggctataccatcgaaagaatctactacatctttgaaatataaaagtggtggtagaagaaaaattcaacctagagagcaacaagataagataaatattgggagtttagagtgttttaatggtaagactgcaaacctatttgttccagatttaactccttcagcaaattattgtataaattatgaaactcctggtctcaattactatactaataattctttagatttaaaaggtatcaatattccttctcatagaatagcgtattcttataaaccagttggaaacattcctgtaagacctgcttctagagaagaagcttttagcttatttaaccactctttaatgaataaattatttgaaagttatggagattccccttcctttcaaatgaaatcaacacttataagtttagctctatttggtgaaggtaattcgcatgttaatgaaaataaagaagcattagatttatttttaggatttatcgaaatactaaaagtacttcttccaccaacattgggttttaaaaagatttcaattagagatggtgaagtggtattagaaacaaatagtggggatttcttattagatgctgtttctggcggtataggtgcaatattagatttagcatggcaaatctatatgtatgatggagataaatacgagccatatattgtattaattgatgaggcggaaaatcatttacatgcttcaatgcagagaagattaatgccgagtttacttcaagcctttcctaatgcacaattcataatttctacacatagccctttaatggtaaactctgtaagagattcttccatctttgtgctaaaatataatgaaaatcatttagtagttagcgagttattagacttcgaaaataaggcgtcgaatgcttcagaaatcttaagagatgtattaggtgtccctataacaatgccactatgggtagagaacaaattagaagagattttaaagagttttaaaggatacgaaattacacctgaaagttatagtagactaaaagatgaacttgctacagttggattgagagatcatttgcctcaggcattaggaatccttcaaggaggtatctactaa

SEQ ID NO: 87077 - DNA, 648 bp, Bacillus cereus BMG1.7
atgatttctttaataaaatcgtccaaaccgacaatcctggtggagaaagaaatcaattggacaaatgaattgttaagttttgaagaatctggtgaaaaagtacctaattatattaaaggtagatatcgtcacgaagaaatcaaggaagcattattaaaagaaacatattctaaatgtgcatactgtgaaagtaagatacttcatatagattatggagatattgagcatataatacctaaaagtatcttccctcaaaaaacattttcgtgggataatcttacaattggatgtgcaaaatgtaatcagagtaagagtaattattatgatgatactttaccgttacttaatccatatattgattcccccgaaaatcaaataatatttcaaggacccattccttttgcaaaacctgaatgtagaagtgcatataaaactatcaaacagttaaagcttgatcgaattgaattaatcgaacatagaagtgatttaataaaaaaaatccaacccttaatttggcaatatgagaatactgaggacgatatgttaagaaaaatgatattagatgatctaaaatcatttactaataaggatcaagaatactcattgatgataaaacaattattagattctcttgctattactgcataa

SEQ ID NO: 87078 - DNA, 1257 bp, Bacillus cereus HuB13-1; identical to SEQ ID NO: 87076

SEQ ID NO: 87079 - DNA, 648 bp, Bacillus cereus HuB13-1; identical to SEQ ID NO: 87077

SEQ ID NO: 87080 - DNA, 2118 bp, Bacillus cereus VD214
atgattcgaatatataagaatggtgcaataaactggctatctaatgaattatcagctctaggattacagtacatactaaatgagaaaggtgagttagaaaaattaatatcggagtgttttaatgggaaatgttcctattgtgaaaattcgatggaacgtatagatatacaaattgattattatagaccaataaatggtgcgctaaatactatggatggaatttttcatgaggaactttataactggttggaaaatgatatcgataatctattttctatttgtgtagagtgtaatcgtgccaaaagtaatcgatttccagtagaaggtgagatggcttcttttaatgcaagtcagaaagaattaactaaagaaaagaggttattactaaatccttatagagactatccagagaagcattttagttatagtagtgatggaagcatatacccacgaacaaaaaaaggacatatttcaatagagatattaaacttaaatcgagattcattgaggaaagctagaagagaagaggctgaacaatttgttgaaatgtgtaatttttatatagagagcagtggtatgttacgtaggcatggtgagggcatgggaagaattattaaagaaataaatcaagaatcaatatttgctggtttaaaaaggcatattctttctgaattaattttaaatggaagtatgaagtatactgaagaattagatgaatatttaaagggaattatgacgaaaagtgagttgcattatttcgttgccgcaaataaagataactttatcgaatcaacgaaacgaaagtattatgatacggaaaaaaaaataaacctttataatgtgacagatgataatgatatatctaaatattttagtgtgcaacgatttattgaaaaaattgagattagtaattttaaaattattaaagatttaaaacttgatttgactttaagtaaaagtaaagatgcaccgtggttaatgctccttggtgagaatggtataggtaaaagttcaattttacaagccattgcactggcgttgatggggaaaaaagaaagagataaactattatggaaaattaataaaagtcctaatgaatatttacgacataatgcatctgaggggtatattaaagtatatttatcggggatgatggaaccaattagtctacactttaataaatattcgagagaatttaggggggagaaccatcaagaaccgaggattttattattaggttatggatctacacgtttactcccacgggatagcatggaagaaggtatgaacattacttgggcaagaacgggtaatctttttaatccatttataccattagtacatgtagaggagtatttgctgtctttaagtgatgaggacttttttaatgtaaggcgagctatagaatcagttattttagaagatgtgagagttgttaggaataaatctaaaaggttattactttttagattaccaaattcaactgttgaattagaagaattaagtgatggatatcaaactgttattgcacttgctactgatataatgatggtcatgaaaaatcgatggcgcagttttgatgcggagggaatagttttaattgatgagatagatgcccatttacatcctagatggaatattgaaattgtatctagattgaagaaagcttttccgaaaatccaatttatcgcaacatcgcataatccattatcacttcgtggacttattgatggagaaattgccgtgttattagaagatgaggataaaaatccgtatattactcaaaaactcccttcgcaaaaagggtttaatgtggaagtgctattaacatctaaattttttgggctgtatgatacgatgccggagttaaatgaattatttgatagatattatttacttttatcaaatcccgaacctaattcagaagagaaacaagagataaggtatttgaaaaataaattagaaaaatatgataaaacaggcacgacgattagggaacaaaagttttatgaagtagtagatgaatacttggcaaaatctcgagatagaaattccaattataatgaacaggactttaaaaagatgattaaagaaactatagaatattttgaagggtaa

SEQ ID NO: 87081 - DNA, 879 bp, Bacillus cereus VD214
atgatatatgtcaaaagagggaaattgccaaaagaattagatttaactaacacaaattctattggatctacagaattagcggaggcaataacatattttcaaactcaaacaagaaaatttgatttttctgcttataaaaatccaagtgtagtaaaaaaattagccaaaatgtttcatgggaaatgcgcatattgtgaaagtgaaattcgagcaatatcctatgaagaaattgaacacttcagacctaaaggagcaattagaataaaggttaaagaaaatctgaagtatccagggtattattggttagctatgaagtgggacaatttattggtatcttgtcctaaatgtaataagatcaaggggaatttcttccctctagtaaatgaaaataatcggactgcaaatccaaatcaaatttctcaagaagcaccattgttaataaatccttgtgaagaagctcctgaagatcacattaaatatactgagaaaggttacattgaatctaaaacagataaggggaaattatctataagacattacggtctttatagaaaagatttaactaaacttcgtgaaagattagcaaaggatatttttttaaagaaaagacaaatattaacgggttttaaaaataatatttatttcaagaaacatttagatactgattcagaggcaaaggaacggttagaagaacagacattagaaatcctagacaattatgatttcattcttgaatatattaataatcctgaaatgccttatcgccaaatggtaattcagctaactgaaaagtttcgaaaagactatgggacagaattagaggaattaaggattggatatgaaaaatcagtgcgtaaaaaaaaattagcatataaataa

SEQ ID NO: 87082 - DNA, 1257 bp, Bacillus cereus ISP2954; identical to SEQ ID NO: 87076

SEQ ID NO: 87083 - DNA, 648 bp, Bacillus cereus ISP2954; identical to SEQ ID NO: 87077

SEQ ID NO: 87084 - DNA, 495 bp, Bacillus cereus B5-2
atggcacctgcacggctcaataagctatgcagcacgttagaagctgcgacaggtgtgctcatcaggctgaaaggactgaacgtttaccccgctgcagtccaacttctgcatgatattcttactgagttgcttcgaaagaagattacggtacagtttactatttctagtgttcatacaaatcatttttgccgcattcgtgtgcttgattctactgtatttcagttactcgatgcgtttgcagacaagtacggagatgtccatacggctggcgtaaaaatccagtttatagcaacatctcataatcccttatcacttcgaggactaattgatggagaagttgctgttttattagaaaatgaagatgaaaatccgtacgttattcaaaatttaccatcacaagaaggatttaatgtggaagcactactaacatctaaatttttggattatatgataaaacaggaacaacaattagggaacaaaaattttatgaagtag

SEQ ID NO: 87085 - DNA, 477 bp, Bacillus cereus B5-2
atgtttcatggaaagtttgcgtattgtaaaagtgaaattcgtacaatatcctatgaagagattgaacatttcagacctaagggtgcaattagaataaaggctaaagaaaatctgaagtatccaagctattattggctagctatgaagtgggataatttattggtgtcttgttctaagtgtaataagtctaaggggaatttcttcccactcgtgaatgaaaatactcgggcgacaaatccaaatcaaattcctcaggaggcaccgttactaataaatccttgtgaagaagatccaggccttcatattgcatttactaaggaagattgtattcaatataaaacggataagggcaatttatctataagacattacgacctttataggatggaattaactaaacttcaagaaagattagcaaaggatatattattaaaggaaaggaaaatattaactggtttaaaaaaatatgttttttaa

SEQ ID NO: 87086 - DNA, 1188 bp, Amycolatopsis orientalis HCCB10007
atgtacatcgagcgggtccggctggagaacatccgcggcttcagcggcgcccgcgccgtcgacctgcggcttcccggccccggctgggtggtcctcgccgggcgcaacggttcgggcaagacctcgttgctgcgcgccatcgcggtcgcggcggcgccggacgtcgcgtggggcctgttgtcggacgccggcagctggatctcgacggatcagacgtccgggtccatcgagctttcggtcatgcgcgaggaagggccggcgccggtcgaggtccgctggctcgactccggtctgctcccgatctccgggcttcccccgggccagccgttctgcgccgcgtacgggcccttccggcggctcgcgggcggcagtggcgaggccgagtcgtggatgcgcggcgcggggtcgctggcgcggatggccagcctcttccacgaagacgcctcgctcgccgagggagtcacctggctgatcaatcagcatctccgtgccctggaaggaaaagcgggcgcgcgcgagctgaaggacaaggcgttggagatcctcggggacggtctcctgccgggcggttaccggatccgggacgtcgattcggacgggctttgggtcgagtaccgaggcgaccggttcccgctgcgcgagatgagcgacggctatcgcacggtgacggcgctcgtggtcgacctgctcaagcaactagacagcgccggcctcgatcacgagagccccggcgtcgtgatcatcgacgaggtggacgcgcatctccacgtgtcgtggcagaaacgcatggggccgtggttcaaggcgcatttcccgcggatccagttcatcgtcaccacgcacagcccctacgtctgccaggccgccgaccccggcgggctcatccggctttccgggcccgacgaggaggttccgccgcgtgtggtctccgaggagctgtacgagcgggtcgtgttcggctccggggacgacgcggtgctgtccgaccttttcggcttggacacgccttattcgccgcaggcggtcgaactgcgggagcatctcgccgagctcgaattccaggtggcgtccggccgggcggacgcgaacggcgtccgggaatgggaacgcctgcgcggcatgctgagcagctcaccgccgagccgggtcgacgaggtggccaggcggttcgaggccgacgatcggtga

SEQ ID NO: 87087 - DNA, 741 bp, Amycolatopsis orientalis HCCB10007
gtgatcgggatccgccggatcgcgctgccggggcaggtggtggccgatctcgaagagctgacggcgcggatccctcccggtgacacgaaggaagcccggcgactctggcgggtttcccgtgccgtacggcgttctttgcgggccgggctggacgtcatggccgccggccgcggctactgcatgtactgcggagacggcctcgggtccactgtggaccatttcgagccgatcgcgaggaatcccggccgcgccttcgactggctcaatcacgtgctcgcctgcgaatactgcaacagccaccacaaacgcgacctgttcccggtggacgaagacggcaacagcctgctcgtcgacccgaccgccgaagacccgctggaacacctgttcctggtgctgtcgatcgggacttaccgcgcactgaccgaaaagggcgaacagaccatcaaggtgtgcgggctgaaccgcgcgcaattggcgcgggggcgggaaaccgcggtcagccaggtgaccgcgctcgtcctcgcctggtggacggcgcgcgagctgggggacgaggtgaagcggcgcgcgatggtctggaccctgctcgaccagccgcacgccgacgtcctccacgccatgctccggcaggcggggatgccgggcgcccgcgccgtgttccgggcggacgacgagctgatcgacctgcttcgcgccccggaactcgccgaagatcttcagctctccggcggcgcggtgtag

SEQ ID NO: 87088 - DNA, 1245 bp, Fusobacterium nucleatum subsp. animalis 4_8; identical to SEQ ID NO: 86180

SEQ ID NO: 87089 - DNA, 567 bp, Fusobacterium nucleatum subsp. animalis 4_8; identical to SEQ ID NO: 86181

SEQ ID NO: 87090 - DNA, 1398 bp, Escherichia coli ATCC 25922; identical to SEQ ID NO: 86854

SEQ ID NO: 87091 - DNA, 732 bp, Escherichia coli ATCC 25922; identical to SEQ ID NO: 86109

SEQ ID NO: 87092 - DNA, 756 bp, Yersinia enterocolitica subsp. palearctica YE-149
atgaatctcggtaatgaatttgaaaatcatttagttaatttaaaaacaagacagtcatttgcaaaaacattcgataacaatgaatcactctacgaatcgatggagacgtggtttattaatttagagaaaagcatttcctttttaatggaagatgaatcattcaaattaatatttgacccagataaatttaaattccatttgcagcaagacagtaagcctccatatacatttcaaactttatcctcaggctattcatctatatttaatattttatctgaacttataatgatgactgaggctaatcatatatctccatcagacttacaaggaatagtattaattgatgaaattgatgcacatctacacgtatcgttacaaagaaaaatactaccattcctaaccaggacatatccaagaattcaatttattgttacaacccattccccttttgtaattggttcattagacaatgcaataatatatgatttaagcagccaacaagaattttctgatttatcaaattactcttatgaaaccattatcgaaggtttactcggcgttcctgtggtctctatttcattagaaaaagatactaaaaggctatcagctttattagtagaggaaaatgttgataacgctgcaataactgagcttgtagaaaaacttagtccacaccaagaaaatttagatgatgaatcagctgtttttcttttaaaggccagaagggtattgcgcgaagataaggagactaaataa

SEQ ID NO: 87093 - DNA, 657 bp, Yersinia enterocolitica subsp. palearctica YE-149; identical to SEQ ID NO: 86453

SEQ ID NO: 87094 - DNA, 1239 bp, Yersinia enterocolitica subsp. palearctica YE-P4; identical to SEQ ID NO: 86452

SEQ ID NO: 87095 - DNA, 657 bp, Yersinia enterocolitica subsp. palearctica YE-P4; identical to SEQ ID NO: 86453

SEQ ID NO: 87096 - DNA, 756 bp, Yersinia enterocolitica subsp. palearctica YE-P1; identical to SEQ ID NO: 87092

SEQ ID NO: 87097 - DNA, 657 bp, Yersinia enterocolitica subsp. palearctica YE-P1; identical to SEQ ID NO: 86453

SEQ ID NO: 87098 - DNA, 756 bp, Yersinia enterocolitica subsp. palearctica YE-150; identical to SEQ ID NO: 87092

SEQ ID NO: 87099 - DNA, 657 bp, Yersinia enterocolitica subsp. palearctica YE-150; identical to SEQ ID NO: 86453

SEQ ID NO: 87100 - DNA, 1212 bp, Bacteroides massiliensis dnLKV3
atgaaaatagaaaatcttcatatcaaaaatataggtccattcaaagaagctgtcattgaatttgccacagaatataatgaagccaccggcgaacagcctgtgaccattatcaccggcatgaacggtgcgggaaaatcaattgtcattgatgccatccgggccgcattgagcggtcaagaactggaacgggatattgtggcagacactaacgatttctctattgaaatggatgtggtattgaatggaagtacaactcatctgtccacctccactttacaaaacggacatataagaggagttgattacataaacataggccaagctttgacatatggttacgatattccgggacctgtcaatcattgggtgattgattattggtcatccaaatctccttccgactcgttcaagattgccaatatgaagaacatacagcacgaaaaagccttaatgggagtgatgcttggaaagaagagcaatcttgatttgatcaactttatctgccacatagactaccttcgtaccagcgaaatgcctgttgagaaggaattgggaaatatgatgtacgaaaagatgaaagatgtcataaaccaatgccttgacaacggactgttcaaatatgtacgcagaacagatctgactcctattatagagcagaatggtatagaactttcgttcgataaattgagtagcggtaatctctttttaatagaacacctgttgctgcttatgtgcaaaatgtactctatcagcatattgaataaattgcctcccatgcagatttttaatattccaggacttttattgatagatgaaattgaaacccatcttcatcccaaatggcagaaaaagattctgggtatcatccgcagcctattccctcatcttcagatgatccttacgacacactcaccattcgtagtggcatccatggatggagcacgcatttatacatgtgtcccccaaaccggatatagtgaactgagagatgaaacggaaaggtatggacacatgcccgtcgaagaaatccttgtatctgacatctttggagtacagccttttaatgaagacattacaaatctgataacgacccgcaaacagttaatagaaaacggggaaaaagaggaagcacggaaagtggcagaaaaactatatgaaataaatcccgagtatttctcataccttaatataaaaaatgaattcaggaaatga

SEQ ID NO: 87101 - DNA, 690 bp, Bacteroides massiliensis dnLKV3
atgagacatatagaaagactgccggaacctgccatcttaaaacaaaaacacgatgaatggcaagataaatttgaacaagctaaaaaacagaacccaaaagccagaccggattctacaaaatatggaaaccctggaataagaaaaaacttggaggactgctcttacggtaaatgtttttattgcgaaagcaaactgtcgggcgcttccaaagagattgatcattttatagaagtggctattgactcgaagcaagcctacacttggacaaacttatatttatcatgcagcaactgcaatgataaggcagatcataacacgatacctgtaaatacagccttggatccatgtcgggacagcgatgaagaaatacaagctaatattacattcgaagacgagtgtatctgctctcaacatggttcccaaaagggattgaacaccataaaaaaatatcatctcggaacagaacttttagatatgaaacgtggaaaatggctgagacatatcatgaaagatatcattgacatccaaaacagaatgattacggatgaacgcagcctgcctactaaagatgaacaacaaagaatcaaacggtatatgcaacccgaccagccttatagcttgatgagcaaagtattccttgaaaaaaactttgaccacctgctggaagcagcatatgaaaatcaaaaataa

SEQ ID NO: 87102 - DNA, 1161 bp, Bacteroides massiliensis dnLKV3
atgagtaattttataacagatataaaagttcagaaggtctttcatctgaaagacttttgtattcctatttccgaaacagaaaagaaacacctgattataacgggaagaaatggcagtggtaaaacaatcttgctcaacgccattgctgctttctttaatgaaatgtattcctttgcgagtgtaaaaagtattgccggaaagtatatgctggaaaaccggtttgttgcagaaaaacaagtaggattgtattgtaatgatgctgagactttattaaagaaatatagaaagcaagactttattatagctttttatgcagatgaacgtaaatcacgttttgaggaatctcgtaatccggtaaagcctgatttaaaggtaaataaagagaatgtaggacaaagtaaagtggatcagtttcttaattttatggttgattataaagttcaagaagcgttggcacggaatgaagggaagaatgaagatgctgattatattcgtcaatggtttattagtttccagactattttgggaagaatttttgatgatccacaattaaacttgaagtttaattataaggactattccttttttattgaaacggatggtaaaagttttaagtttacagaattatctgccggttattctgctgttcttgatattgtcactgatttaattctaaaaatgcaagaagggaataatattgtacgagcttatgaaaaagaaggtatagtattgattgacgagatagaaacgcatctccacctggaactccagcgggtgattttgcccatattgactacgattttccctcatatacaatttattgtaactacccattccccctttatattaagttcattacccaatgctgttgcttttgatttggaacgtagagaatcgatagaagatttgactgaatattcttatgaggcattggcggaaggttattttggtgtcagtacagattctagcgaaatacaaatgcgtttgcagcagttggaaagtttgattcaaaaagaaaaattgtccgtgtcggaggagaaagaactggaaatgtatctaaaagattttgaaaatatacctgaagtattggctcctaatgtcaaagcaagattttatgaactgaaaagaatatggaatagtaaagcctggaagtatgattag

SEQ ID NO: 87103 - DNA, 633 bp, Bacteroides massiliensis dnLKV3
atgattagaataaaaaaaagtcttgaaatacctttaggtctggacacaaaatataatgcggaagatgtctgtaagcaaattttagaggatcaatatgagaaatgttatttatgtgaacggtatttgggtacagattatcaggtggaccatttacgttcacaagcgaattaccctttattagtgaaggaatggagtaatctgtttattgcttgtagctattgtaatgggaaaaaaggagtttcttttgatggaatacttaatccttgtcttcataatattgaagagattatagagcattctgttctatttatggaaaagaaagtagtttttaatagcagccaactgtcaaaggaagtacggcagaccattcagttactcactattttatttaatggaaaaaacggtttacggacatgtcgggaacagaggttttatgatgagtttatccgaaaaattaatgtgtttcaatatgctgttgatgaatatatgttgggcaaaaaagaggaatatcgtccgatgatagaagaattattggatatacacggtgaatatttgggctttaaacatttgattatttgtgggaatcctgtattaaaaaaagattttgaagaatttctgggttggaataaatag

SEQ ID NO: 87104 - DNA, 975 bp, Lachnospiraceae bacterium A4
atgtacattcagatttcggaaacaggggtgataaaaaggcagaaagtggatatcgacagcgatgtttctattatatatggctacaataatagcggaaagaccacacttttaaaggcacttgaccaagcatttgcgaacaggcagatggagaagtttatcttagggcagtctggagatcaggcactgtatattccgacgaacagaattgtcgttagcgaacatagtacggaacagccccagttaaaggattgtgaggactggcttcactatcagaaagacagctataaggattacagccttcatttaaagaggcttcgcgaccatattctttccaatgagattgtacatcaatttatctgtggggcaattcataagatttttgatataaaggtaaacgagctgaacagcagatatagcgacgggattgaaaatattatcaatatttacctgagcattatatgggcgatgatgtggaatactgatttttcagtgctgtcagagaaagcattttttgatgaactttcccaaaaacaactctatgtaatgatagatgagattgaaatgtatctgcatgtgaatattcagtcgaagttaataggaagtattaagcaggattttccagcatgtcatttgattatgacgacccattctccactcctcctgacaagatacaaacagtgcttgatttataaaatacaagcaggcaagctgaagatgattgaggaagatatgtattatgaagatttaaacatcatttacgatcaattatttgatgtggatgaacttccgaaaaaatttcaaaaggatatcaatctcttgggaaacgctgtgatgaaaaacagggtggacgatacagagaagatacaatctatgataaaacatatgagagaggaatacccaaatttatccagaagatacaacgctattataacgaaggcagaaaatattggagataaaaatgatcaaaatacatag

SEQ ID NO: 87105 - DNA, 645 bp, Lachnospiraceae bacterium A4
atgatcaaaatacatagaacccacaatccggcagtattggaaaagacgaataagacgtttcagacagaaatcgctggaatgaatgagaaagaggcatacgacttttataaaaagcatagccgcgtctacctgtataatacaaatgaaaccaaaacgcattttaagataatgaataaagagcggtgttctttttgtacgaaattcatacaggattttgacgatgaaatgacagttgagcatatccagttaaaaagagacgcgccgcaattgatttttgagtggaataatttactgtgttcatgcaggacctgtaatacgaaaagaagtacaaaggcccattcttctgaaaagtatcttgatccaacaaatattacagatattgagaaatatttctgttatgagctcgacggaaaggtttatccgaatcaggagctgagccggcaagaacagcagcaggcagcgtatatgatcaaattataccagttaaatcgaaaggggctggtgtgtaagagacgtgagttcatgaaacaaatcatgtcagatgatgatttttacaatagtttgaaaacaatggacgaagccagtcaaaatataatatttttatccgtgtttgcatactataagaggcagagaatgccttcatga

SEQ ID NO: 87106 - DNA, 1299 bp, Lachnospiraceae bacterium 28-4
gtgaatctgaaacaattggtattgcataatttcaggtgttttgagaagttagaagtggaatttcacgataggctgacggtaattgttggggcaaatggagctggtaaaacgacggttttagaagcggcggctgttgccgcagggactttgttgtattctttcgatgggattcgattgagaacaatagataaaaacgatgcacataataaatattattccatgggaagcgtgattgacgtacagccgcaatatccggtagaggtgtttgcatatggaaatattgacgggaaaatgactccatggatgagggcattaaacggtgaaaacggaaaaacgacagtagtggatgcaagagaaatgactgacatttcaggagcctatcggaaaaaattgatgaatggggacgcatctcttattcttccgatgatagcatattatggaactggtcgtatgtgggattaccaccgggaaaagaaaagtgatacttttaagaaaaatacgcgaacgaatgggtacattgattgtttagacggaacggcaaacgtaaaactgatgatgaattggtttaggaaaatggcgagacgtgatctggatgaaaaaatccccagtcctgaattttccgccgtcaggggcgccatggaacgttgctttgcgctcatgaccggaattacagatgtaaaagtgaagttggatttggatacgtctgagattgtgattatttatcaagacgaaaaagaaggcaaggtaaaaattccgctgaatcagttaagcgacggatataaaggaacgatcagcctcattgcggatattgcttatcggatggctgtgttgaatccgcagctgtcggagcgtgtattatcggagacggatggaattgttttgcttgatgaagtggatctgcatctgcatccggcttggcagcagcgtgtcatctatgatttaataaatatttttccgaaagtacagtttattgtcaccacacatgcaccggcggtgatccagtcggtgaagagcgagaatttgatgattttaaaagactatcagattatgaatgcgggcagtcaggtttatggcaaggaggttaatgcagttttaaatgaaataatgggggtaactgagcggccgccggaagtttcaaaattgttcaagagtttttatagcttgcttgaaaagaaagaattcagattggcagaacagatattggataaaattgataaattgcgggattaccatgacccagaggtggctggatgccgtgtaaaactaaagctggaacgtatacgcggaggtcaaaaatga

SEQ ID NO: 87107 - DNA, 741 bp, Lachnospiraceae bacterium 28-4
atgatagcaattcagaagaaaagcgagccggaaggactggcacagctgcgccggaaggcaatagatgaagaactttcaccgaaagaagcgtatgctttattaaaaaatccgttaaaagagcaggtcagagacagacttgtggaagaacaggggcagatatgtgcatattgcatgtgccggatcccgcgccaggatgcggatcctgtaataacaccaattattttggaacatatggtgccgcgcagccctggtgatgggagaaatatagggcaggggcttgattatcataattttgttgctgtatgccatgggaacagaggggcgcatggaagccggacaatgtcagatctgacatgcgatgggcataaaggaaatgatgaattcaggaaagtaaatccgtgcagaccggaaactttaacatcgattacatatacaatagatgggaagattgatgctgcggatccggacgttcggtttgacttaatacatacattgaatttgaattgtccttcatcaccgttaatagcagaacgaaaagcggcgttggagagcttgatcgatgagatggggcaggtatcggatgatgatttggttgtttattgttccggtgttttaaaagattttcaagcagagaccaatcccaggactccttatgtgggaattctgatctggtatttgcagtcgatgatatcagcgatgaataacagcggatcacacagtgaattgagaggagcggaatag

SEQ ID NO: 87108 - DNA, 1293 bp, Lachnospiraceae bacterium A2
atgaaagtcaacacaatccagatttctaattttaaagggatccgcagcttggaactgccctttgacggaaaaagcacaatttttttcggcatcaacggcgtagggaaatcaaccatcctgcgcaccattgatttaatttatgcaaatattatttctatgttagtatcctcaaaagcaaaattggcacaattagaattggacgatatcagttatgggaaaacacgcgctgacatccacgcaacatttaaatttcctgatgggagccttaaggaatatacacgctccatctctagggcagaaggcaaaaaacacaatcccggagaactgcggaatttagtaaatcttttcgaaacactttatattgaaaagggatatgacgacggcaacgggaattggattgaaaaagaagatacaaaaaacatgcctgtttttgtaaattacggcgtcaaccgttccgtattcgacgtcccattaagggtcacaaaaagtgaacagtttacgaagctcagcgcatttgacaaagccatcgaaagtaaaattgatttcaggacattatttatgtggttccgcaatcaagaagacattgaaaaccaagaaaaagtaagaaaaagcgctgcatatgaggaccgcagcctttcagcagtaaaaaaggccatgcttgccatgctggatgggtttgatgatatccatattgaccggaagccactggcaatgaaggtaaaaaaagatgggcagtccctcaaaataaaccagctatcggatggggaaaaatgcaccattgcgttattcggcgaccttgcacgcagaatggctcttgcaaatccccaattagataatccactgaatgggcagggagttgtcctgattgatgaactggatttgcatatgcatacctcatggcaaagaaaagtagtgcgcgttttatcacaaacattcccgaatatccaatttattatcaccacacattctccacagattctgggagaactaggagatacctttaatttattctatttatcgcgggaaaataatactgtcactctccagaaatataaatcattcgtcggatgggatgcaaatgtaatattagaagaagtaatgaaaaccgattccgtaaatattggaatcaaacgattggtggaacaattatattgccatattgaaaagaaagaatatgagcaggcagaaaaaattgccgatacactggataacatttccaatggatatgtagatggggttgcaaaagcacgggtgctgatttcaagggggaaacgccatgaaaaaaattgttaa

SEQ ID NO: 87109 - DNA, 669 bp, Lachnospiraceae bacterium A2
atgaaaaaaattgttaaggaacaaccgcctacatggtttgaaacatggaaacagaattttaagcagacccatggcagaactgcacattataaaaatgatttttcctcagatgattcccaaggtaccgcgcggcggcagcaattacgtgggcacttaataaaagaacaagggcatatttgctgctattgcatgaaaagaatttcactgcaaaattcccatattgagcatttccggcctaaaacacgatttcctcaaaacgatttggattaccaaaatttacttgcctcctgcaatagggatggaatggtttcccttgatgggcactgcgggcacaaaaaagaagactggtgggaagacaatctggtttctcccaccgaatcaaaaattgaagaaatgttccaatattcgcttgatggaaatatacatagtatccaaaagaaaccttttaccaatattgcccaagaaatgatagggcatatggggctggatagttaccatttaattcggaaccggcgcgcggccatagaaagttcagaagtttttgatgaaaatgaatattccaatgaagatatccgaaattttattgacttctattcgaacaaagacggtgaagcctatgtcccatactgcatggctattgttgcttgtctgaaagaacagctcggatga

SEQ ID NO: 87110 - DNA, 1638 bp, Streptomyces albulus CCRC 11814
atgcgtctgctgcgcctgaaccttcccgcctaccgcgggctgcgcgacttccacctggacctcaccgacgcggtggatggcggtcatgccatcgccacgctgatcggccccaacggtggcggcaagtcgcgggccctgcacgcgctcgccgagatcttcggtgccctgcaccggccgaaatacagtgcggctttccccttcgacgtccaatacgagctgcgcggcacgaccgtccgggccgtgcagaccgcccgctcagccgcccccgaactgaccgtggtggcccaggcgggccgcgagccgacaagagtgccgagggcgcactggccgcaccatcttcccgaccacgtcttcggctatcaggcctacccgcacgccccctggaccgcggagttcgaccagcaccgccgcttcgcgacgcgccgcctgggcgattggcgccgacagtggcgagaggatcttgacgcttggctcgccagccggtcgcccgaggatgcgtggccggaacagctcaccctccccatccgctgccccctgtacacccccgttttcctgtgcacccccgcccacctgccgctactgcttctggcgcagaccacccactgggccgactcgttcggcacctacctgcgggagcactcttacatccagcacgtggcctcggccgtcctacgcgtcaaagcaccccgcaccgtgcggggggcgccgttggccgcgctgccgtactggggcctgggcgggcccgcccgcacgctgtttgcggccgtggccgagtccggccgcttcggccccattcccgactccgacccggtggacggcgccgggagccccgccgacgggttccggatcgtcctcggcaccaccgaggacgtccgggccttccgcaacctcttcgacagtgacctgtcgatgttcgggctgctcgccaccctgctcgacgccgggtacctcaccgttgaggtccgcctgcacaagaccggcgcagtaatgctcgggctggacgacctgagctccggagagcagcaactcctgaccattttgggcctgctgcggctccagcgcgcacaggagtcactcttcctcctggacgagcccgactcacacttccatcccgagtggagccggcgctggtacagctccgtgcgcactgtgctggggacacatcaggactcgcagttcatcacggccacccacgaacccctgctggtggccaacatgacccgccagcagatccggatcgtcgccaccgatcaggaaggtcaggccactgccgtgattcccgaggccaccccgcgaggccagggcgcgggcggtctgctgaccaccgatctgttcgggctgcccacccaactggacgaacacacccaggagctgattgaccgacagtacgcgctgctgccggtcgcaggccacgatgcggtccttcagtcagagctccgcgaggtcacagccgagctcgacgcactgggcttttctacggcgaaccgcgatccgctggtggcggccttcctcgccgaacttcaccgcaggcgccgcgctctcgtcgaggccgccaccggcgccaaccctctgccgccgcaggtcctggaggcattggtcgccgaactgttcaacgagcacttctcatcggtgatctga

SEQ ID NO: 87111 - DNA, 1110 bp, Streptomyces albulus CCRC 11814
atgagcgggctcaccaccccgcaggcgtgggcggccaagaccgaacgcaccttggacgtcgtgcgggcagccatggccagcaacaccaagcgccgtttcaccgagcactggaccgacgacgaggtacgcgacccgctggtcgcgctgctcggcccgaaatgctggtactgcgagaccacgatccagcgcgcggatatcaccgtcgaccacttccggccaaagtccgaggtactcggggaacccggccacgacgggtactggtggctcgcctacaagatcgccaactatcgcatcgcatgcaagcactgcaacagcagcggagccaggttcgacgggatgcgggaaggccgtgcgaagggcagccggttcccgctgctggccgggctgcgcgcctggcgccagcgcgacggcctggaccttgagcagccgctgctcctggaccccgcccaaatcggcgatcccgacctgctcggtttcgacaccgccggctacgcccgccgcggtcgtaccccctactcgcaggccgagacgcaacacggtgtgtgccgcgcggacgagaccatacggatcctggcgctcaacgccacccagatcactgagcagcgcagcgatctcatgaaggaggtcaccgcgctcgcccagctgccaggccaccccgtcatccaggacatgatcgacaaaagagtgcgccccaccgcgcagtggagcgcagcagccgcaaccgctctggcactgcagcgcgcctgtgaccggcagctggacacgcccgcccggtccgcggcggcgcgccccgtcacgacgggcagcaccccgggccactcgaacgtcgacttgcatgacctcctcgaacacctcgatcccgtcgaactgcaggcgggcatctcgctgaccggccgccacaggaacacggtgcaccgggcggtgctgctccacgacggccggataagcgtctggagcaggccctggggaaccccgaactccgcggcccgggccgccactggcagcgacgacatcgacggctggggcttctggcggctgaccattgccggtgtcgagcagtcgctcgcggagttccgcgccgcacacaccacgcccgacccaccggtctga

SEQ ID NO: 87112 - DNA, 1257 bp, Eubacterium sp. 14-2
atggaacagctgtttataacaaatctgacaatcaggaatgtcaggcatttaaaagatgtttctattccattatcatcagagcagagaaagcatctgattatgacaggcaaaaatggaagtgggaaaacaagcgtagtggaagcgctggcagaacatttgaatcatgtctttacagatcagaactttggactgagagaagcagggctacgtgcagcagaggagttaagaagtaaggctgttcagaacggggaagacagggataaacttttacaactggagagaagtgtcaaacagcagacaaaatttttggaggacagcagaaagggactggaagtacaatttaatcataaatcagaaagtattattgcgctctcagaaaaatatcattatattttagcatattatccggcagacagaatatttcaggcagaacagccgaagcatgttgaaaaggtacagtttaaagattactatgagttgcaggaatttccccgtaatgaatttgtgaaatatttattagacttaaaaatgacagaggcactggcgcgaagtaataaaaaggcggaaaaagcagatgagattggggtgtggtttgaaaagttagaacagcttttgaaacagatatttgatgatgagacagtacgaataatatttgatgaagatacttttgaatttcacattttacagcagggaaaagagccttttgattttaacaccttatccagtggatatcaggcagtattggatattgtgctggatatcataatgcgaatgcaacatcagacgaaacgttcttttgattttaatcttcctggaattgtactgattgatgaaattgaaacacatctgcatctggaattgcagagaaatattgttccgttactgacaaccgtttttccaaacattcagtttattatgacgactcattcaccttttatattaaacagtctggaaaaggttgtgatttatgatttggagaatcattttctggttgaaaacggactggatgatgtaccatatgatggtattgtggaaggatattttggcgccgaaaaaatgtccggtattttaaaagaaaaatttgagcggtataaaactcttacaggaaaaaagaatctgacggacgatgaattgtgtgaaattgcagaagcagaggtatatctggatgaaattcctgattatcttgccattgggattgcaacagaatacaggagacggaagctggaatttaacagtcgggaggaaacagatggttaa

SEQ ID NO: 87113 - DNA, 669 bp, Eubacterium sp. 14-2
atggttaaagtgaggcgttcttttcctgcaccggaatctctggcagaagaagccaggaaaaaaacaggaagatatgataagccggatgtgatagaacgtctgaaaaaggattttcataataaatgttacatttgtgagatgaaagaattacaggatccaaatgtagaacacctgcttccccataaaaacgggaaatatccggagcggaaatttgactgggaaaatcttttctggtcatgtgcacattgcaacagtgtgaaaaataacgaaaaatatgatacaggaattatagattgctgtaaacaggatccggagaagtgtctgaattttcggattgaaagtgaagatgtggaaattagtgtgaaaaattttgaggatgagctgcaaagaagaacagcttcattaacagaggaggttttttcactgaaaaataccgggatgaggacgtacaccagtgatatgagactgaaactgctccaaaaggaaatgaatgttttatacagacagctggaaaaaatacataataatcctgaatccaaaatagcaggaagaaccatacgcagtttgctgagacgagaatctgcgtttgcagcatttaaaagatgttatgtacgggaacatgctgcagaatatccggagttgcagcaatatgtagaaatagaaagttag

SEQ ID NO: 87114 - DNA, 1359 bp, Escherichia coli KTE24; identical to SEQ ID NO: 86204

SEQ ID NO: 87115 - DNA, 660 bp, Escherichia coli KTE24
atgcgcgaaataactaaagggcaaccgccggctagtttgcaacagtgggtgagagcaaaaccacgggataaaaatgccaatcagtggtttcaggaactttatgcgcaaaaaaaatgggatatcgttggcgatctcagccagcagtgcgctcaggaacaattttatctctgtgcttattgctgcgatcgcgtgacaggtacaaaccgcgataccgttaatgaacatgtcgaagccagggatttagctcctgctcgcagtctggaattcacgaatatcgttgcaagctgcaaaacaaaaggccagtgtgacgactcgcataagaaccagccattgctgttaacgccgcttatgccggaatgtgaaaccgagtttatcttcaagatcagtggtcgaattgaagggacgacgccgagagctatcgatgcgattaaggtactcaaccttggcgatagtgaacgtaataatcgggcattaattgaaaaacgtaagcagctttccgacagccttctgtgggctaatggcattgacccttcagaggggcttgaggatgacgatctgctgcaagtggttatcgacgaattactcacccccgtcaacggttatctggcacctttcgctcccgtggtggcgaatattctaaaaaactggatgaccgcatga

SEQ ID NO: 87116 - DNA, 1359 bp, Escherichia coli KTE36; identical to SEQ ID NO: 86204

SEQ ID NO: 87117 - DNA, 660 bp, Escherichia coli KTE36; identical to SEQ ID NO: 86205

SEQ ID NO: 87118 - DNA, 1359 bp, Escherichia coli KTE37; identical to SEQ ID NO: 86204

SEQ ID NO: 87119 - DNA, 660 bp, Escherichia coli KTE37; identical to SEQ ID NO: 86947

SEQ ID NO: 87120 - DNA, 1359 bp, Escherichia coli KTE38; identical to SEQ ID NO: 86204

SEQ ID NO: 87121 - DNA, 660 bp, Escherichia coli KTE38; identical to SEQ ID NO: 86947

SEQ ID NO: 87122 - DNA, 1272 bp, Escherichia coli KTE185; identical to SEQ ID NO: 86856

SEQ ID NO: 87123 - DNA, 783 bp, Escherichia coli KTE185; identical to SEQ ID NO: 86857

SEQ ID NO: 87124 - DNA, 1398 bp, Escherichia coli KTE226; identical to SEQ ID NO: 86854

SEQ ID NO: 87125 - DNA, 732 bp, Escherichia coli KTE226; identical to SEQ ID NO: 86109

SEQ ID NO: 87126 - DNA, 1653 bp, Escherichia coli KTE64; identical to SEQ ID NO: 86934

SEQ ID NO: 87127 - DNA, 651 bp, Escherichia coli KTE64; identical to SEQ ID NO: 86935

SEQ ID NO: 87128 - DNA, 1359 bp, Escherichia coli KTE69; identical to SEQ ID NO: 86204

SEQ ID NO: 87129 - DNA, 660 bp, Escherichia coli KTE69; identical to SEQ ID NO: 86947

SEQ ID NO: 87130 - DNA, 1359 bp, Escherichia coli KTE70; identical to SEQ ID NO: 86204

SEQ ID NO: 87131 - DNA, 660 bp, Escherichia coli KTE70; identical to SEQ ID NO: 86947

SEQ ID NO: 87132 - DNA, 1359 bp, Escherichia coli KTE74; identical to SEQ ID NO: 86204

SEQ ID NO: 87133 - DNA, 660 bp, Escherichia coli KTE74; identical to SEQ ID NO: 86947

SEQ ID NO: 87134 - DNA, 1359 bp, Escherichia coli KTE98; identical to SEQ ID NO: 86204

SEQ ID NO: 87135 - DNA, 660 bp, Escherichia coli KTE98
atgcgcgaaataactaaagggcaaccgccggccagtttgcaacagtgggtgagagcaaaaccacgggataaaaatgccaatcagtggtttcaggaactttatgcgcaaaaaaaatgggatatcgttggcgatctcagccagcagtgcgctcaggaacaattttatctctgtgcttattgctgcgatcgcgtgacaggtacaaaccgcgataccgttaatgaacatgtcgaagccagggatttagctcctgctcgcagtctggaattcacgaatatcattgcaagctgcaaaacaaaaggccagtgtgacgactcgcataagaaccagccattgctgttaacgccgcttatgccggaatgtgaaaccgagtttatcttcaagatcagtggtcgaattgaagggacgacgccgagagctatcgatgcgattaaggtactcaaccttggcgatagtgaacgtaataatcgggcattaattgaaaaacgtaagcagctttccgacagccttctgtgggctaatggcattgacccttcagaggggcttgaggatgacgatctgctgcaagtggttatcgacgaattactcacccccgtcgacggttatctggcacctttcactcccgtggtggcgaatattctaaaaaactggatgaccgcatga

SEQ ID NO: 87136 - DNA, 1752 bp, Pseudomonas aeruginosa PAK
atgcagctactccgtatcagcattcctgcctttcgcaatctgcgtgatctcgacatcagcttcgcgacgcacttgctgcccggcgagggtgcgcctgcggatgtacaacccaaacagattcgcagccatgccctgatcggccagaacggtaccggcaagtccaaccttatcgaagcgctgatcaccatcttccgtgatgtcgatttggatcgcgaagcagctttcgattacacactggaatacagcattcggggctacgcggtgcgcatcgaggccgacactgccaagcaaaagcgcccctatgtgtgggtggatggaaaggccgaatcgcaacgctatctgctgaaaaaccgcgagctgctgccggcgcacatttttgcctattactccggccgcaacgagcgcatcgaggcgctgtttcaagagcatcagcgccgcttcaacctgcgccaggaaatcaccacagacgaagtgctacctgagcagctgctggaaaactttaccggcaccgaggcagatatcctcgcggtggaagacgccaaacgccggcgggagacgcggctgagacaagcgggcgacgaccgccttcgccgtctgttctactgccgtggtgggcatagtcagctggtgctgttggcctgtttattgtccgatgacccagtgtttcagaaggtgctgaagaacctgcacattgagtcactggaatccgcgctattcgtactcaaggagccgcaccgtctgcgcgaaaagcgccggggtggcaagttcgacgaacaggagctgaatgagggcgatccgcgcttttggtatgcacgcggcaatgtggtcagcgagtttcttgacaagctctggcaagtgtcctgggcgcctattgagcaggaggcgaccaagcagatcgacttccgtggccgcaccgaaaaacaaaagcagctctatctgttcgtgccgagccaggagaagctcaagcagctgggcgagctggtcggcagcaccgacagcttcttccgctatgccgagggagcctacattggcgacctgatcgacgaggtgcggatcacggtcaaaaaacgcgatgagcatggtggtaaggtgagctttacgcatctttcagaaggcgagctgcagatgctcaccgtgcttggcctgatgcgaattacccgcgaagaccactgtctgttcctgcttgatgagccggacactcacctgaatcctatttggaagctgcgctacttcgatgacatcgaaggtgtgctgacctctgaagacggcacgctagtgcaaggtgattcgcaaatcctcatcaccacccacgacccgatgatggtgggcagccttaaacgcgagcaggtacatatcctgaggcgcaacggtagtcgaacagtagtggatatacccgatatgcacccacaaggcatgggggtgactgggctcctcaagagcgagctgttcggcctgtcgtccaccctggatatcgaaaccgagcgacgcctcttccgtcgcaacgagctgtttgtaaagcagccgcgcacgccagtagaagatgccgagctctcacggctttccgccgagctggccgatttggggttttccaccgccgattttcgcgatcccgattacgcgctcttcgtgcgcaagatggcgcagcaccgccgtttcaggaaaccagcgctaacgccggaagagcaagctgaacaggatgcaattgccgactcaataattgacgaaattctgcgtgaggaggccgctgagtga

SEQ ID NO: 87137 - DNA, 879 bp, Pseudomonas aeruginosa PAK
gtgatttggatcgacctcaagaataaatatcctactactgctatcccgaactgggatccaaaggctacagctcagcaatggattccttggacgcaggagaggtgggatgcatggttagctaggtccaaacagttggttgcccaattggcggcgcttgacgctgcaggtcaacgtgaagagcgaaacgcgttgatagatgccaatagtgggcattggggagagctgaaagattggttattagcattatcggctggtaaatgttggttttcggaagttcgtgagctgtattcgcactatgatgttgagcactttcgaccaaagaaagaagctaaggctttagattccgctgtacgtgatgggtactggtggctggcttttgattacatgaattttcgtgcttgcggcaatgtaggtaaccgcaagaaagggggctggtttccgcttaaagatggatctctgtgctcgacatttgctgaccaatgtgaggagtcggagacacgttatctgcttgatcctgttgacgatgacgatgtggatttgattgccttcgatgaggaaggaaaagtcatccctatgcctggtacatctgagtgggatcaacagcgtgttcaacaaactgttactcgactgaagctcaatgatcatgtgcctttagctgaggagagacggaaggtttggcaaaaagttgacggccttattgaggatttcaaggctgctaaagcgcgttgtgggggtaataacccagcggctaaggccaagcttttggaggtgcgcagtaacattcgagaaatgacaagtcggactgctgagctatcggctgttgctcgttggtgcgtactttttcggaacgatccgcttttatccaagctagtaagctag

SEQ ID NO: 87138 - DNA, 801 bp, Pseudomonas putida H8234
atggtattagaggacttgatcgacaagcgccgcctgaatggtgttgacttgaatgatgtgttttccgaacaggcgagagtgtggatgaccagtttgttcggcaagaattaccctttcagtgaaatgtcggtcgagcaggcgggcgaactactcaagtttttttcttttactcctaatgtaacatgcgaaatcagaaagaataattcttttgtatcctatgcgaatcttagttctggagagcaaaacaggattgcccttgccgttaagttgctgagccacgctgatgatcgtatgcttgtgctgattgatgagccggagttgagtcttcacgttcaatggcaagctgaattccataggtttctaggcaggcttttagcaggctataaaaattatcacgttgttgttgctactcattcgccagttattgtgtctgaagctgccaaagacatgcctggagagtcgcgctcgattattcttcttgaggagtctgaagtgagtgatgctagcgatatctcctgtcgtgttgcgagtgcggatgatatcaaaagtttcgatcagaccgttttggattattttaaactggctacctacaatagtccttatattgacatgaagatcgctgagatcatgctggaagcggcgaattcaaatggtcttactcaagaggtggaaagaaatattgatgagttggatgcattaagagctgtcaaaaaggttaccgacgagacggatgcggctattttagaggctatcgatcttattcagaggcatttcgctcacaagactgagcgcgcttcatga

SEQ ID NO: 87139 - DNA, 705 bp, Pseudomonas putida H8234
atgaagacaatgggcagttcggacgcgaatcgtgtgctttctgatttagaaagcttggtcgatgctgaagccatcaccgtgacagatgcgtggaaggtgtttaagtctcctggcctgaagcacgagttcaagaagataagccttcgtctcacgccgatagaaattgaggctgtagagtcattgttggctgctgtgaaaagcaggttaaggactggtgcgcgcaaacgatgcgcctattgtcgccggcctatgggaacgcataagatgtcatggcatatagagcacatcaagcccaagtcgaggtttccagagcttatgttctcgatgagcaatttggtgtatgcctgcatagattgtaacttcacaaaaaatactgagattgataatcccaaggtgtacctgttcgacatcatagatccagggagtacggggttttcctattccgcccacttgtcttatctccaagtcactacggagcatcttcactttttgaaatattccccgatctcaccagaaggcactaaaacctatgagcgtttgttgctccaaagaattgaagcgctcgaggttgtgtcaggtctcaatggtcatataagagatctcagccacaggatcgatgatgccgtcgttgagtgcaacgatgacgataatggtgagataggcctttttttgacaaagctgaagctgaaaattgtcactcgctag

SEQ ID NO: 87140 - DNA, 1371 bp, Delftia acidovorans CCUG 15835
atgcttaataattgcacgtataacaatagaaaactgagctttcaagcgggggactactcagattccttgcatgcacccaacaaattcacggtgatcgttgggaggaatggcgttggtaaaagtcggttgctgcgcgaaatatgcatggcgtatgtggatatcgagcaaattgacgacgcgcgaatctcgtatcgtggagcgcaagtcagtagagaaaaatttgatatcgattctcacagggcacctagctcagtgatcgctttatctacaagtccttttgatagattccctttgcagaaaatgtttggcccgatttgcactgattaccaatatcttggcctacgagggttgagcagtagaaatctaagcttggcatttctttcgagaactattggtgcgcttataacttctgtggttgatgaccctaatcatatcaataccataaacgaagtactcagtcacttgggctattatccattcttagagattcgattggtcgcttcgctttcgccagccaaacttgagaaggcacttgaatcgaataattttattgaatacctgataaataataacaatagagttaatgcgatgtctgaaagatggaggtatcacatgacaaaactctcagcatacgaggtttcaagatttgaggctgcttgtcggcattgggcatcagttggagtgaagcctcgtctggacttaaaaatcactaaagatggccttattgatcttcagcgcggcagtagtctagacctgaattttttgttgttgattcaaatgggattcttccagcttcgggacgttggtgttataaaaaatgggctaccgaatccgataagaataaccgatgcaagcagtggagagcaatgtgttgttatgtctctactgggaatcgcaagtcatataaaaaatggcacattgatttgcatagatgagccggaaatatgtttgcaccctgcttggcaggagcagtatgttagtctgctcatgaacgtgttttcgaagttcaagggttgccactttatcattgcaacacattcacctcaagtgattgctcaattgaaagatgataattgcttcgttctcgacctagagaatggtgtaactactcaggcagctgaatacaatttgcgctccgctgactatcagctggcacgtcttttcaaagcacctggtttcaagaatgaatacttgtcccgcacgcttatcgatgcacttcaggctttaagtggcggcgttaagtacgatcaactgaagtctcacgaggttcatcagattttgcatctcaaaaatgtgattagtcccgatgatcctataaagcgtctgatggatatctgtgaaaaagctttgaaggcttcgcaggaaaaatga

SEQ ID NO: 87141 - DNA, 720 bp, Delftia acidovorans CCUG 15835
atgatcagctcctcctacgttttaacagctgcagagcagcgtctggtcaacgaatttaaaatattgccgcatgaaaaacagcgcggttattgggagaaaactgacgttgacgggcctctgtcggagttgaaggcggccatcaaggaattttatttgaaagctcaaaacttcaaatgcgtctattgccagcagcgaattgtagttgaacaccatggggcttgggatatcgaacacataatacctaaggacgttcgaccggaatttatgtttgaatgcgctaacctttgtgttgcatgtaaggattgcaatggcgataaatggaataaaaacgttctaatagacaataaaaggaagacatttccaaaaaacaaggaagcctacaaaatttttcatgcgcattttgatatttatgaggagaatataaaaatcattgaacttgctggattctatttgcctcttaatgagaaagggcgtgcgacagtagaaatgtgtggtctactgaggtttttgtttagtttcgcgggctacgcatgtgcggacgccgcagtggcgggtcggatccatgagatgaatgtacacctcatgaacacaaaaaatcctatcgagcagagtttttggttgcaagcaatatcagatttctcggcagaggctgccaagatgcagagggaagcccacatgagcacgtgctttctacatggcggtgagcaagcgtcagcatga

SEQ ID NO: 87142 - DNA, 1524 bp, Pseudomonas syringae pv. syringae SM
atgtggctacgctgggggcgtggtcaacaggtagactatggctttaggcgccggtctggagatctcatgggcacgcaggacaatatggcgagtgccggaataaattcgcttcggctttcgcggttgcggctacgtgatttccgcagcttcgaaacaattgatatagacttccatccgcgcttgaccgttctggttgctgccaacggaacaggtaagacgtccatcctggacgccatcgctgttgccttcggcccctatgtaggggcgttcgacgaggcagtgggcaaacatctggaacctagcgatatccgccaatttcgtgccaggcgaaccactacaaacgaaatggaatacgcacctcaaggtgctcggatcgaggcgacaggggtcattcctggcagcttgccggatcagttgtccgatgatctgttgcccaccatttggcgtcgtcatttatcaagcacgaccaagactaaaacctcgatcaaagacgccaaggagttggtgaactatggcaagcgcatgcaggaagcggcgcgtacaccggacaccgaggtcgttctgccactcattgcgtactacggcacagggcggctgtggcagcagaagaaactgacagacgcaaagaacattcaacgcacttccagaaccgtgggctataccgactgcctggatccggcctctagctataaatcgtttgtgcagtggtttcgctactggagcctgaatgccaaagaagcccaactcaaagcgcttgaagccggggtcagcattgtcaaaactgaattcgacgactacatccagtcagttagtcgcgcagtgaatgcttgtatccagccagcaggctggagcggcattcaatactctttcactcgtgacacattggtcgcccgccatgagcagtttggggagttgccggtcgagtggcttagcgacggcattcgcaatatgattggtatggttgccgatatcgcgttccgtgcgaccaagctcaacgggcatctcggcgcgcaggcagctcaagaaactcccggcgtgttgctgatagacgaagtcgacatgcatctgcatccggaatggcaacaagtggtgctgctcaatctgaccgaagcatttccggccatgcagcttatcgtcaccacccacagtcctcaggtgttgagcacagtatcctcgaacagcgttcgaatcttgcgcaccgaaatcgatccggagacctctagtcgaattaccagcgtcagcgagccgcagtggcagactcggggcgttgccagctccgacctgctcgctcgtatcatgggtgtggacccagttcctaacgtgcctgaagcatcatgggtttccgactatcaggcactgattcaacagaacctccacgagcaaaccgaaggagtcgagttgagaacaaagctagaatctcatttcggcgctgaccacccaattattcgtgaatgtgagcgacaaatacgcttgcaggccattaagcaacgtcttccacgcgatctcggcaaccgggagtattga

SEQ ID NO: 87143 - DNA, 645 bp, Pseudomonas syringae pv. syringae SM
atgcgtcgtctatgtcgacaggatgaacctccttctgggctaaggcgttaccgacacggcaaagataagtggactcgtacatgcccgacacaagaggaacgcgacggtatctgggcatctttagagctcatgcaaggtccacgatgtgcttactgtgaaggaccgattgccccaaaaaaccgtcatatcgagcactttcgccaacgggatcggtatccgcaaggtacttatgactggaacaatctgttcggatcttgcgagcgcgtcagcacctgtggaaaggccaaggaccgatgcggaatctacccaccggaagtactgattaaaccagacatagaagacccggatgcttttctggtgttcacgcccggcggaacggtggaaccacgggcaggcttgagcgaaggcgatcatcttcgcgcatgcgaaacaatccgtattctcgggctgggcggcgcgctgaacgaaattcggcgtgcggaacttagcggctatctccagaccttggaatattttgttgaaatcgccgaagcgtttcctgaagacgaggaatggatacaggagttgcaacaagaagtgagtaacgccgcgcagttgccgtacgcgactgcaatcagacatgtccttactcgacagagtgagtaa

SEQ ID NO: 87144 - DNA, 1281 bp, Microcystis aeruginosa SPC777
atgaaaattaagtctataaagcttattaattatcgaggtgcagtcagtttaaacatcgactttcatcggcaattaaacgtatttataggagttaatggtgcgggaaaatctacgattttagatagtttggcgattatgctttcatggttagttaatcgcctaaaaaatactaatgccagtggacgaaagattagcgaaaccgagattaataatggtcaggggacggctataattgaaatcactggggtgacggaagatagtcaagagattacttggaaaatagtaaaaactaggactggatatagccacgctggggaagggagtaattttagccaattaaatgaatacactcaacaaatacaacgacaaattactgaacatcaaggacaaattaacttacctttatttgtttattattctgttaatcgagccgtggtagatataccattaaaaattaaaacaaaacatcaatttgattctctaagtgcctacgaaaatgctttaaccagtggatcagattttcgcactttttttgaatggtttcgcgagcgagaagatttagaaaatgaaaatagaaaatatcagtatgatctaattaaaccggaaggtttttgttttcctgatccccaattggaagcagttcgggaaacgatcgaacgttttctacccgattttagtaatcttagcgtccgtcgtaatcccttgagaatggaagtaacaaaaaagaataaaatagttactgttaatcaactttctgatggagaaaaatgtctgattgctatgcttggagatttagctcgaagaatggcgattgctaatcctcaaaatccttatccattaacgggtactggtgttattatcattgacgaaattgacttacatttacatcctcaatggcaaagatttgtagtacctaaattactagaagtttttcctaactgtcaattttttatttccacccattctcctaatattatcactcatgttcaaccagaaagtttacacttcatggaacaaacagaaatgggaataaaatttcatcccgtgcaggagtcctacggcaaaaatgttgatcgaattttagaagatttgatgggattagagacaactcgtcccaaggaaatcgctgaagctttgaaagatatctatgaacaaatatctcaaaatcaattagaggcagctaaaaataaaatcaatgatctcagagctaaaattcaagatgatccagaattaattagagctgaagttattattcgacgcaaggaaattatcggaaaatga

SEQ ID NO: 87145 - DNA, 633 bp, Microcystis aeruginosa SPC777
atgaagtatattagaaaaagacaagaaccaccagagtttaagaattggaaagagcaagctaactcagattggcagcccgactttaaaaatttagcaggaaaaccaaaagaaatactaattaaagcgttgatgacagaacagggggaaatatgttgttattgtgaaagtcgattggttgatggtaaatgccatatagaacattttaaacctcagagtgatcccagtgttgatcccctagattatgccaatttgctatgttcctgtcaggcaaatcttacgcctagtgaacctcggcactgtggtaatctaaaagataactggtttgatgaaaatctcttaatctctccacttaatcccgattgtgagtctcactttgcctttaactatgatggtacaattaaacccgcacaagaagatgatcaaaaagcaattaatactatcgaaaagttgggattaaacctcaagaaaatcaacgactttcgtcagaaagccatcgaaccttttttggatgaggagatagataatgctcaattaaaagtttttgtcaatggatatttatgcttagatgatcaacaaagatacaatcctttctggacaacaatcaaatatttgttcagcgatttaattgaataa

SEQ ID NO: 87146 - DNA, 1293 bp, Pseudomonas putida NBRC 14164
atgcttaaaaacctgacgtttgaaggtgttggtcctgcagagaggctcgccatcgacttcaaaccgcgcctgaattttctgacaggcgacaatggcctgggaaaaagcttcgttttggacattgcctggtggtcactaacgcgtacttggcccagagatggcctagccactccgcgtaagggcgccagtcagtcgagtatcgcgtactgctatgaaggaagcaccggagagttcgcgtacaaaagtagttttgaccatgaatcccagcaatggtcggtcaagcagagccgtccggcgataccaggagtggtgatctatgccggcgttgatggcagcttctcagtctgggacccggcgcgtaactactggaagggcgataggggagagcccgccgcaccgaaccgtccacgtagtttcgacttttcacctgatgcggtttggaatggcttgctttccagcgacggtaaaacccagctctgtaacgggctgatcagtgattgggttctgtggcaggaaggtagcaaacccgctttcgatgatttggtcaaagttctggaagcactgtcaccgtctggtgtagaaaaaatgaagccaggggagccgatgcgcgtgggcgatagtgtgcgtgacattccctcactgcgcatgccttatggacaggatgtaccgttgacacaggcctcggctggaatgcgtcgtatcgcggcattagcctacctgctggtatggacctggcgagagcatcaactggcttacgagcgttaccgtgtacaaccggctagagagatcatctttctcattgatgaaattgagtgccacctgcatccggaatggcaacgccgtatcgtccctgcgttgctaaatgtcatgaatgcgctgaccggcagtcgtgaggtacctgtacagctattggcggcgactcactcgccattggtgctagcttcggtcgaacctgatttcgatggttcgcgcgactgcatttgggatttcgatcttgtcgggaccgaagtgcaagcatcactctatccgtattcgcgtaaaggggatgtgaatgcctggctatcttccgatgttttcaacctgaaggagccaagctctgtggctgccgaagaggcgctcgggcgtgcccggacattcttgcgggaagtcagtctacagaaggtgcctttgacagctgagcagagaagcacccttagtgatattgactcggcgcttcgaaatagcttgagtgatgtcgattctttctgggtccgctggagcaacttccgcgagcagaggttgggcaacgcatga

SEQ ID NO: 87147 - DNA, 690 bp, Pseudomonas putida NBRC 14164
atgattcgagtcgagccggcggatgagcctgagagctttgatgagatagtcagaaaacctggtcatcgagccattgccgaactggtaggtgaggagggcttgcccgcgcgtagagggcggcccaggacggtagtggcgctaacacgcgaagatattccggctgacaagtttccacctgtgtggactcatgctctaccggacttgatggaggcctacggccgtctctgcgcctatgtttgtatctatatcgagcgagtcacaggtggcggttcagtggaccatatgctagctaaatcccgcgcgtggcaggacgtgtacgaatggcagaactatcgcttggcctgcacgctaatgaatgcccgcaagaacaactaccaggatgtcctagaccctttcgaggtcgaggatgggtggtttcgtctcgaactggtcagctaccaggttatacccggcgagggtcttgatcctgtgattgaggcgcgggtgctggctaccatcaaacgcctgaacctgaacgatcatgattgcctgaaggtccgtgaagagtatgcaacagcatttttcgatggcgatatcaaattggactatttgcggcgacgcgctccatttttggcaagggagatcgaatggcagggtgcagatgcccctatggagagacaagtggagttggggcgtaaccacgtcgattga

SEQ ID NO: 87148 - DNA, 1410 bp, Pseudomonas plecoglossicida NB2011
gtgaagctctcccggctacgactgcacgattatcgctgcttcgaatctctcgatatcgatttccacccccaggtgactgttctggtcgcttcgaacggtgtgggaaaaacttctatacttgatgccatcgcagtagcttacggcccttttgttggcgctttcgacgaagcgattggcagccatttcgagcctcgggacattcgccagttcgcagtgcgcaagacatcctccaatgagatggagtacgccgccaaaggtgtgaggatggaggcagaaggtaatattccaggaagtctattggactcgctggatacaggcctgactagtgcctggcgcagaagcctttcaagtggcacgaagaccaagaccactgtgaaggatgccaaggagctgagtgactatggcaaacggctccaggaggccgttcgcacaccaggtagtgaggtgttactaccccttatcgcctactacggcacgggtcgcttatggcagcagaagaataagaaacgtgaatcaatgcccctgcaacggacttcgcggacagttggctacaccgactgtctagatccggcctccagctacaaatcgttcgtagattggttccgctactggagcatgagcgccaaggaataccgcttcaaagcgatggagcttgaagaaccatcacggccctcagagttcgacgactacatcaagtcggtgagcaccgccgttgacatctgtatgtcccctgcaggctggcaggggatcgagtactcactgaccaaggaagcactggtttcctaccatcccgagtttggccagctccctgtggaattgttgagcgatggcatccgcaatatgatcgggatggtcgcagacattgcattccgcgccaccaaactcaatggtcagctgggtgcctttgctgccagggaaacccccggaatcgtgctgatagatgaagtggatatgcaccttcacccagaatggcaacaagcagtaataccttcactgactaaggcctttcccaagatacagttcatcgtcaccacccacagccctcaggtgctaagtaccgttgacagcgagtcggtgcgaatgatccgcagcgtacgcgaccctgaatcgggtcggatggtcacattgacagaacgcccgcaatggcagacccgtggtattgccagcacggacttgctagcgcgcatcatggacgtcaatccagttcccgacgtacccgaggcacactggatcaaccaattccaggctctggtccagcagaatctgcaggactcgaccgaaggaactgcgctgcgcgaaaagctgaagcagcatttcggcgctgggcatcccatcatgctggagtgtgatcgtttgatacgtctgcaaagcttcaagcagcgtctccccaaagccataggaaaggagtaa

SEQ ID NO: 87149 - DNA, 513 bp, Pseudomonas plecoglossicida NB2011
atgcaaggaaagcgttgcgcctattgcgaagccgatatcaaccacgaaaaacggcacatcgagcactttcgccagcgggaccgctacccccaaggaacatttgattggcacaaccttttcggttcctgtaaccgcacaagctcttgcgggaagcacaaggacaactgtggtgtctatcgccaggaagtcctcatcaagccggatgtggaagaccccgaagcctttcttgtgttcaccccgaatggttccgtgcaaccaagagccaatttaagcgcaaacgaccgcacccgggccgagcagaccattcgaatactcggattggacggcgcactgacgcagataaggctggagcagatacgcggccatcttgatacagcactgatgatcgcggagctggccaaagagtattcccaagatgaatggctgccgttcctggctgatgagctctcgctcattgccgatcttccgttcgcaaccgccattaagcatgtactgaccccacaagatgaatga

SEQ ID NO: 87150 - DNA, 1461 bp, Acinetobacter indicus ANC 4215
atgtcctcaattcataccatcttttttaatgaaaaaatactctttttagaaggtaaaaacttaattattacaggtaataatggtgcaggtaaaaccagatttcttaatcatttaacagataatctaaaaggtaattctaatacggataataaacctctaagagataaaataatttcagaaattaattttggtattatgaattttcattccgccctagagtttaaaaaaagtgagaatgaacacctaaaatatatattaaatagtgaaatgcatactcaagtagaatatattttttcaaaagaaatagcagaattcaaaaaacagttaaaaaagaaatttgataatttcaataagaataaagataattactttaaaaacaactcaaataaaattaaaagttcagaaaacggtaaattagttataaaaatatccaaagagttggagaagaaaaatgaaaaatatttttattactatgcgccagaacatattgaaaattatgttaaaaatttaaactctatgattgattcatatattgcaaataaaaaaatagttgaagttgctttacattcttgggataaaaattcaatttatttttttgactcttctcgtgtttcaagaaaagatatttcaatagatcaattcaaaacatatgatgaatttttaaaatctggatcattgacggatattgagggtgcccttgaagcttatttattatttcaaaaattagagcttttatcattaatcaaacacaggaaagctagtggtactaaaataaagcaaattaatgaaattgaaaaatggtttataaaagttgagaatgatctaaaatggattttagagaacaataccacagaattaatcttcacaaaaaatgggaatagagttctaattaagcaaagtagaacaaccttttcacttgatgatttatcttctggatttaaagccatttttaatatttacgcaaacttattgatgcgggcacaaatacaaaaaattgcacctgaacatttaaaaggaatagcaataatagatgaaatagatgttcatctccacatcacacttcaaaaaaaggtacttcctttcttaatacaagcatttccaaacattcaatttattgtaagtacacactcaccttttgtcataacatcacaaaatactaatactgttgtttttgatctaactactaatgagcttattgaagaagatttaagtcgttattcttatgaatctgtgattaaaggtttattccatgtagaaatacagtctgaaaaattagaatcagaaattaaagccatagctgaaattttaaataatgagccaaatagttatgaaaaacttaggaatgttttaagaaatattactccttttgtaaaacaaatagatgttgagtcaaagtctttttatttcagagcactaaatcacttattagataatcaagaactaggagatcttgatgtttaa

SEQ ID NO: 87151 - DNA, 603 bp, Acinetobacter indicus ANC 4215
atgtttaaagttacacgttcagataaacctgaagattggacaaattctgattacacagatccagttgtagttaaacaattgaaaaaagattttttgtctaaatgttatttatgcgaacaagcggatttcggtaatgttaatgtagaacactttgtaccacatcttaataaaagtgaagagttaagaacggattggaataatctttattatgcttgctctcactgtaatggtattaaaggctcaagacataaggaattactcgactgttgtgaagaaagtcataatgtagatactgctatttctttggaagctccaagtgttccaaatggaaaaattatcttaaccaatacattaactaatgattctgatttgtttgaactcacaaataaaaccatagctttattagagcaatgctataacaatgcaaacagtggtaatcaacaaataagccatcaatatttgaaagaaaaaattcttgaagagcatgcttatttgcaaaacttacgtttcgaacttaaaaaaggcttaaatcgcttaatacaaagagaaaaagatgatctagtagaaagaataagtaatatgcttaaacgagcctgtaaataa

SEQ ID NO: 87152 - DNA, 1290 bp, Acinetobacter guillouiae MSP4-18; identical to SEQ ID NO: 87018

SEQ ID NO: 87153 - DNA, 669 bp, Acinetobacter guillouiae MSP4-18; identical to SEQ ID NO: 87019

SEQ ID NO: 87154 - DNA, 1596 bp, Agarivorans albus MKT 106
gtgaaggtggattttttaaaaatcagggatggctttaagaatatccacaatttagaaattgattttgatgataaagaattattaacagttcttattggtagaaatggctctggtaaatcgaatgttattgaagcattagtacgtattttcagagccttagaccttggtgatgaacaagcgccctttagctataaattgatatatttattgggtgctgataatgaaaagatgattgaagttgatgcctcacctgactatggcagcacgcctcatcagcagcataaaattaaggttgcgattaaacaggaagataatacctattcgaaacttgaaccagtagccttgtcaaaggttaggcgtgataccaaagggggttcagaatatttacctcaacatctattcgcctattactcaggcccaagtgatcgactggaagacttgtttaagccgcatagaatcaagttttataatcaactgttgaaaaataaagtcaaaattgaagatgaggttcgccctttattttacgcaaaaccgttccatagccaatttgtacttctcgctttctttttaaaccagcaacatggtgtaggccgtgagtttctggctgagcagctgggtataaaagactttcattccgtgcattttgtatttcgtcggccggactggggtaaaaacaataagagagatacgttctggggcgcacgaggtgtagttcgcgagtttttagataggttgcttccctatagctatgggcctgtaaaatcaacaagagaagaagcgacctcgttaacgggcaaaggcgttgataatgagttcgtacacttgtttctaccagacatacacggattaaaaaaagtagccaaggggttaaaacctaaagacttctttaaaatgctagaaagtacattgttgtctgagcttattgatagcgtaaatattaaagttaaattgcacaacgatgagattgttagctttagtgagctaagcgaaggagagcaacagctactaactgtcctgggccttttagagtttacagtagaagatgattcgttatttctattggatgagcccgatactcatttaaatcctgcatgggcagctaaataccatacctttcttaaacggttcatacctaatcaaaaattctgtcatatcttgatggtaactcatcacccactagcgatagctgaattggataaacagcaaatacaagttatacgcaataaccaagaaggccagtcgatagctgaggtgcccgctgaaagcccaataggtatgggggtcaatggaatattgaccagtgatatgtttggcatggcgacaacactagataggcatacaagcggtgtaatagagaaacgtagaacgttacttgaaaaagaatctttaagtgagaatgaaaccaagaaattaaggaagttaaacggctctttagaacgactcggctatggctatacccacccagatgaagactatcgacagttcttaatttctcgaaaaagagctatggacgctatggactcgaaaggtatagatgacactcagtatcggttgaagataattgaaaatattttgaagacaaaagggctggtctag

SEQ ID NO: 87155 - DNA, 879 bp, Agarivorans albus MKT 106
ttgcgatatatagatattaacttaattgatgcatgtaaacccgccaactgggatgttaatgctacgcagtggttaactgatattcagaatgcacaggatagatcagctgagtttaagcgacttggtagtaagtggtcaccattcaaggataactttatcaaccaatttggtgataaatgctggtattcagaagttaaaagaagcaacactgattttaatattgatcactttcgcccaaaaggggctgttaagagaactaaaggggcttatgccactagattttttggtggaaaaccacaaaagcactcaggttactggtggttagcatttgaaccaaaaaattatcgatattcctgccagtatgcgaaccaaccgagagataatggtggaaaacatgactactttcctcttcaaaatgaaaccgctagagtctggggtcgatgttcgctaacaaaccataacgttgaagcgcctgttttgctcgacccatgcgaacttgccgatgttcaattgttatcatttgaaaagtcccctggtatggtacattctcggtacgacctagccacagataaagctaaatatgaaagagtaaagacgagtgctaagtgctacaacctaaaccacaagaccgttaaaggtgacaggcttaaagtaatcacctccgttcagcaagacctagtgctactagaaagtattcatggattaccactggctagtaaacaagttatgcaggtcaatgtaaataacgctgaaaatcgactagttgatgcttgtaacagaaaatcaccattctcagccgccgcagtagcttttgttaaaccaaagaaagcagagccttggttggctaatattttacctagattagaccttacagattga

SEQ ID NO: 87156 - DNA, 2316 bp, Pseudomonas sp. CFII68
atgatctttgttgaccgcaaatctgtccaaaatcccttcgaggacgctgctttggcgagcaaagcagcattagaggttgcacgagccggagctgaagtcatgggagcgtcctctcagcggagacttctgttcacagcttataagcacccgactgtaaaagcagcgctatccgctctctttcatgataagtgcgcctactgcgagacacggatcgtgggttcctttgccgacatcgagcagttcagaccgaaagctagcgtttccgaggccagggatcatcagggctattggtggctagccaactcttgggaaaatctgctgattgcttgtcagtcatgcaatcgaaagtcgctttctgctgcaaacaaaagtgaggggcaggggccgatcggtaagtacaatcgatttcccttaattgatgaaagcaaacgcgcctttacaccgagcatggacttgtcgatggaacaaccattgctgcttaatcccaccttcgacgacccaacctcacatcttacgttctcggatgaagggctggttttcagcgaaacagaaagaggaaattcgacgatctcaatactgggattgaatcgacccaatcttgccaatgaaaggcataagacagcgaagaactatagaaacttgttcgaaagagtcatttgggcgatggacaaggatgtcgacctaagcaaacagcttctcgatgagctccttgagatggcggcgagcgaagccagttatgccggtatgatccaacaatttctgcggcgtgataaagcccggcttgagcaacaaataaataaccacaaattgacgaaggtgatagaagacgacgccattaagcgtaaccttcgatcacttgaaagtaaggcccccatatctggccccgcaagcgtgaagagggcagctcgcacgaccaaggcctatcgagggcgaatggcaaattactctctggccgatgaagaagggatcaaacggtataagtcgcaacgtcgctccatcgagaccatatccatccgaaacatccgggcgctaggatccttttatatagatttagcgacgcaaggtagcggcgcaggtcgctggttgatgctgctcggtgagaatggcaccggcaagagcaccgtgctccaagcgatcgcgctcgtattaggtggatcagcctacatctcaaagcttatcaaagagcagcgcatccgtattcccgagcttgtgcgattccgctgccgctccggtgagatcgccgtaaaaatgagtggcttcgacacgccacaccgactcaaagtattcaaagaccgcctcgagttcactagcccctccaaagagaccgtctgcatcatgcttgacggcgaggttagaggaactgcgtgggagccccagacggtgatggcaggatatggcgctacacgcctgtcgccgcgcataagtaatgactcaccatcaggaggcgactttgcccgggtggaaaacctctttgatcccttcgtcccgttgatggatgcacagaaatggctggccagcctgactcgaaaagactttaaccgcgtcgcaatcatcctcaaggatttacttgcgattgacccagacgcctatcttgatcgaagccgaggaaacattttccttcatgcttcaggggagaatgtcagcctgagcagcctcagtgttggctatcagaccatcgttgcagcaaccgtcgacatgcttgagatcctctctagggtttggagcaatccattggaagccgagggtatcgtgatgattgacgaactggatgctcatttgcacccaacctggcagatgcaaatcgtcaatagcctgagacaagccctgcctggggtccagttcatcaccactactcatcaacctctgtgccttcgaggactgtcagagggtgaaattgtagtgatgcatcgtggggcaaaccatgaagtcgaaatcattacggatctaccttcaccggctgacttccgggtcgatcagttgctcacatcgccgttcttcggactcaactctacaacggatcccgacgtcgaacggctcttcgatcgctactacgcgttacttgcgatggatacgcgcgatgaacagaatgaggtcgaactcacagagctaaccaaacaactcgaacgacgcaaacagttcggagagagccagcgcgaaggtctttaccttgaggcgatcgaccgcctactggcaaggcaaaaatctttgccagacctcgcgcacgaagaaattcgagagaaggcggttagtgagatatcagcaatctgggacaacctaatcggtgacatcgcagagactggagaagagcagatatga

SEQ ID NO: 87157 - DNA, 984 bp, Pseudomonas sp. CFII68
atgatttacgtttcgcgctcatcggatgcggaaaagctgcctctctatacaaaggcgactgtaaaagcagcggacgggaagataaaggttacccgttttgagcgagagcgcgcggctgcgattagctttttcacgaacgtcgccaattatcacaacaacgaaaaattaggcgagaaatccttcagctttaaagtctacaaagacaaagcgctcgcgaaagtcttagccagcgactttcgaagcaaatgcgcttattgcgagagcaaatttggagcagtgagctccgccgatattgagcattatcgacccaaggcttctattggctcgggcacgaccgaactcaaaccaggttactactggctcgcaggtgattgggataaccttttgatttcatgccaacactgcaatcgtgtacgcaaccatgaagtgccagggcaaagcgcaaatatcctccttgggaaaggcagccaatttcccctatcggacgaatccaagcgagtgcgggtacatggtggaaatattgccgccgaggcggatctgcggctactgctgcatccctgtgtcgatcagccaacggaacaccttgcattcgacgagaccggcttggtacgagccattgtgaacggcgtcgaaagtccgcggggcaaagcatcgatcgacgtttatgcgttgcagcgtaaagatctggtggaagctaggcgagaccagatcaatgaactcagatcaaagatcgatgacttgcagaggttggtacgccaacataatcgaatggcaaattcggccgacttccccgacgatggccattcggagaatctcgaccatattgccaagactgtaatgggcatcagaaccatgatgctccctgaggcagtctatattgcagccaaaaggggatgggtgagaggggcgtacgagcgcggcgaattcaagaccttggaaaagttcggagttaagctcgaagcatttttgctattcgcaacctaa

SEQ ID NO: 87158 - DNA, 729 bp, Pseudomonas sp. CFII68
atggttaaaatcaacgaaattctcacgcagcggcgagcaatagagttaagagcaaatttctcagagtcacggttatcacttggtgaatacacggctgacagcacaataattcgtgcaattattgttttgatggatgtcggcttaataaggcttatggacttgatacttaataaaaaggggtttggaaagctttctttgaagaaggcgagctcgggtgagcaatgcctactggtactcattctgggaattgcaggccatatcacaaatggatctgtagttttaattgatgaacctgagattagcctgcatccacgttggcaggaggagtttatgactttacttatgtcatctttttcgggttattataaatgtcagtttattattgctacgcactcaccgcaagtcatcgcccggttaagtggtaaaggctgctatatcgcatccctatcgagaagagaactgtacgatgctgaggagtttcacgaaaagtcggctgactttcaactggcagagctattcgatgccccaggcattatgaatgaatacatttcaaggttggcttttaatttgcttgcgaaggtaaagcatagcaagaaatttgattcggattcattggcagagttaattcggttgcaaaaatttgaccagcaacttgatgagaatgaccctgttaaagagttgattcgatccgtttctatgctgtgtgaaagctatgccgataatcgataa

SEQ ID NO: 87159 - DNA, 606 bp, Pseudomonas sp. CFII68
atgccgataatcgataacccaatagtccttagcgacgcttcgctagtactcatagagcagaaaaaggcaactgctaacttttcgcacgccaactggggtgatgaagatcttcagccagtacgccgtgagattcgagagcattatcgaaatgttcaaaggctcgtatgtgtctattgcttgggatcggtttcggcccattcggcagcaggagcaccagttgaacacattgtcccaaaatcccaacatctgcacttcatgtttgaacctgaaaacttatgtgtgatttgtcccgactgcaatgaattcaagtcgaatagagagtctttagtaaatccagtgctgacggcgaacagagttaactacccaagaaactctgctctgtataggatcgttcaccctcattttgactcgtacgataatcatatcgcgaaattcaatcggctttatgttgaatgttccgacaagggcggatacacaatctatatttgcaacctaaatcgatttttcagaagatttggacgctgcgacgagttagttaacgatgtcgccctagcggaacaagcagagcgattttttgaagacggcatagctcctgagcaaccttga

SEQ ID NO: 87160 - DNA, 1269 bp, Pseudomonas syringae pv. theae ICMP 3923
atgcgcctcgaccacctccacctgcagaattttcgttgttacgaagatgctcattttgacttccagccgggtttcaacttggtggtgggggttaatgggagcgggaagacgtcgctgttgttgggggtggcggaatgcctgattccttatggcaatgcaatggggcaaggccaggaaattctgagcaaggaagacgttcgtttcgttatagacaggcatgaaggacgcagtcgatttgagagaaagtttcccgtattcataagagcggatggcgatatttttgatctgccaaattggcgggcagtccgtctgctcgagccctgggaaggaggagtagatccctcatcactctctcacttgagtgctgtgctcgccaggaacaacgcaggtgagcagattgactttccggttcttgccttctatcgcgccaatcgtcgttggagcagtgcgcgcatatctgccgagttcgcagcacagcagcggacttcccgttttgacggatatgcaaactggtttgacgccgtagccgatctgcgtgattttgaaagctggttaatcgcaaggacgcttgagcgccttcaggaccgtcttgattcaacttcgactgtcgagcgtgaagatgaacttgaatgggtgaatcgagcgatcagacttgccataccggatgcccatgatctccgatatgacttgaggctacaaagcctgctcgtagatatgggggaaggcaacgccgttccgtttcacgaactcagtgatggtcaacgtagtttgattgcgttgattgcagatattgcacgacgcatgtgcgttctaaacccacacataggaaaagacgttctggcgaataccagtggcatcgtgattattgatgagctcgatattcatctgcacccggcctggcaacgcaacattgcgccgacgcttaaaaaagcattccccaaagtgcaattcatcgccacaagccactcacctcaagttatcggtagcctgcaaccgggcgaggtcatcctgctgaataaccatgacggctctcacccgcgagcaacctacggcctggactccagcagcattctggaagaggtcatgggtgtgtcgcagcgtgagcccgaaattgaagcgttgctcgacgagctgttcagtgcactggaaaacaatgaacttgaaaaagccagactgcagcttgatgcgctaaagaaaaaagcccccgatctacccgagttcgcaggtgccgaagcactgctcaagcgcaaggagcttattggacgatga

SEQ ID NO: 87161 - DNA, 645 bp, Pseudomonas syringae pv. theae ICMP 3923
atgagacgcatcatcaaaggaactgagcctgcgtcatttaccgaatggaaagccagcgcaaatgaagactggatgcccacttatccaaccttgcagaacccacaaaaacgcgaattgcataacagcctgctacaagagcagcattcttcttgctgctattgcggcagggaaatagaacttgagagcagccacatcgaacatttcaaaccccaggagcactacctgccactggcgctggagtacagcaatctccatgcgtcctgcctgcgcgagaccaaaccaggaaacccgctgcattgcggacatcacaagagcaactggttcgatgaaacgctgcacatttctccactggcagacgattgcgaacagcgatttcgctatctgctgacaggaaaaattcaaaacactgaatccgcagaccttcccgccgccacaatgatcgagaaactcgcactcgatatcgcctacctgacgagaagacgtcaggaagcgatcacaggcatttttgatgaacagttcatattgagcgccagtgaggcggagttgacgcatctggtgcagagtttgcgctcaggagatgccggcaagcaggtcgcctttggccacgtcgttgcccgctatgcggagcagttgctagcgtcctga

SEQ ID NO: 87162 - DNA, 447 bp, Pseudomonas syringae pv. actinidiae ICMP 19071
ttgaccactgcagttctggcgaataccagtggcatcgtgattattgatgagctcgatattcatctgcacccggcctggcaacgcaacattgcgccgacgcttaaaaaagcattccccaaagtgcaattcatcgccacaagccactcgcctcaagtgattggcagcctgcaaccgggcgaggtcatcctgctgaggaatggcgacagctctcacccgcgagcaacctatggcctggactccagcaccattttggaagaagtcatgggcgtaccgcagcgcgaccccgaaattgaagtgttgcttgatgagctgttcagcacgctggaaaacaatgaacttgaaaaagccaggctgcagattgacgcgctaaagaaaaaagcccccgatctacccgagttcgcaggtgccgaagcactgctcaagcgcaaggagcttattggacgatga

SEQ ID NO: 87163 - DNA, 645 bp, Pseudomonas syringae pv. actinidiae ICMP 19071
atgagacgcatcatcaagggaactgagcctgcgtcatttaccgaatggaaagccagcgcaaatgaagactggatgcccacttatccaaccttgcagaacccacaaaaacgcgaattgcataacagcctgctacaagagcagcattcttcttgctgctattgcggcagggaaatagaacttgagagcagccacatcgaacatttcaaaccccaggagcactacctgccactggcgctggagtacagcaatctccatgcgtcctgcctgcgcgagaccaaaccaggaaacccgctgcattgcggacatcacaagagcaactggttcgatgaaacgctgcacatttctccactggcagacgattgcgaacagcgatttcgctatctgctgacaggaaaaattcaaaacactgaatccgcagaccttcccgccgccacaatgatcgagaaactcgcactcgatattgcctacctgacaagaaggcgtcaggaagccatcactggcatttttgatgaacagttcatatcgagcgccagtgaagcggagttaacgcatcttgtgcagagtttgcgctcaggagattccggcaagcaggtcgcctttggccacgtcgttgcccgctatgcggagcagttgctagcgtcctga

SEQ ID NO: 87164 - DNA, 1356 bp, Pseudomonas syringae pv. actinidiae ICMP 19071
atgcagaactatcgctgcttcggtgaattcgagatcgacttcgatccgcatctgaccatacttattgcctccaacggaggcggaaaaaccaccattcttgatgccgcccgagttgcactgtggcctttcgtcaagggttttgatcttggtggccagacaggaaaatccgccactatccagattgaagatgtgcgactggcccaattcggcagtggcaatatggagtcgcaggtacccagcgttatcgaggcaaagggtgtctggtgggaaagcgccgttgaaagtagctggctgcagcagcgcgtcagcttgaaaaagtccactaacaccattggcgatgctggatcgaaagcgttgactttgtatggtaagtcgcttcaggacagtgtgcgaagcgatgcacatgtcactctgccaatgatgacttacctgggcacttccaggctatggttcgagggacgcttcagttcggcagcggctcagacaacactcgataaaagtgagtactccagaacgtccgcatacctcaattgcctgtcttattcatccagcttcaagaccttcactgcatggtacatctggatgtaccgcagctaccgtgaagctcagttgatcgctctggagcgcggtgaagaagtgtccgataccgggcagcgctttgagaaaatcatctcagctgtcaaagaagccatcgacaggttgataaaggctcctacgggctggcacagactggaatacagtgccagtcatcaacaacaactggtcatgcaccacccggaccaggggattttacctgtcgaaatgcttagcgatggtctgcgtaacacgatcgccatggttgcggacctcgcttttcgtgcctgcaaactcaacccgcacctcggcgagcgggcacccttgcaaacgccaggtatcgccttgattgatgaagtggatatgttcctgcatcccttctggcaacagacgatagtaggttcattacgtgcggcttttcccgccatgcagtttattgtcaccacgcacagtccgcaggtgttgagtacggtccgacgtgaaaatattcgggtgatcggtaaagatgcccaagggcgtttgattgcatcccggccccttgccatgacctacggtgagccgagcaacagcgtgctgcgaagcgtgatgcaggtcgatccgcagcctccggtggatgaaaagccgggcctgctacaactcacggaatgggtggacaaaggtcgctatgacgaaccacaggcgatcttgctgatgcagcagataacggaggcactaaccgagcaacaccctcaactgcagcgcctgcagcgcagcataaagcggcagaaggcattgaggggatga

SEQ ID NO: 87165 - DNA, 570 bp, Pseudomonas syringae pv. actinidiae ICMP 19071
ttgtgttgctatagcgaaattcgacctgaccgggttggcctgagtttccatatagagcacgtcgaaaacaagagccaacaccctcagcgtacgtttgactacaataacctcgctgcctgcgcgctggacagtcagagcgatctggaagtgttgaaaatacaaggcgctgaggtatttggtgggcacgcgtcaggtaagtcgaaaggggtcgacatggctcgcttcgtctcgtgtcacatgcccgactgttcgcgcttcttcgcctatttgtctgacggccgtgtagtgcctgctgacggattgtcactggatgaagttgaccgagctgaatacaccatcgacctgctaaaccttaacagcccttatctccaggacttgcgacaatcctggtgggatgagttggaagggctttttgaagatcatgttgatcaagatatgagtctgcattgtctggcggggattgatctcatccctgtgggtgcgagtttaagtcagtttttcagtattacccggaattttttcggaggtatcgctgaagaaatccttgatcaagaggctggtcgctggtaa

SEQ ID NO: 87166 - DNA, 1356 bp, Pseudomonas syringae pv. actinidiae ICMP 19073; identical to SEQ ID NO: 87164

SEQ ID NO: 87167 - DNA, 570 bp, Pseudomonas syringae pv. actinidiae ICMP 19073; identical to SEQ ID NO: 87165

SEQ ID NO: 87168 - DNA, 1269 bp, Pseudomonas syringae pv. actinidiae ICMP 19073
atgcgcctcgaccacctccacctgcagaattttcgttgttacgaagatgctcattttgacttccagccgggtttcaacttggtggtgggggttaatgggagcgggaagacgtcgctgttgttgggggtggcggaatgcctgattccttatggcaatgcaatggggcaaggccaggaaattctgagcaaggaagacgttcgtttcgttatagacaggcatgaaggacgcagtcgatttgagagaaagtttcccgtattcataagagcggatggcgatatttttgatctgccaaattggcgggcagtccgtctgctcgagccctgggaaggaggagtagatccctcatcactctctcacttgagtgctgtgctcgccaggaacaacgcaggtgagcagattgactttccggttcttgccttctatcgcgccaatcgtcgttggagcagtgcgcgcatatctgccgagttcgcagcacagcagcggacttcccgttttgacggatatgcaaactggtttgacgccgtagccgatctgcgtgattttgaaagctggttaatcgcaaggacgcttgagcgccttcaggaccgtcttgattcaacttcgactgtcgagcgtgaagatgaacttgaatgggtgaatcgagcgatcagacttgccataccggatgcccatgatctccgatatgacttgaggctacaaagcctgctcgtagatatgggggaaggcaacgccgttccgtttcacgaactcagtgatggtcaacgtagtttgattgcgttgattgcagatattgcacgacgcatgtgcgttctaaccccacacataggaaaagacgttctggcgaataccagtggcatcgtgattattgatgagctcgatattcatctgcacccggcctggcaacgcaacattgcgccgacgcttaaaaaagcattccccaaagtgcaattcatcgccacaagccactcgcctcaagtgattggcagcctgcaaccgggcgaggtcatcctgctgaggaatggcgacagctctcacccgcgagcaacctatggcctggactccagcaccattttggaagaagtcatgggcgtaccgcagcgcgaccccgaaattgaagtgttgcttgatgagctgttcagcacgctggaaaacaatgaacttgaaaaagccaggctgcagattgacgcgctaaagaaaaaagcccccgatctacccgagttcgcaggtgccgaagcactgctcaagcgcaaggagcttattggacgatga

SEQ ID NO: 87169 - DNA, 564 bp, Pseudomonas syringae pv. actinidiae ICMP 19073
atgagacgcatcatcaagggaactgagcctgcgtcatttaccgaatggaaagccagcgcaaatgaagactggatgcccacttatccaaccttgcagaacccacaaaaacgcgaattgcataacagcctgctacaagagcagcattcttcttgctgctattgcggcagggaaatagaacttgagagcagccacatcgaacatttcaaaccccaggagcactacctgccactggcgctggagtacagcaatctccatgcgtcctgcctgcgcgagaccaaaccaggaaacccgctgcattgcggacatcacaagagcaactggttcgatgaaacgctgcacatttctccactggcagacgattgcgaacagcgatttcgctatctgctgacaggaaaaattcaaaacactgaatccgcagaccttcccgccgccacaatgatcgagaaactcgcactcgatattgcctacctgacaagaaggcgtcaggaagccatcactggcatttttgatgaacagtgcgcattccacgccatccggccacccagtccaccaacatccggccac

SEQ ID NO: 87170 - DNA, 1356 bp, Pseudomonas syringae pv. actinidiae ICMP 19103; identical to SEQ ID NO: 86084

SEQ ID NO: 87171 - DNA, 570 bp, Pseudomonas syringae pv. actinidiae ICMP 19103
ttgtgttgctatagcgaaattcgacctgaccgggttggcctgagtttccatatagagcacgtcgaaaacaagagccaacaccctcagcgtacgtttgactacaataacctcgctgcctgcgcgctggacagtcagagcgatctggaagtgttgaaaatacaaggcgctgaggtatttggtgggcacgcgtcaggtaagtcgaaaggggtcgacatggctcgcttcgtctcgtgtcacatgccagactgttcgcgcttcttcgcctatttgtctgacggccgtgtagtgcctgctgacggattgtcactggatgaagttgaccgagctgaatacaccatcgacctgctaaaccttaacagcccttatctccaggacttgcgacaatcctggtgggatgagttggaagggctttttgaagatcatgttgatcaagatatgagtctgcattgtctggcggggattgatctcatccctgtgggtgcgagtttaagtcagtttttcagtattacccggaattttttcggaggtatcgctgaagaaatccttgatcaagaggctggtcgctggtaa

SEQ ID NO: 87172 - DNA, 555 bp, Pseudomonas syringae pv. actinidiae ICMP 19103
atgggggaaggcaacgccgttccgtttcacgaactcagtgatggtcaacgtagtttgattgcgttgattgcagatattgcacgacgcatgtgcgttctaaacccacacataggaaaagacgttctggcgaataccagtggcatcgtgattattgatgagctcgatattcatctgcacccggcctggcaacgcaacattgcgccgacgcttaaaaaagcattccccaaagtgcaattcatcgccacaagccactcgcctcaagtgattggcagcctgcaaccgggcgaggtcatcctgctgaggaatggcgacagctctcacccgcgagcaacctatggcctggactccagcaccattttggaagaagtcatgggcgtaccgcagcgcgaacccgaaattgaagtgttgcttgatgagctgttcagcacgctggaaaacaatgaacttgaaaaagccaggctgcagattgacgcgctaaagaaaaaagcccccgatctacccgagttcgcaggtgccgaagcactgctcaagcgcaaggagcttattggacgatga

SEQ ID NO: 87173 - DNA, 645 bp, Pseudomonas syringae pv. actinidiae ICMP 19103; identical to SEQ ID NO: 86083

SEQ ID NO: 87174 - DNA, 1359 bp, Pseudomonas syringae pv. actinidiae ICMP 19098
atggaaatcaaaagcttcaggcttatcaatgtgggacgtttcagcgatctggaagtcgctctggcacctaccgaaaggcacccatcgaaggtgaccgtgctggtcggcaataatggggcggggaagactacgctgctcaagtctgtcgctacagcattgagctggctggtggcgagggtcaggacgcctaaaggtgttggaatcagaatcgacgaggatacgatccagaacggtgcggcgacttcttcaattcgtattgacgcttacgatgaccagattatcgactccctgatttgtgggcctgattttcactgggagattgccggaacactcaaggggcgcaaagctacctcgtctacggtgctgggcgagctgagtatgctggcagaggggtaccgctcacagttgacggccaagagcgatttatctcttcctcttctggccttttatccagtcgaacgctcagtgattgagataccgctaaaagtccacgccaagcactccttcgatcaactggacggctacgacaacgccttgggtcgtggcgtggattttcgccgctttttcgagtggttcagggagcgcgaagacagcgagaatgaaacgggtatctcgacagagctgctgaatgaactgtctcaaaaaatcctggttgatacagaactctggaaagtactgaccagagagcatgcctcatcgcgtgaccgtcagctgaccgcggtcagaacggcggttgaagcgttcatgccgggcttcacgaagctgcgcgtcaagcgcaaaccgcgcctgcatatggcgatcgataaagatggcaagacgctgaacgtgtcccagctgtcgcaaggcgaaaaatcgatgatggcgctcgtcggtgacatcgccagacgcctcgccatgatgaacccggcgcttgaaaacccattgcacggcaatggcatcgtcttgatcgacgaagttgatctgcacctgcaccccaaatggcaacgcagcctgatcgcccagctcaccacgacgttccccaattgccagtttctcctgaccacgcattcgccgctggtcatcagcgacagcaaggatgtgctggtgtatctcatggacgatgggcagttgcgtgagcaggatggtctttacgggctcgatgccaatcaggtgttgttgagtgtcatggacacggacatccgaaacgaggcggttcaggcgtctctggatgaaatgcagcactttttgatcagaggggagcttgataaggctcgtacgctctacgcagtgttgactggcgaattacctgcaaatcacatcgaactggcgaaagcttcgctactgattcgcaagctggaagtgcgccgtgagaaagattga

SEQ ID NO: 87175 - DNA, 651 bp, Pseudomonas syringae pv. actinidiae ICMP 19098
gtgagaaagattgagaagggaagtctcgcagtcctggaaaaatggaagcgtgcgaacaagggaaagaaatacgccgacctcgtggggcgtgaagatatcaaggatgccattcgtcatgcctgtgtcactgaacagcatggcttgtgcgcctattgctgctgcagaataaccgccgagaaagacagcgcctgcaatgagcatgtcgaagcccagcatcaagcaccgaatcgcaccctggatttcggcaacatagtcgcgagctgtaccaaagccaagcggtgtgacaatgctcatggtcatcagcgcctaccacttacaccgctgatgatcgaatgtgaagaggagttgcagtttgagctctcgggtctggtggcaggcaccacgcccagggcacgcgaatgcatgaaggtccttaacctgggcgatacccgtaagttcaacaaaggattaatcgaggagcgtaaaagcatgattgatgatttgttgtactccaaaggagtaaatcccgccgaatttattgtcgaggaggatgggatgctcgatcttttgatagaggacatgttgagagtaaacgtccagggagagcttcaggccttttcccccgttctggtaaacgttattcgtcgtctcaaggctttgcgggtctcctga

SEQ ID NO: 87176 - DNA, 1269 bp, Pseudomonas syringae pv. actinidiae ICMP 19101
atgcgcctcgaccacctccacctgcagaattttcgttgttacgaagatgctcattttgacttccagccgggtttcaacttggtggtgggggttaatgggagcgggaagacgtcgctgttgttgggggtggcggaatgcctgattccttatggcaatgcaatggggcaaggccaggaaattctgagcaaggaagacgttcgtttcgttatagacaggcatgaaggacgcagtcgatttgagagaaagtttcccgtattcataagagcggatggcgatatttttgatctgccaaattggcgggcagtccgtctgctcgagccctgggaaggaggagtagatccctcatcactctctcacttgagtgctgtgctcgccaggaacaacgcaggtgagcagattgactttccggttcttgccttctatcgcgccaatcgtcgttggagcagtgcgcgcatatctgccgagttcgcagcacagcagcggacttcccgttttgacggatatgcaaactggtttgacgccgtagccgatctgcgtgattttgaaagctggttaatcgcaaggacgcttgagcgccttcaggaccgtcttgattcaacttcgactgtcgagcgtgaagatgaacttgaatgggtgaatcgagcgatcagacttgccataccggatgcccatgatctccgatatgacttgaggctacaaagcctgctcgtagatatgggggaaggcaacgccgttccgtttcacgaactcagtgatggtcaacgtagtttgattgcgttgattgcagatattgcacgacgcatgtgcgttctaaacccacacataggaaaagacgttctggcgaataccagtggcatcgtgattattgatgagctcgatattcatctgcacccggcctggcaacgcaacattgcgccgacgcttaaaaaagcattccccaaagtgcaattcatcgccacaagccactcgcctcaagtgattggcagcctgcaaccgggcgaggtcatcctgctgaggaatggcgacagctctcacccgcgagcaacctatggcctggactccagcaccattttggaagaagtcatgggcgtaccgcagcgcgaacccgaaattgaagtgttgcttgatgagctgttcagcacgctggaaaacaatgaacttgaaaaagccaggctgcagattgacgcgctaaagaaaaaagcccccgatctacccgagttcgcaggtgccgaagcactgctcaagcgcaaggagcttattggacgatga

SEQ ID NO: 87177 - DNA, 645 bp, Pseudomonas syringae pv. actinidiae ICMP 19101
atgagacgcatcatcaagggaactgagcctgcgtcatttaccgaatggaaagccagcgcaaatgaagactggatgcccacttatccaaccttgcagaacccacaaaaacgcgaattgcataacagcctgctacaagagcagcattcttcttgctgctattgcggcagggaaatagaacttgagagcagccacatcgaacatttcaaaccccaggagcactacctgccactggcgctggagtacagcaatctccatgcgtcctgcctgcgcgagaccaaaccaggaaacccgctgcattgcggacattacaagagcaactggttcgatgaaacgctgcacatttctccactggcagacgattgcgaacagcgatttcgctatctgctgacaggaaaaattcaaaacactgaatccgcagaccttcccgccgccacaatgatcgagaaactcgcactcgatattgcctacctgacaagaaggcgtcaggaagccatcactggcatttttgatgaacagttcatatcgagcgccagtgaagcggagttaacgcatcttgtgcagagtttgcgctcaggagatgccggcaagcaggtcgcctttggccacgtcgttgcccgctatgcggagcagttgctagcgtcctga

SEQ ID NO: 87178 - DNA, 1356 bp, Pseudomonas syringae pv. actinidiae ICMP 19101; identical to SEQ ID NO: 87164

SEQ ID NO: 87179 - DNA, 570 bp, Pseudomonas syringae pv. actinidiae ICMP 19101; identical to SEQ ID NO: 87165

SEQ ID NO: 87180 - DNA, 1356 bp, Pseudomonas syringae pv. actinidiae ICMP 19079; identical to SEQ ID NO: 87164

SEQ ID NO: 87181 - DNA, 570 bp, Pseudomonas syringae pv. actinidiae ICMP 19079; identical to SEQ ID NO: 87165

SEQ ID NO: 87182 - DNA, 1320 bp, Pseudomonas syringae pv. actinidiae ICMP 19079
atgagccaaggtacactggcgcatccgcccgctctggtaaaggaaaccgacatgcgcctcgaccacctccacctgcagaattttcgttgttacgaagatgctcattttgacttccagccgggtttcaacttggtggtgggggttaatgggagcgggaagacgtcgctgttgttgggggtggcggaatgcctgattccttatggcaatgcaatggggcaaggccaggaaattctgagcaaggaagacgttcgtttcgttatagacaggcatgaaggacgcagtcgatttgagagaaagtttcccgtattcataagagcggatggcgatatttttgatctgccaaattggcgggcagtccgtctgctcgagccctgggaaggaggagtagatccctcatcactctctcacttgagtgctgtgctcgccaggaacaacgcaggtgagcagattgactttccggttcttgccttctatcgcgccaatcgtcgttggagcagtgcgcgcatatctgccgagttcgcagcacagcagcggacttcccgttttgacggatatgcaaactggtttgacgccgtagccgatctgcgtgattttgaaagctggttaatcgcaaggacgcttgagcgccttcaggaccgtcttgattcaacttcgactgtcgagcgtgaagatgaacttgaatgggtgaatcgagcgatcagacttgccataccggatgcccatgatctccgatatgacttgaggctacaaagcctgctcgtagatatgggggaaggcaacgccgttccgtttcacgaactcagtgatggtcaacgtagtttgattgcgttgattgcagatattgcacgacgcatgtgcgttctaaacccacacataggaaaagacgttctggcgaataccagtggcatcgtgattattgatgagctcgatattcatctgcacccggcctggcaacgcaacattgcgccgacgcttaaaaaagcattccccaaagtgcaattcatcgccacaagccactcgcctcaagtgattggcagcctgcaaccgggcgaggtcatcctgctgaggaatggcgacagctctcacccgcgagcaacctatggcctggactccagcaccattttggaagaagtcatgggcgtaccgcagcgcgaacccgaaattgaagtgttgcttgatgagctgttcagcacgctggaaaacaatgaacttgaaaaagccaggctgcagattgacgcgctaaagaaaaaagcccccgatctacccgagttcgcaggtgccgaagcactgctcaagcgcaaggagcttattggacgatga

SEQ ID NO: 87183 - DNA, 645 bp, Pseudomonas syringae pv. actinidiae ICMP 19079; identical to SEQ ID NO: 87177

SEQ ID NO: 87184 - DNA, 1359 bp, Pseudomonas syringae pv. actinidiae ICMP 19096; identical to SEQ ID NO: 87174

SEQ ID NO: 87185 - DNA, 651 bp, Pseudomonas syringae pv. actinidiae ICMP 19096; identical to SEQ ID NO: 87175

SEQ ID NO: 87186 - DNA, 1356 bp, Pseudomonas syringae pv. actinidiae ICMP 9855; identical to SEQ ID NO: 86084

SEQ ID NO: 87187 - DNA, 570 bp, Pseudomonas syringae pv. actinidiae ICMP 9855; identical to SEQ ID NO: 87171

SEQ ID NO: 87188 - DNA, 555 bp, Pseudomonas syringae pv. actinidiae ICMP 9855; identical to SEQ ID NO: 87172

SEQ ID NO: 87189 - DNA, 645 bp, Pseudomonas syringae pv. actinidiae ICMP 9855; identical to SEQ ID NO: 86083

SEQ ID NO: 87190 - DNA, 912 bp, Pseudomonas syringae pv. actinidiae ICMP 19070
ttgagtgctgtgctcgccaggaacaacgcaggtgagcagattgactttccggttcttgccttctatcgcgccaatcgtcgttggagcagtgcgcgcatatctgccgagttcgcagcacagcagcggacttcccgttttgacggatatgcaaactggtttgacgccgtagccgatctgcgtgattttgaaagctggttaatcgcaaggacgcttgagcgccttcaggaccgtcttgattcaacttcgactgtcgagcgtgaagatgaacttgaatgggtgaatcgagcgatcagacttgccataccggatgcccatgatctccgatatgacttgaggctacaaagcctgctcgtagatatgggggaaggcaacgccgttccgtttcacgaactcagtgatggtcaacgtagtttgattgcgttgattgcagatattgcacgacgcatgtgcgttctaaacccacacataggaaaagacgttctggcgaataccagtggcatcgtgattattgatgagctcgatattcatctgcacccggcctggcaacgcaacattgcgccgacgcttaaaaaagcattccccaaagtgcaattcatcgccacaagccactcgcctcaagtgattggcagcctgcaaccgggcgaggtcatcctgctgaggaatggcgacagctctcacccgcgagcaacctatggcctggactccagcaccattttggaagaagtcatgggcgtaccgcagcgcgaacccgaaattgaagtgttgcttgatgagctgttcagcacgctggaaaacaatgaacttgaaaaagccaggctgcagattgacgcgctaaagaaaaaagcccccgatctacccgagttcgcaggtgccgaagcactgctcaagcgcaaggagcttattggacgatga

SEQ ID NO: 87191 - DNA, 645 bp, Pseudomonas syringae pv. actinidiae ICMP 19070; identical to SEQ ID NO: 86083

SEQ ID NO: 87192 - DNA, 1356 bp, Pseudomonas syringae pv. actinidiae ICMP 19070; identical to SEQ ID NO: 86084

SEQ ID NO: 87193 - DNA, 588 bp, Pseudomonas syringae pv. actinidiae ICMP 19070
ttggaggagcagtacggattgtgttgctatagcgaaattcgacctgaccgggttggcctgagtttccatatagagcacgtcgaaaacaagagccaacaccctcagcgtacgtttgactacaataacctcgctgcctgcgcgctggacagtcagagcgatctggaagtgttgaaaatacaaggcgctgaggtatttggtgggcacgcgtcaggtaagtcgaaaggggtcgacatggctcgcttcgtctcgtgtcacatgccagactgttcgcgcttcttcgcctatttgtctgacggccgtgtagtgcctgctgacggattgtcactggatgaagttgaccgagctgaatacaccatcgacctgctaaaccttaacagcccttatctccaggacttgcgacaatcctggtgggatgagttggaagggctttttgaagatcatgttgatcaagatatgagtctgcattgtctggcggggattgatctcatccctgtgggtgcgagtttaagtcagtttttcagtattacccggaattttttcggaggtatcgctgaagaaatccttgatcaagaggctggtcgctggtaa

SEQ ID NO: 87194 - DNA, 1356 bp, Pseudomonas syringae pv. actinidiae ICMP 19068; identical to SEQ ID NO: 86084

SEQ ID NO: 87195 - DNA, 570 bp, Pseudomonas syringae pv. actinidiae ICMP 19068; identical to SEQ ID NO: 87171

SEQ ID NO: 87196 - DNA, 555 bp, Pseudomonas syringae pv. actinidiae ICMP 19068; identical to SEQ ID NO: 87172

SEQ ID NO: 87197 - DNA, 645 bp, Pseudomonas syringae pv. actinidiae ICMP 19068; identical to SEQ ID NO: 86083

SEQ ID NO: 87198 - DNA, 1356 bp, Pseudomonas syringae pv. actinidiae ICMP 19097; identical to SEQ ID NO: 87164

SEQ ID NO: 87199 - DNA, 570 bp, Pseudomonas syringae pv. actinidiae ICMP 19097; identical to SEQ ID NO: 87165

SEQ ID NO: 87200 - DNA, 1269 bp, Pseudomonas syringae pv. actinidiae ICMP 19097; identical to SEQ ID NO: 87176

SEQ ID NO: 87201 - DNA, 645 bp, Pseudomonas syringae pv. actinidiae ICMP 19097; identical to SEQ ID NO: 87177

SEQ ID NO: 87202 - DNA, 1359 bp, Pseudomonas syringae pv. actinidiae ICMP 19094; identical to SEQ ID NO: 87174

SEQ ID NO: 87203 - DNA, 651 bp, Pseudomonas syringae pv. actinidiae ICMP 19094; identical to SEQ ID NO: 87175

SEQ ID NO: 87204 - DNA, 1359 bp, Pseudomonas syringae pv. actinidiae ICMP 19095; identical to SEQ ID NO: 87174

SEQ ID NO: 87205 - DNA, 651 bp, Pseudomonas syringae pv. actinidiae ICMP 19095; identical to SEQ ID NO: 87175

SEQ ID NO: 87206 - DNA, 1359 bp, Pseudomonas syringae pv. actinidiae ICMP 18883; identical to SEQ ID NO: 87174

SEQ ID NO: 87207 - DNA, 651 bp, Pseudomonas syringae pv. actinidiae ICMP 18883; identical to SEQ ID NO: 87175

SEQ ID NO: 87208 - DNA, 1359 bp, Pseudomonas syringae pv. actinidiae ICMP 19099; identical to SEQ ID NO: 87174

SEQ ID NO: 87209 - DNA, 651 bp, Pseudomonas syringae pv. actinidiae ICMP 19099; identical to SEQ ID NO: 87175

SEQ ID NO: 87210 - DNA, 1359 bp, Pseudomonas syringae pv. actinidiae ICMP 19100; identical to SEQ ID NO: 87174

SEQ ID NO: 87211 - DNA, 651 bp, Pseudomonas syringae pv. actinidiae ICMP 19100; identical to SEQ ID NO: 87175

SEQ ID NO: 87212 - DNA, 1356 bp, Pseudomonas syringae pv. actinidiae ICMP 19102; identical to SEQ ID NO: 86084

SEQ ID NO: 87213 - DNA, 570 bp, Pseudomonas syringae pv. actinidiae ICMP 19102; identical to SEQ ID NO: 87171

SEQ ID NO: 87214 - DNA, 555 bp, Pseudomonas syringae pv. actinidiae ICMP 19102; identical to SEQ ID NO: 87172

SEQ ID NO: 87215 - DNA, 645 bp, Pseudomonas syringae pv. actinidiae ICMP 19102; identical to SEQ ID NO: 86083

SEQ ID NO: 87216 - DNA, 1356 bp, Pseudomonas syringae pv. actinidiae ICMP 19104; identical to SEQ ID NO: 86084

SEQ ID NO: 87217 - DNA, 588 bp, Pseudomonas syringae pv. actinidiae ICMP 19104; identical to SEQ ID NO: 87193

SEQ ID NO: 87218 - DNA, 555 bp, Pseudomonas syringae pv. actinidiae ICMP 19104; identical to SEQ ID NO: 87172

SEQ ID NO: 87219 - DNA, 645 bp, Pseudomonas syringae pv. actinidiae ICMP 19104; identical to SEQ ID NO: 86083

SEQ ID NO: 87220 - DNA, 447 bp, Pseudomonas syringae pv. actinidiae ICMP 19072; identical to SEQ ID NO: 87162

SEQ ID NO: 87221 - DNA, 645 bp, Pseudomonas syringae pv. actinidiae ICMP 19072; identical to SEQ ID NO: 87163

SEQ ID NO: 87222 - DNA, 1356 bp, Pseudomonas syringae pv. actinidiae ICMP 19072; identical to SEQ ID NO: 87164

SEQ ID NO: 87223 - DNA, 588 bp, Pseudomonas syringae pv. actinidiae ICMP 19072
ttggaggagcagtacggattgtgttgctatagcgaaattcgacctgaccgggttggcctgagtttccatatagagcacgtcgaaaacaagagccaacaccctcagcgtacgtttgactacaataacctcgctgcctgcgcgctggacagtcagagcgatctggaagtgttgaaaatacaaggcgctgaggtatttggtgggcacgcgtcaggtaagtcgaaaggggtcgacatggctcgcttcgtctcgtgtcacatgcccgactgttcgcgcttcttcgcctatttgtctgacggccgtgtagtgcctgctgacggattgtcactggatgaagttgaccgagctgaatacaccatcgacctgctaaaccttaacagcccttatctccaggacttgcgacaatcctggtgggatgagttggaagggctttttgaagatcatgttgatcaagatatgagtctgcattgtctggcggggattgatctcatccctgtgggtgcgagtttaagtcagtttttcagtattacccggaattttttcggaggtatcgctgaagaaatccttgatcaagaggctggtcgctggtaa

SEQ ID NO: 87224 - DNA, 1326 bp, Pseudomonas syringae pv. actinidiae ICMP 18804
atgaacctgaccaggctttgccttaaaaactaccgtcgctttgccgagtttgatatcgaattcgatccacggttgacggtaatttccgcgcgcaacgggcaaggcaagacgtcggttcttgaagccatcgttgcggctctaggccccttcgtcggctcgttcgatcagggcgcgtccaggcatatcgagcgcactgatgcccgttatgcgcgagtaggtgaaggttttgaaagcgagcagcaatttccagtggtcatcagcgcagaaatgtccaaccctgcgaagcgttggcaacgagcgcttaacggtcccaaaagccggacaaccaccaaagaagccgaaccgctggcagcgtggggaaaagaacttcagttactgctgcgcaacgattcggcgatttcattgcccgttgtgcgctattacagctcaaggcgcctgtgggtcagtcataaaaacgtctccagcaaagcgatcctgactgaaagccgcacggcaggttacgaagattgtctgtccgcgttctctacttatgtgcagttacaggagtggatgaggaaggcgactctggccgtcattcagcaaaaacagcaggtcggttacgagcattcaaatcttgagccacgtttgcagggcatcagaaatgcggtgaacgaggtgatggcggaggaaggctggagcgacttccattacagcctgacgtttgaagagctgtccatgtttcatactgaccactctgcgctgccactgggcctactcagtgacggtgtgcgcgccatgattacgctggtcgctgatctggcattgcgttgctctcgcttgaatggccacctcaaggaacaggcctcactacagacaacaggcatcgtattgattgatgaagtcgatttgcacttgcatccggcctggcaacaacgtgtggttgccagtcttcgtaaagcgttcccgaacatccagttcattgtcagcacgcacagcccgcaggtactctcgacggtaaaacgcgaatgcatacgcatggtatttcaggacgccgatgaaaactggcaagctgcatgcccgccacaggaggtcaaaggcgttgaaagcgccattgcgcttaacgacatcatgggcgtgaaccccattcctccggtagatgaagcactttgggtagccgaatacactgcaaaaatcgaaaatggctcccatgaagatcacaacggcctggctctgcgcaaaaagcttctcgatttttatggagcacagcatcaggtgattctggacgctgacaggctgatccgttttcagacgttcaaattgcaaaaacactcgaacaccaagggctga

SEQ ID NO: 87225 - DNA, 681 bp, Pseudomonas syringae pv. actinidiae ICMP 18804
gtgctcaaactggatcgcacctctgtggatgctcctccctgcctcgccgactacaatcatccgacccatgagtggtcagactttcgcgggacctgcaagaaacagctgcgctttgcgctcgtacagctacaaggtatcgacggtgtcactacagaagacgccgccgagtacggcgtgcgatgtgcttattgcgagggggccatttttcatgaaggccatatcgagcattttcggcgcaagaatccggatcactttccggaactgacattttcctggagcaacctttttctcgcctgtggcagtatccaacattgcggccaccacaaggatcgacgctcggctcctgactacgacccaagccttctcatcaaacccgacgaacatgatcctgagcattacctgtatttccattcttctggaaaggtgctcgcccgtaacaacctgagtgatcacgaaaatagctgcgccaccgagaccattcgcgtgtttggtctcgacaatccagcgcttgagggcgctcgggcaaacgcagtgcgcagctaccgcaagatgcacgatgcggatctgtccgagatcgcttcgtggtcagacgctgagcgtgacgcgtatttccggggggagatcgaagccacccgctggctcccctacgctacgacgatcagacacttcttgcagaagtga

SEQ ID NO: 87226 - DNA, 1359 bp, Pseudomonas syringae pv. actinidiae ICMP 18804; identical to SEQ ID NO: 87174

SEQ ID NO: 87227 - DNA, 651 bp, Pseudomonas syringae pv. actinidiae ICMP 18804; identical to SEQ ID NO: 87175

SEQ ID NO: 87228 - DNA, 1269 bp, Pseudomonas syringae pv. actinidiae ICMP 18886; identical to SEQ ID NO: 87176

SEQ ID NO: 87229 - DNA, 645 bp, Pseudomonas syringae pv. actinidiae ICMP 18886; identical to SEQ ID NO: 87177

SEQ ID NO: 87230 - DNA, 1356 bp, Pseudomonas syringae pv. actinidiae ICMP 18886; identical to SEQ ID NO: 87164

SEQ ID NO: 87231 - DNA, 588 bp, Pseudomonas syringae pv. actinidiae ICMP 18886; identical to SEQ ID NO: 87223

SEQ ID NO: 87232 - DNA, 1269 bp, Pseudomonas syringae pv. actinidiae ICMP 18801; identical to SEQ ID NO: 87176

SEQ ID NO: 87233 - DNA, 645 bp, Pseudomonas syringae pv. actinidiae ICMP 18801; identical to SEQ ID NO: 87177

SEQ ID NO: 87234 - DNA, 1356 bp, Pseudomonas syringae pv. actinidiae ICMP 18801; identical to SEQ ID NO: 87164

SEQ ID NO: 87235 - DNA, 588 bp, Pseudomonas syringae pv. actinidiae ICMP 18801; identical to SEQ ID NO: 87223

SEQ ID NO: 87236 - DNA, 1716 bp, Sphingobacterium paucimobilis HER1398
atgctaaatgtaaatatcgtacaaaatgaagtatataacttgcttgttaggcattggcaaattgatccttcgtttagattcacttttcgtaaaagtaatagaggaagccgtttagataaggggtattggttctatgggaatgaatggtatttagcggtttccttctggacaggaatggattggaaaaataaaacaccaaatattatttttgtaattcttttagactctggaaagacttaccttgagattaatacttccgactctgatgaaaaaagacggtttataactaatttttttgtaaatgaattaggacttatgccaaatgggatacgataccaaaaaagctaccaggacaattacttagtaagtttagaaaatttcatccaaaccgataagataataattgacaatataataacagaaaatgctaaatccttcttctctaaaattaatgatggtatatattttatagaagcagtagattttgaaggacaaaaagaaaaaatcgatagatatagagagaataatcttatacacgcttcagttgacactcagaaaccgataaaaatatgtacgatagaaattcttaactatggtcctattaagaatatccacataagtgaaatccccttttcctctcaatggatatttttcacgggagaaaacggtactgggaaaacttctattcttcgagccatcgcgacagcaatttgtaatcaaaaaatacatgcaagtaaatctgaaagtgaaaatgctaaaatcactatagaactatcttcatcaactttaaatataactagttacacatacccatataaccgaatcatagaagaaagtgcttttccattaactaaggggtttgcagcttatggacaatccagattaaaaaccactcatggattagattcaaaaagcttaaaatctatttccacagaattaacatcatcactatttaatgatgagaccgccttgatagatttacaatatcaattcgatgtttggaatagtcagcaaaatagtcaatttagtaaacgaaaaaattatataactgagattcttacggacatattgccaaatctatatgatattaaatttgatgatcaaatcgaagataaagcagtaactacatatattgaaaaagaccacgacggtgctgaatttactaaagtaacattcaataaattagcatctggactgaaaagtatgattgctatgataggcgatattctaataagattatacaatcaacagccagatataaatgatccttctgagttcactggaattgttttgattgatgaaatcgacatacacctacacccaaaattgcagaaacaaattgtccagcaacttagtaagacatttccaaaagttcaatttattgcttctacacatagtcctatttctttcttaggagctccaaagaacagccaaatctatagagtagaacgaaattccgttgaaggagtcaaaattaaaaggttggatgaactattagaattgggagatcttttaccaaataccatattaacgtcaccaatttttggatttgacgatattgtaccagaaagtcatgatcaaaaaagactgataagaacagagacaacttattcagatatagaactcaatgatattgttcaaaaacgaatactatcttttcttactgacgaaaaagagcagcaattgattgatttatttaaatctagacgacaatga

SEQ ID NO: 87237 - DNA, 906 bp, Sphingobacterium paucimobilis HER1398
atgagatttgtggtaaaaagagaagaagataaaacagatcgtttagcatcaaatgaaacataccaagcattgttagcaataacaaatactcttgataaaaatttaattacggatactatttatagagaagcatatgatcatcctgatgggaaaaggtctagagtggaggatcgtctctctttagcctaccataataaatgtgcctattgcgaaagaatctgtaaggcagatatcgaacattatagaccaaaaaaagcagtaaatgaagacggttcgcatccaggatattattggctttgctatgaatggacaaacctcataccatcttgcataacgtgtaatagagaaggggcaaaacacaataaatttccggtgataggtcatcgagtctcagcgccaatgttattggcagatggaaatatagatcttgcattatccaaagctggtgtaactccgctagttgatgaaagaccttatttgttacatcctgaagtggatcatccggaggattattttgaatttgaaatagacccagatggtgaaggaattagaattattggaattgatggtgaaggtagaggaaatgccactatacagatttgcttattaaatcgtcttgagttaaaattggatcgagtagaacgagttattaatgattttaaagatgcgataaatgctctttttcttaaactagaaaatgggaacattaatgatggtcaattagcagatcgtatcagcgaacatatagacttattacatgaacgtagtcttcaagaaaataggaatcatacatatcttagtaaatatattgtagcttcggcagaaaattttgaaaagatagtgctcccatttttagacctcaaaataagacacatacttatagaagctttcaaatcaacaaattaa

SEQ ID NO: 87238 - DNA, 1119 bp, Megasphaera sp. NM10
atgaatcaacattttatcacgcaaatacatattgataaagtacggcacttacagaatatcactatcccattatcagaaacgacttgcaaacacttgattctgaccgggaaaaatggcagtggtaaaaccagtgtcatggaatcgttgaaggcatatttgtctatatatacagaagatagtgatactgttgatatagcccaaggcgttactgctcagtttaacgacaaggaaagtatgcagtccaaggtatacacgggcgaatacatttttgcctattatgaagcggaacgaggatatacagcacataacgagaaaaatgtatctaaagtggatttaaaggaaaggtatactatccaggaacatccagggcaggagttcgtaaaatacattttgaatttgaaaacagtaggggccatggcggaagttggtgggaaaaaagaaagagctgaagaaatcaaagaatggtttcaacgatttgaccacgttttacaaatcatatttgatgcgccgcaagctcatctggactttgatattgaaacctttgagttccatatcgtcgtacctggcagagaaccgtttacctttgacactctttccagtggctatgcagccgttttagatatcgtcgtcgatttgatgatgcgaatggaaaagaaagcgggcaaacgttatgatttggaaggcgtcgtcttgattgatgaaatcgaagcacatctgcatttagagctacagaaaaaaattatgccgatattgacaggcattttccccaatattcagttcatcgtgacgacacactctccgttcattttgaattctatcgagaatacagttatttatgatttggcaaatcatatgctagttaatactccagaaggcctttcaaatattccttatgatggaattgtagaaggctatttcaaggcttcggtactttctgatgagctacagaaaaaatatgaaagatataaacaactggcttgcaaacaggaactaaccgatgatgattatgaagaaattgctaatttggaatattatcttgatgaaattcctgactatcttgggttagattttatggcagattataaaaagctcaaattggaattatcgcagaaggagtaa

SEQ ID NO: 87239 - DNA, 657 bp, Megasphaera sp. NM10
atggtaaaatgtgataaatctccggtggcaccagcttctttaaaagttgaaaaattgaagggtgaaaacggctcgtatcgtggagaagatgtcgtagaacaattgaagactgattttcatgataaatgctatatttgcgaactgaaagggttacaagaccctgaaatcgagcacttggtcccgcataaaggaaatcttgatttgaaatttgattggaataaccttttctggagttgtggtcattgcaatagcatcaagaatcaaagaaaatatgaaggcaagatcattaactgttgccaggaagatccagaattgcatattcaatttctttatactaacgataatatagatgtcaagcctttagatgaccacgaagaaacgcaaatgacagctaaactagttgatgaagtgtttaatctaagaaataccggaatgagggttatcaagtcagcccagcgaatgaaagccttacagcgagaaatgaatatatttttcaatgaattgaaacgttaccaagaacataaatcggaaactaataaacgaagagtggttgtccgattgaaacgaagcgctgcgtttgcagctttcaaacgctcgtatattagaaataaagatgaatatgccgaatttcaagaatatgtaagccttataaaatag

SEQ ID NO: 87240 - DNA, 1608 bp, Megasphaera sp. BL7
atgatttttgttccaatgaaaagtgaggtaggttctatgtatctcaaaagatttaagttaaaaaattttcgtggttataaagaggctgtagaaattaattttgatgatttgactgcttttgttggaaaaaatgatagtggaaaatcaactatattggaagcattagatatattttttaatgagaataagggaaccgttaaattagataaagatgatttaaatatagactgtaaagatgctggcgacgttgatattatgatgacagcatatttttctgggttgccagattcaattattattgatgaaagtaatcctactagtttgcaagatgaatacttattgaataaaaataatgaattagagataaaaaaggtttttcataacgcctcatcttcttgcaaaacatatattatagctaatcatcctcaaaattcagaatgtaatgatttgctttgtctaaaaaatggtgacttaaagaaaaagataaaaggtcttgggattgatagtgatattgatttaacgaaaaatgcagaaatacgccaagcaatatggaaatattaccgggataaattgcagttagctgagagtaaaattgatatttcaaaagaagatgctaagaaatactggaataagatttcaacataccttccgatttatagcctatttcaatcagataggaataattctgattcagatgatgaaattcaagatccattaaaaaatgctgttaaagaaattattagttcaaatgttttacaagaggagttcgaagaggtagcagcgcaggttttggataaattaaatgaagtagcctcacgtactttggaaaaattaaaagagatggatgaagaaactgctaaaacgttgaaaccatctattccagatgtaaaacaactaaaatgggcagatgtctttaaaaatgtatctattgctggtgacgaaggaattcctattaataaacggggcagtggagtgcgtagattgatactcttaaatttcttcagagcagaagcagaaagaaaactagaagaacaaaatgaaaataattcaacggctagcattatttatgccatagaagagccggaaacctcacaacatttttcgaatcaagtaaagcttgtcgaagcatttaaaaccctggcttccctaaataatgttcaagttatcatgacaacacatagtggcactattgttaaaaaacttgattttaacgatttgcgtcttattgataatgaaggaattgataaagggacggctgttaaaacgattagacctaattgtttaccttatccttcattgaatgaggtgaattatattgcttttaatcaaattactgaagaatatcataatgaactttatggttatttagagtcaaataatttgttaaatgaatacaaaaaaggtaaaagaacaagaaaatatatacaaatatgtagaaataatgaacttaaagaaacagataaaattttaactgaatatatccgacaccaaattcatcatccagaaaatgataaaaacgaaccttataagccagaagaattagaagaatcaatcgaaatgatgagaaattttatacaaaaacaagataacataatggatgatatgtaa

SEQ ID NO: 87241 - DNA, 657 bp, Megasphaera sp. BL7; identical to SEQ ID NO: 87239

SEQ ID NO: 87242 - DNA, 1119 bp, Megasphaera sp. BL7; identical to SEQ ID NO: 87238

SEQ ID NO: 87243 - DNA, 657 bp, Megasphaera sp. BL7; identical to SEQ ID NO: 87239

SEQ ID NO: 87244 - DNA, 1626 bp, Vibrio fluvialis PG41
atgcctagtaacccaaatcggcagattaataaaatagtatcgaaatcggagtctggtagctttgcggcttctgcgcagttagtgcagatatactctgagggcatgatgggggcacctgtcgatgtcgaaaaggttcactactatcgtataaaatgtgccgagcagctaactagtgcaaacctaagattggcttcattaaaattaatgggctaccgtgggtttgagtccttagatattcctttcagtcaaaaatcaaatgttactgtgcttgttggtaacaatggtagtggtaagtctagtgtactagatgccattcaaaaatctcttacacactttgtttcgcgtttatctacaagatcttacaatggcgatcagttagatgagttcgatatttccaatggtgcaacttttgcgacagtcattcctgagtttaaggttgcggaaactagttttagtttcgaactatctcagagtcgtccaatgatagagcctaggaaaaaaagtaagtttacggagttaaatgaaattggaaatttgtaccgccttgcgaatactgaaaaaaaagagctttcactccctctgttagctagttataccgtagaaagggctaatgatgttacgaccaaggatattgaagaatctgacgaaatactgagcagtcatacttgggacaaatctaaagcttatagtaaaagcttaacagggaaggctgacttcaaactgttctttcgttggtttaaagagcaagttgagtctgagaatgatgaaagtagtgacattaaagttattaaagcgcagatagaatcgaaagaaagtgaaattaacagttctttaatgaagtctattttgtctaaccctgaaactgtcgaaactggtgaaatattgatcaagcagtacaaggatcagattaatgagcttcaagaacagctgaatgagaaatctaacgttggaaataaatcgttagatagtgtgagaaacgcaatttataaattccttcctggtttttctgatctcaagctgaaaagagctccattggatatggtcgttaaaaaagatggtcaagagtttagcgtattacaattgtctcaaggtgaaaaaagcgttcttgcgctaatcgcagatatagcgagaagactgactatgttgaatccgtcattagcgaacccacttgaaggtagtggtttggtgttgattgatgaagtagatctccatctccatccttcgtggcagcagaagattatgcaaaggctagaaagtacttttcctaatttgcagttcatagttacgacccacagcccacaagtctgtcatacactagacagtgacaatatatggttactgaaagatggtaagaagtttaatgctcctaaaggtgttagaggagcggtgtcctcgtgggtattgaaaaacctcttttatgtagaagaacgccctcctgaagatgagattactcaacttttcaataagtacaaagagttggtatacgctgatcaatatgatagtgcggaagctctaaaagcaagagaagtactgatagataattttgggaaagactatgacgaaattgttgagttagacctgtatatcgaaaacaaagagtgggagaaagagtttgaggaggattaa

SEQ ID NO: 87245 - DNA, 774 bp, Vibrio fluvialis PG41
ttgaggaggattaacaaatctaccgaaagcaacgttctcacagaatatgccgcggagttcccagactctaattgggatgaatttaggcaacataataacggagaatcttacgcaactataaagactaagattttttcggagcagtatgagatttgcgcatattgtgaagtgggcttgaaaggtgagcctaaccacaataagagaatagaacactttgtgtccaagtccgacatttcctcgtccagcaatgttcatttagattggtttaatcttattggagtttgtttaggggggactgattataaaaatcgtgaagaatatgagttgcctgaaaacttaagttgcgattcgcataaagcgcatatagaggagttggaatcgatagttgataaagattggaatggtaaagttctatctcctttaagtattcttcaggatcatgggttgtttgattttgataaagttacaggtaatctgacaccgaatttacaagcatgtaacgagcaagttatagaaggcaatgtgcatgagacgacacttttgcttgttgaggaaacaataagagtttttaacttgaattgtgaaaggctaagcgcagctcgcttaaaattatttcgccagcttcaaaataaaataaaaacagctaggaaaactggcgatatggggattatcgagagatttgtcgctagctggaaacgagatttccctctcttttttcagactagtagagatgcaatactactcgacaataaaatcacctctaggtttttatga

SEQ ID NO: 87246 - DNA, 1266 bp, Sorangium cellulosum So0157-2
ttggagctcgcgccccggctcaacctcatcaccggcgacaacggcctcggcaagagcttcctgctcgacgtcgcatggtgggccctcacgcggaagtggccgcaggacctcaacgagaacctgacctcgggctacgtcgcgcggcccaccgacgtcggccagaaggccacgatcaagttctccgtcgagagcaagacgggccgtgtcgagtatgagagctcctacgtgcccgcagatcagtcgtggcgcggcaaggccggacgcccgtggaacccagggcttgtcgtctacgcgctcgccgacggcggcttcgccgtgtgggacccggcgcggaactactggaggaagaagggcaacatcgacgtgcaggagcggctgcccgcctacgtcttcagctcgaagcaggtctgggacggtctgccggtgctcgtcgacggcaagacgacgaaggtcagcaacggactggtcgccgactgggcgtcgtggatccgcgaaggcaaggccgacgcgaagcgcatggcggccgtactcgcgattctcgcgccgacgtcgggcgacgacggtctgcaggtcggcgacacgttcgcgcggctgtcggtcaacgacgcacgcgacatccccacggtgcgcatggcgtacgggcaggacgttccgattctctacgcatcgctcggtgtccgccgcatcgccgccctcgcctacatgctctcgtgggcgtggcgcgagcacctcatcgcgtcgcagcagctcggacagcagccgtcatcccgcatcgtggtgctgttcgacgagatcgaggcccacctccacccgcgctggcagcgcgccgtcgtgcccgcgctcctcaaggtggtgcagacgctgacggccgatgccggcgcatcggtccagctcatcgccgcgacgcactcgccgctggtgctcgcgtcggtggagccgctgttcgacgtcgagaaggacaagctcttcgtcctcgacatcgaggaccatgtcgtcacccttcgcgagaagccatgggcaatgcagggggacgtcatcaactggcttgtctccgagagcttcgggcttcagcaggcacgctcgatcgaagccgagaaggctgtcgaggctgcggaggcatggatgcgtggggacaccgccgcgcttccgccggacctctcgacgaaggaagcgatccatgccgagctcgcgcgagtccttgcggggcacgaccccttctggccgcgctgggtcgtgaagttcgagaaggcgggagggcgcccgtga

SEQ ID NO: 87247 - DNA, 570 bp, Sorangium cellulosum So0157-2
gtgattcgctttgaacgacgccccaagccggagggcttcgaggaacgcgtcgaggggcccggtgctgcgtggctcaaggccaacgcgaccgggcgcccgccggcgcactggcgcgagtttcgcccacagctcgccgacgcgttcggatcgctgtgcgcgtattgcgcgatgttcgagccggttggcaccgtggaccacttcgtcagcgtcgatgaggacaggagcaagtcctatgactggacgaactacaggttctcctcaggctggatcaactcgagcaagcagtcgctcaggtcgacgcaggtcatcgatccgttcgcggtgaccaacgagtggttcgaggttcagttgccgtcgatgcagctcgtcctcaccgaccacgttccacccgaggaacgtgaacgcgcgcagttcgtgctcgaccgcctgcatctcgggcatgacgagcgcgtcgttcggcaacgtcgtgagtggtaccgcatgtaccaggatggcgagctcgacctcatcgggctcagaaaaaaggcaccgctcatcgcggcggccgtcaagaagcaggagatcgcctga

SEQ ID NO: 87248 - DNA, 1416 bp, Sorangium cellulosum So0157-2
gtgtacctccgcgagatccacatccggaacctcaagctgctccgcgatttgaggctgtcgttcgcctcctcctccggcgaaccgcggatgtggaccgtcatcgtgggcgagaacggcctgtgcaagacctccatcctgcaggccatcgcgctcgcggccagcggtcccgaccgggccaaccagctcgccgacatcccgtcgctgccggaccggcggcacccggacgagcccctcgacatcgcggccagctttgcgttcgggcccctgcccgaagggcgctcgcgcacatacccgggatggggtgacaagctgggccagccgccgaagttcctgcggagccggctcagcctggcgcccggatggaaggtcttcgtgggctcgtccgactacggggatccctctgcgcatccacgggaacacctcgagccggcgcgcagcgccgacccgggccccctgcgcgaagcccgcgccatcggcgcgccgtggtggttcgtggccgggtacggcgtcaaccggcgcctgcccaagccgcatggcgccgcgcgcccggacgatccgacgctgagccggctcgactcgctgttcgacggcgccccgatcctcggcaccgggttcgccgacatcctccaggacctcggcatcgaaccttcccgctacgccgagatgctttccgacgccctctttcgccgctcccgcctgcttccgcgcgtgcgcgggctggagctccggcgccgcggcgcggtgaagagcgccgccgatctcgtggaagcgcaccgcttcgagctgcgctcgggctcctccacgttcacgttgcccgcgacgtggctgtcccatggctaccaggggctgatctcctggatcgcggacctcatcggccaaatcgtggccgatactcagatgctggccgataagtcgaagtacggcaccctcgtggatcccgcggagaagagcggcctcgtgctcatcgacgagatcgacctccacctgcacccgagctggcaggccgagctggtgccgaagttgaagaaggtcttcccgcggatgcagttcgtggtgaccacccactcacccctggtcctccccggcttcgcgaaggacgagatcatccggctcggccgcaaccgggacggcgacgtgatcgcccggaagaccggcgagtcgcccgcgctcatgaccggcagcgagctgtacgaggagttcttcgggatcgatcgcctctatccgaccgacctcggcgaggccgcgcagcggtacggcctgctcgcgaacgaccccggccggtcggacgcggaggagcaggagatggtcgcgctgcgggagaagctccgcgccgccgacgtcgagcccgagtgggagcccgtgtcccgaacgagggtgagcgagaagcggccagcgaggaaggcgcgaggccggtga

SEQ ID NO: 87249 - DNA, 807 bp, Sorangium cellulosum So0157-2
gtgatccgcgtcaaccgaggcgcgaagccggaagggctggaggccatccgcaaggcggaggtgaagcggctcgcggccatcgttcggggcgcgcccccgaaggcggcggacttcggcaacaggtacgacatcgctcgccgcgtcctctggaaagcgcagggacagacgtgctgctactgcgagcgccgcatcgaccgcctctacaacgacgtcgagcacttccggccgaagacccgcgcccaccgcggcggggatcgccccacgcacggctactggtggctggcgtggacgtgggagaatctcctcttcgcctgccccagctgcaatcgaaggcacaagaagaacaaattccccctcgtccgggggagccgcatcctgccggtggggcacagcccaccggggcccgagcgagccctcctcgtcgatcctgcaggcagtgacgatccgatggatcacatccagttcgtgccgctccaccaggcggggaagaagaggaagtggatccccgtggctcggggcgggagtcgcagggggaagaggacgatccaggtcctcaagctcgatcgccccgcgctcgtgacccacgacggaggtcacgtgtccgacctcgtcgaccaccacgtgaaagggattcgggcggccatcgacgcaggagacgtccaggccgccgcgaaggtctggcaagccgccctgaagaagctgttttatccgcgtcaggcgttcaaggccttgtcctatgacgttctggaccatcactttccgctggggacccggcagcagtggggcctcgagccctaccgtccctga

SEQ ID NO: 87250 - DNA, 1152 bp, Sorangium cellulosum So0157-2
gtgcgagccggcagcgcgaaggccgtgattcgcctccgagctcacgatgacgaagatgacctcacgacgctcgccctggagccgtccccaggcggcgaggtcctccggcgacggaccttcaccgaagcggccatgcccttcattgtggcctacggctcccgccgcggctccggcctcctcgactccggacgcagcgccgagcccacgcccctggcggccgtcgaaaccctgttcgacgagggcgctagcctgatgcagccggattcatggcttattcggtggcagcttgctgcgctgcaaggcggcaagggctcgcgagaggcgcgcttcttcgatgcgatcctctccacgctgtgcgagctgcttccggacgtgaaggcggttcacgtgagcgccaagggggtcgagattgagggccccacactcggccgggtgccgctcggagcgctgagcgacggctaccggacgaccatgggctggatcctcgacatggtggcgcgctgggtcgaggaggcgcggcgacgcaatctccaggtcgatggtgattttcacgagaagatggccggcgttgccgtgatcgacgagatcgatctgcaccttcatcctcggtggcagcgcgacgtgatctcgatggtacgcggacacttcccgcggatgagcttcgtggtcaccacacacaacccgctgacgcttctcggcgcgcggccgggagagatctacgtgctgcgacggggtgcgcgaggcggcgtggagatcctccagcgggacctcccgcccggtgcgggcgccgagcggatcctcacgggcgagtggttcggcctcccgtcgacgctggacgacgagacgctggacatgctcgccgagcaccagcggctcatccgcgacagcggcttggacgcacccgaggcggtgaagctcgaagaggagctgcggcggcggctcgggtctttcgcggatacgccggtggagcggctggcgcacgaagcgatggcggagcatgtcgagaaggatctgcgcgagctgacgcccgaggagcggaagcaggctcgggcgaaggtcgcgcagatccttgatgaaaagccgggtccggtgaagccggcgccggtgaagagcaagccaaaggcgaaacgacccaagcaatctgcgggttga

SEQ ID NO: 87251 - DNA, 828 bp, Sorangium cellulosum So0157-2
gtggcgcgcgcgatcgccgcggggcaggcgccggaattccctccgttgtggcgcaaggaggagtacaaacgcgcgttcgtcgccgcgcagcacggcaaatgtggctactgcgagacgtacgcgctgaaccaccctcccgccatcgaacactacgcgccgaaaggtgagctcgaggacctggccaacgatggaatggaagcggacgggctctacggcgtccgggagcgtgacgcgcgacagatcagcgcgaccggctaccactggcttgcctatgaatggaaaaactggttgcttgcgtgcgagcgctgcaacacgggctggaagcggtcgctctttccggtgcgagagcgtccgcacccttgcccgccgacgccggaccagccctatacgccgctgctactgagcccgttcggcgtggaagatcccgtcgagcacctggagttcagcgtgcttggcaatgtcatcgcccgtcatgggagcgagcatggggaggcgacgatacgtacgctcgggttttctcgccgtgaatcgctgcgcaagattcggcatggcttcgcggaggacgcaacccggcacgcgagagggctcgagcaggcactcgccgacgacaagctcgatcgtgcacagattcacgctgaagcattgatctcgctcggtggtgaggagcgcttgcatgcaggcatggtgcggagcatcgtcctgtccaagctcggcctgcgctggtccgagatggaggagctggcggagaagatcgccgcgaagtcgcttcctcacgccaaggatccgagcctcggtacggacaacaggaaacgggggcggaagagatag

SEQ ID NO: 87252 - DNA, 1341 bp, Sorangium cellulosum So0157-2
atgctgcgatcgctgcacctggaaggcgtggggccggccgatcggctcgacctggagctcggcgagcggctcaacgtgctcacgggagacaacgggctcggcaagagcttcgtgctcgaggtcgcatggtgggcgctcaccggtacgtggacggatcggccggtgctgccgcagcccggcaaggaggagggcgcgcggatcgcgggcgaggccgagccgggtaccacgcgccatcagttcgaaggcaagtacgatcgactggctcagcagtggagcgacaggttcgagcgccacatgggccgcagctggaccgataccccttccggggcggtcatctcttcgtgggtacgcggcctggtcccggtgctccacgtccgtacgaacggcgcatgctccgtctgggatccctgtcgaaatattccctcgttgggcagcgctctgtaccggctgtcgtcgtcaccttcgcccgatccccagccctatctcttcgaggagagacagctctgggacgggctcgttcacgagggcaggcccgtctgcaacgggctcgtccaggactgggtgacatggcagctcgaggcggcggacggcgatgaggcccacccgttccagctcctctgccgcgtgctgcagcagctctcccaccccgaggagacgatgacgcccggcaagccggtgcggctctacctcgacgacgtgcgcaagttcccgaccatcgagctgccctacggcacgatccccatcgtccacgcgtcggccgggatgaagcggatcctcgcgctctcctacctcgtcgcatggtcctggtcggagcacatgcaggcgtcgcgcctcatcggctggaagccctccgaccgcatcgtcctgctgatggaggagcccgagacgcacctgcacccgaagtggcaacgccacatcgtccccgcgctcctcggcgccctgagcgggctctctccctcgatgcgcccgcaggtgctgctgacgacgcactcgcccctcgtgctcgcgtccatggaaccgcacttcaagccggccagggacaagctgttcgtgttcgagctcgacggcgccgatgtgaccgtgcgcgagctcccctgggcgaagcgcggcgatgcgatcgggtggctcacctccccggtgttcggtctggagcaggcgcgctcgatcgaggcggagcgcgcagtggaggccgcagaggcgttcatgcgcggcgagaccggcgcgctgccggaggggctccggagcgaggacgcgatccatcgggagctcgtgcgcctcctgccagatcaggatcgcttctggccgcgatggatcgtgcgccgggagcgggcgggcgcatga

SEQ ID NO: 87253 - DNA, 669 bp, Sorangium cellulosum So0157-2
atggatcgtgcgccgggagcgggcgggcgcatgatcccgttcgagcgcgcgcccgagcccgcgggcttcgacgccagcgtccgacaacccggccagcggtggctcgccaagggcgacgccaggagcacgccggggtactggcgccgcgcggcgcgcgacctcagggccgccttcaaggatctgtgcggctacacggcgatgtggctctcgacgccagggacggtcgaccacttcgtctcgcgggatgaagaccccagcctcgcctacgcgtggaccaactttcggtacgccgcggcatggatcaacagcagcaagagcgcgctccgctccgatcaggtcctggatccgttcgaggtcggcgacggctggttcgagatcatcctgccgtcctgccagatggtgctgaccgaccgctgcccgccggaggtccgcgatcgcgcgcagacgatgctgaagcggctcaagctcggcgatggtgagagcgtcgtctcgttccggcaggagtggtaccggatgtactgcgagggagagctcagcctggagggcctcgcgcgcaaggcgcccctccttgcgcgcgcggtgcggaagcagcgggagcaagcagccgccgagccggcggcgagcgacggcgcaccgcgctccaggccagccgaagcctcgggcgcatga

SEQ ID NO: 87254 - DNA, 1272 bp, Sorangium cellulosum So0157-2
atgaagatcaccagcctctccctccgcgacttccggggcttcaggagcctcgacctggatttttcgccggacgtcaccgcgctcgtcggcgtcaacggcaccggcaagacctcgatcctcgacgcgctcgcgctcctgctgtcgtgcctcgtggagagcatccgttcgggaaagcccgaaaccgtcgcgccttacgcgagcgacgtccgggtcggagcgtcgacggcgcagctctcgctgaccgcggagatcggcgcgcagcccagccactggagcatcgcgaagacgctgccggggcacccacctggaccgccgagcgcgctggatgcgttgcgcgagcccgtcgcggtcgcgcagggcacgatcgcgctcggctcccctctcctcccgctcgtcgtctacttccccacgaaccggagcgcgctcgacatcccggagcggatccgcacgccccacgagttcgatgcgctgagcgcctacgacggcgcgctcgagggcggggcgagcaacttccgtggcttcttcgagtggtttcgtgaggaagaggacatcctcaacgagcagcaggtgctcgagatgatggacgatcagcaaggtctcgaagagtccgccgcgccgtcgccgctgccggccgtccgctgggcgatcgaggagctcctgccgggcgcgcgtagggtccgtatcgagcggcggccgcaacgcatgaccgtcgagctgaacggcacgcgcctcgacgtcgcccagctctcggacggcgagaagtgcctcctcgccatggcgggggacctcgcgcggcgcatggcactcgcagcgccgaaggtgcccaacccgctcgagcgccccgcggtcgtcctgatcgacgagatcgagctgcacctgcatccggggctccagcgggtcatcctgccgcggctccggaaggtcttcccgcgggcccagttcatcatcaccacccactctccccaggtgctctcctccttgcacgcggcgaacgtccgcgtcctggagcgcttcgagctccgaacactggaccgcggcacctggcgacgcgacacaaaccgcatcctggaggcggccttcggcgatccagggcggcctcccgaggtcgcggccaagctgaacctgctgcgcgacgccgtcgatgccgaccgctacgacgaggcgcgccagctcatccgtgagctgtccaccatgatcgagggggacgaccccgacgtcttcttctaccagcagctcctgccgcctgaagacaccaccgaggccgcttcgtga

SEQ ID NO: 87255 - DNA, 675 bp, Sorangium cellulosum So0157-2
gtgaggcacatcgtgaagggcgcggagccggcgacggtcacggagacgcgcacggcatcgacgaccgacctctccacgacgacgcgcgctcgcaccgcgttcgaccagatcgacaagggtcgcgtgcgcgccgacctcgcgcgcgagcagggctggctctgcgccttctgcatgcgccgtatcgaccctgacgccgccgacgcgcgtggcgagcgcacgatgaagatcgcccatcgcacgcccatcgacgtcgatccagcgcaggcactctcgtggcggaacctcctgggctcgtgcgacggtgggcagcgctccggatggcgaacgaggagctgcgacgccgcgcaggggtcgacggcgctgaccgtcgacccgaccgtgcacgcctcctgcattcagcttcggtacgagcgccgcgacgcccgcgaggggctcttcatcacatcggaccaccccggtctcaagaccgacgtcgagcagacactcggcctcaactcgggagacctccccgtgctgcgggagctggcgtggaaggccttttgcgctctccagcagaagcacgcgccgaagcagtacggccgccccgcgcgggtcgccttcttcccgacgtggatgaaacagcagggctcacggcttcccgagatgctcggcgtcatcgaggagcgcctccggtga

SEQ ID NO: 87256 - DNA, 741 bp, Acinetobacter baumannii BJAB0715
atgaaagaagcaattgtttcaatggctgcatttggtccaggaaatcaatttgtacagaaaaatgaaaagattgaaaagcaattttccgactttaaagatattctaaagcagatattacctgctgatcttggttttaaagacttaagtgtacggataccagacctagtattggaaacggaaaaaggagattttctattagatgcctcttctggaggaattatgtctattattgatctagcatggcagatttttctttattctcatgacaaagatgaatttgtcgtcactattgatgaaccagaaaatcatttacatccgtctatgcaacgttctctattgaatgattttgttaaagcatttcctaaagctcaatttattgtggtaacacatagcccgtttattgtttcttcaattcgtgaatctaacgtatatgctttaaaacatgaaaaaaataatgtaagcgatcaacaaagtggatgggcaaaaaaagttgtttcttataagttagatctgaatcaaaaagcagctactgcaagtgaaattttgcgtgatgttttaggtgtacccgtaacattgcctaaatgggctgatgatgagttacaaaaaatctgttcgacctttacagtccaagatattacaacagacggtttatctagattgagagctgagttaaataatgccggtttaggagagttctatccagaagcattaagtaatatcgtaggagagagtgggttatga

SEQ ID NO: 87257 - DNA, 669 bp, Acinetobacter baumannii BJAB0715
atgataaaaataattaaaaaacagaaacctgctgtgttaattaaaaatgccagtaaatggaagtcacaattacttgatgatattaaagcagaaaaaaaatcaacaaagtacctcttaacaagatatagtcatcctgagattaaagagacattaatcgaagagacacatggtaaatgtgcttattgtgaaagtaagcttttgcatattcatcatggtgatattgaaaatatttttcctaaagcactagatcaatccaagcgttatgaatggaataatttaactctttcatgtgaaatatgtaatcagaataaatctaatcatgatcctaatttgaatcatattttaaatccgtatattgataatcctgagagtagccttattttttttggtaccttcgcgcatggtatggataacaaaggtgaagcgacaagatttttattagagctaaatagaacagctttggtagagaggcggcaagaacgtctagataaaattagactgatagtgaaggagttaaataacacaggtttaccaatagtcgctagaaaagctatttatcaggacttaattgagaacgaggcttctcatgagagtgagtatacttctatggttaagctcgcgattaggtgttttgatgcaagtattccaactgaagtaaaagctgcataa

SEQ ID NO: 87258 - DNA, 1584 bp, Desulfovibrio sp. X2
atgcgcctggattggttctgggtcgaagatttcaaaaacctcaaggaggtcaccattgactttgatgaaaatcattgggtgactgtggttattgggtggaatggcacaggcaaatcaaatgtgctcgaagctcttgcgaccctgttccgtgacctcatcatgatccatgagttcaatggatcacgaatgccaaccttcaaatataagctcatttacaaatgccagaataacctgatcgccattgatgctgatccaaatagggctcagaatgcctatcgaatttcggtccgcggtctggcagaacaagtgcaatcaaatctcccactgagcacttcggaagacaagtttgaatctatttttgctcaagggaagacgctgccgttaactcaattcatcaaacatcaagaagaatatcttccacgaaatgtttttgggtactactctgggtatgcaggaagaatggaagaaatattccaaccctacctagagaaatatgataaggaattaagagcgggaaaagacccaggatttaaaagactgttttttgcacttcccattcatagtcaattcgtgcttttggcatttgtcctcaaacatgagcaaatgattaaggattttcttaataagcttcttttccttgaccctgttgatggtattgaatctgtcttgctcgttctaaaaaaaccaggatgggcaaatagcaaaagaaaaaatggagataatcgcttttggggagcggaaggagtcgtcaaagattttcttgcccgactctatgacatagctctcgcaccgatccgtatcacccgtgaaaagcaaataactctttggaacagaagccgaatagaattcctctacctctttgtaaaggacatgaatgcgcttcgaacgctcgtcggtgaccgtgagcccaggtcattattccgagacatcgaaagcacctttgtttctgaaatgattgaggaaataagaataaaaattcgtctacgagatggcaaaggaaaggtcactttccgggaactcagtgaaggtgaacaacaactccttactgttcttggtcttctctgttttacagctgaagatcaaagcctgttcctcctcgatgaaccagacacccaccttaatccaaggtggagcgccgattatcttgaacaccttaagaaatttgtcggcgcagatgatgaaggaaacgaaagtagccatatactatttacaacgcacaaccctctagccatagcagagttggtcaaggaacaggttcaaatcctcaagcgatcagagaccgatttggaaaccactgttcacaccccggctgaggatcccaggggcatggggtattctggaatcgtgaccagcgatatgtttgggctagacgctgctttggacagacatactctcaatctgcttgaaaatagaaggaagatatccttgaaagatagtcctctttcccctgatgaaaaggcagagcttgctaggatcgaaaaagaactcaggccttatggtttcaggcacgaagcccgcgatccgaagttccgtgattatttaaaagagcgatttgctgctaagtctgaggaggatgcggagtaa

SEQ ID NO: 87259 - DNA, 816 bp, Desulfovibrio sp. X2
atgcgctcaattgacatcagacgtcttcgtttgccagcagattggcaggataaagccgacaaggctcttgaagacgtgaaaacaggggtgtgcaagctaaaaaatagagctaatatctggtgtgaagcgaaagatagcttggcagaattgtctcatgacaagtgttggtattgtgaatcgaaacagattcgctcggacgatgcagttgaccattaccgccccaaaggcaatgtacaagatacagaacgagagcatccagggtactggtggctggcttttgataaacagaatcttcgctattcatgtaccttttgcaatagccgacgcaagaacccagcgactggtgagactgaagggaagggcgattactttccattaaaagacgaaaaaaaacgtgcatataatcctggtgacgaaaggaatgaggagccgttgttacttgatccttgtaactccgctgatccttctcttttagattatcgttcagatggtaaaccttgctgcaagtttcctgatgatcctgactgtgtccagcgtgttaaagcctctattaaattgtatcatcttgatcatgaaggaacggctgaagagagacgtctacttggagaagagatcaagagctggcttgaggaggctaatgaggcctacgaagataagaaaaatggtgatcgtcaagctgcacgaacatattccagccgtttccgagatatacagacaaagatgcggccagaagcagagtattctgtttttgcaaaaagatttattgcaagctttagacattatgaatgggtcgatgaactgtatgagacattgtaa

SEQ ID NO: 87260 - DNA, 1182 bp, Blautia hydrogenotrophica CAG:147
atgaagattgaatcattagtagttaatgggattggaggaattcatcatttggagttatcctttggcgatggtttaaacgtaatatgcggtgcaaatggtattggaaaaaccacaatattagacataatttctgatgcgtttagttctaacatttcgtcaaaattaaagagaaatgctttatatgaagtaggtaagtacaatattcaattaagtttgatcgaagatggaaaacgggttataaacaataaagaagaaaaagtggaaaaatttcaacctagtacagatacatatcgaggagggtggcgggaatattctaaagaccttctttattttggaataaatcgtaatattgattatatcaaacttaattcggttacatcagatccagagcgacaagaatatgttgttggacaaatggctgtaaatggtatacaagcaaatgatattaaaaattggtttgtaaatagatacctgtttgtagataaaaaagatagtttaagtcaagagcaaatcgaaaattatagacttgcagagaaaacttttagtgttttggatgatacggtcaactttaaaacagttatagcgagaacatatgatattatgttaaatactttaaagggagatatttattttgagtatctatcttcgggatataagagttgcatttatattattttcggcattataaaagagatagaatatagaaattctgaaaatcccattcaagcaagccagtttgatggagttgtgcttattgatgagattgatttgcatttgcaccctacctggcaagctgggcttataaaggccttaaaaacaattttcccatatgcgcaattcattttaactacacatagtcccagtattcttcaaactttagaaaaggatgaaattatagctttggggtgcgatgaagagggaaatacacatttaaaagagctaaatttggggaaatatggtttgcaaggttggacattggaagaaatattaaaatatgttatggaaatgcctgcaacaacttctcgattatatcaagaaacattagcaaaatttgatgaagcaatgaataatgaagatagagataaaattcttcaacaatatgaattgttaaaggaaatgttacatccggaaaatccattacgtaaattactagctattcaagtggcagaatgggaggagtga

SEQ ID NO: 87261 - DNA, 774 bp, Blautia hydrogenotrophica CAG:147
gtgataaaggtagaacgtatagaaaaaccagaagagttaacagtagatgtacaaaagcatttaacagaagaatttaaaaaggacaagaaaaaaagcgtatggaataaaaagtatatcagagataaacttttgaaagagtgtaataataaatgcgtgtattgtgagtgctttataggggaggggtacaaagaaatgcatgtagaccattttcattataaagataaatatgaagatgaagttgttgaatggaacaatttaaatccttcatgccctcactgtaataaaaacaaatcgtctcatgatacatatgaagaaccaattatcaatccttttgagcagaatccacaagagtatttctatttaaaaaattatcgatattatagtaggaatgataaggtagaaaaaatagttcgtgatacaatagatgtattaggtttaaatgatacagaggatgttgtcaagttcaggtttgagcaaggagaggcaataatagagaaaatccgggagatttatgagctggcaaatgaaaataaatatatattgtgtagcgatactaaaaaaaagaatagagtgttacgtggatgtaaaaatatattatcgaaaggaacgagagaggcagaatattctgcgtttatggcaaccattataaaggatgatatttattatgggaaattaaaaagtatattgatagagttggggatctggaatgaaacattacaagaattagacgcaaaagtagatgaaataaaaatgcaaactataccagatatgtaa

SEQ ID NO: 87262 - DNA, 1263 bp, Firmicutes bacterium CAG:791
atgaatcacctgtatattacgaacatccatattgacaaggtcaggcatcttcagaatattgatatcccggtaggatctgtggaaaataggaagcatttgattctaactggcaggaatggtagcggcaagaccagtttgctggaagctgtaaaaggctacttgaattcggtatcaacgaccaatgacccgtatgaggcaagaaaaagtctggaagcaggtaaaaggaatctggcatacgctcagcagcataataaaacccaaaatgaaattgccgatattgaagaactgataaaattctacgaagatagaattaaaaattcaacctgtggcctgcaattgacttttaacacaccggaaagcaatctaaaggtcgcttttgaaaacggagagtacattcttgcttattatggagctcaacgtgctttcggagctgagcagccggagagtataaagaaagtacagataaagaaaaattataatattaccgaggagccaagacagcaatttctaaattacatgctcgacatgaagatgacccaggcgatggctctcacaagtggtaaaccagaggataaggataaagccgaagaaattcggaagtggtttgataaagtacaatctattgtcagagatgtatatgaagatccatctctgacgatagatttcaatgtagatacttatcggtttactattcacgaaaatggcagagaaccgtttgattttaatactgcatccgatggcttttctgctgtgctcgatatcatcattgacttgatgcttcggatgcaggagcagaacaaacgcaccgtggtctttaataagccgggaattgttctggtcgatgagattgagaatcatctgcatcttgagctgcagaagagaattcttacatatctgaccagcctgtttccgaatatacagtttatcgttacaactcattcaccgtttgttgtcaacagtctggaagatgcggtgatttatgaccttgaaaacaagacactggtggagaatggcctttccgatgtcagctacagtggagttgttcaggggtattttgaatccaacgaattatcggatgagctgcggacaaaattcgagcagtatcagaagctgactcagaaaaagaatgttacagatgaagaactggcagaaatcgccagacttgagatgtatcttgatgagatgcctgattatctgatgcctgaagtatctacagagtacaagcgtctcaagctggaatttgaaaacagaaaggatatctga

SEQ ID NO: 87263 - DNA, 660 bp, Firmicutes bacterium CAG:791
atggtcaagatagaaaggagctatccggctccggcatcgcttgccatcgagagccaaaagaagaatggcaagtataacggggaagatgtaatcaggcaactcgtccatgactttcatgacaaatgttatatctgcgaaatgaagcctgtaacagatgtgcaggtagaacatcttctgccacataggggaggagagtatcgtgacagaaaatttgactgggataatcttttcctgtcctgcccacattgcaatcaggttaaaaacaagacgaagtatgatgcaggaattatagattgctgcaaggaagatccggagaaatttctcctgtttcggttggaaaacgattcagttgtggttagggcccttagtgaacatgatggtaaagcccagagaacggctgatcttgtcgaggaaacttttcattgcatgaatacaggcagcctgacccatgacagtgaggttcggctgcaagacctgcagaaagagatgaatgtcctttacacctggctgggaaaatataagaatgacaaaaatggcagggcaaagagaacattaaagggattgctcagcagagaatcggcgtatgccggatttaaacggagctatattcggctccataagaaggagtatccggaacttaatgcaatgatatcggcttag

SEQ ID NO: 87264 - DNA, 1308 bp, Firmicutes bacterium CAG:791
atgtatcttcaaaaactgacgcttcataattttaaatgctttgaaaatttagaattagagtttcatcccaatcttacggtgattgtaggcgccaacggttccgggaaaacgtctgttttggaagctgccgcaattgcagtcagtaccctgtttgtaaaaatggaccggctttcaggaagaagcattgataaaagccaggcgcatttgaaggctttctccattggtagtacgaaggatgttcagcctcagtatcctgttacggtgaaagcctccgcggtgatcgaaaaggaagaagccacatggtccagaagcttgaacaagccggccgggagcactaccgtcatagatgcaaaagagatcattgacatcggagctcgttttcaggaacggctgcggaagggagatacctccctcatattgcctgtcattgcctattatggcactggtagattgtgggattaccatcgtgaaaagcagaatgatgtatttgaaacgaataaccggagcaatggatatattgactgcgtggacggaaccgcaaatattaagctgatgatgaactggttttccaaaatgaccgttcagaagtaccagaatcaggaactgggggcaggagatattccggagttagagacggtatattcggccatggaatcctgttatcaaagaattacaggaagtgattttgttaagatccagtacagcatggcaacaagagaactggaagtagcatataaagatccgtctgggaagctgatgaggattccgatcaatcagttaagtgatggctataaaagtacgatcagtcttgttgcggatattgcgtaccggatggccgtattaaatccacagcttcttggcggtgtctgcagggaaacagaggggatcatactgattgacgaggtggatttacatctgcatccgacatggcagcagcggattctgaaggatttaacggaaatcttccctaaggtacagtttatcgtaagcacgcatgctccggcagtcatcagcacggtaaagagcgaaaatattgttatgctggacaacggggaagcatgggaaccctccggggaaatttatggaaaagacatcaacacgattgtcagtggaattatgaaggcaccagagcgcccctcagacatcaaagaattatttgacgatttttatcactgggtcgacatgggtcaggctgagaaggcagagcaaacactggatgccctgaaagcgcgtattggaaacgatgattcagaaattgcagcctgcaatgtaaaacttaagttattgaagtttaggagagacaaatga

SEQ ID NO: 87265 - DNA, 723 bp, Firmicutes bacterium CAG:791
atgattctgatcaagaaaatgcaggccccttctgaattggaacatttaaaaagagaagcagaggagcaggggctgtccgataaagagggatatgcggaattgagaaatccattaaaatcgcagattcgggaatccctcatgaaggaacaggggcacctttgtgcttactgtatgcgcagaataccggatgagcgcatacgggaagaggatgccgacttaagcgatgtttacattgaacactggatggcgagaacggcagataataaaaccggtgagaataaaggattagattataggaatatgcttgcggtatgttctggtaatgaaaaagcaccgggggcaggaaaacataaaagaagatttcttacctgcgacaaaaagcgtgagaacgcaccactaaagatcaatccgttggatgagaagactctggagacgatctattatttggcggatggaacaataaaagcgacggatcccgaaatagactatgatatcaacattcatttgaacctgaactgttctacggaggcagttaccctgccggaaaaccgcaaaaaagttcttgataccattcaggaagatcttgtgaatcagggcggtgatttacggcagaactgtatcgaacagttacagatgtgggaaagcgaggaagatcccaaaacgccatatatcggaattgcaatctggtggctgaaagaacagatcgcccaaatggagtgttag

SEQ ID NO: 87266 - DNA, 1368 bp, Firmicutes bacterium CAG:24
atgtgtgaatttaaaattcaggaattggctcttttgaattacagaagatttgaaaatgaaaaatttacgttaaatcccagaatgaacgtttttgctggaaagaacgggtctggaaaaacgaccgtattagaagctgcaaatgtaatgctgggagcatatctggcagcctataaaacatacgttccgtcccggtttgtatacaatataaaatcggcagatgtgcggcagaaagcacagatttctgaagacagtacgatttttaccacggggacgatctctcaatatccttgtaaaatcagctgtatagcaaaatggggggagcaggataaaacgatagaatttcagcgtgtaatcctgaaagaagatgccagaacaaaatttggcggttcaaatccgatgcagccgacagtaatagcgtgggaagaagcaatatcaaaagcagatcattcagatattgaagttgttcttccattggtactttatcttagtacagcacgtttatggaaagatggaaataaaaaagcgacaaaaaggggggtattcagcaggacggatgcctataaccattgtctggatgcgcagcatggactggatattgcatttcgatatttggatacactaaaagcagtttcgatggaagaaaatggtggaatactgtttccggcatatcaggcgattttagaagcagtaaatgaggcatttagcgaagaactgcagccaggggaagagattatattttcgaccaaatatgaggatgatatgattgcccttaagacagcagaaggaacaattcttccattccgaatgcttagtgatggttatcggaatgtgataaagattattcttgatattgcaactaggatgtgtattttgaatccgtatttgaaaggggatgctcttaaaaagacaccgggagttgttttgatcgatgaggttgatttaagtttgcatccgacctggcagaagcgcattataagaatcttgaaggaacagttcccaaggattcaatttatctgtgcgacacattcgccgtttattattcagtctcttgaagacggggaactggttactttggatcagccgttagatagtgaatattcgggtgaggggattgaagatattgcggaagatattatgggcgtggtactgcctcaatatagtgaaaaaaaacggaaaatatatgaagcctcacgagagtatttttctgcgctcaaagaggcaaagacacaggatgaaattgagaagttgggaaaacgattagctgaactggaagctgagtacagcgaaaatccggcatatatggcatgggttcaccagcaatatacggagaaagcatggaaggttaaaaaaaatgagggcaatagataa

SEQ ID NO: 87267 - DNA, 699 bp, Firmicutes bacterium CAG:24
atgagggcaatagataagggcggatcgccttataaagaaatagacgagtatcaggatgcaataccgtatttggaaaagaaaattggtttatattgttcttattgcgaaatgtcaattaaacatgttccggaagtagagcataaaatttccagaaagaatggcggagactggacggcatggagcaatttgcttttaggatgtaaatattgtaataccagaaaagcagcaaagataacaccacaaaatgtgggggagtatttatggccagattctgataatacagcggtggctttttcctatacgaatgggattccaaaggtaaatgaagatatattgagtgcgttagatccaactgggatttgctgtgaaaaggcgaaaaatacatatgaaatggttggattgggaaatataccgatacaaaaggatgataaagacagaagggctacaagcaggaatagtgcgtttattaaagcaagggaatctttggaaggatggcgccagattaaagatgcgccagaaacgtataaaagcgttatgaaaacacaaattatgataacagctgtagcagagggatttttttctgtttggatgacagtttttgcggacgaaccacagattttgcaggcattgatagaaagttttccgggtactaatggggcatattatggtaaggatgggaaaataaagaagattatgtaa

SEQ ID NO: 87268 - DNA, 1335 bp, Prevotella sp. CAG:924
atgcgtgatattacaataaaaaacttccgttgctacgaagaaaaaaacatagaatttcgcagaggagttaatttactaattggagataattcagttggtaagacatcattgcttcatgcttgtaatttagtaatgaatgcatttttttctggttatagtgatgaaaacacggtttggaaaagtgcagatgacaaagatttccgtgaaacaggaatcacagaatcacctatagaactcgtatttcacgcaggcgaatgggattttccaactattcagacacaaataggagactcttattctttggatacaaatgtggagctgaaaatagaaaaaaagtcaaagaagaattcccggaatcttgtcaccggtctaaaaccattaaaagattatgcaactgcccttatgctcttttcacatgtcgtacaagaagacaaaagtataagacagattaatccgctgcctgtttatgcttgttttacaacagaggacattcatactgtacggaagttcgataagacaagattcaagaaatacaatcataagccctcattcggctattatgagtgttatgattgtaaaggcttgtttgaatgttggataaatcgactccttgttctgagaggagcgcaaaagggagaagaagagataaattcagtcagaaatgccatcattgatgcattaggtcccgatggttgtaatatcatcagtgatattgatatccgccataatgaaggtaaggtatatttcaaatttgtcgatggcagggaatcagagtccacattactgtcagatggttatcgccgattagtaaatattgtgatggatattgcattccgttgtgcgttgcttaataaagcaatgtttggagatcaatgctacaaacgtacacatggtactgtaattattgatgagatagatgaacatctgcatcctgctttacaggttcgtgttttaaaggctttacaggatacatttccccaaatccagtttattgtcagtacacatgctccgctggtaatgtcgtcagtagaaccaagaaatgatgaaaacggaaatgagataaatgtagtgtataaattggagtatgctaatggtaattatacacatagagaacttaatctatacgggatggatgcctcaacaattattgaaacatatatgggacaaccctctagagatttgaaagtcaatgcaggcattaagaaaatattagatttaatagataaggggaatgtccagaaggcaagggaattgttgaaagagttagggcagaatattgctagcggagatcctgaattaacaagagttgaagcattaatttcattcatggaataa

SEQ ID NO: 87269 - DNA, 690 bp, Prevotella sp. CAG:924
atgattctgattacaaaaaataaagaaccgaaagagtggactgagtatcgcaacactcccggggtagattatcaggccattccggagttagtccaatcgcttttgaaagagcagggatatatatgtgcctattgtatgcgcagaattcctgtaagggatagattgtataagaaagatggcaataattatgtcttgacggatgaggatcatcgggtggaacatataaaaagcagggaactgcatgatgatttgaagttagaatatacgaatatggtggtctgttgtcccggtcatattggaacggaagatcactgtgatagattaaagggggcaaaggatatttcatttactccacttgatcaacagtttataaaaaccatcaaataccgttcagatggaaccatattgtctaccaatgaacaatatgataaggagataaatgagattctgaatttaaatacagaattacttaagaaaaacaggaaaactatgttaattgaagtaatcacccgaatcaacgtagattgtaagagagaaaagagttgggataaaaatacgctggagcgttatttaagtaaatacagcgaaaaacactccgagaaagatggagaagatgtaaaagaaaaatattattcctattgtggcattatcacttggtttttacagaaaaaactacgtgccttgggataa

SEQ ID NO: 87270 - DNA, 1341 bp, Prevotella sp. CAG:924
atgagaattaaagaaattaatatagtcaacttcaagggattccagaacaagaccgtccgtttcaatggcaatctgacagttgtcatcggaaataacactgccggtaagaccaccttgctcaaggctcttcaggtaggtctgggagcctacctgcaaagtctcaaggaccttcccggcggtaccgccttccgtcgtaactttagctcgcacgacagattcatgaggttcgataaggacctgagagattatgtgcccaatgaagccaagccaagaataaccataaaggcagactatcccgtaacgcaatcgtcatgtgcgaacagcccggagctgtcattcatccctatacaatggtacagggagctgtccggcaattacacgacgcatacccgtgctgccgcaggcgagctgattgatgccgttcatcgtatgcaggacttaaggaatgacgagaaacagagctcgatctatccgttggtcttggcctttggagccaaaaggaccgacgattctcaggcgaagagcaagtcaaacgttagggagagggcgtccaggatcgagaaagcctataagttcgctttgcatgacaaggtggattttgagggagccatggagtggctcagccgctacgagaagaatgtcaaggacggcaaggaatttgacggtacgagggacgcctttttcgaggccctgcaggttgcggtccccgcattgtcagagatagatttcgaccatggagagatcgaggccgtagtcagcgttaccgggcatgcgccttcccgccatcacttctcatacatgagcgacggccttcagtctatgatcaacatcgtttccgagatagcccatcgctgcatagagttaaatggcttcctgggcgttgatgccgtgaagatgacccccggtgtcgtcatgatcgatgagatcgacctgtacctgcatcctcattggcaaaagcatgtattacaggatctaacccgtgccttccccctgatacagtttatcgtgtccacccacagccctttcatcgttcaaagtcttcaggaagggcagctcgtgagttttgatgacgatgttctcaccaccggcgagccgttccgtgagagtttggaagatattacttccgagcgtatggggttaaagcaggacatcaggagcaagcgcttcaacgagatggtagcaaccgcatcccgtctgttcgaagcggcggataatggcagtgcggacaaagagaaaataaaaagtcagcttgatgagctggaggcggagttcagtgacgatcccgcctatctcgcgctcatcaaaacggaaatcaaggcaagacagaaatcagtattatga

SEQ ID NO: 87271 - DNA, 747 bp, Prevotella sp. CAG:924
atgagacccgttgagaaaaagaaacccggagatacggtccgctatttaaattccaacaatcaagtggtagtacataccctgcaggaacattatcctcactataaggatgccctattcccgttggtgggtaatctcggttcctattgctcttattgtgagcaaccgcaaacggtcgatgtgattgatgtggagcatatcgttcccaaaagcgagggcggatcatatacggcatggaataatttcctgttgtgctgtaagatctgcaacagcgtgaaaggaacaaaaaaacttaatcccgataccggctgtcagtggccacatttgaacaataccttctatagctttgtgtatgatgagaccgggcgggtaagggtcaacgaccatattcccgagatttcaaaacagagagcccaaaagttattggacctgactcagcttcaaagatatccgggtacagacaatcctctctctcccaaagatttcagatggcacaagcggtaccagacctggaatatagcatcaacgttcagggaacagtttttaaagggagcgataaccgaggatgatgtcatcacaaatgccaaattgataggccagtggtctgtatggtttaccgtatttaaaggcatcgattgtatcttgcgcaggttaatatccgattttccgggtacttgtgcctcatgcttcgacgaaaataatcattacgaacccgttgaaaggaatccgggatgtatagaccctatataa

SEQ ID NO: 87272 - DNA, 1272 bp, Firmicutes bacterium CAG:424
atggaaagattatttataaccgaattgcaaattatgaatgtcagacatttaaaagatatttatattccattgtcaaatgataaaatgaaacacttaatcttaaccggaaaaaatggaagtggtaagacaagtgttttagaatatttaaatcagtactttatgatgaatagagaatattaccaagcatctggagttgcaccctttagtgatgacgttgcagcttttgtggagcagatggagataaagccgcaggaaagcgaacagacagattcaggggtggtgaaacggctgctggcatatgcaaaggcatttaagacactgccatacttagaagaatacgaaaattgcataaaagcagaatttaacgttccagaaggacagtggataaaaacctttaagaatagcggatttcttttggcgtattacggagcagagcggaaatttcagccggaaaaaccaaagcacgtggagaaagtagaattgaagagtggttatggaaccacagagggaccaagaaatgagtttattaaatatttgctggatttaaagatgacggaggcactggccattgccaatggaaagcaggaaaaagcagaagaaattaaaatttggtttttgcagtttgagaaacttttacagcaaatatttagtgacacagagcttcatctggtttttgacgaaggagaatttacattttacattgaggaaaaagggcataacccatttgggtttgatacgctgtcaagcggatatgcggcggttttggatattattgtagatttaattatgagaatggaaaaaaatgcagacaaaagtttccgctttttgcagcctggtattgtgttgattgatgaaattgagactcgcttacatctagaaatgcagagaaatattttgggacttttaacaacgctatttcctaatattcaatttattgtgacaacccattcgccttttattctaaatagcctgaaggatgtagtaatctatgatttggaaaatcatatgttagtggagaatggtctggcagatgtgccatacaatgggattgtagagggatattttaatgtagatggaatgtctaaacttttggccgggaaatttcaaaaatataaagagattgtgagtaaagaaaaattgaaagatgaggattttgcagaagtagcaaaactggaaatgtttctggatgagattcctgactatctggcgttagatattgcatcggaatatcagcgattaaagctggaatttgcaaacagggaggatatttga

SEQ ID NO: 87273 - DNA, 426 bp, Firmicutes bacterium CAG:424
atggtaaaagtagaaagaactttgccagcaccggcttctcttttgacagaatccagaaaagaaaacggaaactacgcacttatagatgtggttcagcaactaaggcaggatttccatgataaatgttatgtgtgtgaaatgaaaaatctccaagacccacaaatagagcatttgctgcctcataaaaatggaaagtataaggagcgggaatttgactggaaaaacttattttggtcctgtgggcattgtaatagtgtaaagaatcaaaagaaatatgaaggtcggattttagattgctgtgaggtggatccggaaaaagctttgtcttttaatatagagatgaatgatgtcaaggtactggtgaaaaattcaaatgacgaaaaggcaataaaaaccgcaagactggtagaagaggtatttaattaa

SEQ ID NO: 87274 - DNA, 1320 bp, Bacteroides sp. CAG:545
atgaaaagtctaaagcagttgtctttgagaaattttcgtctatttggcgaggatgaacaaatattgaaatttagctccgacaaaaatgtaactattcttgtcgggaataatggcagtggaaaatcgtctattctggatgctattgcgatttcaatcagcacgtttacatcaaacttccctggacaggccattaagcaatacactgattcggatattcatattactgaaaacgaggaatatggagattacctgcaggttgaatccctatttgatacgtattacaatggagacattgatatcttaagatacaggcagggaaagtccaagtctccagaagggatcctcaaaaatgttaattcctatgctgatttattgatgtcaaaaatcaataataaggaagagtgtaatcttcctgttgttgcatattatggaactggacgaggtcaaataaaggcacctgaaagaaaaagggatttcaagaaagcgtttactcgatgggattcctatactggtgcgcttgaggccagcgctaattttaggcagttcattgaatggttcgatttgatggaggacgaggaacgaagagagagagaagaccatcgtgactgggattacaaaagcaaacctcttgaaactgtaagaaaagcattgtctatttttgttggagaaaaattctcaaatccaagaatgatgattcatccgctgcggtttgttatggatgaaagagtgggtgacggcaaatacagacaactacgaatagaacaaatgagtgacggctacaaaatcgtgacggcaatggtggcggatatcgcctcacgtatggctgaggctaatcctgacatggagaatcctctaatgtctaacggtatagtcttgatagatgagattgatcttcatcttcatccgaagtggcagcgcacaattataggcagtctgtctaagacattcccaaatatacagttcattgtttccacacacagcccggtaatactttctggcgccatggacactgcgcaagtcatagtgttgggtgaggatggaatcgttgatgcagatgcaaaaggatacgaaacttatgatataagccaacttctgttgagtgaattatttggactccaaagttcccgttctcctcaatgggataatatattgtctgagcaaaaatcattacttgagaagaataaccgaacttcagatgaagacttgcgtctcaaggaacttgacaaagaactttcacggctgtcttttggcgattccattgagcaactgaaatcaagagacctgctttataagatagcgaaaagtctcaacatagagtag

SEQ ID NO: 87275 - DNA, 777 bp, Bacteroides sp. CAG:545
atgaataagatatcgaaaagtactccagttccagatatacttctcactagaggagaagaactgaaggcgaaactgatagaacaagcggataacggcgagacgaatttctcattcagcagtgaggtttatgccgattcgacagtaaaagatagactgaagtctgaccaacataacaaatgttcgtattgcgagcgttacctgaatggggattttggagacgttgagcacttcagaccgaaaaaagcctatcagcagtctttcggttctgcaatgaatcggcctggttattattggctagcatacaattgggataacttacttctgagctgctctgaatgcaatcgttctttcaagaagaatctttttccattggaggatgaacataaaagagacgttccacatagaaatgtaacgcaagaggtatctttgctgatcaatcccacatctgaagacccaggacggtttgtttgctttgaagagcatatcgttaaagcacgggtaattgacggagcggagagttcaaaaggtaaagcgacaatagatattctcaaactgaatgatcgtgcggatttggtggaggcgaggcggagaaaatggaatgagtatcaaacgataaagaaatctatcgcggtgattagatccatgcttcataacgtaaatatgagtgattatgcggaagatatgagagatgctattttgtctcaacagaggtgtttggaagagatttcatcgaatatgtccgagtttacgggcatgtttaaacatcaaaaggattga

SEQ ID NO: 87276 - DNA, 1269 bp, Clostridium sp. CAG:122
atgaacttatctaatgttaaaataaaaaattttcgcaatattgaagaattggatataaatttcaaacccgggtttaatttgattaagggtaaaaatggaaaagggaaaacatctgttttagaggcgatagctgtcggacttggaggatttataagtggaataacaggtgtttctacaaggcattttaatattgatgaggtaagaactgaatatttaaagataggtgacggttcttacagtaaaaaatatcatgttcctacggaagttacgatagctgcacaattatatggcgaggaatatcagtggactagaggtaaaagcagtattaaagcatcaagaagtacaacacagcccagagatatatgcaggagagcggagaaaatggttgaagatgataatgtagaacttccgattcttgcgtacataggagctggcagagtatggaatcagatgaggcagaaatgggaaaatccgtttagaaaacactatttcagaacagtgggatatacagatgcacttattgaggcatctaatgaaaaattgttgatgagctggtgtgtcaagatggagcaaatatcatggcaaaaagagaaaaaaatagcagagtatgaagctgttaaaacagcggtagctaaatttatggattttatggaggaaaaagagggacatattgtattttatgataagcaggaagaacagatgatgtataagtcggatgaactgatacagccgatagaacatctcagtgcaggttatcagtctttaatttggacagtatttgatattgcatatagaatggcagtattaaatccatcaaagcttgacaagattgcagaaacagcaggggttgttctgattgatgaaattgatatgcatttacatcccagatggcaatggaatgttgttggggcattgattagcacatttccaaatgttcaatttattgcggcaactcatgcaccaatattatttgcatcacacaaaaatatatggattatagatgtggatgaggaggaagtaaggtattcagagtcgcattatggtatggatgttaatacttctatgcagtattatcagaatacaagggaaatcccggaaaaagtaagacaaaaagttgaattatttaataaaaaaatggatgatgaaaaatatgaagaagctgaagttattttaaaacaacttgaaatagaaacagctccggctcatccgttgttagtagaactgcgtacaagatttgaatttgaaagtacagattgggagaatcaatga

SEQ ID NO: 87277 - DNA, 651 bp, Clostridium sp. CAG:122
atgatatatataaagaaagggaaagaacctgcatccttaactaaatataaaaaacaaaaatttgcttattatgatgggtataaagaaaaagatgatttgcgaaaaatgcttttaaaagagcaggggtatctgtgtgcttattgtatgaggagaattgatatagagcacatgaaaatagaacattggtttcctgaaaatgagctgagtgatatagaaagattagactatagaaatatgcttggatcatgtgaagggcatatagatggaacatacggaaaaaaagatgatacatgtgattcgcataaatctggggataaaataacagtaaatccattggatagaagtacattgtgttctataaagtataattctgatggagaaatttattcagataatgagattattgagaaagacattgatgttgtattgaatctgaattctgaaaagcacctgcttaagctaaatagaaaaagtatgctaaagcaggttagagaagaattgtgtaaaatgcaaaaaagaggaatatggggcagaagtgtgttggaaaaagtaaaaaacaaatacataaatgcagatgaaaacggttataaaaaagaatatgcgggtgttgcaatatggtatatagataaaaaattaaatagtactacataa

SEQ ID NO: 87278 - DNA, 1257 bp, Clostridium sp. CAG:122
atgcgactaaagcagattgaattaacaaattttagggcgattgatgaggcagtcattgaattggatggaaaaagtacggttattttcggtataaacggaacagggaaatcaagtattcttcgttctgttaatttattgtttgcaaatattataaatcaggttgtaaacagaaaagaattaaaacaaaactatgctattcaattagaagatattatgtatggaaaaagtggaacaagcatacacgcaacgattgaatttgaaggtacggagtttgaatattcaagaaatatgatgcgaaatacaggcaggaaaacacataacaaaaaagctttaaatgaaattgttgatatatttcatgagaaatatatcagtgatgaagaacagaatgatattcctatttttgcaaattatgggacaaatcgtcttgtgttggatatacctttgcgcattagaacacaccatacttttgatatatattctgcatttgaaaaggcgattgaaaataaaatagactttaggacttttttcgagtggtatagaaatcaggaagattatgaaaatgagcaaaaaatagagacgggaaatttaaaatatgaagataattctctgcaagcggtaagaaaggcgattttgtcaatgttagatggctgctccaatcttcgtgttgtaagaaaacctcgtttggaaatgaaaataaacaaggcaaatatcagcttgaatgtttctcaaatgtctgatggggaaaaatgcacattagctttgtttggtgatttggcgagaaggcttactttagcaaatccaaataaagaaaatccattgcttggagagggaatcgtactgattgatgaagtggaactgcatatgcacccatcatggcagagaaaagtgttatctgcattaagagatacttttccaaatatacagtttattattactacacattcacctattgtattaagtgaagctgatgaaaattataatctgttttttatagataacagtgaaggaaaatttagtattcaaaaaaataaacagttaaacggatatgatgcgaatgctgttttagaacagtttatggatacaagttctattaatgaaaaaataaaaagttttatagactcgatatatgatgatataaacagtagattatttgagcaggcagaagtgaaaataaatgcacttgctgaaattacaagtgagaaccatccggatgttattacggcaaggatggaattaaagaggagaagatatatatga

SEQ ID NO: 87279 - DNA, 570 bp, Clostridium sp. CAG:122
atgatatatattgaaaagtctgaagaaccagagtttttgagtgagtttaaacgaaaaaatcccgataagacttatgattcggaagaatttgcacattacagaggaattcttacagatgtacttataaaagagcaaaaaggaatctgtgcatattgttgtggcagaataaaaaaggaaaatgttcataatgagcatatagaaccaagaaatccggggaaatatgtgagtaaacgctcattagattattcaaatcttgtggcaagttgtaatacaataagaacctgcggaagaaaaaaggaaaacaaatatgattcggataaatttgtgtctccattagaacaggagtgtgagaaaaagtttacatattatggcaatggaacaatagtaggggatgaatacacaataaaccttttaaatttaaatgactatgaattgcgtgaagcacgcaaggcggtatatcagcagttgcagcatcttgacaaagaaacgataaaactggtgtatatgaatgaacaggacgaggagtaccagccttattataatgtgattaagtggtatgtgaatgggtga

SEQ ID NO: 87280 - DNA, 747 bp, Roseburia sp. CAG:197
atggttcatctgaaaacgcagcaatcatatgcaagaaatgaaggaaatatttctgatgttgagaatatacagatgtggtttgatcgttttgagagagctttgagaatccttttagatgaagattctatcaaattgcaatatgactacaaaaattatgattttaaaatagtccaagatggcagggtaccgtttaattttgcagaattatcggatggttattcatcagtgatttatattgtttcagatttgatactaaggatggataagaattggctgaatgaaaacagaataagtcagtatacggaggaaggtatcgttttgattgatgaactagagactcatttacacatagagttgcagaagaaaatacttccatttcttactgagttttttccacatatacagtttattgttacaacacattcgccttatattttgaattctgtcgcaaatgctaaggcatatgatcttgagaagcatatggagttggataatctgtatatgtataaggcggatgatcttgcagaagggtattttgatgcagatgatttttctaacgatatgaaaaagaaatttgcagaatatgcccggttggtcgatgcaaaagatatttcagatgaggaaagaataaaacgtgcagagttaagatgtcagcttaagaatgcgttgtcaaagttcccggaaggtgaagcaagagatatgtttgaggatattgaaaagagaagggctgcatatgatcaaaattga

SEQ ID NO: 87281 - DNA, 669 bp, Roseburia sp. CAG:197
atgatcaaaattgagagaaaaccaacagaaaaagctcttcttgcccaagaagatttgaaattggcgagagaaaagggaacaacctataatactgaccatgtaaatgaggcattacgtgaaatgtttcatggaaaatgctatatatgcgagaataaagaagcaacatcatttcagatcgaacatttgattccatacaagggagatgttgaacttaaatacgattggaacaatttgctttgggcttgtgcccattgcaataatatcaagttggataaatatgatcccattattgattgtacgcaagaagatgtggaaaagaaaattgcttttcgtaaagaaggatattttggaacggatgaaaaatttgtctttatctcattggatgatgatgtaaaaacaaaaaatacggtgaagcttttgcatgatgcgtattatggtactacatcacaaaaaaagatggaagccagaattattaggaagcatttgagggagaatatttctgactttaaaaattatgttagggagtacatagaggcagtcggagaagataaggaagatttggaacttcttatacagaacgaactcagtgacaaatccgagtttactgcttttaaaaggtggctggtacgggatagtgaaaatctgccggaattgaaaaaatatctataa

SEQ ID NO: 87282 - DNA, 1281 bp, Firmicutes bacterium CAG:56
atgtttctagaatcaatgattctccataatttcaggtgcttttctgatatagaaataaaatttaataaccgacttacggtggtcgttggaaataatggggcaggaaaatcaacgattctggaggctgccacaattgcagcgggtactttgacggcagcgatggatggactcacaaattatgggatcaagaagagtgatgctcattataaatattatgatttgggaagtaccattgatgttcagccgcaatttccggttgagattacagcatcaggtaaaatggatggaaaggatataacgtggagccgaagtcttaaatctgcaaaaggcagaggagggctggcatctgcaaaggagcttacatccattgcagaagagtatcaggagagaatgagaaacggggatcgagagctgaaattacctgttatttcgtattatgggacaggacggctctgggcacagcatagtgagaaaaagaatgatacttttgaaaaaaataacagaagcaatggatatatagacagccttgacggtgcagcaaatgataagctgatgatgaaatggtttgaaaaaatgacttatcagcagcttcagagacaagaaaaaattccggaatttgttgcagttaaaatggcactggaacagatctttgcttcggttacaggatattcagatgtaaaagtacagttcaatctggatacgggtgaaatagatattctttattttgatgggacagaacatgtgaggatgcccgtttctcagctgagtgatggatacaagtgtacgataagtctgattgcagatattgcatatcgaatggctattcttaatccacagttactgaataaagtattagtggaaacagaagggatcattttgatagatgaagtggacctgcatttacatccaaagtggcagaagcgaattttgaaagatctgatggatatatttcctaaagttcagtttatcgtcagtacacatgcaccggaagtgattaattctgtgaaaaaaggatctgttgtgattctcagaaataatgaagttatcaatgcaactgatgaaacatatggtaaagatgcaaataccattttaagagaagtgatggaagtttcttcaagaccggatatcattcgatttttatttgaaaaattttatgaattactggatagcggcgaatggaagatggcagaggagattattgggcaattggaaaaagaaataggaaataacgatccggaaatcaatgcgtgtcgtgtgcgtcttgagttggaacagatgtga

SEQ ID NO: 87283 - DNA, 669 bp, Firmicutes bacterium CAG:56
atgatcaggataaaaaagggcagagaacccggaaagttactctggtatcgtcaacaggatggagcatcttatgaacagatggataaagaagtaagagaggaactaatagatcaattgctgcgagaacaggggcatctttgtgcatattgtatgtccaaaattccggaaagcagaaatctcccaagcggtgtacctgcggttacgatagaacattggctgccgagaaatccagatgataagctggatattggacaaggtttggactataaaaatatgtttgcagtctgttccggaaatagaggatgcgggtgcgaagaaaaactgacctgcgatgccagaaaaggaaacgatgcaataaaagtaaatccttgtgatgaaagcacactgcgtggaattacatacaaatcaaacggaatcatacagtcctctgatccggtgattgatgaagatttgaatcagagactgaatttgaatggagcaaattcatcatttcaggaaaacagaaaacaagtgctggaaagtctgatttttgatgtgaaaaaaagatgtggaaatggtgatatatctttgtattgcaaacgaaggttagaaaagattcaggcgatggatgatcagaagattccgtatgtcgggattttgatctggtggcttgaaaaacatataaaatga

SEQ ID NO: 87284 - DNA, 1317 bp, Phascolarctobacterium succinatutens CAG:287
atgcagatagaaagattaaggctgaagaatttccgttgttacgatgagcttgatattgattttgaacctaggctgacagttattgttggcgaaaacggcaagggtaagacggcaatttttgatgcgttggcaattgctctggagccttatctgcgcagctttgatgccagtggcaggcaaattactccccaggatgtgcgacgtgtgcctgtttataaaaaggatatgcgtcatattgatggtatggaatgccattatccggtagaaattaagctggagggtgaggtttatggcaaaaagcttacctgtacccgccgcctgctggaggggaatgtgcctgaggatgatgctgatgagctgtgcgaacgtggctgtgcattggcgcacgatgccaaggagaacggcaacaggctgctgccggtgttggcctattacggtactcagcgcatttgggtagacagcaagctgatgacaaattttcataaatcgctgatggaacgcaatgtaggctacgaggaatgtctggagccgtcttcttcctacagcaccttcggaaaatggtttgagtacgttaccaagtgtgcgcagtcagagcagcagtacagcgcagaggtgaagcgcaatgtgatgctgaagaatgcgattcagaacgctgtcgacgtgtgtctggaaagcaccggcctgcgtgatttatattataattatcgcctgaaatgctttgttgtcagtcaccctgatatgggtgagatggtggtagatgaattgagcgacggcttccgcagtattatcagcatggtggctgacctggcctatcgcatggcgcgtctgaatccgcagctgcgtgaggatgcggtaaccaagactccgggacttgtattgattgatgaggtagaaatgcatctgcacccgctgtggcagcagacggtactgctggatttgcagaaaaccttcccgatggtacagtttgtagtgactacgcatagtgcgcaggtgcttagcagcgtgccggcagagagcattcgtgtattggcttggggcaagcagttcgaaggcgtgcgccacgtagatttttccttgggcgccaacagctatcagctgctgcaggatatccagaatgtgagcccacgtccgcaagctctgccgattgtgcaggatttaaagcgttatctgcagctggtgagcgaggatgcctgggatacgccggaggcgctggagctgcgcaaaaagctggataaatggtccaagggcaaggagcctgctctgctgcgtgcggatatggatatccgtatgcgtcagttccgcaggaggcgctcatga

SEQ ID NO: 87285 - DNA, 780 bp, Phascolarctobacterium succinatutens CAG:287
atgaaacgtgtttataaaagcaaggaagaaccggagcttctcaggcattaccgtctgcataatcctgaggaaacctgggagcatttccgtcgtcgctgccgcaagggctacaaacaggtgcgcgaagcaattttgcgtgaccagcacggcctttgcgcttattgtgaggtaggcattaagctggcggaggaggaaggcgaggttgacgacttccgcgtagagcatttttatccgaaaaatgctacgcaggagcacgggcacaactatcatttggattggcgcaatctgttgggcgtgtgccacggcggcagtcagccttatgtgcctgatcccgagtggcgctattccagccagaagcgtgaccgcagctgcgatgtgcctaagggtgggcgtgaaattacaaactatatcctcaatccgctgaagattcccggcaaaatccgtctgttccgttatgccgagcatagcgggcggatgtatgtagacgaagatacctgccccaaagatttgcaggggaaggcgcgcagcactatccgtgagctgaatctgaatgcgccgcggctgatgcgcatgcgccgagaggtaatccatacactggaggaccagataagtgaggagcttagtaagggccgagagctggatgaagttttggaaatgttggcaaccatctgtctggtgcctgactataatggtatgacgctacctttcttttccgttatccgttggtatctgggtgaggcggcggaagaagttatccgtgcgagcggtgctaagctgtag

SEQ ID NO: 87286 - DNA, 1320 bp, Bacteroides sp. CAG:709; identical to SEQ ID NO: 87274

SEQ ID NO: 87287 - DNA, 777 bp, Bacteroides sp. CAG:709; identical to SEQ ID NO: 87275

SEQ ID NO: 87288 - DNA, 1266 bp, Blautia sp. CAG:52
atgattgttcaaaacgtagatataaaaaatttcagaggaattgaatacgcatctatagaatttaaatcgggatttaacttgattaaaggggagaatggaaaaggtaaaacttctatattagaagcgatttctgttggattaggcggatttatcgcaggatttagtgatgtctcaacacgacatttttctaaggatgagataagaaaagtgataaagttgacaggcgatgggtcatgtgatgagatttatgaggttccaacagaggtggtgttaaaggcagatatcaacggtgaaaatattgaatggattcgaagacggacaagcataaaagcatcgcgcagtacgattcagccgcgtaaaatttgtaaggttgcagaggaaatgtcagtgaatcctgatgcggaatatccgatattaaattatcagggcgcaggaagagtatggtctcaaaaaagagagaaaacagaaaatgtatttaaaaaaaaatactccagaacagcaggttatattgacacattatatgaagcttctaatataaaactgcttttaaactggtgtattaagatggagcagatttcatggcagaaagagcagaaaattgcagaatatgaggctgtgaaacaagcagtagctgattttatgagttatatgaattcaggtggaacatatgaggtcttctatgacaaacagttagaagacttaatgtataagaccgaagatttggtacttcctgtgtcagatttaagttctggctatcagtctttgatttggatggtgtttgatatagcctatagaatggcaatattaaatccgaataaaagatcagaggtatgtgcaacaaaaggaattgttttaatcgatgaaattgatatgcatctgcatccgaaatggcagtggaatattatagattctctgagaaagacatttccaaatgtccagtttatagcgacaacacattctcctatattatttgcatcagcaaaagatgtgtggattattgatatcgaagaggctgagtatcagtatgggtattcgcactatggaatggatatcaatactgcactgcaggcttatcagaatactacacaaataccggaggaagtgcagaagagagttaatcagttttatgatgctctggatgaagaagattatggcgaggcgaaacaaatattggaagaattagagaaggcaacagcaccagatcatccaacattgattcagatgagaacaagatatgagtttgatacaatggaactgagggattaa

SEQ ID NO: 87289 - DNA, 639 bp, Blautia sp. CAG:52
atgatatatattcaaaaggggaaggaaccggcatcattgacggcatataaaaagcaggctcatgcttattatgatggatgcaataaagatgatattagagaaaatttgctgcgggagcaaggatatctttgtgcgtactgtatgcggagaattgaaaaagaaaaaatgaagattgaacattgggatccggaagataatctgacagaattggaaagactggattatagcaatatgcttggagtgtgcctggggcatatgaatggacaaaagaaaaaagatgatacctgtgatacgcataaaggcaatgtcagaataattgtagacccaagagacagcagaaccctgtctgagataaaatacagaagtaagtcaggagaaatctattcggaaaatgaagatatacagaaagatttaaatgaaaccctgaatctgaacagtgaagggcacagattacctcagaatagaaaagaaaaattaaatgctgtaattaacgagattgcaaagacaatgccccaaggtacctggacgaaagaaaaaatcaggaaccttatgatcgaatatggcaaatgtaattcagaaggaaagaagacggagtatctgggaattatacaatggtatttgggtaaaaaaatgaaataa

SEQ ID NO: 87290 - DNA, 1245 bp, Blautia sp. CAG:52
gtgaaagaatattttatcagtgaaattaatatagaaaagttgtatcatttatcaaatataacgattgaattggatacaaccaagcgccagcatttgttgttaactggaaaaaatggttcaggaaagacatcgttactgttaagattagtaagatatctgaaagtacttaaagatggacatcttattcgattaacgagaacatggccggaattagaagaagatgcgaaacgtaagatggaacatgcttcaagtgagaatgaacgatttaaagcggaacaggattacaggcaatggtcggatttgattcgtaagtatagcgatggcattagggttgcatggaatgataatgatggacttgaaagtgcatatcaaaaaggagaatttataactgcgtattttccggcagaacggaaagcacaatttgcgaaaccgaatggcgtggaaaatattaagctgtctgaagtatatgacaccacagagaacgccggaaatattcttcttaagtatatggttcacatgaagacacagcaatcttttgcaagaaacgaaggtgaccaggaaatcgtagagaggattcaacaatggtttgacagatttgaatctgcgctgcaggttttgctggacgaaaaatcgattcatctggaatatgattataaaaattataattttaaaatcagacaggaaggccgggagccttttgaattcagtgaactgtcagatggctattcatccgtgatctatattgtatccgatttgattcttcgaatggataaaaactggttattgggtgaagaaatcagtcagtataatgcacagggaattgttctgattgatgagttggaaacgcatcttcatattgaactgcagaaaaaaattcttccattcttaacagaatttttcccgaatattcaatttatcgtgacaacacattcgccatatattttgaattctatttccaatgcgaaagcatatgatctggaaaagcatgtggaactggaaaatctggctgctttttcatcagatgaacttgcggaaggctactttgaggcagatgaatattcagatacattaaaagaggaactggagcgatatgcacagttgtgttctggaaaaaaactgacggaagaggagagggctgaacgggcagaattaaaaataaaatttaaaaatttgtcaacagatctgtcaggagctgccagagaaaagtttgaggatatcgaacggagaagggaaacgaatgattaa

SEQ ID NO: 87291 - DNA, 711 bp, Blautia sp. CAG:52
atgattaagattgagaggaaggaaaccccgcatacacaagaggcaatggatgatttgcaggaagcatgtgatacaggtcgttcgtataatacggaacatgtgaatcaggcgttacaggaagtattccatgggaaatgttatatttgcgaaaacaaagaggcaacatcctatcaaattgaacatcggattccacaccggggtgataagaaactgaaatatgattggaataatctgttttgggtatgtgcacattgcaacaatattaagtcagacaaatacgaaccaatattgaactgtacaacagagcctgtagaacacctgattgcttttcggaaaacaggttattttggaacggaggaaaaactggagtttgtgccggtgaaagatgataatgcagcgatcagaaatacgattctgctgttaaatgatgcgtattatggaacgactcctcagaaaaaaatggaagcaaggattatacgtaaaacgttgcggaaagatctttcaaagttcaaagaatatgtaagagagtatcaggaagcagaaaatgaagaagaaaaggaagatattgagatgcttctgaagagggaactgaaagacagttctgcgtttacggcatttaagagatggctgatatgggataatgaggaaaagtatggggagctggagaaatttattcctgagaatcagaaggaaaaattatttgacatttaa

SEQ ID NO: 87292 - DNA, 1134 bp, Bacteroides sp. CAG:714
atgaatcactatattaaaaatatttacatacatgatttataccatctgcacgattttaatattcctattgcagatgagcaaactccgcacctgatgataaccggcaagaatggcagtggaaagactgtcttattgaatgcgttgtcaaatttcttggataatttaaaacattatagtcttgatttttctgagaatggtgaggtatctttaacttttcctgatactccattagttgtcacgcttaaagatgaattttcacagaaagatttcattgttgcattttaccaagcggcaagaatgccgaaaatgatagaacctcaaagtccgactaagcctatatataatcttaattgtgccgcaagggaaacggtaacggatcaattcttgaacttcttgtcagacctgaagattcaagaagcattggcccgcaatgaaaatcagatggaagatgcggaagaaatcaatcaatggttttttaatttcttggatcttctctgccaaatctttcaagataaagatttgcatctgaagttcaactataaagattatagttttcgtattctgacagaaggaaaggaattcaaatttacggaattgtctgatggttatgccgccatcttggatattgtggtcgatctgattctgaagatgcagacaaaagacagtttgacgcgcgcctatcagaagaaaggaatcgtattgatagacgaagtggaaacgcatttgcatctggagttgcaaaagatgataatgccctttttgacaaaggtatttcccaacatacagtttatcattacaactcattcgccgtttgtactcaactcgttggacaatgccgtggcattcgatttggagcaccgggaagccatcagtgacttgacccaatattcttacgaggctttggccgaaggctatttcggagtatcctccgactccagctatatgcagatgcagctggggcggctggaatcgctgttgcagaaaaccgacctgaccgattcagacaaatatgacatcaggcagcttgttgaggatttggacaaagtgccggagtcagtttcgcccaacttggtgggggcctatatgacaatcaaaaacagatatgcgtcggttcttaaaacagtgttggcatga

SEQ ID NO: 87293 - DNA, 639 bp, Bacteroides sp. CAG:714
atgatcagggaaagaaagagcgagaacgttccgtcctctttgttgactacctcccaatatgatggagaggacgtaaaggcgcaattattggaggaccaacacgagaaatgttatatctgtgagcgcaagttgggtacagattatgagatcgaacattttaaaagtataaataattatccaggattaaggcaagaatggacaaacctgtttatggcctgcggatattgcaacaaaaagaaatccagctcgtttgacgataatctgtatccgctcgatacgaatatagaaaacgaaatagaacagcggatagacttcagcaggaacaaggcttcttttactactgcgattgatgatgtaccccatcagaatacggtaaaaatgttgcatgttttctataatggcaaacagaaaatgcgtgtcatcaaggaagaacgtttttttgatgaagccaagcagaagatgaaccgctttttggagaaggtcaacacattcctgatggagcccacacctgccaatcgggctttggtggcggccgaattgtccatcgagcaagaaatgttaggcttcaagtattgggtaatccgcgacaatcatttggaggcagagtttaaaaatgaaatagtgtggaacaagcattga

SEQ ID NO: 87294 - DNA, 1371 bp, Phascolarctobacterium sp. CAG:266
gtgaaagtagtgtatattaccaaactttatcttgaaaatttccgctgttacgataaatttgagattgattttgacaaagagcttacggttattgtagccgaaaacggacagggcaaaactgctattcttgatgcggttgccatagccatggggccgtatttgtcctgcttttcggacggtaaggcgcgtaatattcacgaaactgatgtgcgccagactgtggaaacggcaagtaaaagccagctggaaattttgcgtatgaaaagccagtatccggttgttattggcgcagaaggcgatgttgaaggcaggcatataaaatggcagcgtgagctgaacaacgccaaggggcgcaccactatgcagcatgccaaaatgctgagcagctacggcaagcgtatggtggaagccctgcgcgcgaaagacgacaatgaagttgtgctgccggtaattgcttattatggaacggggcgtatctggaaggacagcaaactgcgcaatactattaaaaatattgatttggagcgcagcagcggctatatggattgcctggaatcgacgtcatcttacgctaattttggccattgggtaaaatatgccattatgagtgcggtagagatagaaagaattattgccgaaaaacatttaacggagaaaaacccttaccgcgaagtttttaaagccgtagagcaggctattgtaacctgtataggcagcatgggctggaccgatattgactacagctttgtaaggcagaatctggtgcttaaacataaaacgcgcggcattctgccgatagaagcacttagcgacggtgcaagaagcgttatcagcatggttgccgatttaagctaccgcatggtgcggctgaaccctgatttaggcattaatgctgttttaaaaactcccggcatcgtgcttattgacgaagtggatatgcacctgcatccttcctggcagcagactgttttatatgatttgcgcaaggcgtttccgctggtgcagttcattgttacaacgcacagcccgcaagtgcttacaaccgtaccgcctcagtcaatccgcgcgctgcgctggaacaacgatttgatagatatttaccagccggatttttcgcttggcgcggcaagctatcagctgctgaaggatattcagaatgtagatgcaaggccgcagtgcgtgccggttgtaaaagaattaaaacggtatcttgatttggtatcggaagacaaatgggactgccccgaagcgcttgaactgcgcaagagccttgataaatgggcggcagggcgtgaaccggcgcttttgcgtgctgatatggatataagaatgcgttccttcaggagaaagcagcatgaaaagaatatttaa

SEQ ID NO: 87295 - DNA, 780 bp, Phascolarctobacterium sp. CAG:266
atgaaaagaatatttaagtcgccgcaggcaccggaagggctgcggaagtttgccgaagaaaacccgtacgaaacatgggaatgcttccgccgtgcaaaccgccgcggctaccgtgaagtaaaaaaacagcttttaaaagaccagcacgggctttgcgcctactgcgaaattaatattacttttgccaatgaggaaggcgaggttgacgacttccgcgtggaacatttttatcccaaaagcgaaacggattttgccgtgcataattatcaccttgactggcagaatttgctgggggtttgccatggcggcagccagccgaatgtggaagatgcggaggagcgtttttcaaagcgcaaaatagaccgcagctgcgatgtgccgaaaggcggcaagcctattaacgagcgcattttaaacccgctggaaataccggcggatgtgcgtatttaccgttatgccgcgcataccgggcgcatgattgttgatgaagatacctgcccgccggagctggtgcgcaaggcacgcaataccatccgcgagctgaaccttaacgcaccgcgcttaatgcgtatgcgccgcgaagccgtaatgatgttggaggacgaaatagaaaatgcccttgcggcaggcgaagatatggaagaatttttaaatgtgcttgcagaaagttttctgctgccggacgataacggcaactgccaggcgttcttttcgttaatacgctggtttttaggcccggctgcggaaaatgttttaagcaaatacggttatgcaatttaa

SEQ ID NO: 87296 - DNA, 1353 bp, Phascolarctobacterium sp. CAG:207
atgtatatcagtcgcttatgtttgcagaattaccgctgttatgataattttgagatagatttcaacaaagaactgactgttatcgtagctgaaaatggtaagggcaaaacagctattctagatgcggtcgctgtagctttagggccttatctggcgtgctttgacggtgttaaggccaaccagatcagtgatacggacgtacgccagaccaaagatactgtaggcaggactttggagcatgtgctgcggatgaaaagccagtatcccgttgtgatcggagcagaaggcgttgttgacggcgaaaagatcacctggaaaagagaattgaaggcggccggggggcggacgacgatcctgaatgcgaaggctttgagcgagtatgggcggcatatggtcaaggcgctgcgggaggtcaacgacagtaaaataattttgccggtcatggcttattatggtaccagcaggatgtggaaggataataagctgttcgagctgcgcaaggatatcagtctggagcgcggcagcggctacgtcgattgtatggagccttcgtcatcatataatacttttgggcagtggttcaaatatgcggcgatgagcgcgatggaatttgaccgttatctggccgagagcggtaaaaaggatgaaaagaatccgtatacggaagtgctgaaggctgtgcgtcaggcgatcattacctgtatcggcagtatgggctggacggatatagattacagctttgcttttcaaaatctgatcattatgcatgaaacgatgggtgtattgccgctggaggctttgagtgacggtacccgcagcgtgatcagtatggcggcagatcttgcgtaccggatggtgcggctgaatcctgaccttggagccatggcggctcttgaaacgccgggcatcgtactgatcgacgaagtcgatatgcatttgcatccttcctggcagcaggcggtagtttatgatgtgcggaaggcgtttcccaacgtacagtttattgtgacgactcacagtccacaggttctgagcacggttccggctgaggctatccgtatcctgcgctgggacaataatctgatcaatatcgataaacctgccttttctttaggcgctgaaagctttcagctgctcaaggatatccagaatgtcgacacgcgcccgcaggcattgccgatcgtgaaggatctgtacaggtatctgatgcttgtgagcgaggataaatgggatacggacgaggccagggagctgcgcaaacgtctggacgaatggtctaaagggtgtgaaccggctttggtccgtgctgatacggaaatcaggatgaagtctttcaggaggaagaaaaaatga

SEQ ID NO: 87297 - DNA, 780 bp, Phascolarctobacterium sp. CAG:207
atgaaacgggtgtacaaatctccggctacacccgagtgcctgcgcagttatgtgaaggcgtttccggacgaaacctgggagcatttccgtcggcgcaaccgcaggggctaccgcgaagtaaagcagcagctgctgcaggatcagcacggtttatgcgcgtattgtgagatcagtatcaagctggctgagtttgaggacaatgttgatgatttcagggtggagcatttcttccccaaagtagctacacagcttgaaaaacacaattatcacctggactggcataatctgcttggtgtttgccatggcggcagccagccctatgtgtcggaccctgaatggcgttattccagcaggaagaatgaccggagctgtgatgtaccaaagggcgggaaaccgatttccgagcggatactgaacccactgaagataccggcgtcagtcaggctgtttcgttatcaggagcataccggtaagatgatcgttgacgaaagttcctgtccgaaaaaattgcaggccaaggcgcgcaatacgatccgcgagctgaatctgaacgcgccgcggctgcagcggatgagactggcgctgatcaggatactggaggacgagataaacagtgctttggctggcggagcggtgctggaggagtttttgccgctgctggcggaaagtatcctgctgccggatgaagatggcaattatcagccgtttttttcagtggcgcgctggtatctgggtgaatttgccgaggatattttaagggaaaataattatgcgatgtaa

SEQ ID NO: 87298 - DNA, 1299 bp, Parabacteroides sp. CAG:2
atgaaagagattagattagagaattttcggtgttatacagagctatccatccccttgaaaagtagagtcaatttgcttgtaggtgataacgctaccgggaagacatccgtgttgcgagcttgtaagtttgtgttgagcgcattcttcagcgggtttagcgatgataataccaaatgggttaatcccggcaatgaggatttcatgcaaatggagaccggtggaatcttattgcaggagcgtcctattcatatttcttttgatgtggctgatgtgatggggaaggaggcggattccacgggtggagattcgttttatactttgataaagaaaagcaagaaaaatagccgttccttgacttcgggacttaaggagtataaggattgggcagctttgttgatgcataactatattagtaaggagggacagagaatcgctttacctcttttcgcgaatttctcgacagaagatattcatgctattcgaaagatcgattttggaaagttcaaggagtataaccataagccttcttttggctattatgaatgtttggagggggatggctttttcccttattggattaagcgattgctggtcttacaggaaggtagggaaaaccatttggagatagatatagttcgcaaggctatacagaaggctcttggagcgggtggttgtgcgattattcaagacatggaggttcggcccatccggaaaaaagtatattatatcttgatggatgggcgagaggtagaagctgatttcttgtcagatggatatcgaaggctggtttatatagtaacggatctagcttttcgttgcgcattgctaaaccggggtatttatggtgaggagacttgtgcgaaaacccggggtaccgtcttgattgatgaggtggatttgcatttacatccaacgttgcaatcggtggtgctgaaaggattgtgcgaggcatttcctggattgcagtttatcgtcagttcccatgctccgatggttatgtcgggggtggaaagtaatgaggagaatattgtttataagttgagttactcggaggaacagggctatcgtataatgccgactgtcacttatggtatggatatgtcgacgttgacctatgtcgtgcttggtcaaacgcctcgtgcggttgaagtagataggcagttgaacgaattgtttgagttgatagatgtggatcgcttgaaagaggctggagatttgttacagaagttgagagggaaatatggagattctttacccgaacttgcccgggcggaagcgatgttgaactgcttgatttaa

SEQ ID NO: 87299 - DNA, 630 bp, Parabacteroides sp. CAG:2
atgagaaagatagacaaacgaccggaaccaaaggagtgggtggaatatcggcagacccccggtgctaagtatgaagcgatatctgaactgcgaagttcgttgcttgaggagcaaggatatgtttgtgcttattgtatgcgtaggattcctgtgaaagaccggaatagtaatgaaaccagccggatagaacatgtgctgagccgagaaaagcatccggatagggaattggattatcataacatggtgatatgctgtcctggggcaatctcttctgactttcattgcgataagttgaaaggtaatgaggatctaacatttaacctttttgatgatgagctttttacaagcctttcttataaaagtaaatctgggaagattgtctcggcgaatgaagattatgataggcagatcaatcagttgcttaatttgaacaaccgctggttgatggctaatcgtttgcaggctttgctgggagtgattgattatttgaatcgtaaaggctggacagcttctaatttaaaccagcaaataagtaagtggagtaatatggatgcggaaggacgttataaggagtataatagtattgtcgtttggtatttgaaaaaaaagcagaggcaatgtgatttataa

SEQ ID NO: 87300 - DNA, 1353 bp, Parabacteroides sp. CAG:409
atgcgagatataacaataaaaaacttccgatgctacgaagaaaaaagtatagaatttcgtagaggagtaaatttgttgataggagataactctgttggtaagacatcattattgcatgcttgtaatttggtggtgaattcttttttttctggttatagtgatgagaatacagtttggattagtgcagacaataatgattttaggaatacaggtatagcagaacaacctatagaaattgcttttcatccaggggaatgggattttattgatataacatttccaaattcaatcatgtcttcacattcattagatataaataaagatttaaaaataaaaaagaattcaaaaaagaactctcgaaatttagtaacagatttaataccattaagggattatgcgtcaactataaaactttggtctcatgttcttgtagaaggtgtgggtattaaacaatttaatattttacctgtttatgcctgttttaccacagaagatattcattcaactgtcaagttagagaaaaataagtttaagacatatgtacaaaaaccttctttcggatattatggatgttctgattgtaggggtttgcttgaatgctggataaagcgtctgctggtattaaaagaggctcaaaaaggtgaggaggaaattaattctgtaagaaatgccattatcgatgcattaggccctactgggtgtaatatcatcaatgatatggatatacgtcataatgaaggcaaggtatatttcaagtttgttgatggacgtgaatcagaatccgcattactttccgacggttaccgtcgtttggtgaatatcgtgatggatattgctttccgttgtgctttactcaacaaatctatgtttggcgaccagtgctacaaacatacacatggtactgttatcattgatgagatagatgaacatctgcatccggctttgcaagtccgtgtgctgaaagcattgcaagatactttcccgaaaattcaatttattataagtacgcatgctcctttggttatgtcgtcagttgaaccaagaaaagatgaagacggtaatgacatcaatgtggtgtacagactggaatatgcggatggtgtttattctcataaagaattaaagccgtatggattagatgcaaatttaattcttgaagaaatgtctttggtagatagtcgggtccctgaaattgccgaccgtattgaaaaaattaaagatttaatatctgaaaaattattagatcaggcttcttctcagattagtttattagaggaagaaacagatccgaatcaaccggtattagttagactacgtgctattattaacagactagaaacattgggtaaatga

SEQ ID NO: 87301 - DNA, 735 bp, Parabacteroides sp. CAG:409
atgagatatattgagaaaaatttcagctatgaaaatacagatgtcatagcatacgaaacagaactaatagagaataaattagataaatgtaatctaagtgatgcagctattcatcctacaatgtcaggacctgatgtttatgatgcagtaaagagttttaattcttttaaaaaattcaaacaagcaattctaagagatcagggttctatttgctgttattgtggtcagttaataaaagaatctacatgtattgtagaacatgttttgcctaaatcaaaatatcgacatttagcaggtgaatatgaaaatttattattgtcttgcaagccaacacaagaagaggagaatgaaaggaaaaaagctggcggaaataaaaaaaacaatataaaatattggcattgtgataaattaaaagataatgaggaattgaattatacacctttgcaaaaagattgtacatctcattttatatatttagataatggagaagtaaaaggggatgatatgcttgcagatgccgatataaaaactttaggattaaactgtaattatttgaaaagaagaagatatagtgctatcttaggagcaatgttcgatgacagtgatgtattactttcaaatgaagaattagaacaatatgcaacattagttatgaatagaaaactggatggcagttttattgaattttgttttgtaatagaaggggcaataaatcatttattaaaaaaaggataa

SEQ ID NO: 87302 - DNA, 1755 bp, Bacteroides eggerthii CAG:109
atggattctattcatatagattttacagaactaaggacatcatggactaaatatgatatagtccaagcattggatgttatatatagtgttgatactatacagaaatataagaataaagaagcaaaaatcaatgaaagaattttgcgttcatttcttggtatcaactccctagatgatccaattcctgattattggattgagattcaaaaatatccaatagaaaagaaaatattttcattactagctctaatctttactcatggaggggttgtaaaagactttgcaactaaatattcaaaagataacatgaaaggtgtcttttatattgattctaaagataaacagcttactaatattcgcagtgctttagtagttgcagaagcaacagatccaacaaataggagaaaaaatgaagttccttatgacttctccgtcgtatattacaatcccaaagttggaaaattatttaaaaaagtattattagaaaggatttccagatttacaaataaagaactttcgaatgatgagttttatagtatttgtattgaaaatgaatttcataaggctttaagtttgacttttgaccaattcaaaacatggcttgaaggttatagctttaatgcgtgttacgttaaagaattacatatcagtaattttctatcaataaaagagccagtagatattgactttgaaaaatcaaaagaaatatattttcttggagagaatggtgatggaaagtcacttataataatggcaatatgtcttgcttttaatggcaattatatcaaatataaaactgaaaagcgagatactggaattgcatccgatatattggataataatagcgatatatatggtattgatgagtgggggcatcaatataatatttctaatgcaatatatcttgataatctttatgcttatggtacacatcgcggaagatataatgctgatccttctgaaaaatatggcttcatgtcattattcaataatgatcttacactaaatagcccagagcaatggctaaaaaatctgaaactggaagaagaacaagctgaagaaaataagctaaaaataaaagttgcaactaaacaattagaagacattctgttcaatctactcgaaagaaacgttaaaactcacattgaagggagtaaggttttttttgaggaaaaagggtgtttcctgagtatagatcaattatcagaaggatataggagtatcattatttttgtctgtgatttattgtatcgtttatataaaaacaatagcgatgatatattcaaaacgaaaggtgttgttttagtcgacgaaatagatcaacatttgcatttgaaatggcaaagaataattgttagtaagttacgaaatatatttccaaatatgcagttcatatttacgacgcacagccctacaattattcaaggcgcatcagacgattctattatatttagaacgtatagagtgaacggcataacaaaagtgagtgaaccgtattatagaaaggacttagatcatctcatgatgaatactttggtaacttcttctctatttgggttggaagattccagattagacacagatgataataattccgatactaacgatacttatttattgtataaaataaataagaaacttatttcaaagttacaggaacaaaaagaaaaaggtaagaattttgttagtgagaacgaaattgactctttgatagatagcattttagaagaatatcaaaatgaagaagatcgataa

SEQ ID NO: 87303 - DNA, 777 bp, Bacteroides eggerthii CAG:109
atgaagaagatcgataaagacttagcagtaataccaccatcactagctattggtgatgataagttaacacatcaaaggagattagaattaatagcaaagaagcattatattaatgaagcaccttacaatgatcgatataaaactgatgatattagagatagattagtgcgtatatataacaacaagtgtgctttttgcgaacaaaaggttgaacaatatcatattgaacattttagacctaagcaaatttactactggttagcatatagttgggataatcttttattagcgtgccactactgcaataattataaaggcataaacttcgcaataaaaggaaagcgagctaaatgtcctaatacaaaagatttaaaaaacatcaatactatatcatccagcaaatataatcttcaagaacaaccaaagttaataaatccagagcaatcagagccaagttcttacttgatatttgaaagagatgggaaaataacctctgataacgaagattataaatatacaatagaaacatgtagaatagaccgtaaatatttaaatgatagtagaaaaaaaattattgataaatttaagagagaaataatttcagagcttgtttataattcaactccagaagaacaaaagcaggctataaatatattggtcagacgttttgttaatgaagccaatgataatgataatgaatttttggcttttcgtaattttgcaattggacacaattggttaaatgatgtagtaaaagaagctattactaccttataa

SEQ ID NO: 87304 - DNA, 528 bp, Eubacterium sp. CAG:252
atgtcgagtggttacgcagcagtatttgatattattaatgatttgattataagaatggaagcacagtcgggattgcggacacagtttgatatggaaggtattgttctggtggatgaaattgaaactcatttacatttgcaattacaaaaaaagatacttccagttttgacaaaattgtttcctaatatacaatttgttattacaacacattccccatttattctaagttctttagataatgctgttatttatgatcttgaaaataacacgcttgttaaaaatggtttgaaaaatttaccatatgaaggaattgtggaaggatattttaaagcagacaaattgtcagaagagttaagggaaaaatatgaaagatataaagctctggtttcaaaggatgagttatcagataaagaatatgaagaaatagataaactggagtactatctggatgaaataccggattatcttgcaaaagaattaacggcggaatatagtcgtctgaaattagaattttcaaacagggggtag

SEQ ID NO: 87305 - DNA, 657 bp, Eubacterium sp. CAG:252
gtgattaaaatagagcgaaatcctattcctccatcatcacttataattgaatcacaaaagccaaatggggtttataacaagcctgatgtaatacaaagattaaaagaagattcaaatgataagtgttatatttgtgagttgggaggattgtctgatccggaagtagaacatttaagaccacatcatggacgtaaatttccagagagagtgtttgattggaacaatttattttatgtatgtccacattgtaataatctaaaaaaagaagcaaaatatgatgacaaaattatagattgttgtgttgatgatccagagagtatgctggaacaatgttatgaaaatggacatgttaatgtacttaatatagtggataaggaatgtgccattatgacagcacagcttatacaggacgcttttgaaaaatgtaatacaggaattagggaagctgcttgtcaatatagaattaaccaattgtcagatgagatgaatgttttatataaaatattggaaaaacataagaagaatcctgaattacagcgttataaaaaaagtctaaaagttacattgagtagaaccagtgtctttgcagcatttaaaagaaattatgtaagaaaacatattatggattatccggatttagaagaatttttaatgtaa

SEQ ID NO: 87306 - DNA, 1350 bp, Eubacterium sp. CAG:252
atggaacagttttacttgaaaaatatagaactatttcattttagaaagtttgaggacataacctatgaatttaatccacgaatgaatgtagttattggtaaaaatgcatctggaaaaacttcattattggaggcaacaacagttattttaggagcatatctggcagcatttaaggaatatgtaccaagcagatatagtcataatatatcggatgccgatgtattaaaaaaatcattaaaacctgtaaaaaatgttgctgtaacatcatccatacagcaatatccatgtaagataacaagtcagtttatgtgggataagtctgttaagaaatgtgtaagaagtcttgaaaaagaaggcggacgaacaaaatttatcggaaaaaatccaatgcgtgatgatgttgaaaaatgggagaaagcaataaaagcagccgatggttcagataatgaacagatatatcctttagtgttgtacttaagttctgcaagactgtggaacgaaaacaggacaggtgaaatgtcaaaaattccggcaagaactgatgcttatcaaagatgtcttgaccctaaaagaggaaatcagacatcatttgaatatataaaactgcttggtaatcttgccgctgaggaaaatgatggaattccattaccagcttatgaagttattatgaatgctgtaagatatagtttaaaagaagaattgagtgaaggacaacaggtattatattcttcaaggtacggagagattgcggttaaaaatacagatggtacagttattaatttttcagcattaagtgatggctatcgaaatgtaattaaaatagttacagatatagcaactaaaatgtgtattcttaatccatatcttggaaaagatactttaatattaactccgggaatagttgtaatagatgaattagatttgagccttcatccaacatggcagagaagaattgtagatatattaaaagaactatttcctaaagtccagtttatatgcgctacacattcaccatttattatacagtcattagagccgggtgaacttattacactggactcaattcttgatgaggaatattcaggacaaagcattgaagacatagcagaagatgttatgaatgttaagattgcacaatatagtgaaaagaaagttgaaatgtatgaggcggcagagaaatattttaaggcattaaaaaatgcagcatcaaatgaagatatagaagagttgaaggacaggctggatactttatctgccagatatagtgataatccagcttataatgcatggatgcagttaaagtatttagagaaaaaagcggagatgaagaataatgcgaccggtgaataa

SEQ ID NO: 87307 - DNA, 660 bp, Eubacterium sp. CAG:252
atgcgaccggtgaataaaggacaaaagccagtagaatataagcattatagggatgctgaaccatatttagagcaaagacttggcacatactgctctttttgcgaaatggatattagcaacgctcctgaagttgaacataaagaggcaaagtcgagaggcggtcaggaacttgaatgggataacttgttactttcctgcaaatactgcaatacacgtaaaggcatttatgtaaaaaagggagataaagaaaaatatatctggccagataaagatgatacatttcatgcatatttgtatgatgaagatttgccaagattaaatgaagaatacttaaaaacaaaagatataaatgaaagagagaaagcagagaatttattcaatcttttaaagctggataattatccggttacacctaaagacagggataaaagatttgcgaaaagaaatgaagcaagaaattatgcaatatcaggcagagagggattaaagtctataaaaggagttgatgaacgcagggtttatctggagttaatgataaatcttgcaaaatcgagtggctttttttctgtctggatggaagtatttaaagatgatgatgagataaagaatatgcttatatcaatatatccgggaacaaggacagaatatgtaagcaattag

SEQ ID NO: 87308 - DNA, 1272 bp, Clostridium sp. CAG:253
ttgtatttagaaaagattcatatagagaattataaagcaattgaaaaattagatattaatttaaaacctgggttgaatctgcttattggtgataatggttcaggaaaaacttctgtccttgagggaattgctgtggctcttggaggtttgtttgtcaatgtcgcaggtgtcagaactaagaatatcgtaaaagatgatgttcgtatgaatataaaagctttgggtgattcttcaacgacgattgaatactgtgaacctgtagtggctggttgtacacttcaggtaacggaagaacagaattttacatggagcagaatcaaggaagaggtatctgctacctatacaaagatagatgataaaaatgtatgtgtttggatgaagaaacttgctaataattcaagtacgattctgccattgattagttttcaaagtgctgcaagagcatggagagtaagaagaggagattttggaacggaattaaagaagaaattggatgatagacgatgtgggtatatcggatgtctggattcttcaatggatgtgaaatctatccagcagtggtgcctcaaacaggaaatagtgacctcgaataaagggatagtgcgggaatacgaaatgtttaagaatattgtagcttcgtttatgaaggaaatcaatgaactagataagatgccttcaatttattattctccgcagtttgatgaattagtttacaaggatgataaggaagaaatgcctatttcaaagctgagtgccggttatcagtctctattgtggatggttatggatctggcatatcgtgtttgtatgcttaatccggaattagaaagcagagaccaaattacaggtatagttcttatagatgaaattgatttacaccttcatccaaagtggcagtggaatgtaattgatgcattgcgaaaaacattttcaggtgttcagtttatcattgcaacacattcaccgattgtaatttcagcgtcaaaagaggtaaacctgattcttttagacaaagtcaaagcagtgagttatttaccagattgttatggatatgaagtagaggatgtactgagttaccgtcaggagagtgtatcaagaccaaagaaggtaaaatacttggttgatgagatagagaatgcgattgccgatatagcatttgataaagcagatgctgcattggaaagattaaaagatgtgcttggtgaagataatttagagtacaagaaaatggcaggaatgatttcagatgcaaagctgatagaggagtgctga

SEQ ID NO: 87309 - DNA, 744 bp, Clostridium sp. CAG:253
atgctgtatatagaaaaagaaggtttgccgaatgatataaacagaaaaattatagagttgagcaaaagcgaggaatggaaaagcatcggcgaagacgacacaacagcaatacgcaatgccttcgataatgattttccaaagaatgaggttaaagagattttacttcatgaacaacatggaatctgtgcatattgtatgagacgtattcgtatggacaatcattccagagtggagcatcttgtaccattgagtagaaacaaggacatggcaattgattataacaatatgcttggagtatgtgatggtggtgagaaagtcactggggataagggacatattctttgttgtgatgcatataaaaaagagacagaaatcacgattagtcctcttaataaggctcagatggataagattgcatatgactcaaaaggtaaaatctacacgaagccgaaagatgaagatattgaaagagatataaatgaagttctcttgttgaacggtattcagaaaaaagatgggacggtaagagatacctctacggaactgttaaagggcagaaaagatgcctatgacagagcaaagaaaatgatggctgccttgaatacaaaaggaaaatgtacatcagcaacgcttaaaaagataatggataaattatacaacagagaagaaagagatgagtttgtaggtgttcagatatattattttagaaaacattacaattcgctgattcgcagaggaatgtaa

SEQ ID NO: 87310 - DNA, 1245 bp, Roseburia sp. CAG:471
gtgaaagaatattttatcagtgaaattaatatagaaaagttgtatcatttatcaaatataacgattgaattggatacaaccaagcgccagcatttgttgttaactggaaaaaatggttcaggaaagacatcgttactgttaagattagtaagatatctgaaagtacttaaagatggacatcttattcgattaacgagaacatggccggaattagaagaagatgcgaaacgtaagatggaacatgcttcaagtgagaatgaacgatttaaagcggaacaggattacaggcaatggtcggatttgattcgtaagtatagcgatggcattagggttgcatggaatgataatgatggacttgaaagtgcatatcaaaaaggagaatttataactgcgtattttccggcagaacggaaagcacaatttgcgaaaccgaatggcgtggaaaatattaagctgtctgaagtatatgacaccacggagaacgccggaaatattcttcttaagtatatggttcacatgaagacacagcaatcttttgcaagaaacgaagacgaccaggaaatcgtagggaggattcaacaatggtttgacagatttgaatctgcgctacaggttttgctggacgaaaaatcgattcatctggaatatgattataaaaattataattttaaaatcagacaggaaggccgggagccttttgaattaagtgaactgtcagatggttattcatcggtaatttatattgtatccgatttgattcttcgaatggacaaaaactggttattgggtgaagaaatcagtcagtataatgcacagggaattgttctgattgatgagttggaaacgcatcttcatattgaactgcagaaaaaaattcttccattcttaacagaatttttcccgaatattcaatttattgtgacgacacattcgccatatattttgaattctatttccaatgcgaaagcatatgatctggaaaagcatgtggaactggagaacctggctgctttttcatcggatgaacttgcggaaggctactttgaggcagatgaatattcagatacattaaaagaggaactggagcgatatgcacagttgtgttctggaaaaaaactgacggaagaggagagggctgaacgggcagaattaaaaataaaatttaaaaatttgtcaacagatctgtcaggaactgccagagaaaagtttgaggatatcgaacgaagaagggaaacaaatgattaa

SEQ ID NO: 87311 - DNA, 711 bp, Roseburia sp. CAG:471
atgattaagattgagaggaaaacaacccggcatacacaagaggcaatggatgatttgcaggaatcatgtagtacaggacattcatacaatacagaacatgtgaatcaggctttacgggaagtattccatggaaaatgttatatttgtgaaaataaagaagcaacatcctatcaaattgaacatctgattccgcaccggggcgataagaaactgaaatatgattggaataatctgttttgggtgtgtgcacattgcaacaatattaagtcagacaaatacgaaccaatattgaactgtacaacagagcctgtagaacacctgattgcttttcggaaaacaggttattttggaacggatgaaaaactggagtttgtgccggtgaaggatgataatgtagcgatcagaaataccattttgctgttaaatgatgcatattatggaacgactcctcagaagaaaatggaagcaaggattatacgtaaaacgatgcggaaagatctttcaaagttcaaagaatatgtaagggagtatcaggaagcagagaacgaagaggaaaaagaggatattgcgatgcttctgaagagggaactgaaagacagttctgcgtttacggcatttaagagatggctgatatgggataatgaggaaaagtatggggaattggagaaatttattcctgagaatcagaagaaaaaattatttgacatttaa

SEQ ID NO: 87312 - DNA, 1317 bp, Clostridium sp. CAG:277
gtgagattaaataatattaagattaaaaattttagatgctttgaaaaagtaagcattgattttgacaaacatataacattgattgtaggtaaaaacggagccggaaagacagcgctattggatgctgtggctgtttcaatcagttcatttttgctaggaattgatggagcagtaagccgcagtatattaaaagatgatgcaaggtatgagtttcatgacttaaatggaacgattgatcctcagcatcaatttccggtcagtattgaaagtgtaggagactgcctgggtgagaaggataagcagtggctccggtcgttaaattctgagaacggcaagacaacgataaaggatgcaagccagataacggatattgcgaagaaaacgaaaaatagaattatgaaaggggataaaactttaatattgccgttgatatcttattatggtaccggacggttatatgcacagaagaaggagaagagaaatttacagtcattaacagagttcaagaggcaggtgggatatgtagattgcatggcagcagaatcaaatgaaaaattgatgctgaactggtttcagatccagacgatgaaaagtcttcaagagcagcagaaaacaggaatggtagaaagaccattgcttttgaagacagttgaaaaagctatatgtaaaagttatgagagaatcagtggatcaaaaaatgccggtattttctttgatcttgatacgcatagattaatgttggaatttgaaacggatgacggtggtgcacaaaaatttgcaatgaatgaaatgagtgatggatacaagaatacccttagtatgattggagatattgcttatcgtatggctgttttaaatccaactctaggtgatcaagtattgagagagacaccgggaattgttttgattgacgaaatagatttacatttgcatcctaagtggcagcagagcattttaaatgaccttaatgagatttttcctaagatccagtttattgtcagttctcatgcaccggcagtaattaattctgtgccaaaagagcagattcgtattctggataatggcaaaatctatatgcctgtagcacagacttatggaagagatgctaactctattttaagagaggttatgcaggtatctgacagaccggttgctgtaaaacagcgtatggatttattctatgcgtatatggatgaaaagaagtatcaagaggcagacaaggtgttaaaagaaatcgaaaacattgttggggcaacggatccggatgttgcggctgcgagaacttctctggatctggagatgatattgggggaatag

SEQ ID NO: 87313 - DNA, 672 bp, Clostridium sp. CAG:277
atgattgttgtaaaaagaggaaaagaacctaacagccttttggaatttcgtaaaaaaaatccggatgcggattatgaggatatgccatcaagtgtgcgtgcagatgttagagagcagatgtggaatgaacaaaaacatctttgtgcatattgtatgaggagaatagacagtccgagtgttgtaagaatagaacattgtcgaccgagacatccgaaagatgagatcgtacatgataaaaaggcaacgctggattttaaatggatgctgggtgtctgctatgggaatagtttagtaaaaggtgtaaaaactgaggatacgacctgtgatgctcatagaaaaaacacagaacttaccataaatccatttgatgaggtgtcagtcagaaaaataaagtataaagcagacggaagtatttattctgaggatgaggagataaacaaagatgtgacagataccttgaacttaaattgtacagctatttctcttccgcagacacgaaaaaaagtattatcggaagcccagaagagaatcgtgcagaaatgtgcaggtaagtcacaggatgcctatgtgcatgaattagagcgtacatatacgagcttggttcaggagaggaatttaacaccatattgtgggattattatttcctggcttgaaggtaaattaaagaaatga

SEQ ID NO: 87314 - DNA, 1218 bp, Serratia plymuthica S13
atggaaaaaaatatcaatattaatattttcttagggaagaatggtgaaggtaaaagcagtctttttgagagagaaataaagaggctttataataatacgaataggaatattttagtagtatgcaactctatttacagccgttataagaaaggagaagataatgggtatcgatattttggtttagtgcgtgggcgtgttgaaattgaatcaactatcaccaagttcattgcaagaagtctggatgattataattataaaaaaatatctggagttttaaattacttagcttatgaagacaaaattggttttaatataacatttaacaagcattataataacgatggaaataaaataattgaatatacagatgatgatagagatgatccctatatcaacgctatgttagatgttatgaaagaggaagagattaaaacaggaaggaaactacagtttggtattacatatagtgaggtagaaaaatttcttgtagaaaatagtgggaagattatttatttcgatgaatcaatgcaggatgaaatggttaccagtaaaagcatttttaaagcaatagttcaaaatgaaaaaaaattaaaaagaatagggcttgttaagaaaattaattactttgttaccaaaggtggtgttgcactgccgatagcaaaaatgagctcaggagagaggtatttattggggctaatgttttttctctcgacgagcctttctcacaatacaagtatatttatagatgagccagaaaatagtcttcatccacagtggcaaatagaatacattaataaaatattagaatttataagatatgaaaatgcttactataatgatgatccttatgaaaatgttcgtattaatatagctactcactcaccattgattgcactattttctggtgaaggaaaaaatgtcactttaagaaaatttaacgtaaaaaatagagaagcaaaagtaatagaaaacaaagactccagtgttgaagatatttatatggatctttttaatgttttaacccccaaaagtaggagtttatcaaatcattgttccgaactaatcaatgaatttattaaagacaatattacttatgatgaggctatggctaaaatcctcaattacaagtcaatatctgtggaacgaaaacaggccgattttttaagtgaaatcgtagggttgttagaattagctaacaagaataaatctggaaagtaa

SEQ ID NO: 87315 - DNA, 624 bp, Serratia plymuthica S13
atgtgcttaattgaatttaacaataatgagttatgtttaattgataaggcattaaaactaggatgtaactgttggtcagccgattttttgagtgatataaaggaaaagataaaaaatcatctactaaaaaaacaactagagaactgttgttattgccaaaaaaacttatcgggtgagttcagcatggtcattgatattgagcatattttaccaaaaagtaaatatccaaagttcatgtttgatttaagaaacttggcaatatcatgtaagcgttgtaacatgaaaattaaaagaaatgatattgcattcttaaatgatgttttcttccaaagtgaaaattattttgatatcaaagggtatgatatcgtccatccaaatttagatgtatatgataaccacttgaagttatgtagttttcagtgtggaagtgtaaaactaataaagtatattatagtcgataatagtagaaaaggcgattttacttatggttactttaaattaaaagagcttgaggtgaatacatttaacaatgcacaaggactttcaaatgaaagtgaaattattgatgaggttattaatgaaatgtttgttaaagccactgagaaatttaacatgaactattag

SEQ ID NO: 87316 - DNA, 2304 bp, Rhizobium etli bv. mimosae str. Mim1
gtgcgatatgtttcccgagaaaaggttctaattccaaaggtcttaacctcgcccaaggtgaatgatctgcgtgcacaattagcgagatatgcttccagccaagatggactgtcgaggcagcaacgcgcgccgatcgaccatagcgtcttcgaggattccgacatattgggcggcctctttgacctcttcgaacgcaggtgcggttattgcgaacagcgactagaccattataaccgtccaccgttggaacaccatcgaccgctcggcgtcgcacaagacaaggatggtcgcaccgatcagtaccattatagctggctggcctatgaatgggacaatatgatcgcggcttgcgaggattgccgaaagcgtaagcagaacaactttttcgtcgaaggaacccgttgtgagttgaatgctccgatcgcagaattgcgctcgaccgagagtgcactctttctcgatccttgcttcgatgatccggccgaacatttgcgctttggatccgatggaacggtccagcctttgagtcctaagggacgggagacaatttcgcttctgtctttgaatcgtcgcgatctcgtagatgcacgttaccgcgcgttgaatgatgcggttggccgcctagcggaggcgcctcaaggcctgttcgcttcgccaacagacctgctgaaaagcaaagcttcgtttgtactagcagagactgagcacccaggtgcaacggcacttgccctgatcgaggccgcgtccgagcaagggcgcagctttgacgaccttggccagatgctcgaggagcttggtcgtatggatttgaaaagtcggcgccgcttcgtggaggctctcctgatggggccagcggccgaagcttcggtggttgaagaatccttttctctgccaccatcgaggcggttgccggggcttgcggaaatgcccgctgcgaaagcggctatcaccaccgtcagcgttcgcaacttcaagggtctgcagtcaatagacttccggcttcccgataccgttccatcggtggatgctgtgccgtgtatgatcctgctcggcgaaaacgccacaggcaaaagctctgttctggaggcgatagcccttgccctcctgggaacggtcgagactaaggctctcggtcgcctcattcccgacgaggatgtcaacccgggcgccctcatccaccgccccgacctcgtccactgggacaaggtcgcgcatgagccccttgatgtgaaagtcggcttcttcggtggccaagccattgccactctgaccgccggcggttcaagcgccactttttatggaacggaaggcccatccaagatcgtgctggcctatggaccgaggcgctacttctcgaataagaagacgcggcgttttcgggcacctgcctaccgcgtccgatcactgttcgatgcaatggcgacaatcgccaatccatctgactggttgctcacttgcgacgaggccgagttcgagcccgccgtccgtgcgctacgcgagatcttgatgcttgaggcgaacgactatttcgcacgcgaagatgggcacatagtcatcgagtcttctggcggacgcacacggctcgaggagatgtcggtcgggtacaaatcggtcatcgcgatggcgacagacatcattcgcgagcttctgcggttttacgacaatctcgaatacgccagcgcgacggttttgatcgatgaaatcgagacccaccttcatccgcgctggaagatgcgcatcatgtcgtgtctgcgccgggcatttccacgcgtacagttcatcgtcactacacacgacccgttatgcttgcggggaatgcatgatggcgaggtgtttgttctacatcggccggctggtgaccgtcggatcgagaagcttgagaacctcccggcgatcaagggaatgcgagcggagcagctcctgacatctgagtttttcgggctcggatctaccgacccggaaacggatgcgaagctggcgctctatcatgaactcaactcgaggcgggacaatctcgacgaccgcgaagcgcaggaattgaaacggctcaaaggcgatctcgaccgaaacctggtcgttggcgacacacctatcgagcaggccttagtggatgtcttgcgacaggctgagctcgagacccgcaccgagcccagcaagaccgcattgccaaagagagcttcaatcttatctaacgctctgcagcgactgacaaacggtttcgtatcgcctacaagcttgaccagcgcagaggcacggtcaacgaacgacatgcaaggcaacaacgacggcacagcagaggcgtag

SEQ ID NO: 87317 - DNA, 909 bp, Rhizobium etli bv. mimosae str. Mim1
atgatccgcgtcgatcgcattgggaaggtgccggcacggcttgatctcagcgataaagcaagtctggcttcgctcgagcgccagaagattatcgacggcctagtcggcggaagaccggcagacgatacaacgttttccgcctatgcggacgattcagttcgcggtgcgctacaggacctgttccataacaaatgcgcctactgcgaaagcaaaatcgccggctcacaagatacggatatcgagcactataggccgaaaggacgcgttaccgacgctataaagagcgggatcaatcaccctggctattggtggctggcgatggattggactaacctcgtgctcgcctgcatgcattgcaatcaacggcgtcgtcaactgatctacacacctggcatgacggaagagcagatcgtcgctttgatcgagtccaagaaaacagtcacggttggaaagctcgatgcgtttccgacggcggactcgaaatgggtcaccgactacaagctggatgttgcaacggaacagccactgctgattgatccgacaagggttgatcccgaacttcacctcgactgggttgtggatgagaatctctccacggttcgggcacgtgatagcagtcaaattggccagacctcgatcgatatcttcgcgctgaaccgacgccggctaactgaagacagaatgtcaaagctgcttctcttgcagtggacgggcaatcgcgcactggaggagttgaatgcggctgtcaacgaagccgacgacgctatcgccgcacttcgcgagaagacggccctcgactacctcgagatcttgcgacttcattgcgcccctgaccagccatatgccgggatggcacgtgcctatctcgcccatctggccactaagatcgctgccatacgggcagtctga

SEQ ID NO: 87318 - DNA, 732 bp, Clostridium sordellii ATCC 9714
atgagaagagaagaaaatttaactgaatccattagaaagtatatccaaaatgctccttcaagtttaaatggtggatatcttcctgatataaaacaatggatgataaaccgttattttcagatagaaaaagaatgggcatatatagaaaaaagcaactgggactggctaataaaaaatatagatacattagctcctaaagactcaaaatttaggtttattaaaatcgaaaaagatttagaaccagtatttactataaatgataaagaatgttatttagaagaattatctacaggatttcaatctatactatcgatggtattagctatatttgaatggatagaagcaactaatgaaaaagatgataaattagtgaaaaatgcagccggaacagttataatagatgagctagatgtacatctacacccagaatggcagctaatattaagggatagcttagaagtgatgtttcctaaactacaatttatagttacgacacactcaccacatctaatagcatctgcaaaagaaggcgaaataatagttgttccagaaaaaaacactaaccttgatttatatccaagaaaagataaatattcaggatggaatacagatcaaattctaagtgaattaatgggcgtgaaaagtctagataataaggaatacttcagaatggttgaaaaaggaatggaatatatcaatgagccaatattgaaggattatctcatattatag

SEQ ID NO: 87319 - DNA, 768 bp, Clostridium sordellii ATCC 9714
atgataaagataaataagcaggcagagccacctaaaatattattagataataaagaaaaatggactaataatcttatggaagctgtcaaaaagtatggttcatataagaagataccgagggatgaaaaggaaaaattattaaagaactataagcatcgagatatacaatctatattatttgactcaagttatatgaaatgtgttttttgtgaatgtaaaccagcagagggagggaatattgaggtagaacactttgcacctaaatcattatatccacacttaacatttgaatggtcgaatttacttccaatatgcagaaattgtaatggatcaaaatcaaatcatgatactttaaatagcgtgattattaatccatcagaagctgatccagatagatattttgattttaaaactttaaaaatggtaacatcagatacatctccgaataaggatatatctgaaaatacattaaatgtaattagtaacttaaattcaccgtctttatttagagttagagctgatttactatatacattagccacatatgaagatgatttagaatatcacattaaggaaattgagtctagtggaactgaaagacaaagaagcatcaggataaataaattaaaaaaatcgttagaacttatagaagaattatgtaaacctaatgaaaagtattctgggtttgttaaaaattatgttttcaaaagtgatgtaattactaaggctaaaaaaattgtatctgaattttttagtaccttagattaa

SEQ ID NO: 87320 - DNA, 1440 bp, Proteus mirabilis BB2000
atgaaaattgataaagtaataataaaaaactttcgttgttttgaacaacttgaagtgacatttcaccctcaaatgactgtacttatcgcgcctaatggtgcaggaaaaacaactatccttgatgcagtgcgtattgctatgtggccttttgttaaaggttttgatttaggaagccaaacaggtaaagctgcaaccatacagattgatgatgtcaggttaaggcgttttgaccagaatatggagcctgcattacctgcggaaatagaagcattttctaattcagaaatgaatattctacctatctcttggttgcaatctagggataaaattgctcctcgtacaacaaccaaaggtgatacctttactactcaattgactaatattgctaaaaaatatcagagcataatttataagtcttcaaaatcaactaaaatagctagcgaatctttttctcaatcggtagaaaacatcaacttacctttaatcgtatatttagggacaggacgactgtggtatcaagggcgatatagctcagaagctcaagatcaaaagttggataacagtgtttattctcgattttggggatatcaaaattgtttaactgcaacatcaagttataagcaatttcaatcctggtatagttgggtatatcgtagtcatcgtgagttacaaattacccaattagaagggcaattaaaaccacaagatgaagaagcgcagaaaaatttttctgcagcaattaaagtggtacaaacttctattaataagttaacgcaaaagttaacgggatggcatgacttacaatatagggccagtatggggcagcaacttgtaatggaacatcctgaacaaggctatattcctctttcattgttaagtgatggcttgcgtaatatggtggcaatgatctctgatattgcatttcgctgtattaaattaaatccgcatcttggagagaaagccgctattgaaacatctggaattgtattaattgatgaagttgatatgttccttcaccctacttggcaacaaagggttttgtcttctcttatggaagcatttcctaagctgcaatttattgttactactcatagtccacaagttatcagtaccgtacattctgatagtatccgggttattggtgagaattataaaggtaagcttattgcatcaaaaccgttagctcatacatatggaaatccaagcaatcaagttttagaaagtgttatgctcgtagatcctcaaccaccaattaaagaaaaagagatgcttgaacaattaactgaattagttgatcaaggaaaaggaaatactgaattagcccaatctttgctgacagagttaacggctcttttaggtgatactcacccacaattacagcgcttacataggagccttaatagacaacaatatttgtctcatttagagggccgcaaatga

SEQ ID NO: 87321 - DNA, 681 bp, Proteus mirabilis BB2000
atgaggtttattgtacaatcatcgttaaatattcgtggcttacatgtcgctaatcaaaatccacccattaatgcaacccaagccatcagtcgttggcaatcttttagttataaaaatacagtattacagtcattatgtaggcagcaatccttgctttgttgttatagtgaggttagaggtgatcaacttggtttaaattatcatatcgaacatattgagaataaaagtcaaaatccatctaaaacatttgatgaagctaaccttgcagcaagtgcctttagttccgaagaattatgtaatgtacgtaaagaagaaatatttggtggtcatgcgataaacaaacagcaacatgttgatataacaaaatttatttcttgttatcaatatggttgtgaaagttattttacctatttatctgacggtagaattgtgcctaaagacgaattaaatgtaactcaaacagcaagagcaaactatacaattaatttattaaatttaaatagccattatttaattaatttacgtagacaacgttgggatgagttagaccaattagttcttgagcatataaataataattgggatttagaacagttgtgtgatctagagttaaattttttagatagcaatcatggcttatatcctttcttttcattagctcgtcaattttttggtaagtaa

SEQ ID NO: 87322 - DNA, 1197 bp, Peptoclostridium difficile CD22
ttgaatagaatgagaaaacttgataatattaagaagggcactataattttagatataattcctaatagtgcaaatgggagagatgcaatgaaaattgaaaaaattgaaattaaaggtattggtggaataaaagaattaagtctgaggtttaataaaggacttaatataatatgtggtgcaaatggtataggaaagacaactattttagaagttatttcacatcttttttctatacaatcttctgatttaaagaaaaatgcaaaatttgatttaggagaagcaatagcggattattcgtttgaagatatagaagctgtacataaaagtacttatcaaatcaatgatttcaatgcttctgtgaaagaacttatttttgataatcgagataaaaaaaaatatagtaaatttgtgttgttttttaagacacatagagaattaaattattcaaaattggatggaataactggagatgaaacatatagtgatgatagtacatcttatatggctgatttaggtatagattcaagtaaaataaaaaattggtttattaatagacttcttttttctaagcaagaaggttctcttacaaaagaacaattatgtaatttagacttagcaatagaaatgattagtattttagataagaatgtatcatattctagaattgtatcagattctttagatttaatgataaatactcctcaaggagaaatttatatagaatatttatcatcaggatataaatcatgtttttatatattattaggtataattaaggaattagaatatagatttactaaaccttatattgaagttaaggattttgatggtgtcatactaattgatgagttagacttacatctacatccagaatggcaagttaaaattgtaaatgcattaaaagtattgcttccaaaggcacaaattatagcaacaacacatagccctaatatgatacaaacactatcaccagatgaaattataccattaaccatggatgaaaatggtaatgtgcgtaaaaaagacttagagttaggtgaatatggattgcaaggatggactattgaagaaatattgacagatgtcatgggaatgaaaacaacttcttctgagttatatttagatacaatgaaaaaatttgatagagctatggataaagagaatgtagagaaatcaagaaatactatgatatcttga

SEQ ID NO: 87323 - DNA, 759 bp, Peptoclostridium difficile CD22
ttgataaaaataaatagaacaagaaagcctattgaattaacagaagaagttcagaaacaattaacagaagaatttaaaaataataaagaaaaaagcgtgtggaggaaaaagtatattacaaatgctctacttgagatgtctcatggaaaatgttgttattgtgaaatgaaattgatagaagagggcaaatcactgaatgtagagcattttcaccacaaagacaaatatcctgatgaagtagtgaaatgggaaaatttattgccatcttgtgggagatgcaatagtgaaaagggtactcatgacactaaattagaacctataataaatcctgcaataaataacccaaaagattatttatatttatataattatagatataaaagtaaaaatagaaataaacttggtagtgatacaattgatatattatatttgaatgatacagacaaattaattaaaccaagagtaaatatttgcatggctttattcaaaaggttagagtctataaaaacatttgttgaagattatcaaaatggtacaggaacacatacaagaagaaaaaataaaattataaacgaagtaaaaggtgtattaagatgcgctcaaccaactgaagaatatagtgctattgtggcaaatgttatagtaaatgatgatgattataaatacataaaagaaataatgtcagaatttaacttgtgggataatgaactagaagaattagaaagtaaagcaaaagaaataatgttagattcagaatga

SEQ ID NO: 87324 - DNA, 1269 bp, Peptoclostridium difficile CD40
ttgaatagaatgagaaaacttgataatattaagaagggcactataattttagacataattcctaatagtgcaaatgggagagatgcaatgaaaattgaaaaaattgaaattaaaggtattggtggaataaaagaattaagtctgaggtttaataaaggacttaatataatatgtggtgcaaatggtataggaaagacaactattttagaagttatttcacatcttttttctatacaatcttctgatttaaagaaaaatgcaaaatttgatttaggagaagcaatagcggattattcgtttgaagatatagaagctgtacataaaagtacttatcaaatcaatgatttcaatgcttctgtgaaagaacttatttttgataatcgagataaaaaaaaatatagtaaatttgtgttgttttttaagacacatagagaattaaattattcaaaattggatggaataactggagatgaaacatatagtgatgatagtacatcttatatggctgatttaggtatagattcaagtaaaataaaaaattggtttattaatagacttcttttttctaagcaagaaggttctcttacaaaagaacaattatgtaatttagacttagcaatagaaatgattagtattttagataagaatgtatcatattctagaattgtatcagattctttagatttaatgataaatactcctcaaggagaaatttatatagaatatttatcatcaggatataaatcatgtttttatatattattaggtataattaaggaattagaatatagatttactaaaccttatattgaagttaaggattttgatggtgtcatactaattgatgagttagacttacatctacatccagaatggcaagttaaaattgtaaatgcattaaaagtattgcttccaaaggcacaaattatagcaacaacacatagccctaatatgatacaaacactatcaccagatgaaattataccattaaccatggatgaaaatggtaatgtgcgtaaaaaagacttagagttaggtgaatatggattgcaaggatggactattgaagaaatattgacagatgtcatgggaatgaaaacaacttcttctgagttatatttagatacaatgaaaaaatttgatagagctatggataaagagaatgtagatgaaatcaagaaatactatgatatcttgatgaaaatgttacatccaaatagtacacttagaacaatactgaaaatacaagtggcaggaataatagattga

SEQ ID NO: 87325 - DNA, 759 bp, Peptoclostridium difficile CD40; identical to SEQ ID NO: 87323

SEQ ID NO: 87326 - DNA, 1260 bp, Peptoclostridium difficile CD47
atgagaaaacttgataatattaagaagggcactataattttagacataattcctaatagtgcaaatgggagagatgcaatgaaaattgaaaaaattgaaattaaaggtattggtggaataaaagaattaagtctgaggtttaataaaggacttaatataatatgtggtgcaaatggtataggaaagacaactattttagaagttatttcacatcttttttctatacaatcttctgatttaaagaaaaatgcaaaatttgatttaggagaagcaatagcggattattcgtttgaagatatagaagctgtacataaaagtacttatcaaatcaatgatttcaatgcttctgtgaaagaacttatttttgataatcgagataaaaaaaaatatagtaaatttgtgttgttttttaagacacatagagaattaaattattcaaaattggatggaataactggagatgaaacatatagtgatgatagtacatcttatatggctgatttaggtatagattcaagtaaaataaaaaattggtttattaatagacttcttttttctaagcaagaaggttctcttacaaaagaacaattatgtaatttagacttagcaatagaaatgattagtattttagataagaatgtatcatattctagaattgtatcagattctttagatttaatgataaatactcctcaaggagaaatttatatagaatatttatcatcaggatataaatcatgtttttatatattattaggtataattaaggaattagaatatagatttactaaaccttatattgaagttaaggattttgatggtgtcatactaattgatgagttagacttacatctacatccagaatggcaagttaaaattgtaaatgcattaaaagtattgcttccaaaggcacaaattatagcaacaacacatagccctaatatgatacaaacactatcaccagatgaaattataccattaaccatggatgaaaatggtaatgtgcgtaaaaaagacttagagttaggtgaatatggattgcaaggatggactattgaagaaatattgacagatgtcatgggaatgaaaacaacttcttctgagttatatttagatacaatgaaaaaatttgatagagctatggataaagagaatgtagatgaaatcaagaaatactatgatatcttgatgaaaatgttacatccaaatagtacacttagaacaatactgaaaatacaagtggcaggaataatagattga

SEQ ID NO: 87327 - DNA, 735 bp, Peptoclostridium difficile CD47
ttgataaaaataaatagaacaagaaagcctattgaattaacagaagaatttaaaaataataaagaaaaaagcgtgtggaggaaaaagtatattacaaatgctctacttgagatgtctcatggaaaatgttgttattgtgaaatgaaattgatagaagagggcaaatcactgaatgtagagcattttcaccacaaagacaaatatcctgatgaagtagtgaaatgggaaaatttattgccatcttgtgggagatgcaatagtgaaaagggtactcatgacactaaattagaacctataataaatcctgcaataaataacccaaaagattatttatatttatataattatagatataaaagtaaaaatagaaataaacttggtagtgatacaattgatatattatatttgaatgatacagacaaattaattaaaccaagagtaaatatttgcatggctttattcaaaaggttagagtctataaaaacatttgttgaagattatcaaaatggtacaggaacacatacaagaagaaaaaataaaattataaacgaagtaaaaggtgtattaagatgcgctcaaccaactgaagaatatagtgctattgtggcaaatgttatagtaaatgatgatgattataaatacataaaagaaataatgtcagaatttaacttgtgggataatgaactagaagaattagaaagtaaagcaaaagaaataatgttagattcagaatga

SEQ ID NO: 87328 - DNA, 1260 bp, Peptoclostridium difficile DA00273; identical to SEQ ID NO: 87326

SEQ ID NO: 87329 - DNA, 735 bp, Peptoclostridium difficile DA00273; identical to SEQ ID NO: 87327

SEQ ID NO: 87330 - DNA, 1260 bp, Peptoclostridium difficile CD129; identical to SEQ ID NO: 87326

SEQ ID NO: 87331 - DNA, 759 bp, Peptoclostridium difficile CD129; identical to SEQ ID NO: 87323

SEQ ID NO: 87332 - DNA, 1260 bp, Peptoclostridium difficile CD181; identical to SEQ ID NO: 87326

SEQ ID NO: 87333 - DNA, 759 bp, Peptoclostridium difficile CD181; identical to SEQ ID NO: 87323

SEQ ID NO: 87334 - DNA, 1260 bp, Peptoclostridium difficile 342; identical to SEQ ID NO: 87326

SEQ ID NO: 87335 - DNA, 759 bp, Peptoclostridium difficile 342; identical to SEQ ID NO: 87323

SEQ ID NO: 87336 - DNA, 1260 bp, Peptoclostridium difficile 6041; identical to SEQ ID NO: 87326

SEQ ID NO: 87337 - DNA, 759 bp, Peptoclostridium difficile 6041; identical to SEQ ID NO: 87323

SEQ ID NO: 87338 - DNA, 1260 bp, Peptoclostridium difficile DA00128; identical to SEQ ID NO: 87326

SEQ ID NO: 87339 - DNA, 759 bp, Peptoclostridium difficile DA00128; identical to SEQ ID NO: 87323

SEQ ID NO: 87340 - DNA, 1260 bp, Peptoclostridium difficile DA00167; identical to SEQ ID NO: 87326

SEQ ID NO: 87341 - DNA, 759 bp, Peptoclostridium difficile DA00167; identical to SEQ ID NO: 87323

SEQ ID NO: 87342 - DNA, 1260 bp, Peptoclostridium difficile DA00238; identical to SEQ ID NO: 87326

SEQ ID NO: 87343 - DNA, 735 bp, Peptoclostridium difficile DA00238; identical to SEQ ID NO: 87327

SEQ ID NO: 87344 - DNA, 1269 bp, Peptoclostridium difficile P6; identical to SEQ ID NO: 87324

SEQ ID NO: 87345 - DNA, 759 bp, Peptoclostridium difficile P6; identical to SEQ ID NO: 87323

SEQ ID NO: 87346 - DNA, 1260 bp, Peptoclostridium difficile DA00307; identical to SEQ ID NO: 87326

SEQ ID NO: 87347 - DNA, 735 bp, Peptoclostridium difficile DA00307; identical to SEQ ID NO: 87327

SEQ ID NO: 87348 - DNA, 1260 bp, Peptoclostridium difficile CD92; identical to SEQ ID NO: 87326

SEQ ID NO: 87349 - DNA, 759 bp, Peptoclostridium difficile CD92; identical to SEQ ID NO: 87323

SEQ ID NO: 87350 - DNA, 1260 bp, Peptoclostridium difficile DA00305
atgagaaaacttgataatattaagaagggcactataattttagacataattcctaatagtgcaaatgggagagatgcaatgaaaattgaaaaaattgaaattaaaggtattggtggaataaaagaattaagtctgaggtttaataaaggacttaatataatatgtggtgcaaatggtataggaaagacaactattttagaagttatttcacatcttttttctatacaatcttctgatttaaagaaaaatgcaaaatttgatttaggagaagcaatagcggattattcgtttgaagatatagaagctgtacataaaagtacttatcaaatcaatgatttcaatgcttctgtgaaagaacttatttttgataatcgagataaaaaaaaatatagtaaatttgtgttgttttttaagacacatagagaattaaattattcaaaattggatggaataactggagatgaaacatatagtgatgatagtacatcttatatggctgatttaggtatagattcaagtaaaataaaaaattggtttattaatagacttcttttttctaagcaagaaggttctcttacaaaagaacaattatgtaatttagacttagcaatagaaatgattagtattttagataagaatgtatcatattctagaattgtatcagattctttagatttaatgataaatactcctcaaggagaaatttatatagaatatttatcatcaggatataaatcatgtttttatatattattaggtataattaaggaattagaatatagatttactaaaccttatattgaagttaaggattttgatggtgtcatactaattgatgagttagacttacatctacatccagaatggcaagttaaaattgtaaatgcattaaaagtattgcttccaaaggcacgaattatagcaacaacacatagccctaatatgatacaaacactatcaccagatgaaattataccattaaccatggatgaaaatggtaatgtgcgtaaaaaagacttagagttaggtgaatatggattgcaaggatggactattgaagaaatattgacagatgtcatgggaatgaaaacaacttcttctgagttatatttagatacaatgaaaaaatttgatagagctatggataaagagaatgtagatgaaatcaagaaatactatgatatcttgatgaaaatgttacatccaaatagtacacttagaacaatactgaaaatacaagtggcaggaataatagattga

SEQ ID NO: 87351 - DNA, 759 bp, Peptoclostridium difficile DA00305; identical to SEQ ID NO: 87323

SEQ ID NO: 87352 - DNA, 1356 bp, Pseudomonas syringae CC1557
atggaaatcaaaagcttcaggctcatcaatgtgggacggttcagcgatctggaagtcgcactcgcgcctaccgaacggcacgcgtcgagagtgacagtgctggtcgggaacaatggggcagggaagaccacactgctcaagtctgtcgccacatcattgaactggctggtggcgagggtcaggacgccaaaaggtgttggtagtcggatcgatgaggatacgattcagaacggcgctgtgacttcttcaattcgtattgacgcttacgatgatcagattttcgactccctgatttgtgggcctgatttccattggcaaattgctggtactcgtaaaggtcgaaatgccaacttgtccagtgcattgaacgaattgaatttgctggcggaaggttaccgctcacagttgactgccaagagtgattcatctcttcctcttttggccttttatccagttgaacgctcagtgcttgagataccgctcaaggtccacgccaaacacacattcgatcaactggatggctacgacaacgccttgggtcgtggcgtggattttcgccgttttttcgagtggttcagggaacgcgaagacagcgagaacgaaacaggtattccaactgagctgcttactaaactgtctcaaaaattactcgatacagaactctggaaagtactggtcagggagcatgcctcgtcgcgtgaccgtcagctaaacgctgtcagaaatgcggtcgaagccttcatgcccggcttcacaaaactgcgcgtcaaacgcaaaccgcgtctgcatatggctatcgataaagacggccagaccttgaacgtctcgcagctgtcccaaggcgagaagtcgatgatggcgctcgtcggcgatatcgccagacgcctcgccatgatgaaccctgcgctcgaaaatcctctgcatggcaatggcatcgtactaatcgatgaagtcgatttgcacctgcatcccaaatggcagcgcagcctgatcgcccaactcactacaaccttcccgaactgccagtttctgctgaccacgcattcgccactggtcatcagcgatagcaaggatgttctggtgtacgttatggacgacggtgagctaagcgagccggacagtctttacgggcttgatgccaatcaggtgctgttgagtgtcatggacacggatgtccgcaatgttgacgttcagaaacgtctggacaggctccaggagctgctgatgctgggtgatctggaggaggttcactccctttaccaaaagctggtcaatgacctgccttctggacacatagagttggccaaggcgtctttgttgatccgcaagctggaattacgtcgtgcgaaagattga

SEQ ID NO: 87353 - DNA, 651 bp, Pseudomonas syringae CC1557
gtgcgaaagattgaaaaaggaagtctcgcagtcctgaagcagtgggcgcgcaccaacaagggaaaaaaatacgaagatctggttggccgggaagatatcaaagatgcaattcgacatacctgtgtcctggagcagcatgggttatgtgcctattgctgccgcagcatcacccctttgaaggacagcgctcacaatgaacacgtcgaagcgcaacgcctggcacccaatcgcacgctcgattttcagaatattgttgccagctgcaatcggcccggtcgatgtggggacgcgcatggtgaccagactctacgcttgacgcctcttatggctgagtgtgaaacagaattgcagttcgaactttccggactggttggaggtaagaccgacagggcgcaagattgtatcaaggtgcttaatctgggcggtgatcaagtgtccaacaggtggctgattggcgagcgcaaagcaatgatcgatagtctgctgttttcgcatggcatgggctcgtcaggactggctcttgaggacgatgacgtactctctctgttacatgacgagttactggtcgaggatgaccaacaacagcttcaggccttttcccctgttctggtaaacgtgattcgtcgcctcagggcattgcatgctttttga

SEQ ID NO: 87354 - DNA, 1413 bp, Vibrio parahaemolyticus VP-NY4; identical to SEQ ID NO: 86314

SEQ ID NO: 87355 - DNA, 645 bp, Vibrio parahaemolyticus VP-NY4; identical to SEQ ID NO: 86309

SEQ ID NO: 87356 - DNA, 1230 bp, Vibrio parahaemolyticus VP-NY4; identical to SEQ ID NO: 86310

SEQ ID NO: 87357 - DNA, 666 bp, Vibrio parahaemolyticus VP-NY4; identical to SEQ ID NO: 86125

SEQ ID NO: 87358 - DNA, 1230 bp, Vibrio parahaemolyticus VP232; identical to SEQ ID NO: 86310

SEQ ID NO: 87359 - DNA, 666 bp, Vibrio parahaemolyticus VP232; identical to SEQ ID NO: 86125

SEQ ID NO: 87360 - DNA, 1176 bp, Vibrio parahaemolyticus VP232
gtggagcgtgagtatggacaccgtttacctagaaaactgattgcagcctccactagccagtttgaaaaatttaaagctaattggagcgttcgaaatgatctagtgccgtcaggtttctacgcatatatcggctctaaaccttatatgccatcgttgtctccatcgacgcgtattgcatcaaaagccattcaacagttgttaggggcagagtatttcgaagaacgtaagcacaaggctctggtcgggtttttatcgaagttcgattttggtcaaaagttgctcctgaaattcgaactcacattccctaacgaagatctggagaatatccaaaatcagtcattaactgaacctgaaactcagttgattttgaaaaatgcctatatcgaacacgatgaaatggagttggttgaattactgggttactgcgaaagaattatagaggctcctgcatttgcattaaccgtgggcaatcaaaaccttaatctcatccatctgaagggctctgaacaaaagcctttctctaagctcatcatttcaagaatgctcagagcaggattgattactctttcaagcatacaaacgatgaaagataaatcgctgataaacgaccaatctactgtaaatatcgaaagttccgctatctcgtctttatcaaagcgtagttctggtgaacaatgcttgttcctgctgtttatgggtattatatcgtccatcgaagacaatgcgctgatctgcatcgacgaacctgaaattagtctccatccccaatggcaggaacgcttcgttgatatattaagtgaatcgttttcaagctatcgtggctgtcacttccttatcgcaacacactcaccgcttattgtatctgatataagcgcaaagaattgctgtgtgtacgatatggcaacgaatacattggtggatgcggcgccatatggtgaacgttcctcggactatcagctggcaacgctatttcacaaccctggaaacaacaacgagtatctcttaagccaagttatagaggtgctggatgacatttgtcagtcaaaggaaattgcatctgagacaaagactaaggcgcattggttattaagttatgaacctcgtttgcctgatggagataaggtaaaacgcttactatccattttagagcagacgttagaggcattttccaaatga

SEQ ID NO: 87361 - DNA, 468 bp, Vibrio parahaemolyticus VP232
atgcacacaactcacggtatggtgtgggacacagaacacatcatcgataaagacagctcaccgcaatggatgttcaagccattaaacctctgtgtttcgtgtaaagattgcaatggagcgaaaggcacacgagcagtcacaaaaagtaagtcgtacaagaagtttccgagcaagagtgcaaattatcgaattattcatcctcattttgataattatgatgagcacattgaggttgcagtgccaggcgcgacctaccgatatataacagagaaagggcgatacaccatcgaggtttgtggactacttcgttatcaccaaactgtcggaagaaaaaaagttgaccttggtcttcaagcggttctacttgctgcagcgaataatcaaagccctgagatgttacagtacgccatggaagaaatcgcaagaagacaagcggcggtatctcaaagtactggtagcagtacctaa

SEQ ID NO: 87362 - DNA, 1230 bp, Vibrio parahaemolyticus VP250; identical to SEQ ID NO: 86310

SEQ ID NO: 87363 - DNA, 666 bp, Vibrio parahaemolyticus VP250; identical to SEQ ID NO: 86125

SEQ ID NO: 87364 - DNA, 1299 bp, Vibrio parahaemolyticus VP250
ttgattgatacgtgcaacaagtaccacagttattacactagtgccttgcttgataaggatacccatgtcgcatctgctgttcactatctcagagaagacttttcaccacacaattggaaaacagtggagcgtgagtatggacaccgtttacctagaaaactgattgcagcctccactagccagtttgaaaaatttaaagctaattggagcgttcgaaatgatctagtgccgtcaggtttctacgcatatatcggctctaaaccttatatgccatcgttgtctccatcgacgcgtattgcatcaaaagccattcaacagttgttaggggcagagtatttcgaagaacgtaagcacaaggctctggtcgggtttttatcgaagttcgattttggtcaaaagttgctcctgaaattcgaactcacattccctaacgaagatctggagaatatccaaaatcagtcattaactgaacctgaaactcagttgattttgaaaaatgcctatatcgaacacgatgaaatggagttggttgaattactgggttactgcgaaagaattatagaggctcctgcatttgcattaaccgtgggcaatcaaaaccttaatctcatccatctgaagggctctgaacaaaagcctttctctaagctcatcatttcaagaatgctcagagcaggattgattactctttcaagcatacaaacgatgaaagataaatcgctgataaacgaccaatctactgtaaatatcgaaagttccgctatctcgtctttatcaaagcgtagttctggtgaacaatgcttgttcctgctgtttatgggtattatatcgtccatcgaagacaatgcgctgatctgcatcgacgaacctgaaattagtctccatccccaatggcaggaacgcttcgttgatatattaagtgaatcgttttcaagctatcgtggctgtcacttccttatcgcaacacactcaccgcttattgtatctgatataagcgcaaagaattgctgtgtgtacgatatggcaacgaatacattggtggatgcggcgccatatggtgaacgttcctcggactatcagctggcaacgctatttcacaaccctggaaacaacaacgagtatctcttaagccaagttatagaggtgctggatgacatttgtcagtcaaaggaaattgcatctgagacaaagactaaggcgcattggttattaagttatgaacctcgtttgcctgatggagataaggtaaaacgcttactatccattttagagcagacgttagaggcattttccaaatga

SEQ ID NO: 87365 - DNA, 645 bp, Vibrio parahaemolyticus VP250; identical to SEQ ID NO: 86309

SEQ ID NO: 87366 - DNA, 1176 bp, Vibrio parahaemolyticus NIHCB0603; identical to SEQ ID NO: 87360

SEQ ID NO: 87367 - DNA, 645 bp, Vibrio parahaemolyticus NIHCB0603; identical to SEQ ID NO: 86309

SEQ ID NO: 87368 - DNA, 1230 bp, Vibrio parahaemolyticus NIHCB0603; identical to SEQ ID NO: 86310

SEQ ID NO: 87369 - DNA, 666 bp, Vibrio parahaemolyticus NIHCB0603; identical to SEQ ID NO: 86125

SEQ ID NO: 87370 - DNA, 1230 bp, Vibrio parahaemolyticus 949; identical to SEQ ID NO: 86310

SEQ ID NO: 87371 - DNA, 666 bp, Vibrio parahaemolyticus 949; identical to SEQ ID NO: 86125

SEQ ID NO: 87372 - DNA, 1413 bp, Vibrio parahaemolyticus 949; identical to SEQ ID NO: 86314

SEQ ID NO: 87373 - DNA, 645 bp, Vibrio parahaemolyticus 949; identical to SEQ ID NO: 86309

SEQ ID NO: 87374 - DNA, 1251 bp, Vibrio parahaemolyticus VPCR-2010
atggaaaacgataattcgattcaactgattgatacgataattcctaactcagacaaacacgtaacaatctctcttgaaggcaaaaaccttatcatcacaggtggcaatggctgcggcaagactcgcctcctaaatcaaatttacgagaacatttcggctcaagtagagcaaatgagtcataaaaccgcagatcagattaggaacgatataagtaatcgtgagcggtggatgaatgactccagtccgacgaatgcgaactatcatcaatataaggagcaaataagagagttagaactaaaacttgctgatatcgataaggtgaaagtaacactgggggacttggttaaatactgcaccgaattcaacgaaaaaaaggcactacttcgtttattcccagcagtcagagaacagtctctggctcatactggctcatatgacagtcttgctcgcttaaagaaagaagacgagcgaaattctctttctcaagactcaagttctcaatttgaacgctacttagttgctttctacaattacggtagtcatctattagctcgtgttgacgataaggctcagggtgcaaaagtagatgcgtggttcgataacgtaacaagtcaattacaatacctattcgaagatgaaaccctcaagttggattacaatgctgaagagcaggctttctacattaaacaggatggtaaagacccatacagatttgacaaactatcatcaggctatcaatcaattcttagcatctatgctgaccttttgatgaaagtagaattaaaagaagttagcgcccaagagctatctggagttgtcttcattgatgagattgacgctcaccttcacgtatcactccaaagaaaaatattctctttctttgaccaagcgttccctaaagttcagttcatcgttactactcactcacctttcgtagtccaatcagtgaataattccgttatctatgatttgagtgcgaatgagcaattagaagacctttcgatgtactcatacgaatcgattctaaaaggcttattgggagttgaaagcaaatcaagcatcctagatggattgatagaagaactagcaacacaaattcaagtgaagaaacctgattggaatactatcatcgatcttattcgtagaattaaaccaaatgagcgcaacttagatacacattcgagcaatgttttaaagcaagccgaaatacagctcatggatgagcgcactaaaaatggaacggaggaataa

SEQ ID NO: 87375 - DNA, 690 bp, Vibrio parahaemolyticus VPCR-2010
ttgttcaaagttattcgcccattagaagagcctcctgaacttaagacaaaaggctacaattgcgatgaagttgttcatgctctttggaaaatatgtcatcgaaaatgctatctctgtgaaacaatgaaccctgatgctccagaaatcgaacataaggaacctcatgaaaacaaagatgaagaccttaaagtagattggaacaatctgttttattcatgccgtagatgtaacagtattaaaggaacgaagcataagaacattatcgatgttgcgcaagttgatccgataactaaaatcatttggaacatggctccatccaattattcagatgtaacttttgaaaaggtggacaagaactgcaatgacaaagccgttgacaacacgataaagctccttgagcgttgttttaacgaaactggcactgcttttcgtggaattacaagagaagctcttattgagaaaattgaaatcaagttacagcattttttaaagcaagcctataaaatccgtcacgaagattctgatgaagatgatattgaaaaagcgagaaagcaacttaaagtaatgcttcaaaatgagtatccatattcagctttctggcgttggcgtttcttgagagatcctgtactgatgagggatcactcagatttactacctgaatatgtaacgctgagtccttgcaaactgtag

SEQ ID NO: 87376 - DNA, 1398 bp, Escherichia coli HVH 2 (4-6943160); identical to SEQ ID NO: 86108

SEQ ID NO: 87377 - DNA, 732 bp, Escherichia coli HVH 2 (4-6943160); identical to SEQ ID NO: 86109

SEQ ID NO: 87378 - DNA, 1398 bp, Escherichia coli HVH 7 (4-7315031); identical to SEQ ID NO: 86202

SEQ ID NO: 87379 - DNA, 732 bp, Escherichia coli HVH 7 (4-7315031); identical to SEQ ID NO: 86109

SEQ ID NO: 87380 - DNA, 1398 bp, Escherichia coli HVH 16 (4-7649002); identical to SEQ ID NO: 86854

SEQ ID NO: 87381 - DNA, 732 bp, Escherichia coli HVH 16 (4-7649002); identical to SEQ ID NO: 86109

SEQ ID NO: 87382 - DNA, 1398 bp, Escherichia coli HVH 20 (4-5865042); identical to SEQ ID NO: 86854

SEQ ID NO: 87383 - DNA, 732 bp, Escherichia coli HVH 20 (4-5865042); identical to SEQ ID NO: 86109

SEQ ID NO: 87384 - DNA, 1398 bp, Escherichia coli HVH 27 (4-7449267); identical to SEQ ID NO: 86202

SEQ ID NO: 87385 - DNA, 732 bp, Escherichia coli HVH 27 (4-7449267); identical to SEQ ID NO: 86109

SEQ ID NO: 87386 - DNA, 1872 bp, Escherichia coli HVH 27 (4-7449267)
atgttttttagtcaaaatgcagtgctgaatgcgattgtggaccttaagaaggtccacccttttttcggaattactttccttgtatgcaaaaaaaacaatcttcctatcggaactagcacacaatttgctttagatgcaaaaaataagtgttttcttgaagaagtacataagattgatcctgattcagaatatttttatcaaccctttacataccagacatcccacgagtggctcaataataattatgcgtcatctggattacaagcgataaatacacaaactttttctgcagcatttattcatcctaaacgtactcagcaatggggatgggctgataattacctacatattctaaaagaccatccttcagtcaagaaaaataaaatctcattgatatcattatgtatttggttatataaatttaatgagtttcctcaaaacacatccttcgaaagtataatctccacttttacacaagaatataacatatcagacaaagagcttgaagaattatttttattagaagaatgcaacataaatgaattattcgatgatgaatgcataacttgggataaaataaagggtaagttatcattaccccccgattccaagcctgaaaatggcgggactctatccttgctctctatcgaaaatattgggcctgctaaaaaactagtcatcgaaccaaagacacggcttaatattattacaggtgataacgggcttgggaaatcctttattctcgaatcagcttggtgggcattaactaatacttggacagatcgggtcgcctatcctgacccaagactaagaggaaaaaaaatcaacctgacttattcaatcaaaggtaatggtgaatttaagtcaggtaattgtgtgaactttgattgggacaattttaattggccgatacaaacggacagacctacaattcctggtcttattgtttatgccaaagtagatggttctttcgctgtatgggacccagccagaaaatattctactcaatctacgtttaatgaaaaagaaaaattcgtttttaaaagcaaggaagtatgggacgggcaagatgggattggtgttctcgaaggtttgatcagagactggatgacttggaagaatgatagtaagaaccagcatttcaaacattttgaaaaagtattagaaaaactatctcctccagacttgggggttttgaaaccgggtgaaccagttagaattcctgacgatccgagagtcattccaaccttagttcatccgtatggagagatcccgataacaaatgcctcagcaggtgttagaagaatagttgctttggcatatatgatcgtgtgggcatggaatgaacatgtcgttatttctgagatgatgaatattcctcctcaaaataatatggttgtgcttgttgacgaattagaagctcatttacatccaaaatggcaaagagcatttttaccatctttaatagcacttgataaggtattttcaagtgagttgaagatccaatttatcatcgctactcactcccctttagtaatggcatcctctgaggaagtattcgatatcgagacagatagcttatatcacttacaattggataacaaaggtcatataacacttgatgaattagacttcgtcaaatatggagatgtttcctcttggttaatgtccccaatttttgaattacgacaagcaagatcgcaagaaggcgaagcagctatcgaggatgcaaagaaaatacaggcacttgaaaatcctgatatagaaatgatagaagatataacagttagattgcgtaaatatctttcagccacagacaaattttggcctcgttggattatatttgctgaaaggaatggggttaagttatga

SEQ ID NO: 87387 - DNA, 618 bp, Escherichia coli HVH 27 (4-7449267)
atgataccgttgcagttaatgcccgaaccgcagaattttgatttgaatgtcagacaaaagggtgctttatttcttaacaaggtgccaaatcccaactataaagattttgtaggaaaagattattggcgaaaggcagcaaaagaactttatagttcctatcgttctatctgtgcatatagctgtatatatttacctacatctcctggggttgtggatcattttttacctaaaacgaaatatcctcaactcgcctatgaatggagtaattataggttatgtttggatagacttaatcagtataaaggtaatattgagaatatttgtgatccttttacgattgaaatcggctggttcgttcttgaccttccaagctgtttgataaaaccaggtgaaggtctcccccaagaactccatgataaaattttatatactattgatgttttgaagttaaacaaggatgatggcttagttcaaaatcgatgtgatatcatcatgtatcttatagaaggggatataaatatgaatttcgtggaggaaaagtatccattcatagcacaagaaattaagagacagggattagtcaataacttatctgatatttttaaaagaatggattag

SEQ ID NO: 87388 - DNA, 1872 bp, Escherichia coli HVH 31 (4-2602156)
atgttttttagtcaaaatgcagtgctgaatgcgattgtggaccttaagaaggtccacccttttttcggaattactttccttgtatgcaaaaaaaacaatcttcctatcggaactagcacacaatttgctttagatgcaaaaaataagtgttttcttgaagaagtacataagattgatcctgattcagaatatttttatcaaccctttacataccagacatcccacgagtggctcaataataattatgcgtcatctggattacaagcgataaatacacaaactttttctgcagcatttattcatcctaaacgtactcagcaatggggatgggctgataattacctacatattctaaaagaccatccttcagtcaagaaaaataaaatctcattgatatcattatgtatttggttatataaatttaatgagtttcctcaaaacacatccttcgaaagtataatctccacttttacacaagaatataacatatcagacaaagagcttgaagagttatttttattagaagaatgcaacataaatgaattattcgatgatgaatgcataacttgggataaaataaagggtaagttatcattaccccccgattccaagcctgaaaatggcgggactctatccttgctctctatcgaaaatattgggcctgctaaaaaactagtcatcgaaccaaagacacggcttaatattattacaggtgataacgggcttgggaaatcctttattctcgaatcagcttggtgggcattaactaatacttggacagatcgggtcgcctatcctgacccaagactaagaggaaaaaaaatcaacctgacttattcaatcaaaggtaatggtgaatttaagtcaggtaattgtgtgaactttgattgggacaattttaattggccgatacaaacggacagacctacaattcctggtcttattgtttatgccaaagtagatggttctttcgctgtatgggacccagccagaaaatattctactcaatctacgtttaatgaaaaagaaaaattcgtttttaaaagcaaggaagtatgggacgggcaagatgggattggtgttctcgaaggtttgatcagagactggatgacttggaagaatgatagtaagaaccagcatttcaaacattttgaaaaagtattagaaaaactatctcctccagacttgggggttttgaaaccgggtgaaccagttagaattcctgacgatccgagagtcattccaaccttagttcatccgtatggagagatcccgataacaaatgcctcagcaggtgttagaagaatagttgctttggcatatatgatcgtgtgggcatggaatgaacatgtcgttatttctgagatgatgaatattcctcctcaaaataatatggttgtgcttgttgacgaattagaagctcatttacatccaaaatggcaaagagcatttttaccatctttaatagcacttgataaggtattttcaagtgagttgaagatccaatttatcatcgctactcactcccctttagtaatggcatcctctgaggaagtattcgatatcgagacagatagcttatatcacttacaattggataacaaaggtcatataacacttgatgaattagacttcgtcaaatatggagatgtttcctcttggttaatgtccccaatttttgaattacgacaagcaagatcgcaagaaggcgaagcagctatcgaggatgcaaagaaaatacaggcacttgaaaatcctgatatagaaatgatagaagatataacagttagattgcgtaaatatctttcagccacagacaaattttggcctcgttggattatatttgctgaaaggaatggggttaagttatga

SEQ ID NO: 87389 - DNA, 618 bp, Escherichia coli HVH 31 (4-2602156)
atgataccgttgcagttaatgcccgaaccgcagaattttgatttgaatgtcagacaaaagggggctttatttcttaacaaggtgccaaatcccaactataaagattttgtaggaaaagattattggcgaaaggcagcaaaagaactttatagttcctatcgttctatctgtgcatatagctgtatatatttacctacatctcctggggttgtggatcattttttacctaaaacgaaatatcctcaactcgcctatgaatggagtaattataggttatgtttggatagacttaatcagtataaaggtaatattgagaatatttgtgatccttttacgattgaaatcggctggttcgttcttgaccttccaagctgtttgataaaaccaggtgaaggtctcccccaagaactccatgataaaattttatatactattgatgttttgaagttaaacaaggatgatggcttagttcaaaatcgatgtgatatcatcatgtatcttatagaaggggatataaatatgaatttcgtggaggaaaagtatccattcatagcacaagaaattaagagacagggattagtcaataacttatctgatatttttaaaagaatggattag

SEQ ID NO: 87390 - DNA, 1398 bp, Escherichia coli HVH 37 (4-2773848); identical to SEQ ID NO: 86202

SEQ ID NO: 87391 - DNA, 732 bp, Escherichia coli HVH 37 (4-2773848); identical to SEQ ID NO: 86109

SEQ ID NO: 87392 - DNA, 1398 bp, Escherichia coli HVH 39 (4-2679949); identical to SEQ ID NO: 86108

SEQ ID NO: 87393 - DNA, 732 bp, Escherichia coli HVH 39 (4-2679949); identical to SEQ ID NO: 86109

SEQ ID NO: 87394 - DNA, 1215 bp, Escherichia coli HVH 53 (4-0631051); identical to SEQ ID NO: 86448

SEQ ID NO: 87395 - DNA, 624 bp, Escherichia coli HVH 53 (4-0631051); identical to SEQ ID NO: 86041

SEQ ID NO: 87396 - DNA, 1398 bp, Escherichia coli HVH 58 (4-2839709); identical to SEQ ID NO: 86202

SEQ ID NO: 87397 - DNA, 732 bp, Escherichia coli HVH 58 (4-2839709); identical to SEQ ID NO: 86109

SEQ ID NO: 87398 - DNA, 1398 bp, Escherichia coli HVH 61 (4-2736020); identical to SEQ ID NO: 86202

SEQ ID NO: 87399 - DNA, 732 bp, Escherichia coli HVH 61 (4-2736020); identical to SEQ ID NO: 86109

SEQ ID NO: 87400 - DNA, 1398 bp, Escherichia coli HVH 68 (4-0888028); identical to SEQ ID NO: 86202

SEQ ID NO: 87401 - DNA, 732 bp, Escherichia coli HVH 68 (4-0888028); identical to SEQ ID NO: 86109

SEQ ID NO: 87402 - DNA, 1398 bp, Escherichia coli HVH 74 (4-1034782); identical to SEQ ID NO: 86202

SEQ ID NO: 87403 - DNA, 732 bp, Escherichia coli HVH 74 (4-1034782); identical to SEQ ID NO: 86109

SEQ ID NO: 87404 - DNA, 1398 bp, Escherichia coli HVH 77 (4-2605759); identical to SEQ ID NO: 86202

SEQ ID NO: 87405 - DNA, 732 bp, Escherichia coli HVH 77 (4-2605759); identical to SEQ ID NO: 86109

SEQ ID NO: 87406 - DNA, 1359 bp, Escherichia coli HVH 87 (4-5977630); identical to SEQ ID NO: 86204

SEQ ID NO: 87407 - DNA, 660 bp, Escherichia coli HVH 87 (4-5977630); identical to SEQ ID NO: 86947

SEQ ID NO: 87408 - DNA, 1398 bp, Escherichia coli HVH 89 (4-5885604); identical to SEQ ID NO: 86202

SEQ ID NO: 87409 - DNA, 732 bp, Escherichia coli HVH 89 (4-5885604); identical to SEQ ID NO: 86109

SEQ ID NO: 87410 - DNA, 1872 bp, Escherichia coli HVH 92 (4-5930790); identical to SEQ ID NO: 87386

SEQ ID NO: 87411 - DNA, 618 bp, Escherichia coli HVH 92 (4-5930790); identical to SEQ ID NO: 87387

SEQ ID NO: 87412 - DNA, 1398 bp, Escherichia coli HVH 92 (4-5930790); identical to SEQ ID NO: 86202

SEQ ID NO: 87413 - DNA, 732 bp, Escherichia coli HVH 92 (4-5930790); identical to SEQ ID NO: 86109

SEQ ID NO: 87414 - DNA, 1398 bp, Escherichia coli HVH 95 (4-6074464); identical to SEQ ID NO: 86202

SEQ ID NO: 87415 - DNA, 732 bp, Escherichia coli HVH 95 (4-6074464); identical to SEQ ID NO: 86109

SEQ ID NO: 87416 - DNA, 1872 bp, Escherichia coli HVH 95 (4-6074464); identical to SEQ ID NO: 87386

SEQ ID NO: 87417 - DNA, 618 bp, Escherichia coli HVH 95 (4-6074464); identical to SEQ ID NO: 87387

SEQ ID NO: 87418 - DNA, 1398 bp, Escherichia coli HVH 96 (4-5934869); identical to SEQ ID NO: 86202

SEQ ID NO: 87419 - DNA, 732 bp, Escherichia coli HVH 96 (4-5934869); identical to SEQ ID NO: 86109

SEQ ID NO: 87420 - DNA, 1872 bp, Escherichia coli HVH 96 (4-5934869); identical to SEQ ID NO: 87386

SEQ ID NO: 87421 - DNA, 618 bp, Escherichia coli HVH 96 (4-5934869); identical to SEQ ID NO: 87387

SEQ ID NO: 87422 - DNA, 1398 bp, Escherichia coli HVH 109 (4-6977162); identical to SEQ ID NO: 86202

SEQ ID NO: 87423 - DNA, 732 bp, Escherichia coli HVH 109 (4-6977162); identical to SEQ ID NO: 86109

SEQ ID NO: 87424 - DNA, 1398 bp, Escherichia coli HVH 114 (4-7037740); identical to SEQ ID NO: 86202

SEQ ID NO: 87425 - DNA, 732 bp, Escherichia coli HVH 114 (4-7037740); identical to SEQ ID NO: 86109

SEQ ID NO: 87426 - DNA, 1398 bp, Escherichia coli HVH 116 (4-6879942); identical to SEQ ID NO: 86202

SEQ ID NO: 87427 - DNA, 732 bp, Escherichia coli HVH 116 (4-6879942); identical to SEQ ID NO: 86109

SEQ ID NO: 87428 - DNA, 1398 bp, Escherichia coli HVH 117 (4-6857191); identical to SEQ ID NO: 86202

SEQ ID NO: 87429 - DNA, 732 bp, Escherichia coli HVH 117 (4-6857191); identical to SEQ ID NO: 86109

SEQ ID NO: 87430 - DNA, 1398 bp, Escherichia coli HVH 120 (4-6978681); identical to SEQ ID NO: 86202

SEQ ID NO: 87431 - DNA, 732 bp, Escherichia coli HVH 120 (4-6978681); identical to SEQ ID NO: 86109

SEQ ID NO: 87432 - DNA, 1182 bp, Escherichia coli HVH 125 (4-2634716)
atgaaaatacaaaaaattgatatcaaagatattggtggtataaaaagagcaataattaattttgattcaagtatgaatattatttgcggaccaaatgggatagggaaaaccactattttagattccgtggcacatagttttatttctacaaacagctacgtccttaaaagacatgctcagtctactgatggtcagataaatatcgtattaaatgattgtgacaatattagagaaagtcatatttctcttgcgaatttcgatcctgaggattgttcatttgttcatgggttaagtgaagctggaaggaaagtgatttatttgaatgtttctaggatgtttaaatatgtatctttatctaatatttctaaagacgaggaaagacaagatcatagcatttacacacttttgactgacggaatttcggttgcggatatgaaaaattggttcgcaaaacgctgtctcttcgttaatacagcagaagcattaagtgaaaataataaggttaatttggagttggcaaaaaaatgcttttcactgcttaatgctgaatataaattttctcgcgtagatgcgaaaaaatttgatgttttcgtatctactccaaatggagaaatttggtatgaatatttgtcatcaggatttaaatcatgtctgagtattttattcggcataataaaagagattgaactaagaatgcctgatgaggaatgtttagcacagcattttgatggcattgtattgattgatgagctggaaatgcatcttcatcctgaatggcagtccaaaattgtttctgttttgcgagacacatttcctgcaacacaatttatagttactactcatagtcctcacattatacaaaatgcggaacctaatcagataattgcattagggacagatagtaatggatatacatacgtcagagaacttccgagtaatgagtttggttatacaggatggacattagatgaggtactcaaagatgtaatgggaatggaagacacaagaagtcagaaattacaaagtatgcttgctgcatttgatcaagctattgatgaggaaaataaaattgaagcagagcgcatttataaagaattagatagggcacttcatccagcaaatgtgcttagaaaaatgcttagtattgatctatcctcaataatcgaggaggacaataaataa

SEQ ID NO: 87433 - DNA, 747 bp, Escherichia coli HVH 125 (4-2634716); identical to SEQ ID NO: 86999

SEQ ID NO: 87434 - DNA, 1872 bp, Escherichia coli HVH 132 (4-6876862); identical to SEQ ID NO: 87386

SEQ ID NO: 87435 - DNA, 618 bp, Escherichia coli HVH 132 (4-6876862); identical to SEQ ID NO: 87387

SEQ ID NO: 87436 - DNA, 1398 bp, Escherichia coli HVH 142 (4-5627451); identical to SEQ ID NO: 86854

SEQ ID NO: 87437 - DNA, 732 bp, Escherichia coli HVH 142 (4-5627451); identical to SEQ ID NO: 86109

SEQ ID NO: 87438 - DNA, 1872 bp, Escherichia coli HVH 144 (4-4451937); identical to SEQ ID NO: 87386

SEQ ID NO: 87439 - DNA, 618 bp, Escherichia coli HVH 144 (4-4451937); identical to SEQ ID NO: 87387

SEQ ID NO: 87440 - DNA, 1398 bp, Escherichia coli HVH 149 (4-4451880); identical to SEQ ID NO: 86202

SEQ ID NO: 87441 - DNA, 732 bp, Escherichia coli HVH 149 (4-4451880); identical to SEQ ID NO: 86109

SEQ ID NO: 87442 - DNA, 1398 bp, Escherichia coli HVH 156 (4-3206505); identical to SEQ ID NO: 86108

SEQ ID NO: 87443 - DNA, 732 bp, Escherichia coli HVH 156 (4-3206505); identical to SEQ ID NO: 86109

SEQ ID NO: 87444 - DNA, 1872 bp, Escherichia coli HVH 157 (4-3406229); identical to SEQ ID NO: 87386

SEQ ID NO: 87445 - DNA, 618 bp, Escherichia coli HVH 157 (4-3406229); identical to SEQ ID NO: 87387

SEQ ID NO: 87446 - DNA, 1872 bp, Escherichia coli HVH 159 (4-5818141); identical to SEQ ID NO: 87386

SEQ ID NO: 87447 - DNA, 618 bp, Escherichia coli HVH 159 (4-5818141); identical to SEQ ID NO: 87387

SEQ ID NO: 87448 - DNA, 1398 bp, Escherichia coli HVH 160 (4-5695937); identical to SEQ ID NO: 86202

SEQ ID NO: 87449 - DNA, 732 bp, Escherichia coli HVH 160 (4-5695937); identical to SEQ ID NO: 86109

SEQ ID NO: 87450 - DNA, 1398 bp, Escherichia coli HVH 161 (4-3119890); identical to SEQ ID NO: 86202

SEQ ID NO: 87451 - DNA, 732 bp, Escherichia coli HVH 161 (4-3119890); identical to SEQ ID NO: 86109

SEQ ID NO: 87452 - DNA, 1398 bp, Escherichia coli HVH 169 (4-1075578); identical to SEQ ID NO: 86202

SEQ ID NO: 87453 - DNA, 732 bp, Escherichia coli HVH 169 (4-1075578); identical to SEQ ID NO: 86109

SEQ ID NO: 87454 - DNA, 1398 bp, Escherichia coli HVH 172 (4-3248542); identical to SEQ ID NO: 86202

SEQ ID NO: 87455 - DNA, 732 bp, Escherichia coli HVH 172 (4-3248542); identical to SEQ ID NO: 86109

SEQ ID NO: 87456 - DNA, 1215 bp, Escherichia coli HVH 187 (4-4471660); identical to SEQ ID NO: 86448

SEQ ID NO: 87457 - DNA, 624 bp, Escherichia coli HVH 187 (4-4471660); identical to SEQ ID NO: 86041

SEQ ID NO: 87458 - DNA, 1251 bp, Escherichia coli HVH 198 (4-3206106); identical to SEQ ID NO: 86208

SEQ ID NO: 87459 - DNA, 666 bp, Escherichia coli HVH 198 (4-3206106); identical to SEQ ID NO: 86209

SEQ ID NO: 87460 - DNA, 1398 bp, Escherichia coli HVH 207 (4-3113221); identical to SEQ ID NO: 86108

SEQ ID NO: 87461 - DNA, 732 bp, Escherichia coli HVH 207 (4-3113221); identical to SEQ ID NO: 86109

SEQ ID NO: 87462 - DNA, 1872 bp, Escherichia coli HVH 212 (3-9305343); identical to SEQ ID NO: 87386

SEQ ID NO: 87463 - DNA, 618 bp, Escherichia coli HVH 212 (3-9305343); identical to SEQ ID NO: 87387

SEQ ID NO: 87464 - DNA, 1398 bp, Escherichia coli HVH 212 (3-9305343); identical to SEQ ID NO: 86202

SEQ ID NO: 87465 - DNA, 732 bp, Escherichia coli HVH 212 (3-9305343); identical to SEQ ID NO: 86109

SEQ ID NO: 87466 - DNA, 1398 bp, Escherichia coli HVH 216 (4-3042952); identical to SEQ ID NO: 86202

SEQ ID NO: 87467 - DNA, 732 bp, Escherichia coli HVH 216 (4-3042952); identical to SEQ ID NO: 86109

SEQ ID NO: 87468 - DNA, 1872 bp, Escherichia coli HVH 218 (4-4500903); identical to SEQ ID NO: 87386

SEQ ID NO: 87469 - DNA, 618 bp, Escherichia coli HVH 218 (4-4500903); identical to SEQ ID NO: 87387

SEQ ID NO: 87470 - DNA, 1872 bp, Escherichia coli HVH 220 (4-5876842); identical to SEQ ID NO: 87386

SEQ ID NO: 87471 - DNA, 618 bp, Escherichia coli HVH 220 (4-5876842); identical to SEQ ID NO: 87387

SEQ ID NO: 87472 - DNA, 1398 bp, Escherichia coli KOEGE 44 (106a); identical to SEQ ID NO: 86108

SEQ ID NO: 87473 - DNA, 732 bp, Escherichia coli KOEGE 44 (106a); identical to SEQ ID NO: 86109

SEQ ID NO: 87474 - DNA, 1182 bp, Escherichia coli KOEGE 56 (169a); identical to SEQ ID NO: 87432

SEQ ID NO: 87475 - DNA, 747 bp, Escherichia coli KOEGE 56 (169a); identical to SEQ ID NO: 86999

SEQ ID NO: 87476 - DNA, 1251 bp, Escherichia coli UMEA 3117-1; identical to SEQ ID NO: 86208

SEQ ID NO: 87477 - DNA, 666 bp, Escherichia coli UMEA 3117-1; identical to SEQ ID NO: 86209

SEQ ID NO: 87478 - DNA, 1872 bp, Escherichia coli UMEA 3139-1
atgttttttagtcaaaatgcagtgctgaatgcgattgtggaccttaagaaggtccacccttttttcggaattactttccttgtatgcaaaaaaaacaatcttcctatcggaactagcacacaatttgctttagatgcaaaaaataagtgttttcttgaagaagtacataagattgatcctgattcagaatatttttatcaaccctttacataccagacatcccacgagtggctcaataataattatgcgtcatctggattacaagcgataaatacacaaactttttctgcagcatttattcatcctaaatgtactcagcaatggggatgggctgataattacctacatattctaaaagaccatccttcagtcaagaaaaataaaatctcattgatatcattatgtatttggttatataaatttaatgagtttcctcaaaacacatccttcgaaagtataatctccacttttacacaagaatataacatatcagacaaagagcttgaagaattatttttattagaagaatgcaacataaatgaattattcgatgatgaatgcataacttgggataaaataaagggtaagttatcattaccccccgattccaagcctgaaaatggcgggactctatccttgctctctatcgaaaatattgggcctgctaaaaaactagtcatcgaaccaaagacacggcttaatattattacaggtgataacgggcttgggaaatcctttattctcgaatcagcttggtgggcattaactaatacttggacagatcgggtcgcctatcctgacccaagactaagaggaaaaaaaatcaacctgacttattcaatcaaaggtaatggtgaatttaagtcaggtaattgtgtgaactttgattgggacaattttaattggccgatacaaacggacagacctacaattcctggtcttattgtttatgccaaagtagatggttctttcgctgtatgggacccagccagaaaatattctactcaatctacgtttaatgaaaaagaaaaattcgtttttaaaagcaaggaagtatgggacgggcaagatgggattggtgttctcgaaggtttgatcagagactggatgacttggaagaatgatagtaagaaccagcatttcaaacattttgaaaaagtattagaaaaactatctcctccagacttgggggttttgaaaccgggtgaaccagttagaattcctgacgatccgagagtcattccaaccttagttcatccgtatggagagatcccgataacaaatgcctcagcaggtgttagaagaatagttgctttggcatatatgatcgtgtgggcatggaatgaacatgtcgttatttctgagatgatgaatattcctcctcaaaataatatggttgtgcttgttgacgaattagaagctcatttacatccaaaatggcaaagagcatttttaccatctttaatagcacttgataaggtattttcaagtgagttgaagatccaatttatcatcgctactcactcccctttagtaatggcatcctctgaggaagtattcgatatcgagacagatagcttatatcacttacaattggataacaaaggtcatataacacttgatgaattagacttcgtcaaatatggagatgtttcctcttggttaatgtccccaatttttgaattacgacaagcaagatcgcaagaaggcgaagcagctatcgaggatgcaaagaaaatacaggcacttgaaaatcctgatatagaaatgatagaagatataacagttagattgcgtaaatatctttcagccacagacaaattttggcctcgttggattatatttgctgaaaggaatggggttaagttatga

SEQ ID NO: 87479 - DNA, 618 bp, Escherichia coli UMEA 3139-1; identical to SEQ ID NO: 87387

SEQ ID NO: 87480 - DNA, 1398 bp, Escherichia coli UMEA 3159-1; identical to SEQ ID NO: 86202

SEQ ID NO: 87481 - DNA, 732 bp, Escherichia coli UMEA 3159-1; identical to SEQ ID NO: 86109

SEQ ID NO: 87482 - DNA, 1398 bp, Escherichia coli UMEA 3161-1; identical to SEQ ID NO: 86108

SEQ ID NO: 87483 - DNA, 732 bp, Escherichia coli UMEA 3161-1; identical to SEQ ID NO: 86109

SEQ ID NO: 87484 - DNA, 1329 bp, Escherichia coli UMEA 3163-1; identical to SEQ ID NO: 86954

SEQ ID NO: 87485 - DNA, 612 bp, Escherichia coli UMEA 3163-1; identical to SEQ ID NO: 86955

SEQ ID NO: 87486 - DNA, 1398 bp, Escherichia coli UMEA 3172-1; identical to SEQ ID NO: 86202

SEQ ID NO: 87487 - DNA, 732 bp, Escherichia coli UMEA 3172-1; identical to SEQ ID NO: 86109

SEQ ID NO: 87488 - DNA, 1398 bp, Escherichia coli UMEA 3173-1; identical to SEQ ID NO: 86108

SEQ ID NO: 87489 - DNA, 732 bp, Escherichia coli UMEA 3173-1; identical to SEQ ID NO: 86109

SEQ ID NO: 87490 - DNA, 1872 bp, Escherichia coli UMEA 3175-1; identical to SEQ ID NO: 87386

SEQ ID NO: 87491 - DNA, 618 bp, Escherichia coli UMEA 3175-1; identical to SEQ ID NO: 87387

SEQ ID NO: 87492 - DNA, 1359 bp, Escherichia coli UMEA 3190-1
atgatgaatatccgcacgcttaagctcactaatctggggcggtttgaagaacttgacgttcatctggctccagtggaggagttcaagagcaatgtgaccgtttttattggtaataatggtgcaggtaaaacatcaatattaaaatcgttggcaaccagcctgagttggttcgttgcccgagttcgtactgaaaagggtaacggtagccttattcctgaagacgctattctgaacggtaggagttcggcgacaattgaacttcaggtactgaatacgcatccagcgacggaggccgctacgccctaccgttggttgcttgccagaacggccagtgggaaaaaatcgaccaccgcctccagcctgcaagaggccagccaattggctgcgttttatcgagatcaatacacccagaatagcggggcatccttcccgcttatcgccttctatcccgtagaacgtgtcgtgctggacgtgccgttgaaaataaaagaacgtcataattttttgcaactggatggctacgataacgccctgaatcagggtattgatttccgccgtttctttgaatggtttcgcaatcgcgaagatgcagaaaatgaatcaggcttaccgcaagacgttctggataagctcagtaccaggatagatctcgataacaccgtcttaaatgcattaacggcaatcatggcctcgtcccgggatcgccagttgaccgccgtcagaacggccattagtcgctttatgccagggttcagcaacttacgcgtcaggcgtaaacctcgcctgcatatgtcgattgataaaaatggccagacactgaatgtgctgcaattatcgcagggtgaaaaatcactgatggcgttagtcggcgatattgctcgccgcctggcaatgatgaacccgatgttagaaaacccgctaaacggcgagggaattgtattaattgatgaagtggacatgcacctgcatccaacatggcagcgtacaatcatccagcgtctgacgacaacattcccacattgccagtttgtcttaacaacccactctcctttagtgatcagtgattgcaaagatgtgctggtttattctctggatgatggcgaattaacgcagctcccgtctctgtatgggcaagatgcgaatactgtgcttttgaatgtgatggatacggatattcgcaatgcgacagtggcagaaaaacttaacgatcttttggatctgattcagaaaaacgactttatcaacgctaacgctcttctgaatacgctaagcctggaacttcctgaaaaccatcttgaactggtgaaagccagaatgcttctgcgcaaacaggaaattaaacatgcgcgaaataactaa

SEQ ID NO: 87493 - DNA, 660 bp, Escherichia coli UMEA 3190-1; identical to SEQ ID NO: 86947

SEQ ID NO: 87494 - DNA, 1398 bp, Escherichia coli UMEA 3208-1; identical to SEQ ID NO: 86108

SEQ ID NO: 87495 - DNA, 732 bp, Escherichia coli UMEA 3208-1; identical to SEQ ID NO: 86109

SEQ ID NO: 87496 - DNA, 1398 bp, Escherichia coli UMEA 3216-1; identical to SEQ ID NO: 86202

SEQ ID NO: 87497 - DNA, 732 bp, Escherichia coli UMEA 3216-1; identical to SEQ ID NO: 86109

SEQ ID NO: 87498 - DNA, 1398 bp, Escherichia coli UMEA 3220-1; identical to SEQ ID NO: 86202

SEQ ID NO: 87499 - DNA, 732 bp, Escherichia coli UMEA 3220-1; identical to SEQ ID NO: 86109

SEQ ID NO: 87500 - DNA, 1182 bp, Escherichia coli UMEA 3221-1; identical to SEQ ID NO: 87432

SEQ ID NO: 87501 - DNA, 747 bp, Escherichia coli UMEA 3221-1; identical to SEQ ID NO: 86999

SEQ ID NO: 87502 - DNA, 1182 bp, Escherichia coli UMEA 3230-1; identical to SEQ ID NO: 87432

SEQ ID NO: 87503 - DNA, 747 bp, Escherichia coli UMEA 3230-1; identical to SEQ ID NO: 86999

SEQ ID NO: 87504 - DNA, 1398 bp, Escherichia coli UMEA 3233-1; identical to SEQ ID NO: 86108

SEQ ID NO: 87505 - DNA, 732 bp, Escherichia coli UMEA 3233-1; identical to SEQ ID NO: 86109

SEQ ID NO: 87506 - DNA, 1398 bp, Escherichia coli UMEA 3257-1; identical to SEQ ID NO: 86202

SEQ ID NO: 87507 - DNA, 732 bp, Escherichia coli UMEA 3257-1; identical to SEQ ID NO: 86109

SEQ ID NO: 87508 - DNA, 1398 bp, Escherichia coli UMEA 3264-1; identical to SEQ ID NO: 86108

SEQ ID NO: 87509 - DNA, 732 bp, Escherichia coli UMEA 3264-1; identical to SEQ ID NO: 86109

SEQ ID NO: 87510 - DNA, 1398 bp, Escherichia coli UMEA 3268-1; identical to SEQ ID NO: 86108

SEQ ID NO: 87511 - DNA, 732 bp, Escherichia coli UMEA 3268-1; identical to SEQ ID NO: 86109

SEQ ID NO: 87512 - DNA, 1359 bp, Escherichia coli UMEA 3304-1; identical to SEQ ID NO: 87492

SEQ ID NO: 87513 - DNA, 660 bp, Escherichia coli UMEA 3304-1; identical to SEQ ID NO: 86947

SEQ ID NO: 87514 - DNA, 1398 bp, Escherichia coli UMEA 3337-1; identical to SEQ ID NO: 86108

SEQ ID NO: 87515 - DNA, 732 bp, Escherichia coli UMEA 3337-1; identical to SEQ ID NO: 86109

SEQ ID NO: 87516 - DNA, 1398 bp, Escherichia coli UMEA 3490-1; identical to SEQ ID NO: 86108

SEQ ID NO: 87517 - DNA, 732 bp, Escherichia coli UMEA 3490-1; identical to SEQ ID NO: 86109

SEQ ID NO: 87518 - DNA, 1182 bp, Escherichia coli UMEA 3656-1; identical to SEQ ID NO: 86998

SEQ ID NO: 87519 - DNA, 747 bp, Escherichia coli UMEA 3656-1; identical to SEQ ID NO: 86999

SEQ ID NO: 87520 - DNA, 1230 bp, Escherichia coli UMEA 3671-1
atgcttacatcaataaatgaaatttatgctccaattccatacactaataagacagcaaacttattgcttgacggtaaaaatctcataataactggtggtaacgggtgtggaaaaactagttttattagatctatttatgatttccttaaaaataagatagatagacctaatgatcataacatcaataatttatacaatacgttagagtcctacaaatatcacttaaataacggcgggcgtgacgacgttaattacaacttttattctgaagaaataaaaaacattgaattaaaaattgaacaattaaaagccattagaatagaaacaaaagaaaaagaaggtgaaacacgttcactattgagatttcacaaagctctacgtgaagcatcaattacctcgccaattgccgttcctaggctatcggctttaattaatgaaaaatcacatttttctaatgaagtagatggtgatgatttctttgagaattatttggttagtttaaaaacagctcagagctatgcaatttcttttgataatgaccataagaaagctcagcggatacagaaatggtttgataaaattgaaactgatatgcaggaactttttgaagataaaaacctcttactaacgtttgatagtaacgaaggaaaattttatctcaatcaagatggtaaagataagtttacttttcaaacattatcttctggccactcatcaatattgagaatttacgctgacttaataatgagagtagaaatgtggggtttaacacctgacagtatcgaaggtattatttttattgatgaaatagatgcgcatttacatgtttctttgcaaaagcaaatattaagattttttagtcactcctttcctaaagtacaattcattgtcactacacattctccgtttgttgttacatccgtcacaaatgccatcatttatgatctatcgaccaacgcgaaaattagtgatgtgtcttcatattcttatggtatcatccttcaagaattattcggagtaagtccaatatctaaagttctttcagataagttagaacaacttcaagatattattgacaatattaacaacaacaatattgaaactgccaataacataatacaatccttagcacctttagatgaatccatggacatccatgcaagtgcatttattgactatgcaaaaatgcagatactaaaatataaaaaagcaaattctcaggagaaataa

SEQ ID NO: 87521 - DNA, 654 bp, Escherichia coli UMEA 3671-1
atgttcaaggttaatagaacatatcctgcaccaaagtctctttccaagaaagcacgttatgatggtgctgatgtacatgaagcactacaggaatgcttttatggaaaatgttacatttgcgaaacaaagaaccctttggatataaacattgaacattttaaacccaagggtgatgatgtggaaagagcttttgattgggataatttatatctatcatgttccagatgtaacaatataaaactatcaaaatatgacaacattcttgattgctgtaaagaaaaggtatgggatcgagtaaaattactcccaggatattcttataaagcaaaaaaaataacagtaacagcactatttaatgatattgaaacgcagacgaccgcagagttacttgagaaagtatataatagcgatcataccatgagtaaaaaattaacttctgcggcacttcgtactcaagtagtgaaaacaacccaaaaactaattaaaaatattaatgaatattatgaagaagatactccaacagaacaaaaaaaatacttaattgaaaaaatgaagatgatgataaaaagagacgcagctttttcatcattttgcagatggatcattatggaagatgctgaattaggtccaattcttgaaccatttatggattag

SEQ ID NO: 87522 - DNA, 1398 bp, Escherichia coli UMEA 3687-1; identical to SEQ ID NO: 86108

SEQ ID NO: 87523 - DNA, 732 bp, Escherichia coli UMEA 3687-1; identical to SEQ ID NO: 86109

SEQ ID NO: 87524 - DNA, 1398 bp, Escherichia coli UMEA 3694-1; identical to SEQ ID NO: 86108

SEQ ID NO: 87525 - DNA, 732 bp, Escherichia coli UMEA 3694-1; identical to SEQ ID NO: 86109

SEQ ID NO: 87526 - DNA, 1398 bp, Escherichia coli UMEA 3707-1; identical to SEQ ID NO: 86202

SEQ ID NO: 87527 - DNA, 732 bp, Escherichia coli UMEA 3707-1; identical to SEQ ID NO: 86109

SEQ ID NO: 87528 - DNA, 1398 bp, Escherichia coli UMEA 3821-1; identical to SEQ ID NO: 86108

SEQ ID NO: 87529 - DNA, 732 bp, Escherichia coli UMEA 3821-1; identical to SEQ ID NO: 86109

SEQ ID NO: 87530 - DNA, 1215 bp, Escherichia coli UMEA 3899-1; identical to SEQ ID NO: 86448

SEQ ID NO: 87531 - DNA, 624 bp, Escherichia coli UMEA 3899-1; identical to SEQ ID NO: 86041

SEQ ID NO: 87532 - DNA, 1398 bp, Escherichia coli UMEA 4207-1; identical to SEQ ID NO: 86108

SEQ ID NO: 87533 - DNA, 732 bp, Escherichia coli UMEA 4207-1; identical to SEQ ID NO: 86109

SEQ ID NO: 87534 - DNA, 1425 bp, Vibrio coralliilyticus OCN008
atgataattaaatcagtattactggatagaaaaaggtttaagcttgtagattcggatttttgcaggaaaaaaaatgtattcaccgttatcgtgggtagcaatggaacaggaaaaagtagattactcaagagactggttaatggcattaaaaatgtagaacattcagcaaataaagttccaaataactacagccgccaaattgattttgaaaatgagaactacattggtagctattactcgacccctagcgaatcgaaatccatcgttagccgagataaagaaagtatagatactaagtatataaaaaataatccaaaagttatcgcggtgagtactactccgtttgacaaattccctgtggattataaagggaatgagatgtatagatatcatgatgactacgtttatacatatataggactaaaagtttcaaaaaattctcttaaccaatcaaactttatgaacctactattcaggtctattttaattaatgaggacatacttaaaaatagaaaactatttgagttgctaaaattacaaccagttatatcaacttgtttaaagccaagaatgcgtattagtatatttgactttattgaatttgaaggtaaatattcatttttaaaaaataagttaggagattttgacgcagaatcaaatttcattagtaatttaaagaaaaaaatgccaacgctttatgagaagcttaagtctaaaaggttgataaaaaagacttataatagcgtgacctctactataagttttatagatacacctatacactttgacaaccccgatatcccaaaagaagatatattatttttgatggacattggctttttgaacgtgtctgatttttatttttctgacgaagatggaaagaaaataaaaatatcagaactaagttctgggcagaagtgcttgattttaacattgttaaatattgcaggctcgataacagacaatagtgttatttgtatagatgagccagaaataagcctgcaccctaaatggcaaaaggagtttatgaaggtcctgattgaattttttgaagattaccaaaagtgtcattttattatagccacgcattcaccactgataatctctgagctttcaaatgataactgctatatcctgaacatggatgatggctatgcaaaaaaagctagcgaacatatgaaaatgtcatcagattttcagttggcagaagtctttggggttgcaggaaataacaatgaatatctgaatagaatcgttgtctctctattgtcaaaattgagtcaaaatgcaactttaagcaaaagtgatattggcaaaataaagagcttaaagctattttcagaacagatggatagtaatgatcctgtcaaatatcttatcgaactgcttgtatctgcatgggacaaggtgaaacatgctcagtga

SEQ ID NO: 87535 - DNA, 642 bp, Vibrio coralliilyticus OCN008
atgctcagtgaagttatatatagtcgagaacataaagaattcctagacaaaaaaatagattcggaagattttggcagttcatcatggtctgatgaagatttaaaagatattaagcaccttatcaaatctcattatattaaagcacagaagcatacctgtccttactgccagcaaaagactaatactaataatggaagagtgtgggatattgaacatatattacctagatcggcatcacctaggtttatgtttgaaccaactaatctatgtgttgcttgtgttgattgcaattctgcgaaatcagataagaaagtgactagcagccaagcgcagaagaattaccccaaagatagtagcatgtttgacattattcaccctcacttcgatacctatgataaacatattctggtcataaaggctggtatgtattatatcgctaaaggtaagaagggtgaaaaaacaattgagatttgtaggttaaacagattctatgagttcgctgattatggcgaatatattcaagtagataacaggattttcatgttatctaatgcgctaaatgaatcaaaggatgatgaagaaaagaaaagtataagaagggaaattgcagcgctaactatcaacagtttgatggacgagtga

SEQ ID NO: 87536 - DNA, 1755 bp, Listonella anguillarum M3; identical to SEQ ID NO: 86410

SEQ ID NO: 87537 - DNA, 876 bp, Listonella anguillarum M3; identical to SEQ ID NO: 86411

SEQ ID NO: 87538 - DNA, 1251 bp, Listonella anguillarum M3; identical to SEQ ID NO: 86412

SEQ ID NO: 87539 - DNA, 690 bp, Listonella anguillarum M3; identical to SEQ ID NO: 86413

SEQ ID NO: 87540 - DNA, 1398 bp, Escherichia coli UMEA 3652-1; identical to SEQ ID NO: 86202

SEQ ID NO: 87541 - DNA, 732 bp, Escherichia coli UMEA 3652-1; identical to SEQ ID NO: 86109

SEQ ID NO: 87542 - DNA, 2292 bp, Escherichia coli O104:H21 str. CFSAN002236; identical to SEQ ID NO: 86352

SEQ ID NO: 87543 - DNA, 927 bp, Escherichia coli O104:H21 str. CFSAN002236
atgagacacgtccctcgtgggtcagcccaaccgccgttatcattatcggcgttggattctaatggaaaaagtgaattacagcgagcgcgggaacattatgctgagccagaacaggcaaagcgatttgaatttaaagcctattcttccgacgatgtaaaatggcgattaaacacactattccattttaagtgtgcctattgtgagacttttttctctgcttcttcaccggtagacgtcgaacactaccgcccaaaaagtagagtgagtgaagatgctgcgcatccgggatactggtggctagcgatggactgggagaaccttttacccagttgcattgactgtaatcgtaaaaggcggcagcacattgttaatcagtccagtagtcttatttctcttttggagaatagccggagagcagccacttctggagggaaaaaagacagctttcctctagccaataggggggtacgtatgcagcctgaaagcagagatcattttgaagaacaggctttgttacttaatccctgcgaacaccaaccggaatcattcctgcattttgtcagcataggcgcaccttctcttagtctggtagtgcctacaggagatagagaaagtccacatggcgcaacgtctattcatgtctacgggctcaatcgtctcggtttagttcaggaccgcacgcgttacttacgtcgactcgaatttttgggtgatatgatgatatcgctcggtgagcttattgatcaagtggatagaatggcgttagaagaagttcagagggacgaaatcatacgcccattgagattattattggataaaaccggtaaagaaatgactcagatggctagaccggatcagccatattcagtgatggctgaaacgtggatagcccaattctttcaacaaatagccaaccggggagtatga

SEQ ID NO: 87544 - DNA, 1869 bp, Ochrobactrum sp. EGD-AQ16
atgtatcttacagccgaagcggttcttcacgcgatacaaatccttcgggccaatgtacacccgtttattggtataacgttcgttgcttgtaaacgctacggactcagcgtcggatccactgacgaggtgagcatggataaactcaccgaagaacatcttgacgagcatcaccgcgttgatcaccgtagctcgtactatttccagcctttcagaagcgccacttcttgggtcaaacagagatatccatcgactggcttgcaaaccgtcaatacgcagacttttgctacagtttttgagcatcccagaggcacgcgcaaatggggtttcgcttcgaattaccttgatcgcacgacaagcatcttagaagagcaaaaatttacgacgaatatccctgccgatgcgctcgccgtttggttgtacaaagacaccgatctcggcagcgtagaaaattatgacgacctagtcgaactattcttctctgaatacaagatcaacgaaaatgaaaaagaaggcctgttctccgctaggttgatggagagtgttctctcttccgaaggctcgttttcatctgagccacttgcaatgacggcaattacgcgcgagctcacgcctccgccagacgcgaaagcagaaggtggccgaacgataaaatccttgcgtttgtccaatgcggggccggcccgagaaatggaaatcgatttcggacaacgccttagcatagttaccggtgataacggattggggaaatcgtttctactcgattttgcttggtgggcagccactggatcctgggctgaccgcgaggcactcccacagctagacaatccagctatcgtgtccgaagttgaatactccttgagcggaaattcgggaagaacgatcaacttcaaagcaaagtatgatagaaagagttttagctggatacgccaaaaggaagcaatgaccgttgaggcgatcgcggttttttcccgtgcggatggttcttttgcttttgcagatcccgtgcgtagcaggttcaacaggaagtctgtaacatcaaatagtttatcagcccaagagttgtggaacggacgtccgggaaccattgaggggctaataagagattggattaagtggcagacgtccatagatcggaagacatttgatcaatttacgtcggtgttgaaaaggctgtcgcccgaagatttaggcacgctcacgccgggagaaccagttcgcattccagacgaaccgcgagatatacccacaattaggcaccgttacggaactgttccagtaactcacgcctcctctggtgtgcaacgagtccttctcctagcttacctcatcatctggtcgtggcaggagcatgaactcgccgcgaaacagatgggcgaaactccacttcgccgaatgatagtaattgtagatgagcttgaggctcatctacacccgaaatggcagagaatagttctacccgcacttatgagcattggggatcttttgagcagtgagcttgctttacagatgattgctgcgactcattccccaatgatattagcctccatggaggcgagcttcgacagctctatcgacgtcctctaccacctctatggcgtcggccccactgtcaagctcgaagagattcctttcgttaaatatggcgatgcgtctggctggcttacctccccactcttcggacttcgtcacgctcgctcaagagaagctgaagagacaatcgagaaggcaaaagcgctccagcttggtgatgatccaaatccccaggacgttgctgcgatttcggagcgcctcaaatcgcaactggcctacgatgacaaattttggcctcggtggctctattttgccgagcaacatggtgtaaaaatatga

SEQ ID NO: 87545 - DNA, 621 bp, Ochrobactrum sp. EGD-AQ16
atgattggtgtcatgccaaagggggaatatgcaggtttcgacaatgacgttagaaagcccggcgctgcattcttggccacctgcccgaaaccaacgtcaaaacagttcaagaaatatagctactggagccgggcactaggcgaacttcgcgaagcgtattcgggcatatgtgcatataccgcgatgtatatacctgatcggggaagcgttgatcacttccttccgaaggcaggcgagaacgctcgtccagacctagcgtatgaatgggataattttcgtctagcgggtgaaaaggtaaacacttcaaaaggtgaattgatagacatcgtcgacccatttcaagtgcaagatgattggttctttcttgatctacctgcttgtttactacgtccaaatcccgatcttgacaaagagctgaagagaaaaatcgctaataccattaattctttgcgcttcaatcaaaacgataattacgtgcaagaacggtgtaatattctgatggcctatgccaccaatgatatatcgctcaattttctccaacgtcgatatccgttcctagccaaggaggcaacaaggcaagcacttactcaggaacggctaagagaactattcagaatataa

SEQ ID NO: 87546 - DNA, 1659 bp, Klebsiella pneumoniae KP-1
atgaaagtcgacaaactatatatccgctcacgctttaaaaatctagaaaacgtgaaagtggattttgacgaaaatcatctgatgaccgttgtggtaggtcgtaatggttccggtaaatccaacgttctagaagccttagtatctatattccgcaatcttgacttaggtgaggcgccagcgttttcatacgaactgacttatcgattgggtgaacctcacaaacccaatcgacccagtaatcgatggctggaaatcactattgatgccgatccaaatcgcggaacgctggcaaagcaatacgaagtacgtatgcgcaatcttttgaatgacagcttacctgaagacatatttgatgaaaagactttaggtatagttattccattttcaaaggttaagcgcaataaagaaggtaaagcgccgtacctgcccaactatgtgtttgcctactattcaggtcctagtgatcgattagaaagctacttcaagaaacatcggacagatttttatcgtcatttattaaatgataagccggataaaaagctaaatcttaagggcgacattcgtccgcttttttatgcaaaaccctaccacagccagtttgtactcttggcatttttcttatctgacgaaaatagccctcagcgcacttttattaaggaacatttaggcatagaagatttagatagcattcactttgtgatgcgacaacctggctgggcaaaacaaaaaggcgagctattctggggtgcacgtggcgtagtccgccgtttcctagatgagctaataaaatatacgctagcacctataaaagtgacacgacaagaagatacatctttaactggtagtcatgttcgaaacgaattttttcatttatttttacctaatgtcgaagtactacacacatttgcaaaaggattaagtgatgacgagctttttaaaatgctcgaaagtacactgctatcagaaattatctctgaagtaagtattcgggtgaaagtatccagtagcaaagtacctcttactttccgagaactcagcgaaggagaacaacaactactaaccgtgttgggactactcaaattcaccggcggcaaagactccttgtttttactcgacgaacctgacacccaccttaatccgtcatgggccattaagtatctgaaattcctgcgtgaattcgtacccaaccatgaaactagccatttactgatggttacacaccatcctttggctattgctgagctaaagaaacagcaagtccaagtcatgtggcgtgatgatgagtataatgttcactcacaagaaccttacatagatccacgtggtgctggttttatggccacacttactgaagtttttggtctaaatacaacattggatcttgagacccaaaagttactggatgataggaacgaactggcccacatcgaaagccgaacagaagctcagagcaaccaactagatctccttaatgatgagttaaacagacttgggttttcatttgaaaacagagatccattatacagtgagttccttttagcatggcaagatctaaaatacagtgaaaggccacccttaacgccagataaagcagctcagagacgagttgccatgaagaaggtaattgaggtacttcaagctaagaaggctagcgaatga

SEQ ID NO: 87547 - DNA, 843 bp, Klebsiella pneumoniae KP-1
atgattttcatcaaacgagacgctgcgcttattcctgaaaaggtacttaatgttgctcagcgggcacaaaatgctctggaacaattacccgccgagcagaggaaagatttcatcaagaaaaagtctcatatatggagaggcttttcaaagtatcttgccaaaatgtcttatggtaagtgctggtattctgaggctaaagatgcgggtgcaaatttcgatgtagatcatttcagacctaaagcagaagcaaaaagggctgaaaatttagtcgatgtcgaaggttatgcatggttagcatttgattggaaaaacttccgactttccgctcaaaattgtaaccgtttgaacacggatgaatcaggtaacaccgtaggtaaaggtagctggttccccctgctaaatggtagccctaaagcaagctgggataatcgttgtattaatgatgaaagagtcactcttctggaccctgtagttcaagctgacctcacctatatagactatgacgacaacggtagatttacttcgagtagacactgtattggacaagcagcattaaggatacaacagtctgctgttatttatggtcttaattttgagaaaatgcgtgaagcacgatttcaggtcatgagagaagcaaaagaacttctcgaaactattcaacaaagtgttgaggacttagatccattaggtgatgaagcaccaatgagaactatagagcgacagattgaacaactgaaggccaaaacacgggctgatgcaccatttagccgtgcagtgagagcacagcttataaaacttggtgcagaggattacttaattgatagaagtttggatgcagcttga

SEQ ID NO: 87548 - DNA, 1224 bp, Aggregatibacter sp. oral taxon 458 str. W10330
atgaaatatatacacaatatatctggaaaaattgagcatctagactatgaaataaatattgatttaaatggtaaaaacttaattcttgttggtgctaacggagtcggaaaaacatcaatattaaattcaatttataaatctattaacatagagctcgaaaaaaacaactctcaaatagatagttttaaggacacattagattattataaacgtgatataaaaaattatactgaaggatcaaatgaatacatagataaattcaattcaataaaatattatgaagaaaaactaaaagagtttaattcaccattaacgctttcaattcctaatataagtgattttattagaaattttaatacaaaaaaagcaatcagatctaatttttctgcatacagaataagtagaattcaagcgacatcttcatctacatctttagaggaagagaagaaaaattctcttgagttagaatatgtgggttctacattagaacaacatcttttaaatataagagtcactaaatcattacttatgacagaggctaaagatcatgtgaaagctaataaattctcacaatggtttgataattttgagcgccaattaaaatatctttttgaagataatgacacaaaactaaagtttgatgtttcatcaatgaaattctatattattcaaagaaataagaaatttacatttcaaaatctctcatctggctatcaagccatttttgacatttatgcagatctgttaatgagaactgaactgtttgatataactccagatgaattaactggtgtagtactaattgatgaaatagatgcccatttacatatatctttacaaaagataattttaccttttttcattaactcctttccaaaggttcaatttattgtaagcacgcattctccatttgtaattagctctagttctgatacagtaatttatgatttaacaaaacaagaacttattacaaacaatgtaacattttattcaaatgatgctattgtgaaaggattgtttcatgtaaatacaactcatagcatagaactccagaatataattgatgaactgaaagaagttatagattcagatattaatgactcgaataaattaagagaacatataaaaaagctagaaccatttaaagaaagcttaactaattcagcgaaagtaatcctattattagcagaaaacaaggttctagatatagaggagaatagataa

SEQ ID NO: 87549 - DNA, 669 bp, Aggregatibacter sp. oral taxon 458 str. W10330
atgttttttgttaatagggatccacaattacctaatagtctatcaaaaactataaaagattatagaactgaagaggttattacaaagttaaatgaaatgttttttggtaaatgttatttatgtgaaaaagataacatttcagatattgaagttgaacacctcataccacataagaacaatgaaaatttaaaatatgattggaataatttattttattcttgttctagatgtaacagtataaaaggcacaaaagagaaaattttggattgcacaaacattgatgtaagtaaagcaatagaattacgttgcccttcatctgattcggatcccgtaatagttaatttaggtctattcggagaaagtgaagaaatattagcaactaaagaattattagaagaatgttacaacaatcgttctactgcaatcagaggcataagtagacaagctctcattgatgaaataattaaacattatgcatgttggttagaccttaaactcaaattaagggacaatcttctctcaactagagaagaaaaagaaattctagaaaaactagagaaaatgtgccaatcaaattatcctttttcggctttttggaagtggcatatttatcgcgataatgttttaaaggataaaatttctatttttgatgaacaattccctctatga

SEQ ID NO: 87550 - DNA, 1554 bp, Novosphingobium tardaugens NBRC 16725
atgttcttcaccgtcatacctcacggctcgcgcttaccttcgggcgcaaaaaacaaagcatttcttctgactgataattgggatgactggttcaaattctcgaccatgtacgtcctcttttactatgatgaagaaggcgagcagcatcggataggtgaagttaaaattggccagtttggcctaacctccgaacaacgtaggccgcccatacctcaagaatttgacgctctggacgaaaccttcttctcgctcggccaagacgacacctattatgagcgcgccagcgccatgggcgaagtcattcggcgaaaattttttgatggccttcgagacgtcgcggtagacaatgatctgtttgagcgtgccctcgacgaggatgtgatgggcgtttccctcctgcgttcggttagccgctcctccgttcgtggccagtttcgccgtatcgccaacggcggcgtccgtttgacgagctatgcgttcagctatgagccgccccgtagacgcacggccaaacttgatccggtgaaattcgaattcaaggtcaagccagattcgaaccccccaacaaacattcacgttcttattggcaggaatggtgtaggcaaaacacatcacctgcaactgatgacacgggcgttggtcgagcgtgacgcggaaagcagcgacgtaggaaaattccggaatgacgataatccgttcgaggatttcgaggacgatccggagccgatttttgagaacatagtctccgtcacgttcagcgcgttcgatcccttcgagccattgcccgttcgccagaacaaatcagaaggcgttcggtatcagtatatcggcctcaaaaaaacttcatcggcatcggacggagcgcccaagactcccggcattctcgggcgcgaattcggcgcaagcgtaaagctggtaacaggccagcttcctaagctggagcgttggcggaaagccctcgcggtccttgaagccgatccgatattccgggaagcaaacatcgcttcactggcagaccagagcgacgaggaagaggtaaagggcgaagctgcgcgcgtgttcgcgaaacttagctccggccataagatcgttcttctgacgatcacccgacttgttgaaaccgtggaggaaaaaacgctggtattccttgatgagccggaagcgcatttgcatccgccattgctgtcagcgtttgttcgttctctgtcggatctgctttccaaccggaatggggtcgcgctaatcgccacgcattcccctgtggttttgcaggaggtgcccaagcgatgcgtttggaagttgcgacggtcggggcgtgaagtggctatcgaacgaccggatattcaaactttcggcgaaaatgttggcattctgactcgtgaggttttcggccttgaagtcaccgattcaggtttccatcagcttctggcgcaggctgtggaagcctcgccggactatgacgaggtgctggagaatttcggcagtcagctcggcgcagaagctcgcgctatcgtgcaaggaatgatcgcatctcgtgatggcggtgacgattaa

SEQ ID NO: 87551 - DNA, 840 bp, Novosphingobium tardaugens NBRC 16725
atgtggcgcgtcgataaaccgactatcacggcagaagatgccttcgaaacctgcatcagccggattcgggatgcgggcctcaaacaacggatggaagatataaccgcttctgtggtggcatcggctgcggcttatgacgcggcggcggagcaggggcgattgcacactacagccgttcatactggcgtgaatggatcggtgacgaccaaagaaatgatccggctttacgatgggcggatggcggcggccaaatcgccggggcgaggaatatacgacgcgcttatagcctcggctgaacatggaagatgcccattttgcggccatcgcgttgtgtccaccctcgatcatgttttgccgaaggcgcattacccagcgctcgcggtggcgccccataaccttgtgccgtcatgtgcagactgtaacaaaaccaagcacgatcagcctctcgcaaatgaggcacagcaatacattcatccttattacgatgaaatcgaaggcgagctatggttgcgggcagaggtgttggaaacagcgccagcgtcggttcgcttctttgtcgaacccttcgaaggctggccaaatatccttggtcagcgcgtcgaaaatcatttcacgcgccttggcctcagcaaactttattcctcgcaagcggcacaagagttggtgagcatcagatatcaggtcactgcgttgcatgatcggctgggtgcagacggggtgcggcaattccttgccgaaagccacgcgtcgcgctcaaatgcccggccaaattcgtggcagactgcgttctattcggccctcagcgagagtgactggtattgtaatgggggcttcgcctaa

SEQ ID NO: 87552 - DNA, 1257 bp, Porphyromonas gingivalis F0570
atgcacattcaaagagtcaagatagaaaatttcaggtgtatagaaagattcgaggaagagtttagtcgttactcgaatatattttgtggggttaatggctcaggaaagacaactattttgcaggcattagaaatcttgtttagctggtttattgctcgtttcaataatattaaaggcaatggtacagctttaaaggatgatgatattaagtatggagccgactactgtcttcttgaggtaacacttgatgataacacgacatggagtctatataggcagcactctcgggtaagaaagccaaatctacaaaaaagcaatctaaagggcctgacagaaagggtcaactatatcgttgaaaaagccaacaaagaagaacattatcccactcctgtttttacctctttccctgtttatcgaagagcagtagctactttaccgaaacgtatccataaaaagcatgctttaggtaagtttgatgtctacaatagtaatgcagacagcaaagtgaatcctcatgctttctttgtttggtttcgtgagcgagaagatatagagaatgagctgtatagatatggcaaggaaggatataaagattctcaattggaggcagtacgtcaagccacttctcaaatgatttcgggttataagaatctgcgtattgagcgtcctcgaggttttgtgattgaaaaaaacgaggagaagtttgcatttgatcagctttcggatggagagaaatcctatatcatacttactgctgacattgctcgtttacttgcaatggcaaatcctagtcccgatgaaaaccctttattggcttcgggcattattctaattgatgagatagacttacacctgcatccaaagtggcaacgtgaggttttgcctcagctgagaaaggtctttcccaattgtcagttcttcattacgactcactctccatttgtgctctccagtgctgatgcaagtaatactatatttgtcacagaacaaccttacattaggcttgtagaagatcgtatatatggagcagaagtaagccatatactccttgatactctcggtttatccagtttaagagatagatatgtggaacaggatattcaggagatttggaagcttctcaattcgggtatatcaaaaggtgaagaactaaagatgctaataggcagactaaaggagaaactaaaccccaatgaccctgaatttgtcaaaatctctctccagaaaagatggcttgaatctaataaagaaggatag

SEQ ID NO: 87553 - DNA, 606 bp, Porphyromonas gingivalis F0570
atgagaaagattaataagataccttgccctaagtttgtaaatcatatctcccggaataaactcaataaatttaatatttggaacaaattagacctaaatatcaagcaaaaaactcgagattatatccttaaagaggagcagaaaggacttagtgcttatacagaaaaacggatcgaaaaaagtaagaagctacacattgaccatttccacaagagagatttatacccccaacagacctttgattgggataatttgttggtggatgaaaaagagaaaccctatggagctgatgctaaggataaaaaaatcttaaaatgtgattataaatgggtcattaaccctgtagttgatgatccacatcaatattttgagtattcggccaatggtgagattatcccaaagattggattgggcaagtacgaaaaaaagagggctgagaagaccattgagatcttcaacctaaatcattcaagtttagttgactacagaaaaacacaatataaacacattcatgattatcttgatgctggattacccaaacaagacattctatcagaacttgcagaagctccttttctgagtttgactgagtttcttctaccgtaa

SEQ ID NO: 87554 - DNA, 1338 bp, Porphyromonas gingivalis F0185; identical to SEQ ID NO: 85892

SEQ ID NO: 87555 - DNA, 600 bp, Porphyromonas gingivalis F0185
atgaggaaaatcattaagggaagagaacccgatgcctggctgaagtatagatgtacgccaggagctgtatatcaaagaaaacctgcactagcggatagccttttgttagagcaggggtatgtttgtgcctattgcgagaagcgtatagatgtccaagacctcagagttgagcatataaaacctcgtagccaataccctgcccagcaactatcctatagcaatatggttgcatgttgcagtggccagagtcagggctccgctcattgcgattgctccaagaaggatgaggagattacacttaatctctttaccgacgcactgtttcttagcatcagctacaagcatgacggaacaatatctagtgcaaataagtcttggaatgatgatataaatatcacgcttaatttgaattgcctttctctcaaggagaatcggaaacttgctctagatggtttgctagaaatcatcaaaaaagaaggctatagccaaggggtattgaaaaggctgaaagcaagatacgaggcaaaagacaagggtcataaattcgcagaatacagaggaattatcttatactacatagacaaaaagctatccccctag

SEQ ID NO: 87556 - DNA, 1263 bp, Porphyromonas gingivalis F0566
atgcacattcaaagagtcaagatagaaaatttcaggtgtatagaaagattcgaggaagagtttagtcgttactcgaatatattttgtggggttaatggctcaggaaagacaactattttgcaggcattagaaatcttgtttagctggtttattgctcgtttcaataatattaaaggcaatggtacagctttaaaggatgatgatattaagtatggagccgactactgtcttcttgaggtaacacttgatgataacacgacatggagtctatataggcagcactctcgggtaagaaagccaaatccacaaaaaagcaatctaaagggcctgacagaaagggtcaactatatcgttgaaaaagctaacaaggaagaacattatcccattcctgtttttacctctttccctgtttatcgaagagcagtagctactttaccgaaacgtatccataaaaagcatgctttaggtaagtttgatgtctacaatagtaatgcagacagcaaagtgaatcctcatgctttctttgtttggtttcgtgagcgagaagatatagagaatgagctgtatagatatggcaaggaaggatataaagattctcaattggaggcagtacgtcaagccacttctcaaatgatttcgggttataagaatctgcgtattgagcgtcctcgaggttttgtgattgaaaaaaacgaggagaagtttgcatttgatcagctttcggatggagagaaatcctatatcatacttactgctgacattgctcgtttacttgcaatggcaaatcctagtcccgatgaaaaccctttattggcttcgggcattattctaattgatgagatagacttacacctgcatccaaagtggcaacgtgaggttttgcctcagctgagaaaggtctttcccaattgtcagttcttcattacgactcactctccatttgtgctctccagtgctgatgcaagtaatactatatttgtcacagaacaaccttacattaggcttgtagaagatcgtatatatggagcagaagtaagccatatactccttgatactctcggtttatccagtttaagagatagatatgtggaacaggatattcaggagatttggaagcttctcaattcgggtatatcaaaaggtgaagaactaaagataaagatgctaataggcagactaaaggagaaactaaaccccaatgaccctgaatttgtcaaaatctctctccagaaaagatggcttgaatctaataaagaaggatag

SEQ ID NO: 87557 - DNA, 606 bp, Porphyromonas gingivalis F0566
atgagaaagattaataagataccttgccctaagtttgtaaatcatatctcccggaataaactcaataaatttaatatttggaacaatttagacccaaatatcaggcaaaaaactcgagattatatccttaaagaggagcagaaaggacttagtgcttatacagaaaaacggatcgaaaaaagtaagaagctacacattgaccatttccacaagagaaatttatacccccaacagacctttgattgggataatttgttggtggatgaaaaagagaaaccctatggagctgatgctaaggataaaaaaatctcaaaatgtgattataaatgggtcattaaccctgtagttgatgatccacatcaatattttgagtattcggccaatggtgagattatcccaaagattggattgggcaagtacgaaaaaaagagggctgagaagaccattgagatcttcaacctaaatcattcaagtttagttgactacagaaaaacacaatataaacacattcatgattatcttgatgctggattacccaaacaagacattctatcagaacttgcagaagctccttttctgagtttgactgagtttcttctaccgtaa

SEQ ID NO: 87558 - DNA, 1257 bp, Porphyromonas gingivalis W4087; identical to SEQ ID NO: 87552

SEQ ID NO: 87559 - DNA, 606 bp, Porphyromonas gingivalis W4087; identical to SEQ ID NO: 87553

SEQ ID NO: 87560 - DNA, 1443 bp, Eubacterium ramulus ATCC 29099
atgtatagcggatttttattagtggatttagtgagattttcagattcactaatgttcaggaaggcggcatattgtatgtgtgaatttaatatccaggaaatagaactttttaattacaggcagtttgaagataagaaatttgtgttaaattcaagaatgaatgtttttgcaggaaagaatggctctggtaaaacaacagtattggaagcggctaatgtcgtgctgggggcatatcttgcagcgtttaagagatatgtaccttccaggtttgtgtttaatatcaaatcaactgatgcaagacgaaagactcagatttcagatgatagcagaattcttactgctggtgcaatcccacagtatccttgcaaggttagttgtaaggctgcatggaatattgattatgagtctattggttttcagcgtgttcttttgaaacaggatggcagaactaagtttggtggaaaaaatccaatgcagcagactgtaattgaatgggaaggcaaaatcgcaaatgcagatcactctgatgaagaggttattctgccattggtattataccttagttcagcacgactttggaaagatggaaataaaagaacagtaaagacaggcgtattgagcagaacagacgcatatagccactgccttgatgcgcagcatggattggatattgcgtttcgatatatagatacgcttaaagctgttgcagttgaagaaaatgatggaaaaatttttccggcttatgaggtcattttgtgggcggttaatgaggcgtttagagatgagttaaaatcaggtgaaaaaattatattttctacaaaatatgaggatgatattattgcacttaaaacgtctgaaggaaccgttcttccatttcagatgttgagtgacggttatagaaacgttatcaagataatcttggatattgcagcaagaatgtgtatattaaatccatatttgaaggagaaagccttacaggaaacaccgggtattgttcttattgatgaaattgatttaagtttgcatccaacttggcagaaaagaattattgggattttaaaacaactgtttcctaaaattcagtttatctgtgcaacacattcgccttttattattcaatcacttgaagagggcgagctgatcacattagaccagcctctggaatctgaatattcaggagagagtattgaagatatttcggaggatattatgggggttgtgttaccgcaatatagtgaaaaaaagagaaaaatatatgaagcttcaaagctgtattttgaagcacttacacaggcaaaatcgcaggaagacatagacagactgggaaaaagactggcggaactggaggctgaatacagcgaaaatcctgcttatatggcgtgggtacatcagcagtatctggaacagaaatggaaagtgaaaaagaatgagaccaataaataa

SEQ ID NO: 87561 - DNA, 696 bp, Eubacterium ramulus ATCC 29099
atgagaccaataaataagggggagtctccatataaaaaaataaatgaatataaggacgcattgccatatttagagagacggataggaatgtattgttcttattgtgaattttctataccacatgttcctgaggtagaacatgtggtttcaaaatccaaaggtggagatttaacagactggaataatcttaacctgggatgtaaatattgtaatacacgaaaaaaggcacagacaatgccgaaaaataaaaaaaactatttgtggccggatgaagataatactgctatcgcatattcgtacattaatggtatcccaaaggtgaatgaagagttattgataaaactggattcaacaggggattacctgaaaagagcacgtaatacatataaacttgtaggtttaggcaattttcctacgggaaaagatagagatagacgatttggacaaagaaatatagcttatcaaaaagcattaaactcgctggaaaactggaatcatatgaaagacctgtcaaaagaatatcagaatgatatgaaaaagcagattattatgacggccttgggagatggatttttttcgatatggatggaggtgttttgtaatgaaccggaaatacgactagcactcatagaggcttttccagggacgaacctgaattattatgatgagaaaggatgcgttaaagaaattatatga

SEQ ID NO: 87562 - DNA, 363 bp, Eubacterium ramulus ATCC 29099
aaccaaggaaattgatgttgcttatacggatgcacagggaatgcgcatgtgtatcccactaaaccagttgagtgatggctataaaagcacgatcagtctggtagcagatattgcatatcgtatggcagtattgaaccctcagtgcctgggcgaagtctgcaaaaaaacggatggaatcattttgattgatgaggtggatcttcatcttcatccggcatggcagaaacagctcttacatgacctgacggaaattttcccaaatgttcagtttgttgtcagtacaaatgctccggaagtgatcaattcagtagcaagggagcaggtggttgtcctggaaaactatcaggcattaccggcacctgc

SEQ ID NO: 87563 - DNA, 666 bp, Eubacterium ramulus ATCC 29099
atgatagaaataaaaaaaggaacggaacctaaggaacttttggagtatcaaaaaaaggagtttgcgtcttatgcagatatgaaaggcgatgttaaagagaaagtgatgaaaagtctgctttcggaacagggacacctttgtgcatactgcatgagcaggattgatgagggtgacggtaagcatagagctacgatagaacattgcattcaacaggcggtgacagatgaaaaagaacgtttgaattataaaaatatggtggctgtatgtttgggaaaccgtaatgcacactctaatgaggataaaagctgtgatgcgaagagaggcagtttaaaagttgacaagcaggatatgaaaaaaatcaacgtgtttgatggcaggacattgacggatatcaagtatgcttctgacggtacgatttattctgatgatgaggatgtaaatgaagatctgaacctaagattaaatctgaactgtgaagcacgtagattaaaggaatgtcgccgacaggcactttctgcattacataggaacattgccggaaaatatccaaataaaacagcaccaaagtcatattatcaaaaattgatggatcattatacggaacaacgggaaatgaaagaaccatatagcgggattttgatctattggttggaaaaacatatttag

SEQ ID NO: 87564 - DNA, 1272 bp, Eubacterium ramulus ATCC 29099
gtggaaaatggaggatttaacgtgaaagaatattttatcagtgagattgatatagacaaattgtatcatttgtcggatataaaaatacaactggattcgacgaaacgccagcatcttctgctgacaggaaaaaatggttcaggaaagacatcgttgttgttagagatagaaaaatttttgaaggccataaatgatgaaaaattttctaagttgagagggttttataaagatgcattaaatagagccaaggttaatatagaatctgcagccagtgagaacgataaatatgaagctgaaaagcggtatagaatttatgcagatgaaattgcaaaatatagcgatggtgttcgaattaccctgaatgaatgcgatggcatagaaaaggcataccaagatggaaaatttataatggcatattttccatctgaacgaaaagcacaatttgatgtaccgaatggggtagaaaatattgaattgtccaaagcatacagaatagataatagtgcaggagcagttttgcttaaatatatggtacatttgaaaacgcagcaatcttatgcacaaaatgcaggcgatgaatctgttgcgcaaatgattcagaagtggtttgacagatttgaatcagcattgagaattttactggatgagcagtctgtccatctagaatacgactataagcgctataattttaaaatttgtcagaatggacgagaaccatttggttttaatgaattatcggatggatattcttccattatttatatggtttcggatttaattctgcgaatggataagaattggctgttaggggatgaactgagtcagtataattatcagggaattgttctgattgatgagttggagacacatcttcatattgaattacagaaaaagatccttccgtttttaacagaatttttccccaaaatccaattcattgtgacaacacattctccttatattttgaattctatttcaaatgcaagggcttatgatttggagagacatgttgcattggataatttatcggcattttcttccgatgatcttgcagaaggatattttgaagcggatgaatattctgatgaattaaaaaaacaattggcaaggtatgaaatcctttgcttcagtgatgaagtgacagaggaggaacgagcagagcgggcagaactcagaatcaaattgaaaaatatgtcttcggaactttcaggaacagcaaaagagaagtttgaggatattgagcggagaagaaaattaaatgatcagaattaa

SEQ ID NO: 87565 - DNA, 687 bp, Eubacterium ramulus ATCC 29099
atgatcagaattaaaagaaaagataccgcacagacacagcttgcaattaaggatttagaggaagcaagtcagcgtggaaattcttataatacagaaaatgtaaatcgtgcgttaaaagcagtattttatggaaaatgttacatctgtgaaaataaacacgctacatcgtatcagattgaacatttaataccgcatcatggcaatgcacggttgaaatatgactggaacaaattgttttgggcgtgtgcgcattgtaataatataaaatctgacaagtatgagccgattttagattgtacaaagcgttcagtggaacaattaattgcatttcgtaaaaaaggctattttggtgcagaggaaaaactggaatttacgccattggtttctgatgatgaggaagtggaacagacggtttctctgcttgaagatgtatattatggaacgacaccgcagaaaaagatagaggcgcagatcatacgaaaaaatttgcgaaagaatctctcaaaattcaaagagtatgtaagagagtatcaggaagcggaagatgcggtggaaaaagacgatataggagaactcttgaaaagagaactcaataatagttctgaatttactgcatttaaaagatggctgatctgggacaacgaaatgttttcagagatagaaaagtatattccgaaaaaagattga

SEQ ID NO: 87566 - DNA, 1221 bp, Leptotrichia sp. oral taxon 225 str. F0581
atgaaaatcaaaaatcttcatataaaagaatttaaaggattgagagatatatctataaattttgaaaaaaatgataagccgttagatttagtagttttagcaggttcaaatggaagtggaaaaactagaatattagaaagtattaaagactatttcgaaagttacattgatattcaagcaataaaaattattaataatttgcaaatattttttgaaaaagaagaaaaagaatgtatagataaaataggaagtgaaaaatatttttatagtgctttgaaatatttttctttaaatgataaaaaagagaatctgaatgattcttcatatttggttattaaaaaaaatttattaattcttcctaaaataatttatgttccaacagaaataaattttcagaaaatggatatagctattactaatttagtacagaaatatgaatttttaaatattgtaaacacaaatttaataaaagatattccgtcctatattgcaacaaaaatgatttcagaaatgtttaaaaataaaaatgaaaaagtcgaagatatccaaagaaaagtttttgatgaaataaatgaaatatttgaaaatttaaatatagatgtaaaagttgaagatatttcacaagatggtagaaatattacacttttcacaaattcttcaggagatgaatttgatataaacgaattatcgtctggtgaaaaacaattatttttacggactttggctataaaaatgttaaatcctgaaaattcaattattttgatcgatgagcctgaactttcgttgcatccaaaatggcaacaaagaatagtggatgtatatagaaaaattgggaaaaataatcagataattattgcaacacattcgccacatattttaggaagtgtaaaaaaagagaatattatgttgctagataaggatggtgaagggaaaattgtgattaaaactggggatgagttgtatgattcttatggacagccaacggatagagtattgaaggatattatgggattggaaactactagaaatcccaaagtgtttaagttgttggaagaggctggggagttagtggataaaaatgaatatgagagtgaagaatttaaaactaaatataaagaattacgagaaatattaggtaataaggatgaggatttgcttttaatggatatggatattcaaattagaaaaaaacgaggtttgaaaaatgttgaaagtgaataa

SEQ ID NO: 87567 - DNA, 648 bp, Leptotrichia sp. oral taxon 225 str. F0581
atgttgaaagtgaataaaaaagatgaaccagaatttttttcgaagtttaaaaagaaaaacggacctaaagattggaaagacttagattttgagataaaaaggaaattgaaaaaatacatgctggaaaatgagcagaaaatagacgataaaagttattgtccttattgtgaaatgataatcttttttgaaaatgatgattttgaagaagacaagaaagaaaaagaatgccacatagaacatataaagccgaaaagtgaatttagaaatcttacttttgattataaaaattttttaacatcttgttcagataaaaatacttgtgggcagtcgaaaggcaataaatgggataatttgtttataaatccagttaaagaaaatccagaagaatatttttcatatagcataagaacaggtaaaattattccaaaaaaagaagctggacttgaatacgagaaggcaataaagacaattgaaattttaaatttaaatgaaaataaattatgtgattatagaaaaagttatataaatcagatattaaataccattaaaaactcaagaaataatgatgagaaaatagaaattataaattattttgatgaacttccaacattaaaaaagtttttaatagaaaatattaaaattttataa

SEQ ID NO: 87568 - DNA, 1332 bp, Bacillus infantis NRRL B-14911
ttgcaaaggagaaatattttaataacacaaaaaaaaaatgattattatgatgtaacagatgaaaatgatatacataaatatttttctaaacagaggtttatagaatcagttgaaataaggaattttaaaggcttgaagtatttaaacctagactttggattaagtcaaagtatgggcgcaccatggttaatgttattaggagaaaatggagtaggtaagagttcagtgttacaagcaatatctattggactaatgggagagcaaaagcgtaaagaagtaattttgaagagtgccaataattttgtgactaaccaaaaaagagaaggctctattaagataaaattaactggaatggtagacccaataataatagatttcactagagacagccatttatttggaggggaaaatcatgttgatccccgtgtactaattttatcttatggttcaactagacttttaccaaccgaaaataagatagatatgtttaggccatcgtgggcaagagtagagaatttatttgatccatttgtacccctggttgatgtagagaattacttaacttggttggaacaagaagacttttttattgttaaaaatgctattgaaaatttattcatggaaaaagtagagttaattagaaatggtggaactaaggggataaagttccggttttctaattcaatagttcgactagaagatttaagtgatggttatagaacaatcattgctttagctactgatattatgatggttatgaagaatagatggcgtagttatgatgctgaaggtatagttctcattgatgagttagatgctcacctacatccaagatggaatatagagattgtcaggaagctaagaatggcttttccgaagatccagttcatagctacaactcataaccccctaacactacgaggtttattaaaaaatgaagtagcagttatgctggaggataatgatagagaaactattgtattgcaaaatcttcctgaacaaaaaggtatgatgattgaagatatcttgacttcaaagttttttggtttgtacgatacattacctgagttaaattcaatttttcatgagtactatagattgttagctaacccatctcctaacactaaacaaaaggatagaattgctatattgaaagaaaaattaaaagattatgataagttagggaatacaaaaagagatcaaatgttttatgaggctatagatagatatatagctaaagagaaagcaacaaatgaaaaactaacaagtgattcatttatccaagatattgataatattattaattcacttagagggttttataaaaaatga

SEQ ID NO: 87569 - DNA, 870 bp, Bacillus infantis NRRL B-14911; identical to SEQ ID NO: 86119

SEQ ID NO: 87570 - DNA, 1461 bp, Dickeya solani D s0432-1
atgaaaataaagcaattcaggttgcacaacgtcgggcgctttacctctcttgatgccctcatcgcgccaacggctgattatccttccaatgtaacggtgctggtcggtaacaatggcgctgggaaaacctccattttgcaggctctggcgacctctctcagttggctggtggcgcgggtacgcagtgaaaaaggcaacggcagcggcattagcgaagacgccataaccaacgcgcatacttccgccgcgattgagatcatggcacaagatactcctccattctcaggtcatgctgctgacaacgacgctgaatatcattggacgctggcaaaaactcgcagcggcaaaaaagggcagcacaccagccagcttaatgccgtttccacactggcggaccattaccgtaccgagttaacgcaaaacgaacaaagcagcctgccgttaatcgccttttatccggtcgaacgcagcgtgctggatattccactaaaaataagaaataaacaccattttcaacagatagatgggtatgacaacgcactcaatcaaggggtggatttccggcgttttttcgaatggtttcgtgagcgggaagatattgaaaacgaaaatgatggagtcgtactaacaaatctatttgaaagtgaccctgaaggtactctgaaggtttttgaagatatcgaaaatgccaactatcgcgtagataaattgaaagaatttgactttacagggctatcagaagaattaaaaaagctcactaacaccatgaaattcatgcaggatattcgggataaggccaaagatcctcaactcaacgcggtacgctcagccattaccgcttttatgccgggcttttctaatttaaaagtacgccgcaaaccccgcctgcatatgtccatcaataaagagggaaggccgcttaacgtgctgcaactgtcgcagggcgaaaaatcgctgatggcgttggtaggcgatattgcgcgtcgtctggcgattatgaatccgacgctggacaacccgctgcacgggcaaggcattgtgctgatcgatgaagtggatatgcacctgcatccgtcgtggcagcgcagcattatcgaacggctgactaccaccttccccaactgccagtttattctaaccacccactcgccgctggtgatcagtgattacaaggacgtgttggtgtattcactggataacggtgaattgaccgtggtgccatcccaatacggtcaggatgccaatagcgtgttgctggaggtgatggatacccatatccgtaacgcgcgaatcgcggaaaaatttggtgacctgctggacatgatccagcgccagcaattaacgccagccaaagcgttattggatgaactgaccgctgagttgcccgccaccaatctggaactgaccaaaacccgcctattactgcgcaaacaggagttacgcggtgagaaaaatcactaa

SEQ ID NO: 87571 - DNA, 633 bp, Dickeya solani D s0432-1
gtgagaaaaatcactaaaggtacggaacctgccagcctgacagcctggaaacgcgccaatcccacaggccggtacgacgatttgacagaaaccgagcggcaggacatccgtgatgcctgcgccaaagagcagttttacctgtgtgcctactgctgcaaacctatcagcggtgataacagcgacaccatgaacgagcacgtgcaggcacgaaaactggcgcctcaccgtagcctcgatttcaccaatattgtcgccagttgcaccacgccaaaccagtgcgatgccgcccacggttcacaaccgttttcgcttaccccgctgataacggcatgtgaaacggaattgcaatttatgattagcggacgcgtcagcggcacgacagcacgcgcgcaggatgccatccgggtgcttaaccttggcgacaatgaaacccataacaaaaagctgattgagatacgtaaacagtttctcgatagcctgttatggactaacggtatcgatcctgacgaagggttggaagacgacgatctgctaacagccgtcattaacgatttcagttccccgcaaaacggcaggctggcgccttacgcaccggtgctggtcaacatcctgagaggatggctgtcggcataa

SEQ ID NO: 87572 - DNA, 1380 bp, Enterobacter sp. MGH 14
atggaagtcaaaaatttaactttacataatattggacgattcaagcaccttgaaattcctttggcgccactgggttatttggatagtaatgttaccgtttttgtagggaacaacggttcaggcaaaacctcaattctcaaagcattagcaacgtctctaagctggcttgtttcacgtattcaatctgagacaggtaaaggtagtcccattccagagctggtcataaagaataagacgtcttcagccgccattgatataaatattttcaatcatgtacgtggtaatcctgaagacggtgatttggaagggttagatgataattactttccttggcgaatagcgaaagcccgcaaagggcgtaaaggagaacacaaaagtgatttttggggagctacagcgttagcagatcactatcgaaaaaaattgtctaatgatgagaaatcctctcttcctctaattgcgttttactctgttgagcgggtcgtgatcgatatcccgttaaaaattagggggaaacatgaatttttccaacttaatggttatgagaattctttaactcaaggtgtcgattttagacgcttctttgaatggttcagggaacgcgaagatactgaaaatgagtcgggacttactgatgatgtgttagagcaattaagaaccgttctgggtgacgacaatgaaacatggtcaaagttagataaacttcgagcatcaagccgtgatagacagcttactgctgtccgttccgctatttataagttcatgcctgaattttctaatttacgggttcgaagaaaacctcggctgcatatgtcgatagataaaaatggggaaccattcgatgtcgcacagctttcacaaggtgaaaagtctctgatggctctgatcggtgatattgccagacgtttatccgtgatgaatcccgaattaaaaaatccacttgaaggtgatggcatcgttgtcatcgatgaagttgacatgcatttacatccgaaatggcaacgttcgttgattaagcaacttactacaacttttcccaaatgtcagtttgtgctttctactcattccccgttagtgattagtgactgtaaaaatgttctggcatacctgatcggtgacgaggaacttatccaactgccttcgctatatggtcaagatgctaatactgtattgctagaaattatggatacagatatccgaaatgcggaaattaatgaatcactgagtatggctttagatgcaatccatgattctaatctttctcaagccaaagagataatacagcagcttgaggaagaacttccaagtggtaatttggaattatcaaaagcaaaacttttacttcgcaaaaaggagttaaaagatgcgcaaaataactaa

SEQ ID NO: 87573 - DNA, 636 bp, Enterobacter sp. MGH 14
atgcgcaaaataactaagggtattcatcctgagccagcaagtttgaccgattttaagcgtactaaccgtactgctacttacgatgatttgaataaaatagaacgcactgatattcgtgcaagatgtttggaagaacaacactttctctgtgcttattgttgtaaagaaatttcaggtgaaaatcatgattgcatgaatgaacatgtagaagcacgaagaatagctcctgctcgcagtcttgattttaccaatattgtttctagctgtacgacgccaggacaatgtgatgcctcgcatggctcacaaccattgccattaactccttttatgtctgagtgtgaaacagaactggaatttacgttaagtggcaaagttcgaggacttacagatcgagcaaaggaaaccatcagggtgctaaatcttggtgatgaacttcaaagtaatcgctctttaatcgaacaaagaaagcagtttattcaatcaataatgttctctaatggtatagaaccagaggatggacttgatgacgatgagcttttagaaatggtaatcaatgatatatcaacgcctaaaaatgggaagcttgaagcatttgcacctgttgttgtaaatgtactaaagcaatgggtggcttaa

SEQ ID NO: 87574 - DNA, 1359 bp, Escherichia coli BIDMC 19C
atgatgaatatccgcacgcttaagctcactaatctggggcggtttgaagaacttgacgttcatctggctccagtggaggagttcaagagcaatgtgaccgtttttattggtaataatggtgcaggtaaaacatcaatattaaaatcgttggcaaccagcctgagttggttcgttgcccgagttcgtactgaaaagggtaacggtagccctattcctgaagacgctattctgaacggtaggagttcggcgacaattgaacttcaggtactgaatacgcatccagcgacggaggccgctacgccctaccgttggttgcttgccagaacggccagtgggaaaaaatcgaccaccgcctccagcctgcaagaggccagccaattggctgcgttttatcgagatcaatacacccagaatagcggggcatccttcccgcttatcgccttctatcccgtagaacgtgtcgtgctggatgtgccgttgaaaataaaagaacgtcataattttttgcaactggatggctacgataacgccctgaatcagggtattgatttccgccgtttctttgagtggtttcgcaatcgcgaagatgcagaaaatgaatcgggcttaccccaagacgttctggataagctcagtaccaggatagatctcgataacgccgtcttaaatgcattaacggcaatcatggcctcgtcccgggatcgccagttgaccgccgtcagaacggccattagtcgctttatgccagggttcagcaacttacgcgtcaggcgtaaacctcgcctgcatatgtcgatagataaaaatggccagacactgaatgtgctgcaattatcgcagggtgaaaaatcactgatggcgttagtcggcgatattgctcgccgcctggcaatgatgaacccgatgttagaaaacccgctaaacggcgagggaattgtattaattgatgaagtggacatgcacctgcatccaacatggcagcgtacaatcatccagcgtctgacgacaacattcccacattgccagtttgtcttaacaacccactctcctttagtgatcagtgattgcaaagatgtgctggtttattctctggatgatggcgaattaacgcagctcccgtctctgtatgggcaagatgcgaatactgtgcttttgaatgtgatggatacggatattcgcaatgcgacagtggcagaaaaacttaacgatcttctggatctgattcagaaaaacgactttatcaacgctaacgctcttctgaatacgctaagcctggaacttcctgaaaaccatcttgaactggtgaaagccagaatgcttctgcgcaaacaggaaattaaacatgcgcgaaataactaa

SEQ ID NO: 87575 - DNA, 660 bp, Escherichia coli BIDMC 19C
atgcgcgaaataactaaagggcaaccgccggccagtttgcaacagtgggtgagagcaaaaccacgggataaaaatgccaatcagtggtttcaggaactttatgcgcaaaaaaaatgggatatcgttggcgatctcagccagcagtgcgctcaggagcaattttatctctgtgcttattgctgcgatcgcgtgacaggtacaaaccgcgataccgttaatgaacatgtcgaagccagggatttagctcctgctcgcagtctggaattcacgaatatcgttgcaagctgcaaaacaaaaggccagtgtgacgactcgcataagaaccagccattgctgttaacgccgcttatgccggaatgtgaaaccgagtttatcttcaagatcagtggtcgaattgaagggacgacgccgagagctatcgatgcaattaaggtactcaaccttggcgatagtgaacgtaataatcgggcattgattgaaaaacgtaagcagctttccgacagccttctgtgggctaatggcattgccccttcagaggggcttgaggatgacgacctgctgcaagcggttatcgacgaattactcacccccgtcgacggttatctggcacctttcgctcccgtggtggcgaatattctaaaaaactggatgaccgcatga

SEQ ID NO: 87576 - DNA, 1281 bp, Marinobacter sp. ES-1
atgcatatcaacaaactaaccttgcagcgctttcgtggcgctcaagatctaccgctggatctggatgacaagcttaatgtgtttgtcggcatgaatggcacgggtaaatccagcattctggatgcctcggccatcatgctgtcctggctggcgaatcggattaagcatgcgggtgcgtctgggcgtccgattgccgaatccgatatcaggaatggtgaatcctccgccaatctggccattcagctatgtgatgagggtacttccttcggctggaacttggcgaaggtgcgtaaggggtacagcaaaaaggacctggcctctgttctgatttctgcatccgaaacggccaagggtattcaggccggcatcaccgaacacaacgggaaggtaaacatccccttgtttgcttactacccggtgaatcgcgctgtgttggatattccactgcgtatccgggaaaagcatcagttcgggcttctttctgcttacgaggagtcgctaaccagtggcgccaacttccgtactttctttgaatggttccgggagcgtgaagaccttgagaacgagaaccgcaaatacatagatgatctgatcaagccggacgatttcgagttcccggattcgcagctaacggcggtgcggcgggcccttgagattttcatgccggacttccaaaacctgaccgtaaggcgccaaccgctgcggatggaggtaacgaagaaaggccagcggctgacggtaaaccagctttccgatggcgaaaaatgcttgatggccatggttggcgaccttgccaggcgcatggccatagccaacccggagcgagaagatccgctgctgggagatggcattgtgatgatcgatgaaattgatctgcacctgcatccgaaatggcagcgcctggtggtgcccagtttgagggcggttttcccgaactgtcagttttttatctccactcattcaccgcatgtaattacccatgtgaaaccggagaatctgttccttatgaacatgacagatgccggggaattggagattgttcgcccgaatgagtcctacgggaagacggtggacagggtacttgaagatctgatgggccttgagaccacacgccctgaccaagtggaagatgctcttcgagctatttacgggcaaatcaatgatggcgagcttgatactgccagaaaaggcattgctgaattggaacgagacattggcgaagatccggaactggtaaaagccaaggtgctgatcaaacgcaaggagctgattggccgatga

SEQ ID NO: 87577 - DNA, 642 bp, Marinobacter sp. ES-1
atgaagtatgtggagaagcgccacgaacctgaagtttttacgcaatggaaggctctggccaatgtcaatgaagactggcagcctacctatggcgacctgaggggtgagcccaaagcctcggtaaagagatcattgatgcgggagcagggttacatctgctgctattgtgaacgccggttaaccgagggcgattcccacatagaacactttcagcctcagagtgacccgactgtggatccgctggattacggcaatcttttgtgctcctgccagaatcagatcagaaagggtgagccccgtcactgcggtaacctgaaaggcgactggtttgaccccgagctgttgatatctccgctggatgcgaattgtgagccccggtttggttttgaaggtgatggttggattaaacctgctgacaataacgaccgggcggcctgtgaaaccattacccgactgggcctcgacctgcccaagttgaatgagttgagagctggagcaattgagcctttcctggatgatagcttgagccatgatgagctgggtcagttcgtgtcgggctacttaaccatgggagcagacggccgtttcggtgagttctggaccaccatcaaatacctgtttggggactatgccgccgcatga

SEQ ID NO: 87578 - DNA, 1281 bp, Marinobacter sp. EN3
atgcatatcaacaaactaaccttgcagcgctttcgtggcgctcaagatctaccgctggatctggatgacaagcttaatgtgtttgtcggcatgaatggcacgggtaaatccagcattctggatgcctcggccatcatgctgtcctggctggcgaatcggattaagcatgcgggtgcgtctgggcgtccgattgccgaatccgatatcaggaatggtgaatcctccgccaatctggccattcagctatgtgatgagggtacttccttcggctggaacttggcgaaggtgcgtaaggggtacagcaaaaaggacctggcctctgttctgatttctgcatccgaaacggccaagggtattcaggccggcatcaccgaacacaacgggaaggtaaacatccccttgtttgcttactacccggtgaatcgcgctgtgttggatattccactgcgtatccgagaaaagcatcagttcgggcttctttctgcttacgaggagtcgctaaccagtggcgccaacttccgtactttctttgaatggttccgggagcgtgaagaccttgagaacgagaaccgcaaatacatagatgatctgatcaagccggacgatttcgagttcccggattcgcagctaacggcggtgcggcgggcccttgagattttcatgccggacttccaaaacctgaccgtaaggcgccaaccgctgcggatggaggtaacgaagaaaggccagcggctgacggtaaaccagctttccgatggcgaaaaatgcttgatggccatggttggcgaccttgccaggcgcatggccatagccaacccggagcgagaagatccgctgctgggagatggcattgtgatgatcgatgaaattgatctgcacctgcatccgaaatggcagcgcctggtggtgcccagtttgagggcggttttcccgaactgtcagttttttatctccactcattcaccgcatgtaattacccatgtgaaaccggagaatctgttccttatgaacatgacagatgccggggaattggagattgttcgcccgaatgagtcctacgggaagacggtggacagggtacttgaagatctgatgggccttgagaccacacgccctgaccaagtggaagatgctcttcgagctatttacgggcaaatcaatgatggcgagcttgatactgccagaaaaggcattgctgaattggaacgagacattggcgaagatccggaactggtaaaagccaaggtgctgatcaaacgcaaggagctgattggccgatga

SEQ ID NO: 87579 - DNA, 642 bp, Marinobacter sp. EN3; identical to SEQ ID NO: 87577

SEQ ID NO: 87580 - DNA, 1281 bp, Marinobacter sp. C1S70; identical to SEQ ID NO: 87578

SEQ ID NO: 87581 - DNA, 642 bp, Marinobacter sp. C1S70; identical to SEQ ID NO: 87577

SEQ ID NO: 87582 - DNA, 1281 bp, Marinobacter sp. EVN1
atgcatatcagcaaactaaccttgcagcgctttcgtggcgctcaagatctaccgctggatctggacgacaagctcaatgtgtttgtcggtatgaatggcgcgggcaaatccagcattctggatgcttcggccatcatgctgtcctggctggcgaaccggattaagcatgcgggtgcatctgggcgtccgattgcagaatccgatatcagaaatggtgaatcttctgccaatctggccattcagctatgtgatgagggtacttacttcggctggaacttggcgaaggtgcgtaaggggtacagcaaaaaggacctggcctctgttctgatttctgcatccgaaacggccaagggtattcaagcgggcatcaccgagcacaatgggaaggtaaacatccccttgtttgcttactacccggtgaatcgcgctgtgttggatattccactgcgtatccgggaaaagcatcagtttgggcttctttctgcttatgaggagtcgctaaccagtggggccaacttccgtactttctttgaatggttccgggagcgtgaagatcttgagaacgagaaccgcaagtacaaagacgatttgattaagccggacgatttccagttcccggatcctcagctaacggcggttcggcgggcccttgagattttcatgccggatttccaaaacctgaccgtaaggcggcaaccgctgcggatggaggtaacgaagaaaggccagcggctgacggtaaaccagctttctgatggcgaaaagtgtttgatggcgatggttggtgaccttgccaggcgcatggccatagccaacccggagcgagaagatccgctgctgggagatggcattgtgatgatcgatgaaattgatctgcacctgcatccgaaatggcagcgcctggtggtgcccagtttgagggcggttttcccgaactgtcagttttttatctccactcattcaccgcatgtaattacccatgtgaaaccggagaatctgttccttatgaacatgacagatgccggggaattggagattgttcgcccgaatgagtcctacgggaagacggtggacagggtacttgaagatctgatgggccttgagaccacacgccctgaccaagtggaagatgctcttcgagctatttacgggcaaatcaatgatggcgagcttgatactgccagaaaaggcattgctgaattggaacgagacattggcgaagatccggaactggtaaaagccaaggtgctgatcaaacgcaaggagctgattggccgatga

SEQ ID NO: 87583 - DNA, 642 bp, Marinobacter sp. EVN1; identical to SEQ ID NO: 87577

SEQ ID NO: 87584 - DNA, 1296 bp, Candidatus Symbiobacter mobilis CR
atgtacattgacaaaatcacattgaaaaatatccggggctttgagcatttggagttcgatctttgtcgcggagattcccaatatgcaggatggactgtttttaccggcgacaacggcgccgggaaaagcacactcctcaaagccattgcggtcgcactcactggccgtgatgttgctcgctcgttacaacccagctttcatcgatggatacgggaaggtgctgaaaaccaggaatcaaagatcgaattgatgatcctgcccgagatcaaagcggacgaattctccgagaaaaggaaaactgcatacaaaaaatttccggccacagttgtactgcaatccaccggaaaagatacatccattgaattatcaagtgacctgggacgcaaggcttcgctcgcgcagagagggctttggtcggcgaattcacgcggttggttttcttgcggttatgggcctttccgtcgggtatttggcgcgtcaccagaagccacgcgcttgatggttagcccgacaacggagcgctttgtcaccatgttccaggaagccgcatcactttttgaagtggatcagtggttacgcaacctgagccacaaaaagctggaaggaaaagtcgcggaaagtgagcacttgaccttgctgctggaaatactccgcgacgatctgatgcccaaccagatcaccgttgaccgggtagattcggatggactttggctcaaggatcgcaacgggctgcaactggcttggagcgacatgagcgacggctatcgcgccgcccttgctctgctctccgacatccttcgccacctcatcaacgcctatggtctcgacggtctcgcccagcggggcgaagatggcaagcttcgaatcgttcgcagcggagtggtcatgatcgatgaaatcgatgcccatttgcatcctgagtggcaacgcgaaattggcttctggctcaaggagcatttcccgaacattcagtttcttgtcacgacccacagccccatcatctgccaagcagccgacgagaatggtttgttcgtcttgcccgaacccggaagcatggctacgccgtgcgcactgagcactgacgagtacaaaaaagtcattgcatcgcgaccggacaccattttgctcactgccgcttttggcatgcaaaacacccgatcaccacgcgctgtggcgggccgggcggagtacgccaaactcatggcaaagcaacgggctggcggcaagctgaccaaggaagagcaaggcaaagtccatcagcttcaattgtttgcagcgaccggcgaggagatatga

SEQ ID NO: 87585 - DNA, 735 bp, Candidatus Symbiobacter mobilis CR
atgcggcgactccaacgtgcggacttgcccaagccgatatggacctatctcgaaaagcggcaatcgtcggccaaccaaaagtacagcctgggaacgctggacatcgagaaagaatggaaatcagcacgccagacccaatgtctgaaagcagtcctcgctactttgcagcaaatgatgggtacacgggaaagatgcatgtattgcgttgattcgcacggatcggatattgaacatttccgccccaagatgccttatccgcaacatgctttccagtggcctaacctgctgctttgttgcaccgagtgcggccgactcacagggagtcaatttccgatgcatcaggggcagcctctgttgatcgacccttgcgccgaagacccgtggcagtatctggactttgacccggataccggcaatctgaccgctcgctttgacccacaacaaaacgaatggtcgaccaaaggcagcaagacggtcgaggtgctgatgctcgatcagcgggaggctgtggcggccgggtatcagaccagtttccagcgcttgtccgccattgttcgggcagccttggcaaacggcgttagcgacgcaccagctctctttgatgaattgactcaggccgatgatcatggccttcttggctggtgctttggtacgacaggtcaaaccattgcgccattttccgacctctttcagagacacctggaagcatggaacttctgtcggcaatcactctag

SEQ ID NO: 87586 - DNA, 1362 bp, Candidatus Symbiobacter mobilis CR
atgaaaatcaaggaactatatctacaaaatttccgctcgttttcggtagctcatatcaaatttgaccctttcctgacggttatcgttggagaaaacggcatcggcaaaacttccattctggatgcaatcgccatagcctttggccggttgctgaccaaattaccaaaaatcaagggtgtgtcattcaaggatactgatctacgaatgttggaaaatgaaaagcgttcaccattcgttcattactggatacatgtaaacggcttttccggtgaatatattcaatggtcgaatggaaaaaaacgggattcttcggacaagacaatcaaggaaattatttcgtcaattcttgatcttgaaagattcaatgcgggctacaaacaaatcgacaaatttgcggacagcctcattgataaacataatggcaatgaaggttattccatgcctgttattgcgtattatggaacaaatcgcgctatccttgatgaggtgcagcgcagaagaaattttcgcaaggaatattcgcggtttgaaagcctggtatcggcgctcaatcctaacgcagggttcaaggaggtttttgaatggtttaacgccatggaggatatggagcgtcgtaaacagatggaatataagaactttggttatacattgcccgagctgaatgcggtccggaaggccatcgaatccatgctgccaggattcagtcgccctcgaacggaaattcgccctctcaggttcgtcatagacagaacacttgatgacggaagcaagctcacactccgaattggccagttgagtgatggctaccgcgtcatgttgggtttggttatggacttggcaagacgattagcacaggccaatccaccttatgagtacgacacaggagtaggcagagatagtactgacccactggattcacctgccatcgtactgatagatgaagtggatttgcacctacatccgaaatggcagcagcgggtactaggcgatctgcgacgcacattcaggaatacgcaattcatcgttaccacccacagtccccaggtactaaccacaatcccttccgaatgcattcggatactgaaagacaaccagatttattccgcaccgcccggaacggaaggagcggaaccagagcgcatgctcaagcaggtgctgggtgtacatgaagtgcgcccccccgccaatccagcgactcaggagctgaaggaatatctcgccttggtcgacaaagaccaatggaattctccgcacgccctggaattgcgtgaaaagctaaatgcccgttaccaaggcaacgagccagcattgttggaagctgatttacgtatcgaaaaccgcaagtgggagctgggaatatga

SEQ ID NO: 87587 - DNA, 813 bp, Candidatus Symbiobacter mobilis CR
atgaaacgggtgcgcagacagccagagcctatccagctcaccaactatcgtcatgccaacccattctgcacttggcaacaaatgcgggacgatgcaatgcacgatggtccggctgcctacgaagaaagccggaaaaaactgatcgcaggccaaggtggaatttgtgcattctgtgaaatcgatatctgtgataacgatccgctgcaatgcagggtggagcacttccatcccaagtctgatattactcaggcgcacaactgggccttggactggaataacttattggccgtttgcgcgggcggctcttacaggtttgcgtctgcgccctatgtccatgagccattggctgaaaacctaagctgcgacacccacaagaaccgaatgatccaggtagggaggctgcaagaacaatgcgaaggatggattcttgaccctgctgcaatcccagcattccccagtcttttccgtctggaaatgagtactggacgacttctgcccgaccccgaccactgtgctgtcctgcccatctggcctggtaatcgtcatgctgacgtgccaaccctggtacaacacacgatagatatgctcaatctcaactgtgaccgactttgcaatgcaaggctgaccatcatcagagatatcgagcgcaacaagaaaaagcaacgtatggcaggatttgctgcgcaccagggcttgggcaacttggccgcccattacctgcgccaacgctggccgggattcttttccactatccgtttgtgcctcggtacagccgccgaaacgtatttggcaaaccttggctatcagggctga

SEQ ID NO: 87588 - DNA, 1752 bp, Pseudomonas aeruginosa str. Stone 130; identical to SEQ ID NO: 87136

SEQ ID NO: 87589 - DNA, 879 bp, Pseudomonas aeruginosa str. Stone 130; identical to SEQ ID NO: 87137

SEQ ID NO: 87590 - DNA, 1000 bp, Cetobacterium somerae ATCC BAA-474
tgtatttgaaaaagaagaggaagaaataaacgagcttatttataataatttatttaattcattgaaattatatgaaaataatagattacataatccagaagattctaattttaaagttttaaataattctttaaagattttacctaaaattatatatattccaacagaaattaattttcaaagtattcaaacacaaactaacatgttagaacgacactataattttttaaatattgtagatacaggcctaatctcgaatatagcttcatatatagccacaagagttacttatattagcaatacagaggaagatttaactggaaaagaggttagagaaaaggtagctaaagagattaatgatatcttttcaattttagatttagatataaagttacagggactttctagggatgaaagaagtatgcctattttttcaaattctacaggtgaagagttcgatataaacgagttatcatctggtgaaaagcaactttttgtaagaactttagcgataaaaatgttagaacctgaaaactctattattttaatcgatgaaccagagctatccttacacccaaaatggcagcaaaaaattctcgaagtgtataaaaaaataggaaaaaataaccagattattgtagcaactcactctcctcatatattaggaagtgttcctaaagaaaaccttataattctaactagagatgagaacggagagataaaagctttaaaagatgaagaactttatagctctttaggtcaacctgtagatagaattttagaggatattatgggccttgaaacaacaagaaatccaaatatttttaggtctttaaaaaaattaagagaactagttgataataaccagtataattctgaggaatttaaaagtttaatgaaagaaatgactgctactctaggaggaacagatcaagatttaatgctgattaaaatggatattaacattaaaaaaaagcaaaatgagcaaaggggggaataa

SEQ ID NO: 87591 - DNA, 588 bp, Cetobacterium somerae ATCC BAA-474
ttgttcaaagttaataaaacccctgagccaaaattttttcaagagtttaaaaagaaacattccctttctaactggaatcaatacgattcttatcgttatataaagcaacaacttagagaatactctctttttgaagaacaagagttatgctgtccatattgtgaaattgaaatagatgtagatacaagtgagacagaacatattaagccaaaagatatatttcctaatgaatttcaagattttaataatcttatagttgcttgtaaaagttctaaaaggtgtggaaatagtaaaggaagtcaatggagttccgattttataaatccagttctagaaaatccacaagattttttaacatatgatattaaaacaggagaggtaagacctaaaaattctataggaactgattatgaaaaagctaaggtaacaattgatatactaaacctaaatgataaaagattagctgaggctaggaaaaatttcatattaggaaataaatactctattgattatttagaacctgaaggtgagtttagaactctaaaagagttcatgattgacaataaggatagtattacatctgtttaa

SEQ ID NO: 87592 - DNA, 1233 bp, Fusobacterium nucleatum CTI-6
atgaaaattgaaaaagtccatataaagaatgtaaaagggataaaagatttagaactttcatttaaaaaagatgataaaattttagatgtaattgtcttagctggagtaaatggaagtggtaagacaactattttagaagctataaaagatttttttgataatagatatcttaacagtaatattcaaattgttgatttaggtatatttttaaatgttttagaaaagaaatttattgaagaattcaaaatctttcttaataataattctaaaaataaattttcaaatttttttcatacattattagtgttacctcctgatattgaacttgatactaattatagagctcaaacagagaaatatataaaagagcttcctaaaataatctatgttccagctgaaaataattttgaaaaggtaaaaacagaaactacaactttatcaaaagaatatgaatttataaatactataaattctaatgtaataggagatattccatcatatatagcaactagaagaaattatcttgctactattgaagaaaatttaactatgaaagaagttactaataaagtagtcaatgaaataaatagtatttttaatattttagaactagatgcaaaattaaaaggcttttcaaaagatgaaaaaactttacctatttttgaaaattctgctggtgaagaatttgatataaatgatttatcttctggagaaaaacaactatttttaagaactttatctataaaaatgttagagcctaataattctataattttaattgacgagcctgaactatcattgcatccaaaatggcaacaaagaataatagaagtatataagaagattggagaaaataatcaaataatagttgcaactcattctccacatatattaggaagtgtttctaatgaaaatatttttattttgtatagaaatgaaaatggaaaaatagaaactaaaacaggagatgaacttgattcttcttatgggcaacctgttgagagggttcttaaagatataatgggattggaatcagttagaactccaaaaatagacagagatatacaagaactaagaaagcttgtagataaagataaatataatactgatgatttcaaagaaaaatataataatcttcttgaaatactgggaagtaccgacgaagatttatttcttattgatatggatgtaaaattaaaacaaaaggtgaattctaatgttgaaagtaaataa

SEQ ID NO: 87593 - DNA, 585 bp, Fusobacterium nucleatum CTI-6
atgttgaaagtaaataagagaagtgaaccagaagaatttacaaaatacaagaaaaaaaataaagtggtaaattggaaagatttcacatcagaaagtgagataaaaaagcttttaaaagaagcattattagaagaacaagaaaatagttgttgtccttattgtgaaacagaaattaatttaaatgacagtcaaatagagcatattaaaccaaaggataaatttcctgaacttttgatagattatgacaatttaattgcttgttgtcttgaaagtaaaagatgtggtaattcaaaagcaaataaatgggatgagcttttcattaatcctgtcacagaaaatccagaagattattttaaatatgacataaaaactggaaaaataatttcaatatttaaaaatagagaaaaatatgaaaaggctgagtatacaataaatttattaaatcttaatgacaatagattatgtgaaattagaaaaagatatatatttgaatttttaagttatagtaataataacaaaaatagtttaagtaactttccagtaaaattcccatctttaagaagatatttagaaggtagactttaa

SEQ ID NO: 87594 - DNA, 1752 bp, Pseudomonas aeruginosa BL23; identical to SEQ ID NO: 87136

SEQ ID NO: 87595 - DNA, 879 bp, Pseudomonas aeruginosa BL23; identical to SEQ ID NO: 87137

SEQ ID NO: 87596 - DNA, 1344 bp, Pseudomonas aeruginosa BL20
atgacagtgattgccggtgtcaatggtgtgggtaagtcaacgatactgcaggcaatagcaatcgcctactcccatgccctaccggaatttacggtatctagggagaagccgctgccaatactcaactcggacatccagcaaggtaagtcatcctgcattatagaaatatggagtgacggcttggaggcagcgtcgctgaacatgtttctttccaaggaggatcttggtcggaatgaaaagctttctcttgagcgcaagcaatccttgatgaagcaggagctttctctcttagaaaaggggactccggattacaagaacttgaaaaatgacatttcctgggtagataagcgcctagagggagattttgaaaggcgcttgaactggttgtttaccgatacctatgaaaccgaagcgcggttgagacggtatctgaagagcagtccaacacaggcactggtggtttattactccacgcaccgtttgctttctagacttccgccaaaacttaagggtgaatttccatttaagcagtctgccgctttctcaaaatctctgacacaactagaagtgtctctcaatgagtttgcgaagtggcatcgcgcaatcaactcattccgggttgtcagaaaagacggtgaatatgcttcgcgagtcttaagtcttcttcaaaaggctattgctggactaataccccagatcaaggggttttggtttcatgagataaacccaccgcgctacacggtcgtgaaagatgcaacttttgatgagcagataaatgacaagaagtttgagaaagagttttttttggagcagctatctgatggtgagagagggctgattgctttggtgttcgatctcacacgtcgtctagcgatcgccaatccggatagcgaaaatccaatcgcagaaggtgaggcgttggttttgattgatgagattgaactacaccttcatcccaaatggcaaagagagatacttccacgactgcgcgatacctttaaaagttgccagtttgtggttaccacccactcgccacaggtcattggtgaagttgaggcgaaatgtgtcaggcttctaaccatgagagagggtaaggtggcatccgaaactccaagtatggcctatggagcggactcaaactggattttgagtgttctgatgggggctgatgaaatgaatgaggatgttgaaaggaatatcgaagaaatcgccaggctgactgctgagcgaaatcttgaatctgcaaaagaaaagttgagcacgcttcgggagcgcgttggtaattcggcagcagttcagaagatttcctccacgattgaaagggtggagaggctcggaagatga

SEQ ID NO: 87597 - DNA, 708 bp, Pseudomonas aeruginosa BL20
atgagggctgtagaaaaaagacaatcaccagagtgtttgcggggtttcattgatgggcagcttgccattgagcctgagccagttaacgtaacttacaaaaactttcgagagaaagctaagctgcttaatgagttgacattggagcagtatggcttgtgtggctatacaggggcgccagtagatggcgatcgaatttcgaagctggccagtgcatcaggcgatgttgtatttaaaaatcacatcgaacacttgaagtgtcaagatttatgtaagcaggaactgatcgactcgggaggagtagttggtagggatcttggtgatgacttgaattacttcaacatgatcgccgcgctagggatgagtggttctgaggctgagcactttggcgcggaaataaaaaaaaatatgcccttgccagttctacctacgcaagcagactgcgccgaccacttcggatttcaggaattggatggtggagtcactggccttactgtggccggtgaagaaagtattaaagtcctcaggttggatcacaaaacgctagatggatggaggatgtctgcgattgaggcctggctcaatcctgaggtgattcaaacgcgtgaggattttgaggaagtcatccaggccgtagaaaatccagttgatggaaggctcccagagttctctttcgtgatccgtgcaatagccaggggatatcttgaatga

SEQ ID NO: 87598 - DNA, 1344 bp, Pseudomonas aeruginosa BL09; identical to SEQ ID NO: 87596

SEQ ID NO: 87599 - DNA, 708 bp, Pseudomonas aeruginosa BL09; identical to SEQ ID NO: 87597

SEQ ID NO: 87600 - DNA, 1182 bp, Salmonella enterica subsp. enterica serovar Muenster str. 660
atgaaaatacaaaaaattgatatcaaagatgttggtggtataaaaagagcaataattaattttgatgcgagcatgaatattatttgcggaccaaatgggataggaaaaaccacaattttagattccgtagcacatagttttattaatacaaacagctatgtccttaaaagacatgctcagtctactgatggtcagataaataccgtattaaatgattgtgacaatattagagaaagtcatatttctcttaaacagttcaatcctaaggattactcatatattagtggcttaagagagtcaggaaggaaagtgatttatttgaatatttctagaatgttcaaatatgtatctttatctaatatctctaaagatgaggagagacaagatcatagcatatacacacttttgactgacggaatttcggttgcggatatgaaaaattggttcgcaaaacgctgtctcttctttaatacaccagaagcattaagtgaaaataataaggttaatttggagttggcaaaaaaatgcttttcactgcttaatgctgaatataaattttctcgcgtagatgcgaaaaaatttgatgttttcgtatctactccaaatggagaaatttggtatgaatatttgtcatcaggatttaaatcatgtctgagtattttattcggcataataaaagagattgaactaagaatgcctgatgaggaatgtttagcacagcattttgatggcattgtattgattgatgagctggaaatgcatcttcatcctgaatggcagtccaaaattgtttctgttttgcgagacacatttcctgcaacacaatttatagttactactcatagtcctcacattatacaaaatgcggaacctaatcagataattgcattagggacagatagtaatggatatacatacgtcagagaacttccgagtaatgagtttggttatactggatggacattagatgaggtactcaaagatgtaatgggaatggaagacacaagaagtcagaaattacaaagtatgcttgctgcatttgatcaagctattgatgaggagaataaaattgaagcagagcgtatttataaagaattagatagggcacttcatccagcaaatgtgcttagaaaaatgcttagtattgatctttcctcagtaatcgaggagggtagtaaataa

SEQ ID NO: 87601 - DNA, 621 bp, Salmonella enterica subsp. enterica serovar Muenster str. 660
atggagttaagtgataaaaaatgtgcatactgtgaggttaagcttggtgaaaaaagcacatatcatgaggtggagcattttaaagataagaatgattaccctgatgatgtaatagagtggaataacctattaccttcatgtcgtcattgtaatggttctaaagggacacatgatgttgtccaagaaccaatagttaatccttttgaggaactcccggcagagtttttttatattaaaaatttcagaatgaaagggaggaatgagaaaggtattctgactatagatgttttaaatcttaacgatagagaacatttggttaagccaagatgtgaaacaggagctataattgcggaaaaaatagaggattctttaactttatttgagggatatctttcaaatccaataagcaaaaataaaagaaaattaatcggtactgttagagggatactgaaagaatgtcaaagaagtgccatattttctgcagtatcggctactgtattacatacgagcgaggattatctgactttacggggtaatatgatggcccataagttatgggatgaagatatggagaaccttcacataatgtcaagtaatatacaattaccaacaacagcttaa

SEQ ID NO: 87602 - DNA, 1398 bp, Salmonella enterica; identical to SEQ ID NO: 86590
  subsp. enterica serovar Senftenberg str. 423984-1

SEQ ID NO: 87603 - DNA, 597 bp, Salmonella enterica
  subsp. enterica serovar Senftenberg str. 423984-1
atgactctgcttctcaatgagcaatatcacctttgctgttacagcgaaatccgtgctgatttgcgtggcctcggctatcacattgaacacgtcgaaaataaaagccagcagccagcgcgaaccttcgattatcaaaatttcgcagccagcgcgttagactctgagaatggtttgccccagcttggcatcaacgcgttcggtggtcacgcacagggaaagaataaatctgtggatatggcaaagtttattcattgtcacctccctgactgttctcgttattttgcttacctttctgatggccgaatagtaccggctgatgagctaaatgcccaggaaatggagagggcagagtacaccattgatctactaaatctgaacagcggattccttcaaacggaacgtcgtaatcattgggaagagctggaacagctttttgaggaacatattgaaaaaggctgggatctgcaacaattacttcagcttgagctggtcccttcgccagatcataaactgcatgaattcttcagcattacacgccagtttttccagcaagaagctgaacaggtattacagatccacgccccagcattaatttaa

SEQ ID NO: 87604 - DNA, 1398 bp, Salmonella enterica; identical to SEQ ID NO: 86590
  subsp. enterica serovar Senftenberg str. 361154004

SEQ ID NO: 87605 - DNA, 597 bp, Salmonella enterica; identical to SEQ ID NO: 87603
  subsp. enterica serovar Senftenberg str. 361154004

SEQ ID NO: 87606 - DNA, 1635 bp, Salmonella enterica subsp. enterica serovar Agona str. 432613
atgataaataaaatgaatttagagacttgctatgttgattttttagagttggaatcacatgtgataaacgaggattatttgaaggagtctgttgagcttcaaaagctaatatctactttaaatgagagtaagtttcatttaaataaaataggtatacatgattttaaacggataagagaactacagatttctttagaagatgatttgactgtttttgtcggggataacggattcggtaaaagcactattttggatgcaatagcaattgttttgagttggttgagatcaaatattgaaaaggagagtaagcctggtacttatattaaaagccatgaagttaataactctgttgatgttgagtatgcatcaattgatgcaaatataaaactcaaggactttaataccagtattttgattactaaagcgaaagagggggcatattattctagaaataatgaattgttggaggtaaaaaaacttgcaagtatttatagacttgtgaataaatatgttgataatgcaagcttgcctttgatggcatattattctattgcgcgttcttatataggcggtggggttgataggaaaagaaaaaatgctaaaactaaaactgtatggtcaaaattcgatgtgtatgatgaaatcgagtttgacagaaatgattttaccgatttttttcaatggcttgtatttcttcataacagagcttcacaagagaaattgagtgagtcacaaacgacaatcaatgcgttattttcagatattcagagtttgaaagcaacattaactcaactatctgcgattgataatattgattcaacagttataaaaggtttagagctttcgcttaaagaaaaattgaactacatgaaatctctgcaatcaggagaacataagtttaataatgcagtatcactttatgatagtgttataaataccattctaaagttcttgcctgaatttcagtggattaagcttgtttatggtgatgatgattataagattatccttaaaaaaggagaggttgaattagatattcaacagttgtctcaaggtgagaaaactatatttactttagttggtgatttggctcgacgtttaattttacttaatccaaatttatctaatcctctattgggatatgggattgttttaattgatgaaattgatttgcatttgcatccgcaatggcaacagacaattattgagcgtttgacatctacattcccaaatgttcaatttgtaattactacccatagcccacaggttttatccactgttagctctcgttcagtgcgtattctacaggaagtggaagtggatggtgttaatgatttgatagtgtctcaccccgactatcaaataaaaggtgttagtaatcaggatgcacttttatatggaatgagaactgatcctataccctctactaaagaaaatggttggcttgaagaatataaaaaattggttgagcttaatcgttatagcagtgacgaggctcttttgttaagagaaaaagttgttaaacatttcggattagaccatcctttagttcaagagtgtgatgatcttatatctgttttggagttcaaaaataagataaatcagcacttttctggaagtaaggatataaaatga

SEQ ID NO: 87607 - DNA, 684 bp, Salmonella enterica subsp. enterica serovar Agona str. 432613
atgaaatatctatctagacaaatgccagggccttccgttcttaataaatttgactataggagggatgattggaattccctatcatcaaatgataaaaaagaaatatgggaagaaataataaaaatgcaaggtaaattatgtgcttattgcgagaaaaaaatagagcatcataaaagtggtggcaaaaataaagttgagcggcatattgagcatttttacaggaaaagttattataaaaatttaactttcgagtggtccaatttgtttggctcatgtggtgagccgcaaaggtgtgggttttataaggataagcaaaaatataacgatgatgatttaattaaagctgatagacaaaatccagatgtttttttccattttttggaaaatggtgatgttcatattagagaaggcttgaatgagaaagaacacaaaatggcagaggttacgttaagagtatttaacttaaacccgtcctcaggaggagtcaaggcggaaagaagacgtgcaatagaattaagtatgacattaataaaggaactggtcggatgtgcatctcagcttattgaatcaggatgtgaaattgaagatgttagatctatggtctttgatgagtttaaaaagaatgtaaaagatagatgctttaccactgcgataaagcatgtttttgagaatagaatgccttaa

SEQ ID NO: 87608 - DNA, 1635 bp, Salmonella enterica subsp. enterica serovar Agona str. 409753-6; identical to SEQ ID NO: 87606

SEQ ID NO: 87609 - DNA, 684 bp, Salmonella enterica subsp. enterica serovar Agona str. 409753-6; identical to SEQ ID NO: 87607

SEQ ID NO: 87610 - DNA, 915 bp, Salmonella enterica subsp. enterica serovar Agona str. 0292
ttgagtgagtcacaaacgacaatcaatgcgttattttcagatattcagagtttgaaagcaacattaactcaactatctgcgattgataatattgattcaacagttataaaaggtttagagctttcgcttaaagaaaaattgaactacatgaaatctctgcaatcaggagaacataagtttaataatgcagtatcactttatgatagtgttataaataccattctaaagttcttgcctgaatttcagtggattaagcttgtttatggtgatgatgattataagattatccttaaaaaaggagaggttgaattagatattcaacagttgtctcaaggtgagaaaactatatttactttagttggtgatttggctcgacgtttaattttacttaatccaaatttatctaatcctctattgggatatgggattgttttaattgatgaaattgatttgcatttgcatccgcaatggcaacagacaattattgagcgtttgacatctacattcccaaatgttcaatttgtaattactacccatagcccacaggttttatccactgttagctctcgttcagtgcgtattctacaggaagtggaagtggatggtgttaatgatttgatagtgtctcaccccgactatcaaataaaaggtgttagtaatcaggatgcacttttatatggaatgagaactgatcctataccctctactaaagaaaatggttggcttgaagaatataaaaaattggttgagcttaatcgttatagcagtgacgaggctcttttgttaagagaaaaagttgttaaacatttcggattagaccatcctttagttcaagagtgtgatgatcttatatctgttttggagttcaaaaataagataaatcagcacttttctggaagtaaggatataaaatga

SEQ ID NO: 87611 - DNA, 684 bp, Salmonella enterica subsp. enterica serovar Agona str. 0292; identical to SEQ ID NO: 87607

SEQ ID NO: 87612 - DNA, 1398 bp, Salmonella enterica; identical to SEQ ID NO: 86590
  subsp. enterica serovar Senftenberg str. NC_MB012510-0038

SEQ ID NO: 87613 - DNA, 597 bp, Salmonella enterica; identical to SEQ ID NO: 87603
  subsp. enterica serovar Senftenberg str. NC_MB012510-0038

SEQ ID NO: 87614 - DNA, 1323 bp, Gloeobacter kilaueensis JS1
atgctcaaatccttaaagacaaagggcatcggaccattttcagcactcgatattgagtttgctccccggctcaatatcgtgaccggcgataatggcctgggaaagagttttctgctcgatatcgcctggtggtgcctgacgcggaagtggcctgccgaggtcaatccgcagttaacgtccgggtacatggcacggcccgcttccatcgagagcgaaggttcaggcactccttcaacaaaatcgaccatttcctttgcatttactggaaaaagcaaagaagaaagttacacgagcacattcgagccgcttgagcaaagttggacaggtaaatcaggccgaccatcgaatcctggccttgttatctatgcgcaagttgacggcagctattccctttgggatcctgcccgcaactactggcgaaagagaggaaacatcgacatccaggagagacagccagcctatgtctttactgctcaagaagtctggaatggcctggaagatgactcgaacgtactatgcaatggtttgctgctcgattgggcattatggcaaaaggaaaaaggcgaagcatttgaactgttaaagaccgccttacttacattatctcctgattctgatgaggaaatacgaccaggagagctaacaagaatcagcctggacgatgtccgcgatattccaacaattcggatgccataccagcaggatgtacctgtactttttgcgtctgctgggatccgacgtatactcgcattagcctacttacttgtctgggcctggcaggaacatattcaggcaagcaaacttctgaaacaacaaaaaacaaatcaaattattttacttatcgacgaaatagagtctcacctgcatccgcgatggcagcggacaattatgggggctttactcaggacagtcaaacaattcgccagtgacgacaaagcaggtgttcaaatcattgctgcgactcactctccactgattcttgcatctttggaaccgctgtttgatccagcttttgatacctggtttgacattaacctgcaatcaaatgatcgcggttctcatgctcaacttgagcagatagcctggagacggcggggggatatctccagttggctaacgagcgaagcctttgacctgaagttgccgcgagcaaaagagatcgagcaagttgtggatcgagcatctgctgcccttcaaagtgagcaaacaaccagggagcagtttctgactatcgattcagagctgagaaactatcttagcgatacagaccctttctggattcgctggcggtacatcactgataagcgtggcctgctcaggtga

SEQ ID NO: 87615 - DNA, 528 bp, Gloeobacter kilaueensis JS1
atgaacgagcagggactggatctgagcaagccaaaaccgcagggtgtcacactcgaaccattctggcaagattgtcttgaagaacttcacagtgcctacgacggaatttgcgcctatgtctgtgtttatatcgagcgggtcacaggcactccttctgccgatcactttgttccaaaatctggtgatttgaacaaggcttacgaatggagtaactatcggcttgcctgccagaggatgaatgcaaggaaaaacaaatacgacgacgtgctcgatccttttagccttggttccaatacttttgaacttgagcttttttcgggccgaatctatccatctcgttcgctctcttcggcagatgtgcaagcagctcaagctacaatcctcaggcttaaactcgacgatcccgattgccgcgaactgcggacgcgctacttcaatgcgtacataaatgacgagatttcagtgaaatggctgcaaaaacattctcccttcgtctggcaggaagcgcagcggcaaaatcttctgtga

SEQ ID NO: 87616 - DNA, 1593 bp, Shewanella decolorationis S12
atgaagttagattacctgatcattcgctccggctttaaaaacatcagcaatttgaaaattgagtttgatgaaggccaattgctaaccgtcttggtgggccgaaatggttcgggtaaatccaatatcatcgaagcgctggtcagaattttccgtgcattagatttgggcgagcttgcaccttttagctatgagttagtttactcgcttggtgcggaaaaccgcatttgggtaaaagttgatgccgacccagcctacggcaacacaccgatatcgcagcatcaaatcgaagtcgcggaaaagcttggccaacatgacatgccgatttggaacaaagtatctctggccaaagtgcagcgtgataaagcaggtcaatccgcatatttaccgaaacatctttttgcttattactctggcccaagtgaccggcttgaaagcttgtttgtaaaacatcgcacggatttttattaccaattgcttaaagacaaagtaaaaatcgaagatgaagtcagaccactattttatgcgaaaccttatcatagtcagtttgtgttattagctttctttctcagtggacaaagtgatgaggggaggaagtttctcgcagcacaactcggtatcaagcagtttcactcggcacattttgtctttaggaaaccatcatgggaacgaagtaaaaccgatgctttttggggagcttatggtgttgttcgggagtttctgaatcgcttactaccacatacttttggtatggttagagcaactagagaagaaacaacctctttaaccgggaaaggcaaaaataatgattttgttcatgtgtatttacctgacttaactgcgttaaattcaaccgctaaaggtctcggtccaaaaaacttctttaagatgctggaaagcactctgctttcagagttgatttccagtgtacatattaaagttgtacttaataataatgagattgtgagcttcagtgagttaagcgaaggggagcagcagttgcttactgtgtttggcttaatgcaatttaccgctgaatctgattcattatttttacttgatgaaccggatacccatctaaacccggcatgggcggcaaaataccacgctttcttaaaccggtttattcccaataaaaaccactgccatatcgttatggtcacccatcatccgctagctattgctgaactgaataaagaacaaatccaagtgttgcatcgcgactcaattggattgtcatatgccgaacaaccagctgaaagcccgattggtatgggcgtcaacggcatcttaaccagcgacatgtttggtatggcgacaacgctggatcaacacactagtaaagtgattgaagaccggcggaaaattttagaaaaagatgagctgaatgaagatgataaggcaaaacttcgaaagctgaattcatcgttggaacgtttaggatatggatacactcaccccgatgaggattataggcagtttcttattgagcggaaaaaagccatgcatgccatggaattgaaatcgatcgacaccacggaaatacgcatgcagattgttcagcaaatacttaaagagcgggggtattctgtttga

SEQ ID NO: 87617 - DNA, 873 bp, Shewanella decolorationis S12
ttgagatttattgatcccgcattaattcctgcgtgcaaacctcacgattgggatgtcaaaagtgtgcagtggttagccagagttgctgctgctcaagacaaatccgacgaaatcaagaagcttaaaaatccctggaaaaagttcaaggtgaacttcgcaaatacctttggtgataagtgttggtatacagaagctgctcgcatcggaacaaccaatgatgttgatcattttcgtccgaaaaatgcagttaaagaccaatttggacgacatgttgcccgtacaaatgctgcaggtgttgtcgagtacgcaaattattggtggttggcttatgaaccactgaattatcgctattcatgcatatttagcaatagggccaatggagatggaggaaaacaagagtttttcccattagaagatgagacaactcgagcgtggaccccttcttgtccttacattagggaagatgtctcattcctagatccatgtaacagtaatgatgttcagttaattgctttcgatgtaacagtgggcatggctgagccacgatttagcgaacagcaagatccaaaagcgtttaggcgttttcaactaagcaagaaatactacaacctcaatgaaaagacaattgtcgacgcgcgaatggaagtgctcagcgagctagccaaagatctcaatcttttagagttaacttggagttttgatccagttattaaagcgtcaatgcagcctgcattagatgctgcgaaacagggaattgttaataaatgctcgcgcaaagctaaattctcggcggctgccgttgccctggttaaaactaaacaagcagagccttggcttgccgatgttttacctttactagatctttccccttaa

SEQ ID NO: 87618 - DNA, 579 bp, Shewanella decolorationis S12
atgtataatccgaccctgcatttaaaccctgcgtggagtatggagtacatcaacttcttaaaagaggttgcgggcttcaacttggatgttaccaaggagaagttagattcaggggcagtggacaacagccatattgttttggcgacacatgatccaatcgtcatttcaactctaaagcaagaacaaatcaaaatcatgaagcgtgatgaagatagcttgcgagtttttgctgcgtcaccactctatgagcccaaaggaatgggcttttccgggattctgatgagtgacatgtttggtttacgctctgatttggatcaaaaaacgttagaaaaactagatgaacatgcaatccttttggctaaaaaggatcgcaccgctagagaagaaactcgctataaagaacttcaaggtcagttagataactcgggttttcttgatgcttattcggatccttatttttcagcatttgttaaggcatggattcgaaagcatggagagaatttgtttaagcagccgtttctgactgatatgactgatgaaattcttgccgaacttgatgctgaggaggctagagagtaa

SEQ ID NO: 87619 - DNA, 804 bp, Shewanella decolorationis S12
atgcgttatatcgacatcgatgatctggagctcgatcttcctgatgggtgggacgatacagtcaggcaagcttgggaatatgtaaatagcaaaattgatgctgcagaagctgccactaacgcgaaagctgatgaaaatgagtgggatgcgcagttaagagtagagcaagttgagattgaaaaagctaaagctcgtaagaaggcaatttctgctaaaaacgacgtatggggccagttgagtactgtattagctaatctttcacatggaaaatgctggtactgtgagagtaatgagcttaggtctgacaatccaattgatcattatcggcccaaaggtaaagtcgcagagtgtccagatcatcctggttactggtggcttgcgtttgaatggtcaaactatcgatatgcatgcacctactgtaattctagacgtgttgacgtgacgacggctggcggtaagcaggaccactttcctgtgtttaccccacccgactggaacaaatgtaaagaagacaataatgcagagaagcccaaacttcttgatccgaccgatgctgacgactacaaacttttaacattcaaccagaatggtgaagcttgtcccaatacggatgatgatgaatctgaagcatatcaaaaagctaaagagtcgatagacaagtatcacctaaatcatgagccaacacgaaaagctagaaaagcaattaggcaaaaaattagacaaattgttgccgacactaatgaactgttggtacagggtcttgctattacgtctaatcaaataaaaaagagttacttaagttaa

SEQ ID NO: 87620 - DNA, 1398 bp, Salmonella enterica
  subsp. salamae serovar 58:l,z13,z28:z6 str. 00-0163
atgagaatcgacaaactttcactgcttaactttcgttgcttcaaacagctcgatattacctttgatgagcacattacgattctggtggcaccgaatggcgcgggcaagacgacagtgctggatgcggtacgcctggcgctgtttccctttattcgtggttttgatgccagcctctacgtaaaagataaatcgctggcgatccgtacagaagatgtacgtctggttttccgcactgaagcgctgaacatggaaatgtcatctccggccatgattacggctaccggggaatgggaaagtggaaagacggcaacctggatgctcgacaagcgaggagaacagccgccgcatgaagataagacagcggcgcagcttacccgttggggtgaacaacttcagacgctggtgcgtgaagagcatagtttgcagcaggttgaacttcccctaatgctttatctggggactgctcgcttgtggtatcaggaacgttatgaggcacagcctactgaacagcgtctggataacagcgccttttcacgtttgtctggttatgacgattgcctttctgccacatcaaattataagcaatttgaacaatggtatagctggttatggcttagctaccgtgaacatcaaatcacacaacttgaatcaccttcagcaaagttaaaagaaggtgttcgtgttcagcggatgaaagaagctattcaagccatccagcaagccattaactgtctgacgcaggaagtgactggctggcacgatctggaatacagctccagccataaccagcaattggtgatgaaccatccacagcacggtaagattcccttatcccagctcagcgacggcctgcgtaatgcggttgcgatggtagcggatatcgcctttcgctgtgtcaaactcaacccccatttacgcgatgaagccgccttaaaaacacaggggattgtgctaatcgatgaagtcgatatgttcctgcacccggcctggcagcagcaaattatccagtctttgcgcagcgcatttccactgatccagtttattgtcactacccatagcccgcaggttatcagcacggtaaaacgcgaatccattcgtctgcttgagcaggatgagaatggcaacgggaaagcgttgatgccgctcggagcgacctacggcgagccgagtaacgacgtgctacaaagtgtgatggatgtcgatccgcagcctcccgttaaggaaaaagaagacctgaaaaaactgacagagttagtcgatcaggggaaatacaataaacgggaaacacagcaactcatggctaccttgcaagacgcactaggtgaacatcacccacagttaaagcgtttacagcgtagcattgcccggcaggagttactgaaagggaaagcgcaatga

SEQ ID NO: 87621 - DNA, 585 bp, Salmonella enterica
  subsp. salamae serovar 58:l,z13,z28:z6 str. 00-0163
ttgaatgaacaatatcagctatgctgttatgccgaagtacgtgctgatcttcgtggtcttggctatcacattgagcacgttgagaataagagccagcatccggaacgtacttttgattatcagaatctcgctgccagtgctttagactcagcaaatggtctacgccagtacggtaaaaatgcttttggcggccattctcaaggaaagaacaagtcggtggatatggcaaaatttatccactgtcatatacccgattgttctcgttattttgcttacctgtctgatggtcggatagttcctgctgatgggttaaatgcgcaagaaatggagaacgcacagtacaccattgatctactaaacctgaatagtggctttctacaaaccgagcgccgtaattactgggaagaactggaacaaatttttgatgaaaacataggaaacagacagaatcttcaattattacttcaaattaatctggtcccttcgtcagatcataaactgcatgaattcttcagcattacacgccagtttttccagcaagaagctgaacaggtattacacatccacgccccagcattaatttaa

SEQ ID NO: 87622 - DNA, 1398 bp, Salmonella enterica
  subsp. indica serovar 6,14,25:z10:1,(2),7 str. 1121
atgagaatcgacaaactttcactgcttaactttcgttgcttcagacagctcgatattacttttgatgagcacattacgattctggttgcaccgaatggcgcgggcaagacgacagtgctggatgcgatacgcctggcgctgtttccctttattcgtggttttgatgccagcctctacgtaaaagataaatcgctggcgatccgtacagaagatgtacgtctggttttccgcactgaagcgctgaacatggaaatgtcatctccggccatgattacggctaccggggaatgggaaagtggaaagacggcaacctggatgctcgacaagcgaggagaacagccgccgcatgaagataagacagcggcgcagcttacccgttggggtgaacaacttcagacgctggtgcgtgaagagcatagtttgcagcaggttgaacttcccctaatgctttatctggggactgctcgcttgtggtatcaggaacgttatgaggcacagcctactgaacagcgtctggataacagcgccttttcacgtttgtctggttatgacgattgcctttctgccacatcaaattataagcaatttgaacaatggtatagctggttatggcttagctaccgtgaacatcaaatcacacaacttgaatcaccttcagcaaaattaaaagaaggtgttcgtgttcagcggatgaaagaagctattcaagccatccagcaagccattaactgtctgacgcaggaagtgactggctggcacgatctggaatacagctccagccataaccagcaattggtgatgaaccatccacagcacggtaagattcccttatcccagctcagcgacggcctgcgtaatgcggttgcgatggtagcggatatcgcgtttcgctgtgtcaaactcaacccccatttacgcgatgaagccgccttaaaaacacaggggattgtgctaatcgatgaagtcgatatgttcctgcacccggcctggcagcagcaaattatccagtctttgcgcagcgcatttccactgatccagtttattgtcactacccatagcccgcaggttatcagcacggtaaaacgtgaatccattcgtctgcttgagcaggatgagaatggcaacgggaaagcgttgatgccgctcggagcgacctacggcgagccgagtaacgacgtgctgcaaagtgtgatgggtgtcgatccacaacctccggtcaaggaaagggatgatctacaaaaactgacggcttgggtagatcaagggaagtatgacaatccagaagcacagcaacttatggctgcgttgcaggttgcgttaggtgagaagcatccccagcttcaacgcttacagcgcagtattgcccggcagaagctgctaaaagggaaagatcaatga

SEQ ID NO: 87623 - DNA, 606 bp, Salmonella enterica
  subsp. indica serovar 6,14,25:z10:1,(2),7 str. 1121
atgacgcttctgctcaatgagcaatatcatctttgctgttacagcgaagtacgtgccgatttgcgtggcctcggctatcacattgaacacgtcgaaaataaaagccagcatccagaacgaaccttcgattatctaaatctcgctgccagtgcgttagattcaggggagaacggcggtttatcttccctgaaaagaaaaaatgcttttggcggtcatgcccaaggaaaacaagatgctgtggatatggcaaaatttatccattgccatattagcgattgttcccgttattttgcttacctgtctgatggtcggatcgttcctgctgatgagctaaatgcacaagagacggagaacgcgcaatacaccattgatctactgaacctgaacagcggattccttcaaacggagcgtcgtaatcattgggaagagctggaacagctttttgatgaacacattgaaaaagactgggatctgcaacaattacttcagcttgatctggtcccttcgccagatcataaactgcatgaattcttcagcattacacgtcagtttttccagcaagaagctgaacaggtattacacatccacgccccagcattaatttaa

SEQ ID NO: 87624 - DNA, 1410 bp, Salmonella enterica
  subsp. enterica serovar Worthington str. ATCC 9607
atgagaatcgacaaactttcactgcttaactttcgttgcttcaggcagctcgatattacttttgatgagcacattacgattctggttgcaccgaacggcgcgggcaagacgacagtactggatgcggtacgcctggcgctgttcccctttattcgtggctttgatgccggcctctacgtaaaagataaatcgctggcgatccgtatagaagatgtccgtctggttttccgccctgaagcgttgaacatggaaatgtcgtctccagccatgattacagctaccggagaatgggaaaacggaaagacggcaacatggatgctcgataagcggggagaacagccgccgcatgaagataagacggcggcgcagcttacccgttggggtgaagagcttcagaaactggttcgagatgaggagcataaacagccagttgatcttccgctcatgctttatcttggcacggcaagattatggtatcaggagcgctacgaaccacagatggcagaacaacgcctggataacagcgcattttcacgcctgtccggttacgatgattgcctttctgctacatcgaattataagcagtttgagcagtggtatagctggttgtggcgcagtcaccttgagtttcaatacaaactgattgaggcgggcaggcaaaataaaagtgtggatttggtcgaaggcttgcgcgacgacagtatgagagaagccattcaagctatcctgcaggccattaactgtctgacgcaggaagtgactggctggcatgatctggaatacagctccagccataaccagcaactggtaatgagccatccacagcacggcaagatccccttagcccagctcagcgacggcttacgtaatgccgttgcgatggtggctgatatcgcgttccgctgcgtcaaactcaacccgcatttacgcgatgaagccgccttaaaaacacaggggattgtgctgatcgatgaagtcgatatgttcctgcacccggcctggcagcagcaaattatccagtctttacgcagcgcatttccactgatccagtttattgttacgacccatagcccgcaggttatcagcacggtaaaacgtgagtctgttcgcctacttgaacaggacgagaaaggtaatggtctggcgtcaataccaccgggggcgacctacggcgagccaagtaatgatgtactgcacagcgtgatgggcgtcgatccgcaacctccggttaaggagaaggcagatctgcaaaagctgacggcatgggtggatcaggggaaatatgacgagccagaagcacagcaacttatggcttcattgataacttcattgggtgaaaagcatcctcagctccagcgcttgcagcgcagtattgcccggcagaagctgctgaaagggaaagcgcaatga

SEQ ID NO: 87625 - DNA, 726 bp, Salmonella enterica
  subsp. enterica serovar Worthington str. ATCC 9607
atgaggcatgtgatcaaaacccgacgtggaacagatgccttactcactgcgcatgagcaaccaccacagaactctgaacaatcaacccgtcgctggcagcgctttggtcgtgagaataaagcagccttaatgactctgcttctcaatgagcaatatcatctttgctgttacagtgaaatccgtgctgatttgcgtggcctcggctatcacattgaacacgtcgaaaataaaagtcagcagccagggcgaaccttcgattatcaaaatctcgccgccagcgcgttagactctgagaatggtttgccccagcttggcatcaacgcgttcggtggtcatgcacagggaaagaataaatctgtggatatggcaaagtttattcattgccacctccctgactgttctcgttattttgcctatttatctaatgggcatgtggttccttcaatagatttaactgagcaggaagctgagtacgcacagtacaccattgatcatctgaacctgaacagcggattccttcaaacggaacgtcgtaatcattgggaagagctggaacagcttttcgatgaacatattgagaaagtctgggatctgcaacaattactccagcttgatctggttccgacaccagaccataaactgcatgagttcttcagctttacacgccagttctttcagcaagaagcagagcaggtattacaggattacgctcccgaattgatgtaa

SEQ ID NO: 87626 - DNA, 1398 bp, Salmonella enterica
  subsp. enterica serovar Tennessee str. TXSC_TXSC08-21
atgagaatcgacaaactttcactgcttaactttcgttgcttcagacagctcgatattacttttgatgagcacattacgattctggttgcaccgaatggcgcgggcaagacggcagtgctggatgcgatacgcctggcgctgtttccctttattcgtggttttgatgccagcctctccgtgaaggataaatcgctggcgatccgtactgaagatgtacgtctggttttccgccccgaagcgctgaacatggaaatgtcatctccggccataattacggctaccggagaatgggaaagcggaaagacggcaacctggatgctcaacaagcgaggagaacagccgccgcatgaagataagacagcggcgcagcttacccgttggggtgaacaacttcagacgctggtgcgtgaagagcataatttgcagcaggttgaacttcccctaatgctttatctggggactgctcgcttatggtatcaggaacgttatgaggcacagcctactgaacagcgtctggataacagcgccttttcacgtttgtctggttatgacgattgcctttctgccacatcaaactataagcaatttgaacaatggtatagctggttatggcttagctaccgtgaacatcaaatcacacaacttgaatcaccttcagcaaagttaaaagaaggtgttcgtgttcagcggatgaaagaagctattcaagccatccagcaaaccattaactgtctgacgcaggaagtgactggctggcacgatctggaatacagctccagccataaccagcaattggtgatgaaccatccacagcacggtaagattcccttatcccagctcagcgacggcctgcgtaatgcggttgcgatggtagcggatatcgcgtttcgctgtgtcaaactcaacccccatttacgcgatgaagccgccttaaaaacacaggggattgtgctgatcgatgaagtcgatatgttcctgcacccagcctggcagcagcaaattatccagtctttgcgcagcgcatttccactaatccagtttattgtcactacccatagcccgcaggttatcagcacggtaaaacgtgaatccattcgtctgcttgagcaggatgagaatggcaacgggaaagcgttgatgccgctcggagcgacctacggcgagccgagtaacgacgtgctacaaagtgtgatgggtgtcgatccgcaacctccggttaaggagaaggctgacctacaaaagctgacggcttgggtagatcaagggaagtacgacgagccagaagcacagcaactgatggctgcattacaggtggcgctgggtgatcaacatccacaactccaacgcttacagcgcagcattgcccggcagaacatgctgaaaggaaaagcgcaatga

SEQ ID NO: 87627 - DNA, 726 bp, Salmonella enterica
  subsp. enterica serovar Tennessee str. TXSC_TXSC08-21
atgaggcatgtgataaaaacccgacgtggaacagatgccttactcactgcacatgagcaaccaccacaaaattcagatcaatcaactcgtcgctggcagcactttggtcgtgagaataaagcagccttaatgactctgcttctcaatgagcaatatcacctttgctgttacagcgaaatccgtgctgatttgcgtggcctcggctatcacattgaacacgtcgaaaataaaagtcagcagccagggcgaaccttcgattatcaaaatctcgccgccagcgcgttagactctgagaatggtttgcacctgtttggtatcaacgctttcggcggtcacgcaagaggaaaacaagaggccgtggacatggcaaagtttattcattgtcacctccctgactgttctcgttattttgcttacctttctgatggccgaatagtaccggctgatgagctaaatgcccaggaaatggagagggcagagtacaccattgatctactaaatctgaacagcggattccttcaaacggaacgtcgtaatcattgggaagagctggaacagctttttgaggaacatattgaaaaaggctgggatctgcaacaattacttcagcttgagctggtcccttcaccagatcataaactgcatgaattcttcagcattacacgccagtttttccagcaagaagctgaacaggtattacagatccacgccccagcattaatttaa

SEQ ID NO: 87628 - DNA, 1398 bp, Salmonella enterica; identical to SEQ ID NO: 86900
  subsp. enterica serovar Tennessee str. TXSC_TXSC08-19

SEQ ID NO: 87629 - DNA, 726 bp, Salmonella enterica; identical to SEQ ID NO: 87627
  subsp. enterica serovar Tennessee str. TXSC_TXSC08-19

SEQ ID NO: 87630 - DNA, 1398 bp, Salmonella enterica
  subsp. enterica serovar Sloterdijk str. ATCC 15791
atgagaatcgacaaactttcactgcttaactttcgttgctttagacagctcgatattacttttgatgagcacattacgattctggttgcaccgaatggcgcgggcaagacgacagtgctggatgcgatacgcctggcgctgtttccctttattcgtggttttgatgccagcctctacgtaaaagataaatcgctggcgatccgtacagaagatgtacgtctggttttccgccccgaagcgctgaacatggaaatgtcgtctccggccatgattacggctaccggggaatgggaaagtggaaaaacggcaacctggatgctcgacaagcgaggagaacagccgccgcatgaagataagacagcggcgcagcttacccgttggggtgaacaacttcagacgctggtgcgtgaagagcataatttgcagcaggttgaacttcccctaatgctttatctggggactgctcgcttgtggtatcaggaacgttatgaggcacagcctactgaacagcgtctggataacagcgccttttcacgtttgtctggttatgacgattgcctttctgccacatcaaactataagcaatttgaacaatggtatagctggttatggcttagctaccgtgaacatcaaatcacacaacttgaatcaccttcagcaaagttaaaagaaggtgttcgtgttcagcggatgaaagaagctattcaagccatccagcaaaccattaactgtctgacgcaggaagtgactggctggcacgatctggaatacagctccagccataaccagcaattggtgatgaaccatccacagcacggtaagattcccttatcccagctcagcgacggcctgcgtaatgcggttgcgatggtagcggatatcgcgtttcgctgtgtcaaactcaacccccatttacgcgatgaagccgccttaaaaacacaggggattgtgctgatcgatgaagtcgatatgttcctgcacccagcctggcagcagcaaattatccagtctttgcgcagcgcatttccactaatccagtttattgtcactacccatagcccgcaggttatcagcacggtaaaacgtgaatccattcgtctgcttgagcaggatgagaatggcaacgggaaagcgttgatgccgctcggagcgacctacggcgagccgagtaacgacgtgctacaaagtgtgatgggtgtcgatccgcaacctccggttaaggagaaggctgacctacaaaagctgacggcttgggtagatcaagggaagtacgacgagccagaagcacagcaactgatggctgcattacaggtggcgctgggtgatcaacatccacaactccaacgcttacagcgcagcattgcccggcagaacatgctgaaagggaaagcgcaatga

SEQ ID NO: 87631 - DNA, 597 bp, Salmonella enterica
  subsp. enterica serovar Sloterdijk str. ATCC 15791
atgactctgcttctcaatgagcaatatcacctttgctgttacagcgaaatccgtgctgatttgcgtggcctcggctatcacattgaacacgtcgaaaataaaagtcagcagccagggcgaaccttcgattatcaaaatctcgccgccagcgcgttagactctgagaatggtttgcacctgtttggtatcaacgctttcggcggtcacgcaagaggaaaacaagaggccgtggatatggcaaagtttattcattgtcacctccctgactgttctcgttattttgcttacctttctgatggccgaatagtaccggctgatgagctaaatgcccaggaaatggagagggcagagaacaccattgttctactaaatctgaacagcggattccttcaaacggaacgtcgtaatcattgggaagagctggaacagctttttgaggaacatattgaaaaaggctgggatctgcaacaattacttcagcttgagctggtcccttcaccagatcataaactgcatgaattcttcagcattacacgccagtttttccagcaagaagctgaacaggtattacagatccacgccccagcattaatttaa

SEQ ID NO: 87632 - DNA, 1398 bp, Salmonella enterica
  subsp. enterica serovar Stanley str. ATCC 7308
atgagaatcgacaaactttcactgcttaactttcgttgcttcagacagctcgatattacttttgatgagcacattacgattctggttgcaccgaatggcgcgggcaagacgacagtgctggatgcgatacgcctggcgctgtttccctttattcgtggttttgatgccagcctctacgtaaaagataaatcgctggcgatccgtacagaagatgtacgtctggttttccgccccgaagcgctgaacatggaaatgtcgtctccggccatgattacggctaccggggaatgggaaagtggaaaaacggcaacctggatgctcgacaagcgaggagaacagccgccgcatgaagataagacagcggcgcagcttacccgttggggtgaacaacttcagacgctggtgcgtgaagagcataatttgcagcaggttgagcttcccctaatgctttatctggggactgctcgcttgtggtatcaggaacgttatgagacacagcctactgaacagcgtctggataacagcgccttttcacgtttgtctggttatgacgattgcctttctgccacatcaaattataagcaatttgaacaatggtatagctggttatggcttagctaccgtgaacatcaaatcacacaacttgaatcaccttcagcaaagttaaaagaaggtgttcgtgttcagcggatgaaagaagctattcaagccatccagcaagccattaactgtctgacgcaggaagtgactggctggcacgatctggaatacagctccagccataaccagcaattggtgatgaaccatccacagcacggtaagattcccttatcccagctcagcgacggcctgcgtaatgcggttgcgatggtagcggatatcgcgtttcgctgtgtcaaactcaacccccatttacgcgatgaagccgccttaaaaacacaggggattgtgctgatcgatgaagtcgatatgttcctgcacccagcctggcagcagcaaattatccagtctttgcgcagcgcatttccactaatccagtttattgtcactacccatagcccgcaggttatcagcacggtaaaacgtgaatccattcgtctgcttgagcaggatgagaatggcaacgggaaagcgttgatgccgctcggagcgacctacggcgagccgagtaacgacgtgctacaaagtgtgatgggtgtcgatccgcaacctccggttaaggagaaggctgacctacaaaagctgacggcttgggtagatcaagggaagtacgacgagccagaagcacagcaactgatggctgcattacaggcggcgctgggtgatcaacatccacaactccaacgcttacagcgcagcattgcccggcagaacatgctgaaagggaaagcgcaatga

SEQ ID NO: 87633 - DNA, 597 bp, Salmonella enterica
  subsp. enterica serovar Stanley str. ATCC 7308
atgactctgcttctcaatgagcaatatcacctttgctgttacagcgaaatccgtgctgatttgcgtggcctcggctatcacattgaacacgtcgaaaataaaagtcagcagccagggcgaaccttcgattatcaaaatctcgccgccagcgcgttagactctgagaatggtttgcacctgtttggtatcaacgctttcggcggtcacgcaagaggaaaacaagaggccgtggatatggcaaagtttattcattgtcacctccctgactgttctcgttattttgcttacctttctgatggccgaatagtaccggctgatgagctaaatgcccaggaaatggagagggcagagtacaccattgatctactaaatctgaacagcggattccttcaaacggaacgtcgtaatcattgggaagagctggaacagctttttgaggaacatattgaaaaaggctgggatctgcaacaattacttcagcttgagctggtcccttcgctagatcataaactgcatgaattcttcagcattacacgccagtttttccagcaagaagctgaacaggtattacagatccacgccccagcattaatttaa

SEQ ID NO: 87634 - DNA, 1398 bp, Salmonella enterica; identical to SEQ ID NO: 86590
  subsp. enterica serovar Senftenberg str. 604314

SEQ ID NO: 87635 - DNA, 597 bp, Salmonella enterica; identical to SEQ ID NO: 87603
  subsp. enterica serovar Senftenberg str. 604314

SEQ ID NO: 87636 - DNA, 1398 bp, Salmonella enterica subsp. enterica serovar Soerenga str. 695
atgagaatcgacaaactttcactgcttaactttcgttgcttcagacagctcgatattacttttgatgagcacattacgattctggttgcaccgaatggcgcgggcaagacggcagtgctggatgcgatacgcctggcgctgtttccctttattcgtggttttgatgccagcctctacgtaaaagataaatcgctggcgatccgtacagaagatgtacgtctggttttccgccccgaagcgctgaacatggaaatgtcgtctccggccatgattacggctaccggggaatgggaaagtggaaaaacggcaacctggatgctcgacaagcgaggagaacagccgccgcatgaagataagacagcggcgcagcttacccgttggggtgaacaacttcagacgctggtgcgtgaagagcataatttgcagcaggttgagcttcccctaatgctttatctggggactgctcgcttgtggtatcaggaacgttatgaggcacagcctactgaacagcgtctggataacagcgccttttcacgtttgtctggttatgacgattgcctttctgccacatcaaattataagcaatttgaacaatggtatagctggttatggcttagctaccgtgaacatcaaatcacacaacttgaatcaccttcagcaaagttaaaagaaggtgttcgtgttcagcggatgaaagaagccattcaagccatccagcaagccattaactgtctgacgcaggaagtgactggctggcacgatctggaatacagctccagccataaccagcaattggtgatgaaccatccacagcacggtaagattcccttatcccagctcagcgacggcctgcgtaatgcggttgcgatggtagcggatatcgcgtttcgctgtgtcaaactcaacccccatttacgcgatgaagccgccttaaaaacacaggggattgtgctgatcgatgaagtcgatatgttcctgcacccagcctggcagcagcaaattatccagtctttgcgcagcgcatttccactaatccagtttattgtcactacccatagcccgcaggttatcagcacggtaaaacgtgaatccattcgtctgcttgagcaggatgagaatggcaacgggaaagcgttgatgccgctcggagcgacctacggcgagccgagtaacgacgtgctacaaagtgtgatgggtgtcgatccgcaacctccggttaaggagaaggctgacctacaaaaactgacggcttgggtagatcaagggaagtacgacgagccagaagcacagcaactgatggctgcattacaggtggcgctgggtgatcaacatccacaactccaacgcttacagcgcagcattgcccggcagaacatgctgaaagggaaagcgcaatga

SEQ ID NO: 87637 - DNA, 597 bp, Salmonella enterica subsp. enterica serovar Soerenga str. 695
atgactctgcttctcaatgagcaatatcacctttgctgttacagcgaaatccgtgctgatttgcgtggcctcggctatcacattgaacacgtcgaaaataaaagtcagcagccagggcgaaccttcgattatcaaaatctcgccgccagcgcgttagactctgagaatggtttgcacctgtttggtatcaacgctttcggcggtcacgcaagaggaaaacaagaggccgtggatatggcaaagtttattcattgtcacctccctgactgttctcgttattttgcttacctttctgatggccgaatagtaccggctgatgagctaaatgccaaggaaatggagagggcagagtacaccattgatctactaaatctgaacagcggattccttcaaaaggaacgtcgtaatcattgggaagagctggaacagctttttgaggaacatattgaaaaaggctgggatctgcaacaattacttcagcttgagctggtcccttcaccagatcataaactgcatgaattcttcagcattacacgccagtttttccagcaagaagctgaacaggtattacagatccacgccccagcattaatttaa

SEQ ID NO: 87638 - DNA, 1410 bp, Salmonella enterica
  subsp. enterica serovar Meleagridis str. 0047
atgagaatcgacaaactttcactgcttaactttcgttgcttcagacggctcgatattacttttgatgagcacattacgattctggttgcaccgaacggcgcgggcaagaccacagtgctggatgcggtacgcctggcgctgtttccctttattcgtggttttgatgccagcctctacgtgaaggataaatcgctggcgatccgtactgaagatgtacgtctggttttccgcgccaaagcgctgaacatggaaatgtcatctccggccatgattacggctaccggggaatgggaaagcggaaaaacggcaacctggatgctcgacaagcgaggagagcagccgccgcatgaagataagacggcggcgcagcttacccgttggggtgaagagcttcagaaactggttcgagatgaggagcataaacagccagttgatcttccgctcatgctttatcttggcacggcaagattatggtatcaggagcgctatgaaccacagatggcagaacaacgcctggataacagcgcattttcacgcctgtccggttacgacgattgcctttctgctacatcgaattataagcagtttgaacagtggtatagctggttgtggcgcagtcaccttgagtttcaatacaaactgattgaggcgggcaggcaaaataaaagtgtggatttggtcgaaggcttgcgcgacgacagtatgagagatgccattcaagctatccagcaggccattaactgtctgacgcaggaagtaactggctggcgcgatctggaatacagctccagccataaccagcaactggttatgagccatccgcaacacggcaagatccccttatcccagctcagcgacggcttgcgtaatgcggttgcgatggtagcggatatcgcgtttcgctgtgtcaaactcaacccgcatttacgcgatgaagccgccttaaaaatccagggaattgtgctgatcgatgaagttgatatgttcctgcacccagcctggcagcagcaaattatccagtctttgcgcagcgcatttccgcagatccagtttattgttacgacccatagcccgcaggtgctcagtacggtaaaacgcgaatccattcgtctgcttgagcaggatgagaatggcaacgggaaagcgttgatgccgctcggagcgacctacggcgagccgagtaacgacgtgctgcaaagtgtgatgggtgtcgatccgcagcctccggttaaggaaaaggccgatctgcaaaagctgacggcatgggtggatcaggggaaatatgacgagccagaaacacagcaactgatggctgcattgcaggtggcgctgggtgatcaacatccgcaactccaacgcttacagcgcagcattgcccggcagaacctgctgaaagggaaggcacaatga

SEQ ID NO: 87639 - DNA, 597 bp, Salmonella enterica
  subsp. enterica serovar Meleagridis str. 0047
atgacgcttctgctcaatgagcaatatcatctttgctgttacagcgaaatccgtgctgatttgcgtggcctcggctatcacattgaacacgtcgaaaataaaagccagcagccagggcgaaccttcgattatcaaaatctcgccgccagcgcgttagactctgagaatggtttgccccagcttggcatcaacgcgttcggtggtcatgcacagggaaagaataaatctgtggatatggcaaagtttattcattgccacctccctgactgttctcgttattttgcctatttatctaatgggcatgtggttccttcaatagatttaactgagcaggaagctgagtacgcacagtacaccattgatcacctgaacctgaacagcggattccttcaaacggaacgccgtaatcattgggaagagctggaacagctttttgaggaacatattgagaaaggctgggatctgcaacaattactccagcttgatctggttccgacaccagaccataaactgcatgagttcttcagctttacacgccagttctttcagcaagaagcagagcaggtattacaggattacgctcccgaattgatgtaa

SEQ ID NO: 87640 - DNA, 1227 bp, Salmonella enterica
  subsp. enterica serovar Minnesota str. ATCC 49284
atgaaatttaaaaggttaaaaatatctgattggcgccaatttaatgaggtaagcatagacttccataacaaagtaacagtgattactgggtctaatggagcaggaaagtcaacagtattaagaatattagctaagcatttctcttggaattgtgattttttggcaatgccgttttacgatgaagataaagggattaatattttcactaataaacgtcaaagcaattcatattctaatgccaaccataaaataggagaaatagagtattcaaatgaaattatatcctctatatatatagaagaacatcccaggactataaactatgatatagctattgaaaatattgaccgcagcattaaagggctgtttatacattcgcatagagcatcaaataactatgaaataacatccaatataccaacgggtgtaataaatgcggaagactcctataaaaaccatttacaagcatataagaaacacttagaaaatagttcatttaatggcaacccaacggtagaaatgaagcaatcactgttatccatggctgccttgggagttgggaataactacataaagaaaaataaaaaatcagaaaaaacatttacttcattcatagaaatattaaagataactctacctaaaaacattggattcaaaaatataaggtttgaagttcctgatgttatttttgaaacggattcaggcgactttgtattagattccgcgtctggtgggattatgtctataatagatatatcgtggcaaatattactttattcgcaagatgcggagcactttacagcattaattgatgaaccggaaaatcaccttcatccaacaatgcaacggtcattgataaatgatctgataaaagcgttcccaaacgttcagtttgttattgtcacccatagcccattcattatttcttcagtgaaagactcaaatgtttatgcattaaagcatgatgactccaataaagttaattctcataaattggatttagaagaaaaagcatcaactgcaaataaaatattaagagatgttcttggagtttcaataactatacctcagtgggcggaagatgaattagataaaatatgttcgatgttaactgcagaaaacataactgaaaataatctaaatgaacttagaacttctttagatcaagcagggttgggtgagttttacccggaggccctttaccacatagttggtggtaaaaaatga

SEQ ID NO: 87641 - DNA, 669 bp, Salmonella enterica
  subsp. enterica serovar Minnesota str. ATCC 49284
atgattaaactaataaaattaacagagccagatatattggctaagaattttaaaaaatggacagataaacatttatcaaatatagggtcaggcataaattcaagtgattatttaaaaaccaggtactcacatgaagatataaaagagcaactaataaaagaaactaacgggaaatgtgcatattgtgaaagcaaattattgcatatacatcatggtgatgttgagcatatatatccaaagtcattggatgaatcaaaaagattcttatggataaaccttacgttatcttgtgagatctgcaatcagaataaaacaaatcttgacccaaatttaaataatattcaagatccttattcaggaaatcctgagagtgtaattattttctgtggctcattggttcttggttctggaattaaagggttatcaacgcttgcaatattagatcttaataggaagcaattgatagaaaaaagacaagaaaagttagagaaaatacttttgattttcaatcaaatatgctcagaggcactaccccaagcagcaaggcaagcaatatataacgatatgattaaaaatgaaacatcagcagaccaagaatactcatcaatggtgaaaagtacaattcgtcatgttagttatattattcctggtgatataaagcaaaaataa

SEQ ID NO: 87642 - DNA, 1398 bp, Salmonella enterica; identical to SEQ ID NO: 86590
  subsp. enterica serovar Senftenberg str. 423984-2

SEQ ID NO: 87643 - DNA, 597 bp, Salmonella enterica; identical to SEQ ID NO: 87603
  subsp. enterica serovar Senftenberg str. 423984-2

SEQ ID NO: 87644 - DNA, 1050 bp, Salmonella enterica subsp. enterica serovar Miami str. 1923
atgaagataaagggattaatattattcactaataaacgtcaaagcaattcatattctaatgccaaccataaaataggagaaatagagtattcaaatgaaattatatcctctatatatatagaagaacatcccaggactataaactatgatatagctattgaaaatattgaccgcagcattaaagggctgtttatacattcgcatagagcatcaaataactatgaaataacatccaatataccaacgggtgtaataaatgcggaagactcctataaaaaccatttacaagcatataagaaacacttagaaaatagttcatttaatggcaacccaacggtagaaatgaagcaatcactgttatccatggctgccttgggagttgggaatagctacataaagaaaaataaaaaatcagaaaaaacatttacttcattcatagaaatattaaagataactctacctaaaaacattggattcaaaaatataaggtttgaagttcctgatgttatttttgaaacggattcaggcgactttgtattagattccgcgtctggtgggattatgtctataatagatatatcgtggcaaatattactttattcgcaagatgcggagcactttacagcattaattgatgaaccggaaaatcaccttcatccaacaatgcaacggtcattgataaatgatctgataaaagcgttcccaaacgttcagtttgttattgtcacccatagcccattcattatttcttcagtgaaagactcaaatgtttatgcattaaagcatgatgactccaataaagttaattctcataaattggatttagaagaaaaagcatcaactgcaaataaaatattaagagatgttcttggagtttcaataactatacctcagtgggcggaagatgaattagataaaatatgttcgatgttaactgcagaaaacataactgaaaataatctaaatgaacttagaacttctttagatcaagcagggttgggtgagttttacccggaggccctttaccacatagttggtggtaaaaaatga

SEQ ID NO: 87645 - DNA, 669 bp, Salmonella enterica subsp. enterica serovar Miami str. 1923; identical to SEQ ID NO: 87641

SEQ ID NO: 87646 - DNA, 1398 bp, Salmonella enterica; identical to SEQ ID NO: 86590
  subsp. enterica serovar Senftenberg str. 316235162

SEQ ID NO: 87647 - DNA, 597 bp, Salmonella enterica; identical to SEQ ID NO: 87603
  subsp. enterica serovar Senftenberg str. 316235162

SEQ ID NO: 87648 - DNA, 1182 bp, Salmonella enterica
  subsp. enterica serovar Indiana str. ATCC 51959
atgaaaatacaaaaaattgatatcaaagatgttggtggtataaaaagagcaataattaattttgatgcgagcatgaatattatttgcggaccaaatgggataggaaaaaccacaattttagattccgtagcacatagttttattaatacaaacagctatgtccttaaaagacatgctcagtctactgatggtcagataaataccgtattaaatgattgtgacaatattagagaaagtcatatttctcttgaacagttcaatcctaaggattactcatatattagtggcttaagagagttaggaaggaaagtgatttatttgaatatttctagaatgttcaaatatgtatctttatctaatatctctaaagatgaggagagacaagatcatagcatatacacacttttgactgacggaatttcggttgcggatatgaaaaattggttcgcaaaacgctgtctcttctttaatacaccagaagcattaagtgaaaataataaggttaatttggagttggcaaaaaaatgcttttcactgcttaatgctgaatataaattttctcgcgtagatgcgaaaaaatttgatgttttcgtatctactccaaatggagaaatttggtatgaatatttgtcatcaggatttaaatcatgtctgagtattttattcggcataataaaagagattgaactaagaatgcctgatgaaaattgtttagcacagcattttgatggcattgtattgattgatgagctggaaatgcatcttcatcctgaatggcagtccaaaattgtttctgttttgcgagacacatttcctgcaacacaatttatagttactactcatagtcctcacattatacaaaatgcggaacctaatcagataattgcattagggacagatagtaatggatatacatacgtcagagaacttccgagtaatgagtttggttatactggatggacattagatgaggtactcaaagatgtaatgggaatggaagacacaagaagtcagaaattacaaagtatgcttgctgcatttgatcaagctattgatgaggagaataaaattgaagcagagcgtatttataaagaattagatagggcacttcatccagcaaatgtgcttagaaaaatgcttagtattgatctttcctcagtaatcgaggagggcagtaaataa

SEQ ID NO: 87649 - DNA, 747 bp, Salmonella enterica
  subsp. enterica serovar Indiana str. ATCC 51959
atgattaagctggaaagaaattttacacctctattcttttctcctcagaatgttagtcgtttaactgaaaaatttaagagcagtggtactcatgtatggcatcatgatgatgtaaaaaattcgttgatggagttaagtgataaaaaatgtgcatactgtgaggttaagcttggtgaaaaaagcacatatcatgaggtggagcattttaaagataagaatgattaccctgatgatgtaatagagtggaataacctattaccttcatgtcgtcattgtaatggttctaaagggacacatgatgttgtccaagaaccaatagttaatccttttgaggaactcccggcagagtttttttatattaaaaatttcagaatgaaagggaggaatgagaaaggtattctgactatagatgttttaaatcttaacgatagagaacatttggttaagccaagatgtgaaacaggagctataattgcggaaaaaatagaggattctttaactttatttgagggatatctttcaaatccaataagcaaaaataaaagaaaattaatcggtactgttagagggatactgaaagaatgtcaaagaagtgccatattttctgcagtatcggctactgtattacatacgagcgaggattatctgactttacggggtaatatgatggcccataagttatgggatgaagatatggagaaccttcacataatgtcaagtaatatacaattaccaacaacagcttaa

SEQ ID NO: 87650 - DNA, 1635 bp, Salmonella enterica; identical to SEQ ID NO: 87606
  subsp. enterica serovar Agona str. 419639 2-1

SEQ ID NO: 87651 - DNA, 684 bp, Salmonella enterica; identical to SEQ ID NO: 87607
  subsp. enterica serovar Agona str. 419639 2-1

SEQ ID NO: 87652 - DNA, 1398 bp, Salmonella enterica subsp. enterica serovar Agona str. 632182-2
atgagaatcgacaaactttcactgcttaactttcgttgcttcagacagctcgatattacttttgatgagcacattacgattctggttgcaccgaatggcgcgggcaagacggcagtgctagatgcgatacgcctggcgctgtttccctttattcgtggttttgatgccagcctctacgtaaaagataaatcgctggcgatccgtacagaagatgtacgtctggttttccgccccgaagcgctgaacatggaaatgtcgtctccggccatgattacggctaccggggaatgggaaagtggaaaaacggcaacctggatgctcgacaagcgaggagaacagccgccgcatgaagataagacagcggcgcagcttacccgttggggtgaacaacttcagacgctggtgcgtgaagagcataatttgcagcaggttgagcttcccctaatgctttatctggggactgctcgcttgtggtatcaggaacgttatgaggcacagcctactgaacagcgtctggataacagcgccttttcacgtttgtctggttatgacgattgcctttctgccacatcaaattataagcaatttgaacaatggtatagctggttatggcttagctaccgtgaacatcaaatcacacaacttgaatcaccttcagcaaagttaaaagaaggtgttcgtgttcagcggatgaaagaagctattcaagccatccagcaagccattaactgtctgacgcaggaagtgactggctggcacgatctggaatacagctccagccataaccagcaattggtgatgaaccatccacagcacggtaagattcccttatcccagctcagcgacggcctgcgtaatgcggttgcgatggtagcggatatcgcgtttcgctgtgtcaaactcaacccccatttacgcgatgaagccgccttaaaaacacaggggattgtgctgatcgatgaagtcgatatgttcctgcacccagcctggcagcagcaaattatccagtctttgcgcagcgcatttccactaatccagtttattgtcactacccatagcccgcaggttatcagcacggtaaaacgtgaatccattcgtctacttgagcaggatgagaatggcaacgggaaagcgttgatgccgctcggagcgacctacggcgagccgagtaacgacgtgctacaaagtgtgatgggtgtcgatccgcaacctccggttaaggagaaggctgatctacaaaagctgacggcttgggtagatcaagggaagtacgacgagccagaagcacagcaactgatggctgcattacaggtggcgctgggtgatcaacatccacaactccaacgcttacagcgcagcattgcccggcagaacatgctgaaagggaaagcgcaatga

SEQ ID NO: 87653 - DNA, 597 bp, Salmonella enterica subsp. enterica serovar Agona str. 632182-2
atgactctgcttctcaatgagcaatatcacctttgctgttacagcgaaatccgtgctgatttgcgtggcctcggctatcacattgaacacgtcgaaaataaaagccagcagccagggcgaaccttcgattatcaaaatctcgccgccagcgcgttagactctgagaatggtttgcacctgtttagtatcaacgctttcggcggtcacgcaagaggaaaacaagaggccgtggatatggcaaagtttattcattgtcacctccctgactgttctcgttattttgcttacctttctgatggccgaatagtaccggctgatgagctaaatgcccaggaaatggagagggcagagtacaccattgatctactaaatctgaacagcggattccttcaaacggaacgtcgtaatcattgggaagagctggaacagctttttgaggaacatattgaaaaaggctgggatctgcaacaattacttcagcttgagctggtcccttcgccagatcataaactgcatgaattcttcagcattacacgccagtttttccagcaagaagctgaacaggtattacagatccacgccccagcattaatttaa

SEQ ID NO: 87654 - DNA, 473 bp, Salmonella enterica
  subsp. enterica serovar Nchanga str. CFSAN001092
gtttagcacagcattttgatggcattgtattgattgatgagctggaaatgcatcttcatcctgaatggcagtctaaaattgtttctgttttgcgagacacatttcctgcaacacaatttatagttactactcatagtcctcacattatacaaaatgcggaacctaatcagataattgcattagggacagatagtaatggatatacatacgtcagagaacttccgagtaatgagtttggttatactggatggacattagatgaggtactcaaagatgtaatgggaatggaagacacaagaagtcagaaattacaaagtatgcttgctgcatttgatcaagctattgatgaggagaataaaattgaagcagagcgtatttataaagaattagatagggcacttcatccagcaaatgtgcttagaaaaatgcttagtattgatctatcctcaataatcgaggaggacaataaataa

SEQ ID NO: 87655 - DNA, 196 bp, Salmonella enterica
  subsp. enterica serovar Nchanga str. CFSAN001092
atgattaagctggaaagaaattttacacctctattcttttctcctcagaatgttagtcgtttaactgaaaaatttaagagcagcggtactcatgtatggcatcatgatgatgtaaaaaattcgttgatggagttaagtgataaaaaatgtgcatactgtgaggttaagcttggtgaaaaaagcacatatcatgagg

SEQ ID NO: 87656 - DNA, 1182 bp, Salmonella enterica
  subsp. enterica serovar Nchanga str. CFSAN001091
atgaaaatacaaaaaattgatatcaaagatgttggtggtataaaaagagcaataattaattttgatgcgagcatgaatattatttgcggaccaaatgggataggaaaaaccacaattttagattccgtagcacatagttttattaatacaaacagctatgtccttaaaagacatgctcagtctactgatggtcagataaataccgtattaaatgattgtgacaatattagagaaagtcatatttctcttaaacagtttaatcctaaggattactcatatattagtggcttaagagagtcaggaaggaaagtgatttatttgaatatttctagaatgttcaaatatgtatctttatctaatatctctaaagatgaggagagacaagatcatagcatatacacacttttgactgacggaatttcggttgcggatatgaaaaattggttcgcaaaacgctgtctcttctttaatacaccagaagcattaagtgaaaataataaggttaatttggagttggcaaaaaaatgcttttcactgcttaatgctgaatataaattttctcgcgtagatgcgaaaaaatttgatgttttcgtatctactccaaatggagaaatttggtatgaatatttgtcatcaggatttaaatcatgtctgagtattttattcggcataataaaagagattgaactaagaatgcctgatgaggaatgtttagcacagcattttgatggcattgtattgattgatgagctggaaatgcatcttcatcctgaatggcagtctaaaattgtttctgttttgcgagacacatttcctgcaacacaatttatagttactactcatagtcctcacattatacaaaatgcggaacctaatcagataattgcattagggacagatagtaatggatatacatacgtcagagaacttccgagtaatgagtttggttatactggatggacattagatgaggtactcaaagatgtaatgggaatggaagacacaagaagtcagaaattacaaagtatgcttgctgcatttgatcaagctattgatgaggagaataaaattgaagcagagcgtatttataaagaattagatagggcacttcatccagcaaatgtgcttagaaaaatgcttagtattgatctatcctcaataatcgaggaggacaataaataa

SEQ ID NO: 87657 - DNA, 434 bp, Salmonella enterica
  subsp. enterica serovar Nchanga str. CFSAN001091
atgattaagctggaaagaaattttacacctctattcttttctcctcagaatgttagtcgtttaactgaaaaatttaagagcagcggtactcatgtatggcatcatgatgatgtaaaaaattcgttgatggagttaagtgataaaaaatgtgcatactgtgaggttaagcttggtgaaaaaagcacatatcatgaggtggagcattttaaagataagaatgattaccctgatgatgtaatagagtggaataacctattaccttcatgtcgtcattgtaatggttctaaagggacacatgatgttgtccaagaaccaatagttaatccttttgaggaactcccggaagagtttttttatattaaaaattttagaatgaaagggagaaatgagaaaggtattctgaccatagatgttttaaatcttaacgatagaga

SEQ ID NO: 87658 - DNA, 1410 bp, Salmonella enterica; identical to SEQ ID NO: 87624
  subsp. enterica serovar Havana str. CFSAN001082

SEQ ID NO: 87659 - DNA, 726 bp, Salmonella enterica; identical to SEQ ID NO: 87625
  subsp. enterica serovar Havana str. CFSAN001082

SEQ ID NO: 87660 - DNA, 1398 bp, Escherichia coli UMEA 3342-1; identical to SEQ ID NO: 86108

SEQ ID NO: 87661 - DNA, 732 bp, Escherichia coli UMEA 3342-1; identical to SEQ ID NO: 86109

SEQ ID NO: 87662 - DNA, 1581 bp, Acinetobacter gyllenbergii NIPH 230
atgagtgataataaaataaaatatgaacctaaaggtgttaaaaaagaggatttatttttttgtttcgaaatgcttaaagaattaaaagtaagcggtcaagatttacataaaagcgatttttatgaaattattgaaaaaaatataaatgaaaattgtatttttttgagtaaggttgtttttttaaactataaaagactttcggattatgaggtgttttttaatgaaagaataaatgtcattattggtgagaatggtgtagggaaaacctcggttttaaatggtgtggttaaaaatttatcatggatgttaaataatattctcaaagataataataatggtattcatcttatggatgatgaaattagtaatgttatcattgataaaaaaaaccaaacaagtattgttaagtgtgatttttattatggagaatatactaaaattgagggtgagttagtaaaacataaagttggatttagtagtaagcgacaaagtaaagtttctgaatataaaaatattggagaaatttggagagaatttcataatcttaataacattaacctccctattttttctttttattctgtgaaaagatttaatgataaagttggtaaactagaagctaaggcagaaattaataaattagatgcatacaaaggtgccttggatggaaatgtaaaatttgaatcattttcgaaatggttattacaatgtcttaaaataatatcgaatgatggtgtagatcaaggatataaagaaagattaaatcaattagttttggcaaaacaaagtcttgtccctgagactgaggtttataaacttttagatgaagaagaaaaaagattaaggttcttcatagaaagtcaaaaaaataatgcttatatatataagcaattagaattaattaatggtttggtaaagaaaatatttcctgattttaatgattttaagttaattcaaactactggtgtggatgagatattgctgacttattataatcgggatccaattaacttggagcagctttcagatggggaaagagtttttttaggccttataatggatatagcttatcgactgatttcacttaatccaaatcgagaaaatccatttgaaggttctggaatagttgtaattgatgaaatagagttgcatttacaccctaaatggcaacagagttcagttttaattttagggaaaagctttcctaatattcaatttattataacaacacatagtccacaagtactctcaactgtcgataaaaaatcaattatatatttaaagaaagatggtgtgggggaagtttcttatcaatctaaaggactaatgagttcagatgttttagaattaataatgaatactagatcaattcccgatgttaaagaagcgcaggatttaaaaaaattaaatttattgcttgagagtgaaaagtatgattcggaagagtttgatgagctgctaaggaatttaacggagcattttggagaaaaccatccagaaatattaagtgtaaattctcgtattaattttataaaattgagaaataatttgaaaaataaaattaggatttcaaaaaaatga

SEQ ID NO: 87663 - DNA, 663 bp, Acinetobacter gyllenbergii NIPH 230
atgaaatttttagttagaaatgctgagccagtttgtttggttgtcatgaaaaggatatattcaggctggggagatgttacttttagtgataaacaagaaatttggctctctttagatgagatgcaaaataattactgtgcattttgtgaaatgactttgaaaggtatgagaaagcatattgagcattttatttctagaagcagaaaaaatgttttaacttttgagtggactaatctatttgggtcttgtgataattctgaacattgcggacgttataaagatataataatatcagattatgatgaaaacaatttaataaagccagatgaaaatgatccgagaaattttctttctttttcacctgaaggcgatattagtgtgaaattgggattgtcagaagaaaatgaattaaaagcaaccgaaacaatcagagtatttggtttagatgcccccgatttagttgctgctagacgcactattttaagtggatataatcaaatagctaaagaatatgttgaattggttgagctagctattagtgagggaggggaaaatatcaaagttttggtagatgagatatatgctgaatatagtataactattttagaccaaccattttctactgcgttaagccagttgctggatttaaagtttactcaatga

SEQ ID NO: 87664 - DNA, 1467 bp, Acinetobacter gyllenbergii NIPH 230
atgaactatataaatatacttatctataatgataatgaaattcatctaaatcaaagacatttaattatcacaggtaaaagtggtgttggaaaaacaagatttttaaataatttaagaacagaattagaaaaagataaaaatacagagtcacatatgaaaaagattcttcgtgaacaaatttctgaaattcttaaaaatggaataaataattaccctttatctctcaacttaaaaaatcaagaaataaaatatatcaataaatttcgaaataattatgactctgaatttaattacacaaaccatttattagatatacaaaatttaatagataacaaatataaattttttaataaaaagaaaaaatcatacttcctaaaaacggatagtactacacaggatgagcatctcaagattgaaaacccagactcaattttagaaaattactactactataacaatccatatcacatagataacttttataagtcactaagtaaattgatagaagactatttaacaaatactaaaggaattagtgtttatcctatcaatcaccccaaaaacatatattactttgaatcatcaagagttagttccaatctattcacaatgacagtttttcaaagttttgagagctttaaaaacaaccaacagaaacatgatgtagaagatgcattaggagcatttttagttgatcaaagaatggctttttatgatttaatgaagtttagagaacccgaagaacataatcaaagtgctattagtgcaagattatttgatacaaatgaaatagaaagatggtttttaaaaattgagaaagatcttcaaattattttggaaaaccccactattgaactttcttttacaaaaaaaggagatcaagttttaattattcaaaaagataaagatatttcattttcttttgattctctatcatcaggttttaaagctgtctttaatatttatgccaacttattagtacgcgcacaatttcaagaagttgctccagaagaattaattggcatagccatcattgatgaaattgatgttcaccttcatatttctcttcaaaaaaaagtactaccatttttaattaaagcttttcctaaaattcaatttatcgtgagtacacattcacctttcgttattacttcgacagataacgatacagtagtctatgacatttcaaatggtgaattttttgacgaagatttgagtcgatattcttatgaatctttgattaaaggtctatttcatgtcgacactcaatcagatcacttgaaaacagaaattcaaactattgccactattttaaatagtgatcctaataattatgaaaaacttcgagaaactctaaaaaatattactccatatgctaaacaacttgacgtggagtcaaagtctttttatttcaaagcattaaatcatttattagacaatcaagagttaggagaacttgatgtttaa

SEQ ID NO: 87665 - DNA, 663 bp, Acinetobacter gyllenbergii NIPH 230
atgtttaaagtaattcgatcagcgaaaccaaaagaatggacgaattctgattacacagatccagcagtagtcaaacaattgaaactagatttcttatctaaatgttatttatgtgaacaaacagatttcggtaatgtaaatgtggagcattttgtaccccatctcaacaaaagtgaagaattaagaatagattggaataatctttattactcatgctctcactgtaacggaattaaaggttcaaggcacaaagaattacttgattgctgtaacgaaaatcataatgtggatgttgctattgctttacaagccccaagcgtacctaatggaaaaattgtactcactaatactttaaacaatgactcagatttatatgaattaacaaataaaaccatagctttattagagcaatgctacaacaatgcgaatagtggcaatcaacaagtgagtcatgagtatctaaaagaaaaaattttagaagaacatgcctatttacaaagtttacgttttcaattaaaaaatggatggaatcgacttagacagcaacaaaaagcagatctaattgaaaatattactaatatgcttcaacagaattatccattttctgcattttggaaaacctatgttcgaaatgatccctttttatctgaaattttaaaataa

SEQ ID NO: 87666 - DNA, 1170 bp, Acinetobacter oleivorans CIP 110421
atgaaaatccattctattgagttaaaagatgtaggcggaatcccttatttaaaactcgaaaatttaaattcaaaaatgaatataatttgtggagagaatggggttggtaaaactaatattttagatgctattgctgcttctttcagccagtttgataaaaatcatgttagaaaaagggcaggaagtgataaagcaataattacaataaaacatgataaaaaaggttcttcagatattcatgtggatattacagactttgaaccgaatgagtctgactattttcttcttaacaataaaaactatgaagaaaacaaacatttgatgttgtatataaaaactaataggggaattgattacaaaaaagtcaaagctattattgctgacccagactcaacgcataggatgagaaataattcttctggtgtaaaaaatgaggatatcaaagattggttgttaaatagagtgttacatagtaagcattacgatcatttaacagaaacacaattaaaaaatcttgaatcagctaaagcatgttttaaccttttgaatccagagtttaaatttaaacgtcttaataccagtaatgaaatatttgttgatactcctactggagagatttttttagaattcctttcgtctggctttaagtcaacactattcatacttttgggattaataaaagaaatagactttcgttttgataaaaatagaatagcggccaaggactttgaggggattatactaattgatgaaatcgaattacatttacaccctgaatggcaaggtcgaattatcaatattcttaaagaacttttcccttatgcacagttcttcatcgctacacacagccctcatgttattcagtcagcctttgctggagaagtgatcgcattagaaagactaaataacgaaatagttcttcgggatataccaaatccagaatacggttaccaaggatggacaatagaagaaatccttgaagatgttatggggatggcagatttaagaaccaagctttataaatcggtaaaagggagatttgatgaggcgcttcaagaaagaaatagagataaagcatatgaagcatattgtcagttagataaaatgcttcatcctaattatcctttacgtccggtattcaagctacagttagatagtcttggagaataa

SEQ ID NO: 87667 - DNA, 723 bp, Acinetobacter oleivorans CIP 110421; identical to SEQ ID NO: 86373

SEQ ID NO: 87668 - DNA, 1461 bp, Acinetobacter indicus CIP 110367; identical to SEQ ID NO: 87150

SEQ ID NO: 87669 - DNA, 603 bp, Acinetobacter indicus CIP 110367; identical to SEQ ID NO: 87151

SEQ ID NO: 87670 - DNA, 1773 bp, Acinetobacter brisouii CIP 110357; identical to SEQ ID NO: 87040

SEQ ID NO: 87671 - DNA, 783 bp, Acinetobacter brisouii CIP 110357; identical to SEQ ID NO: 87041

SEQ ID NO: 87672 - DNA, 1398 bp, Escherichia coli 907391; identical to SEQ ID NO: 86854

SEQ ID NO: 87673 - DNA, 732 bp, Escherichia coli 907391; identical to SEQ ID NO: 86109

SEQ ID NO: 87674 - DNA, 1359 bp, Escherichia coli 907672; identical to SEQ ID NO: 85982

SEQ ID NO: 87675 - DNA, 660 bp, Escherichia coli 907672; identical to SEQ ID NO: 85983

SEQ ID NO: 87676 - DNA, 1398 bp, Escherichia coli 907892; identical to SEQ ID NO: 86202

SEQ ID NO: 87677 - DNA, 732 bp, Escherichia coli 907892; identical to SEQ ID NO: 86109

SEQ ID NO: 87678 - DNA, 1872 bp, Escherichia coli 907892; identical to SEQ ID NO: 87386

SEQ ID NO: 87679 - DNA, 618 bp, Escherichia coli 907892; identical to SEQ ID NO: 87387

SEQ ID NO: 87680 - DNA, 1251 bp, Escherichia coli 908519; identical to SEQ ID NO: 86208

SEQ ID NO: 87681 - DNA, 666 bp, Escherichia coli 908519; identical to SEQ ID NO: 86209

SEQ ID NO: 87682 - DNA, 1359 bp, Escherichia coli 908525; identical to SEQ ID NO: 85982

SEQ ID NO: 87683 - DNA, 660 bp, Escherichia coli 908525; identical to SEQ ID NO: 85983

SEQ ID NO: 87684 - DNA, 1398 bp, Escherichia coli A25922R; identical to SEQ ID NO: 86854

SEQ ID NO: 87685 - DNA, 732 bp, Escherichia coli A25922R; identical to SEQ ID NO: 86109

SEQ ID NO: 87686 - DNA, 1314 bp, Klebsiella pneumoniae UCICRE 10
atgacgtttaggattttaaatattttacaagatggcaagtggcttcctatgattaattacattaatgacttggagaatgttttcactgtcattactggaaggaattcgagcggtaaaagtcgtttgctaagtaaggctataaatgccgctattttcaaagaggaaaatttgcatgttaaattttcaggttggtattctgatagaccagaaagagcaattgcaatatcgaccgggaaatttgatagatttccaactattactcatgcagataaaaataaaaatttcattgggaattattcttatcatggagtcaaaaactcagaaaatccgttcaatgaaattattaagaattttttattaacaacattagataagaataatgagaaaacaaatagagtaaggagtttagattacctcctcaaatacttaggttttggatcagatataaaggtgtcattatccttaaatattaatacggggttgataaaagagcgtaggtatgaagattttgctaaggacatgctaaaaaggactttgaggaaaaacatatccgtatcagaaaaatatcaaaagttattcaataataatatgtgggtatcttttgctcatgaagtaagggggagattaaatgaccttgatcttggctatgacgctaagaaaataaccatacaactcaattacaacgaacttaaatttgagagtttctctaagttagatagcattcacttcttattggactgggatatacttcaggtaagtgaaatttccttcaatggcttaacagagaaaaaaaggctagggttgtcaacttttagttctggccagcaatgtatgttgcttatcatcttaggtatcctgagtagcattcaaaataactcccttatttgtatagatgaacctgagattagtttacatccagagtggcagttagaatttattaaacttctccaagatgtattttcatcatttagtgggtgtcattttttaatagcaactcactccccacagatagtgtctggattaagggacaaaaatggttatatactttctctagaagataagcagttatttcaacatgattcttttatgaaatcagctgattttcaattggcggaagtttttcagtcacctggctttaaaaatgaatatcttattaggactttgttagtaattatctcaaaagtgtcgaaaaacgatgagttaaactctacggatttaaagaacttagcattggcaaacagcctcaaagagcatcttgatgagagagaccctgtaatgtatctcattaaacaagcgaatgcgttggttggttga

SEQ ID NO: 87687 - DNA, 651 bp, Klebsiella pneumoniae UCICRE 10
atgaaaaaaatcattccgcagggtaaatataaaaaaatgttcgaggattatgatcgaaaggatcatagcatatggaatgctactaaaggtgatatagttgaggttcgaaaaaccataagggaattctatttgaaagagcaagggtacaaatgtgcttattgtagaatggaaaaaaaagagtctcatggttacacttgggatatcgagcatgttttgccaaaagcatcgtatccagaatatctcctagagccagaaaatctagcgattgcttgtcgagagtgtaataatcctaaagataatcacgaaatgttatctcatccaaaatttcgtacaaaagattatcctaatgataaggaatgcttcaaaattatccaccctcattttgataagtattctgacaacatggaagtggcaatcttagagggtaagagaatttatttccctttaaatcaagataaaggtaagtatacatttatatcatgtgatttattcagattttcatataagtttgctgagtgggaatcttttgataaagcggcaatattaagttttagtgaattcttagataactgtccaaccgatgcaacacctgatgaaattaaacgtatgcttggacatataaagtttaacctgaaaaatcttgatttttag

SEQ ID NO: 87688 - DNA, 1653 bp, Klebsiella pneumoniae UCICRE 8
atgaaactagataaattatgggtaagtgagttcaaaaatctcaaaaatatcaccattgactttgatcaaaatgaattggtaacagtgataattggctggaatggagctggtaaatcaaatgttattgaagcgctagttattatattcagagacttggatttacattatccacctgctttctcatatgacctagaatatgtatgcagaggacggaagatatatatagaagctagggttaatgatgataaaaaagatcgatacaaaataaaatgtcatccaattaataaaccaaatgagagtaaaaatctcagtaataaggagttttttgaagatggagataagaaatatctaccaacaaatgtctttggttattattccggcccaagtgatcggctggctactcacttttatgaacatcagcgaagatttagagaacaattgatttaccctgaaaagttcaatctaaatgaaaatactctaccgctgcgtccgctattctatgcgcaaaaggttcacagtaactttgtattacttgcattttttttaagtgaagatgaaaaaattaaaaagtttttaaaagaaaaacttttcatcgatggtctagaatctgtaatgtttgtgataagtaaacctgattggaaaagcagtgaaggagatcctagattctggaatgcaaaaggtgttgttcagccatttcttgaacgactttatgaggcatctcttgctcctatggatataaaatttacactgccacatcctttgaagaaaaatggtgagaatgtcgatgcattgtttctctttttgaaagatctcgatgcgttaaaaaatgtaggtaatcatacttcagataaagatttttttaagttattagaaagtatatatttttctagccttatccatgaagtacagataagagttaaagttaatgagaagaatggtactaatgaacttcttacgtttagagaactaagcgaaggtgaacaacagttaataactgtattaggacttttaagatttacaagggatgatgaatctctttttctactcgacgagccagatacacatttaaaccctgcgtggagtatggaatatataaattatttagaagaagtggcaggattcaacctcgatagaaaggaatcacaacaaaatgatggttctaaacaaaagattgaaaatagtcatatagtgttagcaactcacgatccggtggttatttctacactaaaacgtgaacagatacagattatgaaaagagatgaaaatactcttgaagtatatgctcattctcctctttatgaccctaaagggatgggcttttcaggtgtgctgatgagtgatatgtttggtctcagatcggacctggatcctaaaactttagaaaaattagatgagcatgctatattacttgccaatgagaatcgtactgctgaggaagaggttcgattcggtgaattgaaagaagagttagatatgttaggctttttagaagcatattctgatccatatttttccgcctttgtaaaagcttggggtagaagcgaaagaattgaccaatatcatcaggtatctctaactgaaagtacaagagatgaattatcaaaaatgagcgatgatattctttctgagttgaagcgtgaagaagggaactaa

SEQ ID NO: 87689 - DNA, 924 bp, Klebsiella pneumoniae UCICRE 8
atgcattttatcgacaaagatgaaatagagattagattaccagatgattggcagaataaaattgatgaagtttggttatacgtgcaagaaaaaattcaagaagctgatgctgctgttagggttaaagctgctcaggaacaatggtctgatgataaattatcatgtgagttaaataaatcgattgcaagcgcgcgtaagaaggctatcaacgctaaaagtgatgtttgggggcaacttagcgagatcctctcggagttgtcatttggcaagtgctggtattgtgaatcaacggaacttagatcagataatccaattgatcattttaggcctaaaggaaaagttgctgaatgccctgatcatccaggttattggtggttagctttcgattggtcaaattatcggtattcttgcacatattgtaactctcgtagagttaatacagatactgctggcggcaaacaggatcattttcctattcttcccccttacacttggaataaaagaagagaagatgagtttatagaaaatcctatattacttgatcctactgatattgatgatgtgaatttactaacattcaatattaatggtgaagcatgtcctaatgttgatgataaaacatcacctttgtataaaagagctaaagaatctgtggatttgtaccacctaaatcatactcccaccaaaaatgcaagaaaaagagtatatcaaactgtaagaaggctcgtttcgaatataaatagtttgagcgcccagaacttcgaagcaaacaaattaactataaaagatttaaaaacgcaactacataagatgattagggtttcttgcccctcgacttcattcaattctgcagctagaatatatctccgggagttttataattctcatgcttgggttaaagatatgcttgataggggttattaa

SEQ ID NO: 87690 - DNA, 1722 bp, Klebsiella pneumoniae UCICRE 7
gtgaaaattgattggttacgattagaaaacttcaaaaatctcacaagttttgaggtggatttttccttaaagtctgaacgccaagttattattggtcgcaatggtgtcggcaaatccaatatattggagtccatcgcatggattttcagagacttagatctttgtgaagaatctgactttgagtatgagattaaatatcgatgccgtgatcactatgtaaaagtaatatctaaagggaaatcgagtaaaaagcctaggcgcaaaggtactcggcgagaaaatattcagcgcttcaaacgttcttattgggtaattgaaaacgctgcagatattgaagataaaagtagcgaagaaattgaaaaattatttgtagagttaaaagagactgaatttaaccgccgcaaccaagctattaaaaacgaaagcggcgtttatcaatttagagatgaaagactgcttcctgattatgtttttggttactactcgggaatatcggcacgctttaatgaagcgttcgaaactcacgagcgcgattactattctgaccagaaggatggggaggaaatgtcgcttagaactatgtttttagctaagcctcaccatagtcagttttcattattatctttttttgctaagcaggatgaggctactgcaaagtttttgttggatgagttcgacatagaaagcttgtcttcagtcttgtttacacttcaagaaccctattggagtagttcgactaaaaagagcgaactagaaaagcagaataaagataggcgtttttggggggctggcggaaatgttgagccattcttaaataaattatttagtcttgcctatgcaccaatggctgggaccgaaagaaaagaaatatcaataaatcgaacgactaacttagaaacaagatattgttttctaaactctcaggactctattaataaattagctgacgggttagagccaaaagaatttttcactcgcttagaaagttctattttcagtgatattttgagcctagacggcagcggattaaagatccgtgtgaggcttaaaggtgttaaggatgcgattactttcaaggaaatgagtgaaggtgagcaacagctgctcactattattgggcttatgcgtttcactcagcgagatgaaagtctctttttgttagatgagccggacacacaccttaatccagcgtggtgcttggatttgttaaaaaacctcagaacatatggtgtcgaccctaaaaacagccaaattttaattaccacacacagcccacttacttttgcaggtttagacaagcacgaagttgtgattgtggacaaaaactcggatggtcagatttatagctatcaccctaccaccgctccaaaggggatgggtttccaggctattctaaccagtgatttctttaagttacgctcgaccctggatagggatactctgaatttgcttgatgaaaaacgtgagctgggtttaaaagaagaaaaaaccgacgaagacagacagcgacttgatgagctcaacacaattcttggaaaattagatttttcacatgcagcacgtgatcctctatatctagaatatatccgcgcaattaccgaagcacaaaaagagtttccagaaattgcaaacgcaactcctgatcatgtttcttggcaggttaggaaacggatttctcttgatattgctaaacggttatcgagaaaaaaggaggacgtttga

SEQ ID NO: 87691 - DNA, 810 bp, Klebsiella pneumoniae UCICRE 7
ttgagatacatagataaacgccagctgcgtagattggtcgatttaacagacattgatttggcaaaagcacaaattgctgcattaccagcagatcaacgtagtgattttattgatgccaacggtgatcgttggtcaaagttaaagccagctctgtggcagttgggcaacttaaaatgttggtattctgagtcggaactacaagttcaacaagggcacgttgaacacttcagaccaaagaagaagcctcacggtcttaatggagttgcacactctggttactggtggcgagcttttgattggactaatttccgactatcacaccctacatgtaacgttcgaattactgattatctgacaggtcaaattgttggaaaaggcgcgtattttcctcttaaagatggtgatgctagagctatcgacgaggcaggtgagcggaatgagaatcctgttcttctcgatccaacagtgattggtgattgtaaattaatttgtttcgatactaatgatggtaggccacttgctactttttctgtacagcaagatccgtggaagaacaaaagagctattcaatcaatagcgttttatcatctggatgaaggaacatggaattatcaacggaaagacttgatggatgaggttggtattctttgtgacaggttaattgaagccgaaagctcacccaatagagatcaagcacaatgtgatcagttagctgatgaattggttggttatattaatgagcatcaaccgttcacctcagcatgtactcaagtaattaaagaaaaagggttgcttgaggcagtaaattag

SEQ ID NO: 87692 - DNA, 1593 bp, Klebsiella pneumoniae UCICRE 7
atgaagcctatagaaaacaataaattcattaaacttgcctctaaatcaagaaaaggggatattgactcctcctacgagttatatacactttatcagaccggaaaatttttagagcaagatattcataaagcacaggaatatcttgatttggcacttaaacaatttagccaacaaaaaataagattcacacaactgtctcttctgaattttaggattatagatcgccttaatctagatatgacaaaaagtcaaattcaagtacttgttggaaacaatggtgcgggaaaaacaactgtactggatgcaatttcttatagtctgagttggcttatacaacgcattgtacacaaaggtggaagagccagagacatagaaaaatcggatatcagtataggtaataatgatggttatagttctattatagccaagattggtctcaaacataattataactcaacacttgagttatgtgaagttgaagaaggaagtattgtaaacaaaaagagttattattcatctttcactaggttaggtaatttgtataaactagcttgcgataaagatgaacgttttgaactgccacttctagcgtactatggagtgatgcgctctacagatatcaattcaaaagatgtatctgactttgatgaaacatcagccatagaaattagcaatcgttttgacggatataataatgctcttactgggaaagcagactttaaagctttctttcgttggtataaacgtcttgatgacgtagttaaacacgaagcaacttcagcatttcaaactgatcccaaaatactcgcatcactggaaacattagcattaacggattcaaagtctcgtaaactactagatgatcttatccttagtcttaaggaacgccaagagtacgaaggaagcagtagcgctaaaagaaaacaaacaatcataaataatgctgtttcgttatttatggaggattttagtaacctaaatgtagagttgaaaccaacactacatctttcaattgaaaaaaataataaaaaaataaatgttcttcaactatctcaaggtgaaaaatcacttttggccttagtccttgatatatgtagaagaatgatggtactcaacccattatcagaaaacccgctactcactgcaggtattattcttattgatgaggtggatttgcatctacacccggaatggcaacgtaatatcttgaaaaacttcagtagagttttcccaaattgtcaattcattgtttcgactcattcacctcaagtgataagcgaagtaaaacatcatcaaatttgtatactgggtaaagatagcaatggaaactttaatgcatccaaacctgaacaatcatatggactgacatcaaatgaagttcttaatgaaataatgaacactggctttcaaaaactagatcgttcacctgaagtacagaaagaaattgatgatgtattcatgcttatagaggaaggtaaaatagaagaagcgaaaaataaaattaataaaatagaattagacctcaatggagaaatacctgaattagttagtgctaaatttgacatcgaacttcagggatgggacaaagaatga

SEQ ID NO: 87693 - DNA, 630 bp, Klebsiella pneumoniae UCICRE 7
atgagagagatacgaaaaggatctgagccgcgcttactcacagaatatcgttccagagggggagaatatgatggacctaattttacacctgtaaaaaatgccatcagatcatctttgttgacagagcagggatatctctgcgcctattgtatgactcgcataacggccgaaacaatgaaagtggaacattgggcatgccaatcaaacaacccgcgactccagcttgattattcaaatctgttaggttgctgcatgggatctgaaggagaaaagttcactagtcaaacttgtgatacaaaaaaaggtgataaaccattaaaatataaccccagcaaacaacaagatcaaattaataacatcataaaatatgatgggcaaggaaagatattttcaacagatagagagttctcggcacaaattaatactgtactcaaccttaacaaggtcaggctagtacaaaacagatcatatatacttacatctgtacgccaaaaactttccagtaaaacgggtaagcgcagcagaacagaaatcaggcgttttttagatgattacctgactctcaatcaagatgggcaattgagagaatattgcgggcttgttgaatactacctcttatcaaaaatatga

SEQ ID NO: 87694 - DNA, 1626 bp, Klebsiella pneumoniae BWH 30
atgaatcggacggttaaaaaaataaaacacggtgctgatcatgataattcgatcaaagatcagtacaaaatgtttaagtattataaagaggggatgtttgttgaagtcgactctgaagagtcttcacgttatcgtcagatgtgtcttaataacctgaaagaatcacagtttcgtttaaaaagagtaaagctggtaaactataaaggctttaacgaactatcgattaatcttgataatgacgttatcctgatcgccgcaaataatggttatggtaagacggggattctggaagcgatttatctttctctttcatggttttatcggctggtttatggttctaaccagggatggaggttcggtgataaatacatcaaccgccgagtcagtaatgccgggatgctagttaatctggaagtttcggtggggaatgacaaaaagtcctccgactatcagatcgacattgcccgctcccttggtgctttttcggttaaaagtgactatgctgattttaaagacttggctgaaatgtatatcgaatttcagaacagtggcattgtggcaccgatgtttgcttactactcagtagagcgaggtaagaattacccagatggtggattcacatctatgattgaaagcggttccagcaaactgttggataaactttacccagactcttcactgacgctttcttctaatatttttgccaactttatcaaatgggctgccgaaataaagattaaaaaaagcgtttctagcgaagatgaacagagcgaaaaaataaaaagtctcaaagagttcatctatcatatcaatcattctgatcttgacaaagaaatcaaaaaaacactaattagccagaaagagaaggaaatcgaaaccatctttagcagccagtcggcggataaattgaccaatcttgaccggatggaaaagattgtggatatgattttcgcacagggatgcgctttcattgatgatatttcttctatccagttaaaatacgatgaaaagctagatgcattagatcttgtatgtataaagcgagattgtgaaattagtgcttcctatctctctcatggtgagaagagcacgctttcattgttattcgacatcgctctgaagctgatctatacctgtggtatcgaagacccatttaatggtcacggaatcgtttttatagatgaggttgaattacatctgcatccctcatggcagcagtccctgctcagtaaattgaaaaaaaccttccctaatgtcaaaattattgccaccactcatagtcctaatatcctgaatactgttgaagagcaggcgatcaggaaaattaaacttaaggataatcgattttatattgaggttccgactttttcatatggtgcaaactcttctcaggtgcagagtgatatccaggatgttgcagcacggcccgatgtcgagccagtacaaaatcttacacgtttccgtgagatgatgaaaaacaatcaatacgacacgccagaagcacaggcccttctaaagaaaattctgcaatggggggatgctcatgacccggatgttaccaaactgaaaattgatctggaactcagaataaagcgtaatgccaaaaagattagtaaggagcaataa

SEQ ID NO: 87695 - DNA, 732 bp, Klebsiella pneumoniae BWH 30
atgagaggctttaggaaaggacggctgagcaatgacattttggacgattatattgcggtaccaggaaatgagaataatggctggaaggatgaattttataccaccctgtcttctcacgacaggaaccgtctgaaaaatgagataattaccgatcaggctggtctctgtgcctattgtgaaaaagcactcagagatgaaggtgacaacaaaccattaggatttaaagttgaacactttattcctgaaaacagcaaaactattaaagaaaagattgcggccgggcagcccgcacccgctactaactactcgctgttgtggactaatctgttggggtgttgctttggcggggaacatccgcgctcagcaagctatgataagtccctgacagataaatctaatctgagctgtgatgtaccaaaatctaataataactggtcggaattgatcctcgatccttcgcaacagcctcctgacgatggtacatggtttgaattcgatgaagatggattgatgaatgtctcggcagattgcccgattcagtatgtgactaaagcccggcaatcaatagaaatgttgaatttaaattgtgtcagattaacccgtttacggctggcagcactggagtcgattagtactattactgatgaagcggacatcgctgcattactcagcaaggatgctgcaggtatctacggtgagtttatctcgctgagaaagtggtatctggcttaa

SEQ ID NO: 87696 - DNA, 1233 bp, Klebsiella pneumoniae MGH 44
atgaaatttaaaaggttaaaaatatctgattggcgccaatttaatgaggtaagcatagactttcataacaaagtaacagtgattaccgggtctaatggagcaggaaagtcaacagtattaagaatattagctaagcatttctcttggaattgtgattttttggcaatgccgttttacgatgaagataaagggattaatgttttcactaataaacgtcaaagcaattcatattctaatgccagacatcaaataggagaaatagagtattcaaatgaaattatatcctctatatatatagaggaacatccccggactataaactatgatatagctattgaaaatattgaccgcagcattaaaggactgtttatacattcgcatagagcatcaaataactatgaaataacatccaaaataccaacgggtgttataaatgcggaagactcctataaaaaccatttacaagcatataagaaacacttagaaaatagttcatttaatggcaacccaacggtagaaatgaagcaatcactgttatccatggctgccttgggagttgggaatagctacataaagaaaaataaaaaatcagaaaaaacatttacttcattcatagaaatattaaagataactctacctaaaaacattggattcaaaaatataagatttgaagttcctgatgttatttttgaaacggattcaggcgactttgtattagattccgcttctggtgggattatgtctataatagatatatcgtggcaaatattactttattcgcaagatgcggagcactttacagcattaattgatgaaccggaaaatcaccttcatccaacaatgcaacggtcattgctaaatgatctgataaaagcattcccaaacgttcagtttgttattgtcacccatagcccattcattatttcttcagtgaaagactcaaatgtttatgcattaaagcatgatgactccaataaagttaattctcataaattggatttagaagaaaaagcatcaactgcaaataaaatattaagagatgttcttggagtttcaataactatacctcagtgggcggaagatgaattagataaaatatgttcgatgttaactgcagaaaacataactgaaaataatctaaatgaacttagaacttctttagatcaagcagggctgggtgagttttacccggaggccctttaccacatagttggtggtaaaaaaaatgattaa

SEQ ID NO: 87697 - DNA, 669 bp, Klebsiella pneumoniae MGH 44
atgattaaactaataaaattaacagagccagatatattggctaagaattttaaaaaatggacagataaacatttatcaaatatagggtcaggcataaattcaagtgattatttaaaaaccaggtactcacatgaagatataaaagagcaactaataaaagaaactaacgggaaatgtgcatattgtgaaagcaaattattgcatatacatcatggtgatgttgagcatatatatccaaagtcattggatgaatcaaaaagattcttatggataaaccttacattatcttgtgagatctgcaatcagaataaaacaaatcttgacccaaatttaaataatattcaagatccttattcaggaaatcctgagggggtaattattttctgtggctcattggttcttggttctggaattagagggttatcaacgcttacaatattagatcttaataggaagcaattgatagaaaaaagacaagaaaagttagagaaaatacttttgattttcaatcaaatatgctcagaggcattaccccaagcagcaagacaagcaatatataacgatatgattaaaaatgaaacatcagcaaaccaagaatactcatcaatggtgaaaagtacaattcgtcatgttagttatattattcctagtgatataaagcaaaaataa

SEQ ID NO: 87698 - DNA, 1227 bp, Enterobacter sp. MGH 25
atgttatgtagcattgataaaattgacatcccggttcgtttttcatccaagagagccgaaatagatttatatggtaaaagtctaattatcacgggtaataatggatgtggtaaaaccagtttcatcacacaaatatttgagcatcttaacaaagcaataaacaatcataatgaaaatgatttagactatcttaaaaatcaattaaattggtacaactctcagctcactataataggcagagatgacaatgtttattctacttatttggcagaaaaaaatagacttgaaaaaagaattgaagaattattaagtttcaatatcattacaacttcgaatgacattacggaaatacgttccttattaagatttcacgatgccacaaggcagtcaaagatagtctcacctacagaagtacctaaacattcaagtttaattaaaaacaatcagcacttcggaaatgatattgatggtagtaatatattcgaaagttatttgctgagtttaaagaaaaaccaaagctatgcaatttctttcgataagaatgaagaaaaagcattaggtatcaaatcttggttcgtaaaaattgaaaatgatctgcgctcgttgtttgaagacccaaaattaactcttgaatttaacacttctgatgaaaaattttatttaatacaagatgggaaagaaaagtatacatttcaaaatctttcttcgggattctcttcgatactaagtatttatacagatctagtaatgcgagttgaaatgtggggtgtaacgccagagaacattcagggaataatctttattgacgaaattgatgcacatttacatgtatccttacaaaaacaaattcttcgtttcttcatgaaggcctttcctaaagttcaatttatagtaaccactcattcaccatttgttgttacgtcagttaccgatgcagtaatttatgatctaagttcaaatgaacaaattattgacgtatcttcctattcatatggtatcgtaatggaagagttattcggtgttgcaacagaatcacacgcattaacggataaacttcgaaatattgaaagccttattaaaaatataaatcatagcaatattgaagaaattgataatgaaattagttcgctagctgtagatcaaagcaacatgagcgaagatgcccaagctttccttgatcgagcaaaattagaattattgaaaagcaaaaaaagaatacaagggtaa

SEQ ID NO: 87699 - DNA, 654 bp, Enterobacter sp. MGH 25
atgtttaatgtaaataggatattaccagcccctgcatctttagcagcgcaacgacgttatgatggcgaagatgtatatatagcgctagaacaatcattctataaaaagtgctatatttgcgaaacaaaatcaccattagatatcaatgtagaacatttcatcccacacatgggtgatatcaataagaaatttgactggagcaatctttatttggtctgttcaagatgcaataacataaagcttgcaaaatataaaaatctacttgattgttgtaacgatagtgtttgggataaagtaaaattacttcccggtttttctcctggtgcaaaaaacttttttattgaagctatggtacatgatgccgctacaattgaaaccgcggatttacttaatgaagtttataataatgataaaactataaacaaacgttttactgcgcgatcgttacgttcagatgttgttaagataacacacaggctaacaaaattaatgacaatatattacgatgagaactccaccgatgctcaaagagaaaattctatcgaggatattaaagtcatgatcagacgttcttatcaatactctgcatttaatcgctggatcataaaagatgatgctgaactagatgaattattgtctccatttatggactaa

SEQ ID NO: 87700 - DNA, 1176 bp, Enterobacter sp. MGH 23
atgaaatttgaatcaacatcgttagtcaacattatcacaggaaataatgggtcagggaaaagttcaatattagctgaaatttcaaagcaagaatacgttacaggaaaaaatgtaatatgcttatcaaacacatcaaccaataaattcccaaaaataaaaagccatcgttttcacgttcttaatcagtcatctaacacacttaccaaagcattaaaaaaagtagtagtaagcaacagtcacgatatgatcgggtcatcgcacgcacacattttcccaagagtgttggcatatttagatttcaatgagcaactcacatttaaatttacaatctttccttatgaaagtttcattagaaaatttcaatccgagatgtacaacaatgagttaatcggtagtgatatcgatgaaataacgaatcacttaagaaatctaatcgaaataaatgatgacactgctaactttactgatcatggagtgaaaagctctcacatactttatttggaatatgctttcacatatgaatcagaaaaaagaattaacaccattcataatcgcctcattgaactaatgttgaagcatgagcgcattctaaaaaagaaccatttaatacatgacattgaaataaccttaggtcgtggccatagtataataccatcatctcatttaagctccggtgaagcatgctacatggcaacacttgcttttatccttacatatatatcggataacagcgtaataataattgatgagccagagaatagtttacatcctcgttggcaaaaaaaatacacatcaaaccttctggatctattatattatttcgacatgagaataatattagcgacacattcaccaatgattgttataggggcggtagaagaccatagtggtctaagtgttttcaaatccgaaaatagcaccctttatccccttgaaggaaatgaaactaatattgatgaagtaatggtggatgtgttcggtgtattaacgtcaagaagcagatatttcagctacaagataaatgagattcttaatgattacaacaataaaaaaatagatataaattcagcgcgcgacaaattagataaaacaaaatcactcgggcctgatgaaagccaagtgaaaataattgaagcagccaatgaaatattaaatcaaatggtgaaaaatgcctaa

SEQ ID NO: 87701 - DNA, 597 bp, Enterobacter sp. MGH 23
atgcctaacttcacatttacagcagagaatatctctcatatccgcactgctatatccgaaaataaattcgatgacaaggtaaaggtgtgggagcatgaattgcttaaatccatgagaagagaactcaaacaatatattctttccaaccgtaatgatggtatcaaatgtgcttattgcttaaaggatttttataatgaacacaatatgaacattgatgttgaacacattctccccaagtcacaatacccagaatatacgttcacacttaaaaatttagcggtggcatgcaagagatgtaacttattaataaaaagaaatgatgtttcatttttaaaccctaacttcataagaaaaaaaccgtttaactcaaaatattacaaaatattccaccctgtcatcgatagaaaaaatcacttatctcttctggatgtccattttaatggatgccacattatcaaatatcaaacaaacagtgaaaaagcaaacaacacctacatttacttcaagttaaatgaagttgagatagaaacattgaacaacgcacaaggaatagaacaaataattgacttacttcacacatacaacctaagaaattag

SEQ ID NO: 87702 - DNA, 1239 bp, Enterobacter sp. MGH 22
atgagtaaattcttgaacagtataagtcgcagttcagaaataaaaagcgaaaatgataacattgatgttagcaacaaaaacttgatcatcacaggaggtaatggctgcggaaaaacaacattactcaacgatatatacaataaactgtcaacacacttaatacagaggaatcaccaacctaaaagtcaagttgaaaacaacataaaatttcttttgaatcaaaaagaaaacgcagttaaaggatctcaagaatatcatcaagcaagccaacaattacgatatcatcaggcggaacttgaaagggtgtggggtggtattcaattagaatttgaagatgccaataaattatctttattactttcagaagggaaaggagttattgctttttttcgagcagacagacaggcatcaattcaggctgcgaccggagctaataaaatcataagcactgacgaatccaattacttgtcaatcagcaaccaagaactaggcaatacatttgaacaacatcttgctaatttaaaaacaagacagtcatttgctaagactcatgacaataatctcaaattattcaattcaattgaaaattggttttcagagttagaaaaaaatatcgcatatctaatggaggataccacatttgaacttaagttcaatcccgatgaattcaaattctttttaacacaagaaggtaaaaaaccctacacattccaaactctatcttcaggatattcatctatatttaatattatctctgatttgataatgaaaaccgaggcttttaaaatctctccgagcgaactgcaggggatcgtgatgatcgatgaaatagatgctcatttgcatgtatcgcttcaaaggaaaattctgccgttcctgactaaaacgtatccatcgatacagttcattgtaacaacacactctccttttgttatcggttcattagaagactccattatctatgatttgagttctaaacagcatttcaaagatctctccagttattcctatgaaactatcatcgaaggcctacttggagtgcctgtagtttcagtctctttggaaaaagatattaaacgcctttcattactcatcaatgaggataatcctgatatagaagccatagatgagattgtacagaaacttcttccttatagggataaacttgatgatgaatcagctatcttcttgataaaaggaatgaatttgcttaaatgcaaagcaagaggagataaataa

SEQ ID NO: 87703 - DNA, 657 bp, Enterobacter sp. MGH 22
atgtttcctgtttcgaaaaattcagttgctcctatatcgttagaaaggagaacatcttactctgaaaaagatgtcatagaaacattatcaaaggactttcataataaatgctacatatgtgaggtcaaagaccctctagttctaaacgttgagcatttcaaaccacacgaaggtgataaaaataaaaaatatgattggaataatcttttctttgcttgcgggcgctgtaacaatattaaaagaaatcattttgaaaatattcttgattgtactgacccaagtgttgatgtattaaggtctatcaagcatgttttccccacgacagcctacgctgaacatgtcgatatagtgccaatgaacgacgacccaaagacgatagaaactgctacattaatttcaaaagttttcaatgacgatcacacaggcaataaagatctcacgcgcatatatttaaaaaagcggctaatgagacagtataggaaatttcttgacctagtttttaattacgacgatgatgatacccttccagaagagaaagaaataataggtagaaaaatcaagaacatgcttcgtgtagaatatgaattttcagcatttctcagatgggctatattagatgctcctctgcttcatcattttaagaatgatgttttctaa

SEQ ID NO: 87704 - DNA, 1227 bp, Salmonella enterica; identical to SEQ ID NO: 87640
  subsp. enterica serovar Poona str. ATCC BAA-1673

SEQ ID NO: 87705 - DNA, 669 bp, Salmonella enterica; identical to SEQ ID NO: 87641
  subsp. enterica serovar Poona str. ATCC BAA-1673

SEQ ID NO: 87706 - DNA, 1299 bp, uncultured Thiohalocapsa sp. PB-PSB1
ttgcacatcgaccgactgaagctagaacaatttcggggtgcgcgagaactctcactcaatctcgatgccagcctgaacgtattcgtgggtatgaacggggccggaaagtcgtcggtgctggacgcctcggcgatcttgctgacttggctggttaaccgtatccgatcgtcatccgcttcgggcaggcagattctggagtcggatatccagggaacggccggattttcgtgtctggaaattgccgtgaccgcgagagataggagttattcctggagcttgtgcaagatgcggcccggcgggaatggctatctattgaacaagcagccgccgccgaggtcgaccctgctagccgctacggaactcgcgggtcaaatgcaagccgatatcagcgaaggccaagagggcgttgatctccctcttttcgtctactacccagtcaatcgggccgtgctcgacatcccgcttcgcattcggaagaaacatcagttttctcttctcgcggcataccaagatgctctgaccagtggcgctaattttcgaactttcttcgagtggtttcgagagactgaggacctcgaaaacgagcagaaaatcgatctggacaatgttggtgctccgcaaggcgctattcggtaccaagacccacaactgaaggcggtacgcacggctttgtcgcagtttatgcccgagttcgttaactggcgggtgcggcgcaacccactccggatggaggtggacaagagcggtaagcgtctaaccgtcaaccaactttcggacggcgagaagtgcctcatggccatgatcggggatctggctcgtcgtttggctatcgcaaaccccgtgcgcgacaacccgctggagggtgaaggcgtcatcctgatcgacgagatcgacctgcaccttcaccccaagtggcaacggatgttgttcccgagactgacggaggtcttcccgaactgtcagtttctgatctcgacccattcaccccacgtcatcacccaggtggagccgaagaacttgttcctgctcaccatggacgacaacgggctcagcgcgcttcgacctgccgagtcctacgggaagacggttgaacgggtgctcgaggacctaatggggctggagaccacaaggcccgatgaggtcaagcaggccctgcgggatatctaccagcagatcgataccggagcgctcgcagccgcacgcgaggcgatcgccgatctggaacagcggatcggcgatgatccggaactgacaaaggccggcgtgctgatcaagcgcaaggagctgattgggaagtga

SEQ ID NO: 87707 - DNA, 492 bp, uncultured Thiohalocapsa sp. PB-PSB1
gtgaagtacatccagaaacgacaggaaccccaagctttcgcggactggaaggcgcaagagaataacaactggcagccgacctacaaggcgctgtctggcccacccaaggccgcgctcaagcaggccctgatggcggagcaaggcgagatctgttgctactgcgagcgtcggctgacctgggacgactcccacatcgagcatttccgtccacagcacgacgacttggtcgatccgttggactacggcaacctgctgtgctcctgtcagaaccgcatccaaaaaggcgagccgcgccactgcggcaacctgaaagacaagtggttcgatgacgccctgttgatctcgcccctggacccggcttgccaggcccgctttcgtttcagcggagacggcgagatcaagccgttgactgacaccgatgccgtcgctgaaacaaccatcgccaagctcggtctcgatatcccaaagctgaacgcgttgcgtgctccttaa

SEQ ID NO: 87708 - DNA, 1317 bp, uncultured Thiohalocapsa sp. PB-PSB1
atgagcgaaaccaaccaagcggtctatctgagctccgtttccgtggcgaacctcgcgtgcttcggtccgcggcaaaccttggacctaaccgttgctgatggacaaccggcgcgctggactctgatcctcggcgacaacggtaccggtaagacgacattgttgcaggcgatcgcggggttgacgcccgtggccaagggcaatcagagctcgccttggatcgtgaattggcccccggccttttcactaatgcgtggacagtccaaggacgccttgacgattatggccactttcctgatcggaccccgattgcatgcccagtcagttgctcgcaagggttttgcagccagtatcgcaatcgatcccccagggagcccgagcgactttatcgtcagaaacgctggtcgctaccagcaaataaacaacttcctttgctacggctatggagcgacacgccgacctggtgctgccagattgggctggcgcgaactgctggagttcgagtccgccaccctattcgacgaccaagagcagctgatcagtccgggggagtggttgttgcggatggactatgcagccgccaaacaggccgctggggacgattccgagtacggcgcacgcaaggagcgagtgaaaaagctgttgatccgcattttacccgacgtcgaagcggtcgatatccaaatccacgacggacccggtgccgaggtctttttcaagaccgcctacggcaaagtcccattcgagcgcatgggccttggctaccgcaccatgacagcctgggtgatcgacttggcggcacgcatgttccggtgctggcccgatgccgaggatcctttgtcggaacccgccgtggtgctggtggatgagatcgacctgcatctgcatccatcctggcagcggcacctcatgggctggctgtccgagctgtttccaaacacccagttcgtcgccacggctcatagcccgctgatggttcaggctgcgcaggatgccagaattgcggtactcaagcgtgagggagatcatgcggtggtcgaccagtcgttctcgtcggtgaccggttggcgggtggatcaactcttgaccagcgacctgttcggtctgccgacggcacgtgcggcacgttatgacgagatcatcgccgagcgcaccgcgctgctgtccaagtcggcgctgtcggacgcggatgagcaacgcgtaatcgagctggatgcccacatggccgctctgccggccggcgagaacgcggtggatatcgaagccatggacattatccggcgcgctgccgatgcgctgaaacggggaggtgatggctga

SEQ ID NO: 87709 - DNA, 561 bp, uncultured Thiohalocapsa sp. PB-PSB1
gtgtcgcacattgcctacggggatgtggagcattttcgaccaaaaggcgggtttcgccagcaccaggacgacgcgctgggccgccccggctattactggctcgcctacgaatgggagaacctgctgttctcctgccaactctgcaatcagcgcttcaaaaagaacctgtttccgcttgccgatccggccctgcgggcgcgcaatcacaaagataccctcgggcgggagacacccctgctggtggacccgtccaacgaggatccgtcgcagagcatcggctttcgcgccgaggtcgcttatggactggatcgggcagggcgcggcgaacggacgctcagggctttgggtttgaaccgcatcgaactggtcgagtcccggcgtgattacctaaaggatctgcaagcttttcgtcaaatcgtcagcctcgcggaggccaagccggacaacgcaccacttcaacaggcagcgcaagccgcagaacagcgattgatgcgggcagtccaggactccgccgcgtatgcgggcatggcgcgctccatgatggcagccgatggcagctga

SEQ ID NO: 87710 - DNA, 1146 bp, Enterobacter cloacae S611
atgcgtattaaatgcgaaagtttctctggcgtggtgtgggacagaacagaaaagcgcgataaatccaaaaaaacgctcaatgtcattccacccgccgtcggtttaaaagccctcaacgaacatgttgatacgtttatcaatgcgcacaatgagggcgaacactatacgttgccggttttcatctattacggcaccggacgtggtgtttttgatgttcccatgcgcaaacgtgactttaaaagcacatttacccggttcgaagcgctcgatggcgcgcttgaaagcagaaccaacttccgccgttttgtgcaatatttttacggccttgaagagagagaaagccgcctgcaaagagagcagcgctcctttgatattgaactgccggaattgtcagcaataaggcttgcgataaaacgtctgatgccgcagttcagtaatatccgttctgttgaaccggcggggatcatggttgactgggaaaagcagtatgttgcgcatgactctgatgccgacagccaaattaaactcacgccattacctgaaagcagcaatataaaaaaatcggaaatacatcaattaaagatcgaacagcttagcgatggataccgcaccacccttgcgatggtgatggatattgccgccaggttggcagaggcaaatccattttcatcagacccgctggcctgtgaagggatcatcctgattgatgaggttgatctgcatcttcatcctgaatggcagcgtgagtttatgccgcggctggttgatgttttccccaaccttcagttcattgtctccacacactcgccgtttattctgcaatccgtcaaagagggcgagctgatcgacctcgaccagttcaacgtaaaccacactcccgacctcgggaaagagatgagcgttgaagatatcgcgcaggagtggatgggtatggataacgtgcagcgtagcgcactgtttaacagacaagttgaggctgcgagacgttattacgccctgttaaatagcggtaagtctgagagcgatcctcaagtcgcagcgttatcagaggaattagatcggctggaaacctattttggggataatccggtctatgtggctttattacgggctgaacgcagaaaaagaattaaggaggcgaaataa

SEQ ID NO: 87711 - DNA, 615 bp, Enterobacter cloacae S611
atgaggcccgttgaacgcccggcatataccggcccggcggtgacacattatcaagcttatttgcagccattgattgaggctttcggcacttactgctcatattgtgaacggctggataaattcgatgtggagcatgtggcgccaaaatcacttaaccctgcgctggcaaccacgtggagcaatatgttgctgggatgcccgcgctgtaaccgcgatttcaaaagaagcaataataacagccggttgaattatgtatggcctgacacgcataacacctacaagttactgaaatactggcctgacgggcgcgtacagcccgcttcaggtcttgatgaagatatgcatgagtatgtagtgaataccatcaacctcgtgtgcctggatgattccgcgcaaccacaaaaccatttaaaccttgcccgccgggcggcctttaatgttgcagagctatttcttgcccattacgaaaacgaaaccatgtctattgacgatgtgctgacgggagcgacgcagggacactggtcagtgtggttcactgtatttcaggcacatccgcaggtgctcgcggcgctggaaacgttgcatcctaataccgctattcatcgtccttattag

SEQ ID NO: 87712 - DNA, 1512 bp, Shinella sp. DD12
atgtatgcgatcgatgacttccagttgctggaagcgcgcactagccaggtacaactagatacgccttggcgtagcaagcgccactattttgatccaaatgtccgctttatcgacaggtcacatcagcttactagcggtgcgtcggagcacatcacagctcttatcggaaagaatggtacaggcaagtcgcatctactgagttcaatcgtgcagacctttgtgctgatcgagcagatccaacgaaagaagaagcgctcgatccgagatgttcccctagaacatctgtcgtaccgaatcgacggaaagcactgcgtagttcagtggtttgatagtccgcgacgattagagtgcagcgtggatggcgttgctgtagatgtgcgctggttgccgataccaaagcgcgtggttgctctgaccataagtcctttcgacaagttcccggttccgcgttccgtgcgcaactctatcaagccagcggagccgtcgatttatgagtatctcgggctccgcgaccagttcggtaaggcttccatggagtcacttctcttcaggtccctaaataacctgttcgaggagagcgagaacgaaccgctacgacgtatcaacatcggctcggtcttcgagtttctcggcctggaaccgtttctgacggtaatctaccggatacggatatcgccagatcttcagaagcgtctgcagtctggtttccgtggtgacatactcacatatctcaatcgctccgacggccggaacgtcgaagagttccttcgcggagatatggacctaacaacccttacgtccctgttggcgctggccgtcgagaaatctgaggacggctttgtcaggacgactgccgatttccgtcacggaggcaatctggatgacgcgttcagggcgttacagccattgcggcgagccgggctgctccgcctttcgaatgtcgaggtcaagcaggtcaacggtccatactcgaatctgaggcgtgctagttccggtcaactgagcatgatatcggcacttcttgcactggcgtccgtcatcgacaacgcgagccttgtcttgatcgatgagccggagctaagcctgcatccggaatggcaggtcgactatgtaaaccttctctcgaagactttcgcgcgcttcaaggggtgccacttcgtagtcgcgacgcactcaccgatggtcgtgtcccagctcccgaaacatgcgaaccttataactctcgaccaaccgtctctccctccgtcggaaaagataagcggtcagtcggccgactatcttcttgcggaggtgttcggcgctcccatgcccggtaacctctatattagggaacgcgtggtagaagcccttggcctcattgcggagggccaggcaaatagtcgagcgtttcagaccgttctggcagacctcgctaagatcgtcgacgttgttaggcctgaggatccaatcaaatcgataattggcgacatctccgaagtcgctcgcgtcgctggaacgaaggcgctgaaatga

SEQ ID NO: 87713 - DNA, 639 bp, Shinella sp. DD12
atgagaccggttcagtactcccgggccagtcaggcgattgtggacgctttcgaggccagatctggggatcagcaagtaggttcctattggggtgacgacgaggcgtccgaggttcgtaaggaaatcaaggaccactacatctcggagcagaagcggagatgctgctattgcacggtcctgatacccaccgatcataacggggtctgggacggtgaacacgtaatctctcggcatggtgccgcgcggttcatgttcaagccggagaacctcgccatttcgtgcaaggactgtaatggcgccaaacgcgagaaggaggtgcgcaggaatacagcaagggtcagcttccccgacaaatcagaacactacctgatcgtacatccacatttcgacgaatatccggagcacatccgctgggtaggcaacgtcgtttacccgacatcgcgaaagggcatagcgacagtcgcaatgtgcgacctccaccgatacggtctgaacgaggctggcgcttcagtcgttccaacacatcatgcgatggatcatcaaatcggggtgctgttaaatccgcaagcggatttgacagaaatgaagctcgccatcgctgccgcgaaatcgtatctggaaaccgtttcacaggaatga

SEQ ID NO: 87714 - DNA, 1398 bp, Escherichia coli CE418; identical to SEQ ID NO: 86108

SEQ ID NO: 87715 - DNA, 732 bp, Escherichia coli CE418
atgaggcatgtgatcaaaactcaacgtgggaccgttgccttactgaccgcacatgaaaacccaccacaagatgctgatcaatcaaccaggcgctggcgaaatttcagaagagataaagccgctgtaatggtccagctcattaacgagcagtatcacctttgttgctacagtgaaatacgctctgatcttcgtggtcttggttatcacattgagcacgttgagaataagagccagcatccagaacgtacttttgattatcagaatctcgctgccagtgcattagattcaggggagaacggcggtttatcttccctgaaaggaaaaaatgcttttggcggtcatgcccaaggaaaacaagatgttgtagatatggcaaaatttatccattgccatattcgcgattgttcccgttattttgcttacctttctgatggtcggatagttcctgctgatgagttaaatgcacaagaaacggagaacgcgcaatacactatcgatctactgaacctgaacagcggattccttcaaacggaacgtcgtaatcattgggaagagctggagcagctttttgatgaacacattgaaaaagattgggatttgcagcaattactccagcttgatttggttccaacaccagaccataaactgcatgaattcttcagcattacacgccagtttttccagcaagaagctgaacaggtattacagagccacgccccagcattaatttaa

SEQ ID NO: 87716 - DNA, 1425 bp, Proteus hauseri ZMd44
atgaaaattgataaagtaataataaaaaactttcgttgttttgagcaacttgaagtcacttttcatcctcaaatgaccgtccttatagcacctaatggtgctggaaaaacaacaattcttgatgctgttcgtattgcgctgtggccttttgttaaaggttttgatttaggcagtcaaacaggtaaagctgcaacaatacaaattgatgatgtccgattaaggcgccttgatcaaaacatggaacctgccttaccctcagaaatagaggcattttctaatcaaaaagacgatatattacctgcatcttggttacagtttcgcgaaaaggtaacgccgaaaacagggactaaaggggacaaacttactacagtcctgactaatatcgctaaaaagtatcaaagtgagatttataaatcttctaaaattgctaaagagtcccttactcaagaaaatactaacttgcctctgatcgtgtatttagggactgggcgattatggtatcaaggacgatacagttcagaaacacaagataaaaaactggataacagtgttcactctcgtttttggggatatcaaaactgtttaactgccacatcaagttataagcaatttctgacttggtatagttgggtctatcgtagtcacagagagctacaaataacacaattagagagtcaattaacaccacaagatgaagtcgcccaaaaaaaattttctgctgcaattaacgttgtgcaaacttctattaataagttaactcaaaagctgacaggctggcatgatttacaatatagagccagtatggggcaacaacttgttatgttgcatcccgagcaaggttacataccgctttctttattaagtgatggtttacgtaatatggtagcaatgatctcggatattgcatttcgctgtattaaattaaacccacaccttggtgagatggcggcagttaaaacttcaggtatcgtgctcattgatgaagtggatatgtttctccatcctacttggcagcaaacggtactatcatcgttaatggaagcattccccaatattcagtttattgtgacaactcatagcccacaagttattagtaccgttcattcggattgtatccgagtgattggtgaggatcataaaggtgaagcgatcgcatcaaaaccacttgctaatacatatggtaatccaagcaatcaagttcttgaaagtgttatgcatgttgatcctcagccacccattaaagaaaaagagatgttaaataaactgactgagctgatcgatcaaggagaaagccatactgacttagttcaatcattgctgaatgagttaacgtgtcttttaggtaaatcccatcctcaactgcaacgcctacaaagaagtattcgtaggcagaagcatttctctgatttagaagggaagcaatga

SEQ ID NO: 87717 - DNA, 714 bp, Proteus hauseri ZMd44
atgagattcatcaaacagtcaccattgaatgtatatggattaacgcaagcaaatgaaaatccaccgactatacaagcagagtcaacaagccgctggtcatcttttggctataaaacggaagttttacaaaaattatgtaggcaacaatgtcaattatgttgttatagtgaggtaagagcggataaactcggattggaatatcatatcgaacatattgaaaataaaagtcagaatccaactcgcacatttgatgaatcaaatcttgcagcaagtgtatttagtagcgactgcctcaaaaaattacaaaaagaggacatatttggtgggcatactcttgcaaagcaaacaagtgttgatataacacgttttgtatcttgctatcagaatgattgtgagcattactttgcttttttatctgatggtagaattgttcccaaaaaaaatttagatccaaataaaaaagacaaagcagaatatacaattaatttattgaatctaaactgccactttttaataaatttacgaaaacaacattgggatgatttagacgaattatatgaagagcatttggagaaaaattgggatcttgagcagttatgttatttagagttggtttcttgtgataaccaaaatggtctgtcgccattctattctttaactaaacagttttttggcaaagttgcggataaagtcatacagcaacaaatcaattaa

SEQ ID NO: 87718 - DNA, 1320 bp, Mesorhizobium sp. L103C131B0
atgttcggtaagcacgcgggagagatcatgttccttgaaacgctcaggatacaaaatatccgatcgattgcagacatagcggtcgacttcgcggatcgttcggtgtccgaaccggcagttcgcaaatggtctctattggtgggccagaatggtaccggaaaatcaaccattcttaaggctgccgcgttgcttctggccggctcggacgcactacctgacctggttcgggatccgaaggagtgggtccgcaacggcgagagcgctggtcgcatctcagggcgccttcgcacccaagactgggagccaagagatatcagtctcgacatagtgtctgctgacgggcgcagcgatatcttgaagcggaatgatgcgggtcttgccgcgctggaccaggcactttcccatgcgtcccagaattatttcaccgctgcatatggcccctatcgccgagtcagcgacgatagccgggcacttagtacaggtcagctacctcgtgcgaattgcctcacaacgctgttcgacaagaatgcggtagtctacccgctcgcaacctgggcaatgtcactggactatcaactgggggaggacgggcttgggatcgttagaaaagcgctagacgatcttctccctggtatccagttttctggaatcgacaaggggcaaggcagactgctgttccagacggacgatgggatcgtgccgttggaccagcttagcgacgggttccagaatgtcgcggcgtggatcggcgatcttctctatcgtatcactgaggcgttcgctcatcgccgcgatccattgaaggcaaggggcctgcttttgatcgacgagatcgacgcgcatcttcatccggcctggcagcggcggctgcgcgaatttcttaccacgacgttgcccaatttccagatcgtcgcgaccacgcactctgcactaacactacagcaagccaagcaggacgagacgatcattctctcgcgtgacgcaaatcggcgcgtcttggctgcccctttccccggcgatccctcaaagctgaggctccatcaactctacgaccttgcctttcggattagctctctcgacagctgggagattgagcaaaataaggagatctatcgtgatctctcggcgaagcctgcagcggctctcacgccagaggaggtttcagcactcgagagcgctcggcagacacttgagcttgtgcccgagtccaaagtcgatggtttgggcaatgaagcacttgagagttatttcaccaagctcagttcggcggtcgatgcactcgaacggagcgcccctggacaagtacgggcagtcgaatga

SEQ ID NO: 87719 - DNA, 834 bp, Mesorhizobium sp. L103C131B0
atgattcagttaagccgtgatcgtgccgcggtgccgaccgcgtttctcgagccaggctgccgcgctaatcttctcgagctctatcgcgccgcgcgcgacaatcaactcgatttgaaggccgtcaaagacaaactcttttcctcaagtcgctggggaatcgcgaagcaacaactcgcagtcgagagtgcgggaaagtgcgccttctgcgaaagccctacatcagccgcctattacggagatgtcgagcatttccgaccgaaggcaatctactggtggctggcatattgttacgacaattatctttacagctgccgcatctgcaatgggaagaagagcgacaagcatcttctatcaggtaagactgcggctgggccggtcgttttgccggacatgaacgacacatcgctattggcccttgcggcgactgcatcgccgcagccaagtgatgtggaaaggatcacagcactagctgcacagttgctcggcgaaagcccctggcttcctcacccctacgatgaagatggcgagactatctttacttggaaggaggacgaagtgctcagggaagtgaggatcgctgcgcggccggggacggcgcgtgcggctttggccctgcaggcggtcgagcagatactcgacttgaatcggtccgaattgcttaccgcacgctggcaggtctatacgcaaatgaagcggctgaacgaccttgccgggttaggcgatgccgtagtgcgggccattgctatcacgggcatcaaagaggccatgaatggccgttacccttactcgggaatggtccggtattacgggcgtgagcgctggaatctaatctga

SEQ ID NO: 87720 - DNA, 1170 bp, Mesorhizobium sp. L2C054A000
atgcatataaaatctattgtaatcgaagatattggcggaataaggcacttgtcgataaatttttcaccaggaatgaacgtcctatgcggcccaaatggaattggtaaaacaacaatcctcgaatgtgttgcacattcattcaccaccacccagtcgcaaattctgaagcggaacgcccaagcatcagaagggtcggtttccataaggctcgacatcgatgaaaccgagacaaatcataagttcacgttaaatgaattctcgccagttaagaattctagtgtcacaggactccacaattttgcgaacaagctgctttccctaaaagtgacacgctcgctaaattatatgcaaattgacgcaattagaacagatcttgagcgacccgttcacattatgtatgaagaggccaagaatgggataaacacctacgaatttaagaattggtttgttaatcgtcacatgtggtccaagcacgagaattctcttactgagcagcagatgtccaactaccacctagctgtaaaaagctttagcattcttgataaagactaccaattcagccgcattctcgccgattcaaacgaaattatgttgaatagtcctcgcggggaaattttctacgagtacttatcttctggattcaaatcgactttgtcagtcatattcgggatcataaaagagatagaatttaggttcaaagaccctcatgttaaggctgaagatttcgacggcgtaatactgattgacgagctcgagttgcatcttcatcctgattggcaggctcgcattccaaatgttctaaggtctttattcccaaaatgccaattcatagcaaccacacatagccctcatattatccaagccgctgacccaaacgagataattgcgctcgaaggttcggacggccacactgttcagcgtcagcttccaaacgcagagtttggcttcaagggttggactattgaagaagtcctctcggacgtcatgggaatgtccgacactaggaccaagcaatttgatgaaaatctggccgaattcaacgcagccattgacggaactgacgcggaaagggcagagcaggccttctcaaaactaaacaagatgattcacccagcaaaccagttgagaaagcttttgcgcctccaactcgcttctatcaggatagattga

SEQ ID NO: 87721 - DNA, 735 bp, Mesorhizobium sp. L2C054A000
atgattcggctaacgcgctccgaaaaaccgacatacctctcagactcaaaagtgaaagagcttaccgatgaatttaaggcgactgggaactcggtctggcgaaataggcaaatagtagaaccgcttttggcttcgtctttcggcaaatgcgcgtattgcgagtgcagactgacggaggagagcaagtacgtggaggtcgagcatttcctcaacaagaatgactttcctgacctagttgtaaaatggataaatctcttaccggcatgcaaacgttgcaacgccagtaaatcaacccacgatgtgggaacgtctccaatcattaatccgtacgaagacacgccgaagaatcacgtcactatgcgattctataggatggttggcctggacgaaaaaggggacacaacgatcgacgttgtctctctcaacgatacggacagagctacaacgaagcggttccagataggggagcaactccactcgaacatagccgatattggcgataaacttgagaaatttatttccgaggaaaccgtaattcgcaggaataagcttgtaagcgcggtgaggaatcttttacgtgagtgccagagaaaggccgaatacgccgctaccgccgcaacgattgttgtaaatgatcaaaaatttctgaaagttctcgcggctatgcaaggaatggggctttggtcggccgagctgtcggcgttgcacgaagaggcgaatgatatagccctttag

SEQ ID NO: 87722 - DNA, 2412 bp, Mesorhizobium sp. L2C054A000
atgctgacgtcctcaggggtgtggtacatgttttattttgatcataagactcggtatgaagagagcgccggcgagttccacgagcttgttgccacaggctacgaaagcgtcgctcgttactacgagatcaatgctgcggagcgcgttcagatggacgttccgcctgtctggaagcgctcgctcgacagtcgtgttcttaggcttttgcaggcactgtcctatgggcggtgtcctttttgcgaacgggcaaatgtcgctcttcaaccctatcggtttcggccacctgcctatgcagagccaatcagcaagcccgaggaaaaggcgtcatacctttggctggctttccattgggacaacttctttcccatctgtgacgactgtgttcctcgccgaaaaaacttcttccctgtctctgccgatcgagcccccaatccagcttcgaccagcaccagcgacgacctgaaaagtttggcgaccttggagaggcctcttctgctctaccctggagagctggaaaatccgcaaacagcgttcatcgcgcagctcgatggcacgctcgttggaaggacaaagcgggccgccgccaccattaagcacttcgggctcaaccgaacggagttggtcgctgagcggtctgccgcgaccgagcgattgcttgtcgaactcgagaccagacgtaaggttgacgatgcgccggcaaccccattcacgcacagagagttcggcggcttcttgtatttggtgcttcgccgggttgcttgggaattcggcaggcaggcacgatccacgctcccggtgagtcaggcgacaatacaagcgtcctttcatcgctggatggagcgatccgactatcgcacgacccttcacgaagctctgcgagctctcagggaggcagggctagcggccgggagccgctcgccaggaactggtgcgtgggagccgccagaaattggaggtcgccttgagggtgtgacgattacaaatttcaagtcgctcgcgaatattggtattaagcttcctccggcacctgatgtcagcaatgaccccttgctcaccctaactggtgacgaggatgacgccaggaggctttctcaggggttcttgattctcggcgagaatgcagcgggaaagagcagccttctcgaagcgatcgcgctcgcggccatgccaagcgatcaggcaaacaacgtgatcgagcgatcagatcgcgaactcattcctcttgatccgaggtatatggagagtttggcgccgcaacctcagggcccccagcggcgttcggcggaagtccatctggtcttcgaagggggacagcagcgttccatcagcatcgacccacagcgcggggaaatcgaactccaagcggacaatgtgtttcagccggtggtatttgcctacggtgcacgcagactctttggctcacctcgccggcgcggcgcaatccggcacgtcgacacgcttttcaaaagagacgcccaaatatcgaaccctgagccgtggctcatcgacctctggaaaagggaccgcgacgcactctctgaggtagtgagtgcgttgcgccacatcattcagatcgaaggacggttcgaggacatcgacgtagaggtcgatgccagcgggctggagcactgcatgatcaagcttaagaagcagcgttccaacggtgaagaattcattatgctgcagcgcctcgatgctgcatcctcgggctatcgtgctatccttgctctcgtctgcgatgtattacaggggctgatgaagtccgagcgtagcagtagccgtccgggcaaacggcgggcctctcgtttggatcatgcgcgcgcggcgcggcgcctcagcgcgatcgtccttgttgacgaaattgaagcgcacctgcatccgcggtggaagctgagtatcatgactggtctccggcgcgccctgccgaatgccaacttcatagtcacttctcatgatccactttgcttgcgcggaatgcgaaacggggaggttgggatgctcaaccgctacctgcttcctgaccgggaggcggaagccgtggagcttgtcgcgaacttcacgaactttgagaacctcactatcgagcagttgctcacctcaaacctattccagctcttctcaaccgaccaccaacgcaccgacagcgcgctcgcgaaagctgcgagcattctcagtcgcaatccaccgtcctctaatcccctctctgggccggcagaggccgccatcgatgctttcaatgacgagatagcgagcgctcttccctatggccgctcggaggtcacgcagctagtgcaggaggctgtcgctgagtatctggcggaacgacgtactgagggcagccaccgttccgaggatttgcgccgacgcgcgaagaagcaggtgctggactacctgcgaggtggggtcggatga

SEQ ID NO: 87723 - DNA, 1041 bp, Mesorhizobium sp. L2C054A000
atgaggcgggtcgatcgagcatcggtagcggaaccggcgatcctgcagaaacccttcaaggatggccggacggagtttgaccgagcggcagctcactacgcgggcgggagcgctggttcgtacgaattcgctagatacagtgacgcatccgtgaagcaggcccttgagacactgtttcatgggaagtgcgcctactgtgagagtgcatattcgaatgtccacccagtggacgtcgagcactatcgcccgaagagcgctgtcgagggcgtgcgtaatcacagggggtattggtggcttggtatgcaatgggacaacctacttcctagctgcatcgactgtaaccgacgtcgagatcagaaagtgcccgtccccaccgaggcgactgctgaaccgttcttcatgccgggagcgatggatccttcgcaaagcctgctcgcgggaaaagcgaccctgttcccccttgcaagggaatcctttcgcgcaacggagatagaccgcaatatcgatagcgaggagcggttactgcttgacccaactcgcgacgacccccggcttcatttacggttctatgtggatcgatcccggctcgtgggacttgtctatcccgcaggcgaaacggccatccttcccaacccgcaggttaatctctcggatcttgcccttgcggcggcgcgagccggcgtcagcgcgatgggtgccgtgtcgatccaggtctatggcctcaaccgccttggactcgttcaggcacgcactaggcacctacgggacttggaatttctgtacaaactgagcgtcgaacttgcagaactttcagcagagttcggtgaggcaatcgccatgcgaaaagctagacttgccaaattgccagccgctagggccaaaactgcaggcaaagatatcgagactgatgagaaagtttgcaagagactagaagagttcgcaaccgaaatccgcagcaagttgaaagaactcatggaccccaaggcgccatactcagagttgagcggggcgtggctaagggttttactccgggacgcttag

SEQ ID NO: 87724 - DNA, 1194 bp, Mesorhizobium sp. LSJC265A00
gtgaacgtgctgctggggatcaacggcgcaggcaagagcaccatgctcgacgccatcgcattggcggcaatgtctcccgtcgtatccgaatcctcgggcttccgaccctatgccttgatacgtcgcgtagcgtcgggtgatgcgcccaagaccgcctctattgatgcggagatagtggtgcacccgcaggatattgtggaagctcccaagaagcgggtggaggtcattcgggaaatcggggcgaccgtggagcgccgaggcgacctcgaggtcctgaaagcggttcagcatccggacccactgtgggaaggtatgttcaaggaccagtcgccggctttcctgatggtgggatatggggctacccgtagagtggagaccaacgctcaagtcgatgaggcgcttcgatcacgcactcgagtgctccgatacgagcgcatagcgtcgctgttcgaggaccacttcacgctgcgcccgctctcgagctggctcccggattggcaaacgaagaacccggggcgttacaagcaggtcgtaacgctcatcaacaagctctcgttgaagcacatcaagttcacgggccggatcgagcgtggcgagtatctgttcgaggttggaaagaacctcgttcccttcagcgcgatgtcggacgggttcaaggctttcatcggctggattggcgaccttttgtatcatgtgtgcatgggttgcccgagcggcaaacggctggtggacaacaagggcgtcgtgctggtcgacgagatcgatctgcacattcatccggaatggcagcagacgatgattccggtgctcgctctcgctctcccaaatctgcaattcattttcacctcgcacagtccattggtggttggatccctcgagcgcgccaacatcatccatgttgagacgggcgccaacggaacggcgaggatggcgcgaccagatgaggagatgtacgggaagaccgcagatcagatcctaaggtccgacatgttcggcctcaactcgactcgcgccccggaatttcgggctcagcttgacaagctcgccgaggcggcgacgggtggcgacagggaggctgcgctagacttcatgcgccaggcggcgagaggcagcggcgcgacagaggcagctcgatctgacgaacggcgcgagatgccgagttggctgaagcccccttcgatggcggagaagtga

SEQ ID NO: 87725 - DNA, 900 bp, Mesorhizobium sp. LSJC265A00
atgatccgctacgccgatgcgacactagagaatgtctgggccttggtcgatgctgaaaagcccacctggcgctcggatgccgagactcgaaccgccgctatcgtcgcagccggcgccttcagtaagggcgctccttcctggagcgacatcaaggcgatcttcatgcgcctgcagtccaacaagtgcgcgttctgcgagttcccgctcggcggagagttcgctggcaaggcaacccaggacgtggaacatttcaggcccaaaaatgcagtaaaagcttggccccataagacaaagaaaccctcctacccgtttagtaccgggggtaccggtagcggctactactggctcgcgtacgacctctccaactacgctgctgcctgcaaagcatgcaacacggcacggaagtcaaactacttccctatcgctggtgcgagaggcgctgcggccagcaccgcggccgaactcaacgctatcgaacggccctacctcgttttccctttgggcgaaacagatgaagaccccgagtcgctgatcaccttcgcgggcttgatcgcattgcctgcgcacgatgcggatggccatgcgcatcgccggggcagagtcaccatcgatttcttcgcgctcaatcagcgcgaggagctgtgggaggatcgctttcgaacgatctatgcactcttcgatgccgtcgaaataacgaagacgagcgccaatcgggcccgtatcgagatcgcgaggagaagaattgaagacatgacctcgacagcaggcgcccaggcggcatgcgcaaggtctttcctgcgactgcttgagaccgatccgcagaaggcctgggacttctacgtggctgccgaggaattcattacccacaatcgaaagaagagggcacctaaactgagctga

SEQ ID NO: 87726 - DNA, 2229 bp, Mesorhizobium sp. LSJC265A00
atgaagaccgtgatcaaagttgatcgagacagcgttcctttccctgaagtactgcggcgcggaagaggcggcgcggcggacgaagaatttcaaaaggcaagcgcgttttacagcgagttcgacaagaagcggcaacactcgcgcttcgaatttaaactgtaccgccacaagaccgtaagggatgctctcgcaaaactgttcaacgggaagtgcgcgtattgcgagtcgcagattgcggcgatcggctatggcgatgtcgacaatttccggccaaagggcggggtgctcgacgcaggcagcacgtacctcccgctgcactattggtggctgacgaacgagtggaccaacctctacctttcctgctcgatgtgcagtcgagccaagggcgggagattcccgctcgaggacgaaaaggaccgggcccccgtgctcgcctcggcatctgagcttctcaaagaatgcccactcctgctggacccatgcgtcgacgatgttgagaatatcctcctcttctcgtcgaacggcacagtttcgtgcaacgacccgcgtgggctaacgacgattgaaattctctcactgaaccgtgccgagttggtcaaagcccggcagcagaccgctcgcgctgtcctcagtcagctcgaagtgctgtcgctttcagaggggagtcctgatgggcctcagatcaacaccgagatcgtcaatcgcctgaaggaaatgatgtcgcccgaggccccttatgcgagcatgtgccggcaactcgtcagtcaggcgatagcggcgaagccgaacgggatggttgctctggccttcgcaaacgatcccctcgcggcctcggtcaaggcgttcacctcaggtgaggaacgcgccgcgcaaaccgcgctcaacaaattccaggctgatcaagagagctattcgcttgaagccgagaccgagcaaaccgtcgcggcctatgtcagcacgcgagaccgtctgatcgagtctgtccggatcaagaatttgcgcgctatcgctaacctcgacctcaacgtgatcgacgggagtgaacgcgcgccttggctaatgctcttgggcgaaaacgcgaccggcaaaagcacggtcctgcactctattgctcttgcactcgtcggagagcgctatcgagggaaactcgtcgatgccttgcacctagatgttcccaggatggtgaggaacggggcagactttggggaagtcagtatcagactgacaggtgccaccgagccgcgaaccctacgcattcaagccgacggaacgatcaccgcgacggggagagaggcgcagctcatgctgctcgcctacggatcgacgcgcttgctgccgcgcaaaccgaattccgaggttcaaggcacgaactatgctcgcgtagagaacctattcgatcccttcatcccgctggttgatgcccagcaatggcttctcacggcaccggctgaagctttcgactacgccgctggtgcgatcaagaaggcgctgacagtcgacgtcgaacgcgagcttgtccgccaggatggagaagtcgggataatcgaaagggggggccttatcccgctccccaggctctgcgacggctatcagacggtgatcgcgctcatcgccgacatcctctcagtcgtcttgccggcttggaagactccggacctggcgcaaggcctggtcctgatcgatgaggtggggaatcatctccatccctcctggaagctccgatttgtcgagagcgtacggagcatcctgcctgggatgcaggtcatagcaaccacgcacgagcccctatgtctgcgggggctgcaccatggtgaagttgccgttctgcaacgcgggccacgcggtggaatccatatgcgcgccgacttgccggcgatcgacggaatgcgggtggaccagatcctgatgtccgagcactttggtctgcaaagcaccctcgatccctcgctccaatcacttttcgacgagtattacgcgcttctccgggaggacaacccgagccccgatgaccgccaacgaatggaaacactgcgcaacgatatcaatcaaaagcagaagcttggcgtgaacgaacgtgagcgccgcatgctggaggccatcgaccgatttctcgcgcgccgcattgaggtgcccgaccagattgagctcgccgaacgcgaacagtcgctcgatgccgagctttcgtcgatatggagcgaggcactggttagggtggagggtgcagcgtga

SEQ ID NO: 87727 - DNA, 1071 bp, Mesorhizobium sp. LSJC265A00
gtgatcccggtcgttcgagaccaagccgtggcggcgtgcgcggcactgaacaagatcggttcaaacgggttgaccgaactcgaacatgcgctctggttcttcggcgggatagcaccacagaaaaatcccctgccaccaaagccgaccaagccgccggcgttctccgtttacaaggaggagcctgtcagagatgcgttgcgggctctgttcgggacacgatgcgcatactgcgagagcaactacccccatctcgcgcagatggaagtggaacactatcgtccgaagggcgggtacatcgacgagcacggcgttcttaaaaagcccggctactattggcttgcagccagctgggtcaaccttctaccgtcgtgcatcgactgcaatcgcgagcgaaagcagcatcatcggtcgagggacggaaagattgtaaagagcaagtcgggcaaggccaatcgcttcccgatcctgcctggaacctcatacgccaccacgccggccgcggttgccctggagcgtccgatgctgctcaacccctgtgaggatcagccccatctgcacctgcagttcttcgccgacggatttctccagcctgcactcacggcagaagaaggggctgccggtcgaggacggtccacaatcgatgtttgcggcttggcgcgggacgctctggtgggggtgcgccgcgaatgggcgctgcggacgaaaggagcgatggaggcggtgcttcgtgcggatcggaataggcgagtctatccacacgatccggtcatggcagcgcagctgacggatgcggaaaccaatctccacacgtttgtcgatggcgaagcgccttaccacgcgatgactgctgcgatgatggcggccttcgtcgaggtccgatcgcttctggaaccatacttcaccgcgctcgaagcatggaaggcgaaccaaagcgtcggcaaccggcaagcattgttggagcgtgcgaccgccatccagcagctgcgccgcgacgcaaggttcgacgaacagcttgtcaattttctattggataaagcaggggtctccgaagcccctccgggcaagacctaa

SEQ ID NO: 87728 - DNA, 2319 bp, Mesorhizobium sp. LNHC209A00
atgcaaagaattgaccgtcccgaacaagctcctctggttctacgctcccgagtagctgacgacgcgcgtcgacggatgcgcgagttttgggccctcgaacgacagcgccgcgcgcagacgagcgtgccggcgccgagcatacaggcgaatgacgaacagctcgtcgaggcggtgagcgtgttgacaggtggacgctgcgccttttgcgaagcaagcgacaacctactcgtccatcgcttccgccctgcgggaaatgcgctgccgctgccgtcgtcaagcaacgcacatctctactatctctggctcgtcgacgcctggcagaatctctatccgatctgccgaggctgcgtcccgctggaaccgcaatttccggttgttgcctcgcgtgcgcccctgccagtgcttcggcagatcgatgtatatgtcaagaatgccaacggattgtggccatcctttccacccagggaaaacatactgctgctcgatccgtgtcgcgatcgcgagttcgaaaagcatcttttgcccaagctcgacggcgaattgatcggggaatcgaaaaagggcgagaccacggtccttgtcttcaatctgaaccgttctgatcgccgcaaccagcgttaccacgcgtatcagatgctgatcgaaaggttgacccggcttattgcttcgcccggcgtgcaaagcgagcacccggactggcagcagctgttcgacttcccagcgatggaattcggcggcacctggttccttttgctgcgccggctcgcgcgctggatcggaggttcaagcggcgttcgtgtgcgcagctcgcgaacgcaaatccgcgtgttctttctcagaatggccagcgagcccgatgccaagcagcgtctcggatccgcgctcgaagcgatcgcgcgggaagacaatggcctacgtgccggtcgctgggtggtcggatcagtttactcggttcgggcgccgatcgcttcggtccagatcaccaatttcaaggcgatagagcagctcgaactgaccttcgcaaagccgttcgagccacttgagggtttgtcctatcgacgggccccatcgcttatcatcctcggcgagaatgcgaccggcaaaagctcgatcctcgaggcgatcgcgcttgcggtcaccacaccggctgctcgcacagccctcgacgtactatggtctcgtcttgtgctcgatccctcacaacttggtcaggagcgcactcgcggcggccaaaggcgcgccaaagtccaggtcgcgctagcgaccgggcaatccgttagcctagccattgaacagggagcagcggtcgtgcagagcgagctcggcaaccagcaggtgccggtgttcgcctatggcgcgtttcgacggttcctgaccgccaccaggcgtccggccccacacaaacatatccgcaatctgttcgatggcagcacgctgtccaaccccgagccatggctgaaatcgctgcctgaagatcgcttcaatatggtcattcgaacgctgcgcgatcttttgtcgatcgagggcgatttcgacgtcatccagcgcgagcgcggcacgcgccaactgcgcatggtcacttcaatcgctgaaccgaacggccagtttcgctatagccgcgcgccgctgcagtccgtttcgtcaggctatcggtcgatgctggcgatgctatgcgacatcatgcgcggcttgcttgacccacaagtatacgagggctttgagagtttccagacagctcagggcgttgtgctgatcgacgaaatcgaggcacatcttcatccgcgttggaaggttcaggtgatgaccagcctgcgtactgcactccccgggatgtcgttcatagtcacgacccacgacccactctgcctgcgaggcatgggcgaaggagaggtggtcgtgctgcaacgcgtggctgccactgacagcactcgcgaaacccagatgccaatcgttgtggaaagagtggagggactgccggccgtcgcagatctaaggatcgagcagctgctgacgtccgatttcttccaacttctgtccagcgacgatgccgcatctgaccgtcggctcgcgcaaatcggggatctcatcagggcgaaagcagaaggtgaacggcttacggatagcgaccaacagatccttcggcagttcgagaccgacatagctaaagcgctcccggttggctcaagcgaagttcaccggattgtgcaggaggcggtcgcggaatacctccagcgtcgacgcattgccagcagtgtgacgctcaaacgattgcgcgacaaagccaaggccgaaatccttgcggcgctcgaggcactctga

SEQ ID NO: 87729 - DNA, 930 bp, Mesorhizobium sp. LNHC209A00
gtgcggcgtgtcaacagatcagcggtcgacaccccgaaatcgctgctgccaggtgctgcgggagaggaggaattggaggccgccagagcgcatcggaataatcccgatcccaaaaagaaggctttcaaatatcgcgtctacaagagagccgatatccaggcggcgctcgaggtgctgttccacggcaaatgtgcgtattgcgaaacttcatacgctgcatccgcgcctgtcgatgtcgagcattaccgacccaaaggcgccgttgccgaagacgaagcgcatgggggctattggtggatagcaatggactgggagaaccttcttccaagctgtatcgattgcaatagacgaaggggacagaagctatttgtcgtgtcggaaagtctcgctgcgtccgccgcaaatgccaaaccggttgctggccaagccggaaagaaagacagttttccgctggcagtgactggtgtgcgcgctgtctaccaggcaaccgactttactggcgagcgcgctctgttgatcgacccctgccgcgacgatcccaaggccagcctcatgtacagcttcgatccggcgcaccctgcagggctaatcgtaccaaaaggtgatcccggccagaaagtgcgcggagcaacatcgattcagatttacggccttaatcgactgaagttggttcaagatcggacccgccttttgagacggcttgagttccttggcgatttcgtacttgaactcgcagcctcgattgaggatttggaggcgcctcaagttgtcgccgccattgcagggactccggctgaaggcgtcacgtcgaagctgaggttgctgcgagacaggacgctggccgaactaaaggctgcggcagacgatcgtgaagcttattcgtcaatggctggtgcttggcttgaacaattcaaggcgcgatttctttga

SEQ ID NO: 87730 - DNA, 1338 bp, Porphyromonas gingivalis SJD2; identical to SEQ ID NO: 85892

SEQ ID NO: 87731 - DNA, 600 bp, Porphyromonas gingivalis SJD2
atgaggaaaatcattaagggaagagaacccgatgcctggctgaagtatagatgtacgccaggagctgtatatcaaagaaaacctgcactagcggatagccttttgttagagcaggggtatgtttgtgcctattgcgagaagcgtatagatgtccaagacctcagagttgagcatataaaacctcgtagccaataccctgaccagcaactatcctatagcaatatggttgcatgttgcagtggccagagtcagggctccgctcattgcgattgctccaagaaggatgaggagattacacttaatctctttaccgacgcactgtttcttagcatcagctacgagcatgacggaacaatatctagtgcaaataagtcttggaatgatgatataaatatcacgcttaatttgaattgcctttctctcaaggagaatcggaaacttgctctagaaggtttgctagaaatcatcaaaaaagaaggctatagaaaaggggtattgaaaaggctgaaagcaagatacgaggcaaaagacaagggtcataaattcgcagaatacagaggaattatcttatactacatagacaaaaagctatccccctag

SEQ ID NO: 87732 - DNA, 1638 bp, Streptomyces albulus PD-1; identical to SEQ ID NO: 87110

SEQ ID NO: 87733 - DNA, 1110 bp, Streptomyces albulus PD-1; identical to SEQ ID NO: 87111

SEQ ID NO: 87734 - DNA, 1311 bp, Asaia sp. SF2.1
atgtacgtatcctcactttctataagaaacatacgagcgatttcggacttccggttcgaagtaaaacctgcagaatgcgctggttggcacgtaattttaggtgataatgcttctggaaagtcgagccttatcaaatccttagccataattttcgcaggcggaccaaaagtaagcgcctcccgccagatttgggaggattggctttcccaaggttctagtactggagagatagcagtagttatcaaccgcaacgaaccattcgaccagtacgcgttaagagggcgtcagccgaaaaccttcactatgcgtgcgacgatagagcgcaaacaaatggacctcacgcctggaactcgtgcagaggtaacaatcctattcagcagccagaactcgagaactgcagaaagaacgatttgggcaaatggtaacggctggtttagttcgtcattcggcccttttcgacggttcagcggtggcgaccgtgattgggaacgtctgttcgtttcgccagaatatcgaaggattgcagcccacctatctgcattcggagaagatgtagcgttcaccgaggccttgtactggctgcagcaacttaaagtcacgtcccttgagagcccatcaagtaaggacggtcagatactggaagctgtgaaaaattttgtaaattcttcgcaactcctgcctcacaacagccagatcgccgatattacgacgaaggctatcacattgaaagacgcagctggggcctctgtgaatgtcgaccagatgagtgatggttatcggtcggttctaagtctaacatttgagcttctaaggcagatgtttctctcgtttggcgaggacattatgctcaaggcgctgacagtcaatccgggaacggttgaggttcccggcgttgtcgcgatcgatgaaatagatgcccatctacatccgacatggcaaacgcgtattggcgactggttcgtcgaccatttcccaaagatccagttcgtcatcactactcacagccctctcgtctgccgcgcggcaaggcgagggtcgatctggcgtttgccaactccaggttcgaacgggaatgctgtccgggtgcaagggcaggagcttgatcgtttggttaaaggtaacattttggaagcgtatgggaccgattattttggtaaagacgtggacgtccctgaagcatctaaagtagcagaacagaacatagcacggctatcaatgcttaaggtgcaaggacgcatctctcccgaacaggacgagatacttagaagcctacaagccgcgcgtcccacagttgcatcgaagatagactga

SEQ ID NO: 87735 - DNA, 795 bp, Asaia sp. SF2.1
atgctcactactgctgtctgcgaacttgtcgatcaagacaaaatggcactccgaacaaagcaggacgagatagatagagtactagatttcaaaacgcgggtcgggctcgcgaaacagctgtttaacgacaagtctcgcgttctatttagcagggtcagggctgcattggcggtcgcttcaggtgatttggtgagatgcggctattgtgaagattcttgcgctgacgaggttgaacatgtctggcccaaaaatttctaccctggtcgcacattcgatcattcgaactatatgtttgtatgtggaatctgcaaccccgccaaaaacgacaagttcagcgttaggtgcgagggtgaatggctcgacctccccactcagagaaaggtagtcggctttgttgatcctttgagtacagaatcacgcttcatagacccactttctgaagatccgctagatttcctttggctcgacatcttggcagggacattcatgattgtcccgatacatgaccccggcaccttggagtatgagcgcgccgactatacgatcaacgtacttcgattgaataaagaggacttagttgaggcacgtaaaaacgcctatactggcttttgtgatcgtatgcaccgttatgtcgattgcaagctgagtggcgaaggacaaccgcaactcgaccatcgacttctcgaattgcgccgcgcgccacatcaaactgtacgtaaggaaatgcagcgtcaatcaggagtgttagatgcaccacatcctgcaatagaaagcgccttagaggttttcagttaa

SEQ ID NO: 87736 - DNA, 1398 bp, Escherichia coli LAU-EC6; identical to SEQ ID NO: 86854

SEQ ID NO: 87737 - DNA, 732 bp, Escherichia coli LAU-EC6; identical to SEQ ID NO: 86109

SEQ ID NO: 87738 - DNA, 1359 bp, Escherichia coli LAU-EC9; identical to SEQ ID NO: 87574

SEQ ID NO: 87739 - DNA, 660 bp, Escherichia coli LAU-EC9; identical to SEQ ID NO: 87575

SEQ ID NO: 87740 - DNA, 1359 bp, Escherichia coli LAU-EC8; identical to SEQ ID NO: 87574

SEQ ID NO: 87741 - DNA, 660 bp, Escherichia coli LAU-EC8; identical to SEQ ID NO: 87575

SEQ ID NO: 87742 - DNA, 1398 bp, Escherichia coli HVH 23 (4-6066488); identical to SEQ ID NO: 86108

SEQ ID NO: 87743 - DNA, 732 bp, Escherichia coli HVH 23 (4-6066488); identical to SEQ ID NO: 86109

SEQ ID NO: 87744 - DNA, 2346 bp, Pseudomonas sp. TKP
atgcagttttttgagcgcagtgccgagccgccgccgaaatttttccgtggaagcgtagcgagtggggcccggcaccggttgctgcaattttttgaattggatccggtagaacgtgcgcagacgcgtttttcagatcatgcgctcgacctcaaggacggtaccgtgttcgatgggctcgggcgtttatttcggggtaagtgcgcattttgtgaaactcggggtgagacatttccctatcggtttcgaccgtcagcttctgcaacgccggaagctaaaaatagtcatctgtattacagctggcttgctaatgcctgggagaatatttacccgatttgccatcgctgtgtaccacgccaatcagaatttttcccagtaacaggcaaccgtgtacgtctgcctgatattgacgatattcagtggtacgttgatgaggatttgggatcgtggcggggctaccctattgccgaaagacagcttttaatcgacccctgtcgtaacgagcgcttttacgattatttctttatatcaattacaggcatgttgcaaaagcagggggcaaggggcgccctaacaattgagcacttcaagcttaatcgtgaatatttggtggaaaaacgccgtatcaggttgggggagtatcgaaggttgcttctgactcccgacaccactgaacgcctggtagttgttgagggaaattttccgattttcgacttctccaatctggagtttggtggtttgtggtatttacagtgccgaatgatagttcagcatttatcacgtgcacttaagaaaaaggtagatgtttcgcgtaccaaagtgggtcattcatttcgtgccctgtccctgcataaaggttttgatgaatatcgggaaatattgcagagctggattgaaacgggtgattttggccgttacccgtcgatcgcaataactcagccggagcgtgtcgaaccaacgagtatgtcggacgagcaactgcccgttactccctcggtatacccttctttgctttcaattgagctgacccattttaaagccatcgattatctcaagttgcaactgactcttccaagcgcggattcggtattaagcagtgaaccaatgcattcggccatgttgatcctaggagaaaatgccactggaaaaagctcgattcttgaggctaccgctcttgcattgtctgaccggaaaactcgaaaggctctagggctgaaagctagcgacctagtgctagattcgactcagctaggtgcgaaaaaccaggatgggatgctttcagctcagattcgcctcggctttgacgagggtcccgatactgtgttggagatcaataaagcgggttggaaaccgcagacatcgtttttgcgtcccccagtgtttgcctatggcgcatttcgccagtaccaaaaaaatagcgataaattcaagcttggacattcggtgttcaacctgttcaattccaaccgcctattaccagaccccgagccttggctgttggcgttaaaagatgatgacctcaatgaggtgacgcgtgccttacgctttattatgactgtcgaggaaaatatccaggtcattgagaaatctgaggacgaactacgttgctttattgtcacagtgcaaggcggtgtgaaggtcaagacacccctcacgcaggtgtcctcgggataccgttccgtgctagcaatggtctgcgacatcatgcgcaggctgatggaccgcagcactaacccgcactatcaaagtctggaaaacgcccgtgccattgtgctgatcgacgaggtggaagcccatctgcacccacgttggaaaatccaaatcatgggggctttgcgcatggcgttgccaaaggtcaccttcatcgcgacaagccatgacccactgtgtgtgcgcggcatgcgtaacggagaagttatagtcgttcatcgcactacaacgacttcagacggggaggggggcgacacggagcaaagggcgcttgtagagcaattgcaacatctgcccgacattagccaattaactattgagcaactgttgacctcagattttttcaatgttgcctcaaccgaccagccagtgatgaatctgaaaatggccaagcttgccgacttgttgagcgcaagctatcggggcgaactttccgaccctgaagatcagcaactagttgcgcgtttcaagcaggagatcaacgacgttttgccggtgggtacaactcgtggacaacaggtggtgcaagaggcggtcgctagatttcttcaggcccggaccactgcttccagcgagcaattaaaggcattagatgaagcggccaaacgtgaaatcctagacctcctggagggcttctga

SEQ ID NO: 87745 - DNA, 1101 bp, Pseudomonas sp. TKP
atgcgttatgtggaccgaagtcaatactccacgccaaaggtgatggtcgccgttcttggccaccgttcggaggcggagcttgagttggtgaaggtggaggcatacatcaaggaaaaagcgcgaatccgcgcgctgaacgagcagaacaaagcgcaggcaaaactggcaggactaaagcctcccgcgaccgtcgctaaaccgccatcgccctttcagttatacgggcacgatagcgtccgtgcgcgactcaatgagatgttccaccgcaagtgtgcctactgcgagagtctctattacgcaacgtcggcgatggaagttgagcattaccgacccaaagaaagcgtgcaaggcgaagcggatcacgagggttattggtggctaggtgctgcttgggacaacttgttgcccagttgcatctactgcaaccaacgtcgcagccaaagcttacctagggcatcaggcaaacctgtggtgctgctggaacataaagggcagttcgaggatccacgttccgcattcacgggcaaaggtacgcattttccggtcttgggagcacgtgtaaccgaccggacgggtgatagctccaaggagctccccttgttgctgaacccatgcctggatcagccgaaagatcacctggattactacatagatttcaagaatatcatcgggctgatgttggctaggccgaatgtgggcgcaatcccttcgagcatcggactcgacccgaaaacccgggaagagtttcgtgatgagttggctttgaccctcaggcacaacctcgatctgcgaggttcggtctcgattctgatctacggccttaaccgcctggggttggtgcaggatagaactcgcgtgctacgtcagctgatgttcatggaaagtcaggtggtggaaattaccacctttatcaaaaaattgaagttgcgggcgtccaagcccgcatacgattacgccgacgaggacaagcttatcgagcagggattgaagcacctgcgcgaccgtaccgtacaacaaatgaaatccatggccaaaccccaggcaccttactccatgatggttcgggcctatcttgaatgctttacggcacgcctaaactga

SEQ ID NO: 87746 - DNA, 1212 bp, Veillonella sp. DORA_B_18_19_23
atgaaattaaagagattagagttaaataatattggtggaataaaacatctatcgttagaacttaatagccatattaatgttatttgtggaatgaatggtataggtaaaagtaccattctcaagtctattttatcatctattcctgcaacaagaacaagggttaagccgaatgtagattcaaataatggagaaataatttttacatatgatgattcaaagaggtttattgtcaatatatcgaataaatctccatcagattatgatttaattaacaataataatgaattttatactccaggagaaattattttttttgatacagaaaggaatatagagtataaaaagttaaaacaaattgaattagagccagagttattctattcaagagataattctgacagaggttatgaatttagcttaggtgttaaattggaaaatataaaagattggtttttaatgttagctcttcatgctgaatcaatacatgaacacttatcatcatatcaatctgattatttcgatgctgctattgctgcattgaatattttaagctctggagaattgcattataaatgtattgattacagtacaaatgagatattgttgaaagatgttcactataatagtccaataatttttgagtatttgtctagtggatataaaagttgtatatatataatttggggaatcataaaagaaataaaagaaagatttgatattacgcttaataaatctgatcatggaaaacataatattaaagagtttgatggaatagttattattgatgagattgacttacatttgcatccggtttggcaaaaagaaattgttggaatattaagtaagattttttctaatgcacaatttattatttctactcatagtccttcagtattacagaatttagataaatctgcaataattcctttaacattaaatgatcagggcattataacaattaactcattagatttaagtgattatggtttacaaggttggacatttgaggagattttaatttatgtaatgggagataataaattagaaactgatttatatagaaattatatagatgagtttgttagttctgttaaaagtaaggataaaaatcatgcaaagcactgttttaatgaattaaaaaaaatgctacatccttccaatccacaattagttttgttggaatatcaacttaaaggtgtattaaatgattaa

SEQ ID NO: 87747 - DNA, 753 bp, Veillonella sp. DORA_B_18_19_23
atgattaagcttgttagaccacttaaacctcaacaactagatgatgaaactattaggttattaacggaaaaatttattaataatcgaaaagaatctgtatggaatcaaccatatataaaagatactctattggagtcttcatatgggaaatgttgttattgtgaatgtaaatatgataaagggaatcttcatatagaacattttcatcctaaaagtctatatcctgatgaagttgtttgttgggaaaatttattgctttcctgtgctaaatgtaatcgtgctaaaggcactttagatactgttaacaataagttagttaatccatatgatgatgatcctaaagattatattggcataaataaagagtacatactaataggtgttgatcaaaatggagttggggagttcttcataaatactatatataaaaatggatatgtatttaaattggctttacaatatcatactatttatactcaatttcaaatagatcttgaggatttatataatatatataatgctagagatatagatgagaattcagactcgcttgtctttaaactatgtaatatattggagatggtacaatctgataaaccttatagtggggcattatcagctttagttattaataattcaaattttatttatttaaaaaataagattgaaagttcactttctgaagatttaatttctgacttttattatctttataatgaggcgctaaataatgcattaagattttttccgtag

SEQ ID NO: 87748 - DNA, 1338 bp, Photobacterium leiognathi lrivu.4.1
atgagtattagaaagattcaaatcaataactttagaagtataaaaaagttagacgtatcaattaccagcaaaaataaagtactttgtttcgttggtgaaaatggtagttccaagacggctttaatgactactattactgaagctatagcttcacatacaaaacttgagtttcctaattattcaattagatcaggtaagcgtttgagattgctttctgcaagcgaaatcatggaaggagaaaaattctattctattgagattgattacgagaaattaaaaggtgcagagcacacttttaaaaaaatagtagcaactaataagacgatagacccttcagtttattctgatgttattcagggtattactttacaaaatgatagtagtaaagaaatatcaacattaacaaaagccgatgcgcatgatgattttttatttgatagtgttttcttattccggccaggtgaacgctatgaaaaagacgggatgttaattgaaaaagatggtgattgggagggggaactaagtgtagcaagacatatagatttatctatgccttatccttatattgttgcccattctgggaatgatactcaaaccacaatacttgatctattttttgattcacaagtaggttatgaagacgctagatttggttttagtaatatacttacaattcttaataaagtaaccggaaagaatttcggcagatttcaaatagctaaatcaccatatcgacaagttttctcttcaacgttgggggagctgagttcattttctcagggagagctcgatcttttagtgactatttcaacaatagtaaaacagcaatcatttttctttgatagatatagtgatatagaaagagaaaacctatctataaataacttatttcatattcccggaattatcttgatcgatgaagttgatcttcacttacaccctaaagcacaagaaaattatctaaaaatacttactgatatttttcctaatattcagtttatagtaactacccatagcccatttgtaattcgtggacttcctgaaaactctatagtggttcaattgccatcaggtaggaagtttgaaaataattttagtgctatgaatatagatagtattactaatattattttcggacatgatggtggtttttctgaagatacaagatctctattagataagtttaagttacatttagttgaagaagtacccaacagagacgaactgcaacgaatttatcaacaactttcatcttctcactctgctaaagaagagctagatctttatctggcaacattcgctaaagaggaacttatcaatattgttcgtggagtttaa

SEQ ID NO: 87749 - DNA, 831 bp, Photobacterium leiognathi lrivu.4.1
atgagacaagttgatagagcgcttgtaacgtttcctgaacgattaaaagctcaaaatattacaaatgttaacaaagctcagctgattgatcacaagaagatttctggagatgtatatcggcatcaagatgtcaaagatagtctcaaagagctgtattttgaaaaatgttatatttgcgattgtgacgtaacaggaaattttaaggttgaacattatttacccaagaaacacttccctcaattaggatatacatgggataacttacataagtcatgtgaaggttgtaatttagctaaagaagataatggttttttagtgaaggatatcaaagggactgtaatagatattaatttattagacccatctaatagcacgtataagattgctgattatatgaggttcaatatcacagcaacagttgagctagttcaaataggtaatgaccctctaataattaacaaagcaaagaacactattaagtatttgaacggtgagtataaaaatgagtatagtaaaactttaaaatatcttagaagtgataaagcaaataattttcttagatactatatgactaacctttttaagcataaggagttgattttcactttaagaaaacttggaatagctaattatatcgaaccgatagatcatattgaacgagatatgcatatagatctatgccaagggttgattaatctcgataatatttatcttggagaggctgctcctttttctacatgtacgcgtgtatatatgacagacgcgttgaggatgacttatccagacttgttagctttgaaagaaaaaatgagaataactttaggaatatga

SEQ ID NO: 87750 - DNA, 1275 bp, Pseudomonas sp. FH1
atgcgcattgattcaatcaagttgacgaactttcgcggagcgctcgacctgcgcctgacgctgaatgaacgtatcaacgtgtttgccggcgtcaatggagcgggcaaatcgtcggtgctcgatgcactggcactggcactctcgtgggcggttagccgtattcgtcatacgactgcttccgggcggccgattgcagagccggacatcaccaatggtaagtcgacagccacgatagagctgagctgccatagcgctcgtggcagcgtggcctggaagctgtctaaaagccgagcggggcatgcgtctgaagacaagagcagttttcatgagctcaaggagtttattcacgacctgcaggagcagatctcccagacccaggagcgctgtaacctgccgttgtttgtgtattaccccgtcaatcgtgcggtgctggatattccgctgcgtatcaaggaaaggcatcggttttcgccgctctcggcctatgacgatgcgctgaccagtggggcgaattttcgtacattcttcgagtggtttcgcgagcgcgaggaccttgagaatgagcaccgcaaataccgcgatgatctggttaaacccgatgactactgctttccagacagagagctggaggcagtacgcagggcgttggcgtgctttatgccggatttcactaatctgacggtgcggcgtaacccactgcgcatggaagttgaaaagctgggcaagcgcctctcggtcagccagttgtccgatggcgaaaaatgcatgatcgccctgattggtgatttggccaggcgtttggctattgccaatccgacattggatgaccctctgcaagggcaaggcgtggtgctgatcgatgaggtggatttacacctgcaccccaagtggcagcgcttgatggtgccgaagctgatagaggtatttgggcagtgccagttcattctttcaacccattcggcgcatgtgatcacccatgtgcaaccagactgcctgtatctgctaggtcagaccgagcaaggcttgcagactgaacatccgcgtgaatcgttcggcatgagtgctgagcgtgtgctggaggatttgatgggcttgccgactactcggccagaatcggttgaaacagatttacacgcgctgttcttggcaatcgataagaatgaactgagtgaggccaagaaaaagatcgacgctttgcgtaacgacattggtgatgacccggatctggctcgcgcagatgtgttgattcgtcgcaaggaagtcatcggacgatga

SEQ ID NO: 87751 - DNA, 648 bp, Pseudomonas sp. FH1
atgaggcatatttctaagcagccagaaccccaggctttattcgattggaaagcgcaggcgaatgcggactggcagccggcttatgagctgttgagtggcgcgcctaagctggccctgaagctggccttgatggttgaacagggatttatctgctgctactgcgagcgacgcttacacgatgatgatgcgcatatcgaacacttcaggcctcagagcgatccagcctgcgatgcgctcgattatgccaatctgctgtgttcttgccagaaccgtattgagcgaggcgcaccgcgccactgcggtaatctcaaagaggattggttcgacgagcagttgctggtttcccctttgttagaggggtgtgaaaggcagtttgcttttgctggggatggttcaatcagacccgcgaatcccgatgatcagtctgctgccattaccatcgagaagcttgggctgaatattcgcaagttgcaggatttgcgtaaggccgccatcgagccatttcttgatcccgagctcagtgatgctgaccttcagctatttacccaagcctacctggcgcgagacgcagacaacaggctgggagagttttgtagcacggttgcgcatctgttcgggcatgtcgagcaaggagtgaatggcgcgtga

SEQ ID NO: 87752 - DNA, 2187 bp, Pseudomonas fluorescens FH5
atgctcaggatttttaggcccaaagcagcacctggatttcttcgttcccccaaagtcctggaagagcgtcgcaagatcctctcatatttgcgtcgcgatgccagtgagcgccggcagagacgagataatctgaatgaggatttgttttttgatccgggattacgctttgagctggcgcgtgtcttccacttcaaatgcgcattttgtgagtctcccctcaacgatgatggtcacgttctacatatgcgccctgtacggcgtgtagaaggtgatgctgaagacaattgggactactacctctggctggcgtttgaatggaggaatctgttttatgcctgcgacgtctgcataaaatgcaaaggggacagatttcctttagagaatgagcgcgcagatttcctggcagccttcacggacgtcataagtcatgagcgtgctctgctcatcgacccgaccgcggaggatccagggaaaaatgtgttttattccgcgggaggactgatctgtccgaagacccctaaaggtgccgcgacaatagatgttttcacattgaatcgcccacgcctggttgaagccaggcacgaagcgatccagcgcgtgcttcacctactcgacggcagtctggtgagcgagctccatcgaagcctggatttgagcgccccacactcaggggcagtaatcaatattcttcaacgaattttgcttatctggagacccgacggcagatccagcgtaggggcagaggcgaagttcgccgatcggtttgtagagctctgggaaaattgcaccagcgaagccaaagctcggctaccgctggcgatagatgaggttcggtcaggtaggctagatccgccgaagcccccagctttagatcacggcttgcatatggagaccattcgcacacctgaatggtcgctaaaatcgggagatattgcatcggtacacatctcgaacttcaaggccattgagcagctcaacctcaagatgccgatcaggcggcctgaaagggctggagcgccagctttgatgattttaggtgagaactcgagcggaaagtcaagcgttttggccgctatagcgctagccgctattggcacccatgaggcgaagaaactaaaaaaatacctgccagcattggcccatagtgcagcgttaaaccgcttcgatcagcttgatcagcaggtggtcaatgtgaagattgactttcattttcacgagcaacctgcggtgtttgagtatgaccccgcacaccaccagccggaaggcttcaaagatcccgcacttaagatattggcgtacggcccgcgccgcttcttcgacactaaaaagcgctatcacaaaccgggggctgcggctcgcgttcgaactctgttcgaccctttggcgaccattccatatccaggagattggctgagggcgcaaactggggctcggttcgatacgatcgcagccgcactccgggtcatattggctctgggcgaggacgatgagttgatcattgaacctgaccatttggcagtcagggccaacggccgcgtaactcccatcgacgcgctcagcgagggctatcggtcggtatttgtcatgacggtcgacattatccgtgagctgatcgatgaatcccagaacctcgagaaagcggaagccctggtgcttatcgatgagcttgagacgcaccttcatcctcgatggaagatgcaagtcatgacctcactgcgcaaggtgttccctcgtgtgcagttcatcgtgactacccatgatccgctatgtttgcgcggaatggacgatggggaggtgatggtgttgcaacgagatcaaagtgggcggattcaagcccttgaggacttgcctaacgtgagagggatgacagccgagcagcttctgacctccgactatttcgggctggccagtacgactgaccccgcaactgaaatcaagctagccagcatcgccggcgatgttgcgcacacttcagatcgaggaatagtgacggtcactccagccgcagctacctcccaattggttgggcgtctgttcgtcggagactcccctagtgaacaggtggtgcaggaggctttggcgacctacctggaacgccgggaatcagagcgcgggagtatacgccccaaactccgagcggaggcggttgaggccatcatcgaagctcttacaagggccgaggactga

SEQ ID NO: 87753 - DNA, 900 bp, Pseudomonas fluorescens FH5
atgcggtatgttgaccgaacgacggtgaccgcgcctccatcactagctgggccgagcaggcctgtccaagaggagaaaactgccgcagccgtttcctacagtacctacgatccgacggcgaaaccgagacccaagacatacacatttttgcagtacaaaaatgatgacgtcaccatcagcctgcgcacactgttccatgacaagtgtgcctactgcgaaacggatgtcggcgacgacatggacgtcgagcacttccgccccaaaggtggagtaaccggtgaggacaatcatcccgggtattggtggctcactcatagctgggaaaacttgctgccagcctgtacaccgtgcaaccaaaaccggtttcagcacattgcaactgaaaacctcacggaagaagatttactggcgctgcgggcccgaaaacctgaccaggcccacggcaaagccaatcaatttcctattgcgggggttcgcgcctacttcgggggatcgttgaatgacgaaaggcatcacctactcgatccgatggtggacgatcctgccgactacctcaagtggtcaaaatccacctacagcattgtgctggcgaatacggatgatgaatgggtgaaggtgcgggcgctttcgacgattagcgtttttgcgctcaatcgcttgaaactggttcaaagccgtaccagagtcctcaacctgttgcggtaccaggctgagcgaactctaatggagctagaagaggatattcgagagggaggatcccctcggctcattcagcgtgctttaaaccgggtcgatgaaatgaggcagagcatggcgccgggtatgccccacactgcaatggtctcttcattcatcgaggactttgtaatcgagctcagagctcgtattgcaggaatctag

SEQ ID NO: 87754 - DNA, 846 bp, Leisingera methylohalidivorans DSM 14336
ttggatagggcctttagcgcgtttaaatttgctcaaaacaactacggcaccgaaaacagataccacggcgagacacgtaggcagcttggagatccactgctaccctttaaggaaatcttgatcggatttgcaggatttggttccgataactcagacatgaaagcagaccccgaggtgaaggggatgtttcaggcgtttcaggatattctgagaaagactcttccgcgcgaaattggttttaagagccttgaagtcaggcgaccagagctgatccttaaaacagacactggcgagtttccaattgacggtgcatcgggtggcttaatgtctgtaatgcaggtcgtgtggcagatttttctctacacaaaatctggcaagagtcacccgaccattgttttggacgaaccagagaaccatctacacccatctctacaacgggagtttctcagaaatcttgtgaccgcgtttccattggttcagtttgtcgtggcaacgcacagtccgttcatcgtttcatcagtccgagaagcacacgtgtatgcactcagagctttgcctgttttgccgaaaaaaaacggtccatccgaggtcaagaacagctcttcttttagagcagaaatgatcgaccttaaagaacaggcaggaccagcaacccaagtgctctctgaagttctaggggttcccataactttaccaatttgggccgaggaagacctagtgcggattatcagaaaatacgaagagcgggaactgagccgggatcttcttgatgaaatgaaaaaagagttgcaaacggcaggcctgggctgtttgtttcctgaagctctagcaggattggcgcgatga

SEQ ID NO: 87755 - DNA, 645 bp, Leisingera methylohalidivorans DSM 14336
atgagaaagctgtccaagggtcccaaacctcaagttttgttagataacgaagaacaatggaaaaaagagcttatggacgccattgctagcggcgacaaggaggaaatcgccaagaaaaccaagcgctatgggcacaaagatatcaaggacgctttagtcgcagaaaattatggaaagtgcgcatactgtgaggcttacgtccggcacgtttcgcatggtgatatcgagcacatttctccaaagtcaaaagcccgagagaagacttttgactggaataatctgacattggcgtgtgaacgatgcaaccagaagaaatcagacgcggaaggtgtcattgatcctcatgttgatgctccggaggatcatctgctatttttggcagctgtcgtacgcggccggaccacaaaaggtatgcggagtataaagccaacacgcgggctggacttgaatcgtactgaattggtggaacgtcgcggggcgcagatatctcgttatgcagatagtttcgaacggattattcaggagcaagatgaagacaaacgctcgatcttagtcgaggcgctgcaggacgatttggctgacccgaaaactgagtattcagccatgcttaaggcgttgcatcaagtgttcgaacttaacgcttag

SEQ ID NO: 87756 - DNA, 1269 bp, Pseudomonas moraviensis R28-S
atgcgcctggaccgactccacattaggaattttcgttgctacgaagatgccacgtttgacttccagcctgggttcaatctggtggtgggggtcaatggcagcggtaagacgtcactgctccaggccattgctgtttccttcatcgaattcggcaacgcggtaaagccgagtcagatctcgataaaagatgaagatattcgcttcgtcattgaccgctttgaaaacagaagccgtttcgaacggcagtacccgctgctggtacaagggacgggggtgttttttggcgcaaccgaatggattctgaaacgagacggagatggctttcccccactcgtgaattcagctttcgaggctgagttggtcaagctcaggcagaagatcaacctggccatgccggtcgatttaccgatgctggcgttctatcgctccaatcgtcgctggcaaggcgcaggcgtatcagcagagtttgcagccaaacaacgcctgtcgcgttttgatggttatgcaaactggttcgatgcggtggcagatctcagtgatttcgagagctggttgatcggcagaacactggaacgaatgcaggatcttctggatgccaatcaacattctgcagatttcaacgacgagctggtttgggtcaacagtgctatagcttgcgcaattcctcatgcacaaaatctgcgctatgacctcaggttgcaaagcttgctgatcgacatcgaccagaaaaccattcccttcaatcacctcagtgacggtcagcgcggcatgatcgcgctattcaccgacatcgcccgccgtatgtgcatcctcaaccctcatatgggcaaggacgccctgaagaatacatcaggcgtgatcatcattgatgaactggatattcatctgcatcctgcgtggcaacgcagcatcgttccggcattgacggcagcgttccccaatgtccagttcatcgccgccagtcactccccgcaaatcatcggcagcttgaagcccgaagaggtgatcgtcctgcacaacggcgaatcctcacaccctcgcgttacctatggtctggactccagcagcgtgctcgaagaagtcatgggcgttgaacagcgcgaacccgagattgaaaacctgctctcggagcttttttcaaccttggagaacaacgacctgcaaagggcgaaatcgcagcttgaggccctgaagaagaaggctccggatcttccggagtttgccggtgcagaggcactgctcaggcgcaaggagattcttggtaaatga

SEQ ID NO: 87757 - DNA, 645 bp, Pseudomonas moraviensis R28-S
atgaagcgagtgctcaaaggaactgaacccgcctcattcacagactggaaaagctcggcaaacgatgaatgggttccaacctatcccgttctgcaaaacccgcaaaagcgagagctacacgcggccttgttagaggaacaaggatcactctgctgttattgcggcagagagatagaaccggctaccagtcacatagaacattttcgccctcaagagcactttgaagcccttgcgctggactacgaaaaccttttcgcgtcttgtctgcgcgaaaccagacccggcaatccactgcattgtggacaccgcaaaggcaactggtttgaagaagcgttgcacatatctccaatggatgagcaatgcgaactgcgcttccgatatctgcaaaatggcggaattcagcccgcagacactgaagacctgccaaccgccaaaatgattgaagttctagcgctcgatattgcctacctgaacaaccggcgccgagacacgatccgtcggctgtttgatgatgaattcatcgcgagcgtcagcaatgaagaccttgaacgcctcgtcactgtgattcgagcggccaaagcctccgatcaaaagcctttcgaccacatcatcgcccgctacgccgagcaactgctcggtcgttaa

SEQ ID NO: 87758 - DNA, 1359 bp, Escherichia coli IS5; identical to SEQ ID NO: 87574

SEQ ID NO: 87759 - DNA, 660 bp, Escherichia coli IS5; identical to SEQ ID NO: 87575

SEQ ID NO: 87760 - DNA, 825 bp, Acinetobacter baumannii UH12208
atgtcagaaggtattctttctgagcagcaggaatacctattacatgatcttaaggcattagagctaggaggagctaacaatagttctagtcctttacaccctatgtatctcaaattaaaaaaatcttttgaagatcaaacttcacagcaatttaaccataacacaaataaattattagaaattataaactcagtatatcgtcaaatttatcaagattttattcgattagagttagtaaataatgatgatggaaaagataaagttagaatggttctaaaagatgatagtttatttttacatcaattatcagatggtcaaagagtatttcttggaatgataggagatatagctcgtagattaatattgttaaatgatagctccgataaccctttaatggggcaaggtattataattattgatgaagtcgagctgcatttacatcctaaatggcaacaaaaaataattggggtgttaagaaaatgttttcctaatattcaatttatagtttctacacattctcctcaaattcttggtgaagtagaaagtaaacatttaagaattcttactcttcaagacactagagaaattaaagttactattcccgaacagtcatatgggttaacctcaagtgaaatagtagaggagttaatggggggtaacggtcgtaatcaagatattaaaaagaagatagatcacatatttaagcttattgatcaagaaaatcttgtagaagctgagaataaaatagaagagcttcaatcagaattaaatggtgaaattccagaactaatagaagctaaaagcttaattcttatgatgaaataa

SEQ ID NO: 87761 - DNA, 642 bp, Acinetobacter baumannii UH12208
atgttaaatattactagacttcatgagccatccagtttaactatttatcgctatcaacctgatgctaaatatgatggccctttattcacaacagttaaaagcgatatacgggaagcattagtaatttcacaagggtacctttgtgcatattgtatgcaacgtatatataatgatcgttcaacaactaaaatagaacattggcaatgtcaggatacttactctcaacgtcaacttgattttactaatatgtttgcagtatgtctgggaacaactcaagatcaattgcattgcgactcatctaagggcaataaacaaataacgattgatccagctagcaggagtcaactcgttgaatcttatattagatatactaattccggcgaaatatatgttcaaaataatgaattattaaataaagagttaaatataattttaaatttaaatcatagtcgtatacaaaataatagacaagctgttttaaaagctgtcactactcaattatctaagtacaaaggaacagtaccaaaaagtgaattacagagtttattgggcaaatggagtaacatagacgcagagggtaaaaagagaccatattcaggagtagctatattttatcttaaaaataagctttcgaaagcttaa

SEQ ID NO: 87762 - DNA, 825 bp, Acinetobacter baumannii UH16208; identical to SEQ ID NO: 87760

SEQ ID NO: 87763 - DNA, 642 bp, Acinetobacter baumannii UH16208; identical to SEQ ID NO: 87761

SEQ ID NO: 87764 - DNA, 825 bp, Acinetobacter baumannii UH19608; identical to SEQ ID NO: 87760

SEQ ID NO: 87765 - DNA, 642 bp, Acinetobacter baumannii UH19608; identical to SEQ ID NO: 87761

SEQ ID NO: 87766 - DNA, 825 bp, Acinetobacter baumannii UH22908; identical to SEQ ID NO: 87760

SEQ ID NO: 87767 - DNA, 642 bp, Acinetobacter baumannii UH22908; identical to SEQ ID NO: 87761

SEQ ID NO: 87768 - DNA, 1545 bp, Acinetobacter baumannii UH6907
atggaaaacatgttaactcacttagtatctaatgcatatgatcagcaatttgattctgcatatcaattatttatgaattatcatcaaggtttaaataaatttcataaaaatgaatctgaagctgaaaaattttttaatttagctattaaattatatgaaaaagatttatttttatccaatatggaaattagtaattataaaattattacaaatttaaaaataaattttgataaagagttaactattattattgggaacaatggagttggaaaaaccagtattttaaatgctatcagaaaacacatcatgtggatagcagccagcattcgtaaagataatgcatctggtggaacaatatcgccagacgaaatcaataataaatcaagtgataataataatggggcatatattgattgtgcttttaatataggaagtaaaaatactgttagaggtagaattgcccgagtaaaagatacttcaacaattccattaaaaagtgaattaactaattatagagagatagggcaaaaaattagagatttaaatgaatatagagatactaatttccctctcttcgcattttatggtattgatagattatcatcaaaaaaaaatctaagttcagatttagtatttaataaagttgatgggtatgaagaatcattaaataaggttagtaactttaatattttcttagaatggttaattcagattttaaaaatgtcagaaggtattctttctgagcagcaggaatacctattacatgatcttaaggcattagagctaggaggagctaacaatagttctagtcctttacaccctatgtatctcaaattaaaaaaatcttttgaagatcaaacttcacagcaatttaaccataacacaaataaattattagaaattataaactcagtatatcgtcaaatttatcaagattttattcgattagagttagtaaataatgatgatggaaaagataaagttagaatggttctaaaagatgatagtttatttttacatcaattatcagatggtcaaagagtatttcttggaatgataggagatatagctcgtagattaatattgttaaatgatagctccgataaccctttaatggggcaaggtattataattattgatgaagtcgagctgcatttacatcctaaatggcaacaaaaaataattggggtgttaagaaaatgttttcctaatattcaatttatagtttctacacattctcctcaaattcttggtgaagtagaaagtaaacatttaagaattcttactcttcaagacactagagaaattaaagttactattcccgaacagtcatatgggttaacctcaagtgaaatagtagaggagttaatggggggtaacggtcgtaatcaagatattaaaaagaagatagatcacatatttaagcttattgatcaagaaaatcttgtagaagctgagaataaaatagaagagcttcaatcagaattaaatggtgaaattccagaactaatagaagctaaaagcttaattcttatgatgaaataa

SEQ ID NO: 87769 - DNA, 642 bp, Acinetobacter baumannii UH6907; identical to SEQ ID NO: 87761

SEQ ID NO: 87770 - DNA, 1365 bp, Acinetobacter baumannii UH7607
atggaaattagtaattataaaattattacaaatttaaaaataaattttgataaagagttaactattattattgggaacaatggagttggaaaaaccagtattttaaatgctatcagaaaacacatcatgtggatagcagccagcattcgtaaagataatgcatctggtggaacaatatcgccagacgaaatcaataataaatcaagtgataataataatggggcatatattgattgtgcttttaatataggaagtaaaaatactgttagaggtagaattgcccgagtaaaagatacttcaacaattccattaaaaagtgaattaactaattatagagagatagggcaaaaaattagagatttaaatgaatatagagatactaatttccctctcttcgcattttatggtattgatagattatcatcaaaaaaaaatctaagttcagatttagtatttaataaagttgatgggtatgaagaatcattaaataaggttagtaactttaatattttcttagaatggttaattcagattttaaaaatgtcagaaggtattctttctgagcagcaggaatacctattacatgatcttaaggcattagagctaggaggagctaacaatagttctagtcctttacaccctatgtatctcaaattaaaaaaatcttttgaagatcaaacttcacagcaatttaaccataacacaaataaattattagaaattataaactcagtatatcgtcaaatttatcaagattttattcgattagagttagtaaataatgatgatggaaaagataaagttagaatggttctaaaagatgatagtttatttttacatcaattatcagatggtcaaagagtatttcttggaatgataggagatatagctcgtagattaatattgttaaatgatagctccgataaccctttaatggggcaaggtattataattattgatgaagtcgagctgcatttacatcctaaatggcaacaaaaaataattggggtgttaagaaaatgttttcctaatattcaatttatagtttctacacattctcctcaaattcttggtgaagtagaaagtaaacatttaagaattcttactcttcaagacactagagaaattaaagttactattcccgaacagtcatatgggttaacctcaagtgaaatagtagaggagttaatggggggtaacggtcgtaatcaagatattaaaaagaagatagatcacatatttaagcttattgatcaagaaaatcttgtagaagctgagaataaaatagaagagcttcaatcagaattaaatggtgaaattccagaactaatagaagctaaaagcttaattcttatgatgaaataa

SEQ ID NO: 87771 - DNA, 642 bp, Acinetobacter baumannii UH7607; identical to SEQ ID NO: 87761

SEQ ID NO: 87772 - DNA, 1545 bp, Acinetobacter baumannii UH7907; identical to SEQ ID NO: 87768

SEQ ID NO: 87773 - DNA, 642 bp, Acinetobacter baumannii UH7907; identical to SEQ ID NO: 87761

SEQ ID NO: 87774 - DNA, 1386 bp, Candidatus Magnetoglobus multicellularis str. Araruama
atgaaacttaaaacaataacgattaaaaattttcgatgctttgaccaattgacattggatttacaccctgaattgactgttctgattgctccaaatggtgctggaaaaactacgttattagacgcatctcgcatagctgtttggccatttgtaaaagcatttgatttaggaagccaaacaggaaaatctgcgaccatacaaatagatgatgtccgaaaagtaatgcgcgaaaatggcaacatggaacctgttaccccctctaaaataatagccaatggtcaatggcaagacaattccacctttgaaacatgggaacaaaaacgagaaaaactaaaaccacggactcaatcaacctatgatacaaccgcaaaatcactcatgcaatttggcgaaagtcttcagaaagaaattcgcaaagaaagccagtcaactcctgtaaatttacctgtcgttgcctacttaggaaccggccgtatctggtatcaaggacgccattcatcagttgtcgaagacaaacccttggatcagagtatatattcaagaacatggggatatcgagattgtctttcaatgtcatcaaactacaaacaatttgaagaatggtatggttggatttatcgtagctttcgtgagcaacaaatcatttgtcttgaaaaaaatattcctttaaatggagcagcgttaatatttcaagatgccattgaagttatcaaaaccgcagttaatggcactattcaagatgacacaggatggcacgatattgcatacagtgccagtcatcaacaacaaatcgttttaacgcatcccaatcatggagagatccctttaagtttactcagcgatggtttgcgaaatactgttgtaatggtagcagaaattgcttttcgatgcataaaactaaaccctcattttggcaaagaggctgcacgtaaaacaacaggtattgttatgattgatgaaattgatatgtttcttcatcccgcctggcaacaaaccattattgattcattgcgaaatgtatttccgcgagtgcaatttataatcacaacacacagtccgcaggtgctttcaacaatagatagtgagtctattagaatttttaaaggatcaaatgttcatcatgccccaaaagggacaaaaggtgctgaatcatcaaggattctaaaacgagttttgggtgtagaagttcgcccccaaaatgataaaaatacacaactgctgaatcgttatttagaactggtctatgcagataaatggcttagtgacgaagctaaagtaaaacgtctacagcttgataatatttatgctgatgaagaacctgcattaacagaagctgatctttacattgagaatcgggagtgggaaaaagaaattgaaaaaaattaa

SEQ ID NO: 87775 - DNA, 621 bp, Candidatus Magnetoglobus multicellularis str. Araruama
ttgaaaaaaattaagaaaacaccggggccaaacagtctaacaaattatgaaaaggaatatccgggcgctaattggtctgattttaaaaattttaatgccggtgaggactatcaatgcattcgaaaccaagttttaaaagaccagggtggattatgcgcctattgtgaaaccaaaatcataaacttaccacctcacaagcaacgcgttgaacattttcatgcgaaatcagatagagtgacctcaaacaaaaactgggcattggattggaataatatttttggtgtatgcattggcggtgatgattctgacaaaaaattgcatccattacctgaaaatttgagctgtgactcacataaaaaccacctggtcaacaaaaaacaattaccagaagcttgtgaaaaatttcttgtaaaccctttgacaatgattgcaactccttgtttatttgatttccacaaagcaactggcgaacttcggccaaatatcaaaacacaaaaacatgcatcaaaagaaaacgattatgaagtatcagaagaattactgaagcaatcaattgatattctcaatttaaactgtgatcgacttaaacagcagcgattgctgattcttaaaaaaatataa

SEQ ID NO: 87776 - DNA, 471 bp, Candidatus Magnetoglobus multicellularis str. Araruama
ttgtatttatctgaagctaaaaataagattattctaatagatgaacctgaattatcattacatcccaactggcaaaatcgtatttttaaattgtatgaagtttttgcggaaaagaacaataaccagatcatattagcaacacattcacctcatattattgccagtgccgggagtgaatcagttaaagtcttaaaaatagaaaatggatttgtagaagtcattgaagaatctaatcagagttatggccttgagttcagtaaaatcttaaccgatatcatgggcgtagagcatttaagacctcctgaaattgctgaaaaattcgatgaagtcaaaaaattgataatttctaatgaatccaactcacaaagatttaaacagctttgggatgaacttgaagatttattaggggataatgatctggatttgcaacttttaaagctagacaagatggttaaggataaaaatgcgtaa

SEQ ID NO: 87777 - DNA, 630 bp, Candidatus Magnetoglobus multicellularis str. Araruama
atgcgtaaaataaataagtcaactcaacctgcgtattttacaaaagctatcaaaaaaatttctactccaaaacaatcgtcagcatggagttgtaaagaaatatcttctattagacatcaattgagggatcatatgttaatcaacgaacaattatctctatgtgtctattgtgaaaaaaaaataaattctgacaggagaaattcaaatattgatcattataaaaaaaggagtttattccctcaattaacattggagtatacgaatttagtggtatcttgtaactcggaaggtagatgctcaagacataaggattcacaacagcgtatagcgtatcataaagtcattaatcctgttaaagaaaacccagaggattattttgattatttaatagcaggagatatacacccaaaaaaagatttaaacaaaacagacaaagctaaagctgaatatacaatagacgtttttaatttaaatcacattggtctgatccaagaaagaaaaaaggtggtatattccattaaatcttatcaggggcaattggaattggaggatattcttaaatgctttccttattatcctacttttgtcaaatgtatctgggaaaaacttagcgcaaccgcatcaagttag

SEQ ID NO: 87778 - DNA, 1602 bp, Candidatus Magnetoglobus multicellularis str. Araruama
atggattttaatccatataaacgggtcgaagtcgaatgtgaatttgacaaatcccatattattgaaacaaatattgaaaaattagacattggttcaattcttcgtgtttattgcccatattgtgggaaatgggggaatggtacaattaaaggatttgttaatgataaaagcgaatctcaactactacagacagtaagcaccttgaaactatctgacagggaaaaatttaatgtcttaacagaagataggaaaagaagtttaacagaagatatgaaaagaagttttttcccaaaaaaacctcctgtcattaagatacaatccataaaacttgaaaatattggaatatttaaatcgttaaacctggattttaattctcaatgctctgtaataattggacctaacggtcgcggaaaaacaacaattttgcgagcaattatacttgccttaattggttatgataaaaatttgaataatcaagctgatagccttttagcaattaagggtcgtaaagatactaaatgtgaatgggagtcaggcaagattcagttaagccttgatatagatggtgaaatcttttcaaataaagtagaattaaaacctgacttaaaaggagaaaaaatccaagtcgtagctgaaccaatgcctggtatttttgatgccaggggcaggcatcttaaatctttaattattgcttttggtcagaatcgtgtttcctgcgttgaaaaatccaaatcaccaatagaggttaagcttcctaaaattggcgacttgctccccttgcttaataatgataacgaaaacaggttgctttcttttgcttcatgggttgctcaactggattacaaagctttaaaaggtagttattctaaaaagaacttgataaataaagcatttgaaatcttttctgatattgcaggcgaaaaaatcgaatttgatactgtaacatctttggatcctttagaaatttgggtaaaaacaaaggactccaggcagggtattcctttagagttgacaagtatgggttatcaaatgcttatgagctgggttggttatcttttacaacgaatgtatgaagcaaataatggatcaataaagttttatgaatctcattgcattgtttttatagatgaaattgacttatttctgcatcccatatggcagcagaaaattctgagtgttttaagaaaattttttccaaatactcaatttattgtaacaactcactcccctttagttgttgacggtcttgatcgccagcagataattcaattaaaatacaaagaagatactattgtagcagaatcgaaccccgttgatatatgggcatggaattataacgatattttagaacgattttttcatacatttcaaaatttttcagagtacgaagaaaatattttaccccagataaaagaacttcaaaacatttctgagcgaactcaagaacaggaagatgaacttgaacgacttgaatctatccttcacagattggaaaacagcagagcagctactgatgaaatttttgcaattaaacaacgacttgaaaatgaagaacaggagttatttaacttattacaaagctataaaaagaaagcgacttaa

SEQ ID NO: 87779 - DNA, 759 bp, Candidatus Magnetoglobus multicellularis str. Araruama
atgcactatgttaatcatggaaccaaaccagaaaaactgaaagagtatcattctcaatttactcaaaaatgggttgatcattatctcaaaggtagaggtggaaaacctgtagatgctcactggaccaaagatgagatacgtgaaccattaattgagtgttttgaagataattgtggttattgcggcacatcaatgggtaaacgaccatccaaatcaggaaaaatgattcctattggccaggtagatcattttttgccaaaaagtaaatgccctgagtttgtttattattgggaaaattatatatggtcctgtactgactgcaataaagcaaaaggagatttctatgaacaggaaatgattttatatcctggttgcaaaaaagatatggaggcattagaactccgaaataatggcaaatattaccttaagatggaatttgccaaaaacgaacttctacaaaaaagatatagagcgacttgcgaaaaaacaataatgaactttggtatccatcccaatgaaagaaaagcaatcaaagatgaacttgagtatcgattatctggaataattacatatggtgatatgattcgatccgatgtttttaataaagctgacagcaaaatacaaagttttattaaggataaatatcaaaaaaccaggtcaaatataaaacagattctaaactccagtcattacaaaaaaatgatccagagcattataaataagtcctgcaaaaaaaaccagagctatcttctattctaa

SEQ ID NO: 87780 - DNA, 1314 bp, Candidatus Magnetoglobus multicellularis str. Araruama
atgattttcaagtataaagcctataatacagatgcaagtctgaattttgatatcaaccttgaaaaaaataaaaatgtatattgctttattggtgaaaatgcagcaggaaaaacaaatctatttgaaaatatggctaaaagtttaatatttagccactcactatttaaaaatacagatcaacatctatattcaaaaatattttggaaagaatcaattcaggaaaacataaaaggtttgaaattatttttaccagcattgatttttatcaatgatagtgaagtaaaaaatgatgactcatggcaagtaacttattttgaaaatattatcaattataatttacagtttgtatttgacaagcctgttatttttattggtgcaaataatagaggatatacaaaaaatattgacagaaaacatattagagttttaggcaattatgctgatacttttaatgaagcttttttaaaaacctataattatatcaatggaaatactgttgaagatactgatcttgctgaatggattagttcaagacttataataaatcctaattttgttgaatcaacagacgataggacatcggaagtcaaccattgccttgctcttatagataaacttgaaacaaattccgatcaaaaaatcaggaatttaagtgaaaaagaatattgtttttcatttagagaaggacttctgtggttaaataatatacctgtaaacaagctttcaacaggatatatttctattttaaaaatatttcaagatattattaacaattttagtgcctggatacgtttacaaaactccgatttgaaagagcatgatttaaataattttgaagcaattgtttttattgatgaattagaatcccatttacatccaaaatggcaacataaatttatacctttgctaaaagaattctttcccaaaataacattttatatagccacacactccccagttattatttctacaactaatgaaggtgaggcttatgaattagtaagagacgactttaatgtaactgcaaaaaagttaggtaatccaaaagaatggtatttagctgatattttttctcaggcttttcatgtaaatttaaataaatcaataagtctatcagatactaatgattctaatatcccacagttgcttaaaaaattcagtatactggtaaaaaattatgctgtaaatcaagatgatcgcttaaagaaagaggtagaagaattatataaaaaaatattaccaaatttatcaccagatgacccacgtagacgttctttagattctttaaggagtcttgtaaatgaaagcaattga

SEQ ID NO: 87781 - DNA, 750 bp, Candidatus Magnetoglobus multicellularis str. Araruama
atgaaagcaattgataggctatccccccctgattgccttaacaatgagatagaagattcaagaaaaaataaaatatctttttacaaaaacttatgggataaatatggaaaagtatatcctcggtggaacagtacttgtaaagatgttgatggcatatctaatattagaaaacaattgttaaaaatgtcaaacagctcttgcgcatattgtgggaaaaaaataggtaattcaagtcttgatgtagaccattacttacctttaagtcaatttccatacattgcatattgttggtataatttaattcctgcctgtaaagcatgtaaccaaagcagcaaaagggattttattccatcatctataaaaagtaaaataatagtggaagatattgtcgcaaatacaattgaaaataaacttctttataatcataaaaatttgctgactgaattacacgatagaattattgaaccaacctttgataatccagaagagcatatacagtttaatcctgaattttattattatgaaccaaaaactgagataggaaaaataacgatcaacatgttttttaaccacaaagaagttgcagaggaatgggaaaagttgagtgagttgatcaaagagttggtacaacataatgtttctgaatccttaataataagaattatagatttatatggttatgaatatgttggtttaaagttctatgaatattggcttagagagaaagaagaaggaagaattaatagataa

SEQ ID NO: 87782 - DNA, 624 bp, Candidatus Magnetoglobus multicellularis str. Araruama
ttgtttgaaagacttttaccaaatgtttcgcaaattgttcttgaagatgatcaaattttttatattgaaaatggatataaagcaacaatacatcaaatcggcagcggcaacaaaacgattctttctatggtgggtgatatagtcattcgcctgtttgaaatgcagcctaaagaaacagcgcccgaaaatttgagtggcattgtggtaattgatgaacttgatttgcaccttcatcctgttaatcaaagatatttacctgaaatattgagcgatatttttccagatatacagtttatatgcagcactcatagcccaatcccgctacttggtgcacccaaaaattcaatttttttcgtagttgaacgagacagacaaaagtctatcactacaattcgagattatgaaattgatataagtaatcttcaaccaaatacattgttgacgtcaccgctgtttggaatggaatcaataagaagtgtccaaaattccatttttgctgaatttcgtacagaaaatgactacagggactacctgcacagaaaaaaacgagatgaatctttaaaacaatatgctgaaaaaggtatacatcttccaaaagaatttatggataaaatttatgattag

SEQ ID NO: 87783 - DNA, 624 bp, Candidatus Magnetoglobus multicellularis str. Araruama
atgattagagtcatcaaagaaagtattcccccagaaatattacaaacaaaagcagaaaacttgcgaattaaggctttgaaggaatgtaaaaagcataaattttctacccgatattatggacatccttctgtaaaaaagaaacttttggaaatatactgtaagaagtgtgcatattgcgaatcctcaattagtgaaggcgctgctttgcaggttgagcattacagacccaaaaagaaccttatggaagatatgaatcatcctggatactactggcttgcttatgaatggacaaacttactactaagctgtccttcatgcaatcgttctaaatcaaatagctttccgatcatgggtgaaagagtaaaatctccacaaaatgatcacaaagaatggcatattaattcggaaagttttatatctgaaaagcctttactgtttaatccagaatttgataatcttgaaaaacagttcaagttttatattgatggcagtattgcaggggaagataaaaaccgaagaagtgaggaaaccataaggatatgtaatttaaatagagaaaatttaagggcagccagaaagaagaaattgaaacttttatacagtgagatattagacattgagcat

SEQ ID NO: 87784 - DNA, 1230 bp, Vibrio parahaemolyticus B-265; identical to SEQ ID NO: 86310

SEQ ID NO: 87785 - DNA, 666 bp, Vibrio parahaemolyticus B-265; identical to SEQ ID NO: 86125

SEQ ID NO: 87786 - DNA, 1176 bp, Vibrio parahaemolyticus B-265; identical to SEQ ID NO: 87360

SEQ ID NO: 87787 - DNA, 645 bp, Vibrio parahaemolyticus B-265; identical to SEQ ID NO: 86309

SEQ ID NO: 87788 - DNA, 1653 bp, Photorhabdus temperata subsp. khanii NC19
gtgacaaagcaactggaacgtaaagccaaaggtgggagtttactctccgccttcgagctttatcagcgagagaaaaatgaagatcctcatggtctaaatgataaagccgaagaatggttcgagttttgctggaattatctgcaaaaaccagcacacaacagtctcggtatatatcatcctgaaaatccgttttgcctacgttcaatgtcatttacggatttccgccggtttccacagcttgatatcaactttgaagaagacctgaccattatcatcggcaataacggacagggtaaaactagtattctttatgcgattgccaagacgctaagctggttcacagcgaatatcctcaaagaagacagcagcgggcaaaggcttaacgagcactcggatattaggaacgattcagataacaatttctcggatatcagttctaatttcttttttggaaaagggcttaagaacatttccattagactttcgcgctcaactctgggcgcagctgagcgtagagagagcatcatcaaacctgctaaggaggttgctgatatctggcgggttatcaatgagagcagaatggttaacctccctatttttgcactctactctgttgaacgatcgcaccctttcagcaagccagcaaaagatagtattgaaaaacgagaagatcgtttcgatgcatacaatcacgccttgaccggcgctggacgcttcgatcattttgttgaatggttcatctatcttcacaaaagaaccgaggctcaaggaacatcagcaatcgaactgcttgaagagcaagttaataacctgaagcagtcagtggaaaatgggctgacttccatggtgccactcctggaagagacacaaaaaaaactgcttacggctcagatgagaaaagtaaccctccaatcagttaacatgctgactgagacggcccaaatggatattgtgtcccgagccattaccacggttgtccccagtataagccgcatctgggttgagaccgcatcgggtacggatattatcaaagttaccaacgatcttcaggatgtcaccattgaacagctatccgatggacagagagtgtttctggcgctggtagcggatctcgcgcgacgcatgattatgcttaatccattgttaaaaaacccacttgaaggcaggggtatcgttctaattgatgagattgagctgcaccttcatccaaaatggcagcaagaagttatcaccattttgcgcaccgtattccctaatattcagtttgtcatcaccactcatagcccaatagtgttatcaactactgagacccgttgcattcgagagtttagggaaaacagtgaaagtggagaactgtttctggactcccctccaatacagaccaagggtagtgaaaattctgaaattcttgagcaagttatgggggttttttcgactccaccgaatattgcagaatcttaccttgtcagtaactttgagaaatcacttattggtgagaaggacgctctgagtgccgaatcactcagcctttacaataaaatcgtttcacattttggccagcacagttctgaactgaaaaaagcagacagcctaatacgccttcaccgcatgaaaaacaaaattagcaaagccaaacgcgagaaggataattag

SEQ ID NO: 87789 - DNA, 648 bp, Photorhabdus temperata subsp. khanii NC19
atgaagtcactcaatcgcagcgtaggcccgacacatttacatcagttcagggcaggacgcgacccgtggatgtctgttgatcaaaacaatatctggccacaactgttggaaatgcaaggtgagttttgtgcctattgcgagtgcagcctcaatcggaagcacattgaacacttcaggcccaggggaaaattccccgcattaacctttgaatggggcaatctatttggatcttgtggcgacagttcaaaaacagggggctggcagcgttgcgggatatttaaagataatggtgcagggaattacaatccggatcacctcatcaaaccagatgacgacaatcctgacgattatcttttattcctgacaactggacaggtggttccagctaaagtgctctccggaccaaaactattaaaagcacaagaaactatccgagtctttaacctcaacggagatccttctctactcggcagcagaaaaaaagcgttaaactgcattatggaagaagtaatgctacttcacgagtcttatgaagatcttggggatgaactatggcgtgaaatgcgtaacgcggaaattcaagctactggcaataaagaattcagcactgcattaaaacacgcatggcttcataacagtgagtattaa

SEQ ID NO: 87790 - DNA, 1110 bp, Pseudomonas cichorii JBC1
atgaaatgcgacgaaaagaatttacccgtcgaagatgtgcgcttcgttgttgataagtacgaagggcgaagccggtttgaacgcaaacttcctgttttcataaaagccgagggtgacatttttggccttccggactggggaacgatacagctggctgatatctgggaagcagccgtcgacccatcattcctgacgcatatggaagaagtacatgccaagtggaatgcaggtgagcgtatcgatctaccggtgctggctttttatcgcgccaatcgccggtggaaaagcgctaacgtatcggcagaattttcggcacaacagaaattatctcgtttcgatggctacctgaactggtttgatgccgtagccgacttgcgcgactttgaaagctggttaatcgccaggactcttgagcgtcttcaggacaagctggactcgaagtccgacagcgaacccgaggatgaactcaagtgggtgaatcaagcgatacagctcgcaatccctgatgcgcttgacctcagatatgacttgagacttcaaagtctggtggtagatatggggccaggcaagactgtcccgttccacgacctcagtgatgggcagcgcagtttgattgctctgatagccgatattgcgcgtcggatgtgcatcctcaatccacagatggggaaagatgttctggagagtaccaatggcatcgtgattatcgatgaattggacatacatcttcacccagcctggcaacgcaatattgcccctacgctcaaaaaagcattcccgaaagtgcaattcattgccacaagccattcaccacagatcatcggcagcctgaaacccgaagaagtcattctgttacataacggtaaagcctctaacccgagaacgacctacggaatggactccagcagcgtgcttgaagaggtcatgggcgttacgcagcgcgatccagagatcgaaaaattactgaaccagctattttcgacactggaagataacaatctcgaacaggccaagcagcaactggaaaagctcaaagcgctgactccagaccttcctgagtatgcaagagcccaagcgctgataactcgcaaagagataattggcagatga

SEQ ID NO: 87791 - DNA, 669 bp, Pseudomonas cichorii JBC1
ttggcagatgaggaaagtactcagggaattgagccgctgtcttttacaaactggaaagccaaagcagaaagagaaaaccgcaagcctacctataaatcactgacgcgctctgcgccccaaaagaaaaaagaggttcatgaaagcctgctaagagagcaagcctatctgtgctgttattgcggggatgagatatccgaacaaaccagccacatagagcactttcgcccgaaatcagactacacgcctttggagcttgactataacaacttgcatgcctcctgcttgcgcgacgtgggtgagctacaacaaagagaacctgattacctgctgcactgcggtcataagaaaggcaatctctttgatgaaactcggcatatctctccacaggatgaaaactgcgaaagccgctttcaatatacgctgaatggcgagataaaaccgacagacgcagatgatgatgccgcctcaaaaatgatcgaaattctcgcgcttgatacccttcgattgaataatcgccgggaagaaacaatgctcggcatcttcaatgacgatttcttgctgacggcaagcaaggaagaactacaaataatcgcccaacgcgcccgcggacaacaaacacgcttttgccacgttattgcccgatacgccgaacaactcctcaccccctga

SEQ ID NO: 87792 - DNA, 1320 bp, Rhizobium leguminosarum bv. trifolii WSM1689
atgaagatcgaacggttatcgcttgctaacgtacgggcttttgaagaggcggagttcactttcaatcctggcttcaacctgatcatcggtatcaatggggcaggcaagagcacagcactggacgccatccggttctgcgggtcgcacttgctgtcgaaccttcagagaatgccctttagaccgtttggctttggcatcgatgatattcatggcaatgcgcctttcgcggaagccgcgttgtatgtccaactcggtggggacgcagatgcgtttgtccgcctgcgcgaatggcgggaacaggttgccgccgaggcaacagagaacgttgagcgcctgcgtcgtgagatcctcgaaacagcacgccccagggatcgtctgcgcaaccagctacgcgagttgcaggaaacggtctcgccagcggaaccggtgttcttttacccctcaaagaacgacttaaaggctcgggcagtcagcgaagcatgcgcgccgttggtgatccactactccaccgcccggtctatcatgaacgagcaggcggagcggaagtcagcagccggcactagccagcttgcctatgtaaacgcacttcaatcgaacgccctcagcctccgccagttcgcggattggatgcgcgctcagatcgaactggcgtctgagcgacccacctcacggcatctggttggtgggatcagtacagcgctcgagcgctttctgcctggctattcgaacttgcggccatcagttgaaagcgcgtcacgagttgagatcgacatcaacggcaagacgcttgatgtacgccaactgtcagatggcgagcgctgcgttttggcgctaatcctagatatcgcgaaacgtcttgcgcaggctaaccctgggctagatgatccgctgaccagcgctgaagccgttatcctcatcgacgagatcgacctgcaccttcatccgcaatggcagcggaaaatcgtgggcaatctcgaaaagactttcccgaactgccagttcatcgccaccacgcactcaccgcaagtgattggtgaagttgcgcacgacaagattcagatgatcagggaaggcaaggtctactccccctcgcgctcctttggcatcgactcgagccgtgttctcgaagaggtcatgggcacaaaatcgcgcaatgcaggcgttgaggacgccatcgggaaaatcgctagactcatcggcgacggcagaggcgaggaagcaaaggcagcgatcaaggggttgtccgaggagatcggtgacgatgatcccgagatcacgcgcgcaataacccttctcgacttcatggagggagacgcgtga

SEQ ID NO: 87793 - DNA, 615 bp, Rhizobium leguminosarum bv. trifolii WSM1689
gtgaggatgatcaccaaaggcgccgaaccgaacagtctcacgcaccaccgggctcaggcacacagtgactacgacaactacactcaaaaagccgacctgcgcgcggcgctggtcggggagcaaaagggcctgtgctgttactgcaccgggcgtgttcgggcggaatcgaccgcgatgaagattgaacactggcaaagccaggcgaactatcctcagcagcaacttgtctacggaaacctactcggcgcatgccttggcggcgaagggaagtcgccggccgaacagcactgcgacaccaaaaaggccaaccgcgatctcaagtggaatccggcagacaccgctcatgtcattgaaacaaggctgagctacctcgtcgacgggaccgttgcctgctcagacgaggacttcaacacccagttgaatcacactttaggtttgaatttcagttacttgaagagcagtcggaaggccgtgctggattctgtactgcattggtggcgctccacaccgaacgctcgacaaaaagttcaacaacagattaattatcgcctcaatgcggcagagtatcagccgtttagtccagtagcgatctggctccttcggcagaaactgtga

SEQ ID NO: 87794 - DNA, 1155 bp, Paenibacillus sp. FSL R5-192
atgaaggttgaatcaattaagattaagaatattaacggaatcaaagacttgagtatagatatgaacagccacataaatatcatttgcggcatgaatggagtaggtaaaagcactatacttgaagttatagcgcaggcatttagttttgctacaagtacaaagctgaagcgcaatgtaagagctgacaaaggatctgcatgggtgaaagttgatggtaaacaaggtttttttgatacactagcctttctgcccaatgataaccaaagagaaaagttggatgttgtaggtgaagctttaaaagtaatatacataaaagaacacagagtacttgagcatcagtccctaagtggaatcacaccagatgaggtaagagacgaaccaaatcacaaacattacatgattaacggagttaatcctcaaactataaaaacttggttggccaacaggattctcttcgagccacaaggaaggtttagtgaggcggagattttcaatcttagcatggcgaagcaaaccttctcaattcttgacaaatctgtagagttctcgtttatagatcacactacgcttgatattatggttaaaacatcaagaggagaaattttttttgaatacctttcgtcaggatacaagtctctgttctttatattgcttggcataataaaagagattgagttcaatttcaaccctaaagtaaaagtcactgaatttaatggtattatattaatagacgaggcagatgcacacatccatccgtattggcaagcaacactaattgaatctttaaggactatcttttcaagtgctcagataattgtcactactcacagtcctcatatgatacaagcagcagaaaacgaggaattaattcctcttggtctagatgaaaacaatgaagttattaggcttgaaacaataaactcagagtatggttttaaaggttggactgtagaagaaatattggaagatgtaatgggccttaaagaaacaagatctaatgaatatatcaatatcagaaaagattttgagaatgcattagaagatgaaaatcatgaaaatgcggttaaatcatttgaaattttaaccaaaatgcttcatccaagaagtccgatgaggaaaatactcgaaattcaattaggatctttgggtgattag

SEQ ID NO: 87795 - DNA, 759 bp, Paenibacillus sp. FSL R5-192
atgataaaaataataagaacatcgccaccacatcaatttgactcagaaaaagttaagcggttaactcaagagtatataaataccaaaagaaatgtgtggaatcttgaatacattaaaagtgctctattagatatgtctaatagtaagtgcattttttgtgaatgcaagctaggcgaagagagtaaatatattgaggttgaacatttccacccgaagtctctgtatccagaagaggttctttcgtggacaaatttactaccgatttgtaaaagatgcaacggtttaaaaagagatcatgatactaagataaatccaattattaatcctactgttgatgagcctaaggatcacctgtttataaaggactatcgatacagaggattaaatgatataggaaaaaggacaataaaagtccttcaacttaatgattctgatcgtcttgtgttaccaaggtttaagattggagacgctatagcagctgcaatagagtctttagttaaagttaaagataaaataaatatggatacgaaaatagaagatgaaaatgagttgataggtaaacttagaaacctgcttttttcctgccagcctgattctgaatatagtactatctgttcatatgctttgttaacagatgacaattactttgaagtcaaagactatcttgtacatcaaggactttgggatttggaattagaaaggttggaaacgataagtttacaacattcacttattagagacaaaatcaatttagcttag

SEQ ID NO: 87796 - DNA, 1155 bp, Paenibacillus sp. FSL R7-269
atgaaagcggattatattaatattgtaaatataggtggtattaaaagccttagtattaaatttaacgatagaattaatttgatttgtggtatgaacggtgttggtaaaagtaccatcttagaatgtatagttcattcgtttggttatgtatattcaaataaaattaagcgaaatcaaaggtctttaataggtgaatgggtgttaagtgttgatgatcaggagataacatttaaaacaaaatcttttcaaccgtttgaaacattgattgatttccaagcagctttcattgaaaaagtcctaaaaattatatatgtaaaagatcaaagatttatagagtataccccaaatgaaggtattcgtaaggatgaggaacgaaccaaagaacaacatcaacatcaagtcatactgggaattcgtccagaaactattaaaacatggtttagcaacagggtcttattcgaaccacatggtaacttatctgatgcagaaatagaaaatatatcgatagcaaaaaaaatcttttcacttttagatgattcggtggaatatgaaaaaattgatcatgcttctctagacttaattatcagtacttccagaggaagcatccacttcgaatatttatcttctggctttaagtctgcattttttgttttactaggaatcataaaagaaattgagtttaattctaaccctaaaattagggtaagcgaatttgatggtataattctaatcgatgaggcggatgcacatttacatcctcaatggcaaggcccgtttttcaaggcgcttaaggaaatatttataagtgcgcaaattattattactacccatagtcctcatatgattcaagtagcagattcggaagaattaatagtgcttgggtttgatggacaaggagaagtaaaacaactagatacaattaaatctgagtatgggtttaagggttggactgttgaagaaatactagaagatgttatggggttgaccgagacaagatcagacgattatttaaatataaaaaataaattcgaggatgccttaaattctgaagataaagagcttgctacagaactgtacattgtcatagaaaagatgttacatccaagaagtcatatgaggaaagtttatcaattacagttaggttcactggggtga

SEQ ID NO: 87797 - DNA, 768 bp, Paenibacillus sp. FSL R7-269
atgataaaagtagagagatcagaacctccggccaaattgacaactgaaaaagttaaggaattaactgaggagtacattaaaacagataataatgtttggaatcaagattacattaaaaaagctttattaaatatgagtaataataagtgcatattttgtgaatgtcgcttgggagaagaaagtaaatacatagaagttgagcattttcacccgaaatcaatatatcctgaagaggtagtggattgggaaaacctgcttccaatttgtaaaaggtgtaacggtctgaaaagaaatcatgacactaagtcggttcctattattaatcccactttgataaatcctcgagatcatctcataattaaaaaatttcgattttttggcaaagatgaattaggtaaaaaaacaataggcgttttaagtttaaatgattcagatcgtcttttctatcctagagtaagaatcggagaggctatttctaatatactcgatagtcttgggaaatgggttgataagataaagttcgagagttccattgaagaccaaaacgaattagtttgtaagatgcgtaatctattaaaagcgtgtcaaccagatgctgaatacagtactatatgttcgtatgccttatttgaagatgataattatcatgagactaaaaaatttatgcagcaagttgaaatatgggatgaagaccttagtacactagaggcaaattgcattaaatattctcttacagaatatggacatcttagatcaaatgtttgttag

SEQ ID NO: 87798 - DNA, 2079 bp, Paenibacillus sp. FSL H8-237
gtgatttttgtagaaagaagtcacttaagcgttccggattggtttaagtcacagaaagcaataactttaaaatctgaaatttcaaacttttactcaagtaattcaatagaattattagcacaacgtagtctaagggaaaaccaaaactatagaagaatgttaagccaggtttctcgggttcctgaggttagatctgaattaaagttgttgtttaacaataaatgtgctttttgtgaaacgtcgttctctgagttgtttgttgcccattttcgtcccaagtctgtttatgaatggttagcctttgaatgggagaacttgatgctttgttgtcgtgattgtaataacgcgcaacgagatagttttcctataaacggtttacgtggtgaagtcatgagttcaattgaagagttgcggaaaaaagaagattatttattagttgatccttgctatgatattccagaggagcatattagttttaattataatggggaaattttatctttgacaaacaaaggggaagaaacaattcgtacatttgaattgaatcgcccttccctagtacgcggtaggagaatgagaattaatgaagttgaaaatatagtaaatcggttaagagaaaatttcgaaattaatcctactcaagcaacatttgatgagctggcattaaaaatttctcagatatacaagtttcctgatcagccttttcaaggttgtgttagagctgtgtttataatggaactagataaattaagaagaaaactaaggaatgaagtgttacaagttaattctgattctctaggtaaacatgtcaaccatcttacaaagatccgtaaaatatcttcaattaaagttgagaacctgctttatatggaagactgcgaaattcagttaaatgagtctgacggatcagattggcttatgatcttaggggagaacggtaccggtaaaagtacactgctgaaactattagctataaatctagctggtgaagaaaaaagaagaattctgaggcatggaatactatctccaaaggatttggtgaaacccggatatagttcagggtatattcaaatagtgttcactggcgaacccgtaataacgcgaaaactaatttttaatctagacgaaacatgggctggctcagcagatcatccctttgatggtaatgtactcagttatggacctgtacgaatcgtaatgaaagaactcaatttcgatgatatcattcaaaatcaatttaattctttttcatgtcttttggacatgaacatgtggctagttgaaaagtataaatcagatatggcaacatattcagctgctgttcgttgtatccgagcgatgctacccatagaggcttcagttgctcagaactttttattagaaccagatgaaaatcgactcgttttccggaatctccatcatgaacaaaataagattccattggactctttaagttcgggttatcggactgtgttttccctagtttgtgatatttttcgaaagcttgatgggaaggatgaatcatcattagaaggaattgtacttctggacgagatcgatgtccatcttcaccctcgttggaagatgcgaattgtcggtcaacttaaagcgttgtttccttcggtgcagtttattaccacagcgcatgatccattatgcttacgtgggctaaataagcaagaaattgttgtgttaaatcgtaacagtaatggagttagagttcattctgataatttacctaatccagaaggtcttcgagcggatcagctacttacatcagagttttttggtttaagtagcacgctcgatccggagattgaagtcatattttcagaatattacagtttgctggcgaaacgagcgaagggatctgcggacgagcagcgtatcgaagagtataaagaaagtctgaagcaatggggctatatggggaataatcgtcgtgagcagctaatgtatcgagcaatcgatttgtttttagctgaagaacgaatactttccacttcagaattacgtcaacacgcggaagataataatcttatggataaacttcgaaatatatggaataaaaaagagtag

SEQ ID NO: 87799 - DNA, 927 bp, Paenibacillus sp. FSL H8-237
atgataaaggttacgcgtccaactgagatacctgctactttggttagtgagtgcgctccaggtggtagattggaaaaagcaattaaagtctattcagactactttaaatctcttgaagttgatggtgaagttaaatctgaaaagatacacaagtttcttaattatgatgaacctgatgttagacaaaagctaactgagctttttcaccgtaaatgtgcgtattgcgagtcattttacgcaggtactggtttattggaaattgaacattttagacctaaagctgaagttcggcaagatagagatgtccccaagcagcgaacaggttattattggcttgcatgggagtggaagaatttattaccttcttgtcataattgtaactctgttatctttcaatatgttgttggcagtgataatcctgaagtcaaagttctcagaggaaaagggaatttattcccactgttagacaataacaagagagtgattaatcacgagaatagcgattttttagctaatgaaatacctcttcttcttaatccttgcgaggatgatcctaaaagttatctcgagttttctgacgaagggcatatttgtccaaaagaaattgaagatagccttatttatgaaaaaggatactggtccatccttacatatggcttagaccggaaagacctgtttatagaacgaaattacatagcaaatcttattacgaaacagattggtagagtgagaagatgtatgactaaatggatgagtgacaataataataatagtttagaagaagaattgattcaggagcgggacgacttatacgactttatgaggccagagcgaaagttttcattaatggcatctcaaataattcaccgtttttgcgtagatgcagggctagattgtccttgttgcataacttcaacgattgaatga

SEQ ID NO: 87800 - DNA, 1176 bp, Vibrio parahaemolyticus 605; identical to SEQ ID NO: 87360

SEQ ID NO: 87801 - DNA, 645 bp, Vibrio parahaemolyticus 605; identical to SEQ ID NO: 86309

SEQ ID NO: 87802 - DNA, 1230 bp, Vibrio parahaemolyticus 605; identical to SEQ ID NO: 86310

SEQ ID NO: 87803 - DNA, 666 bp, Vibrio parahaemolyticus 605; identical to SEQ ID NO: 86125

SEQ ID NO: 87804 - DNA, 1731 bp, Pseudomonas aeruginosa BWHPSA045
atgcgtctggacaagctcaccatcggcagccccaagaaaagccgtacccaccagtttaagaacctgaaaaacgtcaccatagacttcgagcaggatcactgggtaacggttgtgatcggctggaacggcaccggcaagtctaatgtgctggaggcgctggccattatcttccgtgatctgatcaccaaggaacggaagcctgcctttgccttccagctagcctatcgcatgggcgctgacgagagtttgcggcacattcacattgatgcggatcctgatcgcaagaaggagcctttcacgattcacgttgcgacagacgctcaggcccgcggcgaaggaaccctgacctcactcatcgaagatgaaaaagcggtatcagccctgcgtggcaaggctatcaagctcacctcattcttgaatgcgggcggcgagtacctgccacgctacgtgttcagctactactcaggtgagagcctgcgcatgcacgaggtatttcgcccttacctcgaaaactacgacagcaaattacgcaacggcgaagaccccggcctgaagcggctgttctatgccatgccggtgcatagtcagttcgtattactggccttcttgattcaacagtccgatgtggtgcagacattccttgatgaacacctcgggcttgaccccgacgaaggtattgaatcggtgctgtttgttttgcggcaaccgccgtggaaatccaaagcagcggatggtgacccgcgcttctggaatgcgcgaggtgtggtgcgagacttcttgtctcgcctatacaacatcgctttggcacccatcgaggtcagtcgccgcgtctcgacttcgatctggaacaaggaaacgcttcagttcaaatacctttacgtgaaagacatcgcagccttgcggcgcttggtcggcaaccaggcaccagcgcagttttttcgtgatctggagagcacctacgtctcggaattgattgaggaggtgcgcatccgggtacgcctcaagaagaacgacggcagcgttaccttccgcgagctcagcgagggtgagcagcagttgctaacggtgctgggcctgctgcgctttactgctgaagatgaaagcctgttcttgttggacgagccagatacgcatctgaatccgcgatggagcgtggattacatctcctatctaaaacagttcattgccagcggcacaaagcaggaagaaaccagccatattctgctcaccacccacaacccgctggccgtcgctgaactggaccgtgaacaggtgcagattctgcggatgaccaagcaggatgggcagcgtcagatcgtggcttgctatccggaaatggcgccgcgaggtatgggctatgcggcgattgtcaccagcgacatgttcggcatcgcttcatcgttggatcaaccaacacaagagctgttggaggcgcagcgtgcatatgctgccaaggagcagctaactccagatgaactgcgcgagttagatcgcatcaatgctcaactggatcggcttgggttccgcttcttccaccccgatgacgagtactcgcgttacctgcggttgcgcaatgacttacttgtccagaaatttggagcaatgcagcccacggagctcgcatcgcatgtggtgcagatgtctcgggctgggcgtgaggcacttgccaaacagcttatcgctgagctgctagcaaatgagtccaatttgccaaaagggacggcatcatga

SEQ ID NO: 87805 - DNA, 813 bp, Pseudomonas aeruginosa BWHPSA045
atgaggtatgtcgatcgcttaaagcttgtgaagccaactggctggagtcaacgagctcataccgccacacaggccgtagcaaatggtgaggatccgaatgaccatagccaggtttggcgtgacctcaaggacggacttgctgcgcttctgcacgacaaatgttggtactgcgaaacgcctatggaccgatctgataacgctgtcgatcactttcggccaaagaaccgtgttgcagatgcagcaaacccgcacgcgggctatcgctggctggcctttgacgagagcaactttcggtatgcctgtacctattgcaacagccgacgcatagatcaggagggaggaaccgcgggcggaaaggcggatcgttttccattggtcaatgaagcccagcgtgtgtacgtggctgggtcattggtggcggagcaaccaatgctgctcgatccctgtgaaatttctgactggcgcctactcggctgtcaccaagagaatggccaaccctgcgccactggcactgatcctgtctccaagagacgggcagaagaatccatcgagatttaccacttgcattacgagccgacatgcaagcgacgccataccgcagccgttcagttgatggcggatgttgacgaggggaaacgcttgtttgatttggccacccaagatccaaatcgtgagggtgacttcaaggtagtagcagcgcgactgcggcgtgcaattgatcgtgattcgccctacagcggcgatatgcattttcttctgcgggggcagcgaagtgacgcccatccgtggatacaagagctcttagaggcctga

SEQ ID NO: 87806 - DNA, 1233 bp, Rhizobium leguminosarum bv. trifolii CB782
gtgtacgccaagtctctcacgatatatgatttcaaatgcttccagagagcgaagctcgatctccaatacccgggccgtaagacggcaggctcttcagagatatcgaacgtgaacctcatcctcggagacaatggaggtggaaagtcgtccgttcttcgggctcttgcaatcgcggtactggcaccagcgctgcagcggtcgggctttgtgccataccgtcttgtccgccgtcaggtaccgggaatgcccgaagtttcacactgcctcttgaaggtgattggtaaggccgattcccacgaaggagctctgggtctaaagaaccggattgagctcctagcgcggcttgatccgccagcccgcggcaatctcgatcggatctatctcgaatatacgccggactctccagtgacgcccctgctcgaggatgatttctcgcctgcttttttcgtggtcggttacggtgccacacgcagggttgaaacgggagattattcagagagcagtgcccgccgctcgcgcggtctacgttatcagcgtattgccggcctgttcgaggatcacgtggcgctcagaccgctgacgacgtggctgagccgccttaagccaggcagtccgcggttcgctgaagcagtgagcttacttaacgacgttctgcccaatgacatcgcgtttacgggcgctttcttacccgaggacgaacagtatctgtttgatttcgagggcgcaccgacgccgttcaattcgctctccgacggctacaaggccttcattggctggataggtgatctgattggccatcttgccgacgtggcgtcgcaggatgaaccgctaaactcgatcaacggaatcgtccttgtggacgagatcgaccttcatcttcatccttcctggcagcgtcaggtcgtacagctcttgtcaaaaacgtttccacgccttcagttcgtattcacatcacacagtcctcttgttgccacgagcgtaaagcgcgagaacatcttcatcaccgatcgcgctgagaatggaactgcaacgattagccagatcgccgagcacgcatttggccaaagcgtcgaacaaatgttgctatcttcctatttcggtctgacgacaacgcggccagaatcgtttgaacaggaatcacagagcttgttcaaacgtgtcgcagatggcgactccggggctgcgctggagttcttgaagcgagttacgtcgccatctcggtccgccggataa

SEQ ID NO: 87807 - DNA, 876 bp, Rhizobium leguminosarum bv. trifolii CB782
atgatacgccatcaatttgacatcgctgcggtcgaagaggctgtcgccgagctcgacgcaaactggttgcaaaaggctaggaagcggactgcgaaattcatagcgcagaaggcctacaaagaggcatcatcgatctggagcacggtaaagcccgtctacatgcggttgcagcacgataaatgtgttttctgcgagcagcggctggagggtggcgcctatggccccgtaatctgggacctcgagcattttcgcccgaaatccaatgtggagatctggccagatccgacgcgtcactcggacttaacctatgcgaatattgggacagcgtcagcgagcggttattattggcttgcttatgagctgcggaattacgcagcctcctgtaaagtgtgcaactccatcttcaagctcaactggtttcctatagccgcggtacgcgctttgagcgagaccgatgccgttgatcaggagcacgcattcttgtgttatcccctcgaagagggtgatctcgatccggaggagcttataacgttcacgctaacgactgccgtgccaacacaccgcgaggggcctctcaatctgcgcggtcgcatcattatcgatttctttggactgaacaagcgagacacgcttcaccgtgaccgggcgcagatgatcggttcaatcggaatgctgctggaagagcgtgatcgcggaaccgcgagcgctgaaaaacttgcagccattgaacagctgagcggcccgcacgtcccgcatgcagcatgtgtgcgggccttcaaaagactgtgggaagtcgatgcagtagccgctcggcgaggctacgagatgtgtctggcctatggatttgatctctcacgcgcaccgccagccctctag

SEQ ID NO: 87808 - DNA, 1176 bp, Vibrio parahaemolyticus IDH02640; identical to SEQ ID NO: 87360

SEQ ID NO: 87809 - DNA, 645 bp, Vibrio parahaemolyticus IDH02640; identical to SEQ ID NO: 86309

SEQ ID NO: 87810 - DNA, 1230 bp, Vibrio parahaemolyticus IDH02640; identical to SEQ ID NO: 86310

SEQ ID NO: 87811 - DNA, 666 bp, Vibrio parahaemolyticus IDH02640; identical to SEQ ID NO: 86125

SEQ ID NO: 87812 - DNA, 1176 bp, Citrobacter freundii UCI 32
atgctaaataagttcgatattataaataatcaggaagattgttatattcttgtggggagaaatggaagcggtaaaagctcattgttattcgagttggcagaggattttcataacgcaggttacaatgttattgctgtttcaaatacattgtttgataaatttctagtgcataaaaatagcgatcaatacgactacattggtggtaagttaggacgttccttccctgcgttagccataaaaagaactatttcagcaaacaaaaatgatcggcttggtcgtatattttttgtgttgaaagaaataggttatgatcagagggtaggtgtaagaattaaatttagaaggaaatttaaagaaatatttagatacccgggtgatacaatgagagatcactataaagctttctttgataatatagatgaggacattccagatgaactgatgtccgccttaaataaggccgtgtataagactggcaataggctgagtgtgttggattggttggagggtgaagataatgttttctatgagagtgattttaattcatatttgcaattgataagatatgagcgacttctaaaaaaagcgaaaataatttcttctattgagatatttcttagtaaacatggttctagttttcctctaaatcatgcaagctcaggagagctttccttcatagctttgcttgttcacgtcgctttttgtgtaacggataattcatatatattcattgatgagcctgaaaatagtttgcatccacaatggcaaaatgaatatttagaattgctaaaaggagttatcggatataatcagtgtgtaattgtcgtagctacacattccccgttgattgtcacttctctttcagcacaagataatgccgctatttttaaacgaacaaaaaatgggtttgaaaaagtcgaagcttatgatgataatgctgaagaaatatatattgattactttgacacgttaacacctaaaaatagagcgttatccaatagatgtgtagagattatagatgaatacacattggggaaaacgactttacataaagccaaggaacaattgtttacttacgagagaatgtcgagtgattctgctcagattgagtttctttctggtgttgaagccatattggataacatagataaaaataaaggaaaacaccatggctaa

SEQ ID NO: 87813 - DNA, 633 bp, Citrobacter freundii UCI 32
atggctaatttttcatttaccgaagaagaaaagtctttgataaggagtgcgatcgctaaggggcatggtttttggggtgatggttctttggcggatattaagggaaaagtgaaggtctttttaagggagcgacaggttgaggtttgttgttattgttcaaggaatacagataatgaatttaaaatggtattggatattgagcatgtgatacccaagtctgtcttagtttctgagatgtttgaattaaataacctggcagcatcatgtaagcgatgcaatatgagcataaagaaagaagatgtctcttttattaatgaggatataaatacttttaaagctggagggaggtattatctctcggagagttataaattcttgcaccccaatctcgataagtgggatgataatttacattattacgttgtacagcgtaatgatagaaagatggtttattataacgtggttgaaggaagtgaaaaaggagagtatacgaaaaaatatttccggctggcagatattcaagtaaatacctttgatgaagtacaggaagctacagcaagaaaagaacctgtggaccccgaagtggctagtaagtatataaagctagttgattcaatgttgagtaaaaattaa

SEQ ID NO: 87814 - DNA, 1260 bp, Citrobacter freundii UCI 31
gtgtacattagaaaaattcaattagaaaatattaaatcatttaaaaacttcacttggcagcttgaagatgaagaaaacccggttggctggcacgtaatccttggcgataatggttcaggaaaatcaacatttattaagtctgtatctttagctttattgggtacgacagatgctaaaagaacaaaagttccttttggcgaatgggttaagcagggctcatcagcaggcttcattcgtttagaaatccagcatacgaaaatagacaactgggcaggaaaaggtaaacagcaaagtgaaaatttaaagttttctttaaagctaagctctaatggagaattaacccatcatggtactccatctccaactcggcatgtatggggcggtaaaactggctggttttctgccgcttatggcccttacagaaggtttaccggtggttcttctgattaccaaaagcttttctattctgcccctcttcttgctcggcatttaagtgtttttggcgaagacattgcattaagtgaaacacttgactggcttaaagaattgaaatttaagtcgcttgaaacaaatggcgcaaaaaaatacgaacttctcaataacataattacctttattaaccaagatgacttactgccgaactctgtaaagttaaatgaagtaacctctgatggaataacatttattgatggtttcgacaacatcgtagatattaactcattaagtgacggatatcgaacagtactaagcatgatgttagagttaatccggcagatgactatttgctatgatacagattcgatattttcacctgatctgaaaagaataataaaaccaggcgtggtattcatcgatgaaattgatgttcacttacaccccaaatggcaaagaacaataggaaaatggttgacctctcactttcctgaaatacagtttattgtgagcactcatagcgcattaatctgccaaagtgcaaacccaggttcaatctggaagttaccatctccacattacccaggtgaaagaatcactggcaatgcccttaatagacttatttacggcgacttacttgaagcaattagcactggggcttttggtaatgaaataaaacgttcagatgatgcgaaatttcttatggaagaattggcagatttgaacattcaagccatgattcaagagttaaatgaagaacaaaaagaaagaagaaaggacttacaagctatttttggaagtaattcaaatttaacatctaaaggataa

SEQ ID NO: 87815 - DNA, 789 bp, Citrobacter freundii UCI 31
atgatcgtcatgactgctcataattttcttgctacaacagagacacatctaaatttaaaacagcaggaaataaacaatgagacaagctatgcaggcaaggtagtaaaagctaataatttatggaagtcaaagtcgaagaaacattttgatgacatcaggactgttctggacaaaatgtgtgttggctcacgccgatgtaattattgtgaagattctgtagctgatgaggttgaacatattaagcctaaaagcctatatcctgatgattgcttcaaaagcgaaaattatttatatgcatgcggtccttgcaatggcccaaaaaataataaatacgctattttcgaccagcaacgcaatgttattgatgtttcgagaaaaaaaggtgatgctgttattccacctcaaaatggaaatagtgttttcatcaatccaaaaacagaagaccctttggattttataattcttgatctaaatacattcatttttatacccttacccggaaaaggcaaaattgagatagctcgggcaaaatacacaatagaaacactggaattaaactctcgtgattatctagtaaatgcgaggaaacatgctttccatagttataaagactccctagaaacttatattaataaaaagttaaatggtgaagcaagtgaccaactactcataagaaaaaatgagattaacggtcgtcaccatcctacagtctggagtgagatgaagcgacaaagctcatttcatccagagcttaaaaagctattcgatgctgcacccgaacttatataa

SEQ ID NO: 87816 - DNA, 1230 bp, Vibrio parahaemolyticus EKP-028; identical to SEQ ID NO: 86310

SEQ ID NO: 87817 - DNA, 666 bp, Vibrio parahaemolyticus EKP-028; identical to SEQ ID NO: 86125

SEQ ID NO: 87818 - DNA, 1230 bp, Vibrio parahaemolyticus IDH02189; identical to SEQ ID NO: 86310

SEQ ID NO: 87819 - DNA, 666 bp, Vibrio parahaemolyticus IDH02189; identical to SEQ ID NO: 86125

SEQ ID NO: 87820 - DNA, 1176 bp, Vibrio parahaemolyticus IDH02189; identical to SEQ ID NO: 87360

SEQ ID NO: 87821 - DNA, 645 bp, Vibrio parahaemolyticus IDH02189; identical to SEQ ID NO: 86309

SEQ ID NO: 87822 - DNA, 1230 bp, Vibrio parahaemolyticus Peru-288; identical to SEQ ID NO: 86310

SEQ ID NO: 87823 - DNA, 666 bp, Vibrio parahaemolyticus Peru-288; identical to SEQ ID NO: 86125

SEQ ID NO: 87824 - DNA, 1413 bp, Vibrio parahaemolyticus Peru-288; identical to SEQ ID NO: 86314

SEQ ID NO: 87825 - DNA, 645 bp, Vibrio parahaemolyticus Peru-288; identical to SEQ ID NO: 86309

SEQ ID NO: 87826 - DNA, 1359 bp, Escherichia coli BIDMC 43b; identical to SEQ ID NO: 87574

SEQ ID NO: 87827 - DNA, 660 bp, Escherichia coli BIDMC 43b; identical to SEQ ID NO: 87575

SEQ ID NO: 87828 - DNA, 1359 bp, Escherichia coli BIDMC 43a; identical to SEQ ID NO: 87574

SEQ ID NO: 87829 - DNA, 660 bp, Escherichia coli BIDMC 43a; identical to SEQ ID NO: 87575

SEQ ID NO: 87830 - DNA, 1359 bp, Escherichia coli BIDMC 19B; identical to SEQ ID NO: 87574

SEQ ID NO: 87831 - DNA, 660 bp, Escherichia coli BIDMC 19B; identical to SEQ ID NO: 87575

SEQ ID NO: 87832 - DNA, 1359 bp, Escherichia coli BIDMC 19A; identical to SEQ ID NO: 87574

SEQ ID NO: 87833 - DNA, 660 bp, Escherichia coli BIDMC 19A; identical to SEQ ID NO: 87575

SEQ ID NO: 87834 - DNA, 1359 bp, Escherichia coli BIDMC 17B; identical to SEQ ID NO: 87574

SEQ ID NO: 87835 - DNA, 660 bp, Escherichia coli BIDMC 17B; identical to SEQ ID NO: 87575

SEQ ID NO: 87836 - DNA, 1359 bp, Escherichia coli BIDMC 17A; identical to SEQ ID NO: 87574

SEQ ID NO: 87837 - DNA, 660 bp, Escherichia coli BIDMC 17A; identical to SEQ ID NO: 87575

SEQ ID NO: 87838 - DNA, 1359 bp, Escherichia coli BIDMC 15; identical to SEQ ID NO: 87574

SEQ ID NO: 87839 - DNA, 660 bp, Escherichia coli BIDMC 15; identical to SEQ ID NO: 87575

SEQ ID NO: 87840 - DNA, 1359 bp, Escherichia coli BIDMC 9; identical to SEQ ID NO: 87574

SEQ ID NO: 87841 - DNA, 660 bp, Escherichia coli BIDMC 9; identical to SEQ ID NO: 87575

SEQ ID NO: 87842 - DNA, 1359 bp, Escherichia coli BIDMC 3; identical to SEQ ID NO: 87574

SEQ ID NO: 87843 - DNA, 660 bp, Escherichia coli BIDMC 3; identical to SEQ ID NO: 87575

SEQ ID NO: 87844 - DNA, 1359 bp, Escherichia coli BIDMC 2B; identical to SEQ ID NO: 87574

SEQ ID NO: 87845 - DNA, 660 bp, Escherichia coli BIDMC 2B; identical to SEQ ID NO: 87575

SEQ ID NO: 87846 - DNA, 1359 bp, Escherichia coli BIDMC 6; identical to SEQ ID NO: 87574

SEQ ID NO: 87847 - DNA, 660 bp, Escherichia coli BIDMC 6; identical to SEQ ID NO: 87575

SEQ ID NO: 87848 - DNA, 1308 bp, Candidatus Entotheonella sp. TSY1
atggcacgcacgcggcgcaatggtgactcagccccggagggacgatttacggcactccgtttgcaaaacgttcgctgctttgaagaggtggcaatccagcttgacccgcagatgaccgttatgatcggtgaaaatggcactggcaaaacgacggtggccgaagccctggcttcgctctcctatggtgagacggaaggtctgagccatttccctctgcgacgcgacacacgccatggcgaaatcgccttgttcgatgcagcccatacagactctgtagccatctggcgccatgatgaagcatctgcgacgcaccagcggcttcccctcacccgctacttatttgcctacggccggtatcgccggatacacgacccgggcacatgggaagatcccgaatcactcgtaaacgtctcatcattattggatgaactagcgaacgcggtgaccgaacggcggacaaccaccctcaaccatcctgatgggcgccttctacgcgacctcagccgctatctcgtcgctattcatgaagcgcgatcgtttgatccgaggatggatacgatttgggatcgattgcagcaatcgctacgcgaattgcgtcaaggtttagaacgcatcgagatggtcgaaggagaaatggcctacattcctatggtggtccggcgcggggtgcgcttggggctaaacgagctctccgatggctatcaggcggttttggtaattgtatttgatcttatactccgctatacctttttgtttagcaccctgagcgaccccttagcaggcacggctacagtgatgatcgacgaggtagatctgcatctgcatgtgcggtggcagcgcctagtattgcgtcagttgaccacgttgtttcccggcacccagttcgtcgtcaccacccattcgccagcggtggtacaggcggcgatcgatgatggacaccacatcattaccctgcgagagaaaaagggcacggtagaggcgacaccattgagcgcgcgtaagcgaaaacagttgcaaggtgcggggatcgattcgctgtttatcgaaaagctcctgttcggcgcagattcacgctattctgctcaggttcagacagacgaagacgaagtgcgccgtctacgccgcaaggtcgaatcagatcgcgccactgacacggatcgggagcgcctgtttgtgctgctcaatcgactcgaaggacttgtagcgtcagaggcagagcgacacgaaagcgggccgttgatatccgagatgacgaagttgcagctcgcatttttgaaggagctggctatggagcttgatgaaaagtag

SEQ ID NO: 87849 - DNA, 768 bp, Candidatus Entotheonella sp. TSY1
atgagatctctggaccgtacggcgatcaatgctccggcggattggcaggataaggtgaatgataaactgcccgatccggaagcgtacgccagcaaagcccaagaattcgagcaactgccaatcaacggccagcagcgccggaacagcttcacaaaatatgcgccggaagagttgcccaagcgccgcaggaagccttacttcccgaccgtatggagcagtgacaggcgtgtcaaaagtgccttggccacttggtcacacagcaaatgtgcctattgcgaagacaagattaatgcacgccgttcgcaacaggtggagcacttcaagcccaaatcgctttttccctcactagcttacgattgggacaattattttttggcctgtaatggttgcaacggcactaaatcggacaaatggccggaatcgggcaagtatgttcgaccggatcaagatcagccggaaacgctgttcgctttcgatgaacagggcggtatgaaagctcgggaaacgagtagtgatgctcaacgtacggtggatgattttggtttggaccggccaggattgcgagaggcgaggaaggtggctattcgccagcctttgaacacgatgcgcacagtgctcgctcaacgcctaccagataacatgaagcgtcgattggcgcaacggattgtgaccgaagccgaacatcctgaggtatcctactctcaggcgaaaggacaaaatttgcggcgcttgtggcacgaacatttccctaatgtgagtctgttttag

SEQ ID NO: 87850 - DNA, 1341 bp, Candidatus Entotheonella sp. TSY1
gtggcaggcgccttccggctcggcctcgtgattgtgaggttgtgttttagcgttgtggggaatcaaacgtgggataaagttgtcatgtttctcaaatcgatccggctaaaaaattgcaagtgctttgatgacttagaactgacctttgcagaagaagatggtagcgtccggtcttggactgttttgcttggggaaaatggcacgggcaagagcacccttttaaaggcaattgctgttgtcacaagcggtagcaatgcgttgggagagttgttagaggagccgagtgactggattcgatatcgtaaaacctactgtgagcttgaagccgtattggtaacgcaagagctggaagagcgtcacctccaagtgcgcatcaacaaaggggacacgatcacggatgtgatcgtgcgcaatctgcaaggtcttgacgccttggatcgagccctcaagtatgcagagcggaattattttgtggtgggctttggcgcctcgcggcgtctgagcccggatatcggacgccgtgccaagacatctgcatttcggagcgcacgggcacaaaatgtggcgaccttattcgatgctgatgctgttctcaacccgcttgaatcctgggctatggatctggattatgccaatcgtaccggcatccgtacaatacgccacgttttgaatcagtttctgccagatgtgacgtttcaccgtatcgataagaagcagggacggcttctgtttaaaaccccagatggcattgtgcctttgcaggcgttgagcgatggctatcaaaacattgctgcctgggttggcgatttgctttatcgaatcaccgaggtgttcgaagattatcgcaaccctttgaatgcccgtggtctgttgctgatcgatgaggttgatctgcatttacacccgaattggcaacgtgaactcctggctttccttggcaaccatcttcccaactttcaatgcatcgtcacgacccattccccggtaacggcacagcaagcggggcaggggcacttacattacctaacgcgtgaagatggcagcattcggattgaacctttcagcggtgcgccaagtcgcctcctcattaatcagcttctgatgtccgacgcctttggggtcgtttcagacgaatcactcgacctgcaacagaaaaaagatcgctatcgggaactgagggaccaagaccatttgtctgcgaatgaagaagctgagatggcggacttgatggcgtttctgcaagagcagcctactggcggccgctcaaacgtacatttgcacgatgcgcaggtcgccctcctgcaaaagatcgaacgcgagctggcggagccaccatcgtga

SEQ ID NO: 87851 - DNA, 546 bp, Candidatus Entotheonella sp. TSY1
atggcggctgtgcatcggaactttcgcgatacccggaaacaaagctttgaggcggaattactctacaatcaacggcgtatcgtgcggggtgagctggacaagcatccgtttgaaaccgagcggtggaaacaagccaaatcgcagctcatcatcgagacgcatggcaagtgtgcctattgcgaagccccaaccacgatggtggcctatggagatgttgagcattatcgccccaaaagcatctattggtggctggcctacagctgtgagaactatctcgtgtcctgtcagctgtgcaaccaaaaattcaaaaaggacaggtttccggtccgccacacgaggatgcgaggtccgagcattcggcgcaataccacggatgcctacatcgaatcgaaagcgggttcgctagcgcctaatccgttggacctcaatcaagtcagcgagtttttggaaagacacgagcaggaacgacccctcttgatcaatccgtatgttgacgaacccgcagcatattttgcctggcgagctgatgatgtgttaacagcaatt

SEQ ID NO: 87852 - DNA, 2205 bp, Candidatus Entotheonella sp. TSY2
atgcctggtccgccagaaccgctgattgacgcgtgtcaaaacggcaattgtgtcctgtacgtcggtgcgggcgttagtgcaccggcccaattccctgtgtggaagacccttgtcgaagatatgatgtcgtgggctggctcggaaatgagtatgtcgccaagcttattgcaagctgtggagggagcggttcaggcgggcgagttcactttggctgccgatagcatcgtgagtgagttgcaaagcggtgatgagctggagcacttacacgcatatctacaacatatttttgatcgtcccgccgacttgacacctttgcatcagctctttcgtgaactgccgctttcagcggtaataacgacaaactttgacaggatgttggaacagacatttccggaagctggcgaccgggtgcttacacctcacgacacggaacggctactggagctatccgccaagcgagaatttttcattgcgaaactctatggcagtctcgatcggccggaaaccctactggtttcccccgcacagtacgaggacgccattgtcggcaatcgccaattcgcggagttcatggagagtattttcgtctctcgcactctcttgtttctcggatcgagcctcgaaggcatctcggcatatttagaaggtatccggtttcgaggcggtgaacagcagcactatgcgttggtggcggtctccggtagcgcctggaaggctaaggctgctatgttgcagcgacgctatggcattcaggttctggcgtatcctgagaacgacgcacatcccgaagtgtatgcgtttttcaatcgtctggtaaacgaggtcaaaagacgtgagcgagcaagttctcgcaccacggcgacattgaagcgggtcgtgctggagaacatcggtccgtttgagcatcttgagttggagctgacgaatacgtggaatgttcttctaggcgacaacggggtgggtaagtcgacgattctcaaagccattgcgcttgccatgtgcggccgtgatgcgaagccgtatgcgaaccgcttgctccgcagtggtacacggcacgggcgtattacgttggagaccaaccaagggcgatcgtatgcaacagatatctttatgagtagccgaggtattgaggtcgaatcccgtcccgtgggcattatggagatcgaagggtggctcgccttggggtttccgcctattcgagcgatgtcgtggcgcggttcgttcggaccccaaggcgagccggcgttgcaacggcccacaacaaatgacctcttgccgatgatgagcgatgagcccgacccgcgtcttgatgaagtcaagcagtggattattaatctggattatatgaagcggacagccgatgacgacagccagcatgacagggcattttacagccggcttcaggaccaattttttgatatgatccgcaccctaaccggggagttggaggtcgaatttgccggggttcaaccggagatgtggcaagtcatggtccgaaccgacgatggtctcgtaccgatcgagtcggtgagccaggggaccgccgccttgattggctggacgggactgcttttgaaacgcctctatgcggtagttggcgacatggaaaatccgatgcaggcgtacgcgattgtcttgattgacgagatcgacgcccatatgcatccacgctggcaacaatcgctgttacacgatctctccaaattgttccccaatgtacaattcatggccacgacccactcaccgcttgtggtgagtggcatgcaagcagaccaggtgtttcggtttgaacgtgatgctgagggacgagttgagcgcattgaggtgccgcaagatatgctatttggccgcgccgaccaaattctcacgggacggggatttgacttgctatcgacatcggattatgaaacccaaaagctcattcaggaatataaggaactcgtccgccaatcccatcgaaagccggctgcagatgacaaggcggcgcagccgcttgagcaccgtattgcgacattggaggctcagcttcgacaacggttgcccacccctgaagaggagccggtaaagcgccgggccatcgagctgattgatgcgcttttggatgagacgctgagtgctgacttgccggaggcgaaggacatgctgcgggaccgggcacaaaagctttttgacgaattggagcgccagccggagaggtggcgatga

SEQ ID NO: 87853 - DNA, 936 bp, Candidatus Entotheonella sp. TSY2
atgaggcatgtcgattttgatccggaccagctgtctgagaaagcggatcaagattggtggcggcaatggttatctgaggctgaggcagcgacggcagctctcatcttgaaatggcgggcatcggagccgatttccgctgatgactttcaatccgcactttggaaagctctcaaagtttggctgatggagcatgttttccacggcaaatgtgcctattgtgaaattcaccttaccggggctcgccagcctggtgatgctgagcattaccggcctaaaggtgaggttcgttttgtaccggatggacggcggcgatccatcagggcgagtgcctatgacgagaagggaaattcggtcgatcatccgggctatttttggcttgcctaccattggcgcaatctactgcccacctgtacgatgtgcaatcgcgcggtaaagcgtaatctatttcctactgaagaccgtcatgtcttcgtgatcgagttgactgatgaccggctcggggagttgagcgaggagccaaacgagacgccgattccatttgaggcgggttcgaatggatatctgttaccaccgatggctctcgatcaacacgaggcacctcaattattgcatccctaccgggacgacccgtcgaaacatctgcggtttggggaagggggtgtcgtcgtggagttgagtcctcaaggggagagttcgattcgcgtttataagctcgatgacaacgatctcgcccgcgagcgtcaaaaagctcaacaaagagcttggtggcaatatcaggccgctttccaacacgcggaggccaatttgaacatgacacaagacgaatgtcatgcgtttggttggacattcttaacagattggaaggacggtagagaaccattctcggccgctgggttagattatgttgtatatgtcaagaaggcgccagagctctaa

SEQ ID NO: 87854 - DNA, 1650 bp, Candidatus Entotheonella sp. TSY2
ttgggcgactgggaagacccgcgcctggcggagcgagtccgtaatgcggttcggcgcaaacaacaagacaccaatgaacgccgtgcctttgccgccgcccaccctgattcagccgtcgacgtccaacttgcgtttgccgggcacaccgattcgattgctttgacttccgcggctgactgcctgcgcgcccaaatcgccgaggtgatcgacatgccatccgagttcgtctcgctgaaccgggtttccaaaacctcgccggaggccagtctccgatttgccaatcccgaagacgcgctgcggctattcgccatggtgcgaaccggtgatgcattcatgaccgagctgtttcagcattggtcgatcgatatcgagcgctttcaacaggtcaatcgcgaaacgtccgagcgtctgcggcaagccgaggtggagccagacattgggccggagcccatcgagacctcgccgctgcgccttatccggatcgaactcaagaattttcgatgctttccgtatttgcgtctcgaattggatcaaccctcgaccctcgatggtcactggacctgtctagcgggcattaacggctcaggtaaaactgccattctccaggcgatgagcttggcgctcctcggtcatccgacaacccacgaactcggtgaaggtctgctggcccggactcggcgtctggaaaatgggcagcatgtagatgccgaaattaatttgtggtgtcgagatcaccatgggaatcactacgtctctctccatatcaccgagaacggaacggtctcggagagctacgatcgcggcatgcgtgccttctgggatcgggtgcggtcgtcggtgatcttggcgtatggcgcgacgcgcaacttgtccgaatttctcgactcgcggcaccataatgcgagtgaggaaacccaacgccaaatcaccctatttgatccgctcgcccgcctgatgagcgccggaacgttgctgcaatcccatgcccctgacagcgcctttacccatctattcgaacaacttttagagagcattttgggggaagagcttcggctctcggaccatggcagcggcatccgcttcacggttgaggacgaaccggtcccagccatcgacttgccggacgggttccgttcgagtgtcgtttggctcgccgatctttgcgaggcgtggtgccaaaaattcccggagcgggccgaaaacgcacgccctgaggatatcgaggcaatcgtgttactcgacgagattgatttgcatctgcatcccaccttgcagaggcgcttggtgccagccttgcgcaaggccttgcccggcgtgcagtggatcgtcaccacgcattcgccgcaagtcctctctagctttgaccgcaacgaaatcatcgccctggaccggcatgagccgtcaggcgcgcgggaactcgaccggcagattttagggtggacgacggatgcagtgatcaactggctcatgggggctgagtcaacgagcgcggccttggacgaccggatcgccgaggctgcgcaaaacccaggtggcactgaggatcgctctctggctgaactcctggaacaatcgcccgatgccagtgaggaagaagcccggcagcgcatcgagcaattggcgtcccgtctcgatcggctggatctgtga

SEQ ID NO: 87855 - DNA, 942 bp, Candidatus Entotheonella sp. TSY2
ttggcagcccggcaccggcaactcaaggcagacgcaccggcaaccaagctcacctttcgtgatcactggaaccgcccggatgtgcgcggtacactctacgcacgacagggccgtatctgtacctactgtggccggtgtcttcctgataacgataagggggacgtcgagcattttcgccctaagggcaaggtagctgaagatgacgcgcacggtggatattggtggcttgcctatacgttttccaactacttaatgagttgctcggtttgtaaccgtgtctataaacgtgatcgcttcccgctgcggcctggggctcggcaacgggtgacatttgagactcggcagcggctacggcatgaagcccgtttgctcgtgcatccgtttgacaccgatcccattcatggctccatcgagcaatggttacaagtggattggcaggagacaaattgtttcatttggccccgcgagacactctctcccaagcaacgggtacaggtgcaagggacactggattttttccgcatcaatcgtagtccgaggctcatccaagaacgcaataacattaggaacaacgtactcaacgcactggatcagggcgataacgtccaggtcaagcaatccgccagccgctttcgcccccacagccttatcgcccggcaaatgatccaagaccgtcagcgcctcgatttgatgccaacccccttggaggaattgcgcgatttcgtcttggctgaactcacactactcgatatcgcattccggcttctcgatcagcatccggaagacgattccctcaaacgtgtagcgcaagagcaactttggatattggtagccttgtggtacgatccgccagtcgcaacgtcatctgatgctgagcgcttcctgccgccgatgatccaagaccggctgcgcccctatctcaaccaattcggcgaggcatga

SEQ ID NO: 87856 - DNA, 1242 bp, Fusobacterium sp. CM1
atgaaaattgaaaaagtccatataaaaaatataaaaggaataaaagatttagaactttcatttaaaaaaaataataaaattttagatgtaattgttttagctggagtaaatggaagtggtaaaacaactattttagaatccataaaagatttttttaataataaaaatgtaaactacgatgaaccaaagaaatcaaatgttaatttaaatatattttttgaagaatttgaaaaaaagaaaataaaagaggcagaaaaatcttctaataacaataagcgaccattatgggatttttttagtgctttacaaaattatgagatttatataaaaaggagtgataaacattatcatactcatatagcaaaaaagtttgatattccacctaaaataatttatgtcccagctgaaaataaatttgaagaaattcaaacttattctacaactttatcaaaagaatatgaatttataaatactataaattctaatgtaataagggatattccatcatatatagcaacaagaagaaattatcttgctactattgaagaagatttaactatgaaagaggttactaataaagtagtaaatgaaataaatggtatttttagtattttagaattagatgtaaaattaaaaggtttttcaaaagatgaaaaaactttacctatttttgaaaattctgctggtgaagaatttgatataaatgatctatcatctggtgaaaaacaattatttttaagaactctatcaattaaaatgttagaacctaaaaattctataattttaattgatgagccagaattatcattacacccaaaatggcaacaaagaataatagaagtatataagaagattggagaaaataatcaaataatagttgcaactcattctccacatatattgggaagtgtttctaatgaaaatatttttattttgtatagaaatgaaaatggaaaaatagaagctaaaacaggagatgaactttattcttcttatggacagcctgttgatagagttcttaaagatataatggaattaaaatcacttagaataccaaagatagagaaagacttagaagaacttagaaaacttgtagatgaaaataaatatgaaacagatgaatttatagagaaatataataaacttcttaaaatattaggaaatacagatgaagatttattccttatagatatggatataaaaatgaaacaaaaggtgaattctaatgttgaaagtaaataa

SEQ ID NO: 87857 - DNA, 591 bp, Fusobacterium sp. CM1
atgttgaaagtaaataagaaaaaaagtgaaccagaagaatttactaaatacaaaagtaaacataaaataataaattgggatagttttacacctgaaattaaacaagttttaaagcaatatctattagaagaacaagaaaatagttgttgtccctattgtgaaatagaaatccatttagaagatagccatatagaacatattaagccaaaagataaatttccaaaacttttagcagactataataattttattgcttgctgtcttgaaaagaaaatatgtggtgattcaaaagcaagtaaatggagtgaactttttattaatcctattatagaagatccagaagattattttgaatatgatataaaaactggaaaaataatacctatttttaaagagggaaatagacgtgaaaaagccaagtatacaatagatttattaaatcttaatgataatagactgtgtgaaattagaaaaaaatatatatttgaatttttaagttatagcaaaaataataaatatagtttaaacaactttccagtaaaatttccatctttaagaagatatttagaaggggctgttgcaaacttataa

SEQ ID NO: 87858 - DNA, 1242 bp, Fusobacterium sp. OBRC1
atgaaaattgaaaaagtccatataaaaaatataaaaggaataaaagatttagaactttcatttaaaaaagatgataaaattttagatttaattgtcttagctggagtaaatggaagtggtaaaacaactattttagagtccataaaagatttttttaataataaaaatataaattatgaagaaccaaagaaatcaaatgttgatttagatatattttttgagaaatttgaaaaaaagaatattgaagaagctgaaaaatcttctaataactacaaacaaccattatggaacttttttaatgctcttcagtcatatcaatatgagaaatacaataataatggattatatcaaaatttaatagcaaaaagatttgaaaatccacctaaaataatatatgttccagctgaaaataaatttgaagaaattcaaacttattctacaactttatcaaaagaatataaatttataaatatcgtaaattctaatgtaataagagatattccatcatatatagcaacaagaagaaactatcttgctactattgaagaagatttaactatgaaagaaattactaataaagtagtaaatgaaataaacagtatttttgatatttttgaattagatgttaaattaaaaggtttttcaaaagatgaaaaaactatgcctatttttgaaaactctgctggtgaagagtttgatataaacgatttatcatctggagaaaagcaattatttttaaggactttatctattaagatgttagagcctaaaaattctataattttgatagatgaaccagaattgtcattacatccaaaatggcaacaaagaataatagaagtatataagaagattggagaaaacaatcaaataatagttgcaactcattctccacatatattaggaagtgtttctaatgaaaatatttttattttgtataaaaatgaaaatggaaaaatagaagctaaaacaggggatgaactttattcttcttatggacaacctgttgatagagttctcaaagatataatgggattgaaatctgttagaactccaaaaatagatagagatatacaagaactaagaaaacttgtagatgaagataagtataatactgaggaatttaaagagaaatataacaatcttcttgaaatattaggaagtactgacgaagatttatttcttattgatatggatgcaaaattaaaacaaaaggtgaattctaatgttgaaagtaaataa

SEQ ID NO: 87859 - DNA, 585 bp, Fusobacterium sp. OBRC1
atgttgaaagtaaataagagaagtgaaccagaagaatttacaaaatacaagaaaaaaaataaagtgctaaattggaaagatttcgcatcagaaagtgaaattaaaaaacttttaaaagaagcattattaaaagaacaagaaaatagttgttgtccttattgtgaaatagaaatcaatttaaatgatagccaaatagaacatatcaaaccaaaggataaatttcctgaacttttgatagattataacaatttaattgcttgttgtcttgaaaataaaagatgtggtaattcaaaagcaaataaatggaatgagcttttcattaatcctgttacaaaaaatcctgaagattattttgaatatgatataaaaactggaaaaattatttcaatatttaaagatggcgaaaaatatgaaaaggctgaatatacaatagatctattaaatcttaatgacaacagattatgtaatataagaagaaaatacatacttgaatttttaagctacagtagtaataatgaaaataatttaagtgattatccaataaaatttccatctctaagaagatatttagaaggtagactttaa

SEQ ID NO: 87860 - DNA, 1230 bp, Vibrio parahaemolyticus 861; identical to SEQ ID NO: 86310

SEQ ID NO: 87861 - DNA, 666 bp, Vibrio parahaemolyticus 861; identical to SEQ ID NO: 86125

SEQ ID NO: 87862 - DNA, 1176 bp, Vibrio parahaemolyticus 861; identical to SEQ ID NO: 87360

SEQ ID NO: 87863 - DNA, 645 bp, Vibrio parahaemolyticus 861; identical to SEQ ID NO: 86309

SEQ ID NO: 87864 - DNA, 1413 bp, Vibrio parahaemolyticus EKP-026; identical to SEQ ID NO: 86314

SEQ ID NO: 87865 - DNA, 645 bp, Vibrio parahaemolyticus EKP-026; identical to SEQ ID NO: 86309

SEQ ID NO: 87866 - DNA, 1230 bp, Vibrio parahaemolyticus EKP-026; identical to SEQ ID NO: 86310

SEQ ID NO: 87867 - DNA, 666 bp, Vibrio parahaemolyticus EKP-026; identical to SEQ ID NO: 86125

SEQ ID NO: 87868 - DNA, 1284 bp, Kutzneria albida DSM 43870
atgtacgtcgccagggtgcgggtgcgcgacatccggggattcaccggcgcgcgggaggtggacctgaccctcacgcggccggacggcacgcacgccgggtggacggtgctcgcgggcgacaacggttcgggcaagacgaccctgttgcgggcggtggcgctggcggtccgcggggagcgtgccgcgctgcgactgcactcgcatgacggctggctcacccgcggggcggagcgcggcgagtgcacggtcgacctggtgcgggatccggtggccgatcagttcagcgagcaggtgggcgcggacctgccgggtgtccgggcgcggatgtcctgggacgaggagatgggcccgaccggcgagccctcggtgctggcgagcgcggggccgtggcgggacgagccgcagggctggctgtgcgcgggctacggcccgttccggcggctggtgggcaaaccgctgcggcacccggcgacgatcggtgcgctggccaccttgttcgacgaggaggcgactctcgtcgagggcgtggagtggctggtcttccagtacctgcggtccctggagtcgcacggcggttcggcgcggctgatggccacggcgctgcgcgtgctcggggacggcctgctgccggatggctatgaggtcgaccgggtcgactcggcgggcctgtgggtgacccggggcgggcagcggttcgcgctgcgcgagatgagcgagggctaccggacggtcgcggccctggtggtggacctgatcaggcaggtgcacgaggcgttcggcgagctgcccaccgagggcgcgcggatcaccgcccccggggtggtgctgatcgacgaggtcggcgcgcacctgcacgtgtcctggcagaagcggatcggcggctggctcaccgagcacttcccgaacgtgcagttcatcgtgagcacgcacagcccctacgtctgccaggcggccgaccccggcgggctgatcaggctgcctgggccagacgaggacgtaccgccgcacgtggcggacgagcagctgtacggccgggtcgtctacggcagcgcggacgacgccgtgctgtcggagctgttcggcctgcggagcggctactcggaccgggcgcagctgttgcgcagggagttgaccaggctggagatcgaggtggtctcgggcagggcggacgaggagcaggtgcggcgctaccgcgagctgaccgggctgctgaccagctcgccctcggctcgggtggacgaggtcaccgcccggctcgtcctggagcggatcaccggcgagtga

SEQ ID NO: 87869 - DNA, 741 bp, Kutzneria albida DSM 43870
gtgatcaggatccgcaggctgccgctgcccaccgcggccacggggcagctggcggcgcagaccgccgcgatcggtgccgtccgcgagcacgccgagcgggtcaggttcgcgcgcgagcgctggcggcgcggatcggctctgcgcaagccgatccgggagaccctggccaggatggcgcccggcctggagcgctgcatgtactgcggggacaaccagggctccagcgtggaccaccacgagccggtcagccgcaacccgctgcgcaccttcgactggctcaaccacctgctgacctgctcgttgtgcaacagccactacaagggcgacaagttcccgctggacgcccggggtgagccgctgctgatcgacccgtccgcggaggacccgctggaccacatggtgctcgcgctgagcaccggcgagtacctgccgctgtcggagaagggccgggtcaccatcgaggtgtgcgggctgtcccgcccggtgctcaaccgggggcgcgtgctggccaggagcctgctcaccagcaggctgcgggactggggcctggcccagcgggcgcgggactcccggcggatggccgaggtggtgcgggacgtgcacacccagcccttcgccgacgtgtgccagtccatgctgcggcaggcaaccagccccggggcggagatcgtcttcgagcgggatcccggcacgctgaagctgttgcgcagaccggatctgcgcgaggcgctgctcatctga

SEQ ID NO: 87870 - DNA, 2082 bp, Listeria weihenstephanensis FSL R9-0317
atgatgtctcttagtaatgaaagtaagaaaatatatatgcagatggtgaaagattatttcgcttatgaaaatattgaccaaagtagagatttgattgagtatccgttgccaattcctggtatattttgtaaagaggtaaagtcaaaatgtcctttctgtggaggaattgaagagctctttttatcagacttcatcccaatgaaatttcatccgtgggaaaaaaaggatgtagaagaaggttggtcatttaatgagcaaatttatattgagagattggaaagaaataaatcgttaatttcaaacaaaatagttatttgtggtaattgtttgaagtatagaagaggtatttttcctgtaaatagtaagggggaaagggaacttttgaacccattgaatttaaatacaaaaattaactcgcattttaattatacagatgagggtgctttatttggaattacccgcaaaggaaaagtatcaattgaggtttatggactaatgcgtagaatcctcatagatacgcgtgcagaaatgagatttatagagcgccttccaggttatgataaatcaaaacctttagacttaaatgatgattttgcctgcgaacaaatagattttttacggtatcgttttttaaatgatgaattattttatttagaaagtgaaaagtattttgatgatagcattgaaagaatggtgaatcaattaattcttagaaactttaaatcgaagatattcaaaaaagaggacaacattgtcagagatgaagttactcatccagaatttggagtgatcgagcatcgaattaaggataacaatagcgctgtttctaagaaggattggattaacaacggagaggtctatagttttagaaaaggatttttctctattggaagggaaaaagatgtgtatggagaacagattaaaccggtatttataaatagagtacaaataaaaaactataaaactgtgaaagatatcgaatttaatattaggactgaaaaaggaatcaaaccttgggtaactatactgggggaaaatggtgcaggaaaaacatctatattacaggctatcgccctagccatggttcatcctgaatatagtaatcaaatcattggaagtgaactagattacgaagtaaatgtgttttcagaacttggggacatctacacttttaataataataatgggaagtacccactggtaatcgggtatggttcaacaagattgagggatggtgagaatgttgaaagtagtaactatcccagctcgattaagaatttatttgattcaaggataggattggtgaactcagaggaatatttatcaactttgagtgctatggattttgagacagttgccaatgtagtgaaaaagatatttatgcagccaacagatatctatttagagcagaaaactctattttttaaaaattacgattggatagctaaatttaatgaattaagtgatggatacggtactatggttgcattagtagttgatattatgaaaaccattaaaaatcattatagtcactttgatggacaggcaatagtcttaattgatgagatcgaaaatcatctccatcctaattggattattaatctttctgatatatttaaaaaaatatttccttatatccaatttatcacaacttctcacaatcctctatcaattagaaatttaaagccatttgaggtattgcggttagagagaatggatggcaagcttaccatgagtgatatatatatggatcaatcaaatttttctttggaaggggtgttaaattcaaatttatttaaattatatgacacaaatcctcaaaaaaatgagcgaataagtaacctttattctgaaatagaaaggcttagattgagtgaaaacaataagcaaaatctattagaggatattacaaaagagcttaaagaagaggttagaaactttcaaggaagtactcaaactatgaattatcaatattacttagaagcaaagctgacaaaagagtttgaaataagtggactttcgatgaaggaaagaattgatagtttggttaataaactacttgatggagggttaaatgaataa

SEQ ID NO: 87871 - DNA, 792 bp, Listeria weihenstephanensis FSL R9-0317
ttgaataaatgttgctattgtgggacgaaggtacctctacatgtttcacatgctcatattgagcattttcgaccaaagactgctgttaccacattgacaggtaaagtgaaacctggatattattggttagttgctgaatggtctaatttgctatatgcttgtccattgtgtaatgaaaataaagacactcattttccagtcagtgacgagcgtcagagaaaaatagaaatagaagacattttggaagagaaagaattattagttaatatatctagccgaaattatagatttgatgataattattcgtatgactttggttgtaaagaaagttggattagtgaagcggtagtgttggaagggaaatcagaaaagggatggaaaacaataagtatatgtaagttgtctagacctgagcttaatgctaaaagaatggaaattaagcagagtgttttaaaagagtgtagtatgtttttggaattcttgaaattatgcgagcaggcaataagcaaagacaattatttagtcaaacgaagatattgtgaatgcgcaaaggattttttaaacaaatatttttccaaaaaaagtttggaattagagcattattcgcttagagttaaaattttagaaatggctatcattaaagatagtaagagtttaataaaatttaataaagtagtagagaaggagtctcaagctattaaaatttatgaagagcaagaagatgaagatgtgttgacagaactgaatgatatgggtgttatagatgttataatctcgaactatgagctttga

SEQ ID NO: 87872 - DNA, 1263 bp, Providencia alcalifaciens 205/92
atgaaataccttaataatattgatggtggaataccacatactggaattagtgacataaatatcccattaaatggtagaaatttaattattacaggaaaaaatgggagtggaaaaacaagttttttatctttactttctgataagattcttttgcatctaggaaaagaaattcaagatgaacagaaaatacaagaacaattagcttactgggaagcagagaaaagaaaaggtcctcctggtagttcattatattctcaagcacaagatcagattgattattatcgaaagaaaatagatgcatttcatcatggacttcagctagtttttgtaaatgaattagagttaataagtaattatgatgatttaaaggctatattcgtttttttcagcgcaatgcgtatatcttctattcaagaaacaaaacagacatcatcaattgaagaagaaaaacgaagctctattgatgatttaaaaaataaaagaccaactaattttggtagtaagcttgaacaacacttagttaatataaaagtaaatcaatctcttgcaatcaccgaagataataatcaagagcaggctcataaattccaagaatggttctataacttcgatgaacaccttaagtttttatttgaagatagtagtgctaagcttgttttttatcgtcaaagctttaaattcaaaatatcccttaacggacgtgaatttgattttcaaaatctatcatcaggttatcttgcaattttcgatattttagctgatttaattgtacgaacagagttttttgaaatcaccccaactcaattaaaagggatagtgataattgatgaaattgatgctcacttacatatctctttacagcaaaaaatacttcccttttttacaaaattatttcctcagattcagtttattgtaagcacacactccccttttgtgattacatctacaaataatgatactgttatttatgatatttctagcaatgagttttttgagggggatttaagtaactattcttatgaagcaattattaaaggtttattccatgttgatccaattacacctgaaataaaagattctattgaacgtcttaaaactttacttaatgaagaaagttttaatttctcagagattcgaactaccataaaaaaattgactcctctagataaaaataatgttttggataagagagttagaaatatttatcttcaagctattaatttactagctgattatgatgagctgggagagctagatgtttaa

SEQ ID NO: 87873 - DNA, 684 bp, Providencia alcalifaciens 205/92
atgtttaaagtgactaaatctcctagaccaacagaatgggtcacgagagattacaaagatccaaccgttgttcgccagttaaaaaaagatttttatggaaaatgctacatttgcgagcaaaaacatttcccaaatttaaatgttgaacattttattcctcacgaaaatgatgaggatttaaaacttgattggaataatctttattatgcttgctctcgctgcaactcaataaaaaacaaatactttgacaacatgctggactgctgcgactctagccatttagtagaagaatggattaaagtgtattacaggatgcccgatgaggatattgaagttattaatgcctgcccttccgataatcaattttatgacaaagctagtacctctaaaaaattaattacttgttgttttaataatgaaaatagtggtgttcaggaagtaagcaaagaagacctaagagaaagaattattgaggaacatagtgattttttatctttaagatatgtcttttttaaaagtttagataagtggcttgattctgaaaaaatcattgcggtagaaaaaataaagcttcggctacaaccccactaccctttctcagctattctacgtgggcacctagaaaaagacactaggtggcgagaagctattgaagaaattgagaaacttagtattccttcatag

SEQ ID NO: 87874 - DNA, 1440 bp, Acinetobacter pittii 42F; identical to SEQ ID NO: 86188

SEQ ID NO: 87875 - DNA, 672 bp, Acinetobacter pittii 42F; identical to SEQ ID NO: 86189

SEQ ID NO: 87876 - DNA, 1260 bp, Peptoclostridium difficile E23; identical to SEQ ID NO: 87326

SEQ ID NO: 87877 - DNA, 759 bp, Peptoclostridium difficile E23; identical to SEQ ID NO: 87323

SEQ ID NO: 87878 - DNA, 1260 bp, Peptoclostridium difficile T10; identical to SEQ ID NO: 87326

SEQ ID NO: 87879 - DNA, 759 bp, Peptoclostridium difficile T10; identical to SEQ ID NO: 87323

SEQ ID NO: 87880 - DNA, 1302 bp, Candidatus Contendobacter odensis Run_B_J11
atgtacattggtaaagtaatactgaaaaacatccgtggtttttcagatctgcaattcgattttgtgcgacctgacggcggttacgccggctggacggtattcacaggcgacaacggttctggcaagagcactttactcaaggctattgcagtcgggctgaccggaaaggacaccgcacgggcgttgcagccgagctttcaccgttggatacgccaaggagcagaggacgacgaggcgtcgatccagttagagattgttcgtcagggagaagacgatactcttaccgattctgggaaaaaaccagggaaagcattcccggcaaagatcacgctgaagagcggtggcaaggaaactaccctccaatctgcaataccggtcaagaagccgaaaaactattccaccccggaccgcaccatctggtccaccgacgcaaagggatggttttcttgtggctacggcccgtttcgccgggtgtttggagcatcaccggaggcggcccggcaaatggtcgcgccttccaccgagcgttttgtcaccatgtttcaggaggccgcatcgttggccgaagtggatcaatggttgcgaaacctgaaacacaaggagttggaaaacaaagctgccgagcgtgaacaattgacgttgctcctgaacatcctcagggacgaacttatgcccaaccagatcacgctggatcgtgtcgattcggatgggctatggctaaaagatcggaatggtgtgcagctttcctggagggagatgagcgatggttaccgtgcggcgctggctcttctagctgatattctgcgccacctcatcaatgcctatggtatggacggcttgactgagcagggtccagacggcaagttttttatcaagcgcagcggcgtggtgctggtcgacgaaatcgatgctcatctgcatcctgaatggcaacgggaaattggtttttggctcaagcggcattttcccaacatccagtttttggtcaccacgcatagcccgatcatttgccaagccgccgacgagaaagggctttttgtgctacctgaacccggcagcgatattcctccccagcaattgaatgacgaggaataccggaaggttatcgcttcgcgccccgacaccatcttgctaacttccgccttcggcctgcaaaacactcgctcaccccgagcggtggaaggacgggcggaactggcgaagctgcgagctaaacaaagggcaggaggaaaactaactgctgaagaggctaacaaggataagcagttggagatcttcgttgcggatgaagaggagttgtag

SEQ ID NO: 87881 - DNA, 756 bp, Candidatus Contendobacter odensis Run_B_J11
atgcgccatgtgattcgggcgcatctgaaggcagatgtcgaaaataagctgaagaaaaggcagaatgaggtcaatcgcaagcgcactggtggttctctggacattgaacgggaatggaggaacgcccgcaagactcacccgttacaggttgtgcttgctactctcaaaggcatgatgggggtgcgtgaacgttgcatgtactgcttggactcgcatggcacggacatagaacatttctggcccaagatgccataccccgaaaagatgtttgtatggccgaatctgctgctgtgctgtgccgaatgcgggcgtttcaagggaagtcggtttcctctttccgacgatgaccagcccttgttagtcaatccgactgtggaaaacccttggcagcatctggattttgatcccatcactggaaacatggtggcgcggtttgatgtgcaggtgaacgactggtcgccgaaagggctaaagaccgttgaagtgcttcaactggatcgccgggaagccttggcgtctggttaccgaaaaacttttatgcgcctctctgctctggttgagcaataccttgccaccggcacgccgaccgccactgatctaataaccgagttatgggagggtgatgatcatggcctgctgaattggtgtttcttcggcagcgggcagactatgccgccttttggcacgttgcgcgccaaccatcctcaagcttgggccgagtctatcgccgctctcgaaatgctagtaaatccgtga

SEQ ID NO: 87882 - DNA, 1359 bp, Candidatus Contendobacter odensis Run_B_J11
atgcctcaccgcacttggattaaacgactggagctaaaaaattatcgctgctttgctcatctgaccatcgattttgatgagcggttgacggtactcattgcccacaacggcgccggcaaaacaacagtgctggacgctctagccgtcgcgttaggcacctttgtcggtagcttttatacggggaaacgcaccggtatcaatagtgaggatgtacggctacgaatgacccagattgaattgcgcgagatggagccacagtttccagtagttatcaacgcacgcggtgaagtaaatagcgagtctatcgaatgggcgcgttggctcaataccccaaaatcgggtacaacgatcaaggaagctaaaccattaaccgctattggcgaacgaatgcagtacgcagtaacgcaaaaacaatctgttgtattaccactggttgcttattatggcactggaagactgtggaaccagaagaaaaagactgaaaaaaaggtattcgagagcgaattttattcgcgaacagtgggttatcaggactgccttgatccggcctcaagctacaagttttttgaagattggcttcgctataccgcacaagcagatttcgattggcgccatcagcaacgcgagcgtttaggaaataaccatgctgaaacggatacgccttacacccccttgatcgccgctgtccgccaagccgtcgatgaatgcctgatgaccaccaccggctggcgcaatctgcgctacagctttacgcaccaaacggtcgtgatggaacacccggaatcgggcgtcctggaagttaatcagctttcagacggggtgcgaaatatgatcgcattagtcgccgatattgcttatcgaatggcgcgacttaattctgattttggccgcaacgctgcaaaacaaacacctggcctgattcttattgatgaagtcgatatgcacctgcatccagaatggcaacaagtggtactacaagacctgacctttgcgtttccgcaaatacagtttgtcgtgacgactcacagcccacaagtaatttcaacagtaaaacgggaacatgtgcgcgtattgagtgaaaaccaggaaggtgatgccattgccgcgatccctccggctcgtacctatggccgtagcaatgccgacgtcatgcaatccgtgatgggcgtttccccagaaccggaaattcatgaaagcaaagatttgcgcaactatttagcggttgtggaacaaggagattggcgcactgaagagatacaggcattgcgatccaaattgaccgatgcgttgggtaatgaccatcccctgcttcgtcgcgctgaactgatcatgcgccgtcgtgaggcgctggggcaatga

SEQ ID NO: 87883 - DNA, 669 bp, Candidatus Contendobacter odensis Run_B_J11
ttgcgcgatggaacggcatcaccgaaagcatgggaaaattttcgcgctaaccgagacactcgcgacctatgcttacttgagcaatttggtttatgcgcttacagcgaaactctgctcgatgctaatgatctagggatgcatcttgatcatgtacgccctagatcgaagtttcctgccgatacttttgatcaccataacctgttgctgtcagccattgatgatattagttttcgcaaactgatcaagcgggatgtatttggcggacatgcgcgtagcaatcactattcaaaatcagattttattcacccaatccggcccgattgtcagcgtttctttcactatgccagtgatggtcgaattgaaccggcgttgaccctttctgaaagcaataagcgcaaagcggtttatacgattgcgatattgaatctcaatgcgccattattgattaacagtcgtcggcgctggcttgaaacacttgaagaggaaatcgatcaactgctggaaatgcctgctgcgctggaaaattttgccgaggcggagctgtgcctgactaacaataaactgcgtccattccatagcgccgtgcgggaacgattcggcgcactgggcgaacgggtcatccggcagcattgcatccacattacgagcgaccatgaaactccactttga

SEQ ID NO: 87884 - DNA, 1260 bp, Peptoclostridium difficile E25
atgagaaaacttgataatattaagaagggcactataattttagatataattcctaatagtgcaaatgggagagatgcaatgaaaattgaaaaaattgaaattaaaggtattggtggaataaaagaattaagtctgaggtttaataaaggacttaatataatatgtggtgcaaatggtataggaaagacaactattttagaagttatttcacatcttttttctatacaatcttctgatttaaagaaaaatgcaaaatttgatttaggagaagcaatagcggattattcgtttgaagatatagaagctgtacataaaagtacttatcaaatcaatgatttcaatgcttctgtgaaagaacttatttttgataatcgagataaaaaaaaatatagtaaatttgtgttgttttttaagacacatagagaattaaattattcaaaattggatggaataactggagatgaaacatatagtgatgatagtacatcttatatggctgatttaggtatagattcaagtaaaataaaaaattggtttattaatagacttcttttttctaagcaagaaggttctcttacaaaagaacaattatgtaatttagacttagcaatagaaatgattagtattttagataagaatgtatcatattctagaattgtatcagattctttagatttaatgataaatactcctcaaggagaaatttatatagaatatttatcatcaggatataaatcatgtttttatatattattaggtataattaaggaattagaatatagatttactaaaccttatattgaagttaaggattttgatggtgtcatactaattgatgagttagacttacatctacatccagaatggcaagttaaaattgtaaatgcattaaaagtattgcttccaaaggcacaaattatagcaacaacacatagccctaatatgatacaaacactatcaccagatgaaattataccattaaccatggatgaaaatggtaatgtgcgtaaaaaagacttagagttaggtgaatatggattgcaaggatggactattgaagaaatattgacagatgtcatgggaatgaaaacaacttcttctgagttatatttagatacaatgaaaaaatttgatagagctatggataaagagaatgtagatgaaatcaagaaatactatgatatcttgatgaaaatgttacatccaaatagtacacttagaacaatactgaaaatacaagtggcaggaataatagattga

SEQ ID NO: 87885 - DNA, 759 bp, Peptoclostridium difficile E25; identical to SEQ ID NO: 87323

SEQ ID NO: 87886 - DNA, 270 bp, Xenorhabdus cabanillasii JM26
ttgatattaattgatgagcctgaaataagtttgcatcctgagtggcaagaaacatatattcatcttctgatggaagtatttactcatataaaaggttgtcattttatagtcgcaacacattcaccacagataatatctaatttaagtgaaaaaaattgtttcgtaacattaattgaaaatggagatattatcccagcgaaaagctatgtaaataaatcggcagattttcaacttgcaactttatttgaggcgccgggagttgaaaattaa

SEQ ID NO: 87887 - DNA, 651 bp, Xenorhabdus cabanillasii JM26
atgataaacgaaattatttattccgaacaatcatctagaagaattttagaaaaaatggaagaagagaatttttgtggtggaagttggggagatgatgatcttgaagtggtaaggcgagaaataaaagatttttatataagagaacaaaaacatacttgtgcgtattgcaaacaggagattagaagtaaccatggaagacattgggatattgagcatataatatcaagagaatctgttcatgagtttatgtttgagcctaaaaatctttgtgtttcatgccctgaatgtaatcagagaaaaggttctaataaagttacacatagtaaagccaggaaaaaactacctttaaattctttggattactttattgtccatcctcatttagataattatgaagatcatatagaacccgttaaaataggtgagttttatttttctaaatcagaaaaaggagaaaaaaccatatcaatatgtggattaaataggttttatgaatttgcaggatataatcaagctgtaacaacagataaccaaattctacaatttgctaatttgctttccgatacaacgaatgaaaatcaaaggaaaagccttctaagagaaattgctacggttgcgcttagacagcttactaatgagacttctgattaa

SEQ ID NO: 87888 - DNA, 1227 bp, Enterobacter sp. MGH 37; identical to SEQ ID NO: 87698

SEQ ID NO: 87889 - DNA, 654 bp, Enterobacter sp. MGH 37; identical to SEQ ID NO: 87699

SEQ ID NO: 87890 - DNA, 1380 bp, Enterobacter sp. MGH 15; identical to SEQ ID NO: 87572

SEQ ID NO: 87891 - DNA, 636 bp, Enterobacter sp. MGH 15; identical to SEQ ID NO: 87573

SEQ ID NO: 87892 - DNA, 1380 bp, Enterobacter sp. MGH 3; identical to SEQ ID NO: 87572

SEQ ID NO: 87893 - DNA, 636 bp, Enterobacter sp. MGH 3; identical to SEQ ID NO: 87573

SEQ ID NO: 87894 - DNA, 1380 bp, Enterobacter sp. MGH 3; identical to SEQ ID NO: 87572

SEQ ID NO: 87895 - DNA, 636 bp, Enterobacter sp. MGH 3; identical to SEQ ID NO: 87573

SEQ ID NO: 87896 - DNA, 1230 bp, Vibrio parahaemolyticus V14/01; identical to SEQ ID NO: 86310

SEQ ID NO: 87897 - DNA, 666 bp, Vibrio parahaemolyticus V14/01; identical to SEQ ID NO: 86125

SEQ ID NO: 87898 - DNA, 1413 bp, Vibrio parahaemolyticus V14/01; identical to SEQ ID NO: 86314

SEQ ID NO: 87899 - DNA, 645 bp, Vibrio parahaemolyticus V14/01; identical to SEQ ID NO: 86309

SEQ ID NO: 87900 - DNA, 1230 bp, Vibrio parahaemolyticus V-223/04; identical to SEQ ID NO: 86310

SEQ ID NO: 87901 - DNA, 666 bp, Vibrio parahaemolyticus V-223/04; identical to SEQ ID NO: 86125

SEQ ID NO: 87902 - DNA, 1176 bp, Vibrio parahaemolyticus V-223/04
gtggagcgtgagtatggacaccgtttacctagaaaactgattgcagcctccactagccagtttgaaaaatttaaagctaattggagcgttcgaaatgatctagtgccgtcaggtttctacgcatatatcggctctaaaccttatatgccatcgttgtctccatcgacgcgtattgcatcaaaagccattcaacagttgttaggggcagagtatttcgaagaacgtaagcacaaggctctggtcgggtttttatcgaagttcgattttggtcaaaagttgctcctgaaattcgaactcacattccctaacgaagatctggagaatatccaaaatcagtcattaactgaacctgaaactcagttgattttgaaaaatgcctatatcgaacacgatgaaatggagttggttgaattactgggttactgcgaaagaattatagaggctcctgcatttgcattaaccgtgggcaatcaaaaccttaatctcatccatctgaagggctctgaacaaaagcctttctctaagctcatcatttcaagaatgctcagagcaggattgattactctttcaagcatacaaacgatgaaagataaatcgctgataaacgaccaatctactgtaaatatcgaaagttccgctatctcgtctttatcaaagcgtagttctggtgaacaatgcttgttcctgctgtttatgagtattatatcgtccatcgaagacaatgcgctgatctgcatcgacgaacctgaaattagtctccatccccaatggcaggaacgcttcgttgatatattaagtgaatcgttttcaagctatcgtggctgtcacttccttatcgcaacacactcaccgcttattgtatctgatataagcgcaaagaattgctgtgtgtacgatatggcaacgaatacattggtggatgcggcgccatatggtgaacgttcctcggactatcagctggcaacgctatttcacaaccctggaaacaacaacgagtatctcttaagccaagttatagaggtgctggatgacatttgtcagtcaaaggaaattgcatctgagacaaagactaaggcgcattggttattaagttatgaacctcgtttgcctgatggagataaggtaaaacgcttactatccattttagagcagacgttagaggcattttccaaatga

SEQ ID NO: 87903 - DNA, 645 bp, Vibrio parahaemolyticus V-223/04; identical to SEQ ID NO: 86309

SEQ ID NO: 87904 - DNA, 1449 bp, Klebsiella pneumoniae UCI 26
atgtttaagcttgatacaataaaaaatcacagaaaagatgacgttatagttagcattgacaataaattgaacaatgagagcttttacacattaattacaggtgagaatgggtgtggtaagtctactttactaagcaaagctattaatagctttctatttatcaaccctaggaaaagtaaagagtgtcaagtttcttcttcgtcaaaatcgcaaccatcgagaataattgccatatgcaatgctcgatataataagtttgcgctaaaaaaaaccttcttggaaaaaaataaaatctataatcctgattattatatccaagcagatcctaccttggaagtagggagagccttaaatgaagtaatccaatcatcattaagggaaataactaatacacaaaatgaagtcaataacaaaacggtgagaaccatacaggataaagaaagatgctttaaagctttttccatgatcggaatacatcctgagattagatttaatttagagttaaatgttgatagaatttgtaaaataaaggatgcgtaccagcgtccggaattaaatgaacctagtcatgtctcagttgatcattccatctctagggattttctttatctcgctaggatgaatcacattagctcaagtgatattgaggattttttcaatttttatgattgtattgacaataaaataattagcttaggagagggtgttttacactttgattctcctagatatcagattctatcagaacagactaatactgacctattaaaaatcggaatagcagtgggttttattgcccctacaaaaataaaagttcagcgtgacaactctttgaaatgggtaagccatcatgaccttagttctggacaacaatctttacttttaaatgcaatactcatatccattttcgcgaaaaaaaattctttgatttgcattgatgaaccagaaaatagtcttcaccctgagtggcaaataaactatatgaagtttctagactgcttatgtccatcaaatctgcaaagtcatatttttattgcgacacactcgccacaaataatttcaggactacagagcaataatggttgcatagtgtctttgttaaatttaaatcctatgcataaaaataacagaaatcatatttcaacaagtggggaaataatttcaataaattggcaagagttacattcagcttcatcgtatagaagaaagtccgctgctcatcaactagtggagatttttaaaagccctggttttgataatgaggcaataataaataagttattattaattcttactaaacagacaaaaaagattgagataaattatgaagatgaaaattttattgatggtgttcaaaatttaattagaaatgaaaaaatagatgactgcgatcctgtattggtaatgtacagacaaattaaagctattgctaatttaagggaattttaa

SEQ ID NO: 87905 - DNA, 699 bp, Klebsiella pneumoniae UCI 26
atgatattgcaagcaatcgagttcaaaggtgacttactcagacatgtggagacttttgatggtgattcaggccactgggacggaactgacaaaattagagttaagctgaggggagcgataagaaagcattatcttgcgcagcaagattatcattgtgcttattgcaatagattcaggcaagacttccatgggtattgctgggatatagatcatattatccccaaagacacacatcctcaattcacctacgagccgcataattatgcactgacatgcaaggattgcaatactaagaaaggtgagtttaatgttttagaaccaagtgttatagctgctgtaaaatatcctaaaaatagcaatgattatataataataaatcctcattttgatgactacagtgttcatatggctgtggattataatattaataaacaggtttaccacattccaaaaacaaaaaaaggaactgagacatttaggatgtgcaatctatcaagattcacagaggtaatagcaaaaacatctgaggttgttgaagatgaaaatatcactataggcttttcagatgcagagtttagagaaatatatataaattataaagcaataatgaacaataatgaactaactccgagtgagagaaagcaacgactcatttcaagattgactgaattactaggagttgacattaacaatatgtga

SEQ ID NO: 87906 - DNA, 1722 bp, Klebsiella pneumoniae BIDMC 35; identical to SEQ ID NO: 87690

SEQ ID NO: 87907 - DNA, 810 bp, Klebsiella pneumoniae BIDMC 35; identical to SEQ ID NO: 87691

SEQ ID NO: 87908 - DNA, 1593 bp, Klebsiella pneumoniae BIDMC 35; identical to SEQ ID NO: 87692

SEQ ID NO: 87909 - DNA, 630 bp, Klebsiella pneumoniae BIDMC 35; identical to SEQ ID NO: 87693

SEQ ID NO: 87910 - DNA, 1233 bp, Klebsiella pneumoniae MGH 39
atggcaaatctaattaaaagaattaaccaattagtaggtgatgttaaaagaaatattagattagatggaaaaaatctaattatagttggtaataatggtgcggggaaaactattttccttaaaacattggatttacatttaaaagaaatattcatgcatcaatcagttgaattgatatctgatattcaagtcaatcttaaaaatcattatgatgcattaaaaaattataaagttgatagtcaggattataataacttcatgagttcaattggttatcttgaggatattattgaaaaaaagaaaaaatttgatattttgttcgattctacgactaatgtaatccaaagtataaaaaaacaacagctcatactgaggtttttcaaagcaggaagagaatacgtcagtgctaatataaatctgttaacaagcgttgaaagtttatatgataggtttaagtcatcaaatgctaataatcaaaatacaagtgattacttcgaatcatatttagtgtcaatgtctaattatgcgttgcttgagaaaggtgctggtgagattgatgagtataatagagtaactaacattattaatcagattcaatctgatctgcgtgatttattcgaagatgaaaacttggttttaaattttaatagaaagaaacttaggatggagattgttcaaaaacataaaaatccattcggtttagatgaactgccctccggttttgcatcaattctagctgtatactctgagttaataatgttatccgaattgagtaagcaggataaggatgaagtaaaaggtattgttttaattgatgagatagatgcacatctccatgtaacgttacagaaaaaagttttcaacttctttactaatagttttccaaatgtacagtttataatttcaacacactcaccttttgttgttcagtccgtctctaatgctattatttacaatctaagcaataacgagcagatggaggatttgtcaatttattcatacagctcgattgtcaatgggttgctcggagaaacaacaaactcagatgatttagaagccttgcttttagaagtcgatgagttatcaaaaaataaaaattttggtgatagatttaaagaagtgatgaatattcttgaatctaaggttggagtattagatcctcgagccaaagctatttatttaggagccaaatctcgtttggttgattggcgggaggaacaaggtaatgtttaa

SEQ ID NO: 87911 - DNA, 675 bp, Klebsiella pneumoniae MGH 39
atgtttaatgtcgtccgtccattacaggtgccgccaagcttggctttacaaaggacatataagagcgaggatgttattgatgcattgcgagttatgtttcacaataagtgctacttatgcgaacaagattctttagcagatcctgaggtcgaacactttgtaccacataatagggatcctttacttaaatttgggtgggggaatctcttttatgcttgcaggcgatgtaatggtatcaaaagtaactcgcatgtgaatctgttagattgtacattgcccaatagcaatgtttccagtgagatagtgcattttgctggtaatgcagctgtgggagaaattttaattcgagcgagcagtaataatccttctcagcaggttatcaatacagttaatttaattaataagtgcttcaatctggataatacaagccttaggaaagtgtcgaaagaaagtttgatggagaaattattaattgagttggggaattatcttcctcttcgagatgtactggcgaccagattgagtactcagaatgatattcagtcagctaaaaacagtttggccataatgtgtgctgacaattatccgttctcaatattctggaagtggcatatattaaaagatgtgcagcttagtcagcgattcccaaatttgagaacggaacttggtttttag

SEQ ID NO: 87912 - DNA, 1233 bp, Enterobacter sp. DC1
atgcttacagcaataaacgaaatttcgatccctatcccatttaccgaaaaaaaggccgaactcgtccttaacggaaaaaatctaataatcaccggaggtaacggtagtggtaaaaccagctttataaattctatttacgaatatttaaaggaagggctagatcaaccaagaaacaataacagacagcagcttgagcaacaacttagcagtcatgaaacccaaattagaataggaggtcgcgatagtagctcttattcatggtatcaacaagaaattataaaaataaaaaaaagacttcatgccttagataatttccacataacaacattttcaaataatagcgcagaaactcgctctctccttcgtttccacaaggctcttagagaagcagcaattactgccccgcagtatgtgccaaggctttctgctttattcgaagagaatgctcacttttctaatgaaaaagatggggacaacatttttgagaattatttgattagtctgaaaacatcacaaagctacgcaatttctttcgataaggatgaagaaaaagcaaaaaaaattcaaaattggtttgataaaatagaaatggatctacaaggtctatttgaggacacacagctcaaactaaggtttgatagtactgaaggaaaattttatcttcatcaagacatgaaagataaatttacttttcagacgctttcgtccgggtattcttcaatattaagaatatacgcggatttgattatgcgtatagaaatgtgggaactgacccctgaaagtattgaaggcattgttttcatagatgagatagatgcccacttacatgtttcccttcaaaaaaagatactacgtttttttagtaattctttccccaaaattcaatttattgttacaactcattcaccctttgtggtttcttctgttactgatgccgtgatctatgatttatccagcaatcaacaaatagttgatgtatcgtcttattcaaataatatcatcctgcaagagctgtttggtgttaacccaatgtcgatagtattatctgataagttagaagaaatcgaaaaaatcatacaagacttagataataataatattgaaactgccataaaaataatacagtcgctcgcttcatcggaagaatcaatggacactgaggccagcgcatttgtggattttgcaaaacttcaaatcatcaaattcaaaaaagaaaatgctcaggagaaataa

SEQ ID NO: 87913 - DNA, 654 bp, Enterobacter sp. DC1
atgtttagagttaacagaacataccctgcgccagtatcattggctcgtaaattacgttatgacggccccgacgtacatgaagccttacaggaatgtttttttgggaaatgttacatttgtgaaaataaagatcctttagatataaatattgagcatttcgtctcaaggaaaaatgatgatgaaaaatcttatgactgggataatctctatttatcctgcggccgttgcaataatataaaactagcaaagcatgatgaactacttgattgctgcaacgaagttgtatggaatcgtataaagctactacctggattttcagcaagagctaaaaaagtaaccgtagaaccactatttaatgataaaaaaactataaccactgccgatctactcgaaaaagtatataacagtgaccatacgataaataaaagactaacatcagccgcattacgctcacaaataacaaaaacaacgcaaaaacttatcagaaacatcattgaatattatgaggatgatactccaatcgatcgaaagctatatctcattgaaaaaattaaagttttgataagacgtgatgctaagttttcagcattttgcagatggattgtcctcgacgatgctgagctttgtgagattttggaacccttcatggactaa

SEQ ID NO: 87914 - DNA, 1356 bp, Vibrio parahaemolyticus UCM-V493
atgaatattcaaaagttgaagattcacaatttcagaagtatctcaatgctcgatttgagcttgggtactgaaaaccgagttgtgtgttttgttggtgagaacggtagtgcaaagacgtcggttttgagtcttattgcagaagcgatagtatctcagtcaaagctaaagtttcccgactttgagtcacacagtggcaaaagatatcgactgatgagtaactctgaaataaattcggacagcagtttttattcggtagagctgcactattcaaactttgaaaaccgctcttaccagttcaaaaagcttgtaggtcggaagaagggccttcctgcaactgaatatcaggaagtaattcagggagtaagcttaacacgagaatattattcagaattctcgactttatctagattagaggctaatcaagattatctagtctcacatatatttcttattaggccgagtacaagatacgagaaggatggctttgaagtgtctgaagctagatcccaaactcctgcatattctgtaggtgagcgatacaatgaggaaatgccatacccacttacagtatcgcatataggagaaagtattcagtcaatcattcttgatatgattctcgacgcaacaattggttatgaagatgcggctcatgcctttagattaattactcatatattggataagattacaggcaaggaattcggtcagttacaagtatcacagtcaccttataggcaggtagtatcttcgaattatgggccaataaaatcgttatctcaaggtgagcttgatctacttgttacagtatcttcgattctttctcgtcaactatttcatttcaaacaatacaccaaggaccaaaagaaagaactaggatttaataccttattggatacccccggtattgttttaattgatgaggtagatctgcatcttcatccaagagcccaagaaagttacataaaaacactaataagcatattccctaatattcaattcattattaccactcatagcccttttgtagtccgaggacttccaaagcactcaaaagttgtcaacttaccatcaggtagagtgtttgaagagaacttcgaagcaatggatatcgatagtattactaatatcatttttggttacgatggtagtttttcagaagcaataaaaaacaagctaggtcagtttaagaacgcgctagtgttagaagagccgaatgttcagttgttgcagcagttgtatggagagttatcttcatcagactctgcaaaagaggagttgctgttgtatctcgcttcatatgctgatgaagcactaattaataccgtgaagggagagggagatgcgcaaagtagatag

SEQ ID NO: 87915 - DNA, 831 bp, Vibrio parahaemolyticus UCM-V493
atgcgcaaagtagatagatcttctgttccttttccaaatagactattacagcaaaatctgacagaagataatttagcccacttagaaaactataaacagattagtggcagcatctacggtcatcaagacgtcaaaaatagcttgaaaatgctgtattttgataagtgctatatctgtgaaggcgatatcagttctggtgattatgacgtagagcactatcttcctaaaaggtattttccgcaactaggttacacttggcaaaatcttcacaaagcgtgtactggctgcaatctggcaaaagagaataagaactttttcgttactgatgaggaaggtaatgtaactgatatcaaactgctagatccatcaagtttggagtatgatatcgctgattatatctgtttcactatcgattcaaaggcagaaagggtcgatattggtcaaaacccaatagtgattacgaaagctataaatacgattcattacttaaatggtgactacccatctgcttatggaaaagagctttgctacttacggagtaataagagctcaagttttcttcgtttctgtaacgaaactctagttgaacatcggggtcggctaagagaaattaaacttactattagtacttatcaacttccagaagactccgcgttgctggaaattgatcaaagcatctgtcaaagccttataaatgcagataatgagtacttatcagagaaagcaccttttagtacttctactagagtacagctatttccaacgttaaggattacatatgctgaattgattaggataaaaaatcatatgaaacaaactcttggtatgtaa

SEQ ID NO: 87916 - DNA, 1347 bp, Sulfurospirillum multivorans DSM 12446
atgaaaagcccaaaaaacataggcgcatcatatgaagaaatacaaggaagtaaaataatttttgaaaataatgatttaaggatattgcagactgatacaaatttctatgatatggcttctgttgtaataacaagtattaaaaatacaattaagtttaataacaatgaatttagtaataacgtaaaaccaatttttttacaagatttaaatgatgtgaatcttttgctcaatgtattgcaagatgatttgaagcgagaaaaaaatagatcaaaaaagagtgaagagccatcgtatatcagtagcattaaaatcaaaaacatctttagtattaaagagattatgttagaaaatttagatgataaaaaagagatttatattgtgggtgagaatggtgatggtaaaacgctcttgctacaatctttagctttagggctaaaagggattgacgagggcgttgtatttgattttatcaaatctcaaaaagaaatctacagtatagaaatagaagatacgcataaagtcgtttataactcaaaaaatggaatctataaaaatctgtttgcttatggtgcaaatagaaataataactgtcaaatgaaagaagatgagacagggtatttaacattatttcatccttcatttgatttgaaaaatcctattgaatggctacagcgtatagattataatgacaaagctggtactaaaaatattatatctgtcgaggatgcaaaaaagcttttaaaagaattgctcaatagcgatgttgaaattgaaatttctcctagtgctgtaaccttttctgaaaaaggctctcacgtcaattttgaacagctctccgctggataccgaggggttataactatcatcgcagatttgcttattagacttagtgaaaatcagcctgatgtgaaacatctgaaagagtttaaaggcatagtgattattgatgaagtagagttacatttacatccaaaatggaaatatagctttgtgaaaaagctaagagatgtgttcccacatttacagtttattatgacgacacatagccctacagtattgttaggtgcatcacaagaagcagttttttataagatatacaaagaagatggtgaagttcaaatatcaaatcagattaaaaatgaaggttataccagtaattcattagtatcttctcctttatttgagttagagacaattacatcacgagactatacgaaaagtgtcagtaacgatgattatgtgtatgcaaaaatccaccaagtaatttctgaaaaaatcaagaatgaatctgcgatagacgaacaagaaattttgaaattaatagaagaagaattagcgaaactatga

SEQ ID NO: 87917 - DNA, 771 bp, Sulfurospirillum multivorans DSM 12446
atgacaaaagttgagaagaattttgaagatatcccaagtatcctcaaacatgcaagtcgaaaagatgcttttgagaaaaatgtaaatgcacgggcatattcttttggcaaaacattatataaaacaaaagaggctcagaaaaatcttaaagaaatttatcatttaaagtgcgctttttgtgaaaaaaaacttttagatgctgataagcatatcgaacattatcgatctaaaaatacttattattggctagcatattcttgggataatttattattagcatgtggaaattgtaatagagctaaagggaaaaaatttaaaactgaaaatagcaaagttatctataaaaatgagacctttgaggagattcatgcgcttgggaaaagctatgatgaaatagaaaaaccatttatcattcatcctgaaaaagaagatgtactacagtatatcaaatatgataaagagggaaaggtttcatctgagaatccaagagtacaacatacaatcgaagaggcatgtaaattaaacagagaagaacttgttcaaaaaaggctaagtgttttgaatgattttattaaccagataaataaacattatattttattcacacaggaaaaaagtagtttatctaggtttaaacctgatattgaaacttttatagaaaaagctgataaagaaagtgaattttattcatttaggtattttattcttcataacattgagatattttttgaaaataaaaatatacaaaaaattttaatttcgttttggtag

SEQ ID NO: 87918 - DNA, 1320 bp, Sulfurospirillum multivorans DSM 12446
gtgaaaatcgatacctttaaaatcaaaaatatagtgattttgaactataaaaagtacgctcagctatcccttgatatcaatagcgattttaatctcatcataggtgaaaatgggagcggtaaaactactgttttggatgctatggctacgcttcttggcggttatcttcaggcatttcaaaatataccagcgggagagagacactcgatcaacaaatcagatattaaaatagaaatacaagattatgagaacaatatatcggttgagtataaattgccaataagtataagcggaacccttagtattgataatgaagatgtcattattgaaagatttagaagaagtatggtaagtacaaaaacagaattactaaaacaacaaaatcaagctatttatactctagtaaaaactcttgaatccagcgaggataagatgttccctcttatctcctatcatggcacaggaagactttgggagcaagactataaatcaagcgccaaaatggaaaaactgacaagatatgatggatacaaagactgtttaaatgcaaagtcaaattaccgcaactttatatcttggtttgaaaaacaagaaaaaaattctttcaatttacggaaagagatagcagttctagaagctgtgcgaaataccgtcaaagagatgattgggctactcacaaaaaaagaagttgagctttttatctatcgagagggtgatttggagcttaaatttaaaaatgaagctacgagagaaagagtttcaaatctaagtgatggttacaggaacatcataggaatcgtttcagatatagcttatcgcatggctatattaaatccaacgctaggcttggatgtggttaaaaaaacatctggggtagtgctaatagatgaaatagatttgcatcttcatccaaaatggcaaaaagaaattgttggacttcttcaagaactttttccaaaggtacaatttatagcgactacccattcgccttttattattcagtctatgcaaagtgatcagatcatcaagcttgatgacaacagtagaactttggaagcagatgctactatgatgagcatagaggacatagttgaaaatatacagaagatagagttacctcagatgagtagcagaaaaattgaaatgcttagagcagcagatgaatacttgagtattttggaaaagttagaagataataactccttacaaacagaagaagtcaaaagaaaacttgatgaacttatagaaccttttgaagaaaatatggcatatgtagcatttttgagaagaaaaagattattgactgagaacaaacaatga

SEQ ID NO: 87919 - DNA, 666 bp, Sulfurospirillum multivorans DSM 12446
atgagaccaatcaataaagggttggctcccaaaagttacacaagctataatcaagcaaaagatgatttaagaaatgcaataggtagcttttgttcctactgtgagataaatatctcaaatcaaccagatatagaacatgtaaatccaaagagtaaaaatcctgatgcagaaaataattgggataattttttgttggcatgtaaaacttgcaatatcatgaaatcaaataataatgacaatagagatggatatatttttccagacacgcataacacagcttatgcatataaatacaaacaaactaaagtagaagtaaatcctgagatatccgaagaagaaaaagatttagcagtagctactatcgaacttataaaactcaatcgtcaacacgatacaaatggtagggaagatgatagaatttttgcgagagtacgagaatgggataaagctttagagagcttagcggactacaaaagttgcagtaatgacgaaatggcgagacaaataggaagaagccctagtggatttcattcaagttggcttgaagtttttagtgattatcgtgaagttaaacaagaaattttaaaaaatgtaaatggcacagctatggaatgttattgtgatgacttatatccttgtaataacctaggaaggacaagttgttga

SEQ ID NO: 87920 - DNA, 1656 bp, Lysinibacillus sphaericus CBAM5
atggaattatttagacagtttattgaactcagagaagaacaggaaaggttaacaaatttaattaacgatatccaggaaaatggttttgaaataaatttcattaagaaaaagatttatctatataaaaatgggattgcctatataggtttagattgtcaaaatatagagagagaaaaattgatttcagtttttttgattaaagaaagtaaatctagacgtatacaagaaattgattcctattttatagattattttaatgcaaatctaaaagatattgttatcaatttagaaattgaaaacctgtttttagaatcaaaagcttatttattagaagagttatttatgttagaacaattgatctcagaagatttaacagttgattttagaattaattcaattaaatttgaagaatataaatgttttaaagatgaagaaattacgtttgaagaaagaataactgtattagttggaaagaatgcaagtggaaagacaagtattctagatgcgatctctgttgctattggtgcatatttaagtgggattgatgaaagtaccgatacaaaatcaattttaaaaagtgatgttcgttttacttctaaagatgttcatggtactaaggtagtaaaacatcatgcacctacaagaatcaattttaattcagattttattaataaaagatttgattggtctagaactagatcgaaattgaaatcaacaaaattaactacaaaggactctaaacaagttgtaaatttatctagatttttatatagggaaataaataataatgatcttagaaatataacattacctgttttttcttaccatggaaccggtagggtcgcgaattttacaaaaaatatgaatcaactagagaaaacggaaaatatttctaggttttttgggtataaagattgtttaaaaccagcatcaaattataaaacgtttatttcttggtattcgaagatgcagtatagggcatttatgttgaataaaaggatagaagtattagaccaagtgactaagtgtttaaaagaaacctttgtctttttaacagaagaagataaaaataaagtttctgatgtaatatatttagagggcagtttacatttgaaatattcaaatggggatatgattccaatagagtttctaagtgatggctataaagatataataggtattatttcagatattgcttatcgaatggctattttaaatcctcacttagaaaaagatgtaataaaagcaacaccaggtattgttttaatagatgaaattgatttacatttacatccaagatggcaacaaaaaataattaaactgttaaaaaatcttttcccaaaagtacaatttgttgttacaactcactcagctttggtagtctcatcaactgaatatagagaagcaaaagaattaaaagtagttgaagaaaacctgaatgaaaattttacaatagttgctgaaataatcggagattccaaagaatggtatattcatgatattttaagaaacgtttttcatgtagatccattattgcatacacgtcttacatctgaatatatagatcaggatgaagttgatgatttaattaatgacttgaacgaatatgttaagaaatatttagttagtagagaagagcatattttaaaaaaataa

SEQ ID NO: 87921 - DNA, 732 bp, Lysinibacillus sphaericus CBAM5; identical to SEQ ID NO: 85963

SEQ ID NO: 87922 - DNA, 1656 bp, Lysinibacillus sphaericus CBAM5; identical to SEQ ID NO: 87920

SEQ ID NO: 87923 - DNA, 732 bp, Lysinibacillus sphaericus CBAM5; identical to SEQ ID NO: 85963

SEQ ID NO: 87924 - DNA, 792 bp, Vibrio parahaemolyticus EKP-021
gtgaagcaggctggtaaatcccaaaatttcgaacaagattcaagtaatcagttcgaaaaatatctagtcagttattacaactatggttcgcacgtaattgctcgtgaaaacaatccagagaaagagcaacagataaacgcatggtttgagaaagtacaaaatgatctccgtgacctgtttgaagatcatggactaattcttcaatacaacccagaggaacaagccttctacattcaccaagaaggcaaagatccatatcgatttaataacttgtcttctggctacagttcaattttaagcatttatgccgatttgcttatgaaggttgagttacgtgatatacctgcggaagatatcactggcttcgttttaattgacgagatcgatgcccatctacatgtttcgattcaacggaaaatattttctttctttgacaaggctttcccaaagattcagttcattgtaactacacattcaccttttgtagttcaatcggtaaatgactcaataatctatgacctaagtaaacttgaaccactggaagacctttctatgtactcatatgagtccattttaaaagggttactaggggttgagagcacttccgatatattaaacaaacggttggatgagatggctgaaatcattaaccaagagccagtaaacaccgaaaaattacaggaattaatcgattcaattgaaccgtatgaagggcagttaaacgctcgttcacgagcatttcttttacttggcaagaatgctcttttagattcgactgatggtgaggggtaa

SEQ ID NO: 87925 - DNA, 666 bp, Vibrio parahaemolyticus EKP-021; identical to SEQ ID NO: 86125

SEQ ID NO: 87926 - DNA, 1176 bp, Vibrio parahaemolyticus EKP-021; identical to SEQ ID NO: 87360

SEQ ID NO: 87927 - DNA, 645 bp, Vibrio parahaemolyticus EKP-021; identical to SEQ ID NO: 86309

SEQ ID NO: 87928 - DNA, 717 bp, Methylibium sp. T29
gtgaattctagcggccctataaaactaagggttgaggtacaaccatcgttctctcttatcgttaagggagatataaaagctatgacccttttggtttcctcaggactgttgaccgtagagggcgcatatattggcaattattccacgactgacgcctattctctaagtgaactaagttccgggcagtggcacatcctttcgtcccttctgtttacggccgcctccgtagaggatggcacgctcttattagtcgacgagccagaaaatagcctccatccttcgtggcaacaacaataccttggtctgttgaacgacatgatcgagggggtcaagggtgtgcacgttgtagtggcaacgcactccccgttagtcgcttcgtccttgccgcctggacgctgcgaggttgttcagattcggcagactcgcgggcgactgatcgcgagggcgctcccgagtgggcccttcggctggaccgctgatgagatgttgaaggacgttttcggtttatccagttcccgcagcctcgaattcagccaagaaatggccggtgcacttcgtctttttggcgcgggagacagagataacccgaagctagtcagcgcggttgaaaacttggcaaggcttaaggagggattgcctgaggacgatcttgcgcggtcggtaatcgagactctaagctcggttgtattgggtggctcatccaaaggtgaggtttga

SEQ ID NO: 87929 - DNA, 738 bp, Methylibium sp. T29
atggcgaccatactaattccgacattcgaacgcatcaaaaaaattagggtttcccatgcagatcaaaccaagctagcagcgtgtatcgcatctgttggtgaaaaatggggcagctcaacctttaattggtataagacttggcttattcagaagcttcgatgcttgcagaatgacaaatgctgttactgtcgacgcgtgattctattcaataagggcgcccgagaaattgaacatattgtagacaagggaaagcaaacgagattcatgtttgaggtgagtaatcttgcgttggcatgcaaggattgcaacaacaacaaaggtgtgaaatctgtatttgcatcaaccttcacgcttgcgccgggtgccgcttatccgatgtcggcgagttcgtataactgggtgcatccgtatattcataaatattcaagtcatatagttatttaccaaggctggctttatgagcccaagaataagtcacctcaaggtgcagcggttatcaagaattgcaaactaaatgatctggaggcgcttgagagcaagaatcgaatcgcagcaatttgcgcagcccaaacgctcgaggcggctgtgactcgtgccgcaggtatggcggatgaggctggacttgatcgaatctgtcgagaggtatctcctgcgctcgctgctatgtggagcggcaagtcgagcaagaaaatagaggtggctattcgtcaggctcacggaagcgtgacaagcatttag

SEQ ID NO: 87930 - DNA, 1182 bp, Escherichia coli MP1; identical to SEQ ID NO: 86998

SEQ ID NO: 87931 - DNA, 747 bp, Escherichia coli MP1; identical to SEQ ID NO: 86999

SEQ ID NO: 87932 - DNA, 1350 bp, Bacteroides xylanisolvens SD CC 1b; identical to SEQ ID NO: 86148

SEQ ID NO: 87933 - DNA, 750 bp, Bacteroides xylanisolvens SD CC 1b; identical to SEQ ID NO: 86149

SEQ ID NO: 87934 - DNA, 1350 bp, Bacteroides xylanisolvens SD CC 2a; identical to SEQ ID NO: 86148

SEQ ID NO: 87935 - DNA, 750 bp, Bacteroides xylanisolvens SD CC 2a; identical to SEQ ID NO: 86149

SEQ ID NO: 87936 - DNA, 1344 bp, Acinetobacter baumannii 118362
atgacaatcaaatcaatcaagattaataattttaaaagtatatctaacctagatttaactattgataaaaatcaaaaagttatatgctttgttggtgaaaatggcagttcaaaaacctctcttcttagtctaattgttgatactattattaccaatcaatctatttcatttccagactatgatcctaataatgggaaacgttttagatcaattagccaacaggaaattggagaaattacagatcgttatcaatttaaattagaatatatatctaatgaacaacatataatcaactataatagaatagtctttgataaatataagaccgccgaaaactctgaaatatttcaaaattcagatgatattcttattttagaaaataatttccatggtgaaaaaaatacacctaacctaaataagtcaaaccattacttccttgaaaatatttttctatttagaccaagttatcgttatgaatctgatgcattagaaataacttctacagatgaaaactttcattttcaagtatctacaaaagctaaagctgatgtagattatccattcccatttaagatcgctcactctggatataatattgaaaatcttataattgagttattcctagacatgcatataggatatcaagattcaggaagtgcattttctattatacctaaaattttaaataaaataactaataaagattatgggaattttcaaatatcgcgtcatccctatcgtagactatggtcatctactaaaggtatggtaacctctttatctcaaggagaattagatttattagtaacgatatcttcaataatagcacgccaattacacatatataatcaaaatcctattatgaaaaataaatatgataattttcgggatattccaggccttgttattattgatgaagtagatttacacttacatcccagagctcaagagacttatatagaaacacttacctctatgtttaaaaatgtacagtttctagtaactacacatagtccatttgtaattagaggacttcctgaagactccatcgttattcaactacccacaggaattactataaaagaaagtttttctatgatggatattgatagtataacaaattttatttttaattatgatggtagattttctattgaagtagaaaatgatttaaaaatatttaaaaaaatgattagccaattcaatcagcaagataacaacttacactatttatctaatatgtataaaaaatacagatcatctccatcaataattaatgaattagatacttatctttccatattctcatctccagattttacaataaaaataactggagaataa

SEQ ID NO: 87937 - DNA, 852 bp, Acinetobacter baumannii 118362
atgcgccagatagatagaactctagttaatcacccttacaatcttttaaatttaacagccgaacaaatggctcatctaacaaaccataaaaatatccgttctgctatttatgcccatgaaaatgttaaacaagctctgaaatctatataccatgaaaagtgttatatatgcgagtgctatgtcggtgataattatgccgttgaacattatctacctaaacagtatttctcacatcttggttatacatgggataatttacataaagtttgcgatcaatgtaatttagctaaagaaagtgatcaattctttattaaagatcaatctgataatatcgtagacatactacttttggatccatcaaatccttcctataatatttcagactatctaagttttaatttagatggtgaagctattttagttagctatggtgtagatcaaagcatacgtcgaaaagctgaacacactgtaaattatctgaatggaaatttaagaaaagctcaaggtaaaccttttgaacatgcatcaaaattaaatcatcttagatcatcacgtattggagcttttgaaagatttttacgtgaaaccaatttaatgatataccgacaaaatattttaagtattaattctacaataagcacttatcaagctcaaaataatacagaaaagcaacaattagacttagacacatatcattttcttgcaaatctttttaaaaactttcttaatgatgagtgtgtatactgctctaccttaagagattattgttttacagtatttagaattaaattcaaaaatttaaaaataattcttgaacacttaagaaacatatatagattaccagactattaa

SEQ ID NO: 87938 - DNA, 993 bp, Acinetobacter baumannii 1289694
gtggtttatgtcgcacttcaagttttactctgccaagctttagatgaacttacatcctttcagaaattctttaaaataaactttaatgaaagagaaaccaataatagtactatttttagttttttcgatgtaaatagtagattgcaagttccagaaaaatatatacatatgggaaacatgtatgatgtgaaggaccttacttactatttagaggaactaaaattaaattttgactcagatattgaaggagcattagaaagatatctcttggaaaaacgagaagaactacgaaatagtgaggacaatatttgcgaggaaatctataagatatttagtgatatagaaaatgacttaaaactaatttttgatgatgaaactacagtactttcatttgatgacttcaataatcgcgttttaataattcaaaaaaatgaaaatatctcttttggatttgatgagctaccttctggttttaaatcaatttttaaaatatactctaatcttttaattaaatctaaattaataaaaacaagaaaaaacaaactgaatggaattgtcttaattgatgaaatagactcccatctacatatttcacttcagcaaaaagtcttacctttcttcacaaaggcatttcctaatcttcaatttatagttagtacacattcaccttttgtaatcacttctacaaatgataacactgtagtctttgacctttctaataatgagtttttcgaagataatttaagtcactattcgcatgaatctataataaaagaactctttcatgtaaaggaagaaaatgaaaatattaaaatactatcagatcagcttttacaattcattgaatcaagaaacttaactcaagacctaaatgcaattcaagaattattaaatgaaattaataaagattttgaaaagctatcagtagaactacaactccagtatatgattgctaaaaataaacttaccaaattaaaacatgaggcaaaataa

SEQ ID NO: 87939 - DNA, 672 bp, Acinetobacter baumannii 1289694; identical to SEQ ID NO: 86189

SEQ ID NO: 87940 - DNA, 1239 bp, Acinetobacter baumannii 1295743
atgattaattattatctaagagcatttcatgccgaaaattttagacagttctcaaaaatatctatgacttttggaaaaaaatttaacttcattacaggcccaaatggatgtggtaaaagtgggatacttacaggtatcaatcattgtctatcttatgattggagttctagtcgattaaataataatacaagtttctatgttcagatagaaatggaagataaaataattttctcgggactaggaaaaaattcatttaatagcagaaatacttatcgtcaaaatagtttggataattggacaacacctgaggtggatgttagtggagtagataaaaactattcaataattactcctaataataatgaaattatgcctttatttctggggactaaacgatcaatagattatcagagaatagaaggggctcgtagggaggaggacgtacagcagtctgttcagaaatatcggagtcatagtctagaaagtaatagtagtaatgtgaagcaatggtttattaatagatatttttttattgacaaagagtgggctgtagaagagaaattaaattggaatgttttaatagaaaatcttccaaagcttgctccttttgatagtgactttaagtacataagaaccgagagagatcttgaaccaattttttcactttatggtcaagaatgttatttagaggagctttctgcagggtttcaagcaatattttctattattgcaaatattattgagtggattgaagcgactaaccctataggtcataaagatatccaaaaagctgttggaactgttctaatagatgagttagatctacatttgcatcctgaatggcagtttagtattagggatggtttagaagctattttccaaaacttacaatttatcgtaacaacacactcacctcatttactttcttctgcaaaagaaggtgaggttatagttatgactagaacaaatggtgtaatggagtatgagtttactccaagtagtaagcgttattctggttggaatactgatcagattttagaagatgttatgggggttaaaagcttaaataacaaagattatgagcaattagttaatcaggcattagatgcatacgagcaacggaataaagctgaattaatagccttaattcaaagattaaaagatatcgcgcattctaatgacactattgtacaggtattagagattcggcttgcttcactggagttagtcaatgattaa

SEQ ID NO: 87941 - DNA, 474 bp, Acinetobacter baumannii 1295743
atgattaaactagaaaggcctaccaatgtacctcaaattttacaagataaggcggaagaatggactaataatttattagaattagttaaggagtatggaacttatgaaaaaatccctctaaaactaaaaaatgcagctataaaacattatcgccatcaagatattaaagatattctttttgaaagtgcttatcggaaatgtgccttttgtgaaggttttccagaagataatggaaatatagaggttgaacattttcatcctaaatcttcttaccctcatgaaacttttttatgggaaaatcttttaccttgctgtcgtaaatgcaatagtgcaaaagatgcgcatgacacaaaagaaaaagttattattaatccttatattaataacccagaagaacatttagccgttagctttatgaggataattggaaaggatgaaataggggtgagaacagaggtggatcaggaaatttga

SEQ ID NO: 87942 - DNA, 1440 bp, Acinetobacter baumannii 1475718; identical to SEQ ID NO: 86188

SEQ ID NO: 87943 - DNA, 672 bp, Acinetobacter baumannii 1475718; identical to SEQ ID NO: 86189

SEQ ID NO: 87944 - DNA, 951 bp, Acinetobacter baumannii 1267820
agatattatgcctataaagattcttgggacggaaagttaaagttagatgatttctttactcttatttgtgttatttacaataaatcaaaactaaacaatgatttagaagaaataaattcattgaaaaataagttagatcaattaaaatctataaatttctctgatttagaaattattaacctcttacaaaaacagctaaatgagttgaaatctaagaataactttgattcatctcactcagagtcagagttagattttaaaaaatttgtagagactattaaagaatctttaataaatgatttattaggtataaaagatatatcttttaataatttttctggtcgaacacaagtttatttccatttatcagatgggaatattgttaactcaaaacagttatcacacggtcaaaaagttacttattcattgattggagacatatgtcttagactattattactaaaccctaatcttaagaatccattaaaaggtcaaggtataattcttattgatgagctagaactacatttacatcccaaatggcaacagagaattctagtttcattacgtaatacttttccaaatattcaatttatagtctctactcatagtcctcagattttatctacaatagataaaaaacatataagaattttagaagaaaatgactctattattgagcctatttatcaaactgaagggactcgtagctctgatattcttgaacaactaatgtcgacacactctacccctgatattagaataaatactttatacaataaatacttagctctaattgaacagaacatttatgaaactcaagaagctcaagaactaggggcggaattagctagtcactatggagagaaacatccaaaaatacaagaaattaaaagtttaattcgattaaaagaattaaagaataaaattgctagtaaaaaaatggactaa

SEQ ID NO: 87945 - DNA, 660 bp, Acinetobacter baumannii 1267820
atgaaaaaattagatcgaaactcagttcctgagccatcttgtttaaaaaaatataaatatggtcaggatgattggggtgttttatctcgcaataaagcagaaaatcaagaaatttgggattctcttttaccgcttcaatcggaaaattgcgcttactgtgaaagtaatttatcccatcatagacatatagaacatttttttcaaagaaatactaatgggtatgagcatctgacttttgtttgggataatattttcggctcatgttgtaatccaaatagttgtggaaaatataaagatgacaagtttaaaggtgatttaagaaaaattataaaacctgatttagatgatcctaatgattattttatttttttaagaaatggaaatattcaaattaaagaaggattaaatgaaaatgaaaaaataaaagccaaattaactttatcagcctttaacttaaatggagatagcaaattagtaaatagcagatcggcagctataaaaccatatattaaagaagccgatgaaatatatagtttgatcgaaagtgatgaaaatgccttagaaattattaaggttttaattgatgagaaaatacaagaaatttcgtctcaaccttttagtactgcactcatccacctatttcaatataaccaatattaa

SEQ ID NO: 87946 - DNA, 691 bp, Acinetobacter baumannii 1396970
taatgaacataatagaactgaaatatttgacctagaattgaatttatcaaacagaagtaaagatgaaaatacaaatcttctcaacagcttatcatttttagccaactatgacctaattgaattaagagatataaaatttagtaaaaataataggagtttttatttaacagattcaagttctggagaactatctttaatattcaatttattatcgattgcaggtgaaatagaaaatgactcattaatattaattgacgaaccagaaattagtttacatcctgaatggcaaagtaactttcttcctctactaagtaaaatgtttagtaattaccaaagatgccactttattattgccactcattctcctcaaatactttcatcaactaatgataaaaatatttttattattaatctagaagatagcaataagttaataagaagcgaagaaatctctaaaatgtctgctgattatcaattagcatatgtttttaaagaaccaggctataaaaatgagtacttaacgcgtatcgctttaactactttcaccaatgttaataagaaaaaattatttagtgaagatgacctaaattctttaagcttacttttagaaaatatgagtcatttagatcaaaatgatcctctacatcaattgattctatctttaaaagaaatgagaaatttgtatgcctga

SEQ ID NO: 87947 - DNA, 672 bp, Acinetobacter baumannii 1396970; identical to SEQ ID NO: 86803

SEQ ID NO: 87948 - DNA, 1230 bp, Acinetobacter baumannii 1461963; identical to SEQ ID NO: 86766

SEQ ID NO: 87949 - DNA, 663 bp, Acinetobacter baumannii 1461963; identical to SEQ ID NO: 86767

SEQ ID NO: 87950 - DNA, 1284 bp, Acinetobacter baumannii 1106579; identical to SEQ ID NO: 86768

SEQ ID NO: 87951 - DNA, 669 bp, Acinetobacter baumannii 1106579; identical to SEQ ID NO: 86769

SEQ ID NO: 87952 - DNA, 1284 bp, Acinetobacter baumannii 83444; identical to SEQ ID NO: 86768

SEQ ID NO: 87953 - DNA, 669 bp, Acinetobacter baumannii 83444; identical to SEQ ID NO: 86769

SEQ ID NO: 87954 - DNA, 1455 bp, Acinetobacter baumannii 83444; identical to SEQ ID NO: 87014

SEQ ID NO: 87955 - DNA, 672 bp, Acinetobacter baumannii 83444
atgttttcagttactcgacctactacttttcctaaaagtttaacaaaatctactaaagactaccgtgctgctgatgttgttgaagtacttcaagatatatttttttctaaatgttatctatgtgaaagaaaaggattctctgacgtaaatattgagcaccgtgatccacacgaaggcgaccttattaaaaaatatgattggaataatcttttctacggatgtgttcgatgtaatggtattaaagccaatatatataagaatattatagattgttgccaaactttagatgtagctcaagctattgagttacactgcccaatagtcaataacgatgaccataaagtaattgtaacagttggaagtttagcaagtactatcgaaattgaatctacaattaaacttcttgaccaatgttttaatgatacgaatacagctctaaaaggtataagtaggcacactttaataaagcagatacagaaatatcaaactaaacttttaattattaaggatgagcttttggatgattcattgatactaacttcttctgaaaaaaatctgagaatagaaaagttaaaggttatgtgtgaccctgaattccctttctctgcattttggaaatggtatatcactcgtgatgttgatttatcaaaaattgttggaaatgttttttga

SEQ ID NO: 87956 - DNA, 1506 bp, Acinetobacter baumannii 532279
atgaaatacttacaaagcattacaggttcaattaaaggactgtcagtaaaaattgatatccctctaagaggtaaaaatctaattattacaggtaaaaatggtgttggaaaaacttttttcctcaatcaaataaacaacactatttctaaagaattactttccaaattgaatagcctttcagaagaaagcttatatgttaagagaagattttttagatcattagaaagagtattagatcgctatccttcctttttatcattaatagatacacaaagcttaaaaagaatcaaaatattatcaatgaaaagaaatttaaaagaagaagaaaataatgaattttatattcgttcaaaagaaataatttacgagatatataagataaataaaaaaacaaatcatgatgttgaaaattataaaataatgttcgatagtgaatatgaaattagtgaatccttatatcaagaatcaaaattaagtaaaaaatttatcatggaagctgaagagcttttatataatttagaaaacatgtcaaaactcttaaataattttgataaatttactacactagggagtgatctaaaagttattattgaaaatattgaagatttaagtagaaatctaaaatcagcaaaagttacttttaattattttacagcatttcgtcaaacacagattacacattctactaatacaacctctttagatgattatattaataatgctaaaaatggttatgaaaataatctaggtcaactatttgaacagtatctagtcaatataaaaattgatagatcattagcactaactgaatcaaaaaatattgaactagtttataaaattgataattggttcgataaattaaatgaagatctaaaatttttatttgaagatgaatctacttatctagattttgatatgaataccaaaaaatttagtataaaccaaaattcaaagaaatttagttttcaaacactatcctctggatattcatcaatatttactatatatactgagttgatgttaagatcacaatttcttaatattttacctgatgaattaaatggtatcgttttaattgatgaaattgatgcacatcttcatatttcattacaaagaaaaattttgccattttttgttaaatcttttcctaatattcaatttattgttactacacactcaccttttgtaattacatcatctagtgatgatactgtaatatttgatttaacagatggtagttttattgatgagaatcttagtaaatattctattgaatctataactcaagagttatttcatgttaaacctataagtgaacaatttctctcattatctaacaaaattattgaattcatagaaaataatacataccaaacaaatttaaatgatattaaattaacattggatgaagttgagcaagattttgataaactttctatagaatcacaattacaatttattgtagcaaaaaataaactagccaaactaaaacatggagaaaactaa

SEQ ID NO: 87957 - DNA, 690 bp, Acinetobacter baumannii 532279
atgtttacagttactagacctactgagattcctaaaagtttgattaacccaccaaaaaactatagagcagaagatgtagtcaatactttaaaaaaaatatttcatggaaaatgttatttatgcgaaagatccaatatatctgatgtagaaattgaacatttggttcctcatagaggagatgaaataaaaaaatttaattggaataatttattctatagctgtagtagatgcaataatattaaaagttacactcatatagatattattgattgctctatgaacaactatgacgtatcaaaatatattattttagagtgccctttaattaataataaggaaagaaaagtaactgtaaattcaaatactattcccagttcaatatcaatagagccaactattaagctattatatgaatgttacaataatacaagtacagctataaaagggattagtagaagtgaattaataaaagatattcaaaaatatagctttcagtttcaaaagctgaaaaatgatatcttatatcccactgaaccgttaactcaaagtgaaattaatataaaaatagaaaagctcaaagctatgtgttcacctaaattttcctactctagcttttggaaatcggctattatgcttgatgaagatttatcagatttagtaggaaatgtttttgatttaaatattttataa

SEQ ID NO: 87958 - DNA, 1284 bp, Acinetobacter baumannii 983759
atgaaatttaacagtcttcaactaactgaatggcaacaatttaaaaaaattgaaattgattttcatccaaaagtaacaatcattactggagcaaatggttctgggaaatcgaccatattgaaattactttcaacccattttggttggaatataccttttttagcaaccccatacctaataccccgtcaaggtacatataaatacctttcacaatttattcctataactgctacaccgtggggaacattatttgaaaatagcactgatattttaggtgatattacctacaccaatcagacattagctcatatcatgcttgattatgaacttagtaatgatcctcagtttgactttaagattcacaatcgacaaaatattgatgggctacacattaattcacatagaccaatacctagttacttaagattagatagtattccaactaatccaatgaatgctaaaaatgcttttgatagctactacagtgaaacccaaaatctttatcgtagaagttattctaatcacacgccaatgtctcggatgaaagaagcaataatatcaatggctgctttcgggcatggaaatgattctatccagaaaaatgagcacattgaacgttcttttttaaccttcaaaaatattttaaaaaatgttctcccaaaaagtttaggtttccaagatttaagtataagagttcctgatattgtactaattacagattctggagaatttttattagatgcttgttcaggcggaataatgtcaattattgatttagcatggcaaattttcttatattctcatgataaagatgaatttgttgtaacgatagatgaaccagaaaatcatctacatccatctatgcaacgatcattactcaatgactttgttgaagcctttccaaatgcacagtttattgtagtaacacatagtccattcgtagtttcatccatcaaagattcaaatgtttatgctttaaaatatcaagattttagagattctcaaaatcacgaaaaaatagtaaaaaaagttgtttcacataaattagatttaaaccagaaagcctcaacagctcatgaaattctgagagaggttttaggtgttcctgtaacattaccacaatgggctgaagaagatttacaaaatatttgttcgcgctttacagcacaagatgtgactgtctcaggtctagcccttctacgttcagaacttgagcaagctggattaggagagttttatcctcaagccttaaataatattgtggtgagtaattttcatgattaa

SEQ ID NO: 87959 - DNA, 669 bp, Acinetobacter baumannii 983759
atgattaaactaactaaattggataaacctgctgtacttattaaacatgaaaataaatggaaagctagactattacagaatataaaagatggaaagacatctacatactatcttctttctcgatatagtgatcccgaaattaaacagaagataattgaagaaactgatgggaaatgtgcttattgtgaaagtaaattgctgcatatacatcatggagatattgagcatattttccctaaatctttagatcagtcgctaagatatgaatggaataacttgactttagcatgtgaaatttgtaatcaaaataaatctaataaagatccaaatttaaatcacatcttaaatccatatttagatgaccctgaaaagagtattgtattctttggctcttttgctaaaaatattaatatcaaaggtctatgtaccattaattacattgaacttaatcgttcagatcttatcttagaaagaaatgatagatttttggatattgaatttatattaaataaattaactgatgacagaatcccgctagatatgagaaaggccatttatcaagatttaattactgtagaagcaaataatagtaaaaaatatgcgtcaatggtcagatctgctattcgatgttttgatatagctattccgcctgaagtaaaagctgcataa

SEQ ID NO: 87960 - DNA, 921 bp, Vibrio parahaemolyticus AQ3810; identical to SEQ ID NO: 86124

SEQ ID NO: 87961 - DNA, 666 bp, Vibrio parahaemolyticus AQ3810; identical to SEQ ID NO: 86125

SEQ ID NO: 87962 - DNA, 1263 bp, Acinetobacter baumannii 1294596
atgcagaatttctacctacattcttttacagctaaacattacagacattttagctccttattcattaaatttaacaaaaaatttaattttattacaggatctaatggatgtggtaaaacaagtattctgcatggaataatgcattgcttcgatcaatcaaatcatataaatactcgttttggggataattcaagtatttcaacaaatctaataattggggatgatagatttgaccctttgaaaatcactgttggatttggacaaggctctttcagaactaaagaatatcgtggttctactttatatacttatcttccaccttcgatagtcatagatgaatttgaactttttaatgctaatcaatttaaagaaactttcccttatgttattcccttaaatattacttctgataggaatattaaatataaatttattgaaggtacacgacgtatattacctaatgatcaacagagagatagctatttgaatgcaggtttgacacctcattacacagatgatgatagatcagtaaagcaatggatgattaatcgttatgcatggatagataaggaatgggcatacgactataagcaaaactgggatcatttaataagatatttacctaaacttgccccaaatgatagtgactttgaatttgttgaaattagagatgatctagagccgaggttctctatatatggtcaagaatgttatctagaagaattatcagcaggttttcaagcaatatttactgtcgtagctaatattatcgaatggattgaaaacacaaattctgatggtcaacgtttcattggagacgctacgggtacagtattaattgatgaattggatttacatttgcatcctgagtggcaatttaatattagaggtggtctagaagcattatttccaaatcttcaatttattgtcacaacccattcgccacatctactagcatctgcaaaagaaggtgaagtcattattatgaatcgtgaaattggaaaaacagaatatcattttgagcctagtaataagcggtactcaggttggaatactgatcagattttggaagatgtaatgggagttaaaagtcttaagaataaggattatgaaaggcttatagatgaagctctcgatgcttatgaatcaaaagataagactaaacttttatctgtaatggagcatttgaaaaatattactcattcagatgacacgatagtacaagtattagaaatgaagatggcttctttggagcttgaataa

SEQ ID NO: 87963 - DNA, 753 bp, Acinetobacter baumannii 1294596
atgatcaagcttgaaaaacaaaatgatattcctcaaatccttcaagataaacaaagagaatggacagatcatttacttgcattagtaagtaaatatggaacttacaagaatattccgaaagaagagaaagcttcggctcttagccattatagacataaggatattactacccctttatttgctagctcacatcaaaaatgtgctttttgtgaaggaagtccgaaagatagtggaaatatagaagttgaacatttctatccaaaatctatctatcatgataaagcttttgattgggataattttttaccaagttgtcgtaagtgtaatgattcaaaacttacccatgatgtaggtgttgaacctattttaaatccgtatgatgaagattttgatcctagtcagcagtttgaatttgtcttagcacgtatgaaaggtaaaactgaaatagctaaacgtacaattgatgtctgtggtttaaaaagtcgattgtatgatccctacagcaaattgataaaagtattttgtgaatatgaacaaactttagaagaggctcttgaagagctaaacgagaaagatactaatcgaaaacgtttaaaccagatacgtagaatttctgattccattgatagaatcgaatcattaatgaaacctactgaaaaatattcatatttttgttcttatatcattcgaagtagtgaagtttataatgaagcaaaaaggatactctctttagagcttcaacaagtaggctaa

SEQ ID NO: 87964 - DNA, 1440 bp, Acinetobacter baumannii 263903-2; identical to SEQ ID NO: 86806

SEQ ID NO: 87965 - DNA, 672 bp, Acinetobacter baumannii 263903-2; identical to SEQ ID NO: 86189

SEQ ID NO: 87966 - DNA, 726 bp, Acinetobacter baumannii 478810
ttggaaaaacgagaagaactacgaaatagtgaggacaatatttgcgaggaaatctataagatatttagtgatatagaaaatgacttaaaactaatttttgatgatgaaactacagtactttcatttgatgacttcaataatcgcgttttaataattcaaaaaaatgaaaatatctcttttggatttgatgagctaccttctggttttaaatcaatttttaaaatatactctaatcttttaattaaatctaaattaataaaaacaagaaaaaacaaactgaatggaattgtcttaattgatgaaatagactcccatctacatatttcacttcagcaaaaagtcttacctttcttcacaaaggcatttcctaatcttcaatttatagttagtacacattcaccttttgtaatcacttctacaaatgataacactgtagtctttgacctttctaataatgagtttttcgaagataatttaagtcactattcgcatgaatctataataaaagaactctttcatgtaaaggaagaaaatgaaaatattaaaatactatcagatcagcttttacaattcattgaatcaagaaacttaactcaagacctaaatgcaattcaagaattattaaatgaaattaataaagattttgaaaagctatcagtagaactacaactccagtatatgattgctaaaaataaacttaccaaattaaaacatgaggcaaaataa

SEQ ID NO: 87967 - DNA, 672 bp, Acinetobacter baumannii 478810; identical to SEQ ID NO: 86189

SEQ ID NO: 87968 - DNA, 621 bp, Acinetobacter baumannii 723929
atgaaactacagtactttcatttgagtttcaataatcgcgttttaataattcaaaaaaatgaaaatatctcttttggatttgatgagctaccttctggttttaaatcaatttttaaaatatactctaatcttttaattaaatctaaattaataaaaacaagaaaaaacaaactgaatggaattgtcttaattgacgaaatagactcccatctacatatttcacttcagcaaaaagtcttacctttcttcacaaaggcatttcctaatcttcaatttatagttagtacacattcaccttttgtaatcacttctacaaatgataacactgtagtctttgacctttctaataatgagtttttcgaagataatttaagtcactattcgcatgaatctataataaaagaactctttcatgtaaaggaagaaaatgaaaatattaaaatactatcagatcagcttttacaattcattgaatcaagaaacttaactcaagacctaaatgcaattcaagaattattaaatgaaattaataaagattttgaaaagctatcagtagaactacaactccagtatatgattgctaaaaataaacttaccaaattaaaacatgaggcaaaataa

SEQ ID NO: 87969 - DNA, 672 bp, Acinetobacter baumannii 723929; identical to SEQ ID NO: 86189

SEQ ID NO: 87970 - DNA, 1284 bp, Acinetobacter baumannii 318814
atgaaatttaagaaaattctacttaacgattggcggcaatttcaaaatatagatattgattttcatccaaatgttacaattattacaggggcaaatggttcaggcaaatcaacaatattaaaattactttctaaacactttggatggtatcaaccatttttaggcacccctattttatcgaaagaacaaggagtgtttcattataagacggtatttcgaccattaaataaagaatatcaaacatctcactatggtcataatatccatatattaggcaatattttttattctaatgatgcattttctgacatttttattcatgaacaaatatacagcgatgctcaatttgacttgcaatttggggggaacgtccctgtagttaagggggtccatatcagttcccatcgacctattcctaaatatgaaagattgcaaaatattcccactaatcctatggatgcgtcgcaggcttttaatagttactttcaagaaactgttaacttatttaataataactatacacagcacaccccaatttatagaatgaaagaagcaattgtttcaatggctgcatttggtccaggaaatcaatttgtacagaaaaatgaaaggattgaaaagcaattttctgactttaaagatattctaaagcagatattacctgctgatcttggttttaaagacttaagtgtacggataccagacctagtattggaaacggaaacaggagattttctattagatgcctcttctggaggaattatgtctattattgatctagcatggcagatttttctttattctcatgacaaagatgaatttgtcgtcactattgatgaaccagaaaatcatttacatccgtctatgcaacgttctctattgaatgattttgttaaagcatttcctaaagctcaatttattgtggtaacacatagcccgtttattgtgtcttcaattcgtgaatctaacgtatatgctttaaaacatgaaaaaaataatgtaagcgatcaacaaagtggatgggcaaaaaaagttgtttcttataagttagatctgaatcaaaaagcagctactgcaagtgaaattttgcgtgatgttttaggtgtacccgtaacattgcctaaatgggctgatgatgagttacaaaaaatctgttcgacctttacagtccaagatattacaacagaaggtttatctagattgagagctgagttaaataatgctggtttaggagagttctatccagaagcattaagtaatatcgtaggagagagtgggttatga

SEQ ID NO: 87971 - DNA, 669 bp, Acinetobacter baumannii 318814
atgataaaaataattaaaaaacagaaacctgctgttttaattaaaaatgccagtaaatggaagtcacgattacttgatgatattaaagcagaaaaaaaatcaacaaagtacctcttaacaagatatagtcatcctgagattaaagagacattaatcgaagagacacatggtaaatgtgcttattgtgaaagtaagcttttgcatattcatcatggtgatattgaacatatttttcctaaagcactagatcaatccaagcgttatgaatggaataatttaactctttcatgtgaaatatgtaatcagaataaatctaatcatgatcctaatttgaatcatatcttaaatccgtatattgataatcctgagagtagccttattttttttggcaccttcgcgcatggtatggataacaaaggtgaagcgacaagatttttattagagctaaatagaacagctttggtagagaggcggcaagaacgtctagataaaattagactgatagtgaaggagttaaataacacaggtttaccaatagtcgctagaaaagctatttatcaggacttaattgagaacgaggcttctcatgagagtgagtatacttctatggttaagcttgcgattaggtgttttgatgcaagtattccaactgaagtaaaagctgcataa

SEQ ID NO: 87972 - DNA, 1341 bp, Acinetobacter baumannii 1412924
atgacaattaaatcaatccaaattaataattttaaaagcatatccaacttagacttaaatatcgacaaaaatcaaaaagttatatgttttgttggcgaaaatggtagttcaaaaacctcccttcttagtctaattgttgatactattatcacacaccaatctatttcatttccagattataatccagataaagggaaacgttttagatctgttagtcaacgagaaattggtgaagccactgatcgttatcaatataaattagaatatatatctaatgatgagcatataattaattataaaagaatagtttttaataaaaaaaagacaactgaaaactctgaaatatttcaaaattcagatgatatttttattttagataatagttttcatggtgaaaaaaacacacctgagttaaataagtcaaacaattacttccgtgaaaatatttttttatttagacctagttatcgttatgaagctgatgcattagaaataaattctaccgatgaaaattttaattttcaagtaacgacaaaaacagaagatgtagattatccttttccattcaagatttctcattcaggatacaatttagaaaatcttataattgagttattcctagacatgcatataggatatcaagattcaggaagtgcatttactcttattcctaaaattttaaataaaataactaataaagattacggaaattttcaaatatcacgttatccctatcgtagattatggtcatctactaaaggcatgataacttctttatctcagggcgaattagatttattagtaacaataacttccataatagctcgacaattacatatatataatgaaagttcttctataaagaataaatataataattttcaggatattccagggcttgttattattgatgaagtagatttacacttacatcccaaagcccaagagacttatataaagacacttacttctatatttaaaaatgtacaattcttagtaactacccatagcccttttgtaattagaggattaccagaggaatccatagttattcaattaccaacaggtcttactatcaaagaaagtttttctatgatggatattgatagtataacaaatcttatttttaattatgatggcagattctctcttgatgtagaaagtgacttaaaattatttaaaaaaatgatcagccaaactaatgagcaagatgacaacttacagtctttatctaatatttataaaaagtacaaatcgtctccatcaataattaatgaattagatacttacctttctatattctcatctccagattttacacaaaagattattggagactaa

SEQ ID NO: 87973 - DNA, 855 bp, Acinetobacter baumannii 1412924
atgcgacaagtagatagaaatataactacaactccaaataacttattaattttgactgctgagcagcagggtcatttaacaaatcataaaaatattcgttctgatatttatgcgcatgaagatgtaaaaaaagctttaaaagttatttatcatgaaaaatgctatatttgtgaatgctttgtaggagacaactatgccgttgaacattataaacctaagaaatattttcctgatttaggttatacatggggaaacctgcataaagtctgtacacaatgtaatttagcaaaagagagccaacaattttttattaaagatcctatttcagatgatattatagatattttacttctggatccttcagatcaatcttactgtatttcagattatttatcttttaatttagatggagaagcagttcttgctagttttggcacagatccaaacttacgtaataaagctgaaaatactgtcaagtatttaaatggtgagttaaggaaagcccaaggcaaaccttttgaacatgctgctcaattaaaatatttaagagcctcccgcatttgtgcttttgaaagaactttacgagaaacaaacttaagaaatttcttaggaaatattttagatatttactccacattgaatacttatcaagccaaaactgatccgaaaagtcaaaaattagatttagatacctatcactttcttgctaacctttttaaaaattttcttgatgatcattgtccctattgctctactttacgagaatactgttttaacgtatttaaaataaaatttgatgatttaaaaaacatcctttcctgcttagttataacatatagattaccagcttattaa

SEQ ID NO: 87974 - DNA, 1248 bp, Acinetobacter baumannii 1412924
atgaatattcgtggagatattccacatgcaaaaattgaaaatattaatattccattaaatcgaaggaatttaattattactggtaagaatggaagtgggaaaaccagtttcttaaattcactctcaaataaaattaatatacatcttaagaaagaagctcaaaataaagaagatgatgaaaaacatgtagcaatgtggattgaaaaacagaaaaatactcttattggaagccttgattttacattagcacaaaaacaaattgaatttcatagtaatcgactttccaaaataaatgacggcttaagattagattttataaatgaatatgatttaatcgctcattatgatgatttaagagcagtttttgtatcatttaaagctatgcgtatggctgaaattattgaaacaaaacaaacatcatctattgaagatgaaaaaaataaagccattcaaagccttaaaagtacaaatcctgaaagttttggtaagaaacttgaacagcatttagtaaatattaaagtcaatcaatcattagctctcaccgaagataacaatcaagatcaagctaaacaatttcaagaatggtttgataattttgatagccatctgaaatttttattcgaaaatgagagcgcacatttagttttttatcgtcaaaattttaaatttaaaatttctttagataatcgagagtttgattttcaaaccctttcatcaggatacttggcaatttttgaaattttagctgatttactggtacgctcagaattcttcgaaattactccccatgaactacaaggaattgttttaattgatgaaatagatgctcatctacatatttcgttgcaaaaaaagataatgcctttcttcacaagattatttcctcaaattcaatttattgtaagtactcattctccattcgttatcacatccacagatgatgacactgtggtttatgatatttctagtaatgaattttatgaagatgatctaagtaaatactcgattgaatcaataataaaagagctatttcatgttgaaactgattctttaaatttaaaaaattcaattgacaaaatttataatgctatacaagggcatgatacaaatttagatatactaaatcatgaacttaaaaacctccaaccatataaatctaaacttaatcccgaagcaaaaagtatatatatgcaagctattaattacttaattgatcatgaagcattaggaagtgatttagatgtttga

SEQ ID NO: 87975 - DNA, 672 bp, Acinetobacter baumannii 1412924
atgtttgagattattcgctctttacctgcacctactgatcttgcaaaaaataaatataatactgcccctatagtagaagcacttgcagaaatttgctattccaaatgctatttgtgtgaaaatgatgaagttcaagaagttgaagttgaacattttttaccccattcaaagcacccacatttaaaatttgagtgggataatttattttatagttgtaaaaggtgtaatcgaattaaaggagataattatgaatatattttaaatccttgtgatagttctcataacgtatttagaaatattcgactcatccctccatcacgtttgaatgacgaaattacaattgaaaatttgtgcccagaaagtgattcattacatccaaatgtagaaaaaactagagatttattagaaaagtgtttcaatgatgtttctacaccagctaggagaataagcagaacagatcttataaatagattattagatgaattagctgaaattctgcaaattagaggccgcttaaaatctaaacgcttaacaccaaatgaagaaaatgaggaaattgaaaaactaaaaaaaatgacatcacctcaatatcccttttcagcattttggcgttggtatgttttagatgatctattgcttttttcaaaaatgggatcaaatattaatttttga

SEQ ID NO: 87976 - DNA, 1230 bp, Acinetobacter baumannii 1293320; identical to SEQ ID NO: 86766

SEQ ID NO: 87977 - DNA, 663 bp, Acinetobacter baumannii 1293320; identical to SEQ ID NO: 86767

SEQ ID NO: 87978 - DNA, 1167 bp, Acinetobacter baumannii 216872
atgaagattacatctttggggttggaaaatgttggcgggatttcaaacttaaatctggaaaacctcaaccctcaaatgaacattatttgtggtgaaaatggggttgggaaaactaatattttagactctattgcatcttggttttctgagaatgataaaaatacacttaaaaagaaagttggtagtgataaaggtaaaattcttgttattacagataacttgggcagtaatcattatgaaatctcaattgataagtttgatcctgaacaatatgacagctatttaaataatcaaaactatggcaatgttaagaaaagccttttatatttaaagacaaacagagggattgattacaagaagatttcctcaattcaagctgaccctgatattgaacatcgtgctagatataatgccacaggtataaacaatgacgacataaaagactggcttctgaatcgaatactgcatagtgggcatgaaaaacatttatctgaaatacagttaaaaaaccttgaatttgctaaagagagttttagtcttcttaatccagacttcaaatatagtcgattaaacaccagtaatgagttatttgttaacacgcctacaggtgaaatatattttgagtatttatcgtcaggatttaaatcaataatttacatcttgctagggattatcaaggaaattgattatcgactaaaacacgatgatacagcggcacgcgactataatggaatcattttaattgatgaaattgaattacatcttcatcctgagtggcaaggacggatatgtgaggtcttaaaagtcgcttttccaaatgctcagttttttatttctactcatagtcctcatgtggttcaaactgctctcaaaggtgaagttgttgctttggagcgtaaagatggcaatgttggaaggcgagaattacctgagtctcagtatggctaccaaggttggacggttgaggaaattcttgaagatgtgatgggcatggttgatttaaggactcaaaaatataaggaaataaaagggcgctttgataaagcacttgaagataaagaccgtaacgctgctcatatagcttatgaagaacttgacaaaatgcttcaccctcaatatccattacgtcctgtttttagaatgcaacttgatagtcttggagaataa

SEQ ID NO: 87979 - DNA, 720 bp, Acinetobacter baumannii 216872
atgattaagttgcaaagaggtgtcagacctacttatttgagtgatcagaaagttcaagagctcacagatatatttaaagcagataaaaataagactgtttggaagcaagaatcaataggtgagtctttattgaccagttcatccttcaaatgcgcatattgtgaatgtaaattacaaattgaagattcatacatgcaagtcgagcattttaaggataaggatacttatcctgatgatgttgtagactgggaaaatttactaccatcttgtggacgttgtaatcggaaaaaatggacattagatgttataaccaatccaattgttaatccatatattgacgagccaaaggtgcacttatgtcaagagtcatttaggctttatgggaaggatgaaaaaggcaagactactgttaaaaagttgtttttgaatgatgatgatcgtgtggttttaccaagatttttagtttgtaatgaattgaatcgacaattatcaatagctgcctcaagttttaccgacattgataattcaagagattcaatgtccaccatattgtcttcttgtcaatcggataagccatattcagcatttttggccactactttgcatacaaaccaagattacttatacatcaaaaaacatcttgaagactgtcagatgtgggatcatgatcttgaagccttgcatcaattgtctctgaaattggtattagatcaacgctaa

SEQ ID NO: 87980 - DNA, 942 bp, Candidatus Accumulibacter sp. SK-01
ttgagcgcccgcacgctgaccggtgagctggaagcgggcatgaaggagacccgcgccgcgctggcgaacctgaagagcgcggcccatccgccgctggcggtgtatttctcgcccaagcgccagttgcccggccaaccgcgcagcctgccagaggccaagcccttcgacccgtccatcgcctacggtcgcgccctgaatgaccgcgaggtggaactgcgcgagttcatgcactggttccgcacccaggagaagctgggtgctgccaatgagccacgccggttcaaggtgctggacgcgttacgcgccgtggtgggcgaactggtgcccgagttcagcaacctgcgcattcaggagcaaccgcgcctcggcttcgtggtggacaagcgcggccagcccttctacctgcatcagctttccgacggcgaacgcggcctgctggccctgatgttcgatctcacccggcgcttggccatcgccaactcggacagtgacaaccctatcgccgacggcgtggcactcgtgttgatcgacgagatcgaactccacctgcatcccaagtggcagcgcgatgtcttgcagcgcctgcgcgacatcttcaaggcctgccagttcgttgtgaccacccattcgccactggtgctgggcgaggtgccggcgcgctgcgtgcgcttcctcgaattcgtgaatggcaaggtgggcgtgaccgtgcccacagaggcctatggcatggatgccaaccgcatcctgcaggagttcatgggtgccccggtgcgcaaccgggaggtggacggtgaactgaagaccctcttcgaactgatagaccaggagcggtttgacgaggctcgctccgccattgcggcccttgaacacaagctgtgcgaagacgagcccgagttgacccgtgccagttcgctgatccgctttctggagggcgccgagtag

SEQ ID NO: 87981 - DNA, 630 bp, Candidatus Accumulibacter sp. SK-01
atgcggaccatccagaaggggccggagcccgccaccttgacccagcatcgccagcagccgcataccgactatgacaactacgccgacaaagcggccttgcggcaggcgttggtggctgagcagcgcggcctgtgttgctactgccagtcacgcatccgggccacgcccgagggtatgaagatcgagcactggcaatgccaagccgaccaccccgggcggcagctcgattacaacaatctgctcggcgcctgcttgggtgggcaaggccgtcccgagcgcgagcagcattgcgatacgcgcaagggcaacaacgacctgtgcttcagcgtgtgtgaccctgctcaccccatcgagcggcacatccggtttctgggtgacggcaagatcagcgcggacgatgccgacatcgacaaggccatcaatgcggtactcaacctgaacctgccgcgcctggtcagcaatcgcaaggcggtgctcgcggcgttccagcagcgcctggaggatgggcgccgtgttgatccatcgcgtgagctgcccagatgggatggcagcgaacctggcgcattgccggagttcgcacaggtcgtcgtttactggctgcgaaagaggcaagcgagggccgccgcatga

SEQ ID NO: 87982 - DNA, 1266 bp, Candidatus Accumulibacter sp. SK-12
atgctgaaacacctacatctcaagaacgtcggtttggcccccgatctgcgggtcgagtgggcgccgcgcctcaacctgattaccggcgacaacgggctcggcaagagcttcctgctcgacttggcatggtgggctctgacacgaacctgggcgggtgcggttgcgctgccaccgctgtccgcaaggaacccgcaaatcgagtacgtcatccagggcaaggcgggagatgccaagcctgtcgtttcgaagttccgccgcagcgacgagacctggcccgtcgatgccaagcgcccgccgatgccgggaatcgtggtctacattcgcatcgacggcggcttttcggtttgggacccggcgcgcaactactggcgcagcgaccctggccgccctgctgcttaccatttcgcagccgacgaagtgtgggaagggctcgacgtccgcggccaacgcgtatgcgaaggacttgagcgcgactggatcaactggcaggaaggccgcaagccccagttcaaggcgctggcggaggtgttgcgcgtactgtcgccggtcgccgagacgttgcgtgccggcccgccgcaacgcctgttcatcggagaggggcgcgatcgtccgacgttgctgatcggcagccaaacggtgccagtcgccctggcatcggccggcgttcggcgggtactcgcgctggcttactttctcgtgtgggcgtggaacgaacaccatgtggctgcaggacttctgggcaagcgacccgagacgcgcgtcgtgatcctgttcgacgagccagaaacccacctgcatccacgctggcaacgcacgatcgtgcccagcgtcctggcggcggtggacgcgctcaggggcccgtccgatgcgccgccgcaagtgctcttggcgtcgcacgcaccgctgattgccgcatcgctggagccactgttcgacagcgcccaagatgacgtggcgcggctcgatgtgcgcgacggggttgtggcgatcgatcaaggcgtctgggcaccacaaggtgacgcagcgaactggctggtctccgagaccttcggactggagcaggcacgttcgctcgaggccgaacaggccatcgaggctgccgaagccttcatgcgaggggacagggccgcgttaccgaaaggactcgattgcagggcggcaatccacaaggcgcttacgcgcctgttgcctgcacatgaccacttctggccacgctggatcgttaccactaggcaattgcctagcaagcgggaggagcgtcgatga

SEQ ID NO: 87983 - DNA, 600 bp, Candidatus Accumulibacter sp. SK-12
atgattcaggcaccaatgctaccggagcccgcggacttcgatgcccaagtccgacagccgggcacgcagtggctggcggcaaacccgactgccctgcgaccccgagccctctggacgcgctacacgccggtgcttgaagccgggtacgaacgcctttgcggatacgctgcgatggccgacttcaccggcggcacggtcgatcactaccgcagctttaccaatcatcgagcgttggcctacgagtggcggaactatcgcttcgcctcggctacgatgaactcgaagaagcgcgcggcggacgagcgcgtgctggacccagaggaggttcgggcggggtggttcgagatcctgctgccgtcactgcagatgcgggcgaccgacagagttccggcccgcctgcgctccaaggccgagcataccctggaccgactgggcttggcggacggggagcgcgtcatccgctggcgacgaagctggtttgagctttaccagcacggcgatctgtcgatcgaggggcttcggacggtagcacctctgattgccgaggctgtcgagcgcgacggcaacccgtcaggcaagcagggtgctttgcagccgtga

SEQ ID NO: 87984 - DNA, 1581 bp, Candidatus Accumulibacter sp. BA-92
atgcgacttgaccgggtctacatcgatggctttaagaacctgaagcaactctccgccgatttcgatgagcggcaactgacaacagtgatcatcgggcagaacggagccggcaagtccaacctcattgaggccatcaccagcatctttcgttgggtggacttgcgacgcaacgcaccacggttccactaccgcgtggattaccgcatcgacggcgcccgcgtagcactctccaatctggccgacgagccagccattgccgtggaccaaaaggaagtcagtcgcgccgagttcgagcgacgcaagaccgaatggtttcccgacctggtgttcggctactattctggcagcagccgccgacttgaagccttgtttgatgaccaccaacgccgctactacgacgccatcaagctcgaggcaagtgatgaggcctgcgcccgtgcgcaggctgaacggcgactcttctacgggcggccgatccacggcattctggccctgctggcgttcttcgccttccccgatgccaaggtgaaggccgaactggcgagcaagcttggcattaaaggctttcactcgatgctaaccttgttccgcgagccttggtacgccaagggtagccgcaaccagaagatccaggacgcgcacgacttctggggcgccaccggccctgcagggcgcacggcacgcaccctgcaaacagctgccttccaccccattcgtctggtggggaacagcattgacgactaccgcaacaaacagcagatcgaagcgcagtacgcgaccttcctgccggcactcgccaatttgcagaagttcggcagcgcgttcaagggcgagagcgagatgttctatgccctggaagcgatggacatctcggacctgattcgtacggtggacctgtgggtaacgcgcagcaacgatatcagcggcgacgtcggctttgccgacctgtccgacggagaacgccagttgctgatggcgctgggcctaattcgcgtctcgcgcggcaagcgcgcgctgttcctgctggacgagcccgacacccacctcaacccgcactggcagcacagctacctgaagctgatcgaagactggacgggaatcgccgccgacgcggccaactgccacatcattctcacgtcgcacaacccgctgacgatttcggcgctgacgcgtgaagaagtacgggtgatgacggtcgagacggacggtcgcatcagcgtattgcccccctacaccgacccgaaggggatgggtttcaccgccacgctcaccgagattttcggcctggccacgagcctcgacatcgagacgcagcggctaatcgatgagcgaaatgccctggcacagctgctccaaaagtctgatcctgaggagcgacggctcatcgaaatcaatgaccagttggcgcgcctggggttcctgttcgaggaccgtgagccgctataccaggacttcctgcgtgcgtggcacagcatccgctacgccgaccgaccgccactgacggcgtccgatgtggacgtccgacagaacgcaatgaaggcactcatcaagcaactcatggcgcaggaggcgaagccgtga

SEQ ID NO: 87985 - DNA, 843 bp, Candidatus Accumulibacter sp. BA-92
gtgatctacgtaaaacgggatccctcactgattcccgagaaggtgctcaaggtcgccgagcgagcgcagcagaccctggaatccctgatgcccaatcgccgcaaagcgttcatcgaacagaaggcgcacatctggcgagcgttcggtcgtcacttggccaaaatgtcgtacggcaaatgctggtattcggagagcaacgaccctcagtccttcttcgacgtcgatcactttcgtcccaagaaggaggcaaagcgcgcggaaggcgtcgcggatgacggctacccctggctggcgttctcgtgggagaacttccgctattcggccggacgctccaatcgactgaatacggatgacgccactgcggcggtgctcggcaaaggaagttggttcccattgctggagggcagtgtcagggccaactggactaatcgctgcgaggacaaggaatcggccgtgctcctggacccaaccaaccgggacgacgtaggcctgatcgagatcaattccgaagatggccgtgccactccgagtgtgacctgtgtcgggcaagccaagcaggagcgagcgaaacggtccatcgagatctacggtttgaacctgggcaacctgatcaccgcgcgcaaacgcgtgatgcgcgacttgcaggacgactatctcactctgatggaaatctgttcggccggaaccgatatggcagcggtcagcagactacagaacaaattcagacgcgccacgctgccgagcgcaccgtattcccgcgcggcgcgggccaagatgcattcgttaccctacggcccgaagttctgcgcacaacccgaagacgaaccggaggcgctagcctga

SEQ ID NO: 87986 - DNA, 1296 bp, Thiorhodococcus sp. AK35
atgtacatcacccgtatcttcctcagaaatatccgcggattcgcggagctcgatttcgatctgacgcgcccggacggctcctatgccggctggactgtctttaccggcgacaacggttccggaaaaagcacactgctcagggccgtcgcgatcggtcttacgggtgcggagacggcgcgagcgctacagccaagtttcagtggctggatcaaggatggctcggaaaaggattgggcttcgatacagctgacgataaccggcaatccagacgatgacgggatgacgggagaagggcgccggcgtggcggtgccttcccagcggagctcagactggagcaaggaagtcaagatgtcgctgttcgctcgatcaagcccgatggaacgccaaagacctattcgacaccggctcgcacgatttggtcggaaaaggcgaccggctggttcagttgcggctatggtccgttcaggcgggtcttcggcgcatcgccagaggcgacgagggcgatggtctcgccggcctccgagcgcttcgtgacgatgtttcaggaagccgcgtcgctcgccgaggtggatgtctggctgcggacactgagccacaagaaactcgaaggaaacagagacgcagaggagcagctggatctgctgctgagcatcctgtcggatgacttgctacccaatcagatcgttatcgatggtgtcgattccgatggattgtggttgcgcgaccggaacggaactcggctgtcgtgggaagagatgagcgacggctatcgtgccgcactcgccttgctgaccgatatcgtgcgtcatctgatcaagatttacggcctccaaggcttgaccgagacccgagacggcaagacggtgatcgcccgcagcggagtcgtcctaatcgatgaaatcgatgcccatctgcatcctgagtggcagcgtgagatcggcttctggctcaagcgtcacttccccaggatgcaatttctcgtatccacgcacagcccgctggtttgccaagcggcagatccgaatgggctcttcgttctgccagagcctggcgcaccggaacggccgcaggcgctcggcgaggaggactaccggaaggtcgttgccgggcgaccggataccatcctgctcacaccggcttttggcttgcgcaacacgcgctcgcctcgtgcggtggaagcccgcgcgacgcgcgcgaggctacgcgcgaaacaacgcaccggggcggaatggaccgatgctgaggccgcaacctttcggcagctcgatatgtttgaaatcgaggaagacctgtag

SEQ ID NO: 87987 - DNA, 570 bp, Thiorhodococcus sp. AK35
atggccggtgacacagagcgctgcatgtactgcgaggattctcacggcagcgacatcgagcatttctggccgaagagccactaccccgagcagatgttcgtttggcgaaatctactgctctgctgtactgagtgcgggcggctcaaggggactcgattccctttggacgaaacagatgatccgttgctgctcgatcctacgagcgaggatccttggcaacacctggatttcgatcccgagaccgggaatatcgtccctcgcttcgatatcgagcagaatgccttctcccgcaagggcgactcaaccgttgccattctcgaactcgatcgccgcgaagccctggcgcgagtctatctgcgtacctatcgacgtctcgtccagatcacggcggacgcaatcgatgacgccaacccgaatctcgattacctggtcgagcgactgcgagcggccgacgatcacggtttgatcgcctggtgccttcatggcgcagggaagacgatggatccattctgcgtgcttcgcgagaagcatcccgatgtttggagcatctgttgcgaatgtcttccctga

SEQ ID NO: 87988 - DNA, 2205 bp, Pseudomonas syringae pv. syringae str. B301D-R
ttgatcaagctcaagaaattagcaaattcaaagcccgtagatatttccaccaaaacccccttattcacccgggaaattgctaggctcaaagcctatttcaacctttctcccactgagcaggcacgcacccggccgccgttcaacaaggacgttctgaacgtgcaatccgtagcccaagagctcaagcggatccagcacaacaaatgcgcttactgtgaaaccgtgctcgaactcgaccctagtggctacgtgtcccactatcggccgttgagcaatgcggttgacccgcactacgacactgaacatctcgagtgctacgcctggttcgcctacgaatggcagaacttgatgctcatctgcaccgattgcgacagccataagctcaattttttccccatatcgggtaggacggctgtcgcgcgctcctcttggagagaggcgcagcttcgggagatgccactcttgctgaacccgttcgaggacagcccttcagatcacctcatgttcgatagcgatggtgtcgcttgcgccgcctctgctgccgggaaagagactattgcgtttctcaacctcaaccggccggctctttgcctgaaacgcaaggaacagatccatctggcgctcgagctcattctgaacagtaacaacgaaaaggaactgatcagtgcattgcgtgatcacacccgagatgaggtcctacatgtaggggccgttaggaactgcctggggcatgtttgtcggatcctgcaaacccagatccgccacggcagatactcacctcgctccgatctgaacaaaaagatcattcggctcaggggtgagttttctatccgcgattgggaagatgcggtttcgcggtgcaaaacaaatgatctagcattcattgtccagaacaccgatctgggggaactgaagccccgccggtttgcctacattaccagtatcgagatcggccgcttcaaaggcatcgagcacttcattctggatatcggggctatcccatccgggcaggggcgtaagggaacgtcctgtacaatcctgctgggcgaaaacgccactggcaaaagctcgatcctgcaggcagtcgccctggcgcttatgccccctgaggatcgacagcgcatccgtatcgaccagaagagcctcatcccccatgggatagacgaagccgtgtcgccccctctgcaaccagcggtcaccgtgcgtttcagcaatggcgagtccgttgtcctcagcatgaacctgcaaacgggccgcctaaaatccgccggctctccgcagaacttagtgttcggttatggttcgcggaggtacttcctatcgggaagatcgacgaaagcccaaacatgccctaataggacgctgttcaatcaggctgctagccttcaggacccgacgaactggttgatgaatctcaaggaaaaagaaaaattcaacgcggtggcacgtgcacttgcctcgctgctctccctacgtctcggcgaattcgtggccagcgacgaccgctcgattttcatccagcgccagacttcgcgtctgcctatcgaacatctaagcgacggttacaagtccttgttcgccatgtcagtcgacatgatgcgggaaatgctcaaacactgggacaaccttgagttcgcccaaggtatagttctgatcgacgaaatcgaaaaccacctgcacccacgctggaagatgcgcgttatgaaagctctgcgagagtctttccctcgcgtacaattcattgtctccactcacgatccgctatgcttgcggggaatgttcgaaggtgaggtacaagtgctttatcgggatcgcgatgggcatctacaacgcgttgagcaattacccaacgtggcgaatttacgtattgagcaaattctcacgtccgactacttcgggctggccaccaccgaagacccgatgcgtcaacgcgcacttgagcaactcgcccaatatgcagcgcatgaagaccgagacctctcgcaggctgaccgcagtcaccgtgatgaactgctggaacactacggcaacctacccgtgatcggcgataccttagacaagcagatcatagcgcaggccctgactaggcatattcgcgatacggacctggctacccccatagaacatgccgacgctagggaagcatcggtgcgggcgatcatagaggtgcttgagcgcaaccggaagaaatatgatcctcgttga

SEQ ID NO: 87989 - DNA, 882 bp, Pseudomonas syringae pv. syringae str. B301D-R
atgcctacatcgctgaccgctccagatggcgagggttatcgcgagcatctacgcgcggcgatgtactatcaggaaccttacattaagtcgtttgggttcgcctattacaaggagtccgacgtagtcacagcgttgaacgcgttgttccacaataagtgcgcctactgtgaaggaaaaatttccagcaccgggcctatagatatcgaacacttccggcctaaaggccggatagagggcgagtccgaacatccaggctactggtggcttgccaacgaatggactaatttgctggcctcctgcatcgactgcaaccggggtcggtaccaaactgttttgaacagcgaagatggcctgctactaactcagggtgaacgcctgtgtggcaaacacgatcacttcccggtggctgggcaacgggccatttgcggtaccgacgaccatatgctggaagatcctctgttgatcgatcccacatgtgtggatcccggagcacatattcgttggaaggtcgtggccgaacagcctctggctatcgcgagctcgcagtacgggcagactagcatcgacttattcggcatcaatcgctctaagttggcggaggctagacgagagttacagctcaggttggacgaagagtttttatgcctgaaggcaatgatcaccaacattgccaaagagcccacagacgaaggtgtccaaaggtggatgcctgcgctgcagatgtgcattaataagttcttcaggcatgccgaaccaagtaatgagtactcagccttcgcctggcacataatcaaactgcggtacgacacggtatcggaaatggtggcagcgttgatggccaggattgctatggaaaaatctttgggagccgcagcactctaa

SEQ ID NO: 87990 - DNA, 567 bp, Pseudomonas syringae pv. syringae str. B301D-R
atgacgatagataaacatggtgagacattgaatgtcttacagctgtcccaaggcgaaaaatccatgatggcgctcgtcggcgacatcgccagacgcctcgccatgatgaatccggcccttgaaaacccattgcaaggcaatggcattgtcctgattgatgaagtcgatctgcacttgcacccaaaatggcagcgcagtctcatcgcccaactcactacaacgttccccaattgccagtttctcctgaccactcattcgccgttggttatcagcgatagcaaggatgtgctggtgtacgtcatggacgatggcgagttacgcgagcaggacagtctttatggccttgatgccaatcaggttctgtcgagtgtcatggacaccggcattcgcaacgaggcagttcagacctgtctggacgagatgcagcactttttgatcaggggcgagcttgatgaggctcgtactctttacggagtgctggccgaccagttacctgcagatcacattgaactggccagggcttcgttactgattcgcaagctggaaatacgtcgtgagaaagattga

SEQ ID NO: 87991 - DNA, 651 bp, Pseudomonas syringae pv. syringae str. B301D-R; identical to SEQ ID NO: 86097

SEQ ID NO: 87992 - DNA, 1497 bp, Psychrobacter sp. JCM 18903
atgaaagtcaaacgcttacacctacaaaattatggtcgctttgaagacttaacaatagactttgcgccaacttctgaaaagatgggtaatgtcactgttattgtgggtaataatggggctggtaagtcacaagttttgcaagcactggcgacaaatttgagttggtttgtagcaaaacttgctagtgatgaagatggttttaatattgataaaacttatataaataatggtaagaacgaggtcaaagctagtataagggttgattttaacgagaacaatccaatgccttatggattagaagaagatgcagactggagtattacttctgttaaagatggacgtcttaaatctttgagtaattatatgaaattgttaagtaaaactgtcagaagttttcgctcaaacctaactaaagaagataagtattctttacctcttataactttctattcagtcaataggacaatatcagttgaaattcagaaggatatcttttcataccaatatgatcagttggatgcttataaaaactgtttaaactcaaactctatagttttctcgaatttcctagattggtttagaaattcagaagatattgaaaatgaaaggaaagtatcaactgaaagtattttggaaggattaaatagtgaaaatgaaaaagttttgaatgaagttaagaaaattttaagtcagcttaagtcttctaaagaagacaaagtaaatattggtctagagatgttagaggaatctaaatataagatagaaaaagaaatacatgaagtgcaaaagctacaaaagcatagcgaggacatttctagagacttacctttattctttgtgaaaagcgcactgaagtattttactgggttcactgatttttatatccgtcgtaaaggtactgctaccatgatagtggaaaaggatggcgaaaagttagatgttaatcagttatcccaaggagagaaatcacttctagctttagtaggtgatatagctcgccgtctagcaatccttaatccaagcctagcgaatccattagaaggtgaaggcgtagtgatgattgatgaggtggatttgcatcttcatccaaagtggcaacatgatttgattgataagttggtcgctactttcccaaacgttcagtttatcttaaccacacattcgccacatgttatcagtgatcgtaatgatattttgttgtattcattggatgatggtgaattaacagaaatgcctaatgtctatggtgaagatgccaatacagtgcttaccaaaatatttgatgtggatatccgagacagtaaagtcgaagagcagtttacagttattcgccgcgctgtcagtaagcatgattatgtgacagcagatactcgtataacagagctagctgaaaaactgccatctgaccatctagaactattaaagtgtcgtctattattggctcaagcgaaattggcgaaatctaataaagatgagtcgaatcatgcaaaagattga

SEQ ID NO: 87993 - DNA, 579 bp, Psychrobacter sp. JCM 18903
atgccttttgagacagcaaagagttttaaaaagtatcaaactaagaattggggcgaaattccagaaactattaaagcgcctttgcgtcagcagttgtatgatgaacagcgtggagtttgctgttactgctgtaaaagtcttggcaatggaaacacgactattgaacatttaaaaagccgtaacgaatatccacataagtgctttgactatgataatttattattaagttgtagaactgctaagcagtgtgacaacgcaaaaggcagccaagaactgcttttaacaccgcttatggatgaatgtgaagaagagataaaactaaatcttgcaggagagttagagtctgatagtaaacgtggtagtgaagctattcaaatgttgaatctaaatagtcgtaaagcctgtagacaccgcaaagatttattcactatgatgagtgaggtttttggttatgacttaccgtataagcctcccatagaaatagcaaatgaatacgctcttgaaatacttttaacatgtctacctgatgaagggcaaagaagtgagcttcaatatattgtcaaaaaactgactaaataa

SEQ ID NO: 87994 - DNA, 1626 bp, Ruminococcus albus SY3
gagtatcatcactatgatgattatagctattgtaccaaatattatgcctataaaaaaataaataatgagaatacatttcttggctgtgttaaaattggctgcctcaatttaagtgaaaaagttgaatctggggttagtaataatggttttgcttcttattcgattgaccaaattatgccaactgacgaattcaataaccttgaaaatgattatttctctttaggtcaatctattgattactacaagaacattaatgatatatttggaaatgatgcagatgaatactataaaagcctaaatgatcttgcttatagtattgataagtttaaatctctatataatgataaagaaccttgtctggtttattctttattaagagaattgcattatacaaatgtaatccagtttaatagaatatctcacggtgaatgcgaaaatacacgatatgattttgatatttactataaagatgaaaaattacctatcattgtcgatccagatgaaaatcctccaagcaatattcacgtattaattggtagaaacggagttggaaagacttttctattgtataatatagtatgtcatttgttagagaatatggaactaataattgataaaaatagctctcataaatataaatatagtgaggcttttaaagttgatgctgaaaggaatagttttgctggtgttataggcgtttcattcagtgcatttgatgatggattatcctctatacaagtaaaatcagaaagtgaaagtttgcttgaaaatcaacacatgaaagatgattttaaaaagaaatataaatacattgggcttctaaaaagaaatactaatagacatgatatagatgacactcgagaaagcaataatgaagaaagtgattttgaaaaagagaaaaataaagaaattcaatttataactaaaagcgcaaatgaaatgtgtgcagaatttgtcaacagcctaaaaagaattaaaactgacagagtaaaaagagaaacctttattgaaacctgtgatcaattgaaaacagatagtatgttcagtgacaatgaatttattaaattattaaataattatctaacacagggtaataaagttgaagaatatatagacaggattgagcgctttttttatatgctaagctctggacatatggttattattttgtcactgacttgtttatgtgaggctatatatgagaaaacgattgttataattgatgaaccagaaatacacttgcatccacctcttttgtcgacttatattagatcgttatcttttatgcttagaaagaaaaatgcagtggcaattctagctacgcattctccaattgtattacaggaagttccaagctgctgtgttactaaggttattagaaaagatgataatatgagttttataagaatagaaaatgaaacctttgctagcggcactgatttgataactagagaaatatttggttatgatattttaaaaacagggttttataaattgattgaagacaacttaaaagaagattttgaggctactatgaaatacttcaatgatcgtgttggctcattaggccagatgcttatgcttgatttattaagtgaacaggagaacgaaaatgatcaaacatga

SEQ ID NO: 87995 - DNA, 888 bp, Ruminococcus albus SY3
atgatcaaacatgagcctataaaactaatcattactgataatgaatcagtagaacatgaaatgacacaggatgacatctatgatttattgcctgatgtagaatcatttaaaactactgattattataactatagtaaacaagaaacaaaggattatactttaaatctatctaatgctatggattttttcttaagagaaaagaaaagaatggaggatgataaaggatataaaaaagcaatgaaagccaaatatgatcagttttcaagaagtggtaacaaaatttacaatcaagtatatagtcgaattaagacaagcgaagatgtttgtgtttactgtaatttaaggaatagagatatagctgaactggatcatttttttccaaaggcaacatttccttcattggcaatttctattaacaatttaatacctagttgtagctactgtaatcaccctaaaaacgataattttccattggattatgttttattacatccttattatgataattgcttagacaacgtatatgactatttaaaatataaaattaatgaatttaaaggttacaatatcgttggtgaattctacatagataaaacagaaaatatggacgattatacatatattcggataataaaacattttgaattctttgatttgaataagtactataaaaaggatttcatctcagattatgatgagtttgttgaaacacttaataacatagattgtttaaaggaaaaattagaaaaaaagcgtgactataacagaaaaaaaagatctgccccttggttatatgcagggtttgatgcgcttactcattctgaagatttttttcgtattattgaaaataagttgtgtaggaaagaagagtttatgagctcacaatga

SEQ ID NO: 87996 - DNA, 1344 bp, Acinetobacter baumannii 1295549
atgcaaatacaaagctttagtctaaaaaatattgggcaattccaagacctaagcgtgtctttagcacctacacaacactatccctctaatatcacagttttcattgggaataatggtagtggtaagacatctctattaaaatcagtaacgactgcactaacatggtttgtagcacgtttaaagcatgataaatcaaatggtacaccaatccctgaaagcgtgattttaaatacagcaaattcagcagcagtagaaatcattgttaatgatcaaaacttacaacaacaaaaacaagcctatacatggcgtataactaaaaatcgcacggcgagaaaagtagaatttactacgtatctaacagaactaaaccagctaactgactactataaacaatggcttgggcaagacgatcaaagcagtttacctttaattgctttttatcctgtagagcgtagtgtgattgacatcccattaaaaatacgagaaaaacaccagtttttacagatcgatggctatgataatgcacttaataacgctgtggactttagacgtttttttgaatggtttagggagcgtgaagatattgaaaatgaatttataaaagatcttattttgcaaattaagcaaaatttagtagatcaagacttgcttaacaaaatagatgaatataattctggtaagtttaaagatgtacaacttgaagcggttagacaagcaatttatgcttttatgcctgactttaaaaatctacaggttagccgtaagccacgtttggcaatgattattgataagaatgaaaagacattaaatgtaaatcagttatcacaaggtgaaaaatcattaatggcattggttggtgatattgcccgccgtttagcaatgatgaatcccagtctagataatccattactaggcaaaggcattattttaattgacgaaattgatatgcacttgcatccacaatggcaacgatcaatcatacaacgtctacaaacgactttccccaattgccaatttatcttaactacacattcaccattggttatatcggatacccaagacattttggtatatgacttagatgggcaagatattaccgctttaccatcattgtatggtcaagacgctaatacagtattattgcaatatatggataccaattaccgtaacccgagagttgctgaacaaattagccaagcaatggatgcgatccaaaacaatcaatttgaacaagcaaatcaattaattgatactttgaaatttgaacttggtagtgatcaattagaggtaatgcgacttgtggctatgttgaaaaaaagaactctagccaagcaggggaaataa

SEQ ID NO: 87997 - DNA, 642 bp, Acinetobacter baumannii 1295549
ttgcaacagattaataaagtgtctgaaccgactgaattaaccgaatacaaacgtaaaaatccaacccatagatatgatgatttaggggatgatcctgaacaaatacgtttagtaattaggaaggcatgtttggatgaacaagcttatttatgtgcttattgttgtcggcaagttggaataaaagaccgagattgtatgaatgagcatatcttgccacgacatcatcacccacaatatagttttgattttaataatattgtggcaagttgtacgactaaaggttgttgtgatgatgcaaaggaaaatcaggaaatagctattaatccattatccccacgttgtgaaactgaatttaaatttaatattagtggtactattacgggattaactgatgatgcaaaacaaactatagatgtactaaagttaggcgatagcgtgcagcaaaatcaaaagttagttgatattcgtaaacaagtaattgctaattttttattcatccaaggcactgataaagagaatttgatcgaggatgatgagttgttaactttgttgattgatgatttaaagcaattaactgatggtaaattacaaccatttgcgccagttataagtaaagccttgcaaaattgggttaatggttaa

SEQ ID NO: 87998 - DNA, 1344 bp, Acinetobacter baumannii 277047; identical to SEQ ID NO: 87996

SEQ ID NO: 87999 - DNA, 642 bp, Acinetobacter baumannii 277047; identical to SEQ ID NO: 87997

SEQ ID NO: 88000 - DNA, 1440 bp, Acinetobacter baumannii 225588; identical to SEQ ID NO: 86188

SEQ ID NO: 88001 - DNA, 672 bp, Acinetobacter baumannii 225588; identical to SEQ ID NO: 86189

SEQ ID NO: 88002 - DNA, 1344 bp, Acinetobacter baumannii 426863; identical to SEQ ID NO: 87996

SEQ ID NO: 88003 - DNA, 642 bp, Acinetobacter baumannii 426863; identical to SEQ ID NO: 87997

SEQ ID NO: 88004 - DNA, 1608 bp, Acinetobacter baumannii 1391434
atgagcaatagatctatagattacctgaaaaaaaactccaataaagggtcactattttctttatttcaattgcttgaaaatgaaggtctgatagattcagaaaaagtaaatctctcatcagaactactaaaaaactgcttgtcttatgtaacatcaataaaagaagaggaagcaccttttaataaaattcatttagaaaagattcagcttcatgactttagaaaatttagatcaatcgaagtaaattttgataatgatcttaccgtgttcattggctcaaatggtgccgggaaatctactatcattgaagcaattactaaaactataagctggattggaaatggattgataaaagaaggagataatggtcgtcctataacttatgacgatataaataataactcttcaagttatgcagaaattaattcgtattttaaatatggtaaaactgaattttcaggaaatatttctaaagctgttagaggcagaacagcaaaaaaagatagtcatgtttatgatttaaagcaattttcgaatattttaagagccttgaataatattcaacaaattaatcttccattgttttgttattatccagtagagagattaaaagattcccctaaaaatgcccttttaaaagattctttaattatagatagatattatgcctataaagatgcttgggacggaaagttaaagctagatgatttctttactcttatttgcatcatttacaataaatcaaagttgaacaatgatttagaagaaataaattcattaaaaaataagttagatcaattaaaatctataaatttctctgatttagaaattattaacctcttacaaaaacaactacatgagttggaatctaagaataactttgattcatctcattctgagtcagagttagattttaaaaaatttgtcgagactattaaagaatctttaataaatgatttattaggtataaaggatatatcttttaataatttttctggtcgaacacaaatttatttccatttatcagatgggaatattgttagctcaaaacagttatcacacggtcaaaaagttacttattcattgattggagatatatgtcttagactgttattactaaaccctaatcttaaaaatccattaaaaggtcaaggtataattcttattgatgagttagaactacatttacaccctaaatggcaacagagaattttagtttcattacgtaatactttcccaaacattcaatttatagtctctactcatagtcctcagattttatctacaatagataaaaaacatataagaattttagaagaaaatgactctattattgagcctaattatcaaactgaagggactcgtagctctgatattcttgaacaactaatgtcgacacactcctcccctgatattaaaataaattatttatataacaaatatttagctctaattgaacagaacattcatgaaactcaggaggctcaagaactaggtgcagaattagctagtcactatggagagaaacatcccaaaatacaagagattaaaagtttaattcgactaaaagaattaaagaataaaattgctagtaaaaaaatggactaa

SEQ ID NO: 88005 - DNA, 660 bp, Acinetobacter baumannii 1391434
atgaaaaaactagatcgaaactcagttcctgagccatcttgtttaaaaaaatataaatatggtcaagatgattggagtgttttatctcgcaataaaacagaaaatcaagaaatttgggattctcttttaccgcttcaatcggaaaattgcgcttactgtgaaagtggtttatcccatcatagacatatagaacatttttttcaaaggaatactaatggctatgagcatctgacttttgtttgggataatatttttggctcatgttgtaatccaaatagttgtggaaaatataaagatgacaagtttaagggtgatttaacaaaaattataaaacctgatttagatgatcctaatgattattttatttttttaagaaatggaaatattcaaattaaagaaggattaaatgaaagtgaaaaaataaaagccgaattaactttatcagcttttaacttaaatggagatactaaactagtaaatagcagatcagcagctataaaaccatatattaaagaagccgatgaaatatatagtttgatcggaagtgatgaaagtgccttagaaattattaaggttttaattgatgagaaaatacaggaaatttcgtctcaaccttttagtactgcactcattcacctatttcaatataaccaatattaa

SEQ ID NO: 88006 - DNA, 1230 bp, Vibrio parahaemolyticus VP-48; identical to SEQ ID NO: 86310

SEQ ID NO: 88007 - DNA, 666 bp, Vibrio parahaemolyticus VP-48; identical to SEQ ID NO: 86125

SEQ ID NO: 88008 - DNA, 1413 bp, Vibrio parahaemolyticus VP-48; identical to SEQ ID NO: 86314

SEQ ID NO: 88009 - DNA, 645 bp, Vibrio parahaemolyticus VP-48; identical to SEQ ID NO: 86309

SEQ ID NO: 88010 - DNA, 1251 bp, Vibrio parahaemolyticus VPCR-2009; identical to SEQ ID NO: 87374

SEQ ID NO: 88011 - DNA, 690 bp, Vibrio parahaemolyticus VPCR-2009; identical to SEQ ID NO: 87375

SEQ ID NO: 88012 - DNA, 1635 bp, Vibrio parahaemolyticus VPTS-2009
atgtacttacacaaagctaacataatccaatttagaaattttgttgaagcagaactggacttgacaccaactagtagccaatgttttgcactggcaagtccgaatggcgggggaaaaagtacattacttcaatttatattcatactattacattgctttaagaacaaagataaacatgaatatattaaaaacctatttagtagcgaaaaatatttaaaagaaacaaaaattgcagagttcaacttagaaattaaaggtgaaaaacattttttacattttcaagctttgccaattgattatgctggattagatctatctatttttgaagactatgagaatgtcgatatgcacttaaattcacttgaatccaacagtgaatatgacatatcagaattaatgaatataaaagagtctatagatttaaaaagacggatagatcctattttacaaagaaggattacatcgcttagaagatacactcgaactggtgaagaaagaagtttacacatgcggtctatagaggaaagagacccatcagctgcattatcacttattgaaaggctactagagcgagcacatgattatcgagaacaattacaagatgtaaaaaatattaaagataatttgcacttcaaattgaatgaaactatcaaacaactctcagaccttaacaagtcctttattttagatttgggtaacggatttgtattaaccgctgaaactgacattccagaagacaagcaaaaatatattgaagaacatatttatttatctgctcctgcttcacaagttttcttgttccttggtgaagaggaaaagtcttcaattcttaatttgaataacgataatacagaaaatacttatactagctcagttgctcaagcaaaagagagaatcaatggttttttcacttatgactttacaacaactgaattgatttctcgatcatttgacaaagcatttgcaagtgataagcaacaaaaaattgaaactggtagttacggtaacaactacgatcagttggttgatgaacttaataactttttagaaggtaaaagtatctcacaaaatcaatcgaatagtgacattatattcaaggtggctaattcagatattacgttaaagccagaagaattaagtcatggcgaactgaaaaaactgagtttatattcatggttaaagcacatagtgaagcccaactcacttattttgatcgatgaattggatattgccctacatccaaaatggcaagaagagatactatctgacctaatgaaatgggagcctagcaacatatattttgcagcaactcattcaccacaagtaataaattcaattgattacagaaacataagacttttgaagtgtactcaaggcgagtccaagattgagatgttggaaagagcaccattagaccgagatgtaaatactattatctcacagataatgggcgctaattacttcccacagaaattgttagaactccatgttaaatatagaaaaatggtcgacgatgatacatacaaatccgagctcggcttaaatgtaagaaacgaaatcttacaatatgaaagcgtaaactctgagttcttccaagatatccaatatgatattgatgagaaggaagaacaatga

SEQ ID NO: 88013 - DNA, 684 bp, Vibrio parahaemolyticus VPTS-2009
atgagatacgtccataagctagaaacgcctcaattctttcttgatgatacaaaaaatttcactaaatgggacgactatgatgaaaactacgaaacaagggagaaacgcagaaggttaaggagctaccttttagaaaatgagcaatttagtctttgcatatattgtgaaagcaagattgaactagataattcacatgtcgagcatataaaacccaaagacgaaaacttataccctgagcttactttttcctatcctaacctcgcagcttcatgtcaagggaatgcccatgcagagctggcaaaagaaggagagttacagccagagagtacatgtggacacaagaaaagtaacgaatttagcgaagggctatttttgtgccctcatacaaaaagcaacattgggtcttacttcaagtattgtagagatacgggagtaatacaaccaaacgatgtcgacactctatctgagagatatctaaaagcaaattacatgatcacaacgctaaagctcaatgacggacatttacctcaagccagattaaaagcaatcaccgtgttgaggaagcggctacaaaagaaatttaagaaagacaaggctgcacgactaaccgagttacaaaaggttctgcaacgtgacactaatgcctttatcagctttcttcgatacagtttcaccaatagttaa

SEQ ID NO: 88014 - DNA, 1245 bp, Vibrio parahaemolyticus VPTS-2009
atgtcaggctatctaactaaaattaaaacgaagattccttactctgataaagaagtaaatatagacgtcaatggtaaaacactgatcttaacgggtggtaacggttgcggtaagacacagttgctgaagttaatttatgaaaagctgaaagtttcagttatcgaccgtcaaaattacaatttagctgacgttgaaaggagcttgaaatccaatcaagctcaccttagtcgcatcggtcctgctcatcaacactataagcactacacgcaacaagttgagatgtatagtcgacagcttgaagatacaaagtatccctcattagaaactagtaaccttgaagagttcattgtgaactatcaagagctaaaagctcttttaattgagtttgaagcgatgagaaaatctgaaattgttaagccgtcttcggtttcgagcattagtagcttaagagatcaagacaaacaggcagttcaacaagtaaataggaaagtcagtacctcatcattatttgaacagttcttagtcacgaataaagcgaatcaggctttttccgagtcagaaaaaatcaacaacgaccctgcagaagcggcacggattgataagtggtttactaagctagagaccgatttacgaaacctttttgaagatagagatcttgagctagtttttaaatcagactcgttctctttcgagatccatcaaccacacaaagaaccgtacactttccaaacattatcttctggtttctcgtcgattatggctgtgtatgcagatctaattactaaggtatctctacgctcaatagaccccgaagagctaactggggtggtattgattgatgaaattgatgctcaccttcatgtttcattgcaaaagaaaatcttatcatttcttactcaggcatttccgagagttcagttcatcgtatcgactcattctccgtttgttgtctcatcgattgatgatgcagtgatttacgatctatcaaaacgagagcaggtcgaagatctatcaatgtactcttacgaatccgtacttgaaggcttattcggcgtacttccaatttctagcttacttcaacaaaatattgaagctctagccaagctattagacaagcccacgattgatgtcgaagaggttcagtcacttttagataagttaccaccggatgaagattcattagattctgaatcactttactttgtaaattcagctaaattagcgatcaacaaagcaaagaggtag

SEQ ID NO: 88015 - DNA, 666 bp, Vibrio parahaemolyticus VPTS-2009
atgttcaatgcagttagaaatgaaccagctcctacttcactggctggaaaaagaaaatatgactcagaagatgtttgggacgccttaaaaaaggtgtttcataagaagtgttatatttgtgaaactagtgctccattagaaatcaatgtcgaacactttgtaccacatgagggtgatgagggtttaaagtacgattggaataatttgtacttatcttgtggtcggtgtaataacattaagcttgctaagtatgatgaccttttggactgttgtgaccctgataccgatgttgttcgtgcgataaaacataagccaccattaaccccatttgctagaaagctccaaattgaagctcaaagtgatgatgataagactaaattaacagcagaacttctaaaccgagtctttaatagtgagcacacgcctaataaggcagttacggcttcatccctcagacgcaaagtgtttgatcaatacaacttattgttaacacagttgaacaattattatgatccactagctttacctgatgaaaaagatagagctgttgagcgaattaaactcctcctaaaaccttcttctccatacagcgcatttataagttggtgcattatggaagatgaagagctagggccgatgctgcatgaatgtataggtatagtttga

SEQ ID NO: 88016 - DNA, 1632 bp, Vibrio parahaemolyticus VPTS-2009
atgtccaagcaacgtaaagttcaacgtagatcgataagagcacaaattgataatgcagaaaaaggtgttctcctatctcagtttcaagtatacgagaattacctcaagggtaagcatgtcgaaaaggatgaagagttagctcataaataccatcagttacttgaaagtaccttgatcgataaaaaattacgactagattcactttcactattcaattttagacgattcaaagaactaactataaaatttgatgaaaaactaactgttattattggtgataatggtgcagggaaaacaagttttgcagatgctatggcaaatgtcttttcatggtttaacaataatttagagaaagaaaatgtaagtggaaattttattaaacaaactgatgttaatgtaaaagctacggatttttcagaggtaacttgtagattcaaacttgatcaaaataacaggttcgaaacatcgttagcattacctgtcccaggttatacaggtgataagtccaatgatgtcaatgttattaaacagtttggagcaatatataggagttctgcaaagaatgaatcaattacgtttcctctacttgcatattattccgttgaacgttccgattttgagttaaaaacatcagttacagagaaagcttctggagatgataaagataatcggtactcagctcttaaagatgctttaaaaggtacaggtaaattagatgacttctcccaattgtacattgagttagtaaacttagctgaaggcgaggaatctaaggaaattaaagaacttaaaggggacataaacgctttacaacgaacaatcgacgatgtttatcaaggtaaaacaccacaagaaaatgatccattcacagcgatgctgaactccaaaaaagaactactcgcggatttagtcaaatcagttgcttctgctaagtatcaaaaacacttgagctttgtgaatgaggcaattgaaaaactggtgccagatgtaaagaaccttgaagtagatcgtagttcaggtaaacctagaatattcgtggaaaactttggcaataaggttaacatagctcaattgtcacaaggccagaaaatgctagttgcattaactggtgatttagctcgtagactagttaagctgaaccccaattccgataagcctctacatgcgcatggtattgttgttatcgatgagatcgagttacatcttcatcctaagtggcagcaagaaatcattattggtcttcagactacatttccaaatctacaatttatagttacgactcatagccctcaggtattgtcgactgttgatcataaatgcatccgtcaaatttctcttgataagaatggtcaacctattatagatactccaacctttcagacgaaaggagttacaagtgctagcattttagctcgtatcatgggtacaaattctgtccctgaaaagctagaagaggccatttggttaacggacttctctagatatcttaaagaaaataatgaggagctacgcgaattagtatttgaaaaaattaagatgcattttggggataaccaccctgtggtagttgagtgtgaaagccaagttaggattcataatatgaaagctaggttggcgaaaaaagagcaatag

SEQ ID NO: 88017 - DNA, 669 bp, Vibrio parahaemolyticus VPTS-2009
atgagaaaactgaacagatctaatattaaacctgtaggtttatctaactatgatcataacactcagcgttggaccggaagaaggcctaacaaagtatgtcggacaaatatatggtctaaattagctgagatgcaaaatggattctgcgtttattgtgaagcaattgcaactcaaggcaatggtcatattgaacatttctttcataagggaaaaaagcctgatggatcgacaccctacaaacatctaacttttgaatggactaatttgtttggctcctgtggctcgaatactagcgatacatgcggtcactataaggatcgtgaagggatgcatgggccaggtcaatatgatcctaatgatataattaagcctgatattgacgacccaatggattttttcaatttccttgatacaggtgtaattgaggtaaagcctggaatatctgaagctgatcataaaagggctacagaaactttgagagtcttaaatttgagttttctaaatgcagctagaaaaacacagattgatatttttaaaaaggaacttgaagagttagaggagttaagtgttgatctagatgaagaaacgcttgaaagggaaatggatagtattaaagcaaaagtatacttgcaggaatttcaaactgcggtcttgggtgctttgttttaa

SEQ ID NO: 88018 - DNA, 1407 bp, Yersinia enterocolitica LC20
atgagaatcgacaaactttcactgcttaactttcgttgcttcagacagctcaatattacttttgatgagcacattacgattctggttgcaccgaacggcgcgggcaagacgacagtgctggatgcggtacgcctggcgctgttccccttcattcgtggttttgatgccagcctctacgtaaaagataaatcgctggcgatccgtaccgaagacttacgtctgacttaccgcccagaggcgctgaacatggagctttcgcacccaaccatcattaccgctaccggtgaatggaaacgtggagaatcgtctacatggatactcagcaaagagggtgagcaacctccgcatgaagatacgatggcagcccgatttacccgctggggtgagcagcttcaaaaactggttcgtaatgaggaacataaacagcctattgaccttccgctcatgctttatcttggcacggcaagattatggtatcaggagcgctacgaatcacagatggcagaacaacgcctggataacagcgcattttcacgcttgtccggttacgacgattgcctttctgctacatcgaattataagcagtttgagcagtggtatagctggttgtggcgcagtcaccttgagtttcaatacaaactgattgaggcgggcaggcaaaataagagtgtagatttggccgaaggcttgcgcgacgacaatatgagagaagccattcaagctatccagcaagccattaactgtctgacgcaggaagtgactggctggcacgatctggaatacagctccagccataaccagcaactggtaatgagccatccgcaacacggtaagatccccttatcccagctcagtgacggcttgcgtaatgccgttgcgatggtagcagatatcgcgtttcgctgtgtcaaactcaacccgcatttacgcgatgaagccgccttaaaaacccagggaattgtgctgatcgatgaagttgatatgttcctacacccagcctggcagcagcaaattatccagtctttgcgcagcgcattcccactgctccagtttattgtcacgacccatagtccgcaggttatcagcacggtgaagcgtgaatcagttcgcgttcttgagcaagatgagaagggcaacggtctggcactgataccgcctggcgcaacttacggcgaaccgagtaatgatgttttgcacagcgttatggatgtcgatccgcagcctcctgttaaggaaaaagaagacctgaaaaaactgacagagttggtcgatcaggggaaatatgatgagctggatacacagcaactcatggctaccttgcaagccgcactaggtgaacatcatccacagctaaagcgtttacagcgtagcattgcccggcagaagttgctggaagggaaagcgtaa

SEQ ID NO: 88019 - DNA, 585 bp, Yersinia enterocolitica LC20
ttgaatgaacaatatcagctatgctgttatgccgaagtacgtgctgatcttcgtggtcttggctatcacattgagcacgttgagaataagagccagcatccagaacgtacttttgattatcagaatctcgctgccagtgctttagactcagcaaatggtctacgccagtacggtaaaaatgcttttggcggccattctcaaggaaagaacaagtcggtggatatggcaaaatttatccactgccatatacccgattgttctcgttattttgcttacctgtctgatggtcggatagttcctgctgatgggttaaatgcgcaagaaatggagaacgcacagtacaccattgatctactcaacctgaatagtggctttctacaaaccgagcgccgtaattactgggaagaactggaacaaatttttgatgaaaacataggaaacagacagaatcttcaattattacttcaaattaatctggtcccttcgccagatcataaactgcatgaattcttcagcattacacgccagtttttccagcaagaagctgaacaggtattacagagccacgcccaagcattaatttaa

SEQ ID NO: 88020 - DNA, 2130 bp, Bacteroides fragilis str. 3725 D9(v); identical to SEQ ID NO: 85898

SEQ ID NO: 88021 - DNA, 675 bp, Bacteroides fragilis str. 3725 D9(v)
atgataacgattaatagaatagattgtccagatatccttaaacaaggtaaaaatcctaaaagtaaaggtgaacttgaaacgatagacgctttaaaattctttagtgatcaaaataatcatacatctacttacagaaaaactgggactacaacggtcggatataaaatatattcggacgatagtgtgaggaaggttctacttaatatgtttaatgggaaatgtgcatattgtgaaagtaaaataaccagtatatataatggtgatatagaacatttcagacctaaaggagaaataaaagaggcaactccgacaaaacctggatattattggctggcagcagaatgggaaaacttattgtttgcttgccctttttgcaatcaaacaaatacccatacgatagttgctaatggaatattgaaagaaactgtcttaggtaaattgcatcaattcccacttgtttctgaacaatatcgattaaaatacactcatggacaaatttatttttctgacaggaatgcttatcaacaagcttttgaattggaagaaacagagagattgttacttaatccttgtaaagatctaaatatagaaaattattttaaatataaggatagcggtgttattattaccaataatcataaagacatatataaaatgaaaacaagttccaaataa

SEQ ID NO: 88022 - DNA, 741 bp, Bacteroides fragilis str. DS-71
ttatttaatgctttggaaagcatttatatatctgacttgttattcgatgtaaaaataaaagtattaaaagagaatgttacaggcgaattgtctatgagtgaattaagtgaaggagagaaacaactactgactgtattaggacttcttaaatttacaaaagacgaagagtcattaatcttgttggatgaacctgatacacacttaaatcccatgtggaagtggaaataccttcaatatgttgaccaagttgtaaaaaggcctgaatctactcagattatattctgtactcacgatccgttggtaattggaggaatggacaaatcccaggttcggatttttaagagagacagagggggaaatacttatgttactgaaccaacagttagccctaaaggattaggggtagcaggaatattaacaagtgaattttttgacttatcaacaactctggatgaaaaaactcaattaaaattgaatcgaaagcgatatttgcagggaaagttgaatcgggaatctctttctgaaattgaagagaaagaatatggagagttgaaaacagagttagaaagccttgggttttatgataaaactaatgacgaattatacaataagttccttttggaaatatctaagaatgaattgtttcaaaaagttgaatttactgatgaggagagaattctgttagaggaagaaagtaaaaatgtaattgaacagattttaaaagatacgaataaaatatga

SEQ ID NO: 88023 - DNA, 864 bp, Bacteroides fragilis str. DS-71
atgaggtttatagatataaatgaacttccccgattaatgggagaggatgaattcaatgcatggctaaataaagcgaatgcccatctcgatgaattgaggaaacttgacaaaaaaggacgctctgagtatcttcagaaacatgcagattggacagaattatataaatatttgtcggaactttcatttcataaatgttggtatactgaatctcctgagaattctactgaatgggaaattgatcattttagacctaaaaatagatctaaagatgaattcggacagattactttacctgaaggttattggtggctggcttatgactggaaaaattatcgtttatctggaggatttgttaataaaaggagaaaagataaatttgggaatgacgaacttgtgaatggtaaaggagatttttttccgttagacccttcatgttctccatgtgaattagacggagatttggatgatgagatacctctcttattagatccaacatgtttccgtgatactacacttttatcttttgacaaagatggagtacccatctcaaactatccggaagggagtttcgaggaaaagaaagttagtatatctattaaattcctgaatctcaaaaacactatattaaatagaaaaagaaaagaagtttgggaaaatacggaaaaggagattctagcaattagtgtgaaactgaagagttcgacaaaccaaatattgagaaataagatttataatgattcctattataaattgaaggaacttactgctaaaaatcaatcttattctgctgtagcattgagttgcctttccgcaaatcaaacaaatcatccatggatttcaagtatgttaccacatttaaattaa

SEQ ID NO: 88024 - DNA, 1398 bp, Escherichia coli; identical to SEQ ID NO: 86108

SEQ ID NO: 88025 - DNA, 732 bp, Escherichia coli; identical to SEQ ID NO: 86109

SEQ ID NO: 88026 - DNA, 1398 bp, Escherichia coli; identical to SEQ ID NO: 86108

SEQ ID NO: 88027 - DNA, 732 bp, Escherichia coli; identical to SEQ ID NO: 86109

SEQ ID NO: 88028 - DNA, 1629 bp, Snodgrassella alvi wkB2
atgcaaagtatgggtaatactagttctttacgaaatttgaaacaaaattctgagaatggaaatatattttccactttccaattatatgagctatcattactatctaaatcatctgatttaattgagaaaaaaaattattattttcagaaatgtgttgaatttttagaaaccacaacacaaaaacatgataatactaatgattatataagccctaaaaatcaatttattttagattctttggttttaaaagatataagaaaatttcattcttttaaaacaaaatttgaacgggatttaaccgtcataattggagaaaatggctctggtaaaactaccattttagaatgtatagcaaaatctttaagttggattgtggcaggtttaattaaagaaaatgctaatggtgaccgaattggttatagtgatattaaaaatgaagcagaagattatggagaaatacaaactaattttaaatttggagaacaacggtgtagtggctccattgcgcgagcaattaaaggaatgagtgagaaaaaggatagctcagtcagcgatttaaagtttttagctggtatatggcgggttatcaataaccagcaattaattaatttgccattatttatattttattcagctaaacggtttataggagaatttgaccgtacttcagaacaaataaaagatcgagaaaatcgatttgatgtttataatcaatgtttaaaaaatgaaattaaatttattgattttaaacaatggtttatttatttgtacaaaaaaggaaaaaatatccattcaaatgatgcaaacggtcttttagaaaaaaaaattaaactaattctacataaacaaggtcagaatgcaacttctttattgagtctgttagaagaacactttcaagttgatgatgtaaacttaaacgcagaaaaaaataatgcactagataagattaaaacattacaaaaagccataactgaatgtataccagaaataaaagagatatatgtagatatatcatctggtgtcgatgaaatctatgtgcatataaatgaaaaaaaaatcaatattaatcaattatctgatggtcaaagaacatttttaggtatagttgcagatttaacttatcgtctgttagttctgaatcctaatctagaaaatccattaaatggtcaaggtattgtacttattgatgagatagaattacatttacatcctaaatggcagcaacaaatactaattaatctaactaaaatttttcctaacattcaatttattgtcacaacacatagcccgcaggtactttcaactgtttataaaaggcaaattagacaattaatagaattagctaatgatgattatgatgtgcagcagccagaattgcaaacaagaggagtaatgagctctgatattttggaaagaattatgggaacatactctattcctgatgtaaaggaatctaatgatttaaataaattacaacagtatatacaagaagataaatataatacccctgaggcagagctattgtacgatagcctaaaaaaacattttggggataaacatccagaaatgttaaattgtgatagattaattcaatttagaaaactgattgcgaaaaataaattcagataa

SEQ ID NO: 88029 - DNA, 645 bp, Snodgrassella alvi wkB2
atgaaatatatacagcgtactcgggaaccgcaagcgttggaaagcgctagaaaaaaatattcttcatggaatgaattgaaaagaaatgatcacgatacttataacataattgcagaagagctctatagcatgcaggaagaattatgtgcttattgtgaatgtaaattaagaaaagaagaaaaaaactatcatgtagaacattttaaatgccgtcatcaatttcccaagaatgaattggaatggaataatctttttctttcctgtaacgataaaaatacttgtgggaaacataaagataattctaaaacagagaattatgatgtaaatcatctaataaaacctgatattgaaacttataatccaaaacaatattttacttacatattgaatgggaaaattagggttaggtcagatttaaattgtagagatgcacataaagcagaagaaacaataagagttttcaatttgaatgaaattaatttagttaatagaagaaaaaaaattggtaatttctttacacagatgctcaatagccaggattataatgacaatcctgaatttttaggaaatttatttagacaaatggatcagtttgaattcccttcgtttattgattctctatattgtgctgatccgaataaatag

SEQ ID NO: 88030 - DNA, 1176 bp, Escherichia coli 1-176-05_S3_C2
atgaaatttgaatcaacatcgttagtcaacattatcacaggtaataatgggtcagggaaaagttcgatattagctgaaatttcaaagcaagaatacgttacaggaaaaaatgtaatatgcttatcaaacacatcaaccaataaattccccaaaataaaaagccatcgttttcacattcttaatcagtcatctaacacacttaccaaagcattaaaaaaagttgtagtaagcaatagtcacaataagatcgggtcatcgcacgcacacattttcccaagagtattggcgtatttagatttcaatgagcaactcacatttaaatttacaatcttcccttatgaaagtttcattagaaaatttcaatccgagatgtacaacaatgagttaatcggtagtgatatcgatgaaataacgaatcacttaagaaatctaatcgaaataaacgatgacactgctagctctactgatcatggagtgaaaggctctcacatactttatttggagtatgctttcacatatgaatcagaaaaaagaattaacaccattcataatcgcctcattgaactaatgttaaagcatgagcgcattctaaaaaagaaccatttaatacatgacattgaaataaccttaagtcgtggccatagtataataccatcatctcatttaagctctggtgaagcgtgctacatggcaacacttgcttttatccttacatatatatcggataacagcgtaataataattgatgagccagagaatagtttacatcctcgttggcaaaaaaaatacacatcaaaccttctggatctattatattatttcgacataagaataatattagcgacacattcaccaatgattgttataggggcggtagaagaccatagtggcctaagtgttttcaaatccgaaaatagtaccctttctccccttgaaggaaatgaaactaatattgatgaagtaatggtggatgtgttcggtgtattaacgtcaagaagcagatatttcagctacaagataaatgagattcttaatgaatacaacaataaaaaaatagatataaattcagcacgcgaaaaattaaataaaacaaaatcactcgggcctgatgaaagccaagtaaaaataattgaagcagccaatgaaatattaaatcagatggtgaaaaatgcctaa

SEQ ID NO: 88031 - DNA, 597 bp, Escherichia coli 1-176-05_S3_C2
atgcctaacttcacatttacagcagagaatatctctcatatccgcactgctatatccgaaaataaactcgatgacaaagtaaaggtgtgggagcacaaattgcttaaatccatgagaagagaactcaaacaatatattctttccaaccgtaatgatggtttcaaatgtgcttattgcttaaaggatttccataatgaacacaatatgaatattgatgttgaacacattctccccaagtcacaatatccagaatatacgttcacacttaaaaatttagcggtggcctgcaagagatgtaacctattaataaagagaaatgatgtttcatttttaaatgctaacttcataagaaaaaaaccgtttaactcaaaatattataaaatattccatcctgttatcgacagaaaaaatcacttatctcttctggatgtccattttaatgggtgccacattatcaagtatcaaacaaatagtgaaaaagcaaacaacacctacatttacttcaagttaaatgaagttgagatagaaacattaaacaacgcacaaggaatagaacaaataattgatttacttcacacatacaacccaagaaattag

SEQ ID NO: 88032 - DNA, 1266 bp, Chondromyces apiculatus DSM 436
atgaagctcaccagcctctccatccgagattatcgaggcttcaagagcctcgatctcgacctctcgtcggatgtcatcgcgctcgttggcgtcaacggggccggcaagacctcgctcctcgatgcacttgcgcttctgctctcctgcctcgtggagggtatccgctcgggaaagcccgaagagcccgaagagcccagagagatcgcgctgcgggaccgcgacgtcaggatcggagcctcgacagcgcacctatcgctgacggcggaactcggcgggcaggaggtccagtggagcgtggcgaggacgttgcaagggcacccgcccggggcgccgacaacactcgacgcgctgcaggcgcatgtggcggccgcgcaggcctcgatcgcgagcggctcacccgtcctgccggtcgtcgtttacttcccgacgaaccggagcgcactcgacatccccgcccggattcgcaccccccacgagttcgacgccctgagcgcctacgagggcgcgctcgaaggcggggcgagcaatttccggggtttcttcgaatggtttcgcgaagaagaagacatcctcaatgagcaggaggtctccggggaagaagtggccacgccgtcaccgctgccggccgtgcgcgaggcgatcgaggcgctcctgccccacgcccgcaagatccgcatcgagcggcggccgcagcgcatgagcgtcgaggtgaacggcgtgcggctcgacgtcgcccagctctcggacggtgagaagtgcctgctggcgctggcaggggatctcgcacggcggatggcgctcgcggcaccgaaggaggccaggccgttcgagcgccctgcggtcgtcttgatcgacgaggtcgagctacatctccatccaggtctccagcgtgagatcatgccgcgcctgcggcgggtgttcccccaggtccagttcatcgtcagcacgcactcaccccaggtgctctcttcgctgcacgcggcggacgtccgcattctggagcgtttcgagctacggacgctggaccgcgggacctggcgacgcgacaccaaccgcatcctggaggcggccttcgcggatccggggcggcctcccgagatcgcggcgaagttgaacctgctgcgtgatgccgtcgatgcggaccgccacgaagaggcgcgccgtctcattcacgagctatccaccatgatcgagggggaggaccctgacgtctttttctatcagcagctcgtgcctccggaggacgcccctgaggtgtctccgtga

SEQ ID NO: 88033 - DNA, 672 bp, Chondromyces apiculatus DSM 436
gtgaggcacctcgtgaaggctgcggagccagcgacggtcacggagacgcgggccgcgcccacgacagacctctccacgactgcgcgtgcgcgggccgctttcgatcagatcgacaaaggtcgcgtgcgcgccgctctcgcgagagagcaggggcgactttgcgccttctgcatgcgtcgcatcgaccccgatacccgtgacgcgattggtgagcccacgatgaaaattgcccatcgtacgccgatcaaggcgaagccttcggaggccctcttgtggaagaatctccttggctcgtgcgacggtgggcagcgctcggggtggtggacgacgagctgcgacgcagcccaggggtcgacggcgctgaccgtcgacccgaccgtgaatgcctcctgcgctcgcctgcggtacgagcgccgcggctcccgtaagggcctcttcatcacgtccgatgatcccaagttgcaagaggatgtcgagaagacgctcggtctgaattcaggagaccttcccgaactgcgggagcttgcctggaaggccttttgtgatcgtcagcggaaagcggcaccgaaccagtacgggcgctccgcgcgtgctgagttcttccaggcgtggatgaaacaatggagcgtgcagctccctgagatgctcggggtgatagaggcgaagttgtaa

SEQ ID NO: 88034 - DNA, 1461 bp, Chondromyces apiculatus DSM 436
atggccaccaagaaggctgacgagagcggcgagcggcggcgagtcgggcgggcgctgccggccacgaagtcgacacgccgggtcgcgcgcaacgatcgcacgcgcgaaaggtcgaagccctcggaggatgtcacagccatctacgtcctcaagctcaccgtggagaacgtgcgctgcttcggaccagcgcagaccctcgatctatccgacggtcacggcaagccgaagcagtggacggtcatcctcggaaacaacggtgtcgggaagacgaccctgctgcaagcgctcgcggcgagcctgccgaaggaggacaaggctttctccccgaaggaaggcgacgccgtcttctctcccgccctctgcgtcgatctgcatcagagagcgcctcagttcatgcgcgcctccgaggagatgacgtccctgcgcatcgcgctggcacttggcgggccgctcgcggccgcggcgtcgacgttcgaggaagacagcacagagatcagcatcgaggcagatggcctcgtcgggttcacatcccgcgatgtcgcgctccgagggctgcattgcatcggttatggcgcgaaccgaagcatgggctccggttcgctgctcgggcgtgacacggacgaccacgtggccacgctcttcaacgagggcgcggtgttgcgcaacgccgaggaatggctgctccaggccgactacgcggcgagcaaaccctcgaaggagcaggcccgcgcccgcgatcgtcgcgatgccgtcaaatcgatgctcatcgcgctcctcccggacgtcgaggacctccagctcctcgccgacatcggcagcaacccggcccggccccagccaggcatccgcctgaagaccccttatggctgggtccctctgcaggcattgagcatgggctacaagaccctcctcgcctggatggtcgatctcgccagccgcctctatgaacgctatcccgaccgcgacaacccgctctccgggcccgccgtggtcctcgtcgacgagatcgacctgcacctccaccctgcctggcagcgcaccctgctcgactacctctcgcagcgcttccccaacgtccagttcatcgtcacggcccacagcccgctcgtcgtccaggccgccaccgacgccaacatcgtcgtgcttcgccgcgagggcgaccacgtggtcatcgacaacggcgcctccgccgtccgcaactggcgcgtcgaccagatcctcacgagtgacctcttcggcctcccgagcgcccgctctcccgcgctggacccgctcctcgccgagcgccgcaggctcctcaccaagccgcgcctgagtgccgccgacgagcgcgctctcgcccgcatcgagcgcgacatcggacagctcccgaccggcgaaacccccgagcagatggaggccatggacatcatccagcgcgccgcgagcgcgctgaggagaaccggcggcggggcccggtga

SEQ ID NO: 88035 - DNA, 813 bp, Chondromyces apiculatus DSM 436
gtgatccgcatccgcaagccgaccacgatgcccgcggtcctgcagcgccgcggcgctgcggcccgcgagaccctctgcgctgcctaccgacgcgccgctgccgtcagctctggggggcagatcaagctcgacttcgacgccgcgctctacagacacaggaccgtcaaggaagccctccacgcagcgcatcacgggaagtgctgctactgcgaatccaaggtcgaccacgtcgcgcccggcgacgtggagcactacagacccaaagccgccgttcagcagttgcgcagagcgcctctggaacagcccgggtatcactggctcgcctatacgtggagcaacctcctcttcgcttgcgtggtctgcaacggcacgcacaaacggaacctgttcccgctgctagatcccggcaagcgagcccgctcccggagcgccaggctcagggcagagcaaccactgctcctcaatcctgcctgggaggatcccgaagggctgatcggcttccgcgaagagtacgcctatgcgcgcggaggcgacgtgcgtgctcgcacgaccatcgaggaggtgctcctgctgaacgatcgtcctcccctcctcgagcggagacgtgaccacctcacggtggttcagcgcatgcaggacgtcgcgagcaacccaggcgtccctgaagggatccgggacaaggcgagaacctggctcgatgaacagaccgccgacagcgcccagtacgcagccatgacccgcaatgcccttcgtgccatcccagtccctgcgccccggcgggcatcaccgtcccgcagcaagcgcacgcgctga

SEQ ID NO: 88036 - DNA, 1311 bp, Chondromyces apiculatus DSM 436
atgcgcatccaagagatctccctgatcaacttccgcgcgttcaaggagttcaagctcaagctcgacccgcagctcaccgtgctcattggccgtaacggggctggcaagtcgaccgtcctcgaagggctggcggtggcgctgggggcctggttgagcgggttcagcgccatcgcggaggatcagcccatccctcgcactgcagcgcggttgacctccgcgcgggcctcgtcggacatcccagccgaggaggcgtcctatcccgtggttgttgcggccgagggcgaggtactgagcactcccgtggcatggtcgcgggagcttcgcagcgttgacggacgcaccacgacggccggctcctcgcgcctccggcaactcgcagcgcaggccgaagagagcctttcttcggcgccgcagacgctgctcccggtgctcgcctactacgggaccggccggctctggctccacaagcgcgagaagagtgccacgaagggcaagctcaagtcgcgccttgagggttatcgtgccagcctcgaagccgcgtcggaccacaagggattcgaggcgtggatggcctggcgcgagaacgaccgcctccagcgcctcgcccgtgccgatgaagaaggcaggccccttaccgaggtgagcagcccggagctggaggccgtgagcgcggcggcctgcgggtgcctcgaaggtgcgaagcgcatctactacagcgcgaaccatcgggagctgcgggtcgagttcgagcagggcgcgtccatccccttcgaagccctctccgatggccagaggaacctcatcgcggtggcagcggacatcgcctggcgcgcgctgcagctcaacccgcatctcggcgccagggcgccctcccaggcccccggtgtggtgctcatcgacgaggtggatctccacctgcatccggcgtggcagtggcgcgtgctggatgacctgcggcgcaccttcccgaagatccagttcgtggtcaccacccactccccgcaggtgatgtcgtcggcgcctggcgcttcggtgtgcctcatcggtcccgaccatcgcgtccatcgggtgagagagatggccgggaaggacgtcaacaccatcctcgaagacatcttcggcgtgaccgctcgccctcaggccatccgtgacaagctcgacaagctggcgaggctgatcgaagacggcgaggtggccagcgcgagggccctcctcgacgagctgtcgcgcgctctcggcgaggaagacacggaggtggtctccgcgcgctgggagatctccctggcggaggtgggggatgcggcggattaa

SEQ ID NO: 88037 - DNA, 612 bp, Chondromyces apiculatus DSM 436
atgcgcaagcaagcgaacgacgagcagggggggctctgcgcctactgcatgtccctcattccgcagagcaacaaaccactggagcctcccgacaacacctcgatgaagatcgagcacttcgaggcgcgcaacgcgagccgtgcgaagatgttcgactggagcaacctcctcggcgtctgcatcggcgatgtgggcatcgaggggggcggcgagagcgaccagcaggcccggtatcactgcgacacctaccgcgggcacctcaaggtgaccgagcagggcctcgacctgaaccctgccgccttcccgcccgacatcggcgagcgcttctcctacaccgtttccggagaagctcggacgtcacagcgctttgagcctgctgagagggacaaggtcgagcggatgatcgcgcgcctgaacctcaatctaccgcggctcaggcgaaaccgcgcagccgtgatcggcttgctgcgccgggagttgcagaagaagccgacgctggcgcgtgtgaaggagctcctccaggacgcctcggcgcccggtgccaagggcctcctccggccgtactgccaggtagccatccactacctgcagaagaagcttcgtcagctatag

SEQ ID NO: 88038 - DNA, 1347 bp, Chondromyces apiculatus DSM 436
atgtacctgacccagctccgcatccagaacctgaagctcctcaaggacttcgagctgagcttcacggacgcggagggcaggccgcgcatgtggaccgtgatcatcggggagaacgggacagcgaagacctccatcctccaggccatcgccatggccgcggcgggggcgctgaacgtgaacgggctcgcccagaacgtgtcctcgctccgggacaagcgggacagcaaggccactgtctgcatcagggccgatttcctgctcgatgcgaagaggcagcggagcagggtctatccgggatattcaggccggaagccgaaggggggcgtggtggtccactcggaggtggaactgccgccgaaacgcaaggacctggttgcgcggtcgtcctatgcgggagtcgacggcacgcaggaccccatcacggacgcgcgcagcatggatgcgaagctgtggttcgtggcggcctacggggtgcagcggtttcttccgggggatcccaacgcacgacccgtgctcgaccacgccagcgtggagcgtatgcgctcggtgttccagcgggtggacctgatcgggacgggctttgccaacatcctgaagccggagaaggcgcgcatctacagccgggtgctccgggacgcgctcttcgggaaggaaggactgctgccagggttcaacgatctggagctgcgtgggcagaagggagcgggcaccacgaagacactccaggagggacaccgtttcgtgcagaacctgccctcgggggagctgaagctagcggcgagctggctgtcgcacggctaccagtccacgatcgcgtggctcgcggatctggtcgggcacatcctgtgggaggctcagagcaaggaggcgctggctcctgaggacatggaggggctggtcttgctcgacgagatcgacctgtacctgcacccgcgctggcaaaggaccatcatccgtgcgctcaaggcgacgttcccgcggctccagttcgtggcgaccacacattcgccgctggcgctggtggggttgcggccagaccaggatgaaatcgtgcgcctcgtcatcgacgacaagacgggcgatgtgcgccagctcgacatgaagcaggagcgggcccacgaacctgatccacggctgatgacgggcacggagatctaccggacttacttcggtatcgaccagctctatcccgacgagctgggtgagttgctgcgcgagcaccgctacctggccgctgacccgacccggagcgccaaggctgacaagcggctcgacgcgctggaggagaagctccgggaggaaggcgtagagccagattttccccgcgagccgaggcgccaacggtga

SEQ ID NO: 88039 - DNA, 1122 bp, Chondromyces apiculatus DSM 436
gtgatcggcatcgcgcgaggaccggagccggaagcactgcgcctcgaacgccggcagcgcctggcacgcgccatcctggcgcggcgggaagggagcccagtcacgttcgacgggtatcaggtcgcgcgggaagcgctggtgccagcgctcaactacaagtgcgcttactgcgagatgcctctgcaaattcaggggcctcccgtcgagcactttcgcccgaaagagtgcgtcgagaacgagggcgagccaagagacgcgagccggtactggtggctggcgtggacctgggagaacctcctgttcgcgtgttcccggtgcaatacgtggtcgaagaagaacaagtttcctctggcgcccgggagcagtccactcgctgaattctctgtcgcgctagacaaggagcggcccttgctgatcgatccggcgagggtcaacccgcgagagcacatccgcttcaagtggtcggaggcgaggggccggtggttgccgctacccgtgaatgggagcgcgctgggcaggcgaaccatcgacgagctgcgcctcgccgtcatcgatgacggcgcggatcacgccaaggctcatgtcgaggaccggctctctctgtgcatcgagcagcttcgggaggcgatgtccgggggcagtgggaaggacgatcgcgagaaggtgaagaggctgtgggcgcgctggtgcagatcgctcttcgcgccgaggcaacccttccacgcgctcacctgggatgtgctggatgccgagttctccgccgaagaacggagcacgtgggggctgacgctgcctcgcctgggacggcatgagccacccgcgtcgtcgccgctcttcgatcctgccgatgatccgcccgggttcggcgacctctcggaggagctgcaactccgcgtccgggcgctggggcgccacagctcggagcaggaggtgctcggcgtgctggaggagatcctccgaccgcgtcgtggaggccgcgactggtccgaccaggagctggcagggcttctcggccgcagcatcggcagtgtcaggctctaccggcgcagacttgaggagcgccgctccttgaaacaaccacgcggcgcgcggaaaaccacctcacgttccagggaagcctga

SEQ ID NO: 88040 - DNA, 1320 bp, Chondromyces apiculatus DSM 436
atgcacgtcgcgcgcgtcgagatccgcaacatcaagggcttcggagacggcgaggacggggtcgatctcgacctgacggacggcgggaggatcaacaatctcgccggctggacggtgttcgcaggggcgaacgggagcggcaagacgacgctgctgcgggcgatggcggtggcgatcgacggccagaccgccagcgggatcgccttcgagcgggtgccggactggattcatgccggctgcgcagaggggtccgtccggatcgagctggagcgcttccacgtggtgacggacgccacgacgcccgagccgttcgcgcggcgcgctccgcccctcgcggcgaatgccagatggctccgcgaagaaaagatctggcgcaacagccttgatgacctcccgccattcatcacggagggcccgttgaacctggtgtcgttcatggcggcctacggtccgacccgcagggtggtggggcgcctggatgacgtgacggcgctgatgcagtcgcacgcgcaccggagcgcaggtctgttccgggaagatgcttacctcgccgagagcgtgcagtggctgcagaggctcgattatcagcggctctcgggcgatgccgacgcggagaggctcctcgagctgaccctcaggctgctcaatgacgctctgctcccgggggacttccacatgctcggggtctccccgaccgggctgcgggtgcggcaccgaggtacggagctgtccctgcagagcctcagcgatggataccgcaccaccgccgccctggtcctcgacctggtgagccaggtggccaaccaggtgagccgcggcgccccgctggagcagaggcccgacgggcgggtcatcgttcctcaccccggggtggtcttcatcgacgagatggagctgcacctgcacccctcctggcagaagcggatcggcttctggctcaaggagcacttcccctggacgcagttcctggtgaccacccacagtcccttcatctgccaggcggcagatacgctggtgcgcctctcgccgccggggcaagggcagccggtggcggagatcgtggacgaggagactcaccggcgggtggtcaccgggggtgcggacgacgcggtggtcagctcgctcttcgggctggagtacccgcactcggaccaggcagagcgggcgcgggagcggctggccatcctggaggtgcgggagttcgacggcacgctgaacgaagaagagccgcaggagctggagcggctgcgccgggccttccccgagacggccacggcagcggtggagagggcgctgcgcaaggtggccgcggtgtcatga

SEQ ID NO: 88041 - DNA, 621 bp, Chondromyces apiculatus DSM 436
atggcgggtggcgtcgagcgctgcatgtactgcgaggactccgcagggcacgccatcgagcacttctggcccaggtcacggttcccggagcgcgcgttctgctgggagaacctgctgctcacctgcgaccgctgcaacaaccaccacaagcggacgcagtttcccctgagcctgcaaggagaaccgctgctggtcgatcccaccgccgaggagccgggcatgcacctggagctgcgcccgcgggaaggactgatgctggcgcgcgagggctctgccaaaggcgagacgaccatcggggtgctggggctcaaccggtacgagctgcggaaaggtcgcaagattgcctggacgggcttgcaggcgctggtggaacgctacggccggttcaaggagcaggaccgggccgaagaggcggcgctctgcgcggggaccctcaccgggcatcccttccccgcagtccttgaggtcctgctccgcaccgcggagcgcgccgacgccgagcagtacgtcgaccctgagtgcctggcggtgctgcggagccacggctcggacctgcgtgcgctcctggccaggggtctctcctcccaggctgcgcccgtgtcaccagcgaggccgctctga

SEQ ID NO: 88042 - DNA, 375 bp, Chondromyces apiculatus DSM 436
gtgctgcgcatcttcccgaacctccagatcatcgccaccacgcactcccccttcatcgtgggcgcggtgcccggggcgaaggtgttcgtgtgccgctacgaccgtgagcggaagacctgcgtcgtcgccgacgagacggccgagtacgcgaacaagcccgtggaggagatcctcctctcgcccgccttcgacgggacgcagcctttcggcgaggagatctcgcagctcatcgagcagcgcaaggcggccatcgacgctggcgacaccagcgcccgcgcccgcatcgaggccgaactgctggagaagaaccccgagtacttttcctacctcaacatcgaggcgcgactccgtgcgctccggggtgaggtctcatga

SEQ ID NO: 88043 - DNA, 588 bp, Chondromyces apiculatus DSM 436
atgattccggtccgccgtctcgaagagccggaggtgctccaaaagctcgggcagaggtggctcaaggcattcctgaagaagcgcgagtccaacccgaaagaaaagcccccgcccaacacgtacaaccacgaggagatcgtcagcacaccaaaagcgatgagccaccactacctgtcatgctccgagtgcaacggcgtcaagaaacctaatcgttcgatccccgtctctgactgcgtggacccgtgcgacacgtcagttaactcttcggagcatctcacgttcgaggctgatcttatccgtgctcgtggtggctccccgaagggacgatccaccatcatgaaatacattctcgaccgccctgaactcgacggcaggcgcagtaggcagctcaggctgatggttgagacgatcatgaccatccagcagaagatgatcgacgaaggtcgcaagagcatgaccgagcaagaactggaaatgcttcacgccttcgcgcagcccgagtggccgttctcgctcatgctctcggtgtacctggaacgccacagacacctgctcgagggtccccgcccggcgagcgctacgacgtag

SEQ ID NO: 88044 - DNA, 1182 bp, Escherichia coli K02; identical to SEQ ID NO: 86998

SEQ ID NO: 88045 - DNA, 747 bp, Escherichia coli K02; identical to SEQ ID NO: 86999

SEQ ID NO: 88046 - DNA, 1662 bp, Photorhabdus luminescens BA1
atgaccaaacaactagaacgaaaagcaaaaggtgggagtttactgtcagcattcgaaatttatcagcgcaacgtaagcagcgatctccccgaggataataaaaatacagacgaatggtttgagctttgctggaagtatcttcaaaatggttacaccgatgaatcagatagatttcatcctgataacgcattatatcttcgcagcttgtcattaagagattttcgtcgattttcacatctggaagtgaacttcgaagaagacctcacgattatcataggaaacaatggcaagggaaaaaccagcattctttctgctattgccaaaacgttaagttggtttagtgcaaatattctcaaagaagatggcagtggccagaggttgagtgaactgactgatatcaagaatgattctgagaataaatatgccgatgtcagtagtaatttttactttggaaggggccttaaaagtttatcacttaggctatccagatcagcctctggcactgcggagcgaagggatagcattatcaagactgctaaagagctatctgatgtatggcgtgtgattaatgagaataagacgataaatttacctgcattcgcgttttactctgtagagaggtcgcacccctttaataaatctcaaaaagacagtggggaaagaagggaagagcggtttgatgcgtataatcatgctctcacaggcgcaggccgtttcgaccattttatcgaatggtttgtctatctgcataaaagaacggtttcagaggtttcatcgtctattgaaatgctggaacaacaagtgcgtgatctacagaagtccgttgataatgggatggtttcggtaaaaccgctgcttgaggatatgaaggataaacttgtcgcgacgatatcaaagcataatgcatccatagaaaatcagatgctgccagaatcagctcaaaggaaaattgtcgagcaagcgattaccactgtagttcccagtatcagtcggatttgggttgaaacggcaaccggcgttgatgttataaaggtcactaatgacagcctggatgtgacaattgagcaactttcagacgggcaacgtgtgtttttagggttagttgctgaccttgcgcggcgcatggtgatgctcaaccctcttttgagaaatccgcttgaaggacggggcattgtattaattgataaaattgaactccatcttcatccaaagtggcagcaagatgtaataacaaacttgcgtaacgtgttcccgaacatccaatttatcattaccacgcatagtcctatcgtgctctcgactactgaaaagcgatgcattcgtgaatttgcagagaataatgatgatagtagtgtgcaattcttacagcccccgctgatgcaaactaaaggcagtgaaaatgctgaaattcttgaacaagtgatgaaagtcttttcaacgccgccaaatattagagagtctcattgggtgagtgacttcgaaagatcactggttggcaagggtgaggagctcagtgagcaatctcatgatctatacgaaaaaatcaaagggcattttggtccaagcagcccggaattaaagaaagctgacagtctcatccgtattcacaaaatgaagaatagaatcaataagataaaatcggagaagggcaaacaaggatga

SEQ ID NO: 88047 - DNA, 651 bp, Photorhabdus luminescens BA1
atgaaagaattaactcgtccggaaaggccggaaattttgcaacattacattgcgggccaagatgcttggatggatgtagatcaaggggcgatttggcctcgattggaggaaatgcaaggtggattttgtgcatactgtgagtgtcggttgattcgtaagcatatcgaacatttcagacctcgggataagtttccagcccaggcttttgattggcataacctgtttggttcctgtggcgacagctcaaagtcaggtggttggaaacggtgtgggatatacaaagataatggtgcagggtcgtataatgcgaatgatcttatcaaacctgatgaagataaccctgaccactttttgcgattcctgacctcaggcagggtcgttcccgctgacggactcaccggttcagaactgaaaaaggctgaagaaaccattcgtgtttttaatttgaacggtgactcaagattggtcggtagcagaaagacagcattgaaaaatgtcatattagaagttgaggcgctttatgaagcatatgatgaactcagcgaggatgattggaccaaaatgctcgatatggaattagagaatatcgaaggagaagagttcagtactgctttgaaacatgcttggcaatacaacaaaaaatatgtatga

SEQ ID NO: 88048 - DNA, 1749 bp, Klebsiella quasipneumoniae
atgcaactgcttcgcatccgtatcccagctttccgcaatctgcgtgagctcgacatcgctttcgatactcacttgcagccatctgcaagtgcaacagatgcaccacccaaacccatccgtagccatgccctgattggccagaatggcactggtaagtccaacctaattgaagcgttgcttaccatcttccgcgatgtcgatttggaccatgatgcgtcgttcgattacacgctggaatacagcattcgtggtcatgtgatacacatcggggcggacacctccaggcaaaaacgcccctatgtgtgggtggacggtaaagctgaatcacaaggctatttgttaaaaaatcgtgagctactgcctgcgcatatttttgcttattactcgggccgtaacgaacgtatcgaagctttgtttcaagagcaccagcgccgcttcaaccagcgccaggaaatcacaacagatgaagttctgtctgagcaactgctgaagaactttaccggctccgagtcagatattcgcgccgtcgaagaagctaaacgccgtcacgagtcgcggctgaagcaagcgggagatgaccgcttgcgccggctgttttattgtcgcggtggccatagccaactggttctgctggcatgcctgctgtctgaagacccggtgtttcagaagatgcttaagaacttgcatattgagtcgctggagtccgctctgtttgtgctgaaagaaccatatcgcctgcgtgaaaaacgccgtagcggcaaattcgaccagcaagaactgaacgagggtgacccacgcttttggtatgcgcgcggcaatgtggtgagcgaattcctcgataaactgtggcaagtggcttgggctccgattgagcaggaggccatcaaacagatcgacttccgtggccgtaccgaaaaacagaagcagctgtatctgttcgtgccaaatcaggaaaaacttaaacaacttggtgaactgatcggcagtgccgatagtttcttccgctacgccgagggtgcctatattggtgacctgatcgaagaagtgcgtattacggtgaagaagcgcgatgaacacggcggcaaggtaagttttacacatttatcagaaggcgagctgcaaatgctcaccgtgttaggcctgatgcgcatcacccgagaagaccagtgcctgttcctgcttgatgaacccgacacccacctgaatcctatctggaagttgcgctatttcgacgatattgaaggcgtaatgagttccaatactgcagcgccagtaaggagcgagtcgcagataattataaccactcatgaccccatgatggtgggtagtctgaagcgtgagcaagtttatataatgcgtcgtgatggtaaccgtacattggtcgataccccggatgagcacccgcaagggatgggcgtaacagggctactcaagagcgacttgtttggtttgtcatccacgctggatatcgaaaccgagcgccgcttgtttcgtcgcaatgaactgttcgtcctgtcacctcgctccctcgaagaggatgaggaactgagacgtttgtcagctgagctggctgatctgggcttttcgaccgccgactttcgtgatcccgactacgcaatgtttgtgcgcaagatggcgcaacatcgccgtttccgcaaacccgtgctcactccagaggaacaggccgagcaggatgtcatcgccgattcgatcattgatgagattttgcgagaggaaggtgacttatga

SEQ ID NO: 88049 - DNA, 858 bp, Klebsiella quasipneumoniae
atgatctggattgacttagagcacaagcgacctaccgatacaaacatcccgaactgggtaccatggacacaagcacgatgggatgcttggttggcgaaatcggcccaactagtagctgccttagctgccttagacgcagaagacgagcgaaacgaacgcaacgcactgatagatgccaacagtgcgcactggggtgtactgaaggaatggttgttggccttgtcagcgggtaaatgctggttttctgaggtacgtgagctgtacacacattacgatgtggagcattttcgccccaagaaagaagctaaggcgttggatgcaagcctgcgtgatggctactggtggctggcatttgactacatgaatttccgtgtgtgcggcaacgtcggcaaccgtaaaaaaggtgggtggtttccactcaaggacggctcactttgttctacctactccgagccctgtgaggaatccgaaacgcgttatctactcgatccgattgatgatgatgatgttgcacttattgccttcgacgaagaagggaaggtcattcctatgccaggttcctctgcgtgggagcaggagcgagtcaatgagacggtaaagcgactcaaactcaatgaacatgcccccctggcagaagctcgtcgcaaagtctggcagcaagttgacaggctaatcgatgattatacaaaagccaaagctcgctgcagaacaggcaataatccagtagccaaagcgaagttgaccgaggttcgagctagagtgcgcgaaatgaccagcacaacagctgaattatcagctgtagctcgttggtgtttgctggtgcgcaacgatccacagctttctagattggttgggtga

SEQ ID NO: 88050 - DNA, 1356 bp, Photobacterium phosphoreum ANT-2200
atgaatattcaaaatttgaagattcacaatttcagaagtatttcaaagcttgacttgagcttggacactgaaaacagagttgtgtgttttgttggtgagaatgggagtgctaagacgtcggttttgagtcttattgcagaggcggtagtatctcagacaaaattaacgtttcctaactttaagccaaacgatggcaaaagatatcgatcgcttaatacctctgaaataaatatagccagcagtttttattcggtagagctacactattcaagcatagacaaccgctcttaccagtttaaaaaacttttagggcgtcagaaaaaccttcctataactgaatatcaggaaataattcaggggataaacttaactagagaacattattcagaatactcgaatctatctagcttagaggctagtcaggattatcttgtatcaaatgtatttcttatcaggccaagcataagatacgagatggatggcttggaagtttctaaaattggtactaaaacacctgagtattctgtacgtgagcgatatttaaatgaaatgccatatccgtttacagtagcgcatataggcgaaagcattcagtcaatcgttcttgacatgattatcgatgcaacaattggttatgaagatgctggtaaggctttcaatgcaattactcttatattaaacagaattacaggcaaggaattcggtcaattacaggtatcacagtcaccttatagagaggttgtgtcttcaagtatggggccaataagaaccttctctcaaggtgagctcgatctacttgttacagtgtcttcgattctttctaggcaaatatttcattttaaaagttataccgaggaccaaaagagaaatttaggattaaatagtttatttgatgtccccggtatcgttttggttgatgagatagatctacatcttcacccaagagcccaagaaaattacataaaaagactcacagaaatatttcctaatattcaatttattattaccactcatagtccctttgtggttcgagggcttccaaaacattcaaaagttgtcaatttaccatcaggtagagtatttgaagagaacttcgaagcaatggatatcgatagcattaccaatatcatttttggctacgatggtggtttttccgaagtagtaaaagataagctaagtcagtttaagaaagcgctagtgtcagaagagccgaatattcattttttgcaacagttatatcgtgagttagcttcatcagactcagcaaaagaggaattggtgttatatcttgcttcgtatgccgatgaggagttaattagtatagtaaaagggggggaagatgcggaaagtcgatag

SEQ ID NO: 88051 - DNA, 825 bp, Photobacterium phosphoreum ANT-2200
atgcggaaagtcgatagagcctctgttcctattccaaataggctgcaaaatctgacggacgataatttatcccatttagaaaactataaacagattagcgggagcatctacggtcatcaagatgtcaaagatagcttacaaatgctatattttgaaaagtgctatatctgtgagggcgatatcagttctggtgattatgacgttgagcactatcttcctaaaaagcattttccacaactaggctacacttggcaaaatcttcacaaagcatgtgctggctgcaatttagcaaaagaaaataagagctttttcgttactgatgaggaaggtaatgtaactgatatcaaattgctagatccatcaagtgagaactatgatgtcgctgattatgtatgttttgatatagactcaaaggcagaactagtaagtcgtggtacaaatccgaccgttattatgaaagctcaaaatacagttcattacttaaatggtaactataaatctgattacggaaaagaactttgctacttgcgaagtaataagacgtctggctttcttcgtttctgtagcaacaatctagttgaacaccgaaatagactaagacaaattaagcttactatcgaaaattatcaaattccagaagactctgagctgctagaaatggatcaaaatatctgtcaaagccttataaatgctgataatcattacttatctgataaagcgccatttagcacttctaccagagttcaactattccctacgttaaagataacttatgctgaattggtaaggataaagaatcatatgaagcagattcttggtatgtaa

SEQ ID NO: 88052 - DNA, 1374 bp, Escherichia coli O86:H34 str. 99-3124; identical to SEQ ID NO: 86042

SEQ ID NO: 88053 - DNA, 636 bp, Escherichia coli O86:H34 str. 99-3124; identical to SEQ ID NO: 86043

SEQ ID NO: 88054 - DNA, 2292 bp, Escherichia coli O104:H21 str. 94-3025; identical to SEQ ID NO: 86352

SEQ ID NO: 88055 - DNA, 927 bp, Escherichia coli O104:H21 str. 94-3025; identical to SEQ ID NO: 87543

SEQ ID NO: 88056 - DNA, 1374 bp, Escherichia coli O145:H28 str. 2009C-3292
atgaaaagactatattatacccatcatgatagtcgaaccttaaaacttgctgtagaaggtgatgtttctgataatgcgaatatttttacagtaattgtaggtaaaaatggcgttggaaaaagcagattgttatctcagattgctaaagactgtattcaagatgttcatttcttgaaaacttttaatccattatttgacagagaaataacaccaaagttaattgccgtatctaccagcccattcgataaattccctccagggcgtaggtcattaaatcaccaaaggaaagaaaataattatcgctatgtgggtatgcgtggagaaggccccttcggcgtatcaaatgccgtatcccttttatcttcagcagcgagaggttggctagagaaacttgcttattcagaaaatcctgcaaatttactcgatgtttttcattctattgattttgagccccatatagagtttgtatttaaaccaacttacaacggaccggacactcctgactataacttcattggtgtatattcagatgagatattaacggaagttaaggagttatatttaaaatacaatataaaaattgacaggaagaatattgagagtctcttaaagttaaactccgaatcacgtcatgatatttacgaagcactggttgaaattaatcgatttgaacctgaacgtagggctgtaaccttgtcagtcgattttaccaatggtgaaacattggttggctcgacttatgcgaataattatttttctagatcaattcttaaacttatgaacgctggcttcatgagattgatggatatgcgactcataaaaaaaagctatggtcccatgtcacttaaacgtgcgagctcgggagaacaatgtttattagtgatgttgcttggaattgcagggcatataactgatggttctataatactaattgatgaaccggaaataagcttgcatcctcgatggcaggaagagtttatcattatgttaacaaaagcatttttaacttactcaggttgtcaattcataattgcaactcattcaccacaaataatatccaatttgccgaataaaggttgttatataacatctttgtcgaaaagttatctttataaagcaaaatactttagcaaccggtctgcagactatcaacttgcggaactatttgatgcccctggcattatgaatgaatacattgccagattagctttcaatttactttcaaaagttaagactgctaagttagtaacagatgataattggcgtgaattaaaacaactccagcttctccttgaaaacgttaatagtaatgaccctattaatgaactcgtaaattccgtatctcaggtgtgtgaaatttatgccaaaaattaa

SEQ ID NO: 88057 - DNA, 636 bp, Escherichia coli O145:H28 str. 2009C-3292; identical to SEQ ID NO: 86043

SEQ ID NO: 88058 - DNA, 1155 bp, Acinetobacter baumannii LAC-4
gtgaaatttaaatctgttgagttaagcggtgtgggcggtattgattatttaaagattgataaaataaacccaaaattcaatattatttgtggagaaaatggggtcggaaaaacaaatatattagaagcattagcggtccctttttcgaatgagatatctaggaaatttattagaaatgtaaattttcttaaaggaaaaattaccatagaacatgatatagaaaatgaagatactctcatttctgagattgaggatcagaatttaattgggcaagttgtttatccagataataaagcttatctattatttgtggattgtaatagaggtctcagttatcaaacaatgacttcaataagttctgatgaaccaactgccggtagtttcaatcactctaataggatgtgtattaatggagatgatattaaaggttggtttgttaagagatttctttatagtaaacatgaggatacacttactaatattcaacaaaaaaacctaaacttagcagtttctagtttttcaattttagataaaaattttaagtttaaaaaaattagcctaaatcatgaaattataataaataccccaacaggtgatttattttttgaacggttatcgtctggttataagtcaataatctacatcatattgggtttgataaaagaaattgactatcgtcttgctgcaaaaggaaaatgtgctgcagaatttaatgggataattcttattgatgaaattgaaacccatttgcacccagtttggcaggggaaaatttgtattgttttaaaagagatattcccaaaagctcagttttttgtaactacgcacagtccacacgtcgttcagacagcaaatcgaaatgaagttatttcattgacgcgatcagacaacaatgaagtacaggtgcgtgatttaccagaagctgaatatgggtatcaaggatggactattgaagaaattctgaaagatgttatgggtatgcctgatctccgtacaaaaaaatatgatgaagtgaagcggcgttttgataatgcattagataaccaaaatataaatgaagcacgagaagcttataatgaattagatatgatgcttcacccgcgttatccattgcgacctgtgtttagaatgcagcttgatagtcttggagagtaa

SEQ ID NO: 88059 - DNA, 741 bp, Acinetobacter baumannii LAC-4
atgattaagttggaacgagggaaaaagccagagtacctaacagatgcacaagttgaagcacttactaaaaaatttaaagctaacagtaaagatgcagtctggaaacacaaaggtataaagagggcattattgttaagcagtaactctaagtgtgctttttgcgaatgtgaattaatggttagtggttcatatatggaaatcgaacattttaagctcaagaacgattatcctgatgaagtagttagttgggaaaaccttttgccttcttgcaaaagatgcaatacgacaaaaggctcccatgatgttgtagctgagccaattattaacccttttgatataaatccaaaagatcacttatcgcagagtaaacacaggatttacgctaaaaccccattaggtgaatccactacagttgctctcaaccttaacgatgaatcacttacgcggccgagatttttcgtgtcggactacgtaactaataaaatagaagaaatctatcaagatatttcatctaaatccaagttaacgagacatgatagaaataagctttccacgctgcttacttcttgtcaggcggatcatgcattttctgcattcgcttcaacagcattgcatgaatcctacgaatatgtagatgttgtaactaagcttaagaccgataaactatgggatgaacaaatggaagagttgcaccaatgctctctaaaattaattttagatagacgtgagaaaattaagtaa

SEQ ID NO: 88060 - DNA, 1269 bp, Pseudomonas aeruginosa PA96
atgtatctgcgcaaattggatctgacggatttccgcggtttttcttcgttgcggtgggagctcaaagagggagaagaggcaggttggcacgtgctaatcggccctaacggggctgggaagtccggattcctgcgctctgctgctatcgcatttaccggagatatcgaattcacagcctctcgccgtactgcacgagacttcatccgcaaagcggagggcgtggagaaggcgataatccaagtagaagtcgcaccaactattggttgggataagagcggccggcaaggccccatgtcatcaaagccagttaaaggctccataacgctgcacagcgatggggctgttaaatcctcgcctacaaaaaacgttaacttttggggggaaggtcagggctggttctctgcagcattcggccccatgcgacgcttcactggcggtaaccctgaaaatgttaggctctttgccggatttccaagacttgcccggcacctaagcattttcgatgaaggtgtcgccttgactgaagcgcttgaatggctgcagaagcttaggtttaggcagcttgaaaaggtctccagtgacagcgctgagactggcctgcttgggaaggttcggcaatttgtgaatcaatcaggattcctcccccacggagccaagctgacagaggtcacatcagacggcgtcaagtttgaggacggcaacggtgtagagatccccattgttgaaatgagcgacggttacagagcagtgctgtcgatgaccttcgaactcctgcgtttgatggcccttcgttatgatgaagacagccttttctctgaggacgcttctacgatcttggccccgggcgtagtcttgatagatgagatcgatgcccaccttcacccatcgtggcagcgagagatcggtccatggctgacaaagttgtttccggctattcagttcattgtgacgacacactctccctacgtgtgtcagacggcgctgaagggctcggtgtggactttgcccgcacctggctctggcgagcaggtgcaccggatcgcaggcgagcaactgactcgcattctgtatggtgacgttctgcatgtcctgaacagtgacgcctttggcgggcttccaggtcgatccgaagatgccgtccacatgctggatcgcctggctcaactcaaccgcaagcttgatcgaggcactctttccgcacctgaagtatctgagcgtgcagatctgaagcaaactctagggcctgtcgtagaaggtgatgagcagtga

SEQ ID NO: 88061 - DNA, 804 bp, Pseudomonas aeruginosa PA96
gtgatatcaatcacagcagccatccttgataaacgtgcggtggatcgcctgcaggatctgcaagatgctgtaaacaatcttcccgactatgcggctcaggtggcctacgcaaagagcagctggagccgaaagccttcctcgttgttcgatggcttaaagctaaaattagccgaaatgtgtagcggaaatcgaaggtgtgcctactgcgaagattcgtttgcagatgaaattgagcatatgcggcctaaggatttgtatccagaacaagcatacgactggaacaattacgtccttgcttgcggtccctgcaatggtccgaagaacaaccagttcgccatactaagcgacccgcttgcattggttgatgtaacccggaaacgcagtgcaccagtaatccaaccggttgctggccgacccgctctcgtcgatcctagaattgaaaatcctgtcgactttttgtggctcgattttcgcacatggcgctatgtgccaaattcagacgacgagacctctgagatttggcttcgcgccgaatacacaatcgacgtattaaggctcaacaaacgagaggcactcgttcgaggacgcaaaagtgcattttctggcttcagttcaaggctgactacttggctggaaaagcgagagcactggagccctgaagaacaacaggagtttctagatgatttcagggcagagcgttatcgaagtgtttgggagcgaatgaagctgtatcggaatcaagtacctgctcttcatgatgttgcacagctaattgaggcagcaccagaagcccttcagtggtga

SEQ ID NO: 88062 - DNA, 1731 bp, Pseudomonas aeruginosa 3581; identical to SEQ ID NO: 87804

SEQ ID NO: 88063 - DNA, 813 bp, Pseudomonas aeruginosa 3581; identical to SEQ ID NO: 87805

SEQ ID NO: 88064 - DNA, 1731 bp, Pseudomonas aeruginosa 3580; identical to SEQ ID NO: 87804

SEQ ID NO: 88065 - DNA, 813 bp, Pseudomonas aeruginosa 3580; identical to SEQ ID NO: 87805

SEQ ID NO: 88066 - DNA, 1269 bp, Pseudomonas aeruginosa 3574; identical to SEQ ID NO: 88060

SEQ ID NO: 88067 - DNA, 804 bp, Pseudomonas aeruginosa 3574; identical to SEQ ID NO: 88061

SEQ ID NO: 88068 - DNA, 1731 bp, Pseudomonas aeruginosa BWH059; identical to SEQ ID NO: 87804

SEQ ID NO: 88069 - DNA, 813 bp, Pseudomonas aeruginosa BWH059; identical to SEQ ID NO: 87805

SEQ ID NO: 88070 - DNA, 1398 bp, Janthinobacterium lividum
ttgttaaaaaaaattgcgattaacgggcatagcctattttcaaacttatctttccctctttcatctgcttgtgacgcaggcaccaactacaagacggtgatcattggaccaaatggaactggcaagagtacaatattatcttgcatcgcggatgcattgaccattgaatgtagtgagagaaaaatcaagtctcttatcgggattgattatagctatgaccttgaagcagaaatggctggaaaagccctattgatcagcagtagcgatataagctccggaggaaatttcggaaaaggaaagattttggcgatttcttccacgccaaatgatcgctttccgtttctagcgaaaaatagtgtacggaaaagtgagcactacgtgtatttgggtttgaaaactgcttccaataacatctttttctccaatatgaaagaaaagatgttccaagacatgcttttgatatgccgatcgacacgtagggtgaatggtgcactggaggttctgaataaacttggcttcaacagcaaattctcaatcacgctggaacgaggtagtaatttcgctgctttcaatgactcaggaagacgtaagcttcacagcaacgcaatggcaggaagtgcaagttttcagaatgcagctttccgtggattcgtgacatctgatttctatatcgaaaatgaagtcgccattaaagattttctcacgtctatagaaaatgacgcatcggcgcaagccaacttatctacaattagtcgaaataaaaaattattcgataaattgacaatgatatcacgtttgacggaagctaagattctaactataaaaacactttcaatattctcgaataatggcatcgacttacatcaatccagttcgggtgagttcaacatcttgagaatattcttgtcgattattgcgcacgtggaaaatgattcagtaatcatgattgacgagccagaaataagtttgcacccgaactggcaaatcgactttctatcgatactagatgcagcattagtcggttttttgggttgtcactctttaatagccacacattcgcattttttattgtccaatttggaggggagaaattccacaattctggcactccaatttaatcatgagcgcggagaaattttcgttgatgctttagatgttaatagttacggatggtcgcccgagcacacattatatcaagtctttggagtcaccggatttagaaacaaatacctcgaacttgacctacgaatcatcatcgattacatgagcaacgattcgggaagctttcgaaaattcaaagaatctttggggcgaattagaaaatttaatattactgaaatcgatccattgtttaaactcatcaacaaagctgagaaaatcataaaagaaaagtcatga

SEQ ID NO: 88071 - DNA, 672 bp, Janthinobacterium lividum
atgaaaaatgcattaaggttcacggaacaaattgttgcggcatatacgtacaccgttgcggaacagtccttagtggatgctcttcacaattcaacgctaggtcatgatgagatgtggagcggcagcatagctaccattccacataagcgcaaagatcgggacacacttaaaactaatatcaaaaaattcttggagttagcacaagacgggtactgctattactgtggttttagctttgtttctaggaacggtgagcgtggctataagggtatccagcgcgaccacatcgctccgaaaagtttgtataagcagttcacctttcagagcagaaatttaattcttgcctgttcgaaatgcaattccagcgattataaaggcgatacggagactgttgaaaaggcatctgctgagtatgataaatgtgattttaatattattcacccttatttggataaattttctcgtcatctccagttgcaggacgatggtctgctcaagcttgttcgtaagtctcgtaaaggaaaggcgaccaaaaagatgtttggactagatgaaacatttgaggtgacgctcaggtctgtttgcttgcaatttgataaatatcaagttaacactttagaagagttattgcttgcgcgcatatctaaggtgaatatttcagttcataaatga

SEQ ID NO: 88072 - DNA, 1311 bp, Pseudomonas sp. RIT357
atgcatattcaaaagttacagatagagaacttacggtcttttaaggccgtagggctcgacttcaatgtgcccgccacaagtaacttacaaatccaataccctaacgtgaatgtcttgctgggagataacggcctcggcaagaccagcgtattgcgtgcagtcgcattgtcggtgttggggcctttgctcagcggagggtccggctttgttcccgaaggcctggttcgtcgtactgacgccgctgaaaaaaaaacgcctcccgccaccattactgcaacgctcctttcgactgacgaagaaaaaaatccgaagcagacagaccacccgctgcccgatcaattttcgctgaagacccaaatcagttccttcggctctactgagcgcatgcgcagcaaagtgtccccgcgcgatatcgagaatacggtcgagtttcttcagttcaacgaagacaatcctgcgtttttcattgtgggttatggggcgagcagaagtgttgaagcctctgccagggtagatgaaagtgcacgtaaaaaatcgcgcctgcgccgttatgaacgggttgccagcctcttcgaagaacacgtcacactcatgccattgtcctattggctgcctgaatacgccaaaagcaacaaaggccgatacacccaagtcatcaacctgataaacgatctgctgcctctgaactgtcaaattcagaaaacggttcaggaaaacgaaaacttatttgaaatgaacggcattgtgctgccattccgagccttgtccgatgggttcagggcttatattggctggataggcgacatgctgtttcatgtctgccagggtgtcgcgacagggctgaaactaagggaaatgcgaggtgttgtaatggtcgacgaaatcgatctgcacttacaccctgaatggcaaaaagtggtagtccccactctggcaaaagccttacccaatgttcagttcatcttcaccacccacagcccattggtggtgggttcattgatgtcacaaaacctctttttgctgagtcaggaggaaggttcgacgctcataaagcggctgcccgaacatgtgaggggcaagagttccgaacagattctgctttcgccctatttcggcctggacagtactcgcgccgagtctacgtcaaccaaactcaacgaactggcacgcagtgccgtttccgggaatcgcgacgccagcgccaactacctgaaacttatggcaaccggcctagggttcgaccagcccccgtcaccaccgaccacttctgcgcctaagcgaagaaagaacggggaaggcgtcaagaaatga

SEQ ID NO: 88073 - DNA, 852 bp, Pseudomonas sp. RIT357
atgatccgttatccaatcctggagaaagatctcattgcacaaatcaaagagcggaataaaacctggcttggccgtgccaaggcacgtactggaacttacgtggctgccggtaaatacaccggcggtactgagttctggggccagataaaaaccgtctatatagcgctgcaatatgaaaaatgcgcatattgcgaaaccaaacttcagggttcggtgctggcgagcaaagtccacgaagtggagcactatcgccccaagtccagtatccaggcctggcccatacaccttaactgggccaccggcgcagcgagcccaacggggtactacaagctcgcttatcatcactttaactatgcgattgcctgcacccgttgcaactcaaccctgaaatcaaactttttccccattcgcggccatcgcgatgtgcaaggttccgaccccgcacaaatgggcaacgagttagcgctgctgctctatccgatctcaacggttgacgtggacgacccgcaaacgatcattacttttgatggcgtattagcggttccggcgcagcaaaacgggcacgcctatgaacgggcggtcaccaatatcgaatttttccagctgaaccatgaggacctcacctcacggcgagcgcttgcactgatagagctctgggttgcgctggaagccttggcggcggacaaaaccgacgtcgcgacgcgaaaggtcgcacagcaactggtgaccttcaaatgcagcgcccagagtgagttcaccgcttgtaaccttgctttccgacagctctaccaatccgattacaacgccgccaaacagatggctctcttactggcgcaagccctcccggaataa

SEQ ID NO: 88074 - DNA, 1239 bp, Pseudomonas sp. RIT357
gtgaccaatcgttatatagaaagtctacatgttgatcatgtaagaaaatttagtcgattagatatgagttttggacctggattcaattttattgcgggtcctaatggatgcggaaaaacatctgtactagtgtgcattgcccattgttttgatacgtcaggattgagctactctactgttagtaaggaatctgcattctgggtagatatgactgatgggaaagaaaaacttcggattggtctcggacgcaataacgttcatggcggctatcgacaaggctctctgaacttaacgggaggtgtgcctttacaaggagaagggcgggtcgttatcagaccttatgaggataaggtgaaattcctatgtccattatttattggtgcgagcagaaatataacctattctttgataggtggcgtttcgcgtgaactgccacccgatgaggctgctaagcgatataagcaaggtagtgtaaagtcgttatatggcgagtgggatggaaatataaagcagtggctcattaatcgatattttattattgataagccttgggcagaggttgaaaggaaaaattttgagcggttagaagcggcgcttaaatatattggtcccagcgatagtgaatttgcatttgttgaaattggccgtgatcttgaacctattttttcaatttatggtcagcgttgctatttggaagaattgtcttccggttttcaggcggtatttacaattattgcgatgattttcgagtggattgaaataggcggcaatagtgagcgtttagtcgagtctgcgtatggcactgtgcttattgatgagttggacttgcacttgcatcctgaatggcagtttacgctgcgtgacgggctagcaaaattgtttccaaaactgcaatttattgtgaccacgcactctccccatttgcttgcttctgcaaaaaaaagtgaagtactcataatgcctgttggttcggttgagcgcgatatccacgcctctgatcagatttactcaggatggacaactgatcagattctatctgaagttatggacgtaaaaagtctagagaataaagatcatcatcgcttagttacagctgctttggcacaggcggaacttaaaagtttgaaaggcttagagcaggctataataaacttggaagcagtatcacatccgagcgatactattgtgacggttctgaaaacaaagctagcttcactggtggcgcttaaagatgattaa

SEQ ID NO: 88075 - DNA, 741 bp, Pseudomonas sp. RIT357
atgattaaacttgccagaagtcctgagccgcagtatttaaaagacaataagaacgagttttgggtttcgttggaagatgcaattaataagtatgggtcttacaagctgattcctaagctcgaaaaagaaaagttggttgggttttatcggcatcctgaagtcaaggttcctctagttaagtcttcaaatggaaagtgtgcattttgcgaatgcatcccatctgaaggaggcaatgttgaagttgagcattacagacccaaatcgctttaccctgaactgacatttgagtgggggaatcttttacctgcatgtcatcgttgtaatggcgacaagtttgaccatgatacaggcgttgaacctattgttaatccattcgattgtgatcctaaagattacttttattttgatggattaaatataaagggcttgcaaggggtgggtaatgaaattgctgagcgcacaattgaagtgtgtggattgaattcgttgcgtctttgggagcctcgctcaaaaatttatgtaagtttgcatgattttgaagcgtctctttttacagcgataaataactataatgaggcagttactccagttaagaaaagaaatagattgaagtctatccgtgagtcggttgataggatcgagatgttggctagggagggtgaaaggtactctagtttttgcgcctcttatttaaatgggtctgaaatatataagggcgctaaaaaattaatttccgagtag

SEQ ID NO: 88076 - DNA, 1059 bp, Klebsiella oxytoca HKOPL1
atgtttggactgcaatctcacttgcaccttaaatgtgttttagatacgaagaatataacatacatactggctataataagtggtctgataaatggacaaatgatattgtcagatgagagtattaagcatgcaaggaaaagtcgttatttaaaagacgaagagttaaaaaatagaaacataaagttagacgagtcgattgcaataatttgtagagaaagtgaaaacaaactcaccttagatgttctttgtgatatcttactaatgttggaggccggtaaatttcctgaagaaaatctcaatgatatttatttctctgtcgctaaagggagagtttactcagaaagaaaaagtttggtttatgatttcaacggaatcgatataataaagtatttgtttattttagatgtgataaatgtttctgatttccaagtaatgcatcttaacacccaaaaagaagtcagtataatttcactgagttctggacagagaactttgtttggtcatgcaattgtattaagtagctttgcagaaaaaaactgcatggtttgtattgatgagccagaaaatagtttacatcctgaatggcaacttaattttatgcatttcatatctcttttgtgtcctgatactcttggagctcatgttttcattgcaacgcattcacctcagatcatttctggcatgcggtttgataatggctgtgtgttatctctcgcaaacagagataatatagaactgttaaagatgacagataaaaaatatgataatggtggactgtatgaactacagccgttgaaaatttacagggagcaatctgcagacaaacaactaacaggtgtttttaaaagtcctggttataaaaatgactttatcataaggaaattgctcttaatactatctaaagcttcgaaaaaaattaaccttacaaaaaatgataatgaatttattagcgagattgacatcctctttgaaaaaaagagaataccagaaggagatcctgtgcagttgttattgaagcaggttttgagcttccaaaaagcaaggagttctgatgattaa

SEQ ID NO: 88077 - DNA, 588 bp, Klebsiella oxytoca HKOPL1
atgtgcgcagttcgtaaaaacttccgaaaggaggtgcgagattattaccgtaatgaacaaggttttacatgtccatactgtggaagattgagagaggaatttcatggtggacagtgggatattgatcacatcattcctaagtctttatacccagaatatctttattgccccaggaaccttgctgtcgcgtgtaaagattgtaatacacataaatcaacaaataacccactattatccccgctggaacatttatcgccttatcctgaaaactctagatcttacaaaataatacatccacattttgattcctatcacgaacatatcaggctaactagagataataatgggagaacctgtcacgaggtaattacagataaaggtcgagaaacatttcatgtatgccatttaattcgattcagcgaagcactttctgggacctctgagtatgttcctgagctgggtactgaaattggtattattaacgatgttagtgagtcagttcagatgtggctggacggctatgacgctctaactccacatgatgcggaaatcgccttacaggctctcatgcagagaatacgtcgttga

SEQ ID NO: 88078 - DNA, 1245 bp, Acinetobacter sp. Ver3
atgaagtatttagtaaacattagtggagagattccacatgcaaacctttatgacatcaatattccattaaatgggagaaatttgattctcactggacgaaatagtagcggaaaaacaagtttccttaataagctttttgaaactttaaataatgatttagattcattaaatgataatcaacaacaatataaaaataatatttctcattggcagtcagagattcaccggttagggccttcaaatccagattcccaaggattaaagaatctagtcaaagaatatcaaggaaaattaaaactacttgaaactggttttaatattgaaacaataaactttgaagagttcaaaaataaatataaagaatataaagcaatctttagaaattttgatgctatgcgtgagattcatattgatgagtctacacaaactactctgtctaatactgaaattgaaagagcaagaaacgcatttaggcaaaatataggtagccgtctagaacaacatcttgtcaacttaaaaacatctgaagcttttgctaaaggtattgaacaaaatgaaatcaaagggaaaaaatttgagaactggtttagcgattttgaaatttctttaaaaaaattatttgaaaacgaaaaaacactgttagttttcaaaaatgaagaaagaaaatttgaaatttataatggaaaaaactacacaactttccaaaatttatcttctggatataaagcaatttttgatatttttgctgatcttttattaagaacggaattttttgatataacaccttctgatttagagggaattgtattaattgatgaaatagatgctcatttacatatatcacttcaaaagttaattctcccattctttaaagattcatttccaaatattcaatttattgtaagcactcattctccttttgttattacatcaacagacaatgatactgtagtttatgacatttctagtggtgaattttttgaagaagatttaagtcgctattcatacgaatcggttattaaaggtttattccatgtagaaataaaatcggcacaattagaatcagaaattaaagctatcgctgaaattttaaataaagatcctaataattatgagaaacttagagatcttttaaaaaatatttcaccattcgcaaaacaacttgatgttgaatctaaatctttttacttcaaggcattaaatcatttattagacaatcaagaactaggtgatcttgatgtttaa

SEQ ID NO: 88079 - DNA, 666 bp, Acinetobacter sp. Ver3
atgtttaaagttatacgatcagaaagacccgaagattggactaattcggattacacagatccagttgtagttaaacaattgaaaaaagatttcttatctaaatgttatttgtgtgaacaagcagatttcggttatatcaatgtagaacactttgtgccacaccttaacaaaagtgaaaagttaagaaccgattggaataatctttattatgcttgctctcactgcaatagtattaaaggctcaagacataaggaattactagattgttgtgaagaaagccataatgtagatacggctatttctttagaagcaccaagcgttccaaatggtaaaattatcttaatcaatgcattaaataatgattctgatttgtttgaactcacaaataaaaccatagcattattagagcagtgctataacaatgcaaatagtggtaatcagcaagtgagccatcaatatttgaaagaaaagatattggaagaacatgcttatttgcaaaatttacgtttccaactaaaaaatggtttaaatcgtttattgcaaagagaaaaagatgatctagtcgaaagaataagtaatatgctcaaacctaattatcccttttcagcgttttggaaaacatatgtcagaaatgatccatttttatcagagattttaaatcagtaa

SEQ ID NO: 88080 - DNA, 1359 bp, Escherichia coli BIDMC 82; identical to SEQ ID NO: 87574

SEQ ID NO: 88081 - DNA, 660 bp, Escherichia coli BIDMC 82; identical to SEQ ID NO: 87575

SEQ ID NO: 88082 - DNA, 1278 bp, Rhodomicrobium udaipurense JA643
atgaagatccgacggctcagcgtagcccatctgcgcgccttcgagcaggcgcaattcgagttcgacccggccttcacgctgctggttggcgtcaacggcgtgggcaagaccacagttctcgaaacattgcgcatctgcctttcgcgtctgctgcccaaattcaccgccagcaagagccgcccagacaccttcgtcgtcgatgatatccaggtaggcaccccggcgatgaccgtcgatctcgacctaacgatcaatggcgaaggccgccatctactgatccacaagcagcgtgagcagaacgtgtcgcacaagtccggcgtggtgcgcgagcagaccctcgccacgcccgaccgcgaaaccttttcacccgatttcggcaaggcagcgaaagcgctcaagacggcgaaagcccaatctgtcgcggtctatttcgccacgcgccgctctctcgtttccgacgagcagccgaaatcgggcaaggccagcggcgggcaggctgtcgccttcgctgatgcgctcgtcgcccgccctttgcggctggccgaactcgccacatggatgcacgcgcaagaggcgctctctcgggaacttctgcgcgcgggtctgcatctggccgccatgcgtgccgccgcccgccgcttcctgcccgactgcgagggcctgcgcgccgagatggagggcggcccacgcctgctgatcgagaagcacggccgcaccctcgatgtacgccagctttcggatggcgaacgcagcatgttggccctcgtgctcgaccttgctcggcggctctcgcaggccaatcccggactcgatgaccctgtccgcgatggcgtaggcttggtgctgatcgacgaacttgacatgcacatgcacccgctctggcagcgacaggtcatgtcccttctgaccggcacatttcccaactgccaattcgtcgccacgacgcactcgccgcagatcatcggtgagacgcagccggaacgcatcatcttgctgcaagcggaggaagggcggatcgttccgaagcgatgcggccaggcttacgggctcgacacaaactatatactcgaacacttgatgggtacgccctcccgtccagagcccacacggagaatgatagcagccatcgaggcctctttggacgaaggcgatctcgacccggcgcgctcccaattggcggcattacgaactctcattcgtggggacgatccaaccgttgctgggcttgaggctaccatcaataaccttgaggcgcttggcgatgcgtcagatcaataa

SEQ ID NO: 88083 - DNA, 693 bp, Rhodomicrobium udaipurense JA643
atgcgtcagatcaataagggtgctgaaccgggcgagttgacccagtggaaagcccaaaatcgggcattgccgaactattgctacacatctctggcagccgctcatcgccttgcagttagaaccgcgcttgtcacggaacagaggggcctttgcgcctacaccggacggcggatcgacgtggagaattgccatatagagcaccttcgtccgcaagcgcactgcgggattggggaagatgtcgactaccgaaaccttgtcgccggagtgccagctcccaacacaccacagttgccttatggcgctcacaaaaaggccgattggcctgcggtcgcggatgagcatttgttcgtatcgccgctgtctggcggctgcgcggcccgcttttcctttcgattaaacggggaagtcgaagccgccgattccgctgacaatgccgccgtcgagacaatcgcgcgattggggctgaatgacgaagcgcttgttcagcttcgaaaggctgcgatcgcagcaacgctgcagattcgtggacgaggcccagcctcaatcgggatcgccgatgcgcgcaggcgacttcgtgatctggaacgggcggaacaacaggcaggagcactcgaaccctattcatttgtacttgtccaagcgctagaaaggcaaatcaggcgcattgagaagatacgggaggcgagaggctag

SEQ ID NO: 88084 - DNA, 1356 bp, Pseudomonas syringae pv. actinidiae ICMP 18884; identical to SEQ ID NO: 87164

SEQ ID NO: 88085 - DNA, 570 bp, Pseudomonas syringae pv. actinidiae ICMP 18884; identical to SEQ ID NO: 87165

SEQ ID NO: 88086 - DNA, 1269 bp, Pseudomonas syringae pv. actinidiae ICMP 18884; identical to SEQ ID NO: 87176

SEQ ID NO: 88087 - DNA, 645 bp, Pseudomonas syringae pv. actinidiae ICMP 18884; identical to SEQ ID NO: 87177

SEQ ID NO: 88088 - DNA, 1356 bp, Pseudomonas syringae pv. actinidiae ICMP 9617; identical to SEQ ID NO: 86084

SEQ ID NO: 88089 - DNA, 588 bp, Pseudomonas syringae pv. actinidiae ICMP 9617; identical to SEQ ID NO: 87193

SEQ ID NO: 88090 - DNA, 923 bp, Pseudomonas syringae pv. actinidiae ICMP 9617
ccctctctcacttgagtgctgtgctcgccaggaacaacgcaggtgagcagattgactttccggttcttgccttctatcgcgccaatcgtcgttggagcagtgcgcgcatatctgccgagttcgcagcacagcagcggacttcccgttttgacggatatgcaaactggtttgacgccgtagccgatctgcgtgattttgaaagctggttaatcgcaaggacgcttgagcgccttcaggaccgtcttgattcaacttcgactgtcgagcgtgaagatgaacttgaatgggtgaatcgagcgatcagacttgccataccggatgcccatgatctccgatatgacttgaggctacaaagcctgctcgtagatatgggggaaggcaacgccgttccgtttcacgaactcagtgatggtcaacgtagtttgattgcgttgattgcagatattgcacgacgcatgtgcgttctaaacccacacataggaaaagacgttctggcgaataccagtggcatcgtgattattgatgagctcgatattcatctgcacccggcctggcaacgcaacattgcgccgacgcttaaaaaagcattccccaaagtgcaattcatcgccacaagccactcgcctcaagtgattggcagcctgcaaccgggcgaggtcatcctgctgaggaatggcgacagctctcacccgcgagcaacctatggcctggactccagcaccattttggaagaagtcatgggcgtaccgcagcgcgaacccgaaattgaagtgttgcttgatgagctgttcagcacgctggaaaacaatgaacttgaaaaagccaggctgcagattgacgcgctaaagaaaaaagcccccgatctacccgagttcgcaggtgccgaagcactgctcaagcgcaaggagcttattggacgatga

SEQ ID NO: 88091 - DNA, 645 bp, Pseudomonas syringae pv. actinidiae ICMP 9617; identical to SEQ ID NO: 86083

SEQ ID NO: 88092 - DNA, 1440 bp, Acinetobacter baumannii 1451147; identical to SEQ ID NO: 86188

SEQ ID NO: 88093 - DNA, 672 bp, Acinetobacter baumannii 1451147; identical to SEQ ID NO: 86189

SEQ ID NO: 88094 - DNA, 1431 bp, Acinetobacter baumannii 6112
atgcaaatacaaagctttagtctaaaaaatattgggcaattccaagacctaagcgtgtctgtagcacctacacaagactacccatcaaacatcacggtttttattggtaataacggtagtggtaagacatcgctattaaagtcggtagcaacagcattgacttggtttgtagcccgtttaaaacatgacaaatccaatggcacaccaatccctgaaagtgtgattttaaatacggcgaatgcagcagcagtcgaaatcattgttaatgatcaaaacctacaacaacaaatccaagcttatacatggcgtataactaaaaaccgcacggcgagaaaaactgaatttagtacatatttgagcgagctaaatcagttaacagattattataaacaatggcttggcgatgatgatcaaagtagtttgcctttaattgcattttaccccgttgaacgtagtgtgattgacatccctttaaaaatacgggaaaagcaccagtttttacaaattgatggctatgacaacgctttaaataacgccgtggactttagacgcttttttgagtggtttagagatagggaagatgttgagaatgagcttgctagtcaagtgaacgattacgcagatattttaaaggaagaattggaattagtagcatctttaaaaaatctgaacaaaaataagacagattaccaagactttgaaaacttaaaaaataagttagataaaattattaacgctttggaagctaataatagacaagacatcgcaactaaagacttacagcttgaagcagtacgacaagctatttatacatttatacctgaatttagtaatttacgagtaagacgtaaaccacgcttacatatgtctgtagataaaaatgacaaaactttaaatgtcagccaattatcccaaggtgaaaaatccttaatggcactggtcggtgatattgctcgacgtttagccatgatgaatcctaaactggataatccattgcatggtaaaggtattattttaattgatgaaattgatatgcacttgcacccacaatggcaaagatcaatcatacaacgactacaaacgacctttcctaattgccaatttatcctatccacacattcgccattggttatatctgatacacaaaacattttggtctatgacttagacggacaggaagttaatgctttaccatcattgtatgggcaagatgccaacacagtattattgcaatatatggatacaagctatcgtaaccctaaagtcgctgagcaaatcagccaagcaatggatgcaatccaaaataatgattttgaacttgcaaaccaattaatccaaacccttaaattggaacttggcgaaagtcagttagacgttatgcgtcttgttgctatgttgaaaaaaagaaccctagcaaagcaggggaaataa

SEQ ID NO: 88095 - DNA, 648 bp, Acinetobacter baumannii 6112
ttgcaacagatcattaaagggattgaaccgatagaattaactgaatataaacgtaaaaacccaacccatagatatgatgacttaggcgaagacccagaacagatacgacttgcaattagacaagcatgtttaggtgaacagttatatttatgttcgtattgctgtcggcagattgggtcaaaagaccacgattgtatgaatgagcatattttgccacgacaacattacccacaacatagttttgattttaataatattgtggcgagttgtacggcaaaagggtcttgtgatgatgccaaaaaaaatcaagaaatcagcattagcccattatccccacgttgtgaaactgagtttaaatttaatatcagtggtacggttacaggattaaccgatgatgctaaacaaaccattgatgtactaaaactaggtgatagcttgcaacaaaaccaaaagctagttgatatacgtaaacaagccattgccaattttttgtttagtcaaagtaccacgatagatgacttggtcgaggatgatgagttattaacattattggttgaagacttacaacaaacaacagagggtaagttacaaccatttgccccaattattaccaaagcacttaaaaactggattgatggaaataaataa

SEQ ID NO: 88096 - DNA, 1440 bp, Acinetobacter baumannii 72431; identical to SEQ ID NO: 86188

SEQ ID NO: 88097 - DNA, 672 bp, Acinetobacter baumannii 72431; identical to SEQ ID NO: 86189

SEQ ID NO: 88098 - DNA, 1593 bp, Klebsiella pneumoniae UCI 64; identical to SEQ ID NO: 87692

SEQ ID NO: 88099 - DNA, 630 bp, Klebsiella pneumoniae UCI 64; identical to SEQ ID NO: 87693

SEQ ID NO: 88100 - DNA, 1722 bp, Klebsiella pneumoniae UCI 64; identical to SEQ ID NO: 87690

SEQ ID NO: 88101 - DNA, 810 bp, Klebsiella pneumoniae UCI 64; identical to SEQ ID NO: 87691

SEQ ID NO: 88102 - DNA, 1257 bp, Bacillus thuringiensis serovar kurstaki str. YBT-1520; identical to SEQ ID NO: 87076

SEQ ID NO: 88103 - DNA, 648 bp, Bacillus thuringiensis serovar kurstaki str. YBT-1520; identical to SEQ ID NO: 87077

SEQ ID NO: 88104 - DNA, 1341 bp, Sphaerotilus natans subsp. natans DSM 6575
atgagaatccaccagttggtgctgcgcaatttccggcgctatgagcgggcgagtgtccagttccatccgcggttcacggtgctgatcggcaacaacggcgccggcaagaccacggtgctggatgcgttggcgatgctgctcaacacctacttccagggcgcccggctgcccaccggcggcggcacgatcaaggccgacgacgcccgggcggtgtaccggaacaagcacggccaggtcttccgcgaacgcatggacgaggtggcgctggaggccacggccgaggtggcgggcgccgcgttgacctggcggcgcgagatcggcgaccggggcggccaggcgaagaacctcgtccagctgggcgccgaagggcgcgcgcagatcaaggccggcggcagcccggatctgcccttgctgctctactacggcgccggtcgcctgtggacccagcacgacaacgtggagaccagcggcccgacctcgcagctcgacgcctaccgctactgcctggacccgaagtccgatcacaaggccttcgagcggtggttcaagaagctcgccttcagcgccttgcagcgcggggaggccagcccggccctgcgcgccgttcagggcgcggtccaggcctgcattcctggggcgcaggacttcttccatgacaccgagtacgacgagctcaccctccggctggacaaagaggggctgatgcccttcaacagcctgagcgatggctaccgcaacatggtgggcatggtggccgacatcgcccaccgggcctcgcgcctcaacccgcagcatggcgccgaggcggcccgtcggaccgccggggtcgtcctcatcgacgagatcgacctgcacctgcatcccaagtggcagcgccgcgtggtggccgatctgcagcgcgccttcccgaacctgcagttcatcgccaccacccattccccgttcatcctgcagtccttgctgcccggcgaggtgatcgacctggaccggcagcctcttctggccacgaccgagaccgtgccggtggccggcctggcggcgcccggacccggcggcccgttcagccaccgctcgatcgaggacattgccgaaaccgtcatgggcatcgacctgccgcagcgcagcgaacgccgggcgcagatgcacgaggccgccaaagcctactacctcgcgctgaaccagcctcgccccacggatcccgaggcgctggaggccttgaaagcccgactggacgccttgtcagcccccttcagcgatgaagtggcctatcacgccttcctggagatggagcggctcgccgccggtctgggcccgtcccgcgccatcagcgagaacccctga

SEQ ID NO: 88105 - DNA, 534 bp, Sphaerotilus natans subsp. natans DSM 6575
atgcacctggatgcctcgctggccgtggagcatgtgcggcccaagaagccccccggcgccacggacgtgctgcccgagcgggcgctggcctgggacaactttctgctggcctgcaccaactgcaatgccaccaagggcgacaccgacgtggtgctggcggactacctctggccggaccgcgatgacacctttcacgccttgcagtaccgcatcggcggacaggtggacagcgccgccggccaggacaaggtccgggcggatcggctgatcgacctggtggggctgcgcaagatgcccgacacccccgaggccgccgaccggcgctggctcaatcgccgcgaagcctgggacatggccgagcgggcccggcagcgtctcatgacgtgcccgcaggcggctcgcgagttgatgcgcgaacagattgtcgagaccgccaaagccaagggcttctggagcgtgtggatgacagtctttcacggcgatccggacatgacggcgcgcttgatcgcggcatcccccggcacccgatggtga

SEQ ID NO: 88106 - DNA, 1560 bp, Pseudoalteromonas citrea
atgaaaattaaagaagtcactataaatggatttgagcataagttaatttgcaataacttcgaagacaataataattactatactgttttagttggaaaaaatagtgcaggaaaaacagagtgcttaatacaagtaattggttgtttattaagattacagcttaaaaaaaataactctccttatatagatcctttagatgaaattcttgaacacgaatttaaaaggtatcaagaaagttatgagtttgagactaaactaactttttctgaaagtacaaactccaagcttgaggaaatggttaaatttaagaaatctaatagcgcaagaataattaaaaagtttgatggtagtgaggtgactttaaatgatggatattttagacattcacttaaaacttatcccttgttaaacaaagagatatatttaaacattattgcgatttctgaaagcccttattcaaagtttccgattttaaactcagagtacaagaactcatatagcctattttcaccacaattacttaaaaataaagatactgttaccgtatatgctgatgattatgtgcttcctcaaacccaacgtttagttaagtcaatatttcattcaatagcttgtaaaacaaaagttaatttaagagcgttatttgaacttttaaaatttgaattaaaaattaaagtatcaatagatttgaaagatcgctacgcgaaacattcagagattggagttttgaaatttatagatgttaaagtagttcaaaagcaggctgagggtgtattatttgaaaaaacacctgctcagttaagaaaatattgggaatacctaagcgaaaggtttgatttatctagtttacagggtaagtcgtatacagaaagtcattcgagtacttcaattcttttagatataataggagattatgaagggtttgaggcacttaactctctaatcgagtacgaagttttatcagttaataaaatagcttttaagaatagtcatagtggagattatgttgactctactagattgagttccggtcaatactgtttgctaactttatttttttcgattgcgtctaagataagcaatggctctcttatcttattggatgaacccgaaattagtttacatccatattggcaagcgcaaattattcctttattgaatagtacgttttcaaattacataaattgccactttattttggctacacattcgcctcatattatttctaacctaagtaatataaattcatccgtggtaatttttgatagtaatgacaaaagctctcatactgttgaggggggaaagatatcatctcagtctgtagattttcaattagcagaagtctttgaatatccaggctttagaaatgaatatgttaatagggagttgatttcttacttggttcaagtaagtaaaggtcgggaaattactgatgaaacatataagacaatacggagaatagtcgaattagagtctaagctggacagtagtgacccaatgcttgagctaatatatgcagttaaaaaaactctaaaggcaaatcttaatgaaggctgttaa

SEQ ID NO: 88107 - DNA, 702 bp, Pseudoalteromonas citrea
atgaaggctgttaaatataataaagaacaagaagctttcgttgataacttcagaaaaagtcttagttcccacgataaaggaatttggggttatgactatgaatttgagaccctccatgcaagtgctaaaacagatgaattaaaatcaaaggcatcaattattagagagataaagtcatcaataaaagaacactacctagtgcaacaggattttaaatgtgcatattgcaaacagaaaaatttaactcttaataaaaaaacatgggaaacagagcatatcgttgataagcatagtcatggaatttttacatttgaacctttgaacttatgcatctcatgccctgattgtaatggggctgatggtaaaggtacaaaacaagtgttagttaaaccatcaaaagcaaaaaaacctcgttaccccaaaagttcagcttcttttaaaattatacatcctcactttgacgaatacgatgaacatatagaaatacagaatcaaaatggtaacgttcttgtttttaagcctcttagtaaaaaagggagggagactgtcgagatttgcggtttactacgtttttgttataagtattcaaactacagtacagaaaatatatccgatacagatgaagtatcagagattgttaataagcttaaaagtaacccagagcttcttacagaggttttacgaaggtatagtcaagcctaa

SEQ ID NO: 88108 - DNA, 1242 bp, Fusobacterium necrophorum BL
atgaagataaaaaaaatagaaataaaaaaacttaaaggaatcaaaaatctttctctttcttttgaaaatgaaggaaaacctttggatattattgtattagccggttcgaatggaacaggaaaaacaacgattttagaagttataaaaaatatttttgttggagattactcagattatgggaatgaaaatttcccagtaagaatggaaatattctttgagagtttagaagaggtagctatttctaaatccaaaatgtcttctaaggaaaccaatataaaacaatggaaaatacttaatgctttcagaaactattcgtcactaaaagaggagttagagcaagaattttttgactatcaattagcaaagaatctgaagattttacctaagataatttatttgcctaccagaacaaactttcaaaatgtaaatacaaaaacgactgcattaaaagctagcaatcattttgtcaatattgtagataatgaaatatttaaagacattccttcttatattgcgactagagtttactatgttgcaaatacacaagagaatttaactttaaaagaggctaaggaaaaagtagcagaggaaattaatagtgtatttaaaattttagatttggatattaaatttataggtttgtctaaagatgaagaaagcaatcctattttttcaaattctgctggggaagagtttgatattaacgaactttcttctggagaaaaacaactttttttaaggactctatccatacagatgttaaatcctaaaaattcgattattttaatagatgagccggaagtatctttacatccggaatggcagcaaaaaattatagaagtatatagaaaaattggaagtaacaatcaaatcattgttgccacacattctccacatattttaggaagtgtcagaaaggagaatatatttgttctagtaaaagatacagaagggaatatcacagtcaaaacgggagaagaactgtatgcttcctatggacaacctactgataaaatacttgaaggtatcatgaatttatcttctgccagagttcctgaggttgcgagtaaattagaaaatctcaggcaacttgtagataacaataaatataatactgaagaatttaaggagaaatccgaagagcttcacgaaatccttggagaaaaggatattgatttaatgctcattgacatggatgtggaattaaaacaaaaggagaatttaaatgctcaaagtgaataa

SEQ ID NO: 88109 - DNA, 570 bp, Fusobacterium necrophorum BL
atgctcaaagtgaataaaagaaaagagccactagaatttaaggagtataaaaaaaagaaaaaacctataaattgggagggatatgacaataaaataaaagaaaatctaaaaaaatctctgttaaaagagcaagaaggaaattgttgcccatactgtgaagtcaagattcatttagagagaagtcatatagaacacattaagccaaaagacaaatttccgaaatttctacatgagtatgataatatgattgcctgctgtgttagcaataaaaattgtggtgcgacaaaggcaaatcaatgggataatttatttataaatcctgttttggataatccggaggagtattttaaatatgatattaaaactgggagaatacttcctatagacgaagtaggatataaatttgacagagcagaaactacgataagatttctaaatttgaatgaaaaaaatttatgtgacaaaagaaaagtgtatatccttaaatttagagatactcaaaaagaatataggaaattttttcaagaattcccttctttaaaaagatatttgcaaaatgttctgacataa

SEQ ID NO: 88110 - DNA, 1242 bp, Fusobacterium necrophorum DJ-1; identical to SEQ ID NO: 88108

SEQ ID NO: 88111 - DNA, 570 bp, Fusobacterium necrophorum DJ-1; identical to SEQ ID NO: 88109

SEQ ID NO: 88112 - DNA, 1308 bp, Fusobacterium necrophorum BFTR-1
atgcaaataaaacagttacaacttgaaaattttcgttgttatgaaaaaataaatatatcattacacccaaagtacaccgtgcttattggtatcaatggagctggaaaaacaacaatattagattccttatctattgcattaggaggatatatttctaattttgatgggatgggaagttatggtatcaataaagaagattctcattataaaatgtacaaaataggaagtactattgaaaaagaacatatttttcctgtatctatttctgcaacagctgatataaataatagagaatatttttggaaaagaagtttaaatggagaaaaaggaagaacaacaacaacagatacaaaagaaatcatgtcttatgctcaatctctgatagaagaggtaaaatcaggaaaatctcaaaagattcttcctatgattgcctattatggtactggaagactctggatgcaaaaaagagaaaaacattctccaattgataaacagatattttctagactgaaagggtatactgactgcttggactctgcttccaatgaaaaactaatgctaaaatggtttgagagaatgacatatctagaattacaagaagatactaaaattcctgaattatctgctgtaaaacaagctcttagtgaaagttataaacgaatggatgatagtatccaagatgttcactttcactttaaagtaaaaagtaatgaattagaggttactattgaacgaaaaaataaaacagtcgaaagcttacctcttagatactttagtgatggaattaaaagtacttttagcatgattgcagatatagcataccgaatggctgtcttaaacccacaattgttagacaacattctcttagaaacatatggagttgtcctaatcgatgaagtggacatgcaccttcatccaaaatggcagactaaaattattgatgttttatgttctacatttccaaacattcaattcattttcacaacacattctccaagtgtgctagcgaatatcccaaatgaacatattttagtattagataaccttcaaatcaccaaattatctgaaaaaacatatggaagaaatattgacaatattttccgtgaaattatgcaagttgaaataagacctgaaaaaattcgtactctattaaagaactttgataccgctttagataatggacaaatagaacaagcaaaacaacttctttatgagttggaaaatattttaggaaaagatgattctgacgtggtagaagctagaatgtctattaacttggaagaaacttttcatcaagtagaaaaatag

SEQ ID NO: 88113 - DNA, 621 bp, Fusobacterium necrophorum BFTR-1
atgattctaataaagaaaaagatacctcctcgttcttttactgaatataaaaaccaacctacaagttcttttgatgaacttccaaccgacataaaacaggaattacgtttatctttactgaaagaacaaggatatatttgtgcctattgtatgaaaagaatctcagaggaaactgatgtaaaaattgaacattacaagccaaaaagcctatatccaatggaagaactaaattataaaaacttactagccgtttgtgatggtggaataggtactcctttaaaaaggcaaacttgtgatactcaaaaaggttctcaagaattgtcttttaaccctcaaaacgaatctgatgtatccacaattttcttttctagaaatggtaaaatttattcatcaaatcctatttttcaaacagaattcgataccattctaaatttaaatgaccaatatggttatttgattaagaatagacataaagctttaattacttttcaaaaaaaaatatccaaaatgaacaattctcaaattggtaattactataaatggttaaaggaaaatagtacagaaaaaaaattagagtatcttggaatcattctatggtatctgtcaaaaaaatttgaataa

SEQ ID NO: 88114 - DNA, 1242 bp, Fusobacterium necrophorum BFTR-1; identical to SEQ ID NO: 88108

SEQ ID NO: 88115 - DNA, 570 bp, Fusobacterium necrophorum BFTR-1; identical to SEQ ID NO: 88109

SEQ ID NO: 88116 - DNA, 1308 bp, Fusobacterium necrophorum DAB
atgcaaataaaacagttacaacttgaaaattttcgttgttatgaaaaaataaatatatcattacacccaaagtacaccgtgcttattggtatcaatggagctggaaaaacaacaatattagattccttatctattgcattaggaggatatatttctaattttgatgggatgggaagttatggtatcaataaagaagattctcattataaaatgtacaaaataggaagtactattgaaaaagaacatatttttcctgtatctatttctgcaacagctgatataaataatagagaatatttttggaaaagaagtttaaatggagaaaaaggaagaacaacaacaacagatacaaaagaaatcatgtcttatgctcaatctctgatagaagaggtaaaatcaggaaaatctcaaaagattcttcctatgattgcctattatggtactggaagactctggatgcaaaaaagagaaaaacattctccaattgataaacagatattttctagactgaaagggtatactgactgcttggactctgcttccaatgaaaaactaatgctaaaatggtttgagagaatgacatatctagaattacaagaagatactaaaattcctgaattatctgctgtaaaacaagctcttagtgaaagttataaacgaatggatgatagtatccaagatgttcactttcactttaaagtaaaaagtaatgaattagaggttactattgaacgaaaaaataaaacagtcgaaagcttacctcttagatactttagtgatggaattaaaagtacttttagcatgattgcagatatagcataccgaatggctgtcttaaacccacaattgttagacaacattctcttagaaacatatggagttgtcctaatcgatgaagtggacatgcaccttcatccaaaatggcagactaaaattattgatgttttatgttctacatttccaaacattcaattcattttcacaacacattctccaagtgtgctagcgaatatcccaaatgaacatattttagtattagataaccttcaaatcaccaaattatctgaaaaaacatatggaagaaatattgacaatattttccgtgaaattatgcaagttgaaataagacctgaaaaaattcgtactctattaaagaactttgataccgctttagataatggacaaatagaacaagcaaaacaacttctttatgagttggaaaatactttaggaaaagatgattctgacgtggtagaagctagaatgtctattaacttggaagaaacttttcatcaagtagaaaaatag

SEQ ID NO: 88117 - DNA, 621 bp, Fusobacterium necrophorum DAB; identical to SEQ ID NO: 88113

SEQ ID NO: 88118 - DNA, 1242 bp, Fusobacterium necrophorum DAB
atgaagataaaaaaaatagaaataaaaaaacttaaaggaatcaaaaatctttctctttcttttgaaaatgaaggaaaacctttggatattattgtattagccggttcgaatggaacaggaaaaacaacgattttagaagttataaaaaatatttttgttggagattactcagattatgggaatgaaaatttcccagtaagaatggaaatattctttgagagtttagaagaggtagctatttctaaatccaaaatgtcttctaaggaaaccaatataaaacaatggaaaatacttaatgctttcagaaactattcgtcactaaaagaggagttagagcaagaattttttgactatcaattagcaaagaatctgaagattttacctaagataatttatttgcctaccagaacaaactttcaaaatgtaaatacaaaaacgactgcattaaaagctagcaatcattttgtcaatattgtagataatgaaatatttaaagacattccttcttatattgcgactagagtttactatgttgcaaatacacaagagaatttaactttaaaagaggctaaggaaaaagtagcagaggaaattaatagtgtatttaaaattttagatttggatattaaatttataggtttgtctaaagatgaagaaagcaatcctattttttcaaattctgctggggaagagtttgatattaacgaactttcttctggagaaaaacaactttttttaaggactctatccatacagatgttaaatcctaaaaattcgattattttaatagatgagccggaagtatctttacatccggaatggcagcaaaaaattatagaagtatatagaaaaattggaagtaacaatcaaatcattgttgccacacattctccacatattttaggaagtgtcagaaaggagaatatatttgttctagtaaaagatacagaagggaatatcacagtcaaaacgggagaagaactgtatacttcctatggacaacctactgataaaatacttgaaggtatcatgaatttatcttctgccagagttcctgaggttgcgagtaaattagaaaatctcaggcaacttgtagataacaataaatataatactgaagaatttaaggagaaatccgaagagcttcacgaaatccttggagaaaaggatattgatttaatgctcattgacatggatgtggaattaaaacaaaaggagaatttaaatgctcaaagtgaataa

SEQ ID NO: 88119 - DNA, 570 bp, Fusobacterium necrophorum DAB
atgctcaaagtgaataaaagaaaagagccactagaatttaaggagtataaaaaaaagaaaaaacctataaattgggagggatatgacaataaaataaaagaaaatctaaaaaaatctctgttaaaagagcaagaaggaaattgttgcccatactgtgaagtcaagattcatttagagagaagtcatatagaacacattaagccaaaagacaaatttccgaaatttctacatgagtatgataatatgattgcctgctgtgttagcaataaaaattgtggtgcgacaaaggcaaatcaatgggataatttatttataaatcctgttttggataatccggaggagtattttaaatatgatattaaaactgggagaatacttcctatagacgaagtaggatataaatttgacagagcagaaactacgataagatttctaaagttgaatgaaaaaaatttatgtgacaaaagaaaagtgtatatccttaaatttagagatactcaaaaagaatataggaaattttttcaagaattcccttctttaaaaagatatttgcaaaatgttctgacataa

SEQ ID NO: 88120 - DNA, 1242 bp, Fusobacterium necrophorum BFTR-2; identical to SEQ ID NO: 88108

SEQ ID NO: 88121 - DNA, 570 bp, Fusobacterium necrophorum BFTR-2
atgctcaaagtgaataaaagaaaagagccactagaatttaaggagtataaaaaaaagaaaaaacctataaattgggagggatatgacaataaaataaaagaaaatctaaaaaaatctctgttaaaagagcaagaaggaaattgttgcccatactgtgaagtcaagattcatttagagagaagtcatatagaacacattaagccaaaagacaaatttccgaaatttctacatgagtatgataatatgattgcctgctgtgttagcaataaaaattgtggtgcgacaaaggaaaatcaatgggataatttatttataaatcctgttttggataatccggaggagtattttaaatatgatattaaaactgggagaatacttcctatagacgaagtaggatataaatttgacagagcagaaactacgataagatttctaaatttgaatgaaaaaaatttatgtgacaaaagaaaagtgtatatccttaaatttagagatactcaaaaagaatataggaaattttttcaagaattcccttctttaaaaagatatttgcaaaatgttctgacataa

SEQ ID NO: 88122 - DNA, 1308 bp, Fusobacterium necrophorum BFTR-2; identical to SEQ ID NO: 88116

SEQ ID NO: 88123 - DNA, 621 bp, Fusobacterium necrophorum BFTR-2; identical to SEQ ID NO: 88113

SEQ ID NO: 88124 - DNA, 1242 bp, Fusobacterium necrophorum DJ-2; identical to SEQ ID NO: 88108

SEQ ID NO: 88125 - DNA, 570 bp, Fusobacterium necrophorum DJ-2; identical to SEQ ID NO: 88109

SEQ ID NO: 88126 - DNA, 1239 bp, Citrobacter freundii MGH 56
atgccgatagaacgattgcatgttaaaagtattaaacgattccctgaagttaacgttaaatttaatgaccgatttaactttattacaggtcccaatggttgcggtaagacatctattcttgcagccattgcgcactgtttaagctggaatggtgaatattctaggcaccaagatgatagtgagtactggatagatgtaaacgattatgatgaaagatatagattcggtttaggtccggggtttttacgagccaaaaaatatagaggcgaccagataaacatttatatcactccgccttctgaaggggggcgtcagtcattaaatgttattgatgttaaaactagatacaaactaccgcccttagttatcggtgcacagaggaaaatttcttataaaaccataaacggtgttactagagagaaagacagccaaggaagcatcaatgaatattgtagtaatgcgttaaattctctttacaataattcctcgcgggacataaaacaatggcttattaaccgatactttgttatagataaatcttgggcagaagaggaaaaagcaaactgggatcatttgattaaatcgttaccaatggttggaccatttaacagttcattccagtatattgaaacaggacgtgatctcgaacctatattttcaatttatggcaaagaatgcttccttgaggaactttcatcagggtttcaggccattttatacattattattgcgatatttgaatggatagaggcttgcttaccagtaggtgaaagagatgtaacaacagcgtgtggaactgtgctaatagatgagctggacaaccaccttcacccggaatggcagttgacagtaaggcaaggcattgcggcaatattccctaatatacaattcattgtgacaactcactctccccatctcctagcctcggcgaaagaaaatgaaatcattatgcttccaccatcatatcctgatgaaatatatgaatttcaaccttcggataaagcatattcaggttggagtaccgatttaattttgactgagctaatgggcgtgagaagtcttgacaataaagattatgaaatactggtgaaatattgctatgaaaacatcaaggagaataaccttgatgctctcaaagaaaactacgcccgtcttgaatctatcagtcatccgggtgatgcggtgttaatcatactaaagacacgcatagcaggtatggaagcgaaagcaaatgattaa

SEQ ID NO: 88127 - DNA, 759 bp, Citrobacter freundii MGH 56
atgattaaattgatgagaccacctgaaccacaggttttatgtgacaatcgtgcagcatggacccagagtattatggaactggtcgataaatacgatgagtacaagaagataccagcccctgaaaaagaggcagcattaaaacattatcgtcatgatgatatacgtaacgcactgaaagaaagttcttttcataaatgtgctttttgcgaaggcattcctgccgaaactggctttgctgaggttgaacactttcatccaaaatctatatatacgaataaagcctttgagtggacaaatctcctttatagttgtaaggcatgtaataacaaaaaacttaatcacgacacgcagcaacaaccaataataaatccttatgaccttgatccctgtgattgttttacgtatacagatataatgatagagcccaaagcagggggcaaccatgacattgcaaaaacaaccattgaagtgtgtggattgtcggataaaagacttttttcggcaagaggcgatattttagtaagctttcgcatttttgagtctgatctccgtgaggcaatggaagaatttggcctagcacgtacttcaccaaataagcagaaacgagcaggaaagataaacgatgcactacgcacgattgaggaattgtcgcagcctcgtgcgagactctcaaacttttgtgcctatctgctcgctaattctgaaatatatcaggaagccaagcgatgtctgcaggaatacactagcgaaaacttgtga

SEQ ID NO: 88128 - DNA, 1359 bp, Escherichia coli BIDMC 71; identical to SEQ ID NO: 87574

SEQ ID NO: 88129 - DNA, 660 bp, Escherichia coli BIDMC 71; identical to SEQ ID NO: 87575

SEQ ID NO: 88130 - DNA, 1215 bp, Escherichia coli UCI 57; identical to SEQ ID NO: 86448

SEQ ID NO: 88131 - DNA, 624 bp, Escherichia coli UCI 57; identical to SEQ ID NO: 86041

SEQ ID NO: 88132 - DNA, 1215 bp, Escherichia coli UCI 58; identical to SEQ ID NO: 86448

SEQ ID NO: 88133 - DNA, 624 bp, Escherichia coli UCI 58; identical to SEQ ID NO: 86041

SEQ ID NO: 88134 - DNA, 1329 bp, Escherichia coli UCI 65; identical to SEQ ID NO: 86954

SEQ ID NO: 88135 - DNA, 612 bp, Escherichia coli UCI 65; identical to SEQ ID NO: 86955

SEQ ID NO: 88136 - DNA, 1314 bp, Klebsiella pneumoniae BIDMC 69
atgacatttaggattttaaatattttacaagatggtacatggcttcctatggttcatgatattaatgactttgataatgtttttactgtcattacaggaaggaattcgagcggtaaaagtcgcttacttagtaaagctataaatgcttctattttcaaagaggaaaatttgcatgtcaaattttcaggatggtattccgataggccggagaaggcaattgcaatatcgacaggaaaatttgatagattcccaaccattacacgtgcagataaaaataataatttcattggtaattattcttatcatggagtcaaaaactcaggtaatccatttaatgaaatcattaaaagttttttattaacaatattggataaaaataatgaagagacaaatagagtaaaaagtttagactatctcctcaagtacttaggttttggatcagatattaaggtttcattatctttaaatattaacacggggttgatgaaagagcataggtatgaggaatttgtcaaagatatgttgaaaaggactttgagaaagaatgtagccgtatcagaaaaatatcaaacattatttcataaaaatatgtgggtttcttttgctcatgaagtaaggggtaagttaaatgaaattgatcttggtcatgatgctaagaaaataacgattcaactccattacaacgaacttaaatttgagaatttcgctaaattggatagtattcacttcttgctagattgggatttacttcaggtaagtgatatttccttcaatggattgacagagaaaaaaaggttaggtttgtcaacctttagttccggccagcaatgtatgttgcttatcatcttaggggtcttgagtagcattgaaaataactctcttatttgtatcgatgaacctgagattagcttacacccagagtggcagttagaatttattaaactcctccaagatgtgttttcatcatttagtggatgtcattttttaatagcaactcactccccgcagatagtatctggattaagggacaagaatggttatatactttctctagaagataagaacttagttcaacatgattcttttatgaagtcagcagattttcaattggcggaagtttttcagtcacctggtttcaaaaatgaatatcttattagaacactgttggtgattatctcaaaagtgtcaaaggatgatgttttaaattcttctgatttaaagaacttgaggcttgcaaaccgccttaaagagcatcttgatgagagagatcctgtaatgtatctcattaaacaagcgaatgctttggttggttaa

SEQ ID NO: 88137 - DNA, 615 bp, Klebsiella pneumoniae BIDMC 69
atgatcgaaagttatgatctgaaggatcataatatatggaatactactaaaggcgatatagttgaggttcgaaaaacaataagagaattctatttaaaagagcaagggtacaaatgtgcttactgtagaatggaaaaaaaagagtcgcatggttacacttgggatatcgaacacgtcttgccaaaagcatcatatccagaatatttgcttgaaccagaaaatttagcgattgcttgtcgagaatgtaataatcctaaagatgaccacgaaatactatctgatccaaaatttcgtacaaaaatttatcctaatgataaggaatgcttcaagattatccaccctcattttgataagtattctgataatatggaggttgtaatcttaaacggcaagaggatttatcttcctttaaattcaggcaaaggtaaatacacacttatatcatgtgatttattccgtttttcatataagtttgctgaatgggaatcttttgatgatgcagcaataataagttttagtgagttcttggataactgtccagcagatgctactcctgatgaaattaaacgtatgcttggacatataaagtttaacctgaaaaaccttgatttttaa

SEQ ID NO: 88138 - DNA, 1242 bp, Klebsiella pneumoniae BWH 46
atgatgtttgaaaaagaaattaatgctaggtattttctaggaagggttaaaaaagctcattataatacttcagttgtaattcttggtcaaaatggagaagggaaaagtaggctgctcgttgatataatagggtatgccaaagataacaactataccaatgtcatagctgtatctacgagcccctttgataaatttccgataaggaaaaagtttagcggtatagattacagctatgtcggtgtgaaaggaggtacgacaggtaactctatattgtctttgatcggttcggcttcattggggttattgaatcaaaataaatttaatggcatttatgtagaacgaatcctgtcttttttaggtgcttcttctgaagttgaatatgtattcaaagttaatcagaaaatatttcaaaagcaaaattactcagatgataaaaatggtccagatatccatcattatcatcataatggattttttggaaaagatttacatttttctgacaatgaactttataacattaataaagctatagacttattaacgtacttagttgatagcaataaaaacttcaaagttagattgaagattggtagtgaaggttacataaaaactaaagatgttttcattgataaccttaatagtaagcttttaacattacttgatcatgatctcataaagttaattgattttaggatagaaaaaaaagagtttggttggatgtcattgaggcttgcaagttcaggggagcaatgtattctattatcgatgctaggcattgccacaaatatcactgataactctttaattcttatagatgagcctgagatcagtctccatcctgagtggcaagagagatatatatcacttctgatgaggatttttgagagatataattcatgtctttttatcattgctactcattctccacaaatagtatcgaaacttgatgcctatagatcatatatttacactattaaaaatgatgaactagtaagtgcttctgagtatgtgaaaagatcttcagactttcaattagccaacctatttctagctcctggttataaaaatgaatatttaacaagagagctaataacattcctcacgtctccgcaagaatactatgcagataaaggttgtgcagaaataataaaaattatctctttgagagataatattgataaagatgatcctgtatttaagttgattcaattggctcgtaaagtaattgcggagatatcgtaa

SEQ ID NO: 88139 - DNA, 699 bp, Klebsiella pneumoniae BWH 46
atgcctctgaattgcattgtgtatgaaggtgaggatcttgaaacatatagagattataatgcgctgcctaacgataataaagatggaagaatatgggattcggaggagcgtaacatttgtagaattaaaaaatcaattaaagaccattatattattgctcaggattacacatgtccttattgtaaacaaaggattgaggttgaccataatggagcttgggatgccgaacatataatacctaaaagtagtcatccaagctttgtttttgagcctttaaatttatgtgtttcatgcaaggattgtaataatgaaaaaagggacaagactgtattagagaataataacaggagaagacttcctattagaagtgaagattacattattgtccatcctcattttgacgattatgatgagcatataaaagtaattgaggttgcgggttattatataccacgaacagataaaggtagaaaaacaatagaaaagtgtggtttattaagatttgcatataaatacgcaaactatggaggaacttcacaggaaaataaagaaaccattctaacattagccaattgtctactagatgctaatactccggctgatgaacatgcctttttaggtgtgatttcagatgcagtggagactggaaagaaactatcaaaaacagcatttctgcagcaatttggagtaagggaataa

SEQ ID NO: 88140 - DNA, 1722 bp, Klebsiella pneumoniae BWH 48; identical to SEQ ID NO: 87690

SEQ ID NO: 88141 - DNA, 810 bp, Klebsiella pneumoniae BWH 48; identical to SEQ ID NO: 87691

SEQ ID NO: 88142 - DNA, 1593 bp, Klebsiella pneumoniae BWH 48; identical to SEQ ID NO: 87692

SEQ ID NO: 88143 - DNA, 630 bp, Klebsiella pneumoniae BWH 48; identical to SEQ ID NO: 87693

SEQ ID NO: 88144 - DNA, 1593 bp, Klebsiella pneumoniae MGH 60
atgaagcctatagaaaacaataaattcattaaacttgcctctaaatcaagaaaaggggatattgactcctcctacgagttatatacactttatcagaccggaaaatttttagagcaagatattcataaagcacaggaatatcttgatttggcacttaaacaatttagccaacaaaaaataagattcacacaactgtctcttctgaattttaggattatagatcgccttaatctagatatgacaaaaagtcaaattcaagtacttgttggaaacaatggtgcgggaaaaacaactgtactggatgcaatttcttatagtctgagttggcttatacaacgcattgtacacaaaggtggaagagccagagacatagaaaaatcggatatcagtataggtaataatgatggttatagttctattatagccaagattggtctcacacataattataactcaacacttgagttatgtgaagttgaagaaggaagtattgtaaacaaaaagagttattattcatctttcactaggttaggtaatttgtataaactagcttgcgataaagatgaacgttttgaactgccacttctagcgtactatggagtgatgcgctctacagatatcaattcaaaagatgtatctgactttgatgaaacatcagccatagaaattagcaatcgttttgacggatataataatgctcttactgggaaagcagactttaaagctttctttcgttggtataaacgtcttgatgacgtagttaaacacgaagcaacttcagcatttcaaactgatcccaaaatactcgcatcactggaaacattagcattaacggattcaaagtctcgtaaactactagatgatcttatccttagtcttaaggaacgccaagagtacgaaggaagcagtagcgctaaaagaaaacaaacaatcataaataatgctgtttcgttatttatggaggattttagtaacctaaatgtagagttgaaaccaacactacatctttcaattgaaaaaaataataaaaaaataaatgttcttcaactatctcaaggtgaaaaatcacttttggccttagtccttgatatatgtagaagaatgatggtactcaacccattatcagaaaacccgctactcactgcaggtattattcttattgatgaggtggatttgcatctacacccggaatggcaacgtaatatcttgaaaaacttcagtagagttttcccaaattgtcaattcattgtttcgactcattcacctcaagtgataagcgaagtaaaacatcatcaaatttgtatactgggtaaagatagcaatggaaactttaatgcatccaaacctgaacaatcatatggactgacatcaaatgaagttcttaatgaaataatgaacactggctttcaaaaactagatcgttcacctgaagtacagaaagaaattgatgatgtattcatgcttatagaggaaggtaaaatagaagaagcgaaaaataaaattaataaaatagaattagacctcaatggagaaatacctgaattagttagtgctaaatttgacatcgaacttcagggatgggacaaagaatga

SEQ ID NO: 88145 - DNA, 630 bp, Klebsiella pneumoniae MGH 60; identical to SEQ ID NO: 87693

SEQ ID NO: 88146 - DNA, 1533 bp, Klebsiella pneumoniae MGH 70
atgagtgagagaataattgttcggaaattaattcttgattatgttgcaatagatatagcaattgaacctttttcagaacaaggagaaaattattactcgataattacggggcgtaatggttctgggaaaagcagagttttggaggccatttcattatgcattctatttgtagagttattatctgttgagcagcgagaaaatataattggcaaaaatattcattttccacttggttttatttcaccacgaatcccctttgaatacattttactagagtaccatgttggctcgacattaaataagattgagattaaggataataccattacatccttctcaattatttataatgaaaatgctaatcctaaattgatatgtttgtcgaacagtttttttaatcgatttcttgaaggttatggttcttctcttacgtttccttcacataatcaagataaatataaaaatctttcaattaataagtatttggaaaaatcaaagtatttttcagattccgatttcgttagtgctgttttgtcgcgtgaaataataaaatcgtttttcatggggaaagatgtttatgctcgaacaatggcttttttacaaaactttggagtcgttggcgatatatttttaagtttaaaggtcgaatggaggatttgtggcgcaaatctatggggggttactgatatcgaaaagttaagacaaagtgttaaaagaatattgggttgtggacctcaaatagaaactgacgaacatctagtcagtagtttatctgaaaagttaggaaatcttttagagtatcttaacgctggaaatgaaccgccgtgtagtgagcttgaggatgatcatttttttgtgcaagggccatctattgctgattttatttttaatgatgatactactatacagactgaactatgtaaggatgttttatatttagctgagcatggaatattgcttttaaaagattttagattcaatagaaatggacttgaaatggatttacataaaatgagttccggggaaataaatgtttttttgatgcttataaaaattaactcagagatagagaataattcaataataatgattgatgagcctgaaataagtttgcatcctgcatggcagaataagattctgccctcaatagaaagttgcttctctcaatataatggttgtcatttcattatcgcaacccactcccctcaagtagttgcaagtatcccacgtaaaaattcatgcgttattatgttggataatactccaaatacaaccccaggggagctggtgcatggtaaatcatctgattttcagttattccatacattaaattacacaggcgattcgaatgagtatttaataaaaagtttattaacaataatagcaaaaatcgatgcatcaacaaaattaaccaatgaagatcttatctttattgaaaaggctaagaaaatgtctgatgatattgatgatactgatatcgcgaaatatttactccttcaggcgcttgcactacttaacgtcgtaaggggatga

SEQ ID NO: 88147 - DNA, 693 bp, Klebsiella pneumoniae MGH 70
atgatctttttaactcctgttgtattttctgaagaatcagagaagtttataggaaaatatgatggtgtaagtaacgatatatggaaaggcaaagggaaggaaataacaaaaatacgagaggaacttagaaaacactatatacctcaacaggcaggttgttgttcatactgtagaatcgacaatcctcagagtcatggcttgacctgggatgtagaacacattattccgcaaggggattttccacaattcttatttgaaccacgcaatttatctttatcttgtaaagattgtaatggaccaaaaaatagcaagcctgtactcgatacatcaaaaatagatgtatcggtaaactacccaagtgatggcgtttttttttatataattcaccctcactttgataattatgaagagcatattaaaattgaaaagctaggtaagaggattatttatcacccatcggaagggaagggtatgtacacgtatgagatttgtaatctgtcaaggtttgcgacctacgaagctcacaacataactgatgctaatgtagcaagttcggttatgaaattgctcttggaattaaatgaaacgggaaaaataaatatacctaaaaaatatgtgcaaattgtcggagatcatattacatcgcactctatagccattgatgtgaataccgcatttaaaaaacaagagtga

SEQ ID NO: 88148 - DNA, 1233 bp, Klebsiella pneumoniae MGH 80
atgataaatataatgagcagaattagccagttgactgatcaagataaaagaaacattgaattgaatgggaagaatttaattatagttggtaataatggctctggtaaaactctctttcttagagctttaaatgagtgtttaagtgagatatttaggaatcaatatgttactacaataggacagttgaaaaagaccttgaacgaacaagtttctgtagcgaaacagttgcaggttgatactgacgcatataataatgtcatgaattcagttagtatacttaatgaattcctcgaaaaaaagaaaaaatttgacgttgtgtttgcttcgacaactgatattgcaaaccacctaagaaaaaaacaatttattcttaggttttttaaagcaaatagggaatttgtcagttctgataagaatcatctaacgagtgttgaaagcctgtataaagtttttaactcttcggcggcaaatgaacaaactacaagtagttatttcgaatcgtatttagtatcaatgtcaaattacgcattgcttgaaaaaggtgccggtgaaattgatgagtacaacagggtgtattttattcttaattcgattcaaacagatttgtgtgatttatttgaagataatgaccttatattgcattttaatagaaaaaaactcaggatggagatcattcaaaaaaataagacgccatttgggttagatgagttaccatcgggttttgcgtcaattttatctgtatatgctgagttgattatgttatcagaattaagtaagcagggtaaaaatgatgtgacgggtattgttttaatagatgagatagatgctcaccttcatgtaacgttacagaagaaagtatttaatttctttgtaaatagttttccgaatatacagtttgtaatttcaactcattcaccttttgttgtccagtccgtatctgatgctattatttataatttaagtaataatgaacaaatggaggacttgtcaatctattcgtacagttcaattgtcaaaggattacttggcgaagcaacaaactcggatgacttagaaagtttgcttgcagaagttggaatattgtcaaaaaataacgattttggtaatagatttgatgaggtgatggagattttggaatctaaagtaaatgtgttagacccaagagctaaagctatttatttgggggctaggtctcgtatggtggattggcgagagggggaagagaatgtttaa

SEQ ID NO: 88149 - DNA, 675 bp, Klebsiella pneumoniae MGH 80
atgtttaatgtggtccgcccattacaagctccagaaagtttggcatctcaaagaacgtataaaagtgaagatgttattgtcgctttaagagctatgttttataataagtgttatctatgtgaacaagattctttagctgatcctgaagttgaacacttcattcctcatgaaaatgatccatcacttaaattcggctggggtaatttatattatgcttgtagacgctgcaatggtattaaaagtaatacacatgtgaacttgctggattgtacattatctaataacaatgtttctgatgatattatacattttgcaggcaatgcagctgtaggcgaaattctgattaaggcgagtaatgataatccatcccccgaggttatgaatacagtcaatttgcttaatgattgttttaatttagataatacaagccttagaagagtatcgaaagaaagtttaatggaaaagttacttattgagttaggtcgctatattccccttcgagatgttttggtaactagattaagctctcaggatgatattcagttagctaaatatagtttggctataatgtgtgctgataactaccctttttcaatattttggaagtggcatattttaaaagatgtgcagcttaaacaacggtttccaaatttgagagtggaacttggtttttga

SEQ ID NO: 88150 - DNA, 1242 bp, Klebsiella pneumoniae UCI 62; identical to SEQ ID NO: 88138

SEQ ID NO: 88151 - DNA, 699 bp, Klebsiella pneumoniae UCI 62; identical to SEQ ID NO: 88139

SEQ ID NO: 88152 - DNA, 1419 bp, Photobacterium galatheae
atgtttttgggtattgttatggcttatattgataacgtcaaatttgataaccaccatatctttggaacgtctgaaataaatttatgtagtattacagatgatgataaaaataattactatagtgtagtaattggggaaaacggcactggaaaaagcgagcttttaaaatctctttcagaacatattaactatagaataagggataatatttacaattccaaatctaagtataacgataacactgatgtcaattttaaacttaataaagttcctgagtacttagtggtttctgcatcgaacctaaatgacaaatttcctaacattagtcaaagaaacaaatcttaccaccctaactacagatatttaggaataagatctacaacaaacaacgcatttataggaaaatacaaacgtgagttcttagaacactttattgacattctatctaatgataaaaaaatagaaagcctaagcaatgcactcctatctataggacttcctaaaaggttccggttcacttttaaaaagggaagaggaatgtcaaaagtttttgaactaattgataattcaagcagtatagataaatttaaaaatgagtttgaaaaactattaaacttgagcaaatcttctaataaagactataaacttgataaagaaagctatttttataaatttagcaaatccacgcacattcaaattgaatcatacgagttcataaagagtagcaatcaggatataacaagtattgtttatgaaattgatttagataaaccagaaataaatgaacgatttttaacaaattttaatgttctacagctaatggtagaaacagggctaatatctataaaagacttctatttcgtccatgaggatgagtattcattcgcatcttcaagttctggtcaatttaatattataacatctttcattggcatcatatctaatatgagtgataactcgatattacttattgatgaacctgaagtcagccttcacgccagttggcaaataaaatactttgacatattaaaacttctcttaaagccattcaataattgtcacacaataatatgtacacactcccacttccttgtatcatcaatgaagaaagaagaatcaaccctgattcatataaaaaaagacaaagaaggtaaaatcaagtttgataatattaaatctgatgtctggggatggtctccagaaaatatactatacaatgtctttggtatttcttcgactcgcaacgcttactttgaacaagaccttagaaaaataatatccgtaatctctcaagaaagtggaaatcccgatgaaataatagagccattagaaagaattaagagattcaatattactgatgaggatccactaagtctcgttattactcgcgcagagaattttatcaaagaggtactttaa

SEQ ID NO: 88153 - DNA, 642 bp, Photobacterium galatheae
atgtactcttataagaatataccctcttgcgtaaaatacactttagaagagtggtatctagcgaaagctcttaatcaaaaaaattatgatacttgggatgataaacttccaggcatgcctcggggggctagagctgatagagacagattgaaagataaaataaaaaaagatctgaaaaaaatacagcgaggctactgcgcttactgtgggattctctttatggtaagaggtggagagtctcatattcaaagagaacatatactggctaaaaacactgataggtatagaaaattcacttttgaacctctaaacttagttcttgcatgcagtagatgcaatggttttgatcttaaaggaagcaaagattacgtcacatattacaatgaaatatattcattaattgagacttcaattgttcatccccacctagataatattgaagatcatcttacggctaacgatagtgtattagtagagcccgtaaatagttcccctaagggaataaaaacaatatcagaatttaaacttaacgaagaagctatgctttatttaagagggacatatataaaggctactaaaaatccagtatccgatgaagatgaatcgctgatagatgaaatcatgagtaaaaactatgcataa

SEQ ID NO: 88154 - DNA, 1797 bp, Vibrio fortis
atgcaattaaaaaaattaaagattcaagcatttcgtaacctgcgtaatcttgaagtgaattttgccagcgagttggagccggtttcgagcagacccgccgttccagcaagcaatacacctgcaaaacgcattcgcagtcatgcgctgattggccagaatggcaccggcaaatccaatttaatcgaagcactgattaccctgtttcgcgatgtcgatctcgaccgagaagcgtcttttgattacacattggaatacgaaattcgtggtcacatagtgcgtattcaggcagatactgccaaacagaagcgcccttacgtttgggtagatggtgatcgtgttagccaagagtatctgattaaaaatgacccgccggacaaagtcccgcaagataagcgtcgcggtccacggctgttaccaacacatatatttgcctattactctggccgcaatgagcgcatcgaacagttatttcaggagcaccagcgccgatttaacaaacgtcaggaaatcaccaccgacgaagttttgtctgaagacctgctggacaatttcaccgcctccgatgctgatattcgcgcaatagaagacgccaaacgccgccgcgagtccagattaaaacaagtaggcgatgaccgtctgcgccgcctgttttattgtcgtggcggtcacagccaattggtgttgcttgcctgtttactctcggatgacccggtatttaaaaaggtactaaacaacctgcatatcgaatctttagagtcagcgctatttgtactgaaagaaccccaccgcctgcgtgaaaaacgccgcagcggtaagttcgatgaaatggaaatcaacgaaggcgacccgcgtttttggtatgcccgtggcaatgtagtcagcgagtttctagataaactctggcaagtggcctgggcgcccattgagcaggaagtcagtaaacaaattgattttcgtggccgcacagaaaaacaaaagcagctgtatttgtatgtacccaacaaagaaaagcttagagagctcggtgaattggtcggcggccccgacagcttcttccgttacgccgaaggtgcttacattggcgatttgattgatgaagtaagaataaccgtaaagaaacgcgatgaacacggtggtaaagtgagttttactcagctatccgaaggtgagctacaaatgctaactgttcttgggctcatgcgaataaccagcgaagatcattgcctttttcttcttgatgaaccagacactcacctaaatccaatttggaaacttcgctattttgatgacatcgaaaacgtccttaagcctcgtagtgaaaatgctattcaaggcgaatcacagatcctgattactactcatgatccaatgatggtggggtcactcaaaaaggaacaagtccatatcattcgcaaaaatggcttgaaaactcttgttgaacaaccaaatgaacatcctcaagggatgggcgtcacaggtttgcttaagagtgaattatttggcttgtcttcgaccttagatagtgaaactgaacgtaggttatttaaacgcaatgctctttttgctatagataataaaacagtagaacaagaagctgaattaaaaaggttaagtgatgaattagctgatctaggttttgcgacgtcagatttcaaagaccccttttatgcaatgtttgtaagaaagatggctaaacatactaaatttcataaacctgacttgtcggctgaagagcttgcagaacaagatgctattgctgatgatattatcaacaaaatattaagtgaggctgattaa

SEQ ID NO: 88155 - DNA, 870 bp, Vibrio fortis
atgcgcttcattaactttacaggtaagactcctcataacacaccagctgaccctgaatttccggactggacaccatggactgaagttaaatggcaagaatggttaaatcagtcaaatgatcacctagaagctattgaggcgttacatgaaagcggtgatatagctgcgcgcaataaatacatcgacgaccattcatcacactggggtaaattgaaactatggctaaaagttttatccaaaggtaagtgttggttttcagaagtaaaggagctctactcacactacgatgtggagcattttcgcccgaaaaaggaagctaaaagtattgataaaacggtacgcgatggctattggtggctagcatttgattacactaactataggttatgtggaaatgtgggtaatcggaagaaaggaggttggtttccgttaaaagatggttctctatactcgacatatgaaaatcaacgtgaagaatctgaagatgctttcctattggatccgactatccagtatgacactgacctcattgctttcgatgaaactgggaacgctatccctgttcctacagcttcagactgggaaaagttacgagttgaacaaacaatcgttcgtctaaagctcaatgagcacgcagatttagctgaagcaagaagaaaggtttggcaaaaagtttgtttcgagattgaacaatatcaaaaatttaagtctagatgtcgtcaaggggggaacccaggggcgctacagaaagttgaaacgcactgtgagaacatccgaaaactaacttctcatgactctgaattatcatccgttgctaaatggtgtgttcttttcagagaggatgcgcagctagcgcgtttagttgcttaa

SEQ ID NO: 88156 - DNA, 2352 bp, Flavobacterium seoulense
atgccaactattttaaataagcaaggattaacttcattaccgaaaatacctttagcagaggttcatctacacgctgagtacaaccaattatctgaaataccggactcgataggttccttagttaatttaaaccgactatatttaagaaacaataaaattaaaattttatcaaaagaaattggcaatttaaaaaagctacaattattgttattgggaaataatcaaattgataatttacctttagaaattggtaatttgacttcgctaacacagttgagaattgaaaataacaagttgagtgatttacctagtgaaataggactcttaactaatttgacccatttatttctagaaaacaaccaattaaattatcttcctgaagaaataaaaaaactgacaaaactagtacatctttcaattaacggtaataatttaaaattacctgaagattatgcccctaataatccaaaaaaaacaattgaatatattcttcaacatcaagataatttatcagcaaaaaactcattaataactgataaagcttattattttattaatgcaagtaaagaaaacattacagaaaactataaaaaattagttaaagatttttcaattttaaattctatagaatttattccgattatttctgaagaagaaattaataaagatacaaacattgtatttattatatgtccaattgatgctcacacagacacgagtcttttaaataaaatagcgaaacagtgtaaaaaaatgggaaaaagattcttcatttttattcaagatcaattcatcgaaactgattttaattcagccaaccttgataattggaatacattccagaaaacaaaggctttggtcaataaagatttctcaaatgaatttaacccattcagttcatatgaagaattaaataatttaacctttgaggcacttaaacaacacaaaccaaatattaaattagagaagttaacattagaaaacattgggcactttgacaatttggagataacatttgatgatgaaataacctgcctaattggagaaaatggaagtggaaaaagcacaatcctaaaatcaattgctttagctattattggtggaaaccataaaaatatccaagaatcagctaaacgcagttttttaaaaatcctaggttttgataacgataaatttacatatcaaaatggtcttattaaactcgattatactatagatggaaaagaaaattctaacgagataattttagttccaaatgataatggtaatgatattaatttttcagctactaatgaatctaaaattatatataacaattacaacttaaaatcacttgtaattggttttccacaagaaagaggaattgataataatagtaattcaaattttattcaaagtaaaaacactcagcctcatatcaatgatttaattcctttaattaatggaagtgatgaatttaggttaaggtctttttctgattggattgcaaacctatattttgattcaataaaaaagaacgaaggcggtgattcttcctattcagagagagtattaatcgagacagtattttcagttatttcaaatattactaaaaaagaaattaaattcaagacagttaccaaagttgcacctcctgatgtttgggtatttactaatgacgcaccaaatggtattcctctaagcttgattagtcaaggatttagaatgatgattggttggattggtcatcttatgcaaagatttgtcgatacttttcctctttcaaacccaatctctgcttttcaagaaaatgcaattgtaataatagatgaagtagatatctctatgcatccattatggcaagtatcttttatcgaaatattaagggaaatttttccaaaaacacaatttatatgctcaacacatgatccattaattattggtggcttattaaaatcacaagttcgaatattcaatgaaacagatggaaatataaatgtttttgaaccagatattgatcctaaagggttaggtgttgccggtatccttactagtgaattctttggcttaccttctattctagataaaaaaactttagaagacttacaggagaaacgaagattacaaattttattcaaagacgataaacttgatgatgatcaaaaaaagaaactgattgtactggaagacaaacttgaaaaatatggttttacgaaatatcagagagatcctttataccagaaatttatttttgcttttatgcaaagagaagaactgaaaaagaatccaataaatagcgtagaaaagggaattcaggataaaataatggtagatattttagatgaaatactaaacgaagagagaaaatcatga

SEQ ID NO: 88157 - DNA, 819 bp, Flavobacterium seoulense
atgaggtatattgacctaacaaaacttgaattaccggctgattgggaaaataaagctaaagctttaaataataaattattagcagctaaagatgacacagagagggcagaaattttaaaaaaaaatcccatttggcaagaattatttattcctttacaaaaactttccataggaaaatgttggtattcggaagcaaaagatataatgtcagatagagatattgatcatttcagacctaaaaatgaagcaaaaaatcttgacaatatgactagagatggttattggtggttagcatatgattgggaaaattatagattttcatcaacttatagtaatcaaaaaagatacgataaatttgatacaaacaaagaagtaggtggcaaatcttcatatttcccccttttcccaaatagttatgttgcattaacaaaacgaaggctaactgatgaagatataatgcttttagatccaattgacgaagatgatccttgtcttttaacttttgatagttttggtgaagctattcctaatacagtttcatctaaagacattgaaagagtaaaagtttcaataagattatatcatttagatcatactccgttaaaggaagaaagacaaaaggtttgggacaagtgtcaacgatttataaatgaaattcaagaaatcaaccttttaccagacatgagtatttcagataaatcaagagtgaaatttttaaaacaacaaattaaaaatatgactaaaattgacgaagaactttcatccgtagcaatcgcttgtattgagcagaataagctttcaagaatgttaagaatataa

SEQ ID NO: 88158 - DNA, 738 bp, Kitasatospora cheerisanensis KCTC 2395
gtggggcgacggctgggtggaggcgtcgcccgcgccgcgctggcgggtcggggagggcggggcgagccgcgggccaggttcgtggagcacgccgagggcccgcacgtcccgctgcacgccgagctggtggccgaggtgctgccgtccggctggcgggtcggcgacgcccggcgccagtacgtcacgaacggcacgctggagctgcctctcgacgaactcggcgacggcactgccgcgttggcccggctggtgagcgctctcgcgcaggacccgcacccgggcccggtgctgatcgacgacgtggaccgccacctgcacccggtctggcagcagcgcatcggcctctggctgaccgagcacttcccgcacacccagttcctggtcgccacccacagcccgtacgtctgccaggccgccgacccgggcgcgctgatccgcctcccgggcccggacgaggccggccggccccaccggctggacgaggagttgcggcagcgggtgctgtacggctcgggggaggacaccgtgctgtcggagctgttcggcctgccgagcgcctactcgccgaccgccgaggccgaacggcggctgctggtaaggctggagcgcaagatgtacgcgggccgggccaccgacgcggagctcgccgagtaccgggagctgggggcgaagctcaacagctcgctgaccgcccgggtcgacgaggtcaccgcgcggctgctcggccggggcgagtga

SEQ ID NO: 88159 - DNA, 726 bp, Kitasatospora cheerisanensis KCTC 2395
gtgatcccgctccagcggcccgccctccaggcgcggctggccgccgaactcgaccgcgccaccgccgggatccgggcggccggccccagcaccgcgtccgggcgcgccgcctggcgcaaggccgtccgtccgaaggcccaactgcggctgctgctgcggcagatggcacccgggctggagcgctgcatgtactgcggggacaacctcggcaccgacatcgaccacttcgaaccgatcgcccaggccccgctgcggaccttcgactggcagaaccacctgctggcctgcgcgcactgcaacagcaaccgcaagcgcgaccgcttcccccgcgacccggccaccggcgacggcctgctggtcgacccgtgccgcgaggacccggccgaccacctgcggctctacctggactccggcgcgtacgacccgctgaccgtccgcggcgaggccaccatcgaggtgttcggcctcaacgaccggcccgaactggtgcgcggccggcggctgatgttcgcggtggtcaaggcgctgctgctgacctggcgggccgccggccccgcggaggccgaggagtacgcggccgcgctgcgcgagatccaccacgccgacgtgctgcgcaccgtcctcggactgcgccgcagccgcccgctggccctcgccgtgctcggacccgaggtgctcgacgccctggaccaactcctcgccaccgaccggaggttcaccgcctga

SEQ ID NO: 88160 - DNA, 1401 bp, Hydrogenovibrio marinus
atgcatatagactccatttcattagaaaatttccgttgttttaaaagtctatcaatcgatttccatgaaacgttgactgtgttagtcgcgtcaaatggtgggggaaaaacaactcttttggatgcggctagaatttctatttggccttatgtgaaggcttttgatttgggcagccaagcaggtaagtctgcgactattcaaatagatgatgttaggcaggagttgaaggcagataaaaacatggaaacagttgtcccttcaaaaattatagccaaggggacgttgttgagtgaatctctagaatgggttcaatatagagaaaaaacaaagttgggcacaaacaccaagtctgatcgttcagcgaagctcataacagaaattggcaaggagttagagcaccttgtccgcaatgaagagggtcccacaactgtagatttgcctgttgtggtatatttgggaacgggtcgcttatggtatcaaggtcgatatacagcaaaagtagtagacaaaaagctgaataaagctgttttttcacgcttttggggatatcgagattgtttgactgctacatccagttataaacagttcgaagattggtatgcttgggtatttagaagctaccgtgaagtacagattgaacgtatggaaagtggagaagagtattctaactttataaatgaagctgattatatatcactaagaaatacgattttcgtcattcaagaagcggttaacaaaattacccaaaaaactacgggctggaaagaccttcaatatagttctcgtcatcaacagaaattggttatggttcatgataaatatggttcattaccattggatatgttgagtgacggaattcgcaatattgttgttctagtgtctgatattgcatttcgctgtataaagcttaaccctcatttaggtctcgacgctgcaacaaaatcatcgggtgtcgttcttattgatgaagtagatatgtttttgcatccccaatggcaacaaagaattcttggagggctgcaagaggcttttcccaatttgcagtttatcgtcactactcatagtccccaagtgctttcaaccattcctaaagagtgtataagggtattaggtgagtctgaaaatggttctgtagcggcggaaccaaatgcatactcttatggagaacccagcaatgatgttttgcaggcgattatgggggttgatccgattccacctgttgctgaaaaagaagccttagaaagattaactaatttagttgaccaaggaaggtatgaatctgatgaagctaggcagcttttaaatacactaacaatgaaacttcatcctactcatccacaattgcaaaaaatagagcggagcattaaccgtcaaaattttctagcaaaggataaggggtaa

SEQ ID NO: 88161 - DNA, 675 bp, Hydrogenovibrio marinus
atgaggtttatccacaaaacgggttcaggtgggtatcgattatcacaagcaaatatgacgcctcctgtaactgctgcattagctaaaagtcgctggaaatcttttggtgataaattaaggctaaacgttcgcttaacagatgaacaagaaggtttgtgtgcttattcagagattcggccagatttaaatagtttagattctcatattgagcatgttaaaccaaaaagtcaatttcctactcaaacatttgattataacaatcttgtaatgagtgcgctatctagtgacgatcttcataattctagttttggacaacaggataggtttggagggcatgcaaaatcgagtaaatatagtgcagcattatttatttcaccgctagatgttaattgttttaaatttttttcgtatctttcagatgggcgagttgttgccagcctatcattagacgatggtgaaacaagtcgagctaattacacaatcaatctattaaatctgaattgtccatatttagtgaatttaagaaaaaattggattgacgagttggatcaattgattgatgaacatattcaaaaaaactgggacttaagctcgcttgagaatatatatttattgccggtgagtaataagttacttcagtttttttcagcttcatctcaaagatttggtaagtag

SEQ ID NO: 88162 - DNA, 1362 bp, Hydrogenovibrio marinus
atgagaatagacagccttacaataaaaaatttcaaactgtttaaggatgaagagttttcatttaattctaaatttaatctagttattggtgagaatggtgctggaaaaacatcgcttttaagagcggtggcggttgctcttggtggctgggcaaatgcttatatcaaaagtgataaaaaccttcgaccaatcaaggacgatgaagttcgagaggttgtagttgataaccgctttgataaaagtaaagaagcaataattactgctataggccaagccaggataattgataggtataggaataataaaacttgtcatgccgagtggacgcgcaaatggaccgaggagtcggaaagaacctctacttacggtgatattaggtactcagggttttcaacttggtataacttgagattggacactcttggtcgagacattcttgattatatagaaaacgggaaagagtttgacttacctgttattgcgttttacgagtgtgatcggctttggctgcctaaaaatgagttgaatattgaagcctcagctaaggccaagtattcacggtttgatccgtatgtcgattgttttcatacagcggctgatcatcaagcaataggcgagtggctattgaagcatgaactagcctcattgaaacaaaaagaagagactcctgttttaaaatcaattcgaaaagctgcaacatatgctttagaggggtgttctgaccttaggtttgattttgaagctagtagagtaatggtggattttgaagatggaaatgtagttccttttgatcaactaagtgatggacaacgaactattctggggttgttttgtgatattgcacgtagagcggctattttaaaccctcaccttgaagaaaatgctagcgagagagcggagggagtagttctaattgatgaactagatcttcacttgcatcctaaatggcaacgacagattattgaagatctccgtggcctatttcctaaaattcagtttatttgtacaacgcactccccatttttaatccaatctttgagagacgaagctgagcttattgtgcttgatgggcagccgattagtgatttcgctaataaaggaatcgaagaaattgcgaaaagaatgggggttgataggcctgatacaagtgcacgctatgaagatatgaaggaggtagctaaaagcttccttgaaaatttgaatacactacagctggctcctgaagaaaagcaagctgaatataaaaagaagctggctgcacagattgccccttatgctgataatcctgcgtatcaagccattttagagcttcaatatgctaaaactattggagaagaaattgaggccagtcagacgaaataa

SEQ ID NO: 88163 - DNA, 762 bp, Hydrogenovibrio marinus
ttgaggccagtcagacgaaataactctccacaagcaacaaattttaatgactatgctgatgcgaaaccccatctgattggtcggatttctaaagggaaaaatgttagaggtcttcacttggcaagctattgtagctattgtgaaaggccaatacctacatctctagcagttgaacatattgaacctaaaaaagggccatttggaaaacctcaattagaaacagtctggaccaattttctattagcttgtgtcaattgcaactcgaccaaaggtgataagcaggtcatattttcggatctattttttcccgaccgagacaatactttttttgcatttgaatataaagctgatggaaccgttattcccaatccaagtttatcagctagacatcagataacagccaaaaaaacattagatttatgtggtcttcggaagaagaaatcacaaggtaaaaaaacagatattgcgctcgaaagagttggtcagcgaatgcaaatttgggggcaggccgaggactctttggtcgattaccgtaaagatccagcaaataatgcagtagttaatggtattgttaatttaatggtcgcaacaggtttttttagcgtttggatggctgtttttgatgatattcctgaaatgaaagtccgatttattcaagcgatttcaggtacggaagagtcaggatgttttgatatggctgatggatcggttatttctcctcaccctaatgctgataacctccaggatggtggaaagatctga

SEQ ID NO: 88164 - DNA, 1170 bp, Pseudomonas simiae
atgaagatcaagcagatcaaaattacctgtgtcggtggtatcgatgaccttgttttaacattcgatgatcacatgaatattataagcgggcctaacggaatcggaaaaacaaccatccttgagagcgtcgctcaggcatttgctggctatgaaagcaaccttttgaagcgaatggtaggctctgagttcgggagcgttaccactttcgtcgatcctggtaatggcgaaatcgaagagcgaacttatcaaatatcccaattcagtccaagaaaaaatgaaaatacaccccctgtcgaacactatataaaacagcttatttctttgaaagttgctcgaacatttacgtacgtagcactggactccgtttctcgggatgcggacagagacccttacaacacatcaaacagcaacaaatacggcgtaaatctgaccgaagttaaaagctggtttgttaatcgatatctttactcagctcatccgggcgccctttcagatgtacgaatgcacaatttcgaaaaagcgaagacatttttttcattactgaataaggattatcgattcagtaaagtagatgccggaactaacgaaataatggtaagtactcccgcaggagaaatttactatgagtatctctcttccggcttcaaatcgtgcctatctatattgttcgggatagttaaggaaatagaataccgctttgcagaatcaggcataagactggatgagtttgagggtgtgattctgatagatgagttggagcttcatcttcatcctgaatggcagacaaaaatctctacgatcctagcccaagcatttccaaatgcgcaattcataactaccactcatagtcctcatattatacaggcagcaatgccaaatcaggtcgtggctttacattacacaaacgggaagattgagagaaaatcgctcccatcgagtgagtatggctatcaagggtggacggtggaggaggttttaacggatgttatggggcttggtgatacccgtacagcggtataccaaaacgctatccaaagctttcagcgagccgtagatgaagataactatagagctgggactttagcgttcgaggaacttgagaagcttctgcatccagaaaacaatcttagaaagcttctgtcgtttcagcttggcgctatcaaggggtga

SEQ ID NO: 88165 - DNA, 744 bp, Pseudomonas simiae
ttgataaaattggagcgtcaacctaagcctgaatatttatctgcatcaactgtcacagagcttactgaaaaatttaaaagcgatggcagtagcgtatggaatcacccacagataaaagccccattactagcctcaagccacgaaaaatgcgcattttgcgagtgttctatatcagacgagagcaagtacatggaagttgagcacttcaagtacaaaaatttatacaaagatcatgttgcggattggaataacttacttccgtcctgtaaaaggtgcaatatttccaaaggaattcatgatgtgggcagcgatccgatagttaacccttatgatgttgatccaaggcatcatatttcctttaagctctaccagttcaaaggaaaagacaaagtggggaatacgactattgaagcgctggaccttaataattcagatcgattggtattcaagcgttttgaggttggagaacaggtttttaggtctgtacgggttgccgttgaaaggctggacgcgtacaaccagtccaaaacagcgataaggaagagcaagctactcaacatagtggaaaccattcttaacgagtgtcagcctaaagcaatttacgcagccactaccgcaacagtagctttaaatgatgaggatttcatgggggtcatatctcaactccaagcacttaatttatgggaagactatcttgagaccaaactatcggctgcacaaaatattgcatttcaacagccttag

SEQ ID NO: 88166 - DNA, 2286 bp, Rhizobium etli bv. mimosae str. IE4771
atgattcataccgatagagcgcaggtgataaaccccctcgatcctgcgacggcgcttggtaggcgcgcgcttgacgagatggaaaaattcgccgcggacatgcgcgccggtaggtttcaccagaagcgaccgatgttcaaaacgtataaggctaagcccgtcaccgatgcactggcgcagctcttccatggcaaatgcgcgtactgcgaatcgaagataagtgcggtagctcccatcgatgtcgaactatttcgtccgaaggcatctgtcgttgaagctccgtcacaccctgggtattggtggcttgccaattcctgggacaatcttcttgcggcctgcatcgactgcaatcgcctgcgccggttcgaaactggcgccgaaaagatcctgagtggcaaaggggaccggtttcctttgatcgatgaaaccgctcgatgccttatgcccgaagacgacttaagtcgcgagatgcctctgcttcttgatccaaccagggattttcccgaagaacacctggtctactcaaaggacgggattgtcatcagcgagtctgaacgaggcaatacgacaatcgcgatcctgggcctcaatcgtcgaggccttgtccaacagcgccatcaaacgctgctccatttccatgagcgcgaaaactacctcatcgaagctgtttcgggcgcctccgattccgacgcggctttatcgttgatcgagaaccggtgggaaactctggcgcgaatggcaagacctgacgcgccctattctgggatgatccgacaggcgctggagcggacgagagctcggctctctcgcgaaatcagccctgacggcggtgttgacttcgccggctctgcaccccgtgtaacgaaagagcgggaaagacgcgcccagcatgcttcgcgaagctacgcacaagccatgtccgactattctttggaggacgatgccggcatcgcaaaattcaagtcgcagagacgatttgtcgagcgtgtgacaattgagaacattaaggccatcaaaaatctagatctcaatttcgaggcgctaagccatggaccgtcaccatggctgatgttgctcggtgaaaatggcacaggcaagagcaccgtattgcagtcgattgcgcttgcgctttgcgatagtgaccaactcctctctctattaaaaaacgatcgtatagatcccgcctcgatggtccgttaccgttgcaagtccggccgggtcacggtcaagctcagcggctttcctaaggcccacgaacttatcgtctaccgagatcgcttcgagcttagaagcccgcaaggtgacgtggcggcgattaagatcaacaccgagacggtggagaaccctgtcaaggctcaggtcctgatcttgggctatggcgccacccggcttttgccgcgtcgcagatccagcagcgacgcaggggcagccttttctcgcatcgacaatcttttcgatcccttcgtcgcattgatcgacgccgaagcttggctgctgaagcgtgatcccaaggactttggtactaccgccatggtgctaaaagaccttctggcgcttgatgacgaggcagagtttgtcactgacgggcggactatcttcgtcaggagtggggatgccaaaacaccgcttcggaacctcagcgacggatatcagacagttgtcgccgccgctgtagatatcctctcggtcctctcgcgtatttgggagaagctcaccgaggcggaaggcattgtgctgatcgacgaaattgacgcgcatctccacccgcgatggcagatgcggatcgtcggcagcctgcgcaacgcaatgccaggggtccagttcataaccacgacgcatcagccgctatgcctgcgcggattgggcgcgggcgaggtggtggtgatgcaacgggatgaggaaggggtggtggaacccctcttggatttgccgtcgccggcggatttccgcgttgatcaattgctgacgtcaggcttcttcggtctgcgctcgaccgttgatcccgagacagagagattgttcgacacctactacgccctcttggcgcttgacgaccggacggctgaacaggaaagcgagctggagtctttgcaagccgagttggcaggcaggcgccaactcggtgacacgcagcgcgagagtatctactacgcagcgatcgacaaattgctggcaaaacaggccacgcctgcccggcttccacccgaaaccctacgcgaagaggcggtggaacagatcggagcgctgtggacacaaatgctttccaaagccgaggccggtgaatga

SEQ ID NO: 88167 - DNA, 978 bp, Rhizobium etli bv. mimosae str. IE4771
atgattcgtgtcgcacgtcctgcggctaatccgcaaattcccgtctatgtcgataagacctgcaccggcgctgacggaacgagcaagctcacgcgctatgaacacgagcgggaaaaggcaatcgtgttcttcacagacccgagcaactatttgggcgacaagaaattatgcaagaccaagttcgctttcctgacctacaagaattctaagcttctcgagcaccttgtttcggactttaacggcaaatgcgcctattgcgagagtgattttcgtgccgtcactcccagtgacgtcgagcactatcgtccaaaggccgccatcaccacaccgaccgcaaaactggctccgggctacttctggttggcgggagactattccaaccttctgaattcttgcccggactgcaatcggccacgaaagcacaaagtccccggtcagaccaagggcaccttgctcggtaaggggagccagtttccgttatcggacgagaccttaagggttcggtcccaccaggtggcgatagcgtcagaaaatggcgtgcggcttttgctcgatccttgtcatgacaatccggaggatcatctcgaattcgaggcgaatggcaatgttcgtgcacgcaagcacgagggcgtggagagcgctatgggcttacactcgatcgatgtttacgcactccgacgaatgcatttggtccagaagcgatgcggggtcttgcttgatctcgccgcagtattcggagaactcaatcatcacgtggagaatgataatctgctccgtgagcaggcgagttcacaggagttgatcgatcgcaacatgataaggatccagtgctgtatgtccaagctgatatcgatgttttcgaaaacgtcagagtacattgcggccaaacgcgactgggttcgtaaagccgacgcgaatggccagttcgtagcccttcgagccttcaaaatcgagccgctcgatctcatctctacctaa

SEQ ID NO: 88168 - DNA, 522 bp, Rhizobium etli bv. mimosae str. IE4771
atgcagatcatgagctcgctccgccgcgtgttcccgcaatcgacaatcatcgccacgacgcatgatcccctctgcattcgcgggatgcacgacggcgaggtcgtggtgctcagccggcttcggagtcaagatggtagcttcgccatgccgaattacgttcaggttcgggccgatcttcccaatgtcgaaaccatgacgatcgagcagttgctgacatcggaccttttttcgatgttcagcacggactcgcctgcagcggagcgaaagcttgccgaacttggaaccttgctttcgcgacgggaaggcggggatacgctcaccgatgaggagagcgaggtgttacagggcctcgagaatgaggtaacccaagcgttgcctttgggaactacgcaggcacaacggctggtccttggcgccgtcgccgaatttctcgacaaacgtcgcggagcctctgtcgagcagttggcaaagttggaaggtgacacaagaaaacacattctagacgcattggagggaatctga

SEQ ID NO: 88169 - DNA, 987 bp, Rhizobium etli bv. mimosae str. IE4771
atgcgtgccgtgaagcgaggatcgaaggctgcgcccaccgtgttggcccagcgtggcaaggacaagctgacggagcttgagcgggcgcgcgattatatggcaatggttctgccgccggatacggagcgcatacccttcaaattccgggcctacaaaaaggaagaggtcaaacgccggctcgaagaactctttcatggcaaatgtgcctattgcgagtccttttacgccgggcaggcgccagtcgatgtcgaacactaccggccgaaagggtcggttgagggagaggcctcgcacggtggctactggtggctgggcatggaatggacaaaccttctgccgagttgcatcgattgcaaccggcggcgaaagcaaaagacgccaacacgggttggcgatgtcgctgttcttcacaagacgatgtcgaccggcaagaaagactgcttcccgatcgccggcacgagggcagccaacgaggctgcgaaccttacgctcgaagatcccctgttgcttgacccgacgagggacgatccggagcaacatctacactactggatcaaggatgggcacggctcgggcctcatcctgccgaaagcacttggggcgcagggacaagatctcgcggctgttgatgcggatgttgccgccctcggggcgaaggcgacagcgctcggcctgagtgtcaaaggcgcggtgtcggtccaggtatacggtctcaatcgcttgcgcatggtccaggagcggacagcattgctaaatcggttgcgtttcttcgagtatctggtcgtggagatcggtaccgtcttgcagaggctctcgaaggaccacttggaagggattgaagaggttaaggacgcgaccaagcgtcttgcccacctacagtcaagactcctggatgagatggtcgctctcgcatcgccgaaggcgcccttttcggcctttgcagtcgcctacattagggattttaaacagcgcctccaactcaattag

SEQ ID NO: 88170 - DNA, 1647 bp, Serratia liquefaciens FK01
atgactaaacaagttgaaagaagagccaaaggaggaaatttgctttctgcatttgagctttatcagctttattctaaaagcgatacaccggatggaaaggaaaaatctaaggagtggttagagtattgctggagttacttgcaagggggaacagtagacgaaaaaaatatatatcatcatgaaaataactttcatctccgctctctatcattgacagacttccgtcgttttgcattgctaaccgtgaattttgaagacgatctgactgtaattattggtaacaatggtcaaggaaagaccagtattctcacggcaatcgcaaaaacgttaagctggtttagcgccaatattttaaaagaggacggcagtggccaacgtttaagtgaaacgacggatataagaaatagatctgaaggaaggtataccgatgttaatagcaatttttattttgggaaaggtctgaaaaacatatcagtcagactatccagatcggcagcgggaacattgacgcgacgagatagcattgttaaaccagccaaagatatctcagatatatggcgggccgtaaatgcgtataaaacggtgaacttacccatttttgcattttattccgtcgagcgctcttatcctttcactaagctagcaagagatggtggagaactaagggaagaacgtttcgatgcatataccaacgccttaactggagctgggcgcttcgatcactttatagagtggtttatcacgctgcataaacggactgctaatgatacgtctacctcaattgacctattgcgtcagcaagtccacgagctacaagtatcggttgataatggtttgttatcagtaaaaccgttacttgaacagaccaagatacagcttggtgaagcaatctataaagaacaaaataacaagaaaaataaggcactatcagagcttcagcaaaaaaatatgattgtgcatgctattagtacagtggtgccaagtgttagcgatatttgggttgaaacatcttctggtgttgatgtaataaaagtgatcaatgatggtcagcaggttactgtcgaacagctttctgatgggcagcgtgttttcctagggttagtggcggatcttgcacggcgtatggtgatgctcaatccactgatgggcaacccactcgaagggagaggcattatattgattgatgaaattgaacttcatcttcatcccaaatggcagcaggatgttattgaaaatctgcggaggatctttcctaatgtccaacaaatcataacgacacacagccctatcgtactttcaaccgttgataaaagatgtgtaaggcagttcagaggtgatgagactgagatcgtgcttgactcaccaatgtttcaaactaaaggtgttattaattctgatattcttgaacaggttatgagcgtgtttgccgctccgcctcatgttgccgagtctcattgggtcggggattttgaggctatcttgggtaaggagatttatgcaaataatcctgaagctaaagagcaatataaaaagataagcgaacactttggcccagatagttttgagctgaaacgatgcgatagccttatacggatccaaacaatgaaattaaaggtacttacaaggaaacggggtgaggacaggtaa

SEQ ID NO: 88171 - DNA, 645 bp, Serratia liquefaciens FK01
atgaaaaaattaaccaggcctgaaactccggaatgcttaaatcaacttattgctggccgtgataattggcggttggcaaataaaaatgagctctggcatgctttgaatgagatgcagcatggcttttgtgcctattgtgaatgccgtttaaatcgtaaacacattgaacatttcagaacacgtaatgggtacgttaatttaacgtttaactggactaatctgttcggttcttgtggcgatacttcgcaaaaaggtggctgggcgcgctgcggaatttataaagataatggtgccggtggttataaccctgaaaatttaattaaaccggatgaggaagatccgtctgcctttcttcatttctttacgacaggggcggttcgtccccgcgttggccttactgctgatgagcactttaaagccacagagactcttcgtgtttttaatctaaatggcgatccggttttgtttggcagtaggcggcaggcaattaatgctgaacttcaggaaattgaagatttttataaactggaaggccaattatcagcagaagattgggatgcttttttacaggacgctttgtcaagagtgaatattcttgaattcagtaccgccctcacccatgcctggaattataataaaaaataa

SEQ ID NO: 88172 - DNA, 1227 bp, Parabacteroides distasonis str. 3776 Po2 i
ttgcttgtaggtgataacgctaccgggaagacatccgtgttgcgagcttgtaagtttgtgttgagcgcattcttcagcgggtttagcgatgataataccaaatgggttaatcccggcaatgaggatttcatgcaaatggagaccggtggaatcttattgcaggagcgtcctattcatatttcttttgatgtggctgatgtgatggggaaggaggcggattccacgggtggagattcgttttatactttgataaagaaaagcaagaaaaatagccgttccttgacttcgggacttaaggagtataaggattgggcagctttgttgatgcataactatattagtaaggagggacagagaatcgctttacctcttttcgcgaatttctcgacagaagatattcatgctattcgaaagatcgattttggaaagttcaaggagtataaccataagccttcttttggctattatgaatgcttggagggggatggctttttcccttattggattaagcgattgctggtcttacaggaaggtagggaaaaccatttggagatagatatagttcgcaaggctatacagaaggctcttggagcgggtggttgtgcgattattcaagacatggaggttcggcccatccggaaaaaagtatattatatcttgatggatgggcgagaggtagaagctgatttcttgtcagatggatatcgaaggctggtttatatagtaacggatctagcttttcgttgcgcattgctaaaccggggtatttatggtgaggagacttgtgcgaaaacccggggtaccgtcttgattgatgaggtggatttgcatttacatccaacgttgcaatcggtggtgctgaaaggattgtgcgaggcatttcctggattgcagtttatcgtcagttcccatgctccgatggttatgtcggggggggaaagtaatgaggagaatattgtttataagttgagttactcggaggaacagggctatcgtataatgccgactgtcacttatggtatggatatgtcgacgttgacctatgtcgtgcttggtcaaacgcctcgtgcggttgaagtagataggcagttgaacgaattgtttgagttgatagatgtggatcgcttgaaagaggctggagatttgttacggaagttgagagggaaatatggagattctttacccgaacttgcccgggcggaagcgatgttgaactgcttgatttaa

SEQ ID NO: 88173 - DNA, 630 bp, Parabacteroides distasonis str. 3776 Po2 i; identical to SEQ ID NO: 86179

SEQ ID NO: 88174 - DNA, 1227 bp, Parabacteroides distasonis str. 3776 D15 i
ttgcttgtaggtgataacgctaccgggaagacatccgtgttgcgagcttgtaagtttgtgttgagcgcattcttcagcgggtttagcgatgataataccaaatgggttaatcccggcaatgaggatttcatgcaaatggagaccggtggaatcttattgcaggagcgtcctattcatatttcttttgatgtggctgatgtgatggggaaggaggcggattccacgggtggagattcgttttatactttgataaagaaaagcaagaaaaatagccgttccttgacttcgggacttaaggagtataaggattgggcagctttgttgatgcataactatattagtaaggagggacagagaatcgctttacctcttttcgcgaatttctcgacagaagatattcatgctattcgaaagatcgattttggaaagttcaaggagtataaccataagccttcttttggctattatgaatgcttggagggggatggctttttcccttattggattaagcgattgctggtcttacaggaaggtagggaaaaccatttggagatagatatagttcgcaaggctatacagaaggctcttggagcgggtggttgtgcgattattcaagacatggaggttcggcccatccggaaaaaagtatattatatcttgatggatgggcgagaggtagaagctgatttcttgtcagatggatatcgaaggctggtttatatagtaacggatctagcttttcgttgcgcattgctaaaccggggtatttatggtgaggagacttgtgcgaaaacccggggtaccgtcttgattgatgaggtggatttgcatttacatccaacgttgcaatcggtggtgctgaaaggattgtgcgaggcatttcctggattgcagtttatcgtcagttcccatgctccgatggttatgtcgggggtggaaagtaatgaggagaatattgtttataagttgagttactcggaggaacagggctatcgtataatgccgactgtcacttatggtatggatatgtcgacgttgacctatgtcgtgcttggtcaaacgcctcgtgcggttgaagtagataggcagttgaacgaattgtttgagttgatagatgtggatcgcttgaaagaggctggagatttgttacggaagttgagagggaaatatggagattctttacccgaacttgcccgggcggaagcgatgttgaactgcttgatttaa

SEQ ID NO: 88175 - DNA, 630 bp, Parabacteroides distasonis str. 3776 D15 i; identical to SEQ ID NO: 86179

SEQ ID NO: 88176 - DNA, 1227 bp, Parabacteroides distasonis str. 3776 D15 iv; identical to SEQ ID NO: 88174

SEQ ID NO: 88177 - DNA, 630 bp, Parabacteroides distasonis str. 3776 D15 iv; identical to SEQ ID NO: 86179

SEQ ID NO: 88178 - DNA, 1176 bp, Escherichia coli 2-156-04_S3_C3
atgaaatttgaatcaacatcgttagtcaacattatcacaggtaataatgggtcagggaaaagttcgatattagctgaaatttcaaagcaagaatacgttacaggaaaaaatgtaatatgcttatcaaacacatcaaccaataaattccccaaaataaaaagccatcgttttcacattcttaatcagtcatctaacacacttaccaaagcattaaaaaaagttgtagtaagcaatagtcacaataagatcgggtcatcgcacgcacacattttcccaagagtattggcgtatttagatttcaatgagcaactcacatttaaatttacaatcttcccttatgaaagtttcattagaaaatttcaatccgagatgtacaacaatgagttaatcggtagtgatatcgatgaaataacgaatcacttaagaaatctaatcgaaataaacgatgacactgctagctctactgatcatggagtgaaaggctctcacatactttatttggagtatgctttcacatatgaatcagaaaaaagaattaacaccattcataatcgcctcattgaactaatgttaaagcatgagcgcattctaaaaaagaaccatttaatacatgacattgaaataaccttaagtcgtggccatagtataataccatcatctcatttaagctctggtgaagcgtgctacatggcaacacttgcttttatccttacatatatatcggataacagcgtaataataattgatgagccagagaatagtttacatcctcgttggcaaaaaaaatacacatcaaaccttctggatctattatattatttcgacataagaataatattagcgacacattcaccaatgattgttataggggcggtagaagaccatagtggcctaagtgttttcaaatccgaaaatagtaccctttctccccttgaaggaaatgaaactaatattgatgaagtaatggtggatgtgttcggtgtattaacgtcaagaagcagatatttcagctacaagataaatgagattcttaatgaatacaacaataaaaaaatagatataaattcagcacgcgacaaattaaataaaacaaaatcactcgggcctgatgaaagccaagtaaaaataattgaagcagccaatgaaatattaaatcagatggtgaaaaatgcctaa

SEQ ID NO: 88179 - DNA, 597 bp, Escherichia coli 2-156-04_S3_C3
atgcctaacttcacatttacagcagagaatatctctcatatccgcactgctatatccgaaaataaactcgatgacaaagtaaaggtgtgggagcacaaattgcttaaatccatgagaagagaactcaaacaatatattctttccaaccgtaatgatggtttcaaatgtgcttattgcttaaaggatttccataatgaacacaatatgaatattgatgttgaacacattctccccaagtcacaatatccagaatatacgttcacacttaaaaatttagcggtggcctgcaagagatgtaacctattaataaagagaaatgatgtttcatttttaaatgctaacttcataagaaaaaaaccgtttaactcaaaatattataaaatattccatcctgttatcgacagaaaaaatcacttatctcttctggatgtccattttaatgggtgccacattatcaagtatcaaacaaatagtgaaaaagcaaacaacacctacatttacttcaagttaaatgaagttgagatagaaacattaaacaacgcacaaggaatagaacagataattgatttacttcacacatacaacccaagaaattag

SEQ ID NO: 88180 - DNA, 1623 bp, Vibrio cholerae O1 biovar El Tor; identical to SEQ ID NO: 85886

SEQ ID NO: 88181 - DNA, 618 bp, Vibrio cholerae O1 biovar El Tor; identical to SEQ ID NO: 85887

SEQ ID NO: 88182 - DNA, 1359 bp, Mangrovibacter sp. MFB070
atgaaattgaaacaactctttctgaaaaatttcagagggttccggcaatttgaatgcgaatttggtccgggaataaatgtccttgtcggtttaaacggccaggggaaaacctctattcttgatgctatctcaattgcctatggtcaatttttcacggcactgggaacggggattgatcgtggcgttcatgacaacgaaattcacctggctaagcatattctggaagatgctgatgataccttcacgatggaataccaattcccggtaactattagctgcacaacctggcagggtggtccgggcgaatttcctgagagctggagcagggtgcgaaatacgcttaaaggccgaaccacccaagttaaaagcctgaaggattttgctaaaaaactacagaaagatgtgcaggataataagccagcagaattacctttattcggttattacggtactggccgtttatggaaacagaaaaagctctcttcagtaaaagttgcttcactgagtaaatccagccggttcgaagggtatcgcgattgtatggacccagaatccagctactctgcatttgccgtctggttgcgtgatgaaacaattgctgaactggagcgcaaaatgaaaatccttgaagagtcggggttatctgatgcattagtttcaggcaatacattacgtagccgcctgctcagagcaatcacaacggcggttaataccgtactacagccatcaggctggtccaatattcgttatagcgcgacagcgaaagaaattatcgccagccatcctgaacaaggtaatgttccggtttccatgctcagtgatggtgtccgtaatatggtgggtatggtcgccgatattgcctaccgttgtgttcgcctcaacagccatcttcaggaaaatgccgtagtaaaaacgcagggaatggtactggttgatgaagttgatatgcatcttcaccctcagtggcaacagcttgtattacaaaatcttggagcagcatttcccggcttgcaatttattgttaccactcacagtccccaggtattgaccacagtaagaaaagagcaaattttaattttgggccagcacaccgctcataaaccaattggtaatacttttggtgaacaaagccattatgttctgacccaggttttgggcgtggatacccgccctccgcttaatcacagcgatatgctcaaagagtacttcgtcatgattgaatcaggaatgggaaaaagcgcacaggcgctggcgctaagagcccaacttcaggagatgatgggagaacatcattctgacctcgcagccgcagacagggcgattcagcgtaaggagttcttagggaaatgcgcagaataa

SEQ ID NO: 88183 - DNA, 774 bp, Mangrovibacter sp. MFB070
atgcgcagaataaaaaaacaagtgcgcggcaacgccaacctggcggcggcacaagccaataatggtattccggcaacacacgatgcggcgaggcgtgcctggaaaaacttcagagacaaccgtaatacgctgtttcaccaacttctggtcgagcaatttggtttgtgttgttatacagaacttaatttagcggatatacaaaacacccatggtattggctctcatttcgaacatgaacaacccaaaagcctctttcctgctcgcacgttcgatgagttaaatctgctgcgtagcgccctttcagatcaggatttaaaaacctataccggttcagccagatttgccgggcaccataaaggcagtctctataacccaaatttatttatttccccgcagtcagcaaactgccgtgattattttgtctatttaccactggatggaagtattcagcctaaaagtgggttatctgcggcagacgccgctaaagctgattacaccatcaccttgctgaacctgaatgcgccctttctcattgcagagcggcgacgctggctcaaagaaatcgaagatgaaataacccggctcattaacgacaatgccgtggaagctgtccgccatttggcagaatgcgaattaacgctcacaccgcgtaaacacccccagttaattcagcctgcatttgcacaacttcgggcatttcattcagccacccgggcattattcggctctctgggtgaacaagttatacaacaacattgtgcccatattgattaa

SEQ ID NO: 88184 - DNA, 1230 bp, Vibrio parahaemolyticus; identical to SEQ ID NO: 86310

SEQ ID NO: 88185 - DNA, 666 bp, Vibrio parahaemolyticus; identical to SEQ ID NO: 86125

SEQ ID NO: 88186 - DNA, 1230 bp, Vibrio parahaemolyticus; identical to SEQ ID NO: 86310

SEQ ID NO: 88187 - DNA, 666 bp, Vibrio parahaemolyticus; identical to SEQ ID NO: 86125

SEQ ID NO: 88188 - DNA, 1413 bp, Vibrio parahaemolyticus; identical to SEQ ID NO: 86314

SEQ ID NO: 88189 - DNA, 645 bp, Vibrio parahaemolyticus; identical to SEQ ID NO: 86309

SEQ ID NO: 88190 - DNA, 1230 bp, Vibrio parahaemolyticus; identical to SEQ ID NO: 86310

SEQ ID NO: 88191 - DNA, 666 bp, Vibrio parahaemolyticus; identical to SEQ ID NO: 86125

SEQ ID NO: 88192 - DNA, 1413 bp, Vibrio parahaemolyticus; identical to SEQ ID NO: 86314

SEQ ID NO: 88193 - DNA, 645 bp, Vibrio parahaemolyticus; identical to SEQ ID NO: 86309

SEQ ID NO: 88194 - DNA, 1263 bp, Bacillus azotoformans MEV2011
atgattttgaaatcattagaaataaataaatggaatcaatttgataaaatcactcttgaatttaaccctaagttaactattattactggcgccaatggatcaggtaaaagtacaataatccgattaataagtcgtgttatgggatgggaatataatgaaacggcaacacctttattatctacaaaagaaagttatcgttttttgtcaggtattacccttaacattttaaatgaatttcttaatgaggaacaaaaccaacagcaccttggtgtaaatataggtaatctcttgacaaatcaaggccaaatcaatatttatgttccaaaacaagcggaaagtgcaatttattcggttaacttccatccttatttacagctaaaaggagtaaatatcccatcacatcggatacaacatacatataaaccaataaaaagtatccctgttaaaccaaggacaaaaaaagaagcatttaatttatttaatgagtcttttaaaaaaagaacaatgtcaatgtcttactataatccaactgaggatgaccctacagctcacattaaagcgaccttaatgtctttggcggtttttggaaagggaaatgaatttgtgacaaatgacgatagggcatatgaactatttgtaggatttgtaagagtgcttaagcttttactgcctgaaaccttaggttttaaagaattaaaggtaaaagatggggaaattattctagttactgaaacaggacattttcttattgactcagtgtctggcggaatcggcgctattatagatttagcttggcaaatttatatgtatgatgataatgaaacggaatcgtttgttgtactccttgatgaggcagagaatcatctacacccttcaatgcaaaggagtttactacctaacctgctagaggcattcccgaatgtacaatttgttgttacaacacatagtcctttcatggttaactcggtgcaggattcaacagtttatgttctaaattataacgatgataaaaaagttgttacggaaaaattagattttattaacaaagcaggcaatgcatctgaaatattaagagatgtattaggtgttccagttactttaccggtatgggttgagaagaaattaaattcaatagccgaaaactattcctatagtaacttgactccagagacttatcaaaggcttaagacagaattatcggagataggattaaatgattatttacctgatgctttaggaattatagggggcggtcaaaattga

SEQ ID NO: 88195 - DNA, 648 bp, Bacillus azotoformans MEV2011
ttgattacacttaaaaagattgaccagccccaaattcttaaagacaaaagcgaggaatggaaaaacgatttacttgattatataaataagggagagaagccaccagaatcaatagtaggaagatatagacataaagaaataaaagaagccctaaaaaaagagacacatcataagtgtgcctattgtgaaagtaaaataacgcatattgattttgggcatatagaacatatagtacctaaaagtattatacatgaaaaaacatatgattggcaaaaccttactttagcttgtggtacatgtaatacaaataaaggtacatattatgataaaaccatgccattattaaacccgtataaagataaaccagagaatgaaataatttttcttggaccagtgcctatgcctaggccaggtagtaacataggaattataactatcaaaaaactaaagttaaaccgacctgaattattagagcgtcgcaaagagctaatagataaaatcatgccacttttacacctttatgagcaaacaactaatgactctttaagaatacagttatacgaagatataattgaatatacaaaacctgacaaggaatatagttccatggttaaaggtgtattagatcaattaaaaattacttcatag

SEQ ID NO: 88196 - DNA, 1257 bp, Bacillus thuringiensis serovar kurstaki str. HD-1; identical to SEQ ID NO: 87076

SEQ ID NO: 88197 - DNA, 648 bp, Bacillus thuringiensis serovar kurstaki str. HD-1; identical to SEQ ID NO: 87077

SEQ ID NO: 88198 - DNA, 1623 bp, Vibrio cholerae O1 biovar El Tor; identical to SEQ ID NO: 85886

SEQ ID NO: 88199 - DNA, 618 bp, Vibrio cholerae O1 biovar El Tor; identical to SEQ ID NO: 85887

SEQ ID NO: 88200 - DNA, 1623 bp, Vibrio cholerae O1 biovar El Tor; identical to SEQ ID NO: 85886

SEQ ID NO: 88201 - DNA, 618 bp, Vibrio cholerae O1 biovar El Tor; identical to SEQ ID NO: 85887

SEQ ID NO: 88202 - DNA, 1404 bp, Endozoicomonas elysicola
gtgattattggagataatgggacaggtaagagcaggtttatttcaaatttagttaacgcatttttagaaaatattgaaggaaaacgaaggaagcctattgaatacgagatagagtatgagcttgataaggaggtcgtaaaaatagaacgtttttttaaaattaacgatgagaatagaagagctagtgagaatttaaaagtcaaattcccgaacaaattgattgctatctcaacaagtctttccgataaatttcctctagatagacaaagcaggaataaaaactttgaaaatagattgaattctaaagaagaattttacacgtatctgggtacaaagaaccgtgtgaatgcatcctcaagtcgtgctctaatggaccgtgcgattggtaccatgcttgaaaatatgcacgaaaataacaacaatgaacggtatcgtgaaatatttaattacttgaattatgagccagttattaaattatcatatcgcatacgaatacctgacttcataaagaatcacagtctttttgtttttagtgggaatgacctaaaatcattattaaaagattggtctgagaaaagaggtgggtttagaacgagtttctataatagggctattgaaatatattcagatacttactgggatgatcttgccaggttttatgctgaaacattagataaaactatttttagtggtaagcgttctgaatattctttcatagtaaacttttcagaaaaaaatagtatcaggtatgaaaacaatttagactttcatgaaagtaataagtatttctttttagaagagctaaaacggtatgatttggtaagggggccagaaataagtctatataagatcggaggaggagagtttgatttttatgatgctagttctggtgaagctagcattctttcaactcttataggtctaattccaaatcttacagataattgcttggtggtaattgatgagccagagattagccttcatccgacatggcaatatcgttatgtaaatctgattgatagaataattagtaagtttaaaggttgtcatgtcattatcgcaacacattcacactttattatttcagatttacctttatatcgttcacatgtcattcattttaaaaatgataaaagatcaaatatccaagttaattatatagatcatgaaacacatggtctgtcagctgaagatgtacttctgaatatctttgatttgccttcaacacgtaattatttcttatcaaaagaggtttcagaagctctagaacttcttgctgatggtaaaaaaacatcagctagatatattgagctttcttctaggtttgctagatatttaccaaatttaaaatctatagatcctatgcatgaaattctcagcattctagtatcttcgagaaaataa

SEQ ID NO: 88203 - DNA, 630 bp, Endozoicomonas elysicola
atgtcatcaagaatactggaagcatatcaactcactgctagtgaaaaaaaaattatagatactcatttttccacacacaaagattgggaaaaatcagtatttgagggaataaaagaaaatctagttaatgatcttcgtataaagcagaataataagtgctgttattgtagaaatgaattgggttatgacattaaagctgtggatattgagcacattttgccaaaatcaaagtatgagaaattcacatttcacaccaaaaacctcgctttatcttgtcctggatgcaatacgtcaaaagggtcaaaagaagttttaaagtcacctatcaaaaaatatccaaggacagggaccaatataattatcgtacatgctcatttcgataactatgaatcaagcattgaaattcactcaggctcaatctacgagggactggatgaaaaaggctgtgaaacaataaagcagtgtaagctttacaggttgaaacgagttcataagaaagctagaaaaaatttatcaaacagctcgcctatacaacaacttgtagaaagtctgcgtacagcatcagatgcagataagcagctttttattaatcaaatgcgtgaaatgactaaccagtttcaaggtccctaa

SEQ ID NO: 88204 - DNA, 1380 bp, Shewanella xiamenensis
atggaagtcaaaaatttaactttacataatattggtcgatttacgcaccttgaaatcccgttggcgccacttggtaaactgaatagtaatgttacagtctttgtgggaaacaatggttcagggaaaacctccatactcaagtcattagcaacgtctctgagttggcttgtttcacgtattcaatctgaaacaggtaaaggcagccctattcccgaacttgtcattaaaaataaaatgtcttcagctgcgattgatattgatattttccatcatgttcgtgggaacgaggaagacggtgatttggaggggctagatgataattactttctctggcgaatcgcaaaagcgcgtaaaggtcgtaaaggtgagcataaaagtgattttggcggcgctacaggtctagcagactactttcgaaaaaagttgtccaatgatgataaaacctctctgcctctgattgcattttattctgttgaacgggttgtgatcgatatcccattaaaaattcgaggaaaacatgagttttttcaacttaatggttatgagaactcgttaactcaaggtgtcgactttagacggttctttgagtggttcagggaacgtgaagacactgaaaatgaatcaggactctctgatgatgtattagagcaactaaaagcagttctgggggacgacgataaaacgtggtcaaaattagaaaaacttcgagcatcaaatcgtgatcggcaacttactgctgtacgctctgctatttatcgattcatgcctgaattttccaatttgcgagttcgaagaaaaccacgactgcatatgtcgattgacaaaaatggtgagccgttagatgtcgcacagctttcacaaggcgaaaagtctctgatggctctgattggtgatattgcaagacgtttagctgtgatgaatccagaattaaaaaatccgctcgagggagatggaatcgttttaatcgatgaggttgacatgcacttgcatccgaaatggcaacggtcattgattaagcaactcactacgacttttcccaaatgtcagttcgtcctgtctacacattcaccattagttattagtgactgtaaaaatattttggcatatctgatcggtgaagatgagttagtccgtttaccttcgttgtatggtcaagatgccaataccgtattgttagaaattatggatacggatattcgtaatgcagaaatcaataacgcgctcagtcaggttttggatgctattcatgatgctgaactttccaaggcaaaaaaactcattcatcagcttgaacaagaactccctagtggcaatttagagttatcaaaagcaaaacttttgcttcgcaaaaaggagctaaaagatgcgaaaaataactaa

SEQ ID NO: 88205 - DNA, 639 bp, Shewanella xiamenensis
atgcgaaaaataactaagggtatttatcctgagccgataagtttgagcgacttcaagcgtgcgaaccctaaagctacatacactgatttgagggaaactgaacgcactgatattcgttcagtttgtttgcaggaacagtattatctctgtgcatattgttgtaaggaaatttctggtgcaaaccatgattgtatgaatgagcatgtggaggctcgaagaatcgcgcctgctcgcagtctcgatttcactaatattgtgtctagctgtactactcctgggcaatgtgatgctgcgcatggttcacttgcattgcctttaacgccttttatgtccgagtgtgaaactgagtttgaatttacattaagtggcaaagttagaggccttacggaccgagctaaagagactattcgagtattaaatctcggtgatgaacttcaaaataatcgctcattaattgaacagagacggcaattaattcagtcaatcatgttcaccaacgggatcgatcctgaagaggggttagatgatgatgatgatcttttaaagatggtcattaatgatatttctactcctaagagtgggaagcttgatgcgttctctcccattgttgtaaatgttttaaaacaatgggttgtgtaa

SEQ ID NO: 88206 - DNA, 1638 bp, Shewanella xiamenensis
atgcagcttcgatatttagccattccgcagtttcgtaacctgcgcaatttagaagtgagttttgccaccgagctggagccagtttcgggcacactggctgacgtaacagctactgcacctgcaaaacgcattcgcagtcatgcactgattggccaaaacggcaccggcaaatccaatttaattgaagcgctggttaccttgttccgcgatgtcgacctcgaccgcgaagcagattttgattacacgctggaatacgaaatccgcggccacatcgtgcgtattcaagccgatactgccaaaaaaaagcgcccttacgtttgggtagatggcaaaagcgaatcccagagatttcttgtaaaacatgcgagggaatatttaccgtcacatgtttttgcctattactcgggcaagaatgaacgtatagagtcgctatttcgaccccaccaagagcgctataagcaattactgcggcaagatgatgacgacttaatgcgcaggctcttttactgtcgtggcggtcatagccagttggtgttgttagcttgtttgttatctgatgacccagtatttaagaagctattaagtaacttgaatattgaagctattgaatcggctttgttcgtgctgaaaaagccatacgctgcgagagaactggatgagaaggacattgagctaggtgattcacgtttttggtttagacgtggaacagtcgtgaatggatttctcgacaagctgtggcagatcgcctgggcgcccgttcaggaaacgcgactggctgccattgattttcgccgtcgccctgaaaagcaagagctgctttatttgtttgttcctgacaataaaaggctcaaaaaattaggtgaggaagtcgggacgcctgagcgctttttccgctatgcagaagcagcctatatcggtgacttgctggaggaggtgcgcattacggttaaaaaatcgaagggacacggaggcgatgttgagttcaaacagctctccgaaggcgagctgcaaatgctcactgtattgggcttaatgcgcatcacccgcgaagatcattgtttgtttttgttagatgagcccgacacgcatttaaaccccatctggaaactgcgctatttcgacgatattgaaggcgtgttgagctccgaaaaagattcactggtacaaggcgaatcgcaaattctgattaccacccacgacccgatgatggtgggcagtcttaagcgtgagcaggtacatattttgcgcaagcacggtgatcgttcagtcattgaatcacccgatgaacacccgcaaggtatgggggttacaggcttgctgaaaagcgagttgtttggcctgtcatctacattggatattgagaccgaacgccgcttattccgacgtaatgagctttttgtaaaagcggaacgaactccagaagaagatgccgaactttctcgactttcgactgaattggcagatcttggcttttcaaccgccgattttcgcgacccagattacgctttgtttgttcgcaagatggcccaacaccgcaaattcagaaaaccgacacttacacctgaagagcaagccgaacaagatcgtatcgccgatgacataataagcgaaattctgcgcgaggaagctggcgaatga

SEQ ID NO: 88207 - DNA, 852 bp, Shewanella xiamenensis
atgatttttatcgacttggaaaacaaactgccgaccgatactgacttgcctgccaatgttcgttggactcaagccgattgggatgcgtggttagctgagtcagcacgtttggttaatgagcttgccaaactagatgctgcaggaagtgtcaaagagcgtaatagcttgattgataaacacgacaatcattggggaaaactaaaaccttggttattaactctatcgggcggaaaatgctggttcactgaggcgcgcgaccttgcttcacacttaactgtagagcattttcgacccaaaaaggctgctcgtaatgttaaaggccaagagcgcgacggttattggtggctagcttttgattacatgaattttcgaatagccggcaccgtgcctaattgtaaaaaaggtgtttggtttcctcttcgttatggttcaccagtttctactttcatgcgccgctgcgaaggcgacgaaaatcaacattttctcgacccgaccaacgcgtatgatgtcacacttctagcgtttgacgaggaaggcaaggctgtgccagctcctggaattccccgttgggaatacgtgagagttaaacgcacggtagaaagattgaaacttactgaacatcaggttttgtcagaggaacgccgtaaagtctggcaaaaaacctcaaagttgattaacaaatatcacaatgctcttgcggaagcacgtaactctcctgctgcgcgtgagcgagtcagatccactgcgcgtgaaattgcttgcctaacaaaacctgagtctgaactttcagctgtagcgaaatggtgtatttggttacggaacgacccgcaactttcaagactggttggttag

SEQ ID NO: 88208 - DNA, 2292 bp, Escherichia coli 6-537-08_S3_C1; identical to SEQ ID NO: 86352

SEQ ID NO: 88209 - DNA, 927 bp, Escherichia coli 6-537-08_S3_C1; identical to SEQ ID NO: 86963

SEQ ID NO: 88210 - DNA, 2292 bp, Escherichia coli 6-537-08_S3_C3; identical to SEQ ID NO: 86352

SEQ ID NO: 88211 - DNA, 927 bp, Escherichia coli 6-537-08_S3_C3; identical to SEQ ID NO: 86963

SEQ ID NO: 88212 - DNA, 2292 bp, Escherichia coli 6-537-08_S3_C2; identical to SEQ ID NO: 86352

SEQ ID NO: 88213 - DNA, 927 bp, Escherichia coli 6-537-08_S3_C2; identical to SEQ ID NO: 86963

SEQ ID NO: 88214 - DNA, 1635 bp, Escherichia coli 8-415-05_S1_C2
atgataaataaaatgaatttagagacttgctatgttgattttttagagttggaatcacatgtgataaacgaggattatttgaaggagtctgttgagcttcaaaagctaatatctactttaaatgagagtaagtttcatttaaataaaataggtatacatgattttaaacggataagagaactacagatttccttagaagatgatttgactgtttttgtcggggataacggattcggtaaaagcactattttggatgcaatagcaattgttttgagttggttgagatcaaatattgaaaaggagagtaagcctggtacttatattaaaagccatgaagttaataactctgttgatgttgagtatgcatcaattgatgcaaatataaaacttaaggactttaataccagtattttgattactaaagcgaaagagggggcatattattctagaaataatgaattgttggaggtaaaaaaacttgcaagtatttatagacttgtgaataaatatgttgataatgcaagcttgcctttgatggcatattattctattgcgcgttcttatataggcggtggggttgataggaaaagaaaaaatgctaaaactaaaactgtatggtcaaaattcgatgtgtatgatgaaatcgagtttgacagaaatgattttaccgatttttttcaatggcttgtatttcttcataacagagcttcacaagagaaattgagtgagtcacaaacgacaatcaatgcgttattttcagatattcaaagtttgaaagcaacattaactcaactatctgcgattgataatattgattcaacagttataaaaggtttagagctttcgcttaaagaaaaattgaactacatgaaatctctgcaatcaggagaacataagtttaataatgcagtatcactttatgatagtgttataaataccattctaaagttcttgcctgaatttcagtggattaagcttgtttatggtgatgatgattataagattatccttaaaaaaggagaggttgaattagatgttcaacagttgtctcaaggtgagaaaactatatttactttagttggtgatttggctcgacgtttaattttacttaatccaaatttatctaatcctctattgggatatgggattgttttaattgatgaaattgatttgcatttgcatccgcaatggcaacagacaattattgagcgtttgacatctacattcccaaatgttcaatttgtagttactacccatagcccacaggttttatccactgttagctctcgttcagtgcgtattctacaggaagtggaagtagatggtgttaatgatttgatagtgtctcaccccgactatcaaataaaaggtgttagtaatcaggatgcacttttatatggaatgagaactgatcctataccctctactaaagaaaatggttggcttgaagaatataaaaaattggttgagcttaatcgttatagcagtgacgaggctcttttgttaagagaaaaagttattaaacatttcggattagaccatcctttagttcaagagtgtgatgatcttatatctgttttggagttcaaaaataagataaatcagcacttttctggaagtaaggatgtaaaatga

SEQ ID NO: 88215 - DNA, 561 bp, Escherichia coli 8-415-05_S1_C2
atgcaaggtaaattatgtgcttattgcgagaaaaaaatagagcatcataaaagtggtgacaaaaataaagttgagaggcatattgagcatttttacaggaaaagttattacaaaaatttaactttcgagtggtctaatttgtttggctcatgtggtgagccgcaaaggtgtgggttttataaggataagcaaaaatataacgatgatgatttaattaaagctgatagacaaaatccagatgtttttttccattttttggaaaatggtgatgttcatattagagaaggcttgaatgagaaagaacacaaaatggcagaggttacgttaagagtatttaacttaaacccgtcctcaggaggagtcaaggcggaaagaagacgtgcaatagaattaagcatgacattaataaaggaactggtcggatgtgcatctcagcttattgaatcaggatgtgaaattgaagatgttagatctatggtctttgatgagtttaaaaagaatgtaaaagatagatgctttaccactgcgataaagcatgtttttgagaatagaatgccttaa

SEQ ID NO: 88216 - DNA, 1752 bp, Escherichia coli 3-475-03_S3_C1
atgcaactgttgcgcatctgcatccccaactttcgtaatctacgtggtctcgatattgccttcgcgacgcatttgtcagccgctttaggcgcgccagctgatgctcaaccaaagccgatccgcagccacgccctgattggccagaacgggaccggcaagtccaacttgatcgaagcgctgatcaccatcttccgtgatgtcgacctggatcgtgaagctgcgttcgattacacactggaatacagcattcgtgatcatgttgtacgcattgaagcggatacggtcacacaaaagcgcccttacgtgtgggtcgacggcaaagctgaaacgcagggctatttgctgaaaaatcgcgagctgctacccacacatatctttgcttattactcgggccgcaacgagcgcattgaggccttgtttcaagagcatcaacgccgcttcaacctacgacaggaaatcaccaccgacgaggtgctttcagagcagctgttggaaaactttaccggatctgaggcggatatccgcgcggtggaggaagccaaacgccgccgagaatcacgactgaaacaagcaggcgacgaccgcctgcgccgtctgttctactgccgtggtggccatagccagttggtgctgctggcctgcttgctctccgatgaccaggtgtttcagaaggtactgaaaaacctgcacattgaatcactggaatcggctttatttgtactgaaagagccacatcgtctgcgcgaaaaacgccgcagcggcaagttcgacgagcaggaactgatcgagggcgatccacgcttctggtattcccgtggcaatgtggtaagcgagttcctcgacaagctctggcaagtatcttgggctccgattgaacaggaggcaactaagcaaattgacttccgtggccgtagcgaaaaacaaaagcagctgtatctgttcgtgccgaatcaggacaagctcaaacagttgggcgagcttgtcggcagcactgatagtttcttccgctatgccgagggcgcttacatcggtgacttgatcgacgaggtgcgcattacggtcaagaagcgcgatgaatatggcggaaaggtgagtttcacccagctctctgaaggcgagctacagatgctcaccgtgctgggcctgatgcgcataacccgagaggaccactgccttttcctgctcgatgagccggatacccacttgaaccctatctggaagctgcgctacttcgacgatatcgaaggtgtgttggcctctgatgaaggtgcactggtacagggcgagtcgcaaatcctcatcaccactcacgacccgatgatgattggcagcctcaagcgcgagcaggtgcatattctgcgacgcgacaagggacgctctatcgtggatacgcctgatgaacatccgcaaggtatgggagtaaccgggctgctcaagagcgagttgtttggcctctcgtccacgctggatattgaaactgagcgacgccttttccggcgcaatgagctgttcgtaaaatcaccacgctccccagaggaagatacagagctatcacgactttccactgaattggccgatttgggtttttctactgccgattttcgcgatccggactacgcgctattcgtgcgcaaaatggcacagcatcgtcgtttccgcaagcctacgctcacgcccgaggagcaagccgagcaggacgccattgccgattcgattattgatgaaattttgcgtgaggaagaggaccaatga

SEQ ID NO: 88217 - DNA, 858 bp, Escherichia coli 3-475-03_S3_C1; identical to SEQ ID NO: 86973

SEQ ID NO: 88218 - DNA, 1398 bp, Escherichia coli Nissle 1917; identical to SEQ ID NO: 86202

SEQ ID NO: 88219 - DNA, 732 bp, Escherichia coli Nissle 1917; identical to SEQ ID NO: 86109

SEQ ID NO: 88220 - DNA, 1491 bp, Anditalea andensis
atgagaatacatcacttacatatcaaggaatttaaatcattaaaggactttattattaagtttaatgagcctgtttcactttttataggcaagaatggttcgggtaaatctacactcttggaagccattgcttggatatttcgctcggctcacctcacttatgttgaggaaaaacaggaaaacacaccatttgattttgaaatcacctatgaacttagaattgaaaaagtactatcagaatccagcactttcagtgaaacagctaccgactacattggtgttaccttaaaaggcgatagaaaaaacaaaaaattctggtctatcgatacagataataacgcctatagtattgatgatctcattaaaagacatacgatagaaaagctgttaccatcaaacttggtaatttactatgcaggatggtttgaatcaatggaatttatctgcagcgaacacgaaaagatttataaagaaagactacttgaagcaaaatccgattcagatattactacctcttctgaggatttatattcaagaattggagctttaccgttgatgtacatcgaaaagcatcatttcgaaatcttactggcttcgctttatgcatttgagttcaatgaccgtgtagatcgtttttttgctgaagatctcaaaatcactaagcctgataaaaacccgctagccttgtttgtcaaaaagagacaatggaaatcaggggttggtggggatgaattttggggagctaaaggacttctgagaggctttcttgatgtagtgagaagatttgcatacaatgagaccgcaaactacatggatgaagatcaaattttattcaatttccatatccatgactggtacgcattaagagaattttatggagaagaaaaaaagttgttttacctgcttcatatgcttaatgcatcagaaatgcttggaggaatacaaatcttcatggatttgccagaaattgcaatttcccaccatgatttaagcgagggccagcaacaacttattaccattaaagctatcaatgaactccttgtagacgaaaactctcttttacttcttgatgaaccagatacttatctgcatccacagtggcaaagtagttttctgaaaggaatttatgaggtaattgatttgtacaaagctttatcggttccacctccccaatttattatagcatctcattcaacaataatgctatccaatctttcaagtggagacttattcaaaatgagcgaaggacatgcagttccaatagacaaaggatactacggtcgtgagtatggatttaatctttctgccattatgggaggcaatgagagagttccagaagtacaggaagaaattgatgcattatttgaactcatagatagtgagcagttcgaaaaagccattaaagtactggaagagttaaagcaaaagcatacagatgatccagaattgacccgtgcagaaacaatgttggcttttttaaaaggtgaatga

SEQ ID NO: 88221 - DNA, 606 bp, Anditalea andensis
atgaagtttattgtcaaaggaaatgagccaccggaatggaaagcttataaagaaacgcaaggggttgattttgacgcaatcccagcattgaaggaagcactgttaaatgaacaaggatatttatgctgctattgtatgaacggaatcaaagaagataacatgaaggtagagcactataagccaagaagtatttaccctgctttaaaaatggaatacaccaatctatttgcagcttgcaaaggtgatttttgtacggataaacattgtgataccaaaaaggaaaacactgaattgagcattcaccctgctgacccaaagaataattgtgaaagaattattggctatagttccaaaggtctattaacttatcctgaccgatacaaaacagatatagaagaaactctcaacctcaacaattcagttcttgtttcaaacaggagtgcagcactacatggagcattaattgctttgaaaaagaaaggttttaaaaaggcagacattcaaaaattaattatccaatacagggaaaaaggctctgatggtaaattttatccctattgtaatactgttctatggttattgaataaaaaattaagtgcgaattag

SEQ ID NO: 88222 - DNA, 1398 bp, Escherichia coli; identical to SEQ ID NO: 86108

SEQ ID NO: 88223 - DNA, 732 bp, Escherichia coli; identical to SEQ ID NO: 86109

SEQ ID NO: 88224 - DNA, 1782 bp, Tumebacillus flagellatus
atggcagagactaggattccagaagcgattcgaaacgcttttgcaagtgtagatttgcaaaatcaacagatcgctttggattttttagagcatctgttgagcatgggcttttcttgtgagtacgtaaagaactacggtgtgttcgtgtttacctataatcagtttgaggtatgccagatactttgggactatctaaatggatttagcaagattccgggttatttgatgttcttagcacctactccaataaaagaaaaagtctgttctgaaaccctctttccgatcaaggagcaaccgctcattcgaaaactagtagaagcaaaagagtttcatcatagttacaatgccacactgggtgatctggatcttcttataccgttctttgagcaaattcgagatgcgttctttcgcacggaaattacggtagattttcgaattgaatcgttggaacttaccaactttcgttgttacaaaagtgaaacgttcacatttaacccgcaatcaaccgtattgattgggaaaaatgcaagcggaaaaacaagcctgttggaaggtatcaccgttgcaattggcgggttcttacgagccatcgatgaaaaagtggacaagcgggcctttgaagcaagcgacgttagattcaccagtaagtgggtacaaaacgcccctgcaaccgaacaccatcctccaacggagatgaaagtgacctcacgtctcatcaacaatcgcctcgtgtggtcaagaagccgtaccctctatgaatcggataaaaactctcgtacaacttataaagaatcgaatgaaatcacgagcattgtgaagcagcttgtctctgatgttcgtgatgagaagaactcaaggcaaatcattctgcccgtgtttgcttatcacggcacagggcgtgtggccaatttcaatcgagatatgggagaagtcggaaaaacggaaaaaatttcacgattttttgcatataaagactgtctgaaaccgaattctaattacaaaactttcattgcatggtatcgcaaaatgaaatacttggcgttcgagatcaatcagcaaatcccagtgcttgatgccgtaacagaccttcttgtgcgtggcttgcgcttgttgacagaagatgaggagcactttgtagaaggattgttctattttgaaggtgagcttcatctcaagtacgaagatggaactttttatccaatcagcactttaagcgatggttaccaggacatcattgggattctttcagacattgcgtttcgcatggcggttttaaatccacaattaggtaccgaagtatccgcgaagaccccagggatcgtgttgattgacgaagttgatttgcatctgcaccctaaatggcaacagaaggttctatacgtattgaaaaccctgtttcccaaagtgcagtttatttcgactacgcactcacccgtcatcatttccgcaacggagaaagacgaggcgtttgaactctatcaagaggaagatacaatccttacgaaaccgattggaaacccagctgaatggtacctctctgatatattggcacaagcttttcatgtctcttcaaagccgccagcacgaactgcgaactcgatttcggagtccttggaggagctgttgcaccgtttcagcgaattggtgaaaaccgctgtacccacacccagtgacgagcagaagcgagagatcgaagtgctctacgaacggttgcttcccagcctgcctatagatagtcctcggagaaaagcggtagacgctttgaaggggctcgtcaaatga

SEQ ID NO: 88225 - DNA, 699 bp, Tumebacillus flagellatus
atgaaacaagtcaccaggacagatgccccgcatcctttgaattgctcggaaacgaaacggtcgttctatgaggacctgtacgatgaaaccggaacccaagtcaaaaaacgctggaatgtcgtgcgagatgctttgtcagagatgtcaggtcatcactgtgcctattgcgggaaaaaggcaaaagtagaagtagatcacttttttccaaaaaataagcgagccgctccctatctcgcctattgttgggagaatttgattccggcttgtcatgattgcaatcagcgaaaattagcattttttcctcgttccctgtctggaaaaaggattatcgaatcctgtgcggagggggtcgttccgcatgaccttctctatgaaaaatccacgatcatggaaatagccagtaatgaccgactgctcgacccgacatttgatcgagtcgaggaacatcttacacttgattgtgagtttttctgctataactcgcataccaaaattggtgaaatcaccaaggaaaggttttttggtgaggcgtttgagagaaacctcgaaaagttaagtcacctcgccaagaaattggtgagtgagaaggtaactgtcgacatactgaatcctatttttgatttatacggagatgaattttatctacgtgcctactacgagtattggtatctagagaatgctgaaggacgaatgcgttaa

SEQ ID NO: 88226 - DNA, 1332 bp, Tumebacillus flagellatus
atgaagatcgagtggatgaaactcgaaaattttcatggttttcgggaaaaagaaatttcgttccacccgcagtttacggtattggtcggagataatgcttcggggaagacggcggtactggaaggagtttcggtggcgattggggcgtttgcgaatgctttagtcaaaaatgcagatttgcgggagattgaacccgaggaagtacgattaaaaaaattccagcatggagaaattcctacattggagccccaatacccttcttatgtacacttttgttcctcgatagacaatcaaatggtagacgcaatggttttgaaggaagaaagaaatacgcacttaggtgttgatctcatttatgaagtctattccaatgcggaagcacttggaaggaagattctgtccggtgaaagtgtcaaactaccaatattttcgttttttaggacctctcgtttatggagccaaaatgaagacttggttaattccccctattcaccaggctctcgactcgaaggataccgaaactacctcaatcctaacgcgaacgagtcgttttttacaaaatggttcatccagatgtccattgccgaaattaaacggcgcgaaccgttaaaagtcctcgaatccgtccgccgcgccattgtcagttgcatgaacaaacttggcgtagaaaaaattgactacgaccccctccgcgacgagatccaagtctttttggagaacggcgaccaaatcccgctccgtcttctcagcgacggctatcgtaacacaatgggtctcgtggcggacatcgcacaccgcatggcggtgttgaatccttttatggaagatcatctacgaacgtccggcatcgtcttgatcgacgaaatcgacttgcacctgcacccgaagtggcaacgtcatattgttgaggacttgaagaacaccttcccgaacgtgcaatttattgtaaccacgcactcccctttcatcgtgcaatccttagaggagggcgaactgcgcgtgctcgacgaagatgttgaagcaaaggtggtttcacctgctgattacgtcaataaaagcattgaggatatcacggaatatgtcatgggcgtagataaggtccaacgaagcgaaaaactccaccgcctctacgaaaaaaccaaaacctactacctgctcatcgaccaactcagcgccaccgaagacgaaacacaacgcgcagagctggaacgccaaatccaaacaaccaaagacgagatcgacgaactcgactcactcttcagcgacgacatctccttccacgcgatcttggaactagaacgtctccgcctgctcaggagagacaaacaatga

SEQ ID NO: 88227 - DNA, 693 bp, Tumebacillus flagellatus
atgagacctatcgaacgcgggactcatcctgtgaaccctaacggcatcgccgtctctttctctcactactcagacgcccgcattcatttaatcgaccacttaggcgaatactgttcgtactgcgaaatgaagctggaatcgggtttggccgtcgaacacgtcaaacccaaatcgaggcacccgcaactcgaacgaacgtgggagaattttttgctcgcctgcccgaactgcaaccctaccaaaggagatgaagatgaagatgtccatctcccggactatgtttggccggactcagatgacacgcatctcgcctttacatacaatccggacggtcgcgtccttgcagctctcacgccgatgcacacccaagcccaaaacatgctccaactcgtcggtctcgacaaaattcccttaccgcacgagagttcagatcgccgtctccgcaatcgtcataccaaatatcagatggcgctccgctaccaccgtgagctgtctcaacgtcccgatgataaacagtaccgccaaatcatcaccgacctcgccaaagaaagcggctactggtccgtctgggtcaccgttttccgcgacgaccccgacatgatccgccgcttcaacgaagcataccccggaaccagtccgcactgcttcgaaacggaaacttaccaagccaaatcacgccacaacagaccctga

SEQ ID NO: 88228 - DNA, 1407 bp, Tumebacillus flagellatus
atggcgtttttttggcagggaaacattcgcttttccgctgaggactggaaggaaacgatttggtatacattgaatgtagagggaaatagaagattcgagggtattgatagactggaggttcctatgaagcttgagaagatcagacttcaaaattttagaagttttacggatcaggaattttcttttttagatgagaacgaccaggtgaagccgtttacggttttagtaggggataacggcgtggggaagactgctgtcttggagggtattgttcgcggtgctgctccgattatcaaagcgcttcaagcagatgccggggataaggttgacatttcccaattagacatacagatcgggagaagatgggcttcgattgctatcgagtcgatcatccagaatcgacgctttcagtggagaaactccaaaagagaatcgtccatggttcaagattggccaggttcgccggccgcaactcagagagaggtcaaagactttctctcggaaacctttttttcggaccaaccgattcaacaagtgcctctggtgctctactacagcatcgcccgcgttgggattgatgttcctatgaggagcagaaatcctagagaaatgagtcctttgaaagcactcactcattgtctggatttgaaaagcgatttccgaagattttttgaatggtttaagggagaagaagaggacgagttgcgtatgcaacgtgatctaggccgtccgtatcgatcaagagctttgacagctgttcgtacagccattgcccgcatgatgaatcataattatcgagatgtcagaatcagaagcaatccaattcgaatggtgcttctcgatgatcagaaccgggagttgcaggtggaacagctgagcgggggctataaagttgtattttctatgatagcggatattgccgggcgattggcacaggcaaatcctcaattggctgaccctcttgctggagaagctcttgttctcattgacgagttggacttacacttgcatcccaagtggcaaaaacggatcgttcgcgaccttcgagaaacgtttcccaattgccagttcattgtttccacgcattcggcttcgattgtgcaatctcttaacgcggatcaacttatcaatttggaagaattggggcgagaaagaacgggagcctttaaaggttggtcgctctccgaaattcaagagtttgagatgggagtcgagtactccaagaccgaagagtacgagcgaatcaaggaagagtttgaagaagcggtctcggatgaaaacggtgaacgggcgaaggaactatatcgtcaaattcaaaagatggtgcatccaaatagtgagttgctggagctttttcagtttcggttaattggtattggggtggcgattgatgatttatttgaatag

SEQ ID NO: 88229 - DNA, 795 bp, Tumebacillus flagellatus
atgatttatttgaatagacctgtctctccctacaggcttaccaagaagagaaaacgtgaactgatcaagatctttataaaaagccgtcaggagggaaaggaaaagtcggtctggaaatatgcagattttaaagacttgaaaaaatccctcaatcaaatgtctcatgaaaagtgtgcgtactgtgaagataaacttgatagcggcggaaacatgatggaaccggaccatttttatccgaaagagcggtatcccactgctgtggtatcatggaaaaacctccttccttcgtgcaaaaaatgtaattcgagatctggtaagggaaaccatgatgtgaaagagaatcctattctagatccctctaagttaaggccaaatcaacacttccaatatgcgaatcaaacgtatgaaatcaaaggaatcaatgagttgggtatccaaacagtgaaggttttgaagttgaacgatgcagagcgaatgcttcgaaaacgcaaacgcaacgtggacgagatgagacaaacagtacaggatattcaagaggaactcagggcgcgggtatcggaacttgtcacgaacccagggtttcgggaaaaaatccaacgtcaaaccaatggtttgctcctcaaaacaacgagtgtatcggctttctcagctgtgtacgccacggttctacttcatgatcagccttttcaagaaataagagaaacgttgcaacaacatggggcttggacaacctctatggagagtaagttcgaagaggctcatcaggcgtgcttttcaattatcatcggtatatga

SEQ ID NO: 88230 - DNA, 1236 bp, Tumebacillus flagellatus
gtgaaaatcacaagattacatatcaaaaactatcgtagatttcgggatttagagttgcagttgaatggagagagcgtagttctgtttggcgagaacggggcaggaaagtctagtgttttagaagcaacttcggcagttttatcacgtatggttagacatctaacccatgcaaccttacgcggtatagaagtaaaggacgtgcgtttgggagccgatgtagcgagtgtggatgtggaagtggaacactccaatacagagtatagttgggataccatttgcaaaattcatgttctcaagacacgccaaaattctatttcgatcaaacttgggcatgaaatacttcgtcatttaaagcagggagagtataatttaccaatcgtcgtttcttactcggttaatcgagccgtagaagacactccgcttgacctaaatgaaaagaggcaattcagccaactgtctacttacgataactcacttaccagcggtacagacttccgtgtcttcttcgaatggtatcgataccgtgaagaccttgaaaacgaaacaaaagtccaaaccaagcaactcgagtaccaagatatccaattacacgccgtacgtactgcgatcgaatctttcctccctgggtttcacaacctcagagtgatacgaaatccactgcaactcgcaatcgacaaagccggtcaaacactcgaagtcaaccaattatccgacggcgagaagtgcttgtttgccatgattggtgatctggcaagacggttggctctggcaaatccaagcttaccaaacccattgcttggcgaaggggtttgtctcatcgacgaaatcgagttgcatttgcatcctgaatggcaacgagaagtcatcccgagattgcgaaccaccttcccgaacgtccaatttatcatcagcacgcactcccctcaagtattaggggaagtgaaagatatgaacatcctcaaactcgaagtagtggaagaaggcgtgacggtaacgccgctgccgagcttttttggcaaagacagcaaccgcatcttggaagatgccttcgacagttcgttacgcaatcgagctatcaaacaacaaatcagtgaactgtttcaagcgattgtggaggagcaatgggagcaagtgaaaaccctccatcaaggtcttgtggaccaagtcgggcacgacgaaccggaactcgtaaaagcagatgtcttaatccgccgaaaacggagcttgggaagatga

SEQ ID NO: 88231 - DNA, 657 bp, Tumebacillus flagellatus
atgaaatatatccaaaaacggacggaaccccaagaatttgtggactggaagactgatttcccaagttggaacgatggacgcgccgctaactatgacgacctccaaaaccccctcaaaaaccaagtcaaacaatcgttgatcgaagaacaaggcaagatctgttgttactgcgggatgcgtatcgacgcaagaaacacccacatcgagcatctaaaaccgcagcaacactgtacgcccgaggagagtgttgactaccacaacatcgtcgcatcttgcgaaggggagaacaaaaaagtccattgcgggcataacaagcacaattggcacgacgaggccttgtttgtctcccccttacacgaaaactgtgcagctcactttgtgtacacctacgacggaaaaattctcccctgcgaagattccgaacttgtacctaaagcgcgggagacgatttttcaattaggattggacagcgagaagctcaacgcattgcgtcgtgtagcttgggagccgattttgtatctcgaagacctgacgatcgcagacattgacgcctatcttcaggcttgtgatacccctaatgatcagggtgaatttcctgagtacgcggcagccgtacaatccattcttcaagtggaaaaaagaaaaatgctctcatga

SEQ ID NO: 88232 - DNA, 1398 bp, Escherichia coli; identical to SEQ ID NO: 86108

SEQ ID NO: 88233 - DNA, 732 bp, Escherichia coli; identical to SEQ ID NO: 86109

SEQ ID NO: 88234 - DNA, 1257 bp, Bacillus thuringiensis serovar kurstaki str. HD-1; identical to SEQ ID NO: 87076

SEQ ID NO: 88235 - DNA, 648 bp, Bacillus thuringiensis serovar kurstaki str. HD-1; identical to SEQ ID NO: 87077

SEQ ID NO: 88236 - DNA, 1323 bp, Endozoicomonas numazuensis
atgaaaattaacacattgagtctggagaattttcgctgctttgagcaggcgaagttcgatcttgatgaacgtatcactctgatcgtcggcgataacgccaagggtaaaaccaccatacttgaagggctttctgtggctatggggggctttctgctgggcgtgcctcacagttatgttggggtaacaaagcaggcatttgtcagaaatctgcatgcccgtgatgtccagcgttatattctcacctcaaatcaagtagcgacaaccgagcttaaggaaaactgcaaggtggctgcttgtggtcctgttggtcaacaccgctcattgagttggcacaggttactcaaaaaggccggcggaagaacaacaaacgaagggtgcaaaaaaatcagtgcagaagcagcccggctttatgagacacaaaaaacagaaggagctgttgctgaaaacctgcctgtgctggtttattacggaactggacgtttgtgggccgggcagaaaacacagaatgtcaacaagttcaccgcagcgaatacggctcttggctattactatgcgttaaaatctgatgctcagaataaaacattgatgccgtggctggagtggattgatcgcatcgcctacaagaaacgaatacctgatatgccagcactggtagccgttctggatgctattacggctatgattcccaacgcaacccatagttattattcgccggagcactctgagctggttgtggaattcaaggataaagcattcccctactctgatctcagcgatggacagcgcaatatgatcaccctggcaggtgacctggccatgcgttgtgctcagctcaatcagcacctggggaaagacgccgctcgaaaaacgcccggtattgttctggtggatgaggttgatgccaatattcatcctggctggcagaaactactgttacccaggctgctggaatatttcgaaaatatccagtttgtggtgaccagtcattctccttttattctacagtccctggatcatggaaaaattatcaaccttgatcatatgaacaatcctgaacaggatgcagatcagtggaatcgtggagtggaggatattgtgactgacgtaatgggagtagatacaccacgaagtgccctgtatcaagaaatgatggaaaccgcccagaagtattaccagctgcttgaggctggcaaacccgccaccgatgcagaggtaaaaaagttgagtaatgagctggatcaatacgagctggaattttcagagcatccggcctatgtcgcactgttaaaagcgcagaggaaaaaacaggggctggatggatga

SEQ ID NO: 88237 - DNA, 630 bp, Endozoicomonas numazuensis
atgaggccggttgatcgactcgatattgaaaacagttattcaacctacaagagctaccttaaatctctgatagagagttttgggcaattttgctcatattgtgaacgccctgacaaaatggatgttgagcacgtagtaccaaaatccaaggaggctggccttgaagttgagtggactaacttgttgttaggctgctcacgttgcaaccgggatttcaaaaaagacaaaaatgaccgccgtgaaggttatctttggcccgataccgataacaccttccacgcctttacttacgaagaaacggggcgggtttttgccaaccctgaattggataatgcagcccggcaggcagcagaaaacctcaaagtgctggttaagctggatgatggccttgaagttcaaaagacgttgaatctgggccgaagagctgagtttaggagggcgaacctaataaaagaccagtttgccaatggatatatagatattgaagggataatgatcatgctcgatagagtgtcctattggtctgtgtggatgactgtgtttgctgatgttccagaggtaaaggcgtgtttattagacagtgattgttttccgaatacagctacgcattattttaaggaagagggataa

SEQ ID NO: 88238 - DNA, 1146 bp, Janthinobacterium agaricidamnosum NBRC 102515 = DSM 9628
atggagccgcaaatgccgagtgcggtgaccgccaccgggcgctggccgggagtgacgaatgatttcgcgtggatgcaatcccgtgagcgtgtcaaggctggcaccaatactttgggcgattcatggacaaaacaactgacaaagtacggtaccgaattacagaaaaaaatacgtgaagagcaagacggagtacagactgctttacctctgatcgcctatctgggcacaggcaggttatggtatcagggccgctatacctcggttgcggccgacgtcaccctcgataaaagcgagtattcccgcctgtcaggttacttgaattgcctgacgctgtcgtccagcttcaagcagtttgccgactggtatggctgggtctatcggagttaccgcgagagccagatcatcgcactcgaaacgggcgtcgggccgggcgatttgacgcaatattttgaaaacctgatacaggcagtaaaaagtgcggtgaacgccctgctgcaagagcagaccggctggcatgacattgcgtatagcgcccagtatcagcaacagctggtattgagccatccggagcatggcgttttgcctctggaaatgctaagtgatggcttgaggaatgccgtggcgatggtcgccgatctggcattccgtgcttgcaagctgaatccccatctgggcgccgaggtcttgttagagaccgaagggatcgctttaatcgatgaaatcgatatgttccttcatccatcatggcaacaaacagtcttgggctccttaaaacaagcctttcctaaaatacagttcatcgtcaccacccatagcccgcaagtcctcagtagcgtcaggcgcgagaatatccgggtgatcggcaaggatgccgagggccatatgatcgccgaaccgccgctcgcgcgtacctatggcgaacccagcggtgacgtgatgctgagcgtgatgatggtcgatccccagccgccggtggccgaaaaggaagatttgcagcgcctgaccgaattggtcgatcaaggtaactatgcgactgaagaggcgcggcgcttgatggatggactggttgccgcgcttggtgcggagcatccgcaattgcagcgacttgagcgcagtatccggcggcaacaggctttgcaacgatga

SEQ ID NO: 88239 - DNA, 723 bp, Janthinobacterium agaricidamnosum NBRC 102515 = DSM 9628
atgaggttcatcaaaaaaccggatggcggcggattttatctggcgcaggcgcatgcacagccgccgcatggcgcaaaagacgccaccagccgctggcagagttacgcgcataggcctgccctgtgtgaggaattggtagaggagcaattttttctttgctgttattcggaaatcagggctgacttgctgggtttgggctatcacattgaacatgtgcagccgaaaagcagctttcctcaacgtaccttcgattatcaaaacctggcggccagtgcgctggccagtaaaaatgatctggcggcattcaaggcgcaggaagacgaggtgtttgccggacatgccaagggcgatcaatatgacgcgcacttgtttatttcctgccatcaagccgattgcgcgcgtttctttgcctatttgtccgatggccgcgtagtgcctgcggagtcgctgcagcagcaagccgatcgggatcgggcgacctataccattgcgatactgaatctgaacagcccttatctgatcaacgagcggcaacgctggtggaatgaactggatcggattttttcgcaacatcagcagaatgactggagtatcgaacacctggcgatgtgcgatctattgccttctggtaagaagttaagccaatttttcagtatgacgcgacaattttttggagacgtcgcagagcgagtcttgcagcaagatgcccctcatcttgtgtga

SEQ ID NO: 88240 - DNA, 1338 bp, Mucinivorans hirudinis
ttgcccgataaaatgaaaattaatcgaatacatatcagaaacttcaaaggttttgaagatagaagttttgattttgaccctacattcaatgttgttgtggggaaaaatgcaacgggtaaatctactgttgtcaatgcgcttgaggtagctcttgggggatatttacagtgtttaggcattcctgctacaccacaatatcgcaggcaatttcgtgctgaagaacgcctcataaagtggaatcctaaagaaaaagattacttttataacaaggaaaacacttctatcagcgcaacagcaacgttcgatttgggtaacattccaaatatgtttaatccaatagaatggacaagggagctgttaaaaaataacacgaccagtcataacagaagattggtaggtgatttgattgatattagcgagaaaataaaagaacataaagactcaattcctatgcctattgttttaggttttggaacgaaacggacaaactcgcaaataagaaaaggcaaggaaaaacaagaaaagagaagacgactcgacaaagcctttttggcggcactaaacgacaaggtggattacgacggtgttatcgaatggattcataattacgaaaaaaatctcaagtatggaaaagagtttgaaagaactaaggaagcggtgtttagtgctattcacaccgcaataccatatctgaaaaatattgaatacaataattattatttgcaattagaagctgatattgaaatcgatgggtataattacggtacaacgcttcaatcaaatatgagtgatggattgcgtgttatgttaaaaatggttgcagaaattgcctatcgttgtgctgttttgaacggtttcttgggagaaagggctgtgctcgaaacccctggcgtggttcttattgatgagattgatatgcacttacatcctaattggcaacgcagagtgatttctgatttgaaagcagcttttcctaagatacaatttatcacaacaacacactcgccattcattattcaaagccttcaacgaaatgaactgctgatacttgacgattcaagggaaagagtaattgattttgaaaacccttatggaagcggtattgaggatatttcacaggtaatgggggtagaggaagtgccaagaagcaagcaatttatcgaatactcaaaaacggctgaagcctatttcaatctgattgagcaaggagtgaaaataatagacccgggtgaacttcaagcattaaaagagaaattgagagagtatgaagatagattttccgacaatcctgtctatgtagcccttatgagggcagaaaggagtcgtgtgaagttatga

SEQ ID NO: 88241 - DNA, 684 bp, Mucinivorans hirudinis
atgagacccgtaaaaaagtggcaacctaacgacgacagcacgcccgtaaaaatcttagaagattatattccctaccaaaaagcaaaagaggatttagtaaaaaatattggagattattgctcctattgcgagagaaaattacttttagacaccattcacattgagcatataaaatgcagagagttatatcttgaattggagaccaaatggacgaacctattgttgagttgcccgacttgcaatgggacaaaacgaacaaaagaggtaaaaccagagcagacacatttgcctgatagagataatactttgctgtcatttagttatttagaaggaggagttatagtagtaaatagttcgctgcctgagactgagcaaagcaaagcaaagaatttgatagagttggttggacttgatcgcagacccgggcatcccaagcatacatcaaaggacaaaagatgggaaaaaagaatggagatttgggaatatgcaaatcgctatatagagaatgacacacaaacaattattgatttggctaccttgtccggttgttggtcaatatggtataatgttttcaaagataacgcgcaagtaagaaagttgctgattgagaaatttcccggcacaaatcgtgattgctttaatgaatccggtgaaccgactgcacttgacagagattgtttataa

SEQ ID NO: 88242 - DNA, 1629 bp, Vibrio nigripulchritudo SO65
atgtcgagtgatatccctaaacaattgagaagactgacaagacaatctgagtctggtgacttcatttcgacttaccaattagccaagatgtactctgaaggtattactgggattgatgtaaaccttgctaaagcgcaaaagtacaaaacaaaatgcgctgagcaattagctgattaccaattctctttaaactctctaaagttaataaatttcaaaggtttcgaacacctagatatttccttctctcaaaaaggtaatacgactgtacttgtaggcaacaacggtagcggtaagtctacagtgttagacgcgatccaaaagacattgactcacttaagttcaaggttgacaacacgttcatataatggcgagcaaatcgatgaaattgagattgcaaacggtgatgatttttcgaccataatcccaacatttaccataaacaatgtacgatttagtctagagctttctcaaagtcgccccttaattgaagttaagaaaaaaagtaagttttcagaaatcaatgaactggggagcattcttcgtcaagcaaactcgtcgacgcctaatttttcgttccctttacttgcgagctatacggtagaacgagcaaatgacgtcacaactaaagatatagaagaatcagaagagattctgaataaccatacatgggataaatcgaaggcatatagtaaaagcctaacagggaaagcagacttcaaattgttctttagatggtttaaagagcaaattgagcaggaaaacgaagatagctctgagattcttgcactacgagcacaaatcaaaagtaaacaaaaagagcttgaaagccctcttttaaaagctttgatgtcagacgaaaacgcatctgaaagcgctcaagctttagtaaatagctacgctaaagatcttgagattctcaaaacaaaattaaacgctcaagctgatattaatagtaagtctttagatattgtacgaagtgcaatctacaagtttttacctgacttttctgatttaaaactgcgacgcaaccctctcgacatgaccataaaaaaagatcaagaggtactcagtgtattgcaattatcgcaaggagaaaaaagccttctagcattagtcgcagacatagcaaggagactcacgttacttaatccaggggtagaaaatcctctagatggaacgggattagtgttaattgatgagattgatctacacctacatcctcaatggcagcaaaacatcgtaagtaggctagaggcaacatttaagaacctacagttcattgtcactacacatagccctcaagtttgccacacggtagacagtgacaacatttggttattgaaaaatggtaccaaatttaaggcacctaaagggatgagaggagcagtctcgtcttgggtactagaaagcttattcgaagtagataaacgaccacctgaagattcaattacaatcttgctccagaactacaaaaaaatcgtttatgacaataagtatgattcagaacaagccctaaagttcagaaaagaacttattgaccactttggttcagattatgatgaactaattgaattggatttatacattgagaacagggaatgggagaaaggctttgaggaagatctttaa

SEQ ID NO: 88243 - DNA, 789 bp, Vibrio nigripulchritudo SO65
ttgaggaagatctttaagtctactgaagaaaatgagctaacaagatatgcaacagagcatcccaatggaacatggaataacttccgcaatcacaatcaaggtagagattacaaagcgatcaaatctaaactattcagcgagcaaagtgagctatgcgcatattgtgaagtcggtttacatgaggcaggagataataatcgaagagtagaacacttccactctaagtctgatgtaaccgacgaacaacataatgttcatttagattggtttaacttacttggtgtttgtgtcggtggaactgatcatgtcagcaagcaggcttttgaactgccagcaaacttgagttgtgatgcatacaaagcttacattgaggctgtagaaaacattacagacaaaaactggcaaggtaaagttctctctccactgacaattcctcagccacataagttatttacgttcaataaggctactggtcaattgcaccctaacgaggcttactgcgcggagtactctatggaagacaacaagtttgagtctactatagaacttgtttgtgagacgattagagtattcaacctcaattgcgaaaggctcaataaggcaaggcttaaagttttccattcttttgaaaaaagatttaaagttgccagacaaaacaatgacatgaatatactaaaaaggcttactttgcattggtcacaaggtagtcctttaccttttcaaactacacgtaacattataatggaagataacgctattacttcaaaaatgcttcaacaaatacaataa

SEQ ID NO: 88244 - DNA, 1335 bp, Bacteroides fragilis
atgcaagatataacaataaaaaatttccgatgctacgaagaaaaaaatatggaatttcggagaggagtaaatttgttgataggagataattctgttggtaaaacttcgttattgcacgcctgtaacttggtagtaaatgcttttttctctggttatagcgatgaaaacactgtatggaaaagtgcggatgacaacgatttccgtgaaacgggagttgcagaattacccattgaaattatatttcatcccaatgaacaagattatcccattatacaaacacagtctggtaacaattattctttagacccaaatgtagagctgaagatagaaaaaaagtctaaaaagaattctcgtaatcttacaacaggtttaaagccattaagagattatgccactgtttgtaatcattcttctcatatactacaagaagataaaagtgttctacaagtaaacgtattgcctgtatatgcttgttttactacggaagatatccattcagtgcgtaagtttgataagaataaatttaacaaatacaatcacaaaccttcatttggatattttgagtgttatgattgtagaggattgtttgaatgttggataaaacgtttgcttgtattaaaaggggctcaaaaaggtgaggaggaaattaattccgtaagaaatgccattattgatgcattaggctcaactgggtgtaatatcatcaatgatatggatatacgtcataatgaaggcaaggtatatttcaagtttgttgacggacgcgaatcagaatccgcattgttgtccgacggttaccgtcgtttgatgaatatcgttatggatattgctttccgttgtgctttactcaataaatctatgtttggcgcccagtgctacaaacatacgcatggcactgtcattattgatgagattgatgaacatctgcatccggctttgcaagtccgtgtgctgaaagcattgcaagatactttcccgaaaattcaatttataataagtacgcatgctcctttggttatgtcgtcagttgaaccaagaacagatgaagacggtaatgacatcaatgttgtgtataaactggaatatattgatgggaaatacacgcataaggaattgaatatctacggaatggatgcttcaacaattattgaaacatacatgggacagccttcgcgagacttgaaagtaaataatgatattaaatccatactggaattaatagataaaggtgatattcaaacagcgaggaaatcgttggaagagttagagcagaatattgctagtggtgacccggaattaacaagaatggaagcattaatctcgtttatggaataa

SEQ ID NO: 88245 - DNA, 690 bp, Bacteroides fragilis
atgattctgattacaaaaaataaagagccgaaagagtggactgagtataggaacactccaggagtagattatcaggctattccagaattagtccaatcactattgaaagaacagggatatatatgtgcctattgtatgcgaaggatacctacgaaagataaaatatataaaaaagacggagtaaactttgtatatactaatgaggaccatcgtatagaacatatcaaaagtagagagctgcatgacgatttaaaactagattacacgaatatggtggcatgttgtcccggtcatattggaacgcaagatcactgtgatagattaaaaggatcgaaggatatttcgtttagtccaattgataaacaatttattgaaactgtcagatacagttccaatggaaaagtatcttcaacaaatgatgtgtacaatggtgagatgaatgatgttcttaatctgaatacaaaactgctgtgtaagaatagactttcaatgttgaccgaggttatctgtaaaatcaattcaacttgtagaaaagggaaaagctgggataagaaaactctggaattgcttttaaagaaatacagtgaaaagcattcagtgaaagatgaagaaggaacaaaggaaaagtattatccatattgcgggattattatttggtatttacaaaagaaactacgtactttaggttaa

SEQ ID NO: 88246 - DNA, 1755 bp, Bacteroides fragilis
atggattctattcagatagattttacagaactaaggacatcatggactaaatatgatatagtccaagcattagatgttatatatagtgttgatactatacagaaatataagaataaggaagcaaaaattaatgaaagaattttgcgttcatttcttggtatcaactctctagatgatccaattcctgattattggattgaaattcaaaaatatccaatagaaaagaaaatattttcattactagctctgatctttactcatggaggggttgtaaaagactttgcaactaagtattcaaaagataacatgaaaggtgtcttttatattgattctaaagacaaacagcttactaatattcgcagtgctttagtggttgcagaagcaacagaaccgacaaataggagaaaaaatgaagtaccttatgacttctccgttgcatattataatcctaaagttggaaaattatttaaaaaagtattattagaaaggttttctagatttacaaacaaagaactctcgaatgatgagttttatagtatatgtgagaaaaatgaatttcataaagctttaagtttaacttttgatcaattcaaaacatggcttgaaggatatagctttaatgcgtgctatgttaaagaattacatatcaggaattttctatcaataaaagagccagtagatattgacctagaaaaatcaaaagaaatatattttcgtggagaaaatggtgacggaaagtcacttataataatggcaatatatcttgcttttaacggaaattatatcaaatataaaactgaaaagcgggatacaggaattgcatccgatatattggataataatagcgatctatatggtattgatgagtgggggcatcaatataatatttctaatgcaatatatcttgctaatctttatgcttatggtacacatcgcggaagatataatgctgatccttctgaaaaatatggtttcatgtcattattcaataatgatcttacactaaatagcccagagcaatggctgaaaaatctaaaattggaagaggaacaagctgaagaaaataagctaaaaataaaagttgcaactaaacaattagaagacattctatttaatttactcgaaagaaacgttaaaactcacattgaagggagtaaggttttttttgaggaaaaaggatgtttcctaggtatagatcaattatcagaaggatataggagtatcattatttttgtctgtgatttgttgtatcgtttatataaaaataatagcgacgatatattcaaaacgaaaggtgttgttttagtcgatgaaatagatcaacatttgcatttaaaatggcaaagaataattgttagtaagttacgaaatatatttccaaatatacagttcatatttacgacgcacagccctacaattattcaaggtgcatcagacgattctattatatttagaacatatagagtgaacggcataacaaaagtgagtgaaccctattatagaaaggacttagatcatctcatgatgaatactttagtaacttcttctctgtttggattggaagattccagattagacacagatgataataattccgatactaacgacacttatttattgtataaaataaacaagaaacttatttcaaagttacaagaacaaaaagaaaaaggtaagaattttattagtgagaacgaaattgactctttgatagatagcattttagaagaatatcaaaatgaagaagatcaataa

SEQ ID NO: 88247 - DNA, 777 bp, Bacteroides fragilis
atgaagaagatcaataaagacttagcagtaataccaccatcactagttattggtgatgataagttaacacaccaaaggagattagaactaatagcaaagaaacattatattaatgaagcaccttacaatgatcgatataaaactgatgatattagagatagattagtgcttatatataacaacaaatgtgctttttgcgaacaaaaggttgaacaatatcatattgaacattttagacctaagcaaatttactactggttagcatatagttgggataatcttttattagcgtgccactattgcaataattataaaggcataaacttcgcaataaaaggaaagcgagctaaatgccctagtacaaaaaatttaaaaagcatcaatactatatcatccaacaaatataatcttcaagagcaaccaaagttaataaatccagagcaatcagatccaagtccttacttgatatttgaaagagatgggaaaataacttctgataacgaagattataaatatacaatagaaacatgtagaatagaccgtaaatatttaaatgatagtagaaaaaaaattattgataaatttaagagagaaataatttcagagcttgttcataattcaactccagaagaacaaaagcaggctataaatatattggtcagacgttttgttaatgaagccaatgataatgataatgaatttttggcttttcgtaattttgcaattggacacaattggttaaatgatgtagtaaaagaggctattactactttataa

SEQ ID NO: 88248 - DNA, 1398 bp, Escherichia coli B7A; identical to SEQ ID NO: 86108

SEQ ID NO: 88249 - DNA, 732 bp, Escherichia coli B7A; identical to SEQ ID NO: 87715

SEQ ID NO: 88250 - DNA, 654 bp, Neorhizobium galegae
  bv. officinalis bv. officinalis str. HAMBI 1141
gtgacgccgaatctgcccatcatgcatcattatcagaagtttcaggaagtattgcgcaacgtgttgccgcaatcgctaggattcaagtacatcgagatacgcatgccggaagtcgttctggtgactgattcgggtgatttcaccctcgatgcgatgtctggtggtataaatgcgatctttagcatcgcttggcagatacatatgttcgcgcaagaccagcttgatttcatcgtgacaattgacgaaccagaaacccatcttcacccaagcatgcagagaacgcttttaccgagcttagcaaaggcatttccacaggcgaagttcatcatctccacccacagtccgtttatcgtctccagctttccagacgccaacgtctatgccctggttaggaacgatagagcgagggtcgaatccatattgctggatcttcgggacctctcgggaaccccgaacgaagtgctccgagaaattcttgacgtcggctccaacctacctgtgtgggtcgaagaggcagtcggtaaggtgatcgacgatacggccaaccttcctcctgaggaaaaagctagggcgatcatgacccagctagaacgccttggcatcgcaaatgcaatcgctgaatacgggaacagagtagccgatgcgaaaccttga

SEQ ID NO: 88251 - DNA, 633 bp, Neorhizobium galegae
  bv. officinalis bv. officinalis str. HAMBI 1141
atgcgaaaccttgacaagcttccgattccggaagtcttgaacgacaactggatccaatggactgagcagtacaaatccgacaaaacgagcgcaacgaaaaagtatcgctaccgtcactccgacatcaaatccactttggtagaagaaacaaaaagcaagtgcgcgtattgtgaaagcaagatcggacacaatactcctggtgatgtcgaacataaaactccatccagtgttaatattgatttacacttcgattggacaaatctgacgattgcctgcacagaatgtaatcgcagaaagctcacttactttgatgcacagaagccctttctcgacccctatgacggcgatgtcgaaaatcgggttattcatctcggtccagttgtaggatggcaacctggggatgagcctgctgaaatatcggtaaggacgctggaactgcatgacaacagcagagcaggactgatcaaaagaaagatcgaagccattgatcatctaaataatctggtagcgcgatatcatcaggtcgacggcgtcatgaaggaactgcttttgttgtcaatccaaaagttgaagagcaaggaagccgagtactcagggatgttaaaggcagtctgcgataattacgggatatag

SEQ ID NO: 88252 - DNA, 1188 bp, Amycolatopsis japonica
atgtacatcgagcgggtccggctggagaacatccgcggcttcagcggcgcccgcgccgtcgacctccggctgcccggccccggctgggtggtcctcgccgggcgcaacggctcgggcaagacgtcgttgttgcgcgccatcgcggtcgcggcggcgccggacgtcgcgtggggcctgttgtcggacgccggcagctggatctcgacggaccagacgtccgggtcgatcgagctttcggtgatgcgcgaggagggcccggcgccggtcgaggtccgctggctcgactccggtctcctgccgatctccggacttcctcccggccagccgttctgcgcggcgtatgggccgttccggcggctcgcgggcggcagtggcgaggccgagtcgtggatgcgcggcgcgggttcgctggcgcggatggccagcctgttccacgaagacgcctcgctcgccgagggggtcacgtggctgatcaatcagcatctccgtgcgctggaaggaaaagcgggcgcacgcgagctgaaggacaaggcgttggagatcctcggggacggtctcctgccgggcggttaccggatccgggacgtcgattcggacgggctctgggtcgagtaccggggcgaccggttcccgctgcgcgagatgagcgacggctaccgcacggtgaccgcgctcgtggtcgatctgctcaagcagctccacggcgccggcctcgatcacgagagtcccggcgtcgtgatcatcgacgaggtggacgcgcatctccacgtgtcgtggcagaaacgcatggggccgtggttcaaggcgcatttcccgcgcatccagttcatcgtcaccacgcacagcccctacgtctgccaggccgccgacccgggcgggctcatccggctttccgggcccgacgaagaggttccgccgcgtgtggtctccgaggagctgtacgagcgggtcgtgttcggctccggggacgacgcggtgctgtccgaccttttcggcttggacacgccctattcgccgcaggcggtcgaactgcgggagcatctcgccgagctcgaattccaggtggcttccggccgggcggacgcgaacggcgtccgggaatgggaacgcctgcgcggcatgctgagcagttcaccgccgagccgggtcgacgaggtggccaggcggttcgaggccgacgatcggtga

SEQ ID NO: 88253 - DNA, 741 bp, Amycolatopsis japonica
gtgatcgggatccgccggatcgcgctgccggggcaggtggtggccgatctcgaagagctgacggcgcggatcccttccggtgacacgaaagaagcccggcgactgtggcgggtttcccgtgccgtgcggcgttccttgcgggccgggctggacgtcatggccgccggccgcggctactgcatgtactgcggcgacggcctcgggtccactgtggaccatttcgagccgatcgcgaggaatccgggacgcgtcttcgactggctcaatcacgtgctcgcctgcgaatactgcaacagccaccacaaacgcgacctgttcccggtggacgaggacggcaacagcctgctcgtcgatccgaccgccgaagatccgctggagcacctgttcctggtgctgtcgatcgggacctaccgcgccctgaccgaaaagggcgaacagaccatcaaggtctgcgggctgaaccgcgcgcaattggcgcgggggcgggaaaccgcggtcaaccaggtgagcgcgctcgtcctcgcctggtggaccgcgcgcgaactgggggacgaggcgaaacggcgcgcgatggtctggaccctgctcgaccagccgcacgccgacgtcctccacgcgatgcttcgccaggcgcggatgccgggcgcccgcgtcgtgttccgcgcggacgacgagctcatcgacctgcttcgcgccccggaactcgccgaagatcttcagctctccggcggcgcggtgtaa

SEQ ID NO: 88254 - DNA, 1275 bp, Cystobacter violaceus Cb vi76
atgtacctgacgcgattccacatcgagaacatccgcgccatccgggaattgacgtgggaggttccgctcaagagcgcgccgggatggcatgtcatcctgggagacaatggctccgggaagtcctcggtgctgcggtccctctcactcgctttcgtcggtgctcctgacgcgctggctctccagccggattggtcgagctggttgcgtgggaaccagatgggtgaggtgcagttggggttggcaccagatccgcgactcgacaaggtctccaagttctccgtgggaaagaggcggggtcggcagcttcccaaggaattggatgtggttgtgagcttggcgggcggtcgggggaccaaacccattgagatggtcggggaagtctgggagaccgggaaggggtggttcagcgctgcgtatgggccctttagacgcttcactggtgggaacgagaaatacgagaagctcttctcgagtaacccgaggcttgctcgacacctttccgttttcgacgagagcgttgctctgacggagggccttcggtggcttcagcagttgcagttcaagaagctcgaaggcgatccggaaggggcgctgctcgatccattgatggagttcatcaaccagcctggtttcctgccgcatcacgcccggctggagaagatcagttctcgtgaggtgctcttcgtggatggcaacggctaccgcgttcccgtggaggaactgagcgatggctaccgctccatcctgagcatgaccttcgaactcatccgccagctcgcagccacctacgggccgaagcgcgtcttccatcctaaggatccaacgaaagtggatgtgccgggcgtggtgctcatcgacgaagtggatgcgcacctgcacccgacctggcagcgaaaggtggggctctggttccgtgagcacttccccaagctgcaattcatcgtcactacccacagcccattggtctgccaggccgcggaggtgggcacggtgtggcggctccccaagcccggtacgaacgaagaggcccggcaggtcacgggtgtggagctcgatcggctcatcttcggtaacgtgctcgatgcctacggaacaggactgttcggagaggacgttgcgcgctcggaacaatccaagcagcggcttcagcggctggcgaagctgaacctgaaggaaatgcgccaggggctgagcgctgcagagcgtcgggagcagacctctcttcgtgcgagccttccgactgcttccatggcggtccatgattcggaccagtga

SEQ ID NO: 88255 - DNA, 813 bp, Cystobacter violaceus Cb vi76
gtgcttcggctgcctgacatcacgctgtccgccaccgcgctgcaccagctcgaccggtggcaggccgaggtggatgctcattcgggttacgccgcccgggttgatgccgcgaaacgcgctttcgagcagcacaacagcgcgaggaacaggaccttcgccgaagtgcggcgaacgctggcggagatgtgctcgggggagcagcggtgtgggtactgtgaggactcggtcgcggacgagatcgaccacatctggcccaagcacctctacccggagcaggtgttcgcgtggcgcaactatctctatgcctgcggccgttgtaacgggcccaagagcgaacagttcgcggtatttaccccacgagcgcgcaagccagtggatgtgggcaggccacgaggggtatctcccatcagaccgccgttgaagggacccccagcgctcatcgaccctcgctcggaggacccgatggaattcctggtgctcgaacttcgggacaccttctacttcgagccgagcgcgaagcgaggcacgcggaactacgaacgggctgactacacactgcgcgtcctgcaactcaacaagcgcgagtaccttcgtaaagcgcgtgagaccgcctttattggctaccaggacatgctcacacgatacgtctccctgcgagagcggcgagcccccacgacccagctcgagttgcgtaggaaggccgtccagcgctcaccgcatcggacggtgtggaaggagatgcagaggcagcactcgatgcaccccgcgcttcggaccctcttccgcaaagctcccgaggcgattcactggtaa

SEQ ID NO: 88256 - DNA, 858 bp, Cystobacter violaceus Cb vi76
ttgctgccacgtccctttgcgagtgacaaagcagaggatcccatcctgagtaggctcaactcgctgttcgaccgcggccgaatcatcgggactggcttcgcggatttgctcgataaccccagtgagttctcgcgagcactgcgcgctgcgcttgtggacagccaactcctcccacgcgccacggacatcgacctgaaaggaagtggcgaaacgaagtctccaagcgaccttgtcgagaaacacagtttcgaactcaaggtcggcactgagacattgaggctacctgccacctggctctcgcagggataccagagcaccatcgcctgggtcgccgacatcatcggccagatgttctgggagaacggtggacccatcccgctctccgagatggaggggctggtgctcatcgacgagattgatctgcacctgcaccccaagtggcagctcggcctcatccccaccctcaagcgagtcttccccaaactccagttcatcgtgacgacgcactcgcccatgatcctgcccggactgtcccgcgaagaggttgtcatcctgggcaccgacaaggagggcaacgtcatcgcccacgaaagcccggagtctccctccctgctcacgggcagtgagatctaccgaaccttcttcggcatcgatcggctccaccccacagacctcggcaaggatctccagcgctacagcttccttatcgcggaccccctccggagcgacgaggaagacaaggagatgcgcgacatccgggagcgcctcgccgcagcgggcgtcgaccccggatgggaacccgtcccgcgcatccaggaaccaccggagcagacgaccgtgagtgaagagccgtcatga

SEQ ID NO: 88257 - DNA, 813 bp, Cystobacter violaceus Cb vi76
atgatccgcatccatcgaggcgtggaacctgcggaactcgcggccgccagggccaccgaactccagagagtccagaccatcgcagccacgcgccgaccagtccaggaagacctcggcaggaagtacgagatcgcccaccaagcgctctggaacgcccagcgctacaagtgctgttattgcgagagccgggaacaatcgaagcgtaacgacgtcgagcacttccggcccaaggctcgagcggaccggcgacccggcatcagcgtggatcatggatattggtggctcacctggacgtgggagaacctcctcttttcctgccgcaactgcaatcaagcgcccgccaaactcgacaagttcccactcgccgaaggcagtgcggtgctgctggtaggccaacatccaccgggccaggagcgaccgctgctcatcgatcccgcaacggaatcaggcatcgagcacatccagttcgtccggatgccccacggccccacgacaaccggcaagtggtatccccgacctcgcaacggaagccgcaagggagccgtgaccatcaaggtctgcatgctggatcggcccgatctgctcgacttgtacggtgattatgtcgagcggaacgtcaagccgagaaccgacgatatccgaacagccctccaagaaggccgcattgcagatgctcgccgcgagtggtcgcgcgcgctgctgaccttgctcaatccgcgtcaggaatacgtcgggctttctcacgacgcgctcgaccacttcatccccaccgtggtccgcaagagacatcagctcgagctccgcctcccctga

SEQ ID NO: 88258 - DNA, 1311 bp, Cystobacter violaceus Cb vi76
gtgcttgaggccctgcacctgaagaacgtcgggcccatgcccgagacggagatggagttcgcacccaggctcaacctgctcacgggcgacaacgggttgggcaagagcttcctgctggacgtggcgtggtgggcactcacacgaaggtggccgcacgatctcaactcgaacttgacgtctggctacccggcccgtccctccgacgtgaagaaggcggccagtattgacttcaagctgacgtccaagaccaagagcgtcttctatcaaagcaaatatgtgccgagagacgagagttggctgggcaaagcggggcgcccttggaacccagggctcgtcatctacgcccatgcggacggcggcttctctgtctgggatcccgcccgcaactactggaagaagaaaggcagcatcgatatccaggagcgactccctggatatgtcttctcggcgaaagaggtctggaatgggctcgaggtcgacatcgacggcaagcccaccctggtctgcaacggattgctgagcgactggtcggcatggatccgggagaaaggggagaccgcgaagcggatggaggagatcctcggcaacctgtccgcccaaggcgaacatctccgggtggggccgctcaagcgcctctccatcaatgatgcccgcgatatcccctccatccacacggcctactcggccggggtccccatcctccatgcgtcgtcgggagtccgtcgcatggtcggactcgcctacatgctgctgtggtcatggaacgagcacgcccgggccgcggagcagctgggcgaaaagcgcacctcgcaagtcgtcatgttgttcgacgagatcgagagccatctgcaccccttgtggcagcgctccatcctgaagtccgtgctccacatctccgaatcgctccacgcgaaagcgacggtccagctcatcgccgcgacgcactcaccgctcatcctggcgtcggccgagcccctgttcgacgccaacaaggatgcctggttcgatctggatctggagaaaggacacggcgagccggtcgtcacgctgcggcggcgcgacttcgtccgccggggtgatgtctccaactggctcaccagcgaggcctttgatctcaagagcgcgcgctcgctcgaggccgaggccgccatcgagcaggcgcgagccctgctgcgacgcacccagccgccgcccaccctcaaggaggccaaagcggtggatgcggaactgcgcaaggccgccctctccgacatcgatcccttctgggtgcgctggggcaacttcatggaagagcttcgaggcctcaaatga

SEQ ID NO: 88259 - DNA, 660 bp, Cystobacter violaceus Cb vi76
atgattcccgtggcacctgcccccgagcctcctgacttcgatctccgcgtccggcagaaggggctcaacgccatcgcggagatggtcggcgaaaagccagcccggacgaggagaggacccaagcggaagaagctcgcggacacgcgcgagaagattccagcggaccaattccctccgtactggcgcgaggtgctgcccgagatgctcgagtcctaccaccatctctgcgcctacctcgcgctgtacatccattccgcgacgggaagcccatctgttgatcatgtcgtccccaaatccaagtcctgggacaaggtctacgagtggtcgaactaccggctggcgtgcgcactggtgaacgcgcgcaagaacgacgtggagttggcgctggatcccttccagatcagccctggcttgttcgcgctcgagttcgtggagttccaggttgtcgtgggtcccgccgcccaaggcaaccaggtcgatcaagtcaccgcgagcatcaatacgctcgggctcaacgtgcgcgactgccgcaaggcgcgccaggcatacgtcgaagcctatgagaaggatgagatccgcctgtcgtatctcacgcggcatgctcccttcatcgcccaggaactccgtcgccaggggcgattgctgagaggagatacctga

SEQ ID NO: 88260 - DNA, 1311 bp, Cystobacter violaceus Cb vi76
atgtacctgacccgaatctccatccggaacttccgcggcattgaagagctcgactgggatctgccgcccgatgctccgcgggccgggtggcatgtgctcatcggcgacaacggagccggcaagagttccgtcctgcgggcggcggcgctcgcgctcatcggaccggaagaggcgccaatgcttcgcctcaattggaacgactgggtgcgcttcggaaccggttcggcggacatcgacttgctggtcgaggccgacccgaaggaagaccgatcggtcgatcggtccgccgtgaagggtccgctgcgcgtgggaatcgacgtgcagcgccgcccaaagcctcgggtcattgggtcgacgcggtggaagacgagaggcgcgccgcccgagtcgaatgtctggggaagcccgcgcggatggttcgcggcgtcgtatgggccgttccgccgctttaccggcggtgaccgggattgggagaagctcctcgaggagcagtcgcgcgtgactcgccacctctcgattttcggcgagtcggtggcattgacctccggcctcaagtggctgcgcgatctcgcactgctcgagtacacgccggttgggcggatgaagccgctctttgcgccagtcaacgtggacaaagtgagcacgttcgtgaaccagcccgggtttcttccccacgggatgcgcattgacgaggtcacgccgcaggaggtcgtcttccgcaatgcatccaaggggcgcgtgcccgcggagaacctgagcgacgggcatcgcgccgtcctcagcatgacgttcgagttactccggcagctctcgctcgcgtaccccgatcgcgatctcttcgataaatcgggtctgagcgtggctcggcccggcgtcgtgatgatcgatgaggtcgatgcacatcttcacccgacatggcagcgggagattggcccttggttctgcaagcatttcccgaacatccagttcatcgtcacgacgcacagcccgctcgtctgccaggccgcggagttcggcaccgtgttcaagctcgcggtgccgggctctgacgaggaaacgaggtttctcaccggcatcgacctggaacgtctcgttttcggcaatgtgctcgaggcctacgggaccggcgccttcgggctgcggacgacccgctcgcgcacgtcgcaggagcgtgtcgacgagctcgcggccctgaacgccaaggaactgacggacggactgacgaagaaggagctggctcggcaggaggaactcaggcgctcctctccgacagtcgcatacgtgtcgaagccgcgggtgccgcggtcatga

SEQ ID NO: 88261 - DNA, 849 bp, Cystobacter violaceus Cb vi76
atgatccagctgccccggctgcgcctcgacacgaaggtcgcgaagacgctggacgagtatcaggccgaggttctcgcccatcgcagctacaccgcccgggtcgcggaggccaggcggctcttctcccggtacaacacgaagaagagcgcgaccttcacgagcgtgaaggcggtcctcacgaagatgtgttccggcgcgcgccgctgttcctactgcgaggactcggtggccgacgaggtcgagcacatctggccgaaggacctgtatccggagcgcgtcttcgcctggaagaactactgctacgcgtgtggtccctgcaacggcccgaagaacaaccagttcgcggtcttcgtcggcgcgagccgtagccccacgccgctcgcccacccgaagcgcaagaagggccagcccgcgcccaggctcaagaagccggccgcgggaaagccggtgcttttcgacccgcgcgaggacgatgcgacgcggtggctgacgctcgacatcctcaacaccttccacttcgtcgtgacggcgaagagcgggacgcgcgacgccgcccgagcgaagtacacactggaggtgctcggactcaaccgttccccccttccaacggcccgcgcacaagcttttgatgggtatcgcgcgaggctgcgcgagtattgcgaggagaagcgcgccggtgcgcccaccgcgcgcctcgtgctgctgcgggatgcgctcctgcgagtcagccacccctccgtgtgggtcgagatgaagcgacgccacgagaaggtccccgcgttgaagccgctcttcgccgaggcgcccgaggcgctgtcctgggagccgctcccgggcgctgcggggtag

SEQ ID NO: 88262 - DNA, 1419 bp, Halomonas sp. KO116
atgaaactgaacaaagttgatgtcaggaactaccgctgctttgcgtcagtgagcctgtctttgcacccccaaatgacggtgattgtggcggagaacggtcaggggaaatccaccctgctagatgcgttacgcgttgggctatggcccttcatcagcagttttgatctggcaaaggcttcaggatacagcgacccgcaaaacggtatttcagtcgcagacgtgcgccgtgtgatggagagcagcgtggggatgaagcgtcagttgcctaccattatcgaaatggaagccgattggggcgagctttgttcagtcgagtgcggcaacaccatgccagcgtcacactggcttcgttttcgtgaaagtgaagctagtcgcaccaaaacgagaggggatggtgataccaaacagttggagaagtgggccaaagcgctacaggaaacggtgcgcaagccagaagatgcttctcccttacccgtttttggttattacggcactgggcgcttgtggatgcagaagcgcctactatcagaagcagatcgtcgctcagaaaaacagtctgagaaagacgacttctacgtgcgcacttttgcctaccgacactgtatggacccggcctcatcgttcaaatattttcgtgactggtttatctgggcttggaaaagtcgtaccaacacgaatgagcgtaaatcggcaacatcagctgaccgaatacgcgctcatgaacgcattgaagctgttcagcatgctatcgacgctattcttaagccgaccaccggctggcatacattggaatatagcctggaagatggcgaaacccttattctcaatcatgataatgcaggctatttatcggtcgaccagctaagcgacggcatacgtagtgttttggcaatggtaggggacttagcctaccgctgtattcgcctgaatccacatctagggtcggaagcgccctctaaaacgacgggtgttgtgttgatcgatgaagtagatatgcacctgcatcctcggtggcaacagcggattttgcaggcattacaaacatcgtttccctctattcaatttgtggtgactacacatagcccccaagtgatcacaaccgtggcgcgggagaatctgcgcgtgattcacgaagaggacgggcagttcgatgttggtatgccagaattcagccccctggggcattcgtcaggggatgcgctttcgtatgtcatgggggtaacgcccactcccgccatcgacaacattgaagaactggtggcgcaaaccgagcagctgattcgtgcaggcaaagagcaaacgccagaagcgcagcaagctatgcaaaccctcacggcaatgggctacgaatttactgaagcagagcttcacacttggcgctttttggcagacctgaaaaagagccgtaacaatggttga

SEQ ID NO: 88263 - DNA, 600 bp, Halomonas sp. KO116
atggttgaactacagcatggcaacacagaacctcatgtcctgacagcgttcaagcagcagcaccctggcttgcaggtaatagactttaaagagaatcagcaatttcaggctatcaagtacgaaatacgctcggcccttaaccttttgcaggaagggcgctgcgtttattgtgaggcttggctgagtgatgaagaggggcatattgagcatatagtgcccaaaggtgggccaaatgctcagccaacgctctgtttcgagtacaccaactttgctcatagctgttccacgtacaacacctgtgggcatagcaaacaagcaaaagtgttacccataccaccagggccgggctgcaatgatcactggaccctaagcaccgaaggcggttatatccaaccactggcgggattgaaccggtcacagcgccacaaagtgacgcagacccgcgatatgttggggttaaacaggcacgccgagcttgtacgtgacagaaaaaaatggattgaacaatttgaggtagtggcgaaagctcacccagaagcgatagaccagtttattgacagtgcgccgtatcgatacctactcgccacactgctccggtaa

SEQ ID NO: 88264 - DNA, 1350 bp, Hafnia alvei ATCC 13337
atgcgtcaacaataccggttagaaagcataacactgcgcgatgttggcgtgtttgagcatacccattttgattttccacagatcaaaagcgaagaaaaagacgctgagaaagcggaaatccatattttcaccggcccaaatggctgtgggaaaagtactctgctgtatgcgttggctgcggtgtttcagcctgatcctaatgatggtggaaggcttgttagaaaacgctatcgtggtgaaaatagcagcattagatttattttttaccaagagcagggcgtatttggtgtgcaaaatatggcatctcctgattctgttcagcaaatatacaatactgatagtttctactatgcggtgactaatggcgtacgtagtgtgttgtggcgtaacgttagctattttaatcatagccaagaatattcaacaaagaagtttgattttgctgcttttgcatattctggtaatcgtgatatgcaatcttcctttaatgtttctgcaattcaaaatattactaactcgccttttgagagttcattgtcttttgggcaaacagtgcgaccacaggtgttaactcaatggattgctaataatagaactcaggctgcgcttgcgcgcgctgatggggaggttttagaagcagaacattatgatttagcattattacgtattagccagtttattcgtaatatctgctccttagatgtatcgtttcaacttaagcgtttaccgctcgaagttattatcaatatggacggtttgaaagtaacttttgatgctttgcctgaagggcttaagtctataatttgttggatttctgatttagctctccgccttgaatctattccttggcaagaaaatcgcgatatcttttcccagccaattatcttattcctcgacgaagttgatattcatctgcaccctaaatggcagcgccgaattcttcctgccattcaaaaactgctaccaaatgctcaagtgtttgtctcaactcactcaccttttgtagtgggctccgttgaggatgcctttgtttaccgcctgccagatcctcagagaacggtatgtagagatcctgcatcggcagaggtgataacgccaacgccgtctgctgcaggtaaaagctatcagctgattttagatgaagtgtttggcattgaagagcaatttgacgttgaaactgaagcgttgcttgaaaaattctatcagctaaaaaaggcttatttatccaatccacaagatgatagccagctcgttgcattggcggcagaattaagcagcaaaggctctgaagttgcaactattgtgagcatggagctgcgtcaaataacgcggttggtgaagaaaggttaa

SEQ ID NO: 88265 - DNA, 600 bp, Hafnia alvei ATCC 13337
atgtataagtttatccgcagtgagtgccctgagtacttagccttatgttgggagtcactcactgctcaacaccgtcaagccaaagaaaataaccctaaacataagtttgattggtatgcgggtttcaaatatggcacgacactagacatactattcacaatgaatgtcggtcattgtgcgttttgtgacggtggcggaattggcgaacaaagccgtaagaccattgaacattttaagcctaaaagccttttcccagatttagcttataagtgggaaaacctttacccgtgttgcgatcaatgccaaagccaaaagcgggagcgatttgatcctgacttgctcattgccgacgatatcgcttatcaatttgatggctacttcatgctcgattaccgcactggcgctattgagccctccgcggcagttgattctaatcatcagagacgtgcacaggtcaccattgagcactacgggctaaacttaccagaaaggaaaagagggcgattgcgagaactgcaacactatcaacgccgagacaaggacgtaagccaacttgatgattttagctatcgttactttttgcaggattacactgattaa

SEQ ID NO: 88266 - DNA, 1497 bp, Rahnella aquatilis CIP 78.65 = ATCC 33071; identical to SEQ ID NO: 86496

SEQ ID NO: 88267 - DNA, 621 bp, Rahnella aquatilis CIP 78.65 = ATCC 33071; identical to SEQ ID NO: 86497

SEQ ID NO: 88268 - DNA, 1578 bp, Bosea sp. LC85
atgcgaattgattggctcaaaattcatcaatttaagaatcttggcaatgttgagatcaatttcgacaaaagcgagctttctaccgtgcttgtcggcgaaaatggcacgggcaaatcgaatgttatcgaggctttggcgacgatctttcgggacctggatttgggcacggcatcagcgtttgaatatgcgattgcctataagtgccatggtcatcacatcgtaatcgataacagccaagagcacgcgacgccccgcatcactgtcgacggtaagtctttatcgcgcagtgcctttcgggcgggtcggtctgcgtttttaccttcgcatgttttcggttattattccggctctagtcggcggctcgagcaacttttcgacaaacatcagctcagatattacaagaaggtcatatccccgcgctcgtcagcggcagacatccatgacatggaccttcgccgcctcttctactgtcgtccggcttatggccagcttgccttgctaagctattttgccttcgggtcggaatcggcaaaggcattcctgaagaagaacatgggcatcgtcggcttcgacagtgcgcttataatactgcgccggccccgatgggccgatgggaaggaagcccggcacagagcgcagtcggggaagcagaatttctggaactcttccggcctggtgcgaaccttgctcgacaagctctgggcgcatgccttggcgccaatagaagatcttgcgcttgagcaggatgactatcgggcgaagccaaccaatgaggagcaaatctatctcttcatcgaagacttggacagtctcaaccagattgcagcagcctttggcgacgagcgcacattcttcgccttgctagaaacgctggatatctccgacctaataagggaggtgaggatctgggtcgcaaaagacaacgttgaaggggaaatacctttccatgagatcagcgacggggagaaacaactgctgagcgtactcggtttgatgcggttcaccagccaagatgaaagcctctttctcctcgacgagcctgatacgcatctcaatcccaattggaagtgggactatcttcatttggtcgatgaagtcgcacggcaaggtgagagccatatcatcctcaccacgcatgatcccctgaccataggaagtcttaaagcctcacaggttcaggtcttcgcccgcgctgataacggcgaggtcgctgttcggccaccggacgtagatcccagggggctaggcttcacaagcatcctcacgcagatttttggccttcctactacactcgatcccgcgacccagggcgaactcgacgagcgcaatgagcttctgcgcgtcaagggccgcacgcagcagcaggaacgaaggttgctagagcttagtcaacgcttgaggcgacttggctttgtccttgaggatcgcgagccggagtatgaactgttccttcgagcgctcactgatttgaagcatgaaggcagagctgcgctttcgccggagacgattgccgagcgcaacaacgtcgcgcgcatgatgcttgctcgcatcatggaggaaaggggcgcgcgaaaatga

SEQ ID NO: 88269 - DNA, 846 bp, Bosea sp. LC85
atgatctatgtctttcaggaccccgcgaagataccagccgcgtggctggccaaggtcgccgagttgcaggccgaactggaaaggcttgaaacgaagaaggagcgcgccggctacatcgcgaccaagcaagcgatttggagtgagatcaaggatcagcttctcgaaatgtcgcgccaaaagtgctggtattccgaagctccggacgcggtctctgattggcacgtagatcatttccggcccaaatcacgagccttggacgcagacaggacggtgcatgacggctatgcgtggctggccttcgactggaaaaactaccgcatcgccggaagctaccccaactccccacacaaggatggcgagggagtaactcgaggcaaatgggactactttcccctgtctcccggctcagtacgggctagctgggagcaacgcagcatagcgaatgagatctttctcctgctggatcctaccgacaaaaatgaccccaaactgatgacctttgatgaagagggcgtgcccgctccggttgatccgcgcaacccaatcatcagaaagagagtggagacgacagtccattatctttatctagacagcccgcggctgatcgctgctcgcaagaaaaagtggcgcgaagtatcggatttgatcgaagaatatcgtttcgcctgtcctgatagctatgaggcttgcacggttcaggaccatcagagggtacagcggcttatcgagaagcttgccgcggcggcagggccgcaggcgtcatatgcggcaacggcaagggcctgtctgcgcgcgaatggcttcgatcaatttattcaggcagtggaggaagccgccgcagcctag

SEQ ID NO: 88270 - DNA, 1647 bp, Xenorhabdus bovienii str. kraussei Quebec
atgaaaaagaatagacatattcgcgcattggaaatgaatgcaaaaaaaggtgatttgctcgctaattttaatctctatcaagaatattttagcggagaaatgaatgtagaaaagaacgaatcactatcagaacattactttgagcaatgttgtgttctgatagaagaaaataattttatattagagagcttaaagctcatagattttcgtcgattcaaaaaactgaatattgagaaaggattagatagacatcttactgtttttattggcactaatggtgaaggaaaaacttcaattattgaagctatcagtaaaacattgagttggttaaatgctaatatcttaaaagaagatggtcaaggaagtggtataacctatgacgatattcataatgaaagtgaaggttatgctgatatttatactgaattcaagtatggcgttgacactagaataaatgctcgtttatcaagagcaattgaagctgcatcgaaaaaacgtgatagtgaagtagtaggcttgaaatctattgctaatatgtggagaattattaatgataagcgaagaattaatcttcctttatttgcttcatatttaattgaacgttcttatccttttaaaattaataaaagaaattttctgatcgacatgcctgaaaagcgaaggttacgtttcgatgcttatactgatgctcttagaggtactggaaaatttgaaaattttgtagattggtttatttctttgagtaaaataaaaaaatatggaacctcaattttcaatgaagaattgaatcaattaaaaaaacaaattgaaattaaagttatgaatgaaattctttcaacaatctatgatgattctattttaaaggaaatgaaaaatagatatctagaatctttggaagaaaaacaagatgatggttcttatgaatctattattgtttctaaagtgattgaagcaatttcacatgtagtacccagtgttgaagatatttgggtcacagataaatctggtgttgatgagattctcgttttaattgatggaaaagcagttaaattaactcagctttcagatggtcaacgagtatttattgctttagtcgctgatttaactcgaagattggtattattaaaccctgaaaaagaaaaccctttggaaggaaatggtattgtgcttattgatgaaatcgagcttcatctgcatcctaaatggcagcaaagcataattacaacgcttcaggaaacctttcccaatatccaatttattatttctactcatagcccacaagtgttgtccacagtgaatagaaaaaatattcgttactttagtggagaagatgatacaggagcagtttggctgagagtacctgattttcaaacaaagggcgttgcaaatagcgatgttcttgaacaattgatgaatactttttccattccggatcttccagagtcaaaatgggttaacgatctaatcgaattggttgaaaaagataattatgaaaataattcgaatgctaaagagttattcaataagatcaaagaacattttggtgatgagcatccagaagttaaacgttgtgaaagtcacattcgtcttcaaagcttgaaagttaaggctcgtaaaaaatttgataagaaaaagggtgaaaattga

SEQ ID NO: 88271 - DNA, 681 bp, Xenorhabdus bovienii str. kraussei Quebec
ttgaagaaattagaacgtcaggaagctccagactgtttatctaattttaaacatggcatagatagttggggagcggttccgaaggatgaaatatggccaaaattggagcagatgcaaggtgaattttgtgcttattgtgaatgcagattgaaggagaagagtaagcatatagagcactttaggaagcgtgaaacgtatccagataaaacttttaattggggtaatctgtttggttcctgtggagatcctcaaaaaactggagggtggggacgttgtgggatatataaggataatagaaagctgaacccaccatgtgatatcaataaactgatcaaacctgatgaagaagatcctggtgactatttgcttttcttaacttctggccatgttgtccctcaacgaaatttgtgtgacagagaaagacaaaaagcggaagaaacgatccgtgtatttaatttgaataatgatacatcgttatttaatagccgaaagaatactatagagtgcataaaaaatgaaataagaacgctttatgaatgtctagatgatataaatgatagtgattgtcaatcttggcaagaatgggaaaaattacgtgaagaatacactaaagaaattaaaggaaaagaatttcaaacagcattagagcatgcttggaaatataaccgagattacgcatga

SEQ ID NO: 88272 - DNA, 1623 bp, Vibrio cholerae; identical to SEQ ID NO: 86122

SEQ ID NO: 88273 - DNA, 618 bp, Vibrio cholerae; identical to SEQ ID NO: 85887

SEQ ID NO: 88274 - DNA, 1623 bp, Vibrio cholerae; identical to SEQ ID NO: 85886

SEQ ID NO: 88275 - DNA, 618 bp, Vibrio cholerae; identical to SEQ ID NO: 85887

SEQ ID NO: 88276 - DNA, 1623 bp, Vibrio cholerae; identical to SEQ ID NO: 85886

SEQ ID NO: 88277 - DNA, 618 bp, Vibrio cholerae; identical to SEQ ID NO: 85887

SEQ ID NO: 88278 - DNA, 1623 bp, Vibrio cholerae; identical to SEQ ID NO: 86122

SEQ ID NO: 88279 - DNA, 618 bp, Vibrio cholerae; identical to SEQ ID NO: 85887

SEQ ID NO: 88280 - DNA, 984 bp, Thioclava sp. 13D2W-2
atgacgcaaagcggctcagttcatctacccatttttgcgtacggcgcctacaggcaattcctgaaaggcgagcgcaacttcgcggtccacaagcacgtgaggtcgctctttcattcagacgagctcctctccaatccggaacgttggttgctcaaattggatgatgcgaacttcgatatggtggtacgtgccctgcgagaggtcttcagtatcgagggtgcgttcgaagtccttgagcgaagtgatggtaagattttcgtcgtcgcagagccgtccggcaaggagcaggaaagtcccctcagaacacccattgagctggtgtcatccggatttcgcgccgtgctcgccatgctctgcgacatcatgcagggattgatggacccgcgggtgaacccgggctttgagtccctcgatggagcgacggcactcgtcttggtcgacgaggtcgaggcccaccttcatcctcgctggaaaatgtcgatcatgaccggtttgagaaaggcgttgccgggtgtcacattcattgcgacgtcgcatgatccgctttgtcttagaggtatgaagaaaggcgaagttatggtgctggagcggatatccggcgatcaggcccgcaccgaccttccagtatttacacatagcctcgtcgatctgcccgacaacgagaactggacagtggagcagcttttgaccgccgatttcttccagatgcgaacaacagaaagcctcgccgcggaacggcgcgcggcggaaatggaggaccgtttggccaagggtaccaaaccttcggatgatccggagctgtctgcttatcttacggaactctctgctgatctgccgattggccacacggaagtccagagactggtccaggaggcgatagcgactttcctgcgtgagcgtcgcgacgccagcgacgaaaagttgcggcagctgcgagacgaaacccgccaatccattctcgaagccttgcggagcgtcggatga

SEQ ID NO: 88281 - DNA, 951 bp, Thioclava sp. 13D2W-2
atgagaaaggtcgatcgaacagaagctgcgcccgaggatctgagtgagaagggcggtcaggagcttcttgatgcgattacgcacttcgaaggcaatcctgcaaacccagagagctttgacttcaagcgctacaagctcaagtctgtcaaagacgcgctcgaaaagatgtttcatggcaagtgtgcctactgtgaaaccttctatgcgagttctcagccgctcgacgttgaacacttccgtcccaagggcgccgtggctggcgaaagcgaccacaggggctactggtggctggcgatggtgtgggagaacctgcttccaagttgcatcgattgcaatcgaaagcggaaccaggtcacccctaaaggggatacgtcccaagtgcgactgctggaggaaacggctgggtattcggcatcggccaccgtcggatcaggaaagaaggacagttttccgctcgcagagacgggcgttcgtgcttcgaagcgcaccgaccagataacggccgagaaggcgcttctgttgaacccgtgcgaggacgacccgaaacttcatatcagatacttctttgacagagagaggcctgtctccttcgtcctagccaatgaactcgccggcgatccggactttacgggtgcggacggcttgagttcgaagggtgccacgtcggttcatgtctatggcctcaatcgtctgaggctcgtacaagcccgcacgcgccttcttcgtcggctggaatttctggccgatctcgcaatcgatctgaaactcctggctgaaaagttgaaggggagtgcagacccggacatcaaacgcgcgggggtgcaggtggacgggttcggggaccgaacgcttgtcgagctgatagagatgtgtgccgaagatcagccctactccgccatggcgcagtcctggatgcgcgagtttcaagaacggctcgaagcggtagtatga

SEQ ID NO: 88282 - DNA, 1359 bp, Pseudomonas syringae
atggaaatcaaaagcttcaggctcattaacgtggggcggttcagtgatctggacgtcgctctggcacctaccgaaaagcatgcgtcgaaggtgaccgtgctggtcgggaacaatggtgctgggaagacgacgttgctcaagtccgtggccacatcgttaagctggttggtggcaagggtaaaaagcccgagcggtattggcaggcggatagatgaggatgcgattcagaacggtgctgcaacgtcttcgatccttattcgtgtacaagatgtgctgatttcggatttcttggttgactcgcttgagtttcaatggggaattgcagctaaccggagagggcgtcactctgcctctaccataggcttaggtgaactcacaaaactggcgggaggctaccgctcagaactcacggaaaaggctgatttttcacttcctcttctggctttctatcctgtcgagcggtctgtcattgagataccgctcaaagtccaatccaaacacacttttgatcagttggacggctacgacaacgcgttgggtcggggcgtagattttcgccgtttttttgagtggttccgggagcgtgaagacagcgagaatgaaacgggtatctcgacagagctgcttaatgagctgtctcaaaaaatagcacccggcacgccagtatgggaattgcttgccaaagagcatgcctcgtcgcgtgatcgtcagctgacagcggtcagaactgcgattgaagctttcatgccgggctttacaaagctgcgtgtcaaacgtaagccgcgcttgcatatggctattgataaagacggcaagacgctaaatgtatcccagttgtcccagggcgaaaaatcgatgatggcactcgtcggcgacatcgccagacgcctcgccatgatgaaccccgcgcttgaaaacccattgcaaggcaatggcatcgttctgatcgacgaagttgatctgcacctgcaccccaaatggcagcgcagcctgattgcccagctcactacgacattccccaattgccagtttctcctgaccacccattcgccgctggttatcagcgatagcaaagatgtgctggtgtacgtcatggacgatggtgagttacgcgagcaggacagtctttatggccttgatgccaatcaggttctgtcgagtgtcatggacaccggcattcgcaacgaggcagttcagaactgcctggacgaaatgcagcacttcttgatgaggggcgagcttgatgaggctcgtactctctacggagtgctggccgaccagttacctgcagatcacattgaactggccagggcttcgttactgattcgcaagctggaaatacgtcgtgagaaagattga

SEQ ID NO: 88283 - DNA, 651 bp, Pseudomonas syringae
gtgagaaagattgaaaagggaactctcgcggtgctggagaaatggaagcgcgcgaacaagggaaagaaatacgcggacctcgtggggcacgacaatctcaaggatgccattcgtcatgcctgtgttactgagcagcatggtttgtgcgcctattgctgttgcagaatcaccgtcgagaagggcagtgcccgcaatgaacatgtcgaagcacaatatcttgctccgcaccgcacgctggacttcaacaatattgttgcgagctgcaccaaggccggacggtgtgacgatgcccatggtcgtcagcctctaccgcttacaccgttgatgatcgaatgtgaaagcgagctgcagtttgagctgtcgggtctggtggccggcctaacgcctcgggcatgcgtcagtatcaagacacttaatctgggtgatactcatgcctcgaaccgaggcctcgtaggtgagcgcaagaggatgattgatgcgctgttgttctcctgcagcatgaatcctggcgaactgttggccgaagaagatgatgttcttgacctgttaaaggatgaactccttgaatcagacgctcagcgcttgcttcaggcattctctccagtgttggtcaatgtgattcgtagcatccaggccgctcgtcattcctga

SEQ ID NO: 88284 - DNA, 2298 bp, Pseudomonas syringae
gtgcagtactttgagcggccaagccagcctcccgcgattctgaagtcaccgctaacccaggcatcgcgcaaatcgatgctggaatactggctgattgagcccgggcgacggtcgcaaaccagtgtccccatcattagcgtcaatgaagacgaacacctcctgcgtgaagcgttggcaaacctgaataggcagcgatgcgcgttttgtgaggccagcgatcggctggaagtgcatcgcttccggcccgctggtaatgccttgcccatgtctcggtccagtgacgcccacctttactacctctggctagcagatgcctggcaaaaccttttccccatctgccccggctgtgtaccgattgagccccaatttgcggtgcgaggaagtcgctgcccgctaccgacccgtgagcaggttgaggcctatgtgaacagcggagatggtctctggcagtttggcatgcctagcgaaaaagccatgctcctcgatcccacggaagtacgccagtttgccggccacctcattccggccttggatggcggtttactgcccggctcgacacgaggagcgtacaccattgcccatttcgacctgaatcggggggagcgacgtcaccagcgctatatcacctaccagcagcgcctggaggagcttcgcagctgtaccacaccctcagacctgtcgaggatcgatcgactggtcgactttgcaactcttgagtttggcgggacgtggtacctgctgcttcgtcggctactcaaccatcttcctgtcaatggaatcgtgcgtaacccgacgcccaagcaggttggtcccgcgcttcgccgatgggcgaaagcccgggacgcggcgacgctcttggcgcaagcacaccatatgctgcaacgcgaagatgcgaggctgcacgcaagcgacaaacaggcgatggcgcccgagccggtcgtcgaatcgatcaccgccatccacatacgcaatttcaaagcaatcgagcagcttgatcttaagttcaagggggcaccggcgcggtcgctcgcgcgcagtgagcctctggcccctgccttggtgattctgggagaaaatgccaccggtaagagctccatacttgaagctgtcgcgttgacgctagtccctgcagcagttcggaacgcactcaacatatcgttggctgagctggtcatggatcctgcccagctcggcgtggacggcggtgatcaggcgactcgtgcacagattcgtatcgagctatccaatcaacactgggttgagctgaccatcgaccagcaagcccacggccactccagcaacttagataaccagcaagtccctgtgtttgcctatggcgcgtttcgtagattcacccgaaccagccagcgaacaagcccgcatgcccatgtccgtaatctgttcgacggcaacgtgctgtcaaatcctgagccttggctaaggcatcttagacaagatcgattcgacatggtgattcgtaccctacgcgaagtgctggcaatagatggcgatttcgatgtaatccaacgcgctcaggagagcgatatcctgtacatggtgacggccatcagcgaaccggacggcgcgttccgcttcaatcgtaccccgctgcacgctgtgtcttccgggtatcgctcaatgctggcaatgatctgtgacatcctcaaagggctcatgaacgcaactatttaccccggcttcgaaagctttcaatcggcccgaggggtcgtactgatcgacgaaatcgaggcgcacctacacccacgctggaaggtccaagtcatgtctcgtttacgtgcagccctgccaagcatgacatttatcgtcaccacccatgacccgttgtgcctgcggggcatggagcaaggcgaagtggtggtgctgcagcgcatcgctagcgctgatagccaggcgcagcgccagatgccgatcaccattgaaagcatggccgacctgcccccggtggccgatctgaggcttgagcaactgctcacctctgacttcttccagatgctatctaccgatgatgcgcatgctgaccgtcgcttagcgagaatcgccgatctgatggcggcacacgctaatggtgagttgagcgcggaggatgagcgagtgttgcaggacttcaatgaagatatcactaacgcccttccaattggctcgagcgaagtacatcaaattgtccaactggccgtgggtgaatacctggcgaaacgccgtgccgccagtagccagcggttgcggaatttgcggcaggcagccaaggatcaaattctgtctgccctagagaggctttga

SEQ ID NO: 88285 - DNA, 942 bp, Pseudomonas syringae
atgcgtcccgttgaccgattttcagtgcctcccccctcctcgctgctagcaggtggcgctggacctctggagttagatgatgcccgcagccaccgcgccactgcgccggtcccaggcacaaagaagaaggaatttaagtacaaggcttacaaaggcgccgatgtgcgacaggccttggagaaactgttccacggcaagtgtgcctactgcgagacctactatgcggcctctgccccagtagatatcgagcattaccggcccaaaggtgcggtggcggatgatgtcgcgcatggtggttattggtggattgccatgcagtgggaaaatctgctgccgtcgtgcattgactgcaaccgcaaacgaggtcaggttctggctaatgcatcgaatagccttgtagtgctggcgggcacggctgcgacaaggacccgacaagcaggcaagaaagatagctttccgctcgcggacacgggcgtgcgcgccacggcagagaccactaacttttccagagaattgccgctactcatcaatccttgcgaagatgatcctgccacgtatttagcgcatagcatcgatccacagctgcccacgggtttgatcgtggccgtaggcaatgcgcaacagcaagcgcgcgccaattcgtctatttacgtatatgggctgaaccgcctgaagctgttccaagatcgcaaccgcgtgttacggaaattacaattcctcggtgatttggtcactgaactggctgagtcgatcaccgcactggaggaacccgccacacagcgcatattggagggtacgcctgcggcaggtgtcaccacacgacttcgccttctccaagatcgcttgctcaccgaattgaaggctgccaccgcgccggaagctccttatgcgtcgatggccagcgcttggcttgcacagttcacggaagagctgctcttgtaa

SEQ ID NO: 88286 - DNA, 1359 bp, Pseudomonas syringae
atggaaatcaaaagcttcaggctcgttaatgtgggccgttttaccgaccttgaggtcgcaatggcgccgactgaaaggcatgcgtccaaggtgacagtgctggtcgggaataacggggccggcaaaaccacattgctcaggtcggtggctacttcactgagttggttcgtggcgcggattcgaacggagaaaggcagtggcaaccgcattgatgagaacgcgatgcgcaacgatgcttcttctgcctcgattctccttgagataagtgatgctgtggtctttgatccggacatccacagcccttcttcgaagtgggggatatcgaccgcgagaaaggggcgtaaggcagcttcggtgtctacattgagtgatctgaatcttctggctgacagttaccgctcgttgttaactcaaagcaacgaggcgtcgttgcctctggtagcgtactacccggttgagcgctcggttcttgaaattccattgaagattcacgctaagcacacgtttgatcaactggatgggtatgacaactcgctcgcgagaggcgtggactttcgccggttttttgagtggttcagagagcgtgaggacaatgaaaatgaaaaaggaatatcagcagagctgttaaatgatctgtctcataaagtcgcaccagacagcgcaatgtggaaactgctggcgcaagagcacgcttcatcgcgtgatcgtcagctaacagctgtaagggttgcggtagaagcctttatgccggggttcaacaatttgcgtgtcaagcgcaggccacgtttgcacatggctattgataaagagggtgccaccttaaatgtctcccagctctcgcagggggagaagtccatgatggctctggttggagacatcgccagacgtctcgcaatgatgaatccggcactgggaaaccctttgcatggcaaaggtattgtgatggtcgatgaggttgatctacaccttcatcctcggtggcagcgtagattggtcgaacagctcaccacgaccttccctaattgccaatttctgttgacaacccactcgcctttggtcatcagcgatgccaaggatgtattggtgtacgtgatggacgatggagagttgcatgagcaggacagtctttatggcctggatgccaatcaggtgttgatgagtgtcatggatactgacatccgtaatcctgtcgttcagacctgtctcgatgagttgcaacattttcttgtgaggggcgagctggatgaggctcgtaccctttacagatcattgaccaacgaattgcctgcagatcatatcgaactggccaaggcctcactgttgatacgcaagctggaactacgtcgtgcgaaagcttga

SEQ ID NO: 88287 - DNA, 648 bp, Pseudomonas syringae
gtgcgaaagcttgaaaagggaagtttggcggcgctggaaacatggaagcgaaagaatccaggtgcacaatatcgagaccttgtggggcacgatgttgtgaaagatgccatacggcaggcgtgtgtcggggaacaatattggctttgtgcttactgctgccgcagggttacgcccgagaaaatcagtgctcacaatgagcatctcgaagctcaggtcttggcgaagaatcgtacgttggacttctcaaacatggtcgccagctgcaattcaccagggagttgcggtaaagcacacgctagtcaacctctgccgctaacgccgctcatggtggagtgcgaaacggaactacagtttgagctatctggcctggtaaacggaactacagagcgtgctcgctctaccgtaaaagtgctccgtcttggtgccgactataaatgtaaccgacgtttgattagtgagcgtaaacaaatgctggacacgctcatttacgacggcggactcctgccagctgagctgtctctagcttgcgatgaagtattgcaggcgttgctcaacgatttaagtcagccggataaccaatcgaaattacaggcattttctcctgttctgatcaacgtaatccgtcaaatgcgctcgaggaataactaa

SEQ ID NO: 88288 - DNA, 681 bp, Hyalangium minutum
ttgatcgacttgctcccggaggtgagtgacgtccgcttcgcagttcccacggcgaaagtccctgccgcacgggtggaggtgctaacaccctacggctgggtcgccatgcgggacttgagcttggggtatcggaccctcatcgcctggatggtggacctcgccagccgcatgttcgagcgctaccccaacagccccaatcccctggctgagcccgcggtggtgctcgttgacgagatcgatctccacctgcacccgaagtggcagcgccagcttattgggtacctcacggatcgctttccccagacgcagttcatcgtcaccgcgcacagcccgctcgtcgtccagagtgccacgaacgcgaacatcgttgtcctgcggcgcaagggagatcacgtcgtcatcgataacgatgtggagtccattcgcggctggcgggtggaccagatccttacgagcgatctgttcgggctcgagacggcgcgtccgccccaaatcgaggagttcctcaaggagcgaacagccctcctctccaagccccgcctgacccgagaggatgaggcccggctgctcgagctggaggcggccatcggtccgctgcccacgggcgagactcacaccgagcgcgaggcacttgagctcatccaacgtgccgccgcgcgtctcaggaacgggcccaagtga

SEQ ID NO: 88289 - DNA, 747 bp, Hyalangium minutum
gtgattcgcgtccggaaacctgccgagccacctcagattcttcgcacccaaggggtccaggcccggcgagccttcagcacggcctactcgcgcgctgctcggagctacgagaggggaacgaggtcgttcgaatccgactcggacctctacggccacgagaccgtcaagcaggcgctcatccaggcccagcacggcaaatgcgccttctgcgaatcgcgcttcacccacatcgacttcggggacgtcgaacacttccgccccaaggctgggtggcgccaggaggaaggagagccccttcatcgccccgggtactactggctcgcctatgagtgggccaacctgttcgtgtcctgcacgctctgcaatcagcagttcaaacgaaacctcttcccactgggaactcccgcgaaacgagctcggagccacaagaatgacgtgacagaggaagaccctctgttgctggatcctgcggcggatgatcccgaagcctccatctcgttccgggaggaggttccctatgccgtaggcggcaacgctcgcggtgagacgacccttcgcatcctgggactgcgacgggagcctctggcggagcaacgcagagaccgcttgggttatgtgaaggcgctgcgctctctcgtcctgatgggaggccctgaggcagcaaaggctcaggacctgctccagcgcatgcaacaagactccgcccagtacgctgccatgacccgggccttcttgcgcggaagctga

SEQ ID NO: 88290 - DNA, 1452 bp, Vibrio parahaemolyticus
atgacaactttttttacttacctccaagatgaggtgaagagcttttctaaaaaaggtggatgtcttttattagaaaaaaacttcttgtctaaagaagataaagagacttatggcacaatagaagagcgaaaggaagtaaagaataaaagtaatgtactgacgtcagatgacattaagttaatgaagttaaaacttaagaatataggtatctatgaggatttgaccatagactttcaagatgttcttacagtttttgttggcgttaatggcgcagggaaaactaccatactaaaagctctaagtcttgcaattattggggttagagatagtgttgaagataatattctttctttaagaaagattaatgcacccaaagagcaagaaagtaaaattacattatcagctagtgtaaataatgagttttttgaaaacactatatctttcaaagttgactctgatactggtgaagtaattgctaaaggtagttattttaaagagttatatgctaatgaaacgactttaaggttattagttctatgcttaagtgaacagcgtaataatggtaaaccacctgttgatacttaccttcctaagtcacctaggatcaaagatctcctacctataattcgcagtaaagatcaagcttgtattcacgactttacgtcttggtgggcaaatttagagacaaagaaacttactcaccccgagtaccagcaaactataaatttgtgctttaatattttttccgaatttatagggactgagatatcgtcagatgggttaagaaaggtagaacctgaaactgagctatgggtgagatattcaaataatcggtctcttccatttaatttagaaagccaaggataccagactgctcttgggtggattggttatataatacaaagaatggttgagtcttacgaaaaaatacctcaacctttgagccaacctagcattatagtaatcgatgaaattgatcaactattaagtgtcaaatggcaagagaggatacttaatatcctaaagaaatttttccctagaacacaatggataataactacacattcacccatggtgttaaccgacttagaaaagcaccaaattataaggcttcacgatctagatggaaaaattgtagcagatacaaatgaagttgaccttttgatgtggcagtacggtgacataattcgaaagttttttgatattccaattaataatcctaaatttatagaacagacacttaaacaagagataaaggagttgcaaaaattacctcctagtgatcgtacagctaatgatgatattcgtattgaagagcttcaagagcagctaaaaaaagtccaattgagtagatatgaagtagatcctgtataccaacaacagttcgatttacataaacgagaagaagaactcttagctttaataaaaaaaatgaaagatggtttagagtga

SEQ ID NO: 88291 - DNA, 795 bp, Vibrio parahaemolyticus
atgaagttagttattcgttcttccataccagttgaacttaccgagaataaagttcgatggactttgccttgggttcattactataagaaaattaaagatattgatggcaatttactcaagaagaataaaccaacaacttcatattggcttaatccaagtattagacaacccttgattcgtgacttcaaaagtaactgtggttattgtggctcactgatctcttctccatggagtcaaggagatgaagttttacccggaaagggggacgtcgatcattatagagctaagtcagaatacccgcagtttacatatcattggaaaaattatatttggtcatgcaaaccttgcaatcagcataaaggggaattcgatgaccccaaatatcctattttcaatccgtgtaataaagatgattgtaacaaactagagtttatcgaagattttggtcagttctgcttattcaagaagtatgaaaacaatacattactcaaaaagagatttgaaaatactgttaaatatacgttattaaactctgagagcatttgtaaccaaagaagagatataataaccttattaagaggttattttgtctccattaataacttaatgaaagctattaatagtatagaggaaatgcagattggagaaggttttaaggctgatattcaaactgaaatagaaaaaaatatagagcggataaggataactacgaactcagagagtttcaagttacttatcagtgatgaattaaaattattaactaatgagtatcaagaaatctctgagttactataa

SEQ ID NO: 88292 - DNA, 2217 bp, Flavobacterium hydatis
atgaatttttttatagttagtgctggtgagcctggatcagattatattgaggataatttcaaagatattcttgaaacaaatgaatttgctttatatgctaatacagcacaaaaagggacatattattctattgaaaaagatgatgtattaattctcaaatacgaacgaaattttgttgcttatggaaccgtagttcgtaaatattcaaatgaatataaaaacttctccttaagagtacaagtaaaagaatggattttgcatagtatagatgatcctaagaaaggggtttctagatatggtatacaaaatgctactattggaggtggtaagtatggaactgtaaaaacggtaaagcctagttttgggctagacaaaattcgagaaataaacgaaactcataatgaatattatataatattctctaatagtattaatgataaaagtaagtttcgtaaaaaaggagattattttgatttgcatgaagaattatttacttatttattaaagaaatcagaaacagatcctgattttacttttgttacaagagattcaaataataataatgctcttgaaaagggatattggttttatggagaagatactgtagcaatttcattttggacagaaatggattttatagaagacatacctgtgatttcatttttaattaatccagatggacattgcagattaataattcaaactgatattcaggaagacttaaaaaaatattttgaagacagtagatggtggaaggatgagttaaaagatctaaatcagagagatacttggtttgtcaaagagtatagtaattttgatcctgcagattatataaattgtttgagctattttctaagaaatgattatcatattataaataaaattatatacgaggataaccttgtacctggtctcaaaagagaaactataaaagaaagtcctgatgattttgatggatttgttttgcaattacctattaaagaatttaatttaagaataaaaaatatatttaaatataggcaaaatcagtctgttgaattaagctatgattctgtagatgacgaaaatagagcagatagtttaagggagataattattcacaattatggattaattaaaaatcaaaaattaaaaattggagattctaaatgggtttttattactggcgaaaacggatctggaaagactatgtttttaagggcaataggtacaattctaggcaataggacgctcacggaaaaagaaattcaaaagggtagtttacatgtaaatgcaaattttaactcaggtaaaagaattatcccatttgaaagatttgaaaataataatttaaatttaaaaatatctaatctttcaagaggtttggcaatgtatggtccctacaggttgcaacattcttctggtcttgcaaaaataaaggattacagacaatctgtgggaaaaaagagctcatttgaatctttgttcggggatggtgcaaggcttttgagtttagttaatcaatttgaattctggcaagataattctaaaaacaagaaaatgactcaggcgagaatggagcaaattttttcgttattacctaagattattccagatttgcgtaaagttgagtgtataaaaattcaaaataaatttagtatagagtatttaattcgttccgaaggttctgaagaattaatgaaattgaaatggcacgaattatcatcaggaaataaaagtatatcaaatttagtttcagatatattgattagattatattatcaacagcctaaagttattgatccttctgaattaagagggataattatgatagatgaaatagaccttcacttacatcccaaagctcaaaaagaacttgtggaaacgctatctaaaactttccctctacttcagttcatagttactactcatagtgcagttccattattaggtgcgcctgaaaattctattatatgtgttgtaaaaagaaatgcggaacaaggcattattattaatcgtcttttgaaattagaaaaagagataggctttttgactccaaatacaatattaacatcagatatttttaattttaatttttttgatgaaatatcagaaactagatatgaaaatttatatttagaagacaggtatgaagatattcagaaaaatattgaggtaaatgaaagattaagtaaattaaatgaagatatttttccaaaagatttatttaaagactaa

SEQ ID NO: 88293 - DNA, 885 bp, Flavobacterium hydatis
atggtacataggaacaagaatctaacttcaccgccaccggaattaatgaattcgaaatggaatacaataaaacaagatctgttggtaaataagcacaatcatgaagctaagtctgaatgttatagagatacaacattgagttatctaacggaattatataagaataaatgtgcaatatgtgaaagagaaagagggatggaattacaggttgatcattttcgaccaaaaaaacaaagaaataataaaacggaaattaaatataatcaaccaggatattactggctagcatatgaatggtttaatttgattcccctttgttcatactgtaatattaataaaagcaataaatttccattgtcaacttgggataatactaatagaatatcagatcatttaaatattcatactatagcaggtttcaattcttataatttaaattggcttcaaaaccatgaaaatcctttactgataaatcctgaatacgaaattcatcctgagagacatttttcttttcgtatagacggtagaataattggtcaaacggatgaaggggttgaaacaattaatatttgcaaattaaataggaaagatttaaaaagagaaaggattgaaataagatttagatttgttaatgatataaaatctgctttgaaagattttgacgatcatagggataatgcagagttaaaaggtgaattgaaatctatttttaaaagaattaaattaaattgtcatcaaaatagcgctcattcattatatcatatttttttatatacgtatttcgattattttattgtttcaaaaatacctcaagatctaagagatttagttactaattattttaatgattataaaatatggctttcaacgaactcaatagcgtag

SEQ ID NO: 88294 - DNA, 1713 bp, Chryseobacterium luteum
atgaagttattacgtttacaaataaatcatcattttagaagtttaccagctggctttaagttaatttttagagagggtgatgataatctttatgaaaatatagatgagcctatttgtttggtaggagtaaatggttctgggaaatctaatgttttggaagctttggcagaaattttcagttatttggatcaaacctttttaagatatgtaaatagtcactccgatagtccacttatcaatagttttgaaattgaatatttattaccaattgcatatgatatgagatctattgcaacggatttggatattagtggtaaagaagattttattcatgttaaaattgctaagcttaatgatgttaagccaacattttattattatttaaatggagttgaaaagataattggtacagattttcaatcttttatgccaaaaagaattgtagggtattcttcaggtcaaaatgagttattaagcattcccttttctaaaattaaatttagatattacaacactttattacaagagtttaaagaaacatatcgggaaaatgttgaatatagtagattgaaatatgttgattacgaagaaaattacaacatactactttcaaattttttaatggcaaaagataatgaagccgacgttttaaaagaaactatttcgattgaagagatagaaagttttgaattaattatcaatagaaaccaaagtaaaaaaggtgctttaccaatagatgtcgacatagataaattcctcactttctttgagagtagatcgaattataaatatcaaaaaaagccaaatgttacagtgcttggatatactgatatagaaaatttaaagattgaattacaaaataactttggagatgctgcagggttatatactttatttaaacgactcggttatttgaatctgaattttgttgataagattagtattgacctattacttgcttcagacattgaaatatataataattatgatatttcggattttagtccaaaagacaaactgttccagattgcggaggttaacgttagaaaaagtaatttaaattatccaattaactacaaaagcctttcagacggcgaacatcagtttattcatgtgatagggactttattaatgtataaagatgagtcctctttatttctttttgatgagccagaaactcattttaatccacaatggaaatatgaatacaccaaaacctttaaaaaaataactgaccgttttaaatcacagataataatgacaacgcatgatcctgttttactttcaggattgtctaaagagaatgtaattgtatttaacaaaccaaataatggtttggaaagaacctataagccagataaagatcttagaggaatgggtgtagatgcaatattaactagtgaaatatttgggttgaattctactcttgatagtgagacattaaatgattttattgagagaagaaaattattgattaaaaaagaaaaaggagaactaagtgacattgaaaacgaaaaattaacaaagttaagttaccatctaatggatattgattacaataaaccttttgcagatccactatacaaagattttattatggcaatcgaagatttggatgtttataaacaaacagaaataagtcgatcagaaataagggaaagagaagaaatagcaaaacaaatcatgaaaaaattgaatgataatggattataa

SEQ ID NO: 88295 - DNA, 876 bp, Chryseobacterium luteum
atgagatacattaatgttgaaggttataatcctaaaagtttaaaaatagtatcgcaaaagaaattgtcagaaatgatttctaaagtttccattgcagaaaaaaaagcatatttggatgtaccagacaatcaaatatggacgaaatataagagaggatttgaaagattaagtcataataaatgctggttcactgaagcatattcaactctgtcagattttcacatagaacattttaggccaaaaaagaaaatttatttaataaaaaataaagatccatatattgaagaaagaatagctacagacaataatggttattggtggctatcttttgaattagggaattttagattggctggtggaaaacctaatcaatataaaggaaattattttcctttagaatcaggcagtaaagttgctaaagaattagacaattcatggagaaatgagaagccaatgtttttggatccttgtgtaaaagaagatgttgaattaattacttatgatggagttgagcccaaagaatcaaacccagatataaattcattagaacatataagagcaagaatatctattaagatttatgctttaaaaattaataaattaaaaaatgctagatcaagaatatttgaggttgctaaaaattattataactcggctgagttaaactggaaagcattgaatgaaaataatggagtcaatcaagtagcttataatttggcaaaagaaaattttgatgtaagttgttcaaatcttgttttaatgctaaagcctaataaagaatttactagaatggtattagtatttttagtttccactaatcttgattggatagaagaatatattattgatgtagctaaggcgaataagtttatttaa

SEQ ID NO: 88296 - DNA, 1443 bp, Pectobacterium carotovorum subsp. brasiliense
atgatgaaaataaagcaagtcaagttgcacaatgtcgggcgttttgcgtctttggatgcccccatcgcgccaacggctgattatccttccaatatcacggtactggtcggtaacaacggcgcaggaaagacatctattctaaaagcaatggcaacgtcgctcggttggttagtggcacgaatacgcagcgaaaaaggcaccagcgccactatcagcgaaaacaccatcactaaccgacagccttccgccgccattgagattacggttcacggtggtgcacagcatccagagcctgatggggaaaaagaagcgagttatagctggacgctagcgaaggcacgtagcggccaaaaagggcagcatgtcagccagttgaatgacctctccgcactgtctgatctttaccgcaccgcgttaactgaaaatgatgaaagcagcctgccgctaatcgcgttttatccggttgaacgcagcgtgctggatattccgctgaaaataaaaggcaagcaccgtttccaacagttggatggatacgataattcgctcaatcaaggcgtagattttcgtcgatttttcgaatggtttcggttacgagaagatattgaaaatgagacgataccatccttgacggataccatttctaatatacttaacagcaaccctgaacaatttattagtcaagcccttgatcctgatgacaataaagatatcgatattaaagcagaagtaacgaagctaaaaaatgtactatccaaattaaaactatctgaaaaatctaataaagatccacagcttgatgctgttcgacatgccatttaccactttatgtcaggcttttctaacctaagagttcgccgtaagcctcggttgcatatgtccgtcgataaaaacggtgaaaccttcaacgtactgcaactttctcagggtgaaaagtcgctgatggcattggtgggggatatagcacgccgtctggcaatgatgaaccccgcattagataacccgctgcatgggcaaggcgttattctgatcgatgaagtagatatgcacctgcacccctcgtggcaacgcagtatcattgaacggctgaccaccaccttcccacactgccagtttattttgaccacccactcaccgctggtgatcagcgacagcaaagatgtgttggtgtacttattggatgacggcaagctcactgaggtgcaatcccaatatggtcaggatgccaacagcgtcttactggatgtaatggatacagatatccgcaatgcgcatatcgccttaaaatttaacgatctgttggatttaatccagcgcaagcagttagcacaagccaaaacgctgttgaaccaactgacagaagagttacctgccactaatttggagctaaccaaagctcgcctattactgcgcaaacaggagttacgcggtgagagaaataactaa

SEQ ID NO: 88297 - DNA, 633 bp, Pectobacterium carotovorum subsp. brasiliense
gtgagagaaataactaaaagcgttgagcctgcctgtctgacagtctggaaacgtgccaatcctactggtcactatgatgacctgacaccagccgttcgtcaggacatccgtgacgcctgtaccaaagagcaatttggcctgtgtgcctactgttgtaaaccgataagtggtggtagccatgacaccatgaatgaacatgttcaggctcgtaactccgcaccacaactcagcctcgacttcaccaacatcgtggcgagttgcaccacgccaaaccagtgcgatgcagcccacggttcacaatatttttcactcacgccattaatgacagcgtgtgaaacagagttgcaatttatgatcagcgggcgcgtcactggcaccacatctcgtgcacaagaaaccattcgggtgcttaatctcggtgataatgaaactcataacaaaaaactgattgaaatacgcaagcaggctatcaacaccctattattgagggatggaattgatcctgctaaaggcttggaggatgacgagctattgcaatccatcattaacgatctctgtatacctaaggatggcatgcttgaaccctacgcccccgtgttggttaatatcttgagagggtggctgtcagtgtag

SEQ ID NO: 88298 - DNA, 1467 bp, Pectobacterium carotovorum subsp. brasiliense
atgatgaaaataaagcaagtcaagttgcacaatgtcgggcgttttgcgtctttggatgcccccatcgcgccaacggctgattatccttccaatgtcacggtcctagtcggtaacaacggcgcaggaaagacatctattctacaggcaatggcaacgtcgctcggttggttagtggcacgaatacgcagcgaaaaaggtaccagcgccactatcagcgaaagcaccatcactaaccgacagccttccgccgccattgagattacggttcacggtggtgcacagcatccagagcctgatggggaaaaagaagcgagttatagctggacgctagcgaaggcacgtagcggccaaaaagggcagcatgtcagccagttgaatgacctctccgcactgtctgatcgttaccgcaccgcgttaactgaaaatgatgaaagcagcctgccgttaatcgcgttttatccggttgaacgcagcgtgctggatattccgctgaaaataaaaagcaaacatcgtttccaacagttggatggatacgataactcgctcaatcaaggcgtagattttcgccgatttttcgaatggtttcgtgagcgggaagatattgaaaatgaagatggagaggcgctggcattcttgaggatgatggaggagtcccctgagagggtttcaaggattctcaatgatcttgaaaatgccacggaaaaattaaacagaatagaggaaaataattttaaaggattgcgtggtgaagcaaaaaaaatctcagatgctttccaactgatgcgtgaaataaagaacacgtccaaagaccagcaacttactgccgttcgctcagccatcgccgcttttatgccaaatttttcaaatctaagggtacggcgtacaccccacttgcatatgtccgtcgataaaaacggtgaaaccttcaacgtactgcaactttctcagggcgaaaagtcactgatggcgctggtgggggatatagcacgtcggctggcaatcatgaacccagcattagataacccgctacatgggcaaggcgttattctgatcgatgaagtggatatgcacctgcatccctcgtggcaacgcagcattattgaacggctaaccaccaccttcccacactgccagtttattttgaccactcactcaccgctggtgatcagcgacagcaaagacgtgctggtgtactcactggatgacggcaagctcactgaggtgcaatcccaatatggacaggacgctaacagcgtcttactggaagtcatggacacacacatccgcaatgcgcatatcgcctcaaaatttaacgacctgttggatttgattcagcgcaagcagttagcgcaagccaaaacgttgctgaacgaactgacagaagagttgcctgccactaatctggagctaatcaaagcccgcctattactgcgcaaacaggagttacgcggtgagagaaataactaa

SEQ ID NO: 88299 - DNA, 633 bp, Pectobacterium carotovorum subsp. brasiliense
gtgagagaaataactaaaggcgttgaacctgccagtctgacagcctggaaacgtgccaatcctactgaccactatgatggcctgacacccgtcgcccgtcaggacatccgtgaggcctgtaccaaagagcaatttggtctgtgtgcctactgttgtaaaccgataagtggtgataaccatgacaccatgaatgaacatgttcaggctcgcaactctgcaccacagcgcagcctcgacttcaccaacatcgtggcgagttgcaccacgccaaaccagtgcgatgccgcccacggttcacaacccttttcactcacgccattaatggcagcttgtgaaacagaattgcaatttatgatcagcgggcgcgtcactggcaccacatcacgctcacaagataccattcgggtgcttaatctcggtgataatgaaactcataacaaaaagctgattgaaacacgcaagcaaaccatcaacaccctattgtgggctaatggaattgatcctgatgaagggcttgaagatgacgagctattgcaatccatcattaacgatctctgtacacctaagaatggcatgcttgaaccttacgcccctgtgttggttaatatcttgagagggtggctgtcagtatag

SEQ ID NO: 88300 - DNA, 1317 bp, Serratia nematodiphila
atgaaaatcaatcaaatttccttagcaaattaccgatgcttcgcacaaggaacattccaattccatccagaattcaatcttattgttggtgtgaatggcacaggcaagacggccttgttggaggcgctctctgtggcactttcaacctggctattgggcttccggaataaacctgataatagctcgttgtctaaagacgatgctcgtctcagctatcaggaaattgatggtagagtgaaaacaacccagcattggccaataaccattggcgcgcgtggtactgtgtttgagcagaatatcggttgggaaagatcgaaagagagtgagagcggtaaagttcgtcatggtaaagccggtgatttgatatcgatagccaaagaggcagataaaaagcttcgaggtagcgagactgttaccctccccctggtggcttattatggcaccatgcgtttatggcaagaaccccgtaggctgaaacaggaaagtactattcatgggcctggcgctttaagccagcaagagaaaacgagtcggttaacgggctatcgccatagtgtggatcccaggatttctgtacgtaacctggtgagttggtttgctaaagaatcttgggttacctttcaaaatagcggtgaggaatcagtcagtcttcaggtggttcgtgatgccattttaagctgtgtggatggcgctcaaagattattttttgatgccaagcgtggtgagttactttttgatattactgcacatgcaattcagccctttgctaatttaagcgatgggcagcgctgtatgctggccttggtcgccgatcttgcccaaaaggctgtcgggttgaatccccatcttggctctgatgtgctaagagagacttctggcgttgttttagtcgatgagttggatctacatctgcaccccaaatggcagcgccgggtgatcgaggatttacgtcgcacatttccatcgatccaatttatatgtacgactcattccccattcttgattcaatcattgcgctctggtgaagagttattgatgctagatggtcagcctactgcagaacttaataataaaacattggcagatattgccgaagggattatgggggttgatgactcagaaaccagtattcgctatgcggaaatgaaagaaacggccaaaaaatatctgaccatgctggatgaggctgaattggcgccggcggcgaaactggagaaatttaaacggcgtttatcagatagcatagcgccttatgcggataaccctgcttaccaagcatttctcgagatgaaacgtgccgctaaattaggggagtaa

SEQ ID NO: 88301 - DNA, 738 bp, Serratia nematodiphila
atgcgtccggtaagaaaaggagtttcgcccaatgataacattgattttgatgattacaaaaaagcttttcctcacctggtcgggcgtatcggcagttattgcagttactgtgaacgccgtatcgctaccaatttagcggttgaacatattcagccaaaagatggtcaatatggacatccggggctgacaggcagatggagtaatttcttgctggcctgcgtaaattgtaattctaccaaaggtgccaaggaggtcattctcgcaaacttgttgctaccggacagggataatacgttcttcgcgtatgtctattctgctgatggtaaggtggctcctgcaacgcaactttccccagaacaacaggtgatggcccaaaaaacattgtcccttactgggttggataagaagatcagccagatccttgatgagaatggcaaggctgttgctctagaccgggaaagccagcgcatgcaggtatggggacaggcgcaaactgcgttggcagatgttaactctgccccagataatgagcgtttgaagcactggatcattgaagccgccaaggcgacgggtttctttagcatttgggttaccgtatttgctggcaaccctgatatgtgtctgcgttttatcgcggcgtttgagggaacggctgaaagtgggtgctttgacgctgcaggcatccctgtcgtgccgtcacagaaccctgacggatggcagagtggcgctaaagcgtga

SEQ ID NO: 88302 - DNA, 1377 bp, Streptomyces scabiei
atgtacctgaagaaccttcgtctacggaacatcaggtcgttccatggtgcgcgcagcgtcgacctggacctgaccaggcccgacggctcatacgccggttggacggtactggcaggccgcaacggctccggcaagacgaccctgctgcgcgcggtcgccctgacgatcagcggaccagccgtggcccgcagcctcgtccccgggttcgacacctgggtctcccgggacgagacggtcgcgaaggccgaagtgtgcctggtccatgacccggaacaggaccagttcaccacggggcggcgcccggtccggccgatctgggcagggctgcgctggaccgcggcggaccagacgtccctctccggcaagccgggttccagcagggcaggacagccgtcactgagcgccattggctaccagaaggaacgccccgtcgcccagcgcggcccatgggccgataatcctgtgggatggttctgcgcggggtacggccccttccgcaggctcgcagggggatcgagcgacattcagcgactgatgtccagctcaggagcggtcgcccggctgaccagcctcttccacgaggatgcgtcactggcagaaggcgtgagttggctcatcgagcagcacttgcgcgcattcgaggatcgcgacggcgcacgggacctcaaagcggctgccctggccatcctgggcgacgatctgctccccgacgattatcggatcgaccatgtcgactccgagggcctgtgggtggtcaatcgaaaccatcggttcccgctacgcgagatgagcgatggttaccggacggtggcggccttggtcgtggacatcctcaaacagatccatgacgccaacggcgaactggtcctggacacgacggacggcaccccgaacgttccgagtcccgggatcgtcatcatcgacgagatcgacgcccatctgcatgtctcctggcagaagcgaatcggcggctggctgaaggcgcacttcccgaacatccagttcatcgtcaccacgcacagcccgtacatctgccaggcagcggacccaggtggcctgatccggctaccgggcccggacgaggagagtcctgtggaggtcgtgccccagcacctctacgaccgcatcatcttcggcagcggtgacgacgccgtactctcagacctgttcgggctcgacaccccctactcggaccaggccgaacggaagcgggaggagctcctcgccctggagctgaacgtggtgcgaggccgggccagcgaagaggagaaggaccaataccgttacctgaagcggaagttggccagctccccggctactcgtgtcgatgaaatcgcagctcggctccactcgcgccacccgcgtcgcgattcatga

SEQ ID NO: 88303 - DNA, 747 bp, Streptomyces scabiei
atgatccgagtaacaagggtgccactcccgcagacagcgctggcgacgatggctgagtacaccggtgacattgggcaggccgctgttcccggaaagcgggccaagcaattatggaagcacacgactgttcgacggcacatacatccagtgctgaaacgcacactggcggagatggcgcccgggcttgagcgctgcatgtactgcggagacagccagggcactgatatcgaccacttcgagcccgtccgcgtcaacccgctgcggaccttcgactggaacaatcatctgctggcctgctctctgtgcaacagccacctgaagcgcgacctcttcccgctcgccgacgacggcacacccctgctcatcgacccgagcagtgaggatcccgcaacacatctgcacctctcgctcgcggctggcaaatacctccatctcacggacagaggtgaggcgacgatcaaggtcttcggtctgaaccggagcatcctcgtccgggggcgactcaacgcctatcgaattaccccgctcttattgaacgaatggcgcgcagcattcgaaaagggcaacgtggcggatgcagcggactgtgcagccacgatctgggagcaaccgaccgccgatgtcgtccatgccatgttccaccaggccgtcgccccaggagcccaagacatctttccagacgagtcggaaaccctcgcgctgctgcgtgaccccgtgatccgtaccgcgctactcctgaccggttga

SEQ ID NO: 88304 - DNA, 1809 bp, Comamonas testosteroni TK102
ttgaccatgcagttgcggcatctggccatcccacagtttcgcaacctgcgtggtgtggcgattgacttctccacccaactggaggtggtgccgggctcggcgccggccatggcggctagggccatccgtagccatgccctgattggccagaacggcatgggcaagtccaacctcatcgagacgctgatcaccatcttccgagatgtagacctggaccgcgacgcagcgctagactacacactggagtatgagatccgcggccataccgtcaagctgcaggccgacaccgccaagcagaggcggcctttcgtgtgggtggacggcaaggccgaatcgcaaggccacttgctgaaaaaccgggagctgttgccctcgcacgtcttcgcctactactcgggccgcaacgagcgcatcgaggcgctgttccaagagcaccagcgccgcttcaaccagcgccaggagatcaccaccgacgaggtgctgccagagcagttgctgaaccagttctctgccagtgatgccgacatccgcgcgatggaagaagttcggcggcgccgcgaggcacggctgaagcaggcgggggacgaccggctgcgccgactgttctattgccgtggtggtcacagccaactggtgctgctggcctgcctgctgtctgatgacccggtcttccagaaggtgctgaagaacctgcacatcgaggcgctggagtcggccctgttcgtgctgaaagagccgcatcggttgcgcgagaagcgccggggtggccgctttgacgagaacgaactgaacgaaggcgatccgcgcttttggtatgcgcgaggcaatgtggtcagcgaattcctcgacaagctgtggcaggtggcctgggcacccattgagcaagaggctacgcagcagatcgacttccggggccggacggagaagcagaagcagctctacctttatgtccccagccatgccaagctcaagcagctgggagagctggtgggcggcaccgacagcttcttccgctatgccgagggcgcctacatcggtgatctgattgaggaggtgcgcatcacggtgaagaagcgtgacgagcacggcggcgcagtaagctttacgcagttatccgagggcgagctgcagatgctgaccgtgttggggctgatgcgcatcacgcgtgaagatcactgtctgttcctgctcgacgagccggatacgcatctgaacccggtctggaagcttcgctacttcgacgacatcgagggggtgttgggtgcggaggctggcgacgttgcacaaggacagtcgcagattctcatcaccacccacgatccaatgatggtaggtagcctaaggcgtgagcaggtccatatcctgcgccgcgaaagcgatagcaccgtggttcagacgccatacgagcatccccaaggcatgggcgtcgcgggcttgctgaagagcgagctatttggtttgccgtctaccttggatcctcagaccctggacgatttgcagcggcgcaacgagctggtagccaagaaggctaacgaagggctgaatgctgaagaagaagccacgctggaacgattacggcgctatcttgaggagttggggttctctcgtgagtaccgggacccgatgtatcagctcttcgtcgagaagatgtacaaggccaagtcgcagcccatcaacaaactgttgacacaggcagagcttgcagaacaagaggctttggctgaggcgatcatcaaagagcttgtcgcatcggagcgcaaagacgaattggctgagcttgctcgccagttaaagcatgggagggcgtga

SEQ ID NO: 88305 - DNA, 813 bp, Comamonas testosteroni TK102
atgcgcaagatccgggttcccaaagatcagttgccaccagaggattggctggccgaggctgaggcagcaagtactgcgctcgcagaagcgaagaccgatgccgaccgcgaggccatcatcgaggccaagcagaagatttggcgcgacgaccgcatccgcaactggctcctcgctttgtttcatagcaagtgctggtatagcgaggcccaagaggctgtgtctgcgtaccatgttgaccactatcgccctaaaggtcgggtaactgatgtgggtcgcaccagcccagagccgggctattggtggcttacctttaattggcagaattaccggatctgcgggcagcttattaacgtcaagaagaacgacgtgttcccgcttatttgtggtcatcgcgccacgccggaaacgccgggcagcttaaagctcgaagcccctgctcttctggatccgaccactgatgatgctcggctgatcagtttcgagatggacgaggacggctgccgagccgtgccgagtggtggtgccgacgaggaggactgtgctcgagtcatgaccacgatcgaggtcatcggactcaatcgcctggacaggctcaatgggaagcgcgccgatgtttgggaagagtgccgagagaaactggcaagctacgcggccgcctcaggcgaacctccggcgctgaagctgctgcaacgcgctctcatcgtcgttgatttgaagaagcgtgtagcctacgaaagtgagctttcgtcggttgccgaggcttgtatccggaaggtcggatcggagctggtctgcgcacaggtcttcggataa

SEQ ID NO: 88306 - DNA, 1338 bp, Bifidobacterium thermophilum
atgctaagctcgcttgaactacagaactttcggtccttcgaagatgcccacatcgcttttgaccccagcatgaccgtactcatcggcaataacggtgcaggcaaatcggcgattctcgacgccgcggccatcgctctcggggcgttcctcatcaggttgccggactccaaaggtaagaaccattcacgcaagttcaacaaggacaccgatgtccgcagagtatctttcctgcaaggcgatcaggtccagactgagcggcaatatcccgtccgcgtcactgcctatggctatcgtgacgacttgccgcacggcggggcgcccgagatgatgtgggcgaggcaaatcctttcaacagggcacgcaggcaaaggcgattgcaaggaaatcaacgcgtatgcggatgaatgccagcaacgcgtccaatcgcatgatgagagcctgattctgccgatgctcggatattacgggaccgggcgcgtctggacgcacaagaaaaccagcgcgtacgtgtacgaccgtgatttcagtggcggcgtatcaagactgaacgggtatatcgactgcctggacgcatacacgaatgacaacctcatgaggtactggttcatgcgtatggcgttgcaaagtgcggcccgcaaaaaggaaagtccgctgtatattgcggtccgtaaggcgatggcaagctgtgtcgcccacttgcaggacgaagacgcggaagcgatcgatgtcgagtattcggttgacctagggcagatcatcgtgacctaccgtcataatgacggtgtcaccgagttgccgatcggcatgttgagcgatggctaccgtagtgtcatgagcatggtcggcgatatcgccttccgcatggcgatgctgaatccggcgttgggtgagcaagtggtgtcccgcacccccggtgtcgtgctcatcgacgaggtcgatcttcacctgcacccgaaatggcaagaacacattcttgaagtgctgacggaaaccttcccgaaagtacagttcatagtcacgagccatgcgcctctggtactttcctcggtgaaggactcatcctgcctgcgtatcatcgacgagacaggtgggcggccatatcaggggcatgtggcaggcagcagctcgaacgacgtcctcacccatgtcatgggcgcccacgaccgtcccggcgaggtcaggaacatgttcaagcggttggagcaagcgcttgacgattcggcatatggtcaggccaagacgctgttggatgaacttgaatccctgattggcccggatgacgctgaactggctcgggaacgtgccgcgtatgacttcatgacactgggcggcgaatga

SEQ ID NO: 88307 - DNA, 714 bp, Bifidobacterium thermophilum
atgctgtatgtggataaaacgggcggggcgccaaacgcatacgtggaggccgtcggaataatgaaggtgacgcctgacactccgcaggactatgaccacttgccgcctgaaatcaagccgcctctacttgaggatttgaccgagaaacagcacaggttgtgcgtatattgcgagcgtagaatccactccaggggaagcggaagcggctcccgggcgcatatcgagcattggcatcctcgccatagcgaacggggaaaacatgatccgcaggctgccaaggaagatgacaggctgtcgattgattaccgcaatatgttcgcatgctgtgacggtgctaccggtgatggcgagcaatgttgcgacaagaagcggaagaatatcgagttgcacgtcgacccggcggaagaagaatgcaggcggaggatttcctatcgtcaagcgtctgggtatatgtgtggtgccgatggcgatgatgatgccgaggcggatatcgcggtgttgaatctgaatgagcggcggctcgtcgccaacaggaagagctacatcagtgagtatttgcaaaggcttctcgctcggtgccatggcggatcggcaaagacccggaacgagctcgaaaaggagaaacagcgtattctgatgtcgcctcagtggccggaatacgggggcatcatccttgcgattcttgacaagaagcttagacaatatggccggtag

SEQ ID NO: 88308 - DNA, 1383 bp, Delftia acidovorans
atgattaaaagctatcacacaaaagaaaagtcattcaatatattaccttcaggatatgggcttttctctggatcaaatgcatttacgataatagttggaaaaaacggcacagggaaaagcagactgcttagaagtatggtccttggtttgctatcaaagttcagttcaccaatcactcttgacagagaagacaagctactggaactaaattccactagaggcacactagaccacaacaatcttcctcaaaaaataatatgcgtctccaccagtccatttgacaaattcccaatattaagcgaacaacatgcatctaatccttatatttaccttggattaaaaggcatttccagcaacaatccaagcaccagctatatggcaaaaataatagctgaattggtcaaatcaataatcaaacccaaaggcaacgcccttgaaatagtaagagtgctaaattatctcggttatgccggaaaaatcgagtgtaccttctctacatatattgcatcaaaaactcgaaaaacaattaaagatattaaagatagcggcaatttttccatcaaagatggaatcggaataaaagacaacactccatttaactcgcttattttaataaatgactatattttccccaatgcagcaaacaatgacgacaaagaaatatcactcaactaccttacaaaattatcagaaaataaaactaaaccaagaattgatctaacaatagatgaatttggagtaacctttaagggagatgcctctaccagagaagctttggcattgattgcaacaggtcatgccaagcttcgcagtgtcaagctggagaaaattgatactggcaagttaaacataacagatgccagctccggagagcaatcggttgtaatgagtatgctggggatagcaagccagatagaaaataactcactgatttgcatagatgagccagaaatctgtttgcatcctgagtggcaagaacgctacatccatcttctcttagagacatttgaaaaatatcgcggatgtcaattcataattgccacacactcccctcaattaattgcagagctttctcaagcaaattgctttgttatgagcatggaagatggcaaggcaaataaagcactggatttttcaaatcgctctatagattttcaactggccaatgtatttaagaccccaggaagaagaaacgaatacctcaacagaattgcagttaatttattcattagaatttccaaaaataaaaacttcgatattgaagatgaaaatgaaatgagaatactgaacgaagtatttgggaaaattaactcagacgatccactaaaggaattaatttcggcattgcagcttatttggagaaaatatggccgaaatcaatga

SEQ ID NO: 88309 - DNA, 657 bp, Delftia acidovorans
atggccgaaatcaatgacccaataaagtacacatcagatcaactaaaaataataaaagacaaacttaacgacccaaatttcaaccataattgttggtcttccgaagatttggagcatctcagaaaatctgtcagagattattatagaatcaaacaaaatgggaaatgcgcttattgccaaaataatatttctttggaatctgccgcaaactgtcaagtcgaacatattgtgccaaagtcaagagtattgaagttcatttttgaaccaaaaaatctatgtgtaatatgcgcagattgcaaccaaataaaaaggagtaaagaaattttaggaaaagaagaagataccacggcaaacaaaaaacctctgcgatacccaaaatctagcaattcttttttaatagtacatcctcatttcgatacatataacgagcacattgagaaatttggacaatactttttcgatattactgcaaaagggcactttacaattggggtatgcgtcttaaatcgtcggcttagggagtttggttgggaagaacagataattgatgagaatattatagagagtcttatgagaaattacatggaaaatccagataaagtgcaacgagatagggcactcagatctttaatcggctatgtcactagatataattaa

SEQ ID NO: 88310 - DNA, 1749 bp, Klebsiella pneumoniae
atgcaactacggcgtatctttatcccaacttttcgcaatcttcgcgatcttgacatcactttcgcgacgcacttgcagccaatggcaagtacaaccgaggctcctcccaaactcatccgtagccacgccctgattggtcagaacggcactggcaagtccaacctgatcgaggcactgatcaccatctttcgtgatgtggatctggaccgcgatgcagcttttgattacatgctggaatatagcattcgtggtcgtggggtacgcattgaggctgatacttccaagcaaaaacgcccctatgtgtgggtggacggtaaagctgaatcacaaggctatttgctgaaaaaccgtgagctgctgcctgcgcatatttttgcttattactcgggccgtaacgagcgtatcgaagccctgtttcaagagcaccagcgccgctttaaccagcgccaggaaatcactacagatgaagtgctgtctgagcaactgctggagaactatacaggctccgagtcagatattcgcgccgtcgaagaagccaaacgccgtcacgattcgcggctgaaacaagctggagacgatcgcttgcgacgccttttttattgtcgcggtggccatagtcaactggtgttgctggcttgcctgctgtctgacgatccggtatttaggaaggtgctaaagaacctgcatattgagtcgctggagtcagcactttttgtgctgaaagaaccataccgtctgcgtgaaaagcgccgtcgaggcaaatttgaccagcaggaactgaacgagggcgacccgcgcttttggtatgcacgcggcaatgtggtgagcgaattccttgataaattgtggcaagtggcttgggctccgattgagcaagaggcgaccaaacagatcgatttccgtggccgtaccgaaaaacagaagcagctgtacctgttcgtgccaaatcaggaaaaactgaaacaacttggcgaactgatcggcagtaccgacagcttcttccgctatgccgagggggcttacattggtgatctgatagacgaagtgcgcatcacggtgaagaagcgtgatgaacacggcggcaaggtaagcttcacacatctatcagaaggtgagctgcaaatgctcactgtgttgggcctgatgcgcatcacccgtgaagaccagtgcctgttcctgcttgatgaacctgatacccacctgaacccgatctggaaattgcgctacttcgacgatatagaaggtgtgctgagttccgatgatgcaacgatggtacaaagcgagtcgcaaataatcattaccactcatgaccctatgatggtgggcagcttgaagcgcgagcaagtatatatcctacgccgtgatggtaaccgtacgttggtcgatatcccggatgagcatccgcaagggatgggtgtcacagggctacttaagagcgaattgtttggtttatcatctacgttggatatcgaaaccgagcgacgcctattccggcgcaatgaactgttcgtcctgtcacctcgctcccccgaagagaatgaggaactgagccgcttgtcagccgagttggctgaccttggcttttcgaccgcagacttccgtgaccccgactacgcaatgtttgtgcgcaagatggcgcaacaccgccgtttccgcaaacctgtgctcacactcgaggaacaggccgaacaggacgccattgccgattcgatcattgatgagattttacgagaggaggacggcgagtga

SEQ ID NO: 88311 - DNA, 858 bp, Klebsiella pneumoniae
gtgattttcatcgatcttgaaaataagctccctactgatgcagaccttcctgctgatatccgctggtcacgagccgattgggatgcttggttgaaagagtctgaccgtcttgtaggtgaacttgccaagctcgttgctgcgggagcaattaaagagcggaatgatttgatcgacaaacacagcagccattggggaaaactgaaaccttggttactggcgttatctggggggaaatgctggttttcagaggtacgcgagctgtactcacattacgatgtggagcattttcggcccaagaaagaagcgaaggcgttggatacaaacctgcgtgatggttactggtggctagcatttgactacatgaatttccgcgtatgcggcaatgtcggcaaccgtaaaaaaggtgggtggtttccactcaaggaaggctcactttgttctacctacctcgaaccttgtgaggaatccgaaacgccttatctactcgatccaattgatgacgatgacgttgcgcttatcgccttcgacgaagaagggaaggtcatccctatgccaggttcctctgcttgggagcaggagcgagtcaatgagacggtaaagcgactcaaactcaatgaacatccccccttggcagaagctcgtcgcaaagtctggcagcaagtggataggctaatcgatgattttacaacagccaaagctcgctgcagaacaggcaataatccagtagccaaagcgaagttggccgaagttcgagctagagtgcgcgaaatgactagcacaacagctgaattatcagctgtagctcgttggtgtttgctgatgcgcaacgatccccagctttctaggttggttgggtga

SEQ ID NO: 88312 - DNA, 1425 bp, Vibrio sp. OY15
atgggattcagagttaataccatcgcaaatcatgagctttggcatttggggtcaactgaagagaacgcttttactgtaataataggaaataacgggtgtggaaaaacgcagctgttagttgatacttgtgcttattatcaagaaatgtactctcagttgctcaatagcgacaaacctaacgtagctacagcagtccgtgatgtaaaggaatattctgctgagtggagtctattaggagaaaggttcggcctttctttaccaaaaaagttgattgcagcgtcaacgagtcagtttgaaaagttccaacaaagatggaagagtaagaaggacattcaacaaaacgggttttatgcctacgtaggttctaaaccttattcaccatttcaagcaccttcaacacgtatcgcgtcgaaagcaattcaacaattattgggcaatgaaaaatttgaaacgagaaaacttgttgcgttaacaaatttcctgcataagttcgattttggtggtttattgcgtttgcgttttaatgtggctatttctagcgatgactttacaaatttgcaaaatggccaacaattacagcccaaaacaactctgatactgaaggaagccctagaagaatatgaacaagaagaaatccttgggctaatccaatattgtgaagaaatctacaaagaaccagaattccttctttctttagatcgcaatgcttttacattaaaacacttaagaaaacacgaagagaccttttctgacgttgacattgatcgtcatgtcgtttccacgctgcttagggctggacttatcgagctagaaaatcttgagacagttcgtcacacaaaaagtccctcaaattatgtagacgatcttgatatatcagatgtacctctgacgggcttagctaagcgtagttctggcgagcaatgcttattcttgctctttttgggtattatttcttctatagaagatgatgcactgatctgcatcgatgaacctgaaatcagccttcatccgcaatggcaagagaagtttgtagacattcttagggactcattttcaggctatcaagggtgccatttccttatcgcaacgcactctcccttaattgtgtcagacatctccgcttcaaatagttgcgtgtacgatatggttaatcgcaagttaattgatgctcgccctcataaagagcgctctgcagattatcagttggcgacgttgttccataatccaggcaataacaatgaatatttgattactcaaattattgaggtcttggattctgtctgtaagacagaaaaccctcccgaagaagcgttaataactgcgaattggctattgagctttgaatctcaattggaagaacacgataaagtcagagtcttactgggaattatgcgctcaactttgttggctggagggtatctatga

SEQ ID NO: 88313 - DNA, 630 bp, Vibrio sp. OY15
atgaccccttttgttctgaacgaaaatgacgaagcgatcatcaaaagcgtgttggaaaaaaacgtatcccctaatgaaaaatgggcggatcctgcggtgacagaactcaaaactagaatgaaacgacattacatcgaacagcaagaatattgctgtgcttattgtaaggttcacaaaccttctttgcacggtggggattgggatttagaacatatcatgcacaaaaacaattttgataagtggatgtttcacccagagaacctctgtgtctcctgtaaagaatgtaatggatacaaaggtacatcgttaattaccaaatcccctacttataacaaattccccactcggtcatcgagttacactatcgtccatgcacactacgataggtacgaagaccacataaccgcactggtgcctggaataacctataggtataagggggataagcatggtaaaggatggaaaaccatcgaagtgtgtgggttgttgcgctaccacgaagagggaggccgaacacaggttgacccaatcatccaagctgtattgcgtttggctgctgatgaccagagacaagaaaacttgcagcttgctatcgaaatgttacaaagcaaaatcaacgcactaagttag

SEQ ID NO: 88314 - DNA, 1398 bp, Escherichia coli ATCC 25922; identical to SEQ ID NO: 86854

SEQ ID NO: 88315 - DNA, 606 bp, Escherichia coli ATCC 25922
atggtccagctcattaacgagcagtatcacctttgttgctacagtgaaatacgctctgatcttcgtggtcttggttatcacattgagcacgttgagaataagagccagcatccagaacgtacttttgattatcagaatctcgctgccagtgcattagattcaggggagaacggcggtttatcttccctgaaaggaaaaaatgcttttggcggtcatgcccaaggaaaacaagatgttgtagatatggcaaaatttatccattgccatattcgcgattgttcccgttattttgcttacctttctgatggtcggatagttcctgctgatgagttaaatgcacaagaaacggagaacgcgcaatacactatcgatctactgaacctgaacagcggattccttcaaacggaacgtcgtaatcattgggaagagctggagcagctttttgatgaacacattgaaaaagattgggatttgcagcaattactccagcttgatttggtttcaacaccagaccataaactgcatgaattcttcagcattacacgccagtttttccagcaagaagctgaacaggtattacagagccacgccccagcattaatttaa

SEQ ID NO: 88316 - DNA, 1644 bp, Streptomyces sp. JS01
atgcagctgctgcagctgaggctgcccgactaccgcggcctgcgggacttcaccctcgacctggagagcgccgtcgacaaagggcaggccattgccgtactgatcggtcccaacggaggcgggaagtcccggatcctgcacgcgctcgcggagctcttcggggctctctaccgctgcgccctcggccattcgggccgtacgggcttcggatatgaggtgcgctaccagctccgcgacacgaccgtcgagatcgtgcagccgtccgccgaggcagatccggtcatgtgggtgacggacgccgccgggtcgcgcaacgagacaccgcgtcacgacttgctccgccaccttcccgaccacgtcttcgggtatcaggtacacggccgggtcccacggggctccgagttcgagcgccacgtgcacttcgccgaggcggagctggcgaagtggcgcgagcagtggaccgagtcctggtttgcctggcaggaccggccggagaacgaggagggggtgtggtcggagcagctagagctgccgatcacgtgcccgctgtacgccccgggattcctgtgcacgcccgactggctccccctggtcctgctctccctggccggccagtgggcggacgtcttcggcgactacctcagggagcaggccagggtggacggggtggtgtccgccacgctgcacctgcgcgcccccgcgtcggtaggggaggatctgtcggccctgccgtactgggggctgggcgggccgccgcgcgccctgttcgccgaggcggcagcatccggccgcttcggaccggtgccggaatcggacccgctgtacagcgcaggcacccccgacgacgggttcgccctcaccatgagcagccctgaggacgtgctcgccttccgtaacctcttcgacagcgacctgtcgatgttcgggctcctttccactcttcagatggccagctacctgacggtcgatgtgcgcgtccgcaaggcggatggcgccgtcgtccgggcggaccaactgagctccggcgaacagcagatccttaccgttctcggtcttctgcgactccagcgaggccaggagtcactcttcctcctcgacgaacccgacgcgcacttccatcccgagtggagccgactctggtattcgtcagtccagagcatgctcggcgatggacagcgctcacagttcatcgccgccacccacgagcccctcctcgtctcgaacatgctgcgacagcagatccggttaatcgacacggacgccgacggacggaccacagcgctcgtcccggacaccagcccacgaggcctaggagccggcgggctgctcacctcggacctattccgcctccgtagccaactcgacgaacacacccaggacctgatcgacacccagtaccgcctcattcctgtagccgagggcgaccccagggcgcgccgaaaactccaggaggtcaccgaccagctcgacggactagggttcgccactgggcgccgcgataaggttctctcctccttcctggcggaactgcaccggcgacgcacggaactcatcgaacgggcccgaaacggaactgtgacgggcgaggagctggaagcgaccgcacgcgtcctcttcgacgagcgcttctcccggggggtctga

SEQ ID NO: 88317 - DNA, 1167 bp, Streptomyces sp. JS01
gtgcgccacgtagacaacaccggactcaccgctccacagcagtgggcggaaagagccgccaaggaactcgagaagctccacgatgacgcgaaggatgcagacaaggagctctccttccgcgagatgtggcgggaggacgcgatccgcgaccggctgatcgccctcatggacaaatgctggtattgcgagaccagggacaatcggtcgccttaccacgtcgaccactaccggccgaagtccgccgtcgccggcgaggccaagcaccgggggtactggtggctcgcctatgaccccgccaattaccgcctcgcctgccaccattgcaacagcggcggtgcccgctacggcaatcaaagcgccgggccgggcaagggagcccgcttccctttactcgggcaacgcgcgtcggtgggcgaaagcctggagggcgaactgccggtcctccttgatcccgtgctggccgaggacgccgatctcgtcggattcgatagccagggctacgcccggcgcaggctcgaaaagccctactccgacgacgaggtggcctgggatctctgccgggtggacgagaccatacggatactcgctctcaatgccgaccggctcattgagacaaggtccaccttgatcgaaaaggtggaccaactcgtcgagctatacctcgtccgcagagacgacgccgttgtggcgcggtacgcccgcaaggagatcgacgacctgacccggacgaccgcggagtggagcgccgcggcagcggcagcggaacgcttggcgctcctcgcctacggccgctcgggagatgaggtgccccctcagggaggggcggggggcgatatcgccgaacgcgcgagcgacggaaccgagcctgcggcggccatggcaacggctcatcgcgtcgacctacggaccctggtggccgccttgccccccgaggcgttctccacaggtgggatcgcgctgacaggccgcgggaaacggggcccggccagggcaacgctacgaaaggacggcatcatcgagtgcttccagcagcccttggccacgcccacgtccgcggcacggatggcgaccggcgacgagaaggtggatggatggaccttctggtcgttgacggtggacggcacgaccaggacgctatccgacctgcgcgacttcctgatcacctaa

SEQ ID NO: 88318 - DNA, 1608 bp, Acinetobacter baumannii
atgagcaatagatctatagattacctgaaaaaaaaccccaataaaggatcattattttctttatttcaattgcttgaaaatgaaggtctgatagatttagaaaaagtaaatctctcatcagaactacttaaaaattgcttgtcttatgtaacatcaataaaagaagatgaatcacctttccataaaattcatttagaaaagatccaacttcatgactttagaaaatttagatcaatcgaagtaaattttgataatgatcttacagttttaattggctcaaatggtgtcggaaaatctactatcattgaagcaattactaaaactataagctggattggaaatggattgataaaagaaggagataatggtcgtcctataacttatgatgatataaataataactcttcaagctatgcagaaattaattcatattttaaatatggtaaaactgaattttcaggaaatatttctaaagctgttagaggcagaacagcaaaaaaagatagtcatgtttatgatttaaagaaatttgcgaatattttaagagctttaaataatattcaaaaaattaatcttccattattttgttattatccagtagagagattaaaagactcccctaaaatctcccttttaaaagattctttaattatagatagatattatgcctataaagattcttgggacggaaagttaaagttagatgatttctttactcttatttgtgttatttacaataaatcaaaactaaacaatgatttagaagaaataaattcattgaaaaataagttagatcaattaaaatctataaatttctctgatttagaaattattaacctcttacaaaaacagctaaatgagttgaaatctaagaataactttgattcatctcactcagagtcagagttagattttaaaaaatttgtagagactattaaagaatctttaataaatgatttattaggtataaaagatatatcttttaataatttttctggtcgaacacaagtttatttccatttatcagatgggaatattgttaactcaaaacagttatcacacggtcaaaaagttacttattcattgattggagacatatgtcttagactattattactaaaccctaatcttaagaatccattaaaaggtcaaggtataattcttattgatgagctagaactacatttacatcccaaatggcaacagagaattctagtttcattacgtaatacttttccaaatattcaatttatagtctctactcatagtcctcagattttatctacaatagataaaaaacatataagaattttagaagaaaatgactctattattgagcctatttatcaaactgaagggactcgtagctctgatattcttgaacaactaatgtcgacacactctacccctgatattagaataaatactttatacaataaatacttagctctaattgaacagaacatttatgaaactcaagaagctcaagaactaggggcggaattagctagtcactatggagagaaacatccaaaaatacaagaaattaaaagtttaattcgattaaaagaattaaagaataaaattgctagtaaaaaaatggactaa

SEQ ID NO: 88319 - DNA, 660 bp, Acinetobacter baumannii; identical to SEQ ID NO: 87945

SEQ ID NO: 88320 - DNA, 1545 bp, Acinetobacter baumannii; identical to SEQ ID NO: 87768

SEQ ID NO: 88321 - DNA, 642 bp, Acinetobacter baumannii; identical to SEQ ID NO: 87761

SEQ ID NO: 88322 - DNA, 1236 bp, Sinorhizobium meliloti
atgttttccaagctaaatgtcaaaaattggcggcagttcgcggacgtggacctggacttccatggacgcttgaccgttctcgcgggtgcaaatggagctggaaagagcacgttgctgagaatattggcccagttcttcgggatcgaacatcggctcattggttcgcctcttgagggcgacaagcggatgtactcacatgtgctggcgggagaagcgcaggacgttgttcaatcctccgacaacgtcgagattggttcagttgttctcgcaggaggcgatgttgttggaataacaatgccggcgctcagtgaacaagtcgaagagaatgtacagttgcgtgggctccaccggattcatggaatatttattcacccgcacatgggtttaaacaagtacatgccaatcgcatccctcccactatccgggaaaaacttgcgtgtcatttatgaagaggtaatttccggtcagagtcgcgtctttgaaagtaacccgtcccaacgtccaccgctattcacggtaaagcatagtctgatcgcgctggctgcgtttgggcccggtggcaaatacatcgcaccaaatcaagagatgacgttactatttgaggagttccggaacctgctgaaagcgtttctgcctgaaactctgggtttcatggatttttccgttcgcctgccggaactggtcgtcgttactaagcggggtgagttcgctctggattcatcgtctggcggcattacgtcactcatcaacttggcttggaacttgttcattgtctccaaaatgaaccaagacgggtttgtcacgctgattgatgagccagagaatcatcttcaccccgcgatgcagcgggaaatgatggggtcgttactccaagctttcccaaaaggccagttcatcgtcgcaactcatagccccttcatagtttcttcagttcgagattcaaccgtgtacgccttgcgataccgcgatggagaggaaggtgccggcaagatttactcggagcgtctcgacgacttcaataaagccggtacggctagtgaaatccttcggacggtgctgggggtgccagtgacgatgcctgcttgggctgaagctgagatagaaatgattgcccgtgactttaacatccagcagctgacggatgaaagcgtcaaggcattgcgcacccggctggaggcggcaggtttgggctcctactacgcggagacgctcactaaaatggcagagcgcttatga

SEQ ID NO: 88323 - DNA, 666 bp, Sinorhizobium meliloti
atgatcaagctgaacaagaaaggggagccgcagatcctggcggacaattcggctgcctggaccgcagccattgaggcgaaatatgccagcggcgagaagccgagccctacggagatggggcgctacaggcatcccgacattaagaaaatccttattgaggaaacgaacgggaaatgtgcgtactgtgagagcaagctactgcacatacatcacggtgacgtcgagcacatctatcccaagtcgctcgatcgcaagcagaccttcaagtgggataatctgacgttagcttgcgaacggtgtaaccagaacaagagcgacaacgatccgcttcttaaacagattatcgacccctatttggtcgatccttcgcatcaccttactctactcgggccactacctcgaggtaaaactccacaaggagtatctactattgagttgctaaaactgcatcggtctgaactcgttgagcagcgcgaagaagcgttaaaaaaactctacgcaatcatctatcaaatcaaagatgatcggatagcggtggaagcccgacgcgcaatgtacaaagatctgaaggacgagagcgaatctggctgcaatgcttattccgctatggtgcgtgtggcgctacaagtggaagcggtttccttcgatgctgccgtcacatcctag

SEQ ID NO: 88324 - DNA, 612 bp, Sphingobacterium sp. ML3W
atggcaaccttaactagtgaaaatgtaagatttgatttagccgaaggtatggtgctaattgatgagattggtacacatcttcacccaaggtggcgtatggaagtggtcagtagattacggaaagcttttccaaaaatcagatttattgtaactagtcatgaacctctctgtctaagaggcctgattgaaggagaaacaattgtgctcacaaaaaatgagcataaagaaattatagcattaactgaactacctgatccaagtgagttacgtattgatcaaattttaacttcagatttttttggtttaaaaagcacaatcgatcctcaaacagaaaaactatttgatgaatattacaaaatacttgccctggaagaaaaagacagaagtgaagaacaaaagaatcgtattttagagctcagtcatgttattcctcgtataaaacatctaggggatacagagcgcgaagagcttgcctattacgttattgatgaactactagcccgtaagacaagaaaggatggattgaaaatcaaaaataatttagaaacagaggctttgataagaataaaaagtatatggaaaagtttggacaataaaagtggattactatga

SEQ ID NO: 88325 - DNA, 1512 bp, Sphingobacterium sp. ML3W
atgatttacattaaccgaaaaacaatatctcatccagaaatattctattcaaaggaaattgaggcagcaaaaataagcgaaaaaaatttttatagcagaccttatgaacttaggtcacaggaaagaaatctgacacacctcgatcaaaaattaaataatatgcttagaaaagcattgatggaggtatttaatgggagatgtgcttattgcgagtcccaaatttcgaattccagttgcgatcattttagccccaaaaatggagcaaggggatttgaaaatgagttttctaatgatcactattggtggctttcttacgaatggaataatctttataattgttgcttagaatgtaaccgatataaatcatcttggtttccagtgaagggatctagagctgcaactgaaacaaaatacaatgatattgttattcaggaagaagctctattaatagatccttgcattgatcgcccccaggaacacttaacatacaatgaagctggagaaatggtttccttaacaaccaaaggtaaaaccactattgaaattataaaacttaatcgttctgaactagtagaagctagacacagaacaatacaaaagctaaaaactcaatggaatgaattcttaaatttaattatgcgcaaaaatgaaaacttgagcttattgaatgagataatatattcatggggggaaatttttaataatcaggaattacgtacatcatatttaggaattcaaagacactttctttacaaatggttcaaagagcttgaaatacaaaacaatcccatctttacaaattttaatatattcttagataatgaaaatatgtcaggcaaagctttgaaattttcgtttcaagaaattgaaagatctgtaaatagacaaaagattacagatacaaccagagaaaataataaagctgtaactaaccttgatggtatcagacatatttacgttgaaaaaatagagcttaagaacttcaaatgtttttcaaagctggaactagacttttctaataatagaggaattgccgaaagcaaaactaaacaggaaaatccccttttagaaccatgggtattatttttaggggaaaatggcgtaggaaaaagttcactactaaaagccattgccatcggattatcgggaaatgagtatattaaaagtctgtgtatatcaggcaaagagattctaaaacacgacgagaaaaatggttatattaaaatacacttggtcggtgcaataaaccccataattgttaattttaatatcgatacaattatatctacaattgaacaacctatagtaaacgttgtagcttacaattcaatacgcctaaaacccactgttggaaaaataatgccagagaacgttgaattttatggcgccaaggttaaaaatttattcgattatacattttccttgctagatgctgaaatttggctaacaaaattaaaagaagacatatttaaccgtgtggccctaacgctaaaagacctaatgttattataa

SEQ ID NO: 88326 - DNA, 612 bp, Sphingobacterium sp. ML3W; identical to SEQ ID NO: 88324

SEQ ID NO: 88327 - DNA, 894 bp, Sphingobacterium sp. ML3W
atgataaaggttgataggtctcaagtcccaaaaccagctgccttgggcaagagagatagagcgggtgaaacggaaacagagagagcgattaaacattacacttctccgacttttgatgggatgacaaatttcaaatttaaaatttattcagatccggaagtaaaagaagctttgataaaactatttaaaggaaaatgcgcttattgtgaaagctcagttttacatgtatattctggtgatgttgaacactataggcctaaaggtgaaattcaagaagcaattccaaaaacgacgcctggttattattggttagccgcagattgggataatttattgttctcttgtagaaattgtaaccaaaagcttacccattccatgcatggagtagatacaaaaaagacaatgggaaagatgaatcaattccccttatctgatatcacaaaacatgtacgtaaccatgataacgttaatgggattgcagacgaggaaccatataggattttactaaatccatgtattgataatccagaagatcatttagaatatggtcctgaaggagttattcgacctaaaagagatgctgctggaaaagaaagcattatggctaagaaatccatagacgtatatgttttgcaaagaatgtatcttgttcaagctcgtgaaaaggttctaatagatatccaggctcaaatccaaagggtaaaagaagctacgactaagttcaatgaattaataaatgattctgacactgctctcagattttattttgaaaagattttaaaaagagaactggaacgactaaaaaagtttttaaaccctgaagaacaatatgtcggaatggcgcggcaaattattggagaatttctaaaaataaattataatatatctatctaa

SEQ ID NO: 88328 - DNA, 1257 bp, Bacillus thuringiensis serovar kurstaki str. YBT-1520; identical to SEQ ID NO: 87076

SEQ ID NO: 88329 - DNA, 648 bp, Bacillus thuringiensis serovar kurstaki str. YBT-1520; identical to SEQ ID NO: 87077

SEQ ID NO: 88330 - DNA, 1188 bp, Amycolatopsis lurida NRRL 2430
atgtacatcgagcgggtccggctggagaacatccgcggcttcagcggcgcccgcgccgtcgacctccggctgcccggccctggctgggtggtgctcgcggggcgcaacggttccggcaagacgtcgctgctgcgcgccatcgcggtcgcggcggcgccggacgtcgcctgggggctgctgtcggacgccggcagctggatctcgaacgatcagacgtccggatcgatcgagctgtcggtgatgcgcgaagagggcccggcgccggtcgaggtccgctggctcgactccggcctgctgccgatttccgggcttccgcctggccagccgttctgcgcggcgtatgggcccttccggcggctcgcgggcgggagcggcgaggccgagtcgtggatgcgcggcgcgggatcgctggcgcggatggccagcctgttccacgaagacgcctcgctcgccgagggcgtcacctggctgatcaaccagcatctccgtgccctggaaggaaaagcgggcgcccgtgagctgaaggacgcggcgctggagatcctcggtgacggcctcctgcccggcgggtaccggatccgggacgtcgattcggacgggctctgggtcgagtaccggggcgaccggttcccgctgcgcgagatgagcgacggctaccgcacggtgaccgcgctcgtggtcgacctgctcaaacaactcgacggcgccggcctcgaccacgagagtcccggtgtcgtgatcatcgacgaggtggacgcgcatctccacgtgtcgtggcagaaacgcatggggtcgtggttcaaggcgcatttcccgcggatccagttcatcgtcaccacgcacagcccctacgtctgccaggccgccgacccgggcggcctcatccggctttcggggcccgacgaggacgtcccgccgcgcgtggtttccgaggagctgtacgagcgggtcgtgttcggctccggcgacgacgccgtgctgtccgaccttttcggcttggacacgccgtattcgccgcaggcggtcgaattgcgggagcatttggccgagctcgaattccaggtggcttccggccgcgcggacgcgaacggcgtccgggaatgggaacggctgcggggcatgctgagcagttcgccgccgagccgggtcgacgaggtggccaggcggttcgaggccgacgatcggtga

SEQ ID NO: 88331 - DNA, 741 bp, Amycolatopsis lurida NRRL 2430
gtgatcgcgatccgccgggtcgcgctgccggagcgggtggtggacgatctcgaagagctgacggcgcggatccctcccggtgacacgaaagaagcccggcggctttggcgggtttcgcgtgccgtgcggcgttctctgcgggcgggcctggacgtgatggccgccggccgcggctactgcatgtactgcggcgacggcctcgggtccactgtggaccatttcgagccgatcgcgcggaatccggggcgcgcgttcgactggctcaaccacgtgctcgcctgcgagtactgcaacagccaccacaaacgcgatctcttcccggtggacgaagacggcaacagcctgctcatcgatccgaccgccgaagacccgctggagcacttgttcttggtgctgtcgatcgggacctaccgcgcgctgaccgcgaagggcgagcagaccatcaaggtgtgcgggctgaaccgcgcgcaactggcgcgggggcgggaaacggcggtcaaccaggtgagcgcgctcgtcctgggctggtgggccgcgcgcgaactgggcgacgacgggaagcggcgcgcgatggtctggaccctgctcgaccagccgcacgccgacgtcctccacgcgatgctccggcaggcggagatgccgggagcccgcgccgtgttccgagtggacgacgagctcatcaagctgcttcgcgccccggaactcgccgaggaccttcagctctccggcggcgcggtgtag

SEQ ID NO: 88332 - DNA, 1374 bp, Pectobacterium betavasculorum
ctgcttaactttcgttgcttcagacagctcgatattacctttgatgaacacattacgattctagttgcaccgaacggtgcgggcaagacgacagtgctggatgcggtacgactgtcgttgatcccttttattcgcagttttgacaccagtctgtataacagccgatcgcttggtatacgcacagaggatttgcgtctggtttttcgccaggaagcgctgaatatggagaggtcgccattaacaactattaccgctgaaggcgaatgggaaagtggaaagaaggcaaaatggatgagcggtctccagggagaacgagcatcaagtgaggaccggggggctgcggatctcacccaatggggggaacaactcaaggcacaggtacgggatgaaaataatgcacgacccatcgttcttccactggcgctttatctgggaacggcgcgtttgtggtatcaggatcgctacaaaccgcaatctgatgagcagcgtctggataacagtgcattttcacgtttgtcgggatacgacgactgtctttctgctacctcaaattataaacaatttgagcagtggtatagctggctgtggcgcagcctgcgggaattccagattaaatcactggaaacccctgtaacaaatatagtggaagcttttcgtggtgacataatactcgatgctgtacagacaattaagcaagctattaattgcctgacgcagagcgcaactggctggtacgatctggaatatagctctacttataaccagcaattgataatgcgccatccgcaacatggcattctcccacttaaccaactcagcgacgggctacgtaatgctgtggcaatggtggcagatatagcgtttcgttgtgtcaaactcaacccacacttacgcgataaagccgccctacagacgcagggaattgtcctgatcgatgaagtcgatatgttcctgcacccagcctggcagcagcaaattatccagtctttacgcagcgcatttccgaagatccagtttattgtcactacccatagcccacaggttatcagcacggtcaaacgggagtctgttcgcctgcttgaacaggatgataaaggtaacggactggcatcaataccacagggatcaacttacggcgaaccgagtaatgacgttctgcacagcgttatgggtgtcgatccacaacctcctgttaaggaaaaggctgatctacaaaaactgacggtgttgatcgatcaggggaaatacgatgatctggaaacacagcaactcatggctaccttgcaagccgctttgggtgaacatcacccacagctccagcgtttacagcgcagtattgctcggcaaaaactgctgaaaggaaaagcacaatga

SEQ ID NO: 88333 - DNA, 606 bp, Pectobacterium betavasculorum
atggcccgtcttctcgatgagcagtatcatctttgctgctacactgaaatacgtgctgacgagcgtaggttaggctatcacattgagcatgttgagaataaaagccaacgaccagaacgaacttttgattatctaaatctggctgcaagtgcattaaattcagggccaaatggtggtttatttcaactgaaaagtaaaaatgcctttggcggtcacgctatggggaaacaagatgctgtagatacggcaaaatttatccattgccatattcacgattgttaccgttattttgcttacctttctgatggtcggatagttcctgctgatgggctaaatgcacaagaaatggagaacgcgcaatacaccattgatctactaaacctgaacagcggattccttcaaacggaacgtcgtaatcattgggaagagctggaacagctttttgatgaacacattgaaaaagactgggatctgcaccaattacttcagcttgatctggttccctcagcagatcataaactgcatgaattcttcagtattacacgccagtttttccagcaagaagctgaacaagtattacagagccacgcccctgccttaatttag

SEQ ID NO: 88334 - DNA, 1731 bp, Pectobacterium carotovorum subsp. carotovorum
atgcgtttggataagctcactataggcagccctaaagacagcccaactcaccagttcaaaaacctgaagaatgtcactatcgatttcgatcaggagcattgggttactgtggtaattggttggaacggtacggggaagtcaaatgtgctagaggcactggctataatttttcgtgatttgatcgccaaaaaacgctcgcctgtttttgcctttcagttgtcttatcgtatgggagctggcgatagtctccgatacattcatattgatgctgaccctgatcgagaaaaagaatcttttattatccatgttgcaacggatgcagaggcccatggtaagggaactctcgctcccttcctagatggagagggagatgtctcagctctacgtggcagagtgataaaatttagtacctttttgaatgctggtgttgagtatcttcctcgttatgtattcagctactattcgggcgaaagttcgcgtatgcacgagattttccggccttatttggaaagttatgatagtaagctacgcaatggtgaagatcctggcttaaaacgattgttctatgctatgccggtacacagtcaattcgtcctgctcgcttttctgattcaacagtctgatattgttaggaactttctgaatgagcatttaggtctcgatcctgatgaggggattgaatctgtactgtttgtgttgagacaacccccatggaaatccaaagctccagatggggatagtcgcttctggaatgcacgaggagttgtgcgtgatttcttatcgcgcctctatgacatcgccttggcaccgattgaggtatcacggcgtgtgtcaacttctatttggaacaaagaaacactgcaatttaaatatctctatataaaggatattgatgcgttacgacgtttggtcggcagtcaagcgccagccgaattctttcgagatttggaaagcacctatgtatctgaactgattgaagaggttcgcattcgcgttcgtctaaagaaaaacgaagggtatgtgacctttcgagagctcagcgaaggtgagcaacagttactgactgtactgggactcctgtgctttactgccgaagacgaaagtctgtttttattggatgagccggacactcatttgaaccctaggtggagcgtagattatatctcatacctaaagcagtttattgccagtggtactaagcaagaagagacaagtcacatcttactgacaactcataacccacttgctattgctgaattggatcgtgaacaagtacagatcctgcggatggtcaaagagaatgagcaacggagggttgtggcctgttaccctgagatggctccgcgagggatggggtatgcggcaatcgtaaccagtgatatgtttggtattgcttcaacactggatcaacctacacaattgcttttggaaacgcagcgggcatttgccgccaaaacacgcctctcagcagatgaacagcaagaactggataacatcaatgctcaactagaccgtctgggttttcgtttcttccatcctgatgatgagtactctcgttatttgaggctacgtaatgatttgcttaaatcccgtttggctgtgacaaagcctagtgacatagccagtaaggttcttgccatgagccgtttagaacgggaagaactagcgaccaaacttattgaaaaactcatagctgacgatgatgaacagatagataaggtcgatcgatga

SEQ ID NO: 88335 - DNA, 804 bp, Pectobacterium carotovorum subsp. carotovorum
atgagatatatcgacattgatgaattagtgttacctgatgggtggttagataaagcagctactgcttctaatgctgttgccgctggagccgatcccgatgaatattcaaaagtctggcgtgaactcaaagatgctttggcggagctatttcctgataaaaagtgttggtactgtgagtctccggtggatcgtgctgacaatgctgttgaccacttccgcccaaaaggccgagtgagtgatgcatctagtcctcattctggttatcgatggctgagtttcgaacatcgaaattatcgttatgcgtgtactttttgtaatagtctgagaaaagatatcgcaaccggagatactggaggaaaggctgatagatttcctctcattgttgaggcagaccgtctttatgctccagggccactggctcaggaaaaaccaatcttgctcgatccgtgtgagctcaatgactgggagcttattggttgcaaacaggaaaacggaaagccctgcccgacaagtaatgaacagttagcaaaacacagggctgaggaatctatttctatctatcatcttgattatgagccaacttgcaagcaaaggcatgcagtagcggtgagacttatggctgatattgatcaagctaagcagttattcgggctgcctggtatggatgtacattttactgctgtcgcgaaaaaaatacggcgagctataaatcgtaaggcacctttcagtggggatatgattttccttctgaaggggcagcgacacgcagaccacccttggattcaaaaattgttggaaatttga

SEQ ID NO: 88336 - DNA, 1626 bp, Pectobacterium wasabiae; identical to SEQ ID NO: 86696

SEQ ID NO: 88337 - DNA, 783 bp, Pectobacterium wasabiae; identical to SEQ ID NO: 86697

SEQ ID NO: 88338 - DNA, 1236 bp, Pectobacterium betavasculorum
ttgctctctatcgaaaatattggacctgctaaaaaattagtcatcgaacctaagacaagacttaatattataacgggtgataatgggcttggaaaatcctttattctcgaatcagcttggtgggcattaaccaatacatggacagatcgtgtcgcctatcctgacccaagactgagaggaaaaaatatcaacctaacttattcaatccaaggtaatggtgaatttaagtcaggtaattgtgtgaactttgattgggaaaattttaattggccgatacagacggacagacctaccattccaggtcttattgtctatgccaaagtagatggttcattcgctgtatgggacccagccagaaaatattctactcaatcgacctttaatgaaaaagaaaaattgcttttcaaaagcaaggaagtatgggacgggcaagatgggattggtgttctcgaaggtttgatcagagactggatgacttggaagaatgatagtaagaaccagcatttcaaacattttgaaaaagtcttagaaaaactatctcccccagacttgggcgttttgaaaccgggtgaaccagttagaattcctgacgatccaagagtcattccaaccttagttcatccctatggagagatcccgataacaaatgcctcagcaggtgttagaagaatagttgctttggcatatatgatcgtgtgggcatggaatgaacatgtcattatttctgagatgatgaatattcctcctcaaaataatatggttgtgcttgttgacgaattagaagctcatttacacccaaaatggcaaagagcttttttaccatcattaattgctcttgataaagtattttcaaatgagttgaagattcaattcatgattgctactcactcacctttggtgatggcatcttcagaagaagtatttaatgatgaaacagatagccttttccatttacaacttgacgagcatggagttataacattagaagaattagatttcataaaatatggagatatttcttcatggttaatgtcaccaatttttgaacttcgtcaagctcgttcacaagaaggtgaatcggcaatagaggatgctaagaaattacaagaatcaactactccaagtcttgattcaatagaagaggtcaccttaagattgcgtaagtatctttctgcatctgatagattttggccaagatggatgatgtttgctgaaaagaatggaatcgatatatga

SEQ ID NO: 88339 - DNA, 615 bp, Pectobacterium betavasculorum
atgatacctctacaattagcacctgaaccagatgattttgataaaaatgtaagggaaaaaggagctatttttctcaaagtcacacctaacccctcctctaaggacttctcaggtaaagatttttggaaaaaagcagcccatagtttacattcatcttataaagcaatttgtgcatatagctgtatttcattaccaactgcaccaggtgcagttgatcattttttaccaaaaagtaaatatcctaagcttgcttatgaatggagcaactatagattatgtttagataaaattaatcagtataagggaagtgcagacgatatttgtgacccctttaccattcagccgggatggtttgttttagattttccaagctgtctcgttaaagccggtgaaaatcttgccccagatattgctaagaaaattgaaagtacaattaaaatcctaaaacttaatgcagatgaaggattggtagataatagattaggcataattatggatttaatagacggacatgttgatatgcattttattgaaaaacggtatccattcattgccttagagattaaaaggcaaggaatcgaagctgatgtaaaaaacatttttaaaaaattttaa

SEQ ID NO: 88340 - DNA, 1188 bp, Amycolatopsis sp. MJM2582
atgtacatcgagcgggtccggctggagaacatccgcggcttcagcggcgcccgcgccgtcgacctccggctgcccggccccggctgggtggtcctcgccgggcgcaacgggtcgggcaagacctcgttgctgcgcgccatcgcggtcgcggcggcgccggacgtcgcgtggggcctgttgtcggacgccggcagctggatctcgacggaccagacgtccgggtcgatcgagctttcggtgatgcgcgaggagggcccggcgccggtcgaggtccgctggctcgactccggtctcctgccgatctccggacttcctcccggccagccgttctgtgcggcgtatggaccgttccggcggctcgcgggcggcagtggcgaggccgagtcgtggatgcgcggcgcgggatcgttggcgcggatggccagcctgttccacgaagacgcctcgctcgccgagggggtcacgtggctgatcaatcagcatctccgtgccctggaaggaaaagcgggcgcgcgtgagctgaaggacaaggcgttggagatcctcggggacggtctcctgccgggcggttaccggatccgggacgtcgattcggacgggctctgggtcgagtaccggggcgaccggttcccgctgcgcgagatgagcgacggctaccgcacggtgaccgcgctcgtggtcgacctcctcaagcaactcgacggcgccggcctcgatcacgagagtcccggcgtcgtgatcatcgacgaggtggacgcgcatctccacgtgtcgtggcagaaacgcatggggccgtggttcaaggcgcatttcccgcgcatccagttcatcgtcaccacgcacagcccctacgtctgccaggccgccgacccgggcgggctcatccggctttccgggcccgacgaagaggttccgccgcgcgtggtctccgaggagctgtacgagcgggtcgtgttcgggtccggggacgacgcggtgctgtccgaccttttcggcttggacacgccctattcgccgcaagcggtcgaactgcgggagcatctcgccgagctcgaattccaggtggcgtccggccgggcggacgcgaacggcgtccgggaatgggaacgcctgcgcggcatgctgagcagttcaccgcccagccgggtcgacgaggtggccaggcggttcgaggccgacgatcggtga

SEQ ID NO: 88341 - DNA, 741 bp, Amycolatopsis sp. MJM2582
gtgatcgggatccgccggatcgcgctgccggggcaggtggtggccgatctcgaagagctgacggcgcggatccctcccggtgacacgaaagaagcccggcgactctggcgggtttcccgtgccgtgcggcgttccttgcgggccgggctggacgtcatggccgccggccgcggctactgcatgtactgcggagacggccttgggtccactgtggaccatttcgagccgatcgcgaggaatccgggccgcgccttcgactggctcaatcacgtgctcgcctgcgaatactgcaacagccaccacaaacgcgaccttttcccggtggacgacaacggcaacagcctgctcgtcgatccgaccgccgaagatccgctggagcatctgttcctggtgctctcgatcgggacctaccgcgcactgaccgaaaagggcgcacagaccatcaaggtgtgcgggctgaaccgcgcgcaattggcgcgggggcgggaaaccgcggtcagccaggtgaccgcgctcgtcctcgcctggtggaccgcgcgcgaactgggggacgaggtgaaacggcgcgcgatggtctggaccctgctcgaccagccgcacgccgacgtcctccacgcgatgctccgccaggcggggatgccgggagcccgcgccgtgttccgggcggacgacgagctcatcgacctgcttcgcgccccggaactcgccgaagatcttcagctctccggcggcgcggtgtaa

SEQ ID NO: 88342 - DNA, 1389 bp, Vibrio ponticus
ttgaagctaaagcaattagagattccaaatcacaaaggctttgtagactttgttaccacgtttgacgaatcctcgccgattacaacgataatcggcgtgaatggcgtaggtaaatcgaacttaatcgagattatcgtttcaattttccgcgctatagaacttggagaatcgacgccttttgattattcattgtcttacgaatgtcgtgggcatgatatcgaagtgcggtacgttggggcggtcaaggaaagttgttacgttctaatcgatcgagaaaagaagtcttttgctcatctaaagcgaatggctaacgagtatctacctcaaaacatatttacctattattccggcactaacgagcgtgtggagcaactgtttactaaacaccaaacacgtttctacaatgcgcttacaaatggtgacaatcaacttatcagacgttttttctactgtagagatgtccacagcttttttgttctattggcttttcttgtcgatgatgatcctgcctgtgctgatgtcctgaacagacttgatattcaatctttagactctgttctgttttgcctgaaaaagccatattggtataaaaacaaaccatcgcaaattatggaagaggagggagacccccgtttctggttctccagaggtgtcgtgaaagatttcctcagcacaatgtggaaatatgctatcgcacccattgacaataaagagcgtaaaacaatcgactttagagggcggtcagaaactcaagaaagactttatctttttcttccaaatgaagagtctctccgcggtttggcaagtgaatatccagatacaacctctctatttaaaaatatagagagtacttatattgcggatttgcttgaaagcgtagaagtgacagttacgttaaagagtggtcaacaggtcaccttcgaccaactatctgaaggtgagcgtcaattgcttaccgttcttggtctcatgaaattcacacgcaatgatgaatcgctgtttctacttgatgaaccagacacacacctgaatccgcgatggaaattgaaatactttaaaagcatcaaagccattcttgaacaccgtattgaaggaacagataaatcagcattggatactagtcaagtattgctcacgacgcatgacccgttgatgctgacatcactgaattctaagcaagttcgagtacttaccaagcttgaagacaccgggcggaagctgtctgaacaacccgaagttgacccccatacaatgggtgttgaagcgattatccagtcggacctctatggtattcgtaccagtcttgatgaagaaatgcaggacaaaattgatttaagaaaccgattgttagcttcaatcaaggagggggggaaatccctaaacgcttga

SEQ ID NO: 88343 - DNA, 831 bp, Vibrio ponticus
atgattaaaattgaactgcctgcagctctcccaccggaaatcattgcgtggcaacaagaagcccaagtaattactcaggagcttctacaagctcaatcacttgcagaaaaacatcagattatcgatcgtcaccaacgtcattggcgcaagcctgagctagttgaatggttatcagatttaagttttgaaaagtgttggtttaccgaaacgaaatttggcggtgactatcaggaagtggagcatttccgcccaaaaaaagggactagggaaatagatggtagagcttgtgccaaccacgatggctattattggcttgcatttgatttgtcgaattatcgtctttgtaaacgtcgaccgaatgcaaagaagggaacgttttttcccatttgtgacgatagatttagagcaacttcgccacaactcccttggagcgatgagacaccttactttttagaccctttcaaggatacagacgttctgttattgagctttaacgataatggtgaacccgttcctcaagaggatattggtcagatcgatgaggctagagttaagttcacaattgaaaagtactttcttgatgaaagagtactgaataagaggagagcccaaacttggagtacaacaagggttttatatactgagtatcttaatgctataaaagaagctaatgacaatgggagtgttgctaaacggacagaagcagagcagaagttaattcaaataaaaaaactgtgctccagaaatgctgagttttctagtgtagcgagggagtctttgatgaagctgcctgaccgtatggcttggaaaatagcaagcaagatagtgtaa

SEQ ID NO: 88344 - DNA, 1509 bp, Flavobacterium psychrophilum FPG3
atgaaaatagatagtgttcatataaaagggagatttaagaatcttgaaaatttccaattcgactttggtaaaagttcaatggaaacagtcctactggggttaaatgcaaccggaaagtcaaatttcatggaggctattgttataatctttagagatttagatttagagcgatctccattagtaccaaaacacggtgagagttttgaatattatatcaaatataattgtagaggtagggatattgaagtagagtttttatctaaaaatggatataaatttattatagatggcgaaaatctacgttcaaaatcactattctttaaggataagaatgaatacctaccaagtcatgtatttgtttattattcaggcttaagtgaacgattaaaatcattatacgccgaccataaacttttgcagtttaagaaaatgatgactcctgacttgaaatatgaggattttaatgaaatgcctcgaatatttctggtggaacctattcatgcaagtttagcattaattgccttttatttatttccagaaagagaagtggaaactattgaattcctaaaaaaagaattgaatataattgattttggttcggctctttttatgttaaaacaacccaattggtctaaatcaaaaaaagaaaaagatcgtttttggaacgctgatggacttgtacgtcggtttatagaggatttgtggaatttctcaacagctcctatgttttacaaagagacagtgaaaggctctctaaataaacgagaaacacttaatagactttttttatatatcaaagataaaagcacgtttagttccttggttgaaatgaaaatgtataaaagtaagattccgttatttaatgccttatgcagtttacatttttcagaatttgtagaagatcaagatgttcgaattaaagttgtaaaggaaaatataaaaggagaactagctatgggggaattaagtgaaggtgagaagcaattaattaccgttctaggtcttcttaaatttacaaaagatgacgaagctcttattttattagatgaaccagatactcacttaaacccaatgtggaaatggaaataccttgatttcttgagtgatgtagttcataaatcagataagactcaaattgttttttgcactcatgatcctcttgtcataggcggtttagaaaaagaacaagttagagtttttagaaagaatgaaaataacgaaaccaaagtacacgagcctgatgaaagcccaaaagggttaggtgttgcaggtatcttaacaagtccattatttggcatgccaacaactcttgatagaccaacaaataaactcttggaagaacgtaatttattgatgtataaggaaagtcaaaatacattaacaaatgaagataaaaatagacttaaagaactttttgaaatcttaagtaatgaaggttttaattatacttttaaggacccagaattttcgaaatatattgctgaaaagttaaaagcccaaattaaataa

SEQ ID NO: 88345 - DNA, 813 bp, Flavobacterium psychrophilum FPG3
atgatgtatataaactttgacaaactaaatgtcccccagaaaaaatggttagataaagcaacagaattgcttgaactattgaaaaaatcgactacagttgaagaaagaaatagcataattgataaaaatcaccgtttttggaaagtatttaaaaatagttttaaagaactatcacataacaagtgttggtattctgaaaccaataatccatattctcatttacacatagaccattttagaccaaaaaaaagagtagaagatatatttgacaaagcaaatccatctagggatggctattggtggcttacttttgattatagaaattacaggctttgtggaagtgttggtaatacaaaaaaaaatgatcactttgccgtgaaatacaataaagtaaatagtcccgctccaatttcggatgaagtttattattttttagaccctacagtaaaagaggatgttaagcttctaaattttgataataacggggatataaaacctgctgctcctgaaaatttagaaaaatggaattatgacagagctaaatataccattgaatatttagatttaaattatccagatttaaaagaaattagaaggcttaaatggcaggaaactagttcattgatcaaaaaagttaatagcttgaatttagtatttaataaggaaccaacaaaccaaaacaagtataataaagattgtgaaattgaaaaattgagaaagatgatttctcctgagcaagaattaacttcaacagtaagatcctgtctaagatcttcaggtcaagattgggcatataaattattagaagaataa

SEQ ID NO: 88346 - DNA, 1626 bp, Pectobacterium wasabiae; identical to SEQ ID NO: 86696

SEQ ID NO: 88347 - DNA, 783 bp, Pectobacterium wasabiae; identical to SEQ ID NO: 86697

SEQ ID NO: 88348 - DNA, 1626 bp, Yersinia frederiksenii ATCC 33641
atgaatcggacaattaaaaaaataaaaatgggtgctgatcatgataattcaatcaaagaccagtataaaatgtttaagtattataaagaggggatgtttgttgaagtcgatccagctgaatcttcacgttatcgtcagatgtgtcttaataatctgaaagaggcgcagttttgtttaaaaaaagtaaaactggtaaactataaagggtttaacgaactatctattaatctggataacgatattatcctgatcgccgccaataatggctatggtaaaacggggattctggaagcgatctatctttctctctcatggttttatcggttggtttatggttctaaccaggggtggaagttcggtgataaatacatcagccgcctggtaagtaatgccgcgatgctagttaatctggatatctcggtggggaataacaaaaaaccctccggctatcagatcggtattgcccgctcccttggtgcttcttcggttaaaagtgactacacagaatttaaagagttggctgaaatgtatctggaatttcaggacagtgatattgtagcgccgatgtttgcttactactcggtagagcgcggtaagaactaccccgacggtggatttacgtctgcgattgaaagcggttccggcaagttgctggatagactttatccggactcttcactggcgctttcttctaatatttttgccagctttattaaatgggctgccgaaatcaaaataaaaaaaatcgtctctaacgaagatgagcagagcgaaaaacttaaaagtatcaaggaattcatctaccatatcagtcattctgatcttgccgatgaaataaaaaacacactgattagccagaaagagaaggaagttgaaatcatctttggcagccagtcgaaggataaatcaaccaatcttgaccggatggaaaagattgtggatatgattttcgcactgggatgcgattttatcgatgatatttcctctatccagttaaaatacgatgaaaagctagaagcattggatcttgtatgtgtaaaaagagattgtgaaatcagtgcgtcctatctctctcatggtgagaagagcacgctttcactgttattcgatatcgccctgaagctaatctatacctgtggcactgaagacccattcagcggtcagggaatcgtctttatcgatgagattgagttacacttgcatccttcatggcagcagtccctgctcagtaaactgaaaaaaaccttcccgaatgtgaaaattattgccaccacccatagccctaatattctgaataccgttgaagagcaggcgatcaggaaaattaaagttaagaataatcggttttatattgagattccggccttttcatatggtgccgagtcttctcaggtgcaaaatgatatccaggatgttgcagcacggcccgatgtcgagccagtacaaaatcttgcacgtttccgcaagatgatgaaaaacaatcagtacgacacgccagaagcacaggcgctgctgaagaaaattcttgaatggggcgatgctcacgacccggacgtcaccaaactgaaaattgatcttgaactcagaattaagcgtaacgccaaaaaaattagcaaggagcagtaa

SEQ ID NO: 88349 - DNA, 732 bp, Yersinia frederiksenii ATCC 33641
atgagaggcttcaggaaagagcggctgagcaatgacattctggacgcttatctggcggtgccagaaaatgcgaatagtggttggaagggtgaattctataccaccttagcttctgccgaccgggacagtttgaaaaatgagataattgccgatcaggctggtctctgtgcctattgtgaaaaagcgctcagagatgaaggtgacaacaaaccgctagggtttaaagttgaacactttatccctgagaacagcaaaaccattaaaaggatgatagcggccgggcagcctgtacccaccattaattactcgctattgtggacaaatctgttggggtgctgctttggtgggcaacacgcgcgctcagcaagctatattgagtccctgacagatgaagctaatctgagctgtgatgtgctcaaagcccatcataactggtcagcactgatcctcgatccgacgcaggagcctcctgacgatggaacatggtttgaattcgatgaagaaggagtgatggatgtctccgcagattgcccgaaccagtatgtggataaagcccggaaatcaatagaaatgttgaatttaaactgtgtcagattaactcgtttgcggttggcaacgctggagtcgcttggtgctgttagtgatgaagaggatatcgccgcattactcagcaaggatgccgcaggtgtctacggtgaatttatctcgctgagaaaatggtatctggcttaa

SEQ ID NO: 88350 - DNA, 1224 bp, Yersinia enterocolitica; identical to SEQ ID NO: 86710

SEQ ID NO: 88351 - DNA, 654 bp, Yersinia enterocolitica; identical to SEQ ID NO: 86711

SEQ ID NO: 88352 - DNA, 909 bp, Photobacterium aphoticum
ttggattatatagagaaggataataactttgatttgccagtaattgcattttatgaatgtgataggttatggatttcaaaaggtaatatagatattgaaagttctgctttaaagcagttctctcgatttgacccttatttagattgttttcacactggtgctgatgataaggccattggtgaatggttgctgaagttagaattaagtgagttgcaaaagaaaactccaagcccgatgaaaacagctatcgaattcgctgcgaaagcagcaatggaaaattgtgtaggatttggttttgatttcgatgaatcaagagtaatggttcgctatgaagatggaacctctacaccatttgaacacctcagtgatgggcaaagaacaatcttagggttattttgtgatatagcaagaagagctgcgattcttaatccgcatttacaagaaaatatttgttcagagactaagggggtaattctaattgatgagcttgatctacatttacaccctaaatggcaaagaagagttattgaagatctgagaaaaatattcccgaaaatgcagttcatatgtacaacgcattctacttttttaattcaatcattacgtagtagtagtgagttaatattgatggatggtgaacctttattagaatataataataaagggattgaagaaattgctcgtaatatgggtgtatcaagcccagaagtatcacaactatatgaagatatgaagaatactgcgcatgattttttagctactcttgataatgagaatttatcaccagaagaatttcatgaacggtttaatgctcaattagctagtgttattgctccatactcaaataaccctgcgtatcaagcattccttgaaagaaagtacgctattaaaacgggtaaggaactatga

SEQ ID NO: 88353 - DNA, 753 bp, Photobacterium aphoticum
atgaggcctgtatctaaagggaatgctcctacaggtgtcgtttttaccaactatcgagaatcttttgattatttattagataggataggaattggagaatataaaaatattaagctcgctcagtattgtagttattgtgagagagtaatttctactaatcttgctgttgaacatatagaaccgaaaaaaggcccatatgcccaaccacatttagagaactcttggataaactttttacttgcatgtgtaaattgtaactcacaaaaaggttcaaagcacatccagtttgataagctgtattttcctgatcgtgataatactttttatgcctttgagtatagctataatggtgaggtctcccctaatgctactttaagccatgctcaaaagataatagctcaagagacaatcgatttagtgggtttaaatgaaccaattgatacagacgtggatggtgtagcaaaagataggcggacgcagcgtttaaatgcctttgctttggcattggattcattagaagatttaaaaagtgatcctcagaatcaagccatacaaaatcttatagtgaaaggtatgctaaccagtggctactttagtatatggatgaaggtgtttgaaggctacccacatataagaaacatgtttattgactctatcagaggaactcggcagagtggctgtttcgatgagcatggaaatattcggcaccctcacccaaaccctgacaacctgcaacttggtggaaaaatataa

SEQ ID NO: 88354 - DNA, 1392 bp, Enterobacter aerogenes
atgattgagacaattgattctggcgacatacggtatgaatttattgacaaatcactgttaagtcatgatggctcaaatatttttacagtaatgataggaagaaatggaaccggtaagagtcgattactaaaggatattgttgaagctgtatccagtgaaaaacaaaaaaaatcctcttataaaatccagtacatcaactataacaaaagtggtttctccaaggtaattgcattatccacaactcctttcgataaattccctttacctagaacaatagaatctaataataaatattactatatcggcataaaagattgcggtttccgtgatgtcagtaatggttttcttagaaaaatactaggcagctatttgagagcatacctcttaggtgatagagaaagtctaggaaaaacacttgactatcttggatatgaaaaaactttcaatttaaaattttcatatatcggtggttcgattatagaaagattgacaaatgaacaaatagaactaaacaaacaaaatgtaaaatcaaataaaaactataatttagcatggaaattaagatactacttggaagaaagatacagaaagggtgagtatcatttggaaaatttcctgtttgaggcgaaaaagcatcccgagagtgaagggtatgtctctactattttggaatcattaattagcattcccgcaatacatcgcattaggaaagtcagcatatcaattaataacaacgaagttactgtttcaaacgaaaaaatatcatttaacaatgaacttattaatttgatagatgcaggcatattaaaactcgagagtgcatatcttcagaagaaaggaagcaaggaaatttttaagattaacgatgcgagctccggtgaacaatgtgttattttaagtatgctgggcatttcctctcttatttctgacaattcgttaattcttattgatgagccggaagtatgtttacatccagaatggcaagaaaaatacattcaattacttacaagggttttcaactcatacaaatactgccaattcataatagccacgcattcaccgcaagttatagcaaatctaagtacagatcagtgcttcgttctaaaaatggaagatggtgttgtgcataatgcaaatgaatttatccacaaatcatccgactttcaattagcaacactttttgaaagccctggatataaaaatgaatatttatctcgactagctgtttctttattttcaaaaattactgctgagcgaaacattgatagtgaagatttagaaacccttcatgtattaaaaaaatcattagatatgttatcggtagatgatcctctgtatgagttaatcaatgtaattatcaaagccgggagtgtttatggcggagataaataa

SEQ ID NO: 88355 - DNA, 630 bp, Enterobacter aerogenes
atggcggagataaataaatccattgttatatccaaggaaagtgaggatattataaagtcagtaaaatctaagccaggattcactttcaaattatggtcagatgaggagctattaaaagttagaagggaaattagaaaattctatagaaaacaacaaaaaggtaaatgtgcttattgtcaaaatccggttaccctctcggcttctggatgtcatgtcgaacatatagttgcaaaatctttacatgaagaatttatgtttactccgaaaaatctttgtgtcatatgccccgattgtaacgaaataaaacgagagcaggaagtaatggcaaacatagaatcaacattgaaaaatgactctccaaaaacatatcctagaagcagcgcagcatttataacataccacccgcactttgataattataatgatcatatcatcaacattgatgggtattatttagataaatcagagaagggtgccaatactattagaatgtgtgtactcaacagaaaactcagagaatttggatatgatgatagtgcgattgcaattccaggacatttagatttcatgataaggattttctatagtggtaaaattgatgaaattaaaaagctaatcggcatgaattaa

SEQ ID NO: 88356 - DNA, 1305 bp, Burkholderia xenovorans LB400
atgaaaatcgacaaagtacggctgactaactatcgctgccatcgcgacatcgctgttagtttttcgccgcattttaatgtgttggtgggagcaaacgggagcggaaagacgtcgttgctgaaggggatagccgagctgttcaatggatttgtaggtggtgttagctcgaaaagcattgctccaacgctgacggctgactccgtccgggtcgaacgcatcgacattcaaggcagactgagatttgaggagcagtatccagtatcggttcttgccgaaggaagcatcggcgataaaagactgtcgtggggtgtcacccgcgaagcgcctaccggaaactttacgtaccttggcggacaaccaggtgatgtatggaagacagcaagtgacaaaggcgtaaacactgctctcgcaaaaaaactccctatcctcgcgttctaccaggcaaatcgccaatggaatttgaaccgggcaagtgagcttgaggctgcaacgagcaaagacggtcgtatgaacgcttataacaattttttcaatgcgtctagcgatgctgcctctttgcaaacctgggtcatatctaaatgcctggagcgctttcaagtttcctcggaaacaaacagactgttcgacgaggtaactgacgacgagcttgctttagttaacggtgcgctcgccaacgcgatcggggaaattcaaggtatcaaatttgatatgcgggagaaaagcctgcttgtcgaatggaagcagtccgctggttcaagccgctcagctaccgtttttggaaatctaagcgatgggcaaaaagcggtcgtggggttgatcgtagacattgcacgacgcatctgcctcctaaatcctcagttggggcaatcagccattaaggagacgccgggaattgtcctcatcgatgaactcgacatgcatctccatcccaagtggcaacgagcacttaccttgggcttgcagtccgcattcccctccgttcaattcatcgttgcgagccattcgccgcaaattttaggagagatgaagccagagcagattatcgtgctaaccggaggaacgacctccaatcctcaggtcagctacggactcgactcgagcgcggtacttgaagaaattatggacgtccccgctcgtccgttagaagtcgccaatgaactgtcggcactattcgaagctttagagcgaaatgaactgaatgttgcgcgccaacacctcgccaaattgcgtgctggcgcgccgggcattgtcgaactgaaccgcgccgaggcccttctcaagagaaaggaggtgcttggccgatga

SEQ ID NO: 88357 - DNA, 648 bp, Burkholderia xenovorans LB400; identical to SEQ ID NO: 85933

SEQ ID NO: 88358 - DNA, 582 bp, Burkholderia pseudomallei
ttgcttcggctacgccaagtagaactctgtaagtcgggggccgacacgggtttccttattagtcaagcaagttctggcgaacaagccgtagttctcagtctacttggcattggaagtcaaattcgagacggtagtcttatctgcattgatgagcccgaggtatgtcttcatccggagtggcaggagaagtacatccagcttctttattcgacttttgagcattttaccgactgtcattttgtcattgcgacgcactcgccacaaatcgttgcacatttgccggaaggcaactgccacatcatgtcgatggagaccgggtccgcaactgacgcctcatcattttctcgcaagtccatagactatcagcttgctgaagtattcggagcgccgggtgttcgcaacgaatacctgagccggattgcattaaacctgttcgcatctgtctctaaagttcgccggtttgatgctgacgcgcgcaaaacattgcaatcgctggagaaggttgtcgagctccttcggaaagacgacccagtgtacgacctcatcatggcgctacgggagatgcgtaagaactatgcctga

SEQ ID NO: 88359 - DNA, 654 bp, Burkholderia pseudomallei
atgcctgacatcgcgaatcccgtcgcatataccgatgacttggataggttggtgcaatcgaagcagaatgacgtgacgttcacacatcagcaatggggacacgacgacctcgcaccgcttcgagcacacgttcgcacgcactatcgcaacgaacagagggctatctgttctttttgccgcggtccccttggcctgcaggctgcggataactgccaggtggagcatattgtcccgaagtctatccgtccggagttcatgtttgaaccgaagaacctgtgcgtcatatgtgccgactgcaacgtcatcaagcgcgaccaggaagtaacggccactatccccaataccgtggttcgaggacgcgctcgacaactatatccgcgcacatcaacggccttcctaattgtgcacccacatttcgacaattacagtgaccacattctgattcatcacggcttctacatcgacaggtcgcccaaaggtaatttcaccattggagcatgtaggttgaatcgccgactgcacgagttcggatgggacgagaatattgtcaacagaccaacgctgatggaagcggcacagcagtatgtcgactcagagcctggacttgaccggcttgccgcgctccagcgtctgcgagaggaagtactgccatga

SEQ ID NO: 88360 - DNA, 582 bp, Burkholderia pseudomallei; identical to SEQ ID NO: 88358

SEQ ID NO: 88361 - DNA, 654 bp, Burkholderia pseudomallei; identical to SEQ ID NO: 88359

SEQ ID NO: 88362 - DNA, 1353 bp, Cedecea neteri
atgatccatgaacttagccttgccaatgttgggcccgccagcaccatgcatctcacatttggcaatcggctcaacctgttaaccggcgataatggtctgggaaagagttttttactggatattatttggtgggcgctgactcgtcgatggcccgcagaggtgaaccctaaactggttgcgggcaaaaaggcgctgcctgcgcttgaccttactggagcagaggcaagtattgcgttttcatttgccggtaaggtcaaaacggagcgttacgaaagtacctatgcccggcgtgaacagagctggactggccgtgccggtcggccggctaaccctggactggtgctgtacgcgatggcggacggcagcttcgccgtatgggatccgcaccgcaactattggcgcacgcaggatggtattgatgtgcaggagcgggttccggcctatgtattaaacccgactgaagtgtgggatggcttgccgggtgacgaacgctcctggctctgtaacgggttgatccgtgatattgccagttggcaaaaagagaaaggcgcggcgttcaaacatcttaatgccgtgctgaaggtgctttccccctcgataaccgaagtgctctcgctgggggaactgacccgcatcagtctggatgacgtacgtgaaataccgaccctcaggatgccttaccaaaaagatgtgcctgtgctccatgcgtcttcgggaatgcggcgtattctggcgctggcttattttttggtatgggcctgggaggaacaccagcgagccgccagtattgtgggggaagacgtcagccctcagattacgttcctgattgatgaagttgagtctcatcttcatcctagttggcagcgcagtattgttcccgctttgctgaaagtgatgggaaagctgaacgccaaagcacaggtgcagttgatcactaccacgcattctccgctggtgatgacctcggtagagccattatttgatggctcacgagatgcatggtttgatctggattttctacatggtgcggtggtgctggagcggcgtgaatttgaaaaacacggtgatgtgaccaactggctgacgagcgaggcgttcgatttaaaaagtggcagaccgctggagtatgagcgactggttgaggacgcggcaaagctgctgaataagtctgatgcatcggaaaaggagctggacgcgatgtatcagcagttgctggcggctctcgatgttaaagatgagttcctgtttcgctggcggtttatccgtggaaaaaaagcaaacccggagcaaaataataagaagataaaaaaaggacgcaaagatgattccggtggtgttacaggcggagcctga

SEQ ID NO: 88363 - DNA, 612 bp, Cedecea neteri
atgattccggtggtgttacaggcggagcctgatgattttgatgtcgaggtgcgtcagagagggcataactggttgagtaaaaagggtattgctcttaatgcaccaccgccgaaggcttcggatttaccgaactattggacgcacagcaattattcgctttgggaatcttattgcggtgtctgcgcctatctggcgatttattttgagtgggtgacaggggcatcttctaccgaccatttcgtcgctaaatcccataatgccggtgacgcctatgaatggaacaattatcgcctaagttcattggggccaaatcgcaacaagaatgactttgatgacgtcttggatccaatcagcttgcagccggatacctttgtaattaatttcctgtcgggtgagattagccctaattatgcgttatatcctaacggttcgctgtatgccacgcaggcagaatcgacaatatcccggcttaggctcgatagtcaggagcatcgacggatgcgtacacgccattttgagaaatatatcaacggggattggtcgcttgatagcctgaaagatgactcccctttcgtgtatgccgagattgtgcgtcaggggctgactcgttaa

SEQ ID NO: 88364 - DNA, 1233 bp, Phaeodactylibacter xiamenensis
atggaagtgttaaaattgaaaattgataagtacaaagtgtttaaaggttttgaagcagacttttctaatgaagacggaactaccaagaaaataatcgtgttagcgggtgtcaatggcagtggtaaaacatctctattagagtttatccataaaatggttgttgaccctaagatagataggaaaggatacgtagatatcttaacggaatttggatcagaaaaagataacaggaagttaatagagtcagtggcttcactccgtctgaattaccgtctatttaaaaatataacggcttttgaaaaaaaacaaaaaaatgtagattcagatgataatctagtatacctaacggctaatggaactacagaaattatttttaaagataaagaagaaatttttgtcgaggcaatatccaaattgaaaagttcagttgtatttttaaacacagagcaatttgatttcaagaatgttaataatcttattttctcttttgtgaaaaagttaatttttaataaaaatgttagcccaaaagatgcatataatgaagttcaaaatattttagatagtctatttgaggattttgaccttagggttagatttggcagcattgatgcttcgtgggaggcagggaaagaaagttttctcgtatatttcaaaaacagacattcggacaaaataccaatatctgacctttcaacgggagagaaagaattaattacaagagctttttttttagaggttgtgacaccttacaattctgtggtcttggttgatgagcccgagcgatcgctccatccaaagtggcaacaacagatatttgatgtttacgcaagagtttctgaaaagtacgatgcccagtttattatcgctacgcattctcctcatataatttcctccgttgatcctaatagtttatttattttgaacttggaagaaagtgtagatgagccaaataatttgagcatcagtatagaaaatatggaaacacttaataaacatacaaaaggagttgaacccaacagaattctaaaagagattatgggggtgtcaaggttgaggtatggggaaatagataaaaaagttaacgacctagtttcacttctaaatattcatgattatgatagtgatgatgtagcgaagagaagggatgaattaatccgtattttaggagataaagaccctacaatgatcagagttaatcaccaaattaaggttctggaaagaaaactaaattag

SEQ ID NO: 88365 - DNA, 729 bp, Phaeodactylibacter xiamenensis
atgaggtttgtttcaaacgaaaataaatgtgatgagtggagtgaattcttaaaatcagaggcaaaaagcttgaaagtaaaaagaccttgggataagctcacaaaaatttctcgaaaagataaggtgacaggtgaacggattaaagttgggtcaaatgcaaaaagagcattgcatgagcatctttggcgggagcaaaagggtttatgcatttactgtatgcaggagattcataaaaccaggctcaactcagatagtcaccttgaacacttgatgaataagtctcaattcaaagagctgatatttgagtacgataatctttcagtatcttgcaatggatacgattgttcaaccgaccaggattcaaagggtaagaatcagttttgcggtcattacaaggataaaaaaaataaaaagccagaatttatcgctgaaaaatatataaatccttgtgaggatgaaaatatcgaaagctactttgagtatgatgttgaaggacgtattaaaccggcaagaaatatagagcctgatataaaaggaaaggcatcttatatgattgatttgatcaatttgaatgatgatgggcttgtttcggcaagaaaagctgcttatgagagcctgatagagtcggagattcaagaaggagaaaaatttgttttagatttacttgatgaaaagaacaaattttttctaggatatcattctatgcttaagagcctttttggcttttaa

SEQ ID NO: 88366 - DNA, 1275 bp, Phaeodactylibacter xiamenensis
atgagactgaagaaggtagtcgtacaaaatttccgcggcattgagtatatcgaacttgatcttgacgaccagctgaatatccttattggcgaaaacggaagtggtaaaaccgttatacttgaagcacttacggtcgcagtaggtgcttttatgattggccttcgagatgtatcaacccgtggtattcgtgatgatgatgtccgctatactgttcagcaggaatatgcctaccctgttgttattgaagccaatggtataattgacggtcaaagggttagttggagcagagagcggcacagtaaaacagggagtacaaactataaaaatgctcaacccattagccaaatcgcccaaaccatggacgatcgcgtgagatcgggggaatatgtagacttaccgctgatcagctatttctctaccggccgtctttttgtcgaggctcaaagccaacagaaaaagcagccaactgcccgaaatggcaaaaaggagttgggttccaggtttaggggttaccgggaaagcctggatgcgaaatctagtttccgtcgttttgtagattggtttgagctgaaagaattgagccagttgcaaaaaaaagaaactgacccttcgctattcatggttaaacaagccatccgcaaaaacttaccaaattgtaaggatgtattctacgattttgacccggatacaaatcgggggctgactgtagctttgacagatggccgtaccttgccttttgaatacctgagtgacggcgttcgtaactttttcgccatgatggcagatattgcccatcgctgtgtattgctcaatccgcatttgcaggaaaaagccttagcgcaaacggaagggatcgttctgatcgacgaactcgatctgcatctacatccttcctggcaaaagagcgtcatcaggagtctcaccgaaacttttcctaagattcaatttgtagtaaccacccactctccttttctcatacaagaaactgaggctaaccagttaattgtattggaagactgcaaagtcaagcaaacaggatcaggcaacaacctgagcctggaagacatcgccgaggaactacagggctttgtcaacccacgctggagcaacaagcgggaggctttgtacgaaattggcaaaaaatactacactgctgtcgctgaaggcagcactgctgacaatatcgaagaggaaatgacgcaggctgagaaagatttcactgaagacaccctgttctacgcctaccttgaggcgcttaaagctatgaagcaatga

SEQ ID NO: 88367 - DNA, 669 bp, Phaeodactylibacter xiamenensis
atgagagctgtagataagggcgtggctcctcgggcctacttgaattatacagatgctaaacccgatttatttgaccgcattggtccctactgcgcatattgcgaaatgcctgtaagagatttgggctatgtagaccacgtacacccgctggcgaatggaggccaacgtctcgcatgggaaaaccttctgcccagctgctttttctgtaaccgcgtaaaatggaacagaaatacagaccgctcacagcacctatggccggacattgataatacagacttggcttttgaatatggaaaagcatacatagttcgaccaattagaacgctgactagagcacagaaccaagccgcaaacaatttgatacagctgacgggcataagcagaactgcggctaactcaacccgaaaagataggcgttggaaaaaccggcaagaagcctggagaaaagcggaagctatgtacgccgcttggcaaacccagcaaaatcgtccgggcttgcttatcgctatacctgaaattgccgaatctactggattcttttctatatggatgagtgtttttaaagatgagactaacctacgggatgctatacgcaggaagtttccaaatacgtttgagcaaagtgactcaaacggaaagagggtaaaacggctccacgcacttatttga

SEQ ID NO: 88368 - DNA, 1227 bp, Escherichia vulneris NBRC 102420
atgctctgtagcatctctaaaataaatactccaattccgttctctaggaaaaaggttgacatccaattagatggaagaagcttaattattaccggaggaaatggttgcggaaaaactagttttataacagccatttataattacttaaaaaaagggatagatgatccaagaaacaatgatgttcagtatttaatgggtcaaattaaccatatacaaaaccaaataaaaaatatcggtagagatggtggccattataattactaccaagatgagttaagtaaacacaaaaatcgaatagaagaaattaataattttaacatcgaaacaaactctattgataacaaagatattagatctttacttagatttcatagtgcaacaagacaatcagcgatctcatccccaattcaaacaccaaagcactccatacttgttgaagaaaataaacattttgccaatgataaagacggcagccaattttttgaaagttatttattaagtctgaaaaaaaatcaaagttatgcaatagcttttgataaaaatgtaaatgaggcgaatcgcataaacaattggtttgaaaaaatacagtcagatttgcgttcactgtttgaagatgaaaacttagttcttgatttcgacacaaaggatgagaagttttatttacaccaagacggtaaggacaagtatactttccaaacgttatcggctggatattcatctatactgagtatttatacagatttaataatgcgagttgaaatgtggggcgtttcaccagataatatacaagggattatatttattgatgaaattgatgctcatcttcacgtatcgttacaaaagcaaatactgcgattttttataaaatccttccctaaagtccaattcattgtaactactcactcaccctttgtagttacatccgttacagactcggttatttatgaccttacagccaatgagcaaattatagatgtttcttcatactcatatggagtagttatggaagaaatatttggcgtactaccggattcacatgcattaacggataaacttatacatattgagaagttatctcaaaacataactattgataacatttgcgaactagaaaacatcatatcttctttagcaactgaaaaggaacatatgagcgatgacactcaagcttttcttgataccgcacaattaaaacttattaaaaccaaaaaaaacatcagtaagtag

SEQ ID NO: 88369 - DNA, 654 bp, Escherichia vulneris NBRC 102420
atgttcaatgtaattagaaaaatgcccgctcctaattcattgctagctcaaaaaaaatatgatagcgatgatgttcattcagcgctacaggaatgttttcatgagaaatgttatttatgtgaaactaaaaaacctttagatataaatattgaacattttgacccacacatgggtaatgtaaataaaaaattttcatggcacaatttataccttgtatgctcgagatgtaataacattaaattaactaaatatactaacctgcttgattgttgctcaataagcgtatgggatagggtcaaattaactcccggcttttctccaaaatcgaaagaattcattatcactccacagtattttgataataagactcttgaaaccgcacaactgctaaacgatatttacaacaacgataatacgatcaacaaacgactcacagcacgttctcttcgggcaaaggtggtcgaaacgacacacaaactaacgcaatatatgattatctactatgatgatgattcgacagatgaagaaaaagagaatgcatttaataaaatcaaaattatgataaagaaatcttatccttactctgccttttgtcgctggataataaaagatgatgaagaacttgataaattattgacaccattgatggactga

SEQ ID NO: 88370 - DNA, 1545 bp, Acinetobacter baumannii; identical to SEQ ID NO: 87768

SEQ ID NO: 88371 - DNA, 642 bp, Acinetobacter baumannii; identical to SEQ ID NO: 87761

SEQ ID NO: 88372 - DNA, 2304 bp, Comamonas testosteroni
atgcaacgtttcgatcgcacgacagaaccgccaccgatcgctctgcagggcgatgcagcttctcaggcacgtcgggttctgagtgatttcatgcgctatggcgatgagaggctcagccagaccaatgttccgagatcagagctacccttagaagatgccagcatccgtgaagcgctcaacagactgtttcgcggtcgatgcgccttctgtgagtcacgggacaaaatttctccctatcgatttagaccagcgacagaagcggtcccatccagtacgccaaggcaggcgcatctttactatgcctggctcgagcatgcctgggagaacatgtacgccatctgctcgtcatgtaggcccgcagaatcaaactactttccagtgagcgggccacgagtgagactacccactccggaggagcttgaccgctacgctgaagaaaacttgggcctctggcgcgcgtatccaatccgagaaaaagctgttttcctcgatccctgtgcagaaggcgatttctccaagcacttgtggccgcagaccaatggcagcttaatcgggatatcgaccaggggcgagaccaccattgagaacttcaacctcaacgcccccgagagggtcgtcggccggcgcgcgaggtatgtagagtactttgcacgtttgagtgagtgtctcaccgactctgaatccatagcgcatgcgcctggcatgttcgagtttcccgagtttgaatttgggggctcgtggtacctgctgcttcgccgtcttgccttgttgatgggccctgaattcggcggtaggccgatcgtctcgcaggcgcgaatccaacgcttctacatggccatgctgggcaagccggacacggcaaatcggctaaggcaaggttgggggcgccttgtccatgaagatcacaactacaaggctgcaccggcgattaccaaacgaccgagcaaggcaagggtcacgagtataggcctgaggaatttcaaggcgattgaagatctgtcgatcgaacttcccagtccatcacaaggtaatgagtccttcgacgtcatgcatccagtgccttcgttgcttattattggcgaaaactctgcgggaaagagttccatactcgaagccattgcgcttgcgatttcggatgaagcagctcgcaaaaagttggcattaaaaccaggcaactttgtactcaaccccacgtatatgggggcggtaaatgtcgctgcagtagagcgggctgaagttcaagttggtctttccaatggtgcatcacggagactgacgatagatcttgggggcatgaaggatcatggcgaccctggctcggaactcatccctgtctttgcctacggggcgtttcgacagtaccaacacaagcagcgtcctcgatcacccgacaaatacattcgcaatcttttcgacggaagtgtgctatccaatcctgaaaaatggttactcagcctccagccgtcggcctatgccatggtcatgagggtgttgcgtgagattctgtcgatcgagggtgagtacgaggttgttcagcgagacctggaagaaaagcgttgctacgtgatcaccgccgccgctggcattcacggcgagccgaggtttagtcgcacgccgcttggtgcagtctcctcaggattcaggtcggttctggcaatggcttgcgatgtcatgcaaggcttgatggaccccaatgtctatgtcgggttcgaatctctttcgacagcgcgaggagtcatcctgatcgacgaagtggaggcgcatctccatccacgctggaagatgcagatcatgcgtggccttcgccgggctcttcctcagatgacgtttatagcaaccacacatgacccgttgtgccttcggggcatggaggatggtgaggttgtggtactccaacgggtcttggcccaggacagtcactcgactacggacctcccggtctttgttgaacggctggtgaaccttccgcatgtatctgaactgcgaatagagcagttgctgacgtctgatttttttcagctccactccacggacgctccagagatggacgttcagcttgcccagatcggtgacttgctggcaaaagaccctcgtgatctgagtccgaccgaaggctcgacggtggataagtttcgtcgtgacatcgcggcagcactgccgattggggcgtcggaagcccatcggctggtgcaagaggcggttgccgaatacttgatggagcgccgtgaggtatcggagcgtcgaacaaaagagctcaggcaaaccgccaaatcacgcatcgttgaggcgctgagaggaatctga

SEQ ID NO: 88373 - DNA, 348 bp, Comamonas testosteroni
atggtgctgccggggaaggcagtcggcgttgagagtgagcgtggatcggtgtccatcttcatctacggtctcaaccggcttggcttggtgcaggagcgaacacgactactgcgtaggttggagtttcttggagacctggtcattgaactggggactgtcatccaagagatagaagtgcctgctgtcgccctggccctccagggcgttggggttgaggatgttccgaagcgtttgcgcctgttacaggataagactttgagggaaatgcgtgagatggcgagtccggaggctccttattcggccatggtccgggcttggcttcgagcgttcaagaatcggctgagctga

SEQ ID NO: 88374 - DNA, 1134 bp, Vibrio coralliilyticus
atgagtaataactttaatcttaaaaatacaaattctaatatcaaaataattattggagaaaacggaactggtaaaagtgctcttttgaatgagctttctttagactacctaaatgacaataaaactgtaatagcgatagcaacctctatacatgataaattcacttcgaggcgaaggaagttccacttttatggaggtcgtcaaggccgaagcatggttgaacgagcaatcaaaaaatcattgttaggcgattccaatagtgatgttgatagggttaaatatttaataagcgctttggaatacgcaaaatattcgccaagaataggaatcaaggtcgaagggtttgagccagataatatagaatcgttatatcttgcagcgaaagaagatgaacggatttatgatgttttcagtttaataaaaaaatatcacgaaccattttctagagaatcagttgttgctataagtctatgggcagtaactaaagaaaataataatgtatcgggatctgctctgtccgcattcatacgatacgagaaaattttaaaaaaatataaaattattaaaagatttagaacttacctgtatagggaagattccgaaatagcattagaaaatgctagctcaggtgagttaatgatcatctcaatgttggttcatatttcttcatatattgataaagacactgtaatcttaattgacgagcctgaaaatagtttacacccgagatggcagcgtaaatatatagatatgattctggatgttttttacttatttcaaccaaagatctatgtggcctcacattcacctcaaatcattccaatagataacgatttgtataaaatatttgccccaaaaaatggagttgttgtagaggtagatgaaaaaacaagcaacaatgaagagttgctttcagaggtcttcggagtgattactcctgaaaataggtttttatctaacaaaatggtagaaacaataaataattttgacgctaagaatattgaatataacgatgcgttacaaatcatcgaaggctacaaaaacaaagtttacgaccctcggcaggttactttcttagaaggcgttaatgagataattgaaaagataaataattcaaggacttccgatgcctaa

SEQ ID NO: 88375 - DNA, 615 bp, Vibrio coralliilyticus
atgcctaatagaccatcatttactgacctagagaaaagatctatgcaggaagcatctcgcattggtcacactgggtgggataaaaacccatcattaacttctttaaaagataaaattaaaaattttggattaataaaaacagaggatagatgctgttattgtggtaggaatatatatggagagtttcgaatggttatagacatcgaacatatcctaccaaagtcaatttttccaaaacagatgtttaaaggtaaaaatctttccgtctcatgcaagcgctgtaatatgaatatcaaaaagtcaaaagttgactttttagaaggaataaatacagctcatactggaacattgctgcgctcaaagtactataaaataattcaccccaacttggatttttatgactctcatttactgctgatagcaggacaagttggtcgtaaagttatgttgaagtattcggttgtaaattgcagctctaaaggtgcgtttacttacgattattttaaattggaccgtctggaaaaaaacagttttgatatggcacagggcaaccagcctagggtagaaatagataaccccgaattgcaagaagcttttgatgccatagccccataa

SEQ ID NO: 88376 - DNA, 1545 bp, Neisseria mucosa
atgcaagtaaaatcaataactctacataatattggacaattcaaagaattaaccatttcactcacgcctttaactgacaaagcacctaaggttactgtgtttattgggaataatggttcaggaaaaacaacaattctgaaatcgttggttacggcattgagttggctgcctgcacgtattcgtagcgaacgtggacgcggtttggatattcccgaaaaagtaattatgaatgggcactcttcaggaatggtggtactgaatattgaaaatactgaacaatcatttacatggcagattagcaaagctcaaaaaggcagaaaaaatcagttttctactgatttaaaagccattaatcaattggcggatattcatcgcactcatttaaccgaaaatgaacaaactgatttgccgatattggctttttatcctgttgaacgtagtgtattagatattccattaaaaattagagaaaaacattcttttgcacaacttaatggttatgataatgcgttggaaattggcgttgattttagacgattttttgagtggtttcgcgaaagagaagatattgagaatgaagaaaatgcatttttagacatagaacaaataagcaatgaaatagatgaaatgaattcatacatagacaactctcttgatactttcgataagatggtttctttacaaaaagatattgaagaaaaagaaagagagcttattaaagctaaaaataataatgaattagagaaaatagctaatttttctaagcaattaattgaattaacaaataaatttattaaagctcaatctgatactgattcattcttgacaaaagctgagtcattgagaaaaaaagatactttgagaaaaaaaataaattatttagatatccaattaaaatcagttaaagatgcagtacaaaattttaccaattttaaaaatattagaatccgaagaaaacctaaattacgcatgatcgtagaaaaagataatctagaatttgaagtttcccaactctcacaaggcgaaaaatccctaatggcattggtaggtgacattgctcgccgtttggcaatgcttaacccaagtttggagaatcctttgaatggacaaggtattgtgattattgacgaagccgatttacacctacatccacaatggcaacgccaactgattgaacgattaaccaaaacctttccaaattgccaatttgtattaagcacgcattcgccgcttgtgattagcgatagcaaagatattattgtttattcattagaaaatggcgaaatacgacaagtatcatcacaatatgggcaagatgcaaacacggttttattgaatgtaatggaaacagctattcgcaatgaagaagttacccagaagttgaatcatttattggatttaattcaagataatcaattagatgaagcaaaaatgaagttaactgcattacgcaaagacctgcctgaaaataatttagaattagccaaagctcaacttttactcaaaaaacaggaaatccgtcatgaaaaaaattcaaaaagctga

SEQ ID NO: 88377 - DNA, 621 bp, Neisseria mucosa
atgaaaaaaattcaaaaagctgatgagcctgctagttttaccaaatacaaacaacacaatcctactcatcaatacaaagatttaaatgatgagattatccgccaagatattcggaaaaaatgcacagaagaacaatattatttatgtgcttattgctgcaaagaaatttcaggaacaaagatggacaccatgaatgagcatattcagccacgccatcattaccccaatttgtctatggatttcaataatattgtagcaagttgcaatcaaaaagggcattgtgataattcaaaaggttcgaaaattctttcacttacgcctttgatggatgaatgtgaaactgaatttgaatttagaataaatggtactgtaattggtaaaacagaaagagcaaaagaagcaattgatattttgaaattaaatcatgaaaaattatgcgaatcaagaaagcaagctattaattctctgcttataactcaaggactgggaaatccaattgaggtggaggatgatgagttattacaatccgtttgtgatgatattatgcaacctgaaaacggaaaacttattgcttttactcctgccattgtcaatgcaattaaaaattggactaacttataa

SEQ ID NO: 88378 - DNA, 1617 bp, Colwellia psychrerythraea
atgaagttaaaggaactaaccttacccaactataaaggatttgttaattttacaacaacctttgaccaaggctctgctattacgacgattattggtcaaaatggcgttggtaaatcgaatttaatagaagttattgttgcaatctttaggtcactagatcttggtgaacagacagactttagttatgtcctgctctatgagtgcagaggtcatgacgttcaagttaggcatgatgtaaaaaataagagtcagaacttagtcaatattaatggtgtcaaaaaaagttttccgtttttaaagagtaatgcaaatgagtatttaccattaaatgtcttcacttactactcaggtactaattggcgtgttgaagagctatttgtaaaacaccaaactcaattttataagcgactaactgaaggtgatgattcattattacgaaggtttttttattgccgagatgtacatagcttttttgtattgctcgcatttttggtcgatgatgatccagcatgtaaagcattacttaaaaagttagacataaagggcattgattcagttctattttgcttaaaaaagccttattggtttaaaaataaacccagtgagataatgcaagctgaaggcgatgctagattttggtactcaagaggtatagttaaagattttttaagtaatctttggaagcattcaattgcaccaattgataataaagaaaggaagaccattgactttagggggcgttctgaaaatcaagaacgtctatatatgtttttatctgatgaaactgctctgcgaaatttagctgaagaatattcagatacaacgtcattttttaagaatattgaaagtacctatatcgcagatatattagaaaatgttgaagttactgttgagcttgaaaatggtcaagaattaacattcgatcaactttcggaaggcgaacgccaattacttactgttttagggctaatgaagttcactcgtgatgatgaatctttatttttattagatgagcctgatacccatttaaaccctagatggaaattagattactttgctcaaattgaaaaaatattgaatcataaaattgaggggactaataaaacagcttgggactcaagccaagtcatattaactacccacgatcccttaatgctcacatctctttatgctagtcagattcgtgtattaacggaaagtagcattgatggtaaaaaatctgacgaaccggatgaagatcctattcatatgggagttgaagcaataattcaatctgggttatatggtattagaacgagtttagataaagagcttcaattaaagattgatttaagaaatcgattattgtctatgcaaaaagaagactcagcaccatctgaagagttaatcagcattaataatgagcttgatgcgattggtttgtcgcaagttcatccaaatccatatttttcaaactttgctaaagccttatctcgaaaccctttatttagaaagccagagtttacagccgatgaatatgaagagatccaacgcttgtctgaagaaatgctgaacgagattttagagtgcgagacggttgatttagataaacaaaactctgatggaaaaataacatga

SEQ ID NO: 88379 - DNA, 834 bp, Colwellia psychrerythraea
atgataaaaatagtaatccccagagatttgccagacgaaattattgtttggaaggcaagagctgaagaaattaccgcagagatcattgaggcggtaactttagaagacaaaaaaagactaattacacgatacaaaaatcattggcgtaatgaggatctcgtaaactggttatcaagcctttccgatgataagtgctggtatacagaagcaaagtttggaggggataatcaagaaattgaacatttccgtccaaaaggccaagtaaaagacaaagatggtaatgttcatgacgatcatgacggctataactggttagcatttgatctcgataattatcgattatgtaaaggccgaccaaatagaaggaagagtacattttttccgataattgatgagcgtaaccgtgcaattagtgaagaatatgattggcgtgatgaaactccactatttttagaccctatagaagatgaagacccgttatttataacttttgatgaaaatggtatacctgcgcctgaagatgagcttgaagaccaagatcaacgtcgagtagagtttactatagataagtattttttggatgatactgtattgaatcgtcgtcgggcattgacatggagcacatgtcgggaactttattatagttatcaacataaaatgcatgaagctaaaaatgccccaaatgaccgagttagattaaggacggaggcaaaaaaggatttagaaacacttaagtcattattgatgagtgataaagagttttcaaaagttgctcgctgctctattgaaaaaataggtgacagatttgcaagaaatctagttagtagcatataa

SEQ ID NO: 88380 - DNA, 1422 bp, Colwellia psychrerythraea
ttgattattaaatcggtacttttaaatagaaaacgctataacctggttaatgataatgttgatattgatagcaatgttttttctgccattataggcataaacggggctggaaaaagtaggctcttgcatcgtattatcgatagcactattaaggtcaataataattttgagcgcaaggaaatacccaattattttacaaatcatattgaagttattaatgactcaaaacagattaatatatattcgagagttaattctaagttttcagtcttaggagaccaaaataaaaattattttcgacacaaattaaactctaaattaatagccgcaacaacaagcccattcgataaatttcctgttgaaaataaaatcacttcgacatacaagcatcacgatgaggatctgtaccattatattggattacggatttcagaaaactcatataataaatcaaattttatcaatttacttgttcgttcatttttaaagcaaggtgtcactgaaatacagaatagagttttgaatcttttaaagtaccaaaattattacgatattaaattcaaaactaaatttacatcatcagagctaatagaattagaaaattcgaactcttcttttagcatcataaacaaatctccaaacgttctcgacgtattttacaagttgttagagagaagatatccaacattgtttaaaaaagttcagcataaatcaaaactcttagatgatattttacattcggttttatgttgtagtagagagttggagtatggaattagttctattgataacttgccccaagataaaagttttatgctaacttttctacttgatttaggtattattcaaataaagaatgtttgcttaatgaataatggtggggagccggtaaatctatcagaagctagctctggtgaacaatgtgtccttttgactattttaaatatttctggagtcataaaagacaatagtgttatttgtatcgacgaaccagaaataagtctacaccctcattggcaaaaagagtttatgccaatgctcatgttttgttttaaggactttaagcattgtcacttcatagttgcaacccattcacctttaatcgtatctacaatgaaaggtccaaactgttttattttgaatatggaagtcacaaagccagtcttagcggagcagtatgttcaaaaatctgtagattatcagttagcagaactttttaattcacctggttttaacaacgagtaccttaaccgtgttgtcgtatctttactatcaagtctgagcaggaatggaaagctagataaagagcagcgcaatcaatctaaaatgctattgaagttaaataactcacttgatgatggcgataccgttaaagagttaattcaagtgttgaaggctgctttggagaagttaaagcagtga

SEQ ID NO: 88381 - DNA, 642 bp, Colwellia psychrerythraea
gtgatagatagagccgtagaatttaccccacaagaactaactcagattcgaaataaattgcaagcacctaacttcagtaacaatagttggagtgacgaggatatagctaatataaagtcaaagataaaagaacattatttgactgagcaaaatacgacttgtccatattgcaaaaggaatctacaaacgcgacatggtcgttcttgggatattgagcatataattccaagatcaaccgtcgagaattttatgtttgaacctctcaacctttgtatggcttgcgttgattgtaatggcgctaaatcagataaaaaaattacttctagcacagcaagagtaaattacccaagccgcagtggacaatttcttattatacatccgcactttgatgtatatgaagattatataatggttattcgagaggggttctattatgtagctctagaagcgaaaggagcaaaaacgatggatatatgtaacttgaaccgtttttatgagtttgctgggtatggtggtgatgtagataatgatgatgagatagctatattgtccaatcagctttcaaatattgataatgttcaatctaagcagcgaattttactcaaaatagcagagctttctataaaatccgcagttgggtga

SEQ ID NO: 88382 - DNA, 1845 bp, Vibrio navarrensis
atgcaacttcgatatttagccattccgcagtttcgtaacttgcgcaatctagaagtgagctttgccagcgagcttgagcccgtttctggcacactagggaatacgccggcaaaacggattcgcagccatgcgctgattggccagaatggcaccggaaaatccaatttaattgaagcgctgattaccctatttcgcgatgtcgatctcgaccgcgaagcggcatttgactacacattggaatacgaaattcgcggccacatcgtgcgtattcaggccgatactgccaaacaaaaacgcccttacgtttgggtagacggtgaccgtgtaagtcaagagtatctgattaaaaatgacccagcggacaaagtcccgcaagatgagcgtcgcggcccacggttattaccaacacacatatttgcctattactcaggccgcaatgagcgcatcgaacagttatttcaggaacaccaacgccgatttaataaacgtcaggaaatcaccaccgacgaagttttatctgaagacctgctggaaaacttcgccgcctccgatgctgatattcgggcgataaaagaggccaaacgccgccgcgaggccaaattaaagcaagcaggcgacgatcgtctgcgccgcctgttttattgccggggcggccatagccagttggtgttactcgcctgtttattgtctgatgaccctgtgttcaaaaaggtactgaataatcttcatatcgaatcgttggaatcagcgctatttgtgctcaaagaacctcatcgcctgcgagaaaaacgccggggcggcaagttcgatgaaatagaaatcaacgaaggcgacccgcgcttttggtatgcacgtggcaacgtagtgagcgagtttctcgacaaactctggcaagtcgcctgggcgcctatcgaacaggaagccagcaagcaaattgactttcgtggccgcacagaaaaacaaaagcagctgtatttgtatgtacccaacaaagaaaagctgaaagagttaggcgaactggtcggcggccccgacagcttcttccgctatgccgaaggtgcttacattggtgatttgattgacgaagtgcgcatcagggtaaaaaaacgcgatgagtatggcggtaaagtgagttttacccagctttccgaaggcgagctgcaaatgctcactgtattgggcttaatgcgcatcacccgcgaagatcattgtttgtttttgttagatgagcccgatacgcatttaaaccccatctggaaactgcgctatttcgacgatattgaaggcgtgttgagttccgaaaaagattcactggcacaaggcgaatcgcaaattctgattaccacccatgacccgatgatggtgggctcgctcagaaaagagcaagtccacattattcgtaaaagcgaaggtaacactctagttgaacagccagacgagcacccgcaaggcatgggtgtatctggcttgctgaaaagtgaaatgtttggattaccatccacgctcgaccgccacaccttaaacacactgcaacgacgcaatgacttgctcgccaaacgcaagtatgaggggttaagccacgatgagcagcaagaattggattgcttggtggttcgcctcgacgacttgggtttttctcgtgagtaccgagacccaatgtatcaactctttatcgaacagatgtacaaagtgcgcagcaaaccgcttgatgaattactcagcgagcaagaactccaagagcaaaatgccttggctgaaaaaataatggaacaattggtaaaagcgcagcgtaaagaggatttgtcatcgcttgcgcaagagctggccgagaagttaaaggagtaa

SEQ ID NO: 88383 - DNA, 828 bp, Vibrio navarrensis
atgcgcaaagtcatcattacaggcacaccaccagcggactgggttgctgaggctgatgccattaccgcgcagctgcttgccgctgcggatgatatcgctcgtcaagcaatcgtagatgagaacgaaaaacactggcgtgatcaaaggattcgcggttggctaatgagtcagttcgccaataagtgctggtatacagaagcggaagaatctgtctcaccgattcacgtagatcattttcgtccaaaaggccgggtaaaaaatcttgatggcagctacgaagagggttattggtggctgactttcaattggaagaactacgtcatagctggccacttaataaatacgaaaaagagcgactttttccctttaatggagggagagcgccgtgccgcagtcaacagctcggaagttcaattaaaactcgaaggggcagtgttgatcgacccgttgacagatcagacgcgtttgatttcttacgaacgtgatgatgatggttgtattgccgtacttgctggggatattgatgacctagagaaattcaaagcagagaaaactattgaaatcttgggattaaaccgcattgaccgcttaaaccaaaaacgcggcaaaaaatgggatgattgtttaaaggacatacaagactaccgaggagcaagagcacatggtgcacacgctctagtttggcttgtgaaagaaacagcaattgcccgtttgaaagagagaataaagtacgatgctgagttttcttcagttgcagaagcttgcattcgcaagcaagctccagaagctgttattgccgctgtgtttgagcggcgaagtaatatgtaa

SEQ ID NO: 88384 - DNA, 1353 bp, Vibrio vulnificus
atgatcacgcgtataacgttgaagaattttaaactgttctctgatgaacaatttgaatttaaccccgaatttaatctaatagttggcgtaaatggtagcggtaaaagtactctcctcaaagggttagccatttcacttgctggctgggctcatgcatacataaaggataggaaaaatcttcgaccaattgaagataatgagattcgagaaatcgaacaagatggacgctttgacaaaacaaagaaaacatcaattagtgcacatggtatttttcccatcataagccgacttggatacaccgttaatgggatggttgattggactcgttaccgagccgaaggggaggaacaaacattttttactggtggaattcgatacgagagtcgtgatggtggatcttattcagaaaaggaatatccccttaacttatcgaccttaggcagtgatgttatgcgtcacatagagcaaggaaaacagtttgatttacctgtaattgcattttatgaatgtgacagattgtggatgtctgaaggtgatatagacgtaaaaaatacagcaatgaaacaatactctaggttcgagccatatgttgattgctttcatacgggagtaaatgataaagctcttgtagagtggttacttaaactagagttagcagctcttcaaaagaaaacatcaagcccgctaaagtctgcaattgaaatggcagcgaaaggggctttagaaaattgtattgggtttggttttgattttgaagaatctagagtgatggtacgttttgaagatggaacatcaacaccatttgagcatctaagtgacggacaaagaactatattaggcttattctgcgatatagctaggagagcagcaattcttaatccacatttaggagaaagcatttgtcatgaaactaaaggtgttattttaattgatgaactagatctacacctacaccctaaatggcaaagagtaattattgaagctcttagaactacatttcctagcattcaatttatatgtactacgcactctccatttttgattcagtctttacgaagtggcaatgaaataataaagatggacggagagcctctgcttgaatttaaaaataaaagtatagaagacatctccattaatatgggagttgagcacccaacaacttcaagaaaatatagagatatgaaagaggctgcgaagggtttcatgcaggatttgagcgaagttcaaggtacaccaaaagataaacaagaagagtttaaaaaacgcttggcaagtattacgggactttatgcagaaaacccagcttatcaagcatttctggagctacagtatctttctaagtttaggtcttaa

SEQ ID NO: 88385 - DNA, 777 bp, Vibrio vulnificus
atgagaccgtttaaaaaaggatcttctcctgttagcggtgattattcagattactctgatgcgaaaacagatttaatttctcgctttagctcaggaatgataaatggcagtcataaagctgcttactgtagctattgtgaacgagtaatcactcaaagtttagctgtggagcatatacagcctaaaaaaggtaaatataatcatccgacgttaattggaaggtgggataattttttactagcttgtgttaattgtaactcagcgaaaggtagtaaaggggtattctttgattatcttcttttccccgatagagacaacactttcaaagcatttatttatgagccagatggtaagatatacgtaaataaaaataacaatgtggttatgcaaagcctagcaataaataccttaaggctgactggattagataaaacatcaagagaaactttcgatgaaaatggtaaactaattgctcaagatagaattaaccagagaatggaggcttggggaacagctgaggttcaattaaacatatatctacaggacaaacacaatgtacatatacgagaaatgattgcaatgcagatggttacaactggatattttagtgtttggatgactgttttctctgaacatgacgacatgaaaaaaatctttgttgattcaatttctggaactcgcgctagtggttgttttgaccaaaagactcattcatgcgtccaccctcatgataatcctgatagactgcctacagggcgattttcaatgtacaaatag

SEQ ID NO: 88386 - DNA, 1752 bp, Burkholderia cenocepacia
atgcgcctagacaagctcactatcggaagcgtgaaggacagccccacacacaggttcaagaacctgaagaacgtcaccatcgacttcgatcaaaaccattgggtcacggttgtcatcgggtggaacggcaccggcaagtccaacgtgttagaggcgttggccatcatcttccgcgatttgattgcaaagaagcgcacccccgccttcgctttccagctggcctatcgcataggcgcgggcgagaagctgcgccacatctgcatcgacgccgatccggaccgtaagaacgctccatttctgatccgagtcgctggtgcaacgcagatcgagcagagcgatacagctcacggcctgctggactttggcgaggagccagacacgacactgcagggtgagccgattaagctcacggccttcttgaactcggacgccgagtacctgccacgctacgtgttctgctactactcgggcgagagcccgcgcatgcacgaggtattctggccctatctagaatcctacgacaccaagcttcgaaacggggaagacccaggcctgaagcgactgttttatgccttgccggtacacagccagtttgtattactggctttcatgatcaaccagtccgttgaagttcgagagctcctcgagaacgatatgggtattgatcctgacgaaggcattgaatctattctctttgttttgaaacagcccggctggagcaagcgacgcgggaataaaatggttgatgtcgcaggtgatgacaggttttggggagccaagggcgtcgttcagatattcttggaccgtctccaagacattgcgcttgcgccaattcggatcaagcgagacaaacaaattacgctctggaacaaggaatcaacagaatttcagtatctcttcgtcaaggacattgatgctcttcggcgtctcgtcggcgaacagcttccagcacacttcttccgagatctcgaaagcacctacgtttcggagctcatcgaagaagtgcgcattcgcgtgcgtctgaagaagaacgatggcagcgtgacctttcgcgagctgagcgaaggcgagcaacagttactcactgttttgggcctactgcgctttactgcagaggaggagagccttttcctattggatgagccagacacgcatttgaatccgcgctggagcgtagattacatctcttatctcaagaagttcattgccagcggtgcgaagcagcaagaaaccagtcacgttctactgacgactcacaaccctttggcgatcgccgagctggaccgcgagcaggtgcagatcctgcgtatgcacgagcaggaggggcaccgtcaaatcgtggcttgctaccctgaaatggcgccacgcggtatgggctacgcagcaatcgtgacgagcgacatgtttggcatcgcgtcgtcgcttgattttccgacccaagagcttctggaatcgcagcgggcattcgctgcgaaggacaagctcacgccggacgagcaacatgagttggatcgcatcaatgcgcagctcgacaggcttggttttcgcttctttcaccctgacgatgagtattcgcgatatctgcgcttgcgaaatgagttgctcgtgcagcagttcaagacggaacaacctaaggagcttgccaagaacgtggtgcaaatgtcccggtccgaacgagaaaatttggctaaacagctgattacggaattgctggctgacgaagccaatccgccgcagggggacgcaccatga

SEQ ID NO: 88387 - DNA, 813 bp, Burkholderia cenocepacia
atgaggtacgtggatcgagcaaaactggtgaagccagcgggatggctggcacgtgcacaagcggcttcgcaagccgtggcgaacggcgcagatctgaacgatcacagcgctgtttggcgcgagctcaaaagcggacttgccaatctgttgcacgacaagtgctggtattgcgaaacagttatagaccgatccgacaacgctgtcgatcacttcagacccaagggtaaggtcagcgacgctagaaaaccccatacgggctatcgttggctggcctttgatgaaagcaactttcgttatgcgtgcacctactgcaatagccgacggaaggaccttgagaatgggacggctggtggtaaggcggatcgcttccccttgattaatgaagcgcagcgggtctacgacgtcggtgcggtcgatgcagagcagccgctgctgctagatccttgcgagatatccgactggcgtctgctgggatgccatcaagaaaatgggcagccgtgtacgacaagccccgatgctattgccaagcagcgtgctgaagcgtccatcgagatttaccaccttaattacgagcccacctgcaaacgacgacacgcggcagcagtccagttaatggcggacgtcgacgaaggtaagcgaatgtttgaattggctacccgtgatcccgcccgagcgccggacttcaagtctgttgcagcgcggctgcgccgagcgatcgaccgtgagtcaccctacagcggcgacatgcactttctcttacgtgggcagcgcagtgacgcacacccatggatacaagacctgttagaggcctga

SEQ ID NO: 88388 - DNA, 1320 bp, Burkholderia cenocepacia
atgaaccctatatttaagtctctaaatgtggccggctggcgtcaatttcgaaatgtggaaattgattttcatccgagattgacggtgattactggggcaaatggtgcggggaaaagtagtctgcttggattgctgaatacccatttcggttggcaacgcgcttatttgggtactcctcgtagaaatcgactcaatggtgtaacaacgtttagcgcggggttgcggcgtcgccggaacttgaaagggactgggcagcagccgttgcagccgaatcatgaagtcgggagcatcacatactcggatggcaatcgggcatcgatacaggtggcgaacggtgctcaacaatatagcgcttctattgttggtcagttgccggttgtcggcacattcatgtcttcacatcgtccatttcctatttttcagcaggtcggcagtatcccaacgaatgttattcggccggatctcgcatacgccaatcattttaatgaaactgttcagcgtctgaatgggcagggtggcgggctttctcccatcttccggatgaaagaagcgctcctttctatggttttgttgggtgttaagacggatttttctgcgggggacaaagatgctcttgaaaccttctcaggttttgtcgaggtattgcgtattatgcttcctccgactcttggttttaaagatctatcggttaggccgcctgacattgtgcttgaaacggcttcaggtgattttctgctggatgctgcttcgggcggtgtgatttctatcattgagttggcgtggcagttgtatatgtactcgctcagtagtgttgcgaaaaatgctgaaagatactctgtcgtgttagatgagcccgaaaatcacttgcatccggctatgcagcgttcattgatgagtagtttgttggcggccttcccgaaggcgcaatttgttattgctacccatagtccatttatggtttcgtctgtaaaggattcaaacgtccatgtacttgggtacatgccgatatcagattccgaggactatgccgccgaagatgatggcgacgaagactcgtcactgacgaacttggtttacggtgtgaagcttgatacggtgaaccgcgctggaaatgcatctgagattcttcgcgatgtgcttggggttcctgttacggtgcccgtgtgggtcgaatcacaattacaagaaattgttgctgaatatcggtgtaaagacctaagtgtagaaacgctgggttcccttcgcgaaagactgaatgagatcggctttggcgagctctatcctcaggcattggcggaggtcgtgaagatccatgattaa

SEQ ID NO: 88389 - DNA, 630 bp, Burkholderia cenocepacia
atgattaagctgactaaaggagctaagcctgagattctagccgagcgcgcggatgaatggactaagacgctgattgagaagaaagctagaggcgaagagccttctgatggcgaaaagagccgatacaggcacccgaagatcaaagaagcattgatcctggaaactcatgggaaatgtgcgtattgcgaaagcaagcttcagcacattgcctatggtgatgtggagcacatttctcctaaatcgaatgacgttaggttgacattcgattggaataacttgacgcttgcttgcgatatctgcaatacgaataagggggttgttgatgggattgtggatccctataattccgacccatcgctgcacttcactatatctggtcctttgattttggctaatccagccgacgacgttgctcgtttgactgagatgaaacttgacctaaatcgggccgcattggttgaacggcgcaaggaaaaaatcgtttttttgcgagatcaggttgagatttatttgcgtgcagcaaatccaaatttaaaggcagttctgaaaaccgatttggagcgcacaattgcagattctgaggagttttctgcagttgcgcgtcattgcgttgcggtgtggtgcggttag

SEQ ID NO: 88390 - DNA, 1434 bp, Pseudomonas syringae pv. tomato
gtgttcagactcattaaagtgaaaccgggtacaggtcagcaattcgtagtgccttcacataatccaaaagagcctttcaaaagcgtcatagtcgggggcaacgctactggaaaaaccagattcatggtttcgatcatcgaagctttcagaggtctggccgcaacaaaagctctaagcaatgatatggtgagccggagttataaaaagagaacgtctttcacaccgggcttcagtttctcctattatatggacggtgaaaaagtcgactgcaaatatgacacaaagggcttgcacgttgacgtcgacggggaaccaatcaatcacaaggaaattccgctgccttctagggtaatcgcgattagcgcgagctggaatgacaaatttcctttttcggacacggacgaagacaacttttataaatattgtggcgtcagagagacctcaaatgcatcatggacggctacactgtctcgcagatcaatcgaaaacttgctgaacgtcccactccgccttcatcaagaatccattactgaattatttgaatatttgggagttgacacaaagctaaaaataacttttcgattcaggaatgccgaagaccttctagcccttataggcgatcctcacgaactagtaagctttgtgcagagttattcaaaaaacaattcacgaatgcaagtcgacttttttaaaaaatttagccttcaagacgctttaagagtcgaagctggctggaatcagattagcagaaagaaaaccttcgaactcgatgttaatcttcgccacacaaccgtggactactcagatgcttacttcgccataaatgttttcagacgaatcggcttaattacagatgtcgatttgagagtacagaaaattgacagcactgaagcctatccgttcgccagctcaagctctggggaggcgcagctcctatactgcttttcgagcatcataagacacgctaaagataattgcctcatcatcattgacgaaccggaaatcagcctacatccggcgtggcagattaaatatatcagcctactcaaacgggccctcagctcattccgaggctgtcacgtgctgattgcaacgcactctcactttatcgtttctgatttagcttccgaaagcagttcactgcatattttcaagaaaattgaaagcgttagtgacattagaaacgtcgagtactcgacttacgcatggagcgcagacaatatattgtatgatgttttcgatgtacgaaatgtaggaaatctagcatttgaacgggacctcgaattagctttaacacttatcgctcaaaaaaccacaaacttcacagagcttagagcgcttaagcaaaaattcgagaaggtactttttcaggacagcgaccccctaaaaaaagtcatcgacaccatttcggagtatgtcgatggcaatcactga

SEQ ID NO: 88391 - DNA, 630 bp, Pseudomonas syringae pv. tomato
atggcaatcactgagtggtacttaaacatcgaacagctacccatttttgctaaagccaccttagactacttggagggtctaaagccacacgaagccaaacactgggatcttcagaccaatgcgatgaagatttataaaactgaactcctttcccaactactgagaattcaaaataacaggtgcgcgtactgtgggttagggcttgatagaaacctcattgacagggagcattttgtgcacaaggatcaaaatggaggctggccggaattcatgttcgtggctgaaaaccttattgccgcgtgtgcatactgcaacagagcccttaaggggtgcacaacgacagttgcccaatactctgcaaactatgctgactgcagatttaatcttgtccaccctattctagacgaccctagagcagaaattgcgtttatccctgacatgcacggagacgccattctcgcgaaaagccttactaagaaaggtctcgacacgttgactttctttgagttgatgactcctatcatgacagcaaaaagagccgcatatttgctggaaataaaaagaatggaagaaatggcactcgccgattacaacgagttgagggctatatctcattacaagcctagctaa

SEQ ID NO: 88392 - DNA, 1359 bp, Pseudomonas syringae pv. tomato; identical to SEQ ID NO: 86262

SEQ ID NO: 88393 - DNA, 651 bp, Pseudomonas syringae pv. tomato; identical to SEQ ID NO: 86263

SEQ ID NO: 88394 - DNA, 2349 bp, Pseudomonas syringae pv. tomato
atgcaacgatttgcccgcaatgaaatacccccacctattttccgcgaaaaaaggttcaagttggctcgaaaggagttgcttgaactcttcacgctcgacacacaggaactctcacaaacccgcattacgggagaagagctgagtctggatctgagccaggtcggccccattcatgacgcgctagggcacctgtttcatggcaaatgtgcattttgcgaaagccaggacctgaccgtcccctaccgatttcgagcggcgtcatctgtaacgtctgccatgggaatggcggactcacacctctactacgtctggctcgcgaatgcctgggaaaacatctatcccatctgcatcaaatgtattccgcgccagcctgcgttctttcctgtcgacggcaaacgtgtgccgattccaagcctggagcaaatacgccggtatgccgcagaggatctcgggtcatggcgcacctccggaccacgtgagtcagccgttttgctcgatccatgcattgacaggaattttgagcgacacctttttccctccgttgatggcgatctgctgccactgagtgaaaggggtgatactaccatcgccaatttccgcttggatcgtctcgacttgaataaggcgcgtgccgccagacttcgcgagtatcgcgaggctctattggcgcccgatcgaaaccgggcgaatttacgctacagtaattttcaaaatttatttgacttccaagaacttgaatttggtggcctgtggtacctgcaatgccggctcattgcgcggtacctatcgcaaaaagttggcatggtaatgccgaccggccgctcccatatagcaaggacactgaaaaccctgctctttatgggggactataagctgtcgcatgaacaattaaagagttggattgaagagaccgatttcggccacctaccgcttgagatcccgcccacggactatggcgttctggagcccgcgccggtcatccaaaaggcagtcgtaccgcggatttatccttctttgcactctttgcagttcgaccacttcaaggtcatcgagcacctcaagctgaaacttgatatacccaccgccgaatcgcagttgaacaacgcagcgttgcaaccggcactgttgatattgggtgaaaacgccactggtaaaagctcgattctcgaagcaattgcgctcgcgctgagtccccgtgaaacacgtagggcattgaacctgacgccaggctcactcgtgctctcccctgcacaactcggttcaaatgacacgcccacgcaattctgggcacgcgtgcgactcgggtttgacgaggggcgtgacaaagtgttgagcattgacaatgccgcctgtaaacaattcggaccacgccttgtgccacctgtgtttgcttatggtgcctttcgccagtaccagaaaaaaacaccgccggtttttgaacccgctcacgggatcatcaacctgttcgaaaccgatcgcctcctcgcaaatccggaacaatggttacttgggctcaaaggcgaagatttcaatgacgtagcacgcgcgttgaaaatcatcatgtccgtggaaggcgacatcaaagtcatcgaaccagcccccgacggcaaatcctgcttgatcgtgacagcgcccgccggcgttgtgaccaagacaccgctcaatgatgtgtcctcaggttaccggaccatcctggcaatggtgtgcgacatcatgcaacggttgatggatcggcgcataaaccccgacttcccgggtcttgagcatgcccaagctgtggtattgatcgacgaagtcgaagcgcacctgcacccacgctggaaaattcagattatgcaggtgttgcgccgggcattgcccaagatcacgtttatcgccaccagccatgatcccctgtgcctgcgcggcatgcaggacggagaaatcgtagtggttcatagccggtccagggccggcggggccaatacccagtacgcgacgtgtattgagcaactgcatgatctacccgactccacgcagttaacgattgagcagctgttgacatccgactttttcaatctgatgtccaccgaccagccggcaacggaaaaacaattggccaacgttgccgacgtgttgaataagttaaaaagaaaggagacgttgaccgacgaagatgagcaggtcatgcggtatttcgaaaaggagatcaaggaggctctccccattggcaccagcgaagcccagcgcgtcgttcaggaggctgtcgcccagtttcttcaggaacggcgggaaaagccatccatcgagtggggcgcgatacggacggacgccaagaccaaaatattgaacatcctcaggaactcttga

SEQ ID NO: 88395 - DNA, 1056 bp, Pseudomonas syringae pv. tomato
atgcggccgagaaagacaaccgtcagtgctgcggatcaggaactcctcgacttgaccgcccattatgaaaaaaagtccgccgcgcttgcagctgcactggcggctgatgatccggttgcggcctcagcctctgtggcggaggagttctcagcgaaaaagcctccgttcacgacccaccggaaagactcggtcaaaacccagctgtacgcaatatttcatggcaaatgcgcgtattgcgaaacattctaccctgccgtagcgccagttgacgtggagcattaccgacccaaagggggcgtgagccaggatgctgatcatccagggtattggtggttggcaatggagtgggaaaatctgctgcctagctgcattcattgcaaccggctaaataaacacgcaacgccgaagctttcgacccagctagttgaactgcgcgctgacggcacaggcttcagtgaccaatacaaggtcaccacgggcaagggcaaccactttccaatactggggccacgcgctacgccagcttcaagggattgttcaaccgaatacccgctgttgctcaacccttgcctggatgacccacaagagcatttggccttccatgtcgaccgcaaaaaactcatcgggctggtgttacccaaaccgcacaacggtgcggggctaccggcgcacgtttccaccacggacctgctgccagcgttcgcagacgaaatcgatcaggcgctaagggacaagctcagcctgcgcggcgccgtgtcgatccacacctatggactgaaccgattgggattggtccaggatcgcacgcgtgtgctgcgccaactcgcatttctggaggagtcggtgaaggatctttgcgccatgatccagagcctggaagcacgcataaacgaccccttcgcggttgaaaacatacgcatcatcaagcgcatggaggcattggtagaacgcacagcgcagcacatggcggatatggccaagcctcaagcgccctactcgaccatggttcgcgagtttttacagggctttgaggcgcgcctggttgccattccctag

SEQ ID NO: 88396 - DNA, 2211 bp, Burkholderia thailandensis E254
atgagaaagatacatggaagggacgacttagctccgtccgtattggctgggcccgaggcaaaagatgcccgggcgaagatcgccgaacattatcggcagccagaggagcagagattacagagaaggatacctctcgacaggacattgctttattcagttgaggtcgtacgagcgttagccacactttcgcacgggaaatgtagctactgcgaaacgcctatcgaaggtactaccggaaccgttgatcattttcggcctttgacaggtgcacttggtatcggcatgcacggagctaaggacagccccgactattacggatggttcgcgtacgagtggcgcaacttcttcattgcctgccgagcttgtaattcagcaaagtcaaataaatttccagtatcgggaaggcgcgcacccttgctgtgtgcatggcaggaggcgaatgatgccgaggaagggacgatcctcgatccttgccgagatactccggagaaacatttgcgtatttccgtcgccgggcagatgacgggacatacggtccgtggagagcggactatctcgtgccttgatttaaatcgagagaaactactagagaaccgggcctggaaaattcagagatgccttgatcttctcagaagggcaattgacggcgcaggggatgctgagtatgccttggaagcggagattgccgatgaaaaggcgttttccggagtggcgcgtatttttctggtgcagcttattgacgaagccgctaggcgattaggaatgcctaagtcccggtcaagcaatttggtaaacactgctatacgccttcttaaattgctgccgatgcagctagatatcgctgaattcgcagtcgaagctgaggctgatgtgacatctcgggcggtagcgctgtacgacgatcacgacgttctctatgaagttggggatggcattgcgcgccttgactccgtttcctcgatatcgcacatcgagataagaaattttaaaggcattggccatcttgccttcgatttgacagaccgaacgaaccgtccagatcgggcgcgatgcatgatgcttctgggggagaactcaaccggaaaaagctctgtactgcaggcggtagccctttgtctaatggatgacgacatgcggcgaaggttgaaactggatgccgaggattatctgagtcgagatgtcaccggatggaagttttatggcgatagagattgcttcatacaggttacattcgataatcaaaggacagtgcaactggtaatcgatgctgcgcgaaaacgattcgaaggatcaggcggacctgcgacgatactattggcatttggggctagacgattcttcgatacacgccggaaaagaggtcaggcgacagatcgcgtcaagactctctttgacccattgtgcgcgctaccagatttaataagttggttgaatggaatccgagaacgtgagttctatgctgtggcccgtgcaatgcgaggaatcttcgttttggatgaaaaggacgatcttttcagaagcgatgatggcgaaattcttgtgcgagctcatggtagggcaacgcctattaacaatctgagcgagggttatcgttcactgtttgcgatgacgattagcgcaatgaagcacattctcgaaaattgggataactttgagagcgcaagaggagttgtgttgatagacgaaatcgaaacacatcttcatcctaggtggaaagtgcgagtgatggccgccctgcgcgacgcgtttccattagtacagttcatcgccacaacacatgatccgctctgccttcgaggcatggatgcaggcgaagtagaggttctatatcggaacgaggaatttgaagtggaacgcatggcgaacttgcctgacgtcaaatcgctcaggacagaccaattgcttacgtcggactactttggacttttgagtgcggccgaccccgactatgagcaggcgttggacgagtatgcttcacttaagggcgagcagctcggtgcagacgcgaattcaacgaagctcctcgagctagaggcacagatcgagaaaactctgaaaattggagatactccatttcagcaaatcgtgcatgaagcatccagcagatacgtagaacactataagggtaagccgatggctcgacgcgaacaatttcgcgaggcaagtgtgaaagacgtccttgacgctcttataaaggcgcggggggaatga

SEQ ID NO: 88397 - DNA, 936 bp, Burkholderia thailandensis E254
atgcgatttgtacaccgccctgcagacgaagacgatataccaaagccgctcgctgagcgcggcagcgatggggctcgcgaacgtgaaggagcggccaagtattacgaagttcgtaagaaaaaatgctatccgttcaagacgtataaatcacctgaagtcgttgaggcgctcgagaagctttttcacggaaagtgcgcttattgcgagtcgaaatacacggcggtagggccggtcgatgtggagcatttccgtcccaaaggaggagttgaggaagctccggagcaccaaggatattggtggcttgctagtgattggaagaatcttcttccctcttgccttgattgcaatcgaaggcgccgacaccgaattgctacgctgggaatgacgctggctcaattgactggagcgcgcagggagtcgagaggaaagaaaaattcctttcccatcgctggcgtcagagcttttgcaccggctgacgactggcctggtgaggacccgctgctgatcgatccgaccagtacggaccccgcatctcacatggcatggccggtcgacggtagtctgagcgttgtggtcccggtatcgaatcatggcgttgaggatccgaaaggggcagcgacaatatatacgtttgctcttaatcgccaacggctcgtagaggaacgaacaagggtcttgaacgccatccggatgcaggtgttgagcttgcgcgaacttttggaaatcgcctgcacgattaacgaagaatcgccgcgcagaggtctcatcgacaaggccgtgcgtgatatcgcacaactgaagcaactcggaaatgcgtcgtcagagtactcagcactcgcgcaagctgtcttcgaagtggaactggatgcacttgtcgaggagttccgaaagatattgggcgagatcgagcatcgtgcagaacctgaagaggcgtag

SEQ ID NO: 88398 - DNA, 1623 bp, Vibrio cholerae; identical to SEQ ID NO: 85886

SEQ ID NO: 88399 - DNA, 618 bp, Vibrio cholerae; identical to SEQ ID NO: 85887

SEQ ID NO: 88400 - DNA, 1566 bp, Polaribacter sp. Hel1_85
atggaaaaaagtataatacaaaatggttttaagttagattctttagaagttagagaccatcctattttagggaataatacatttaacttcttagataaagaagatgattctaattcaatatactttactgttttaattgggtctaatggtacaggaaaaagtgaattgttaaaattaattcttcatctattcagaggggtttatcttattgaggggaatagatttcgtgttaactatttttttgctttaaagttctggaatagtggctatttatttgagtttagcaacaatagagacattaagtttgttgacattactaataagaagtcaaaatatccatctcctaacttttatttgaataataaaactattgaaagagaagaatttataaatgcttttccgtctagtattattgcgaactcattaatgctaaccgataaatttatagcacctagaaatggacgagaacaagcagattttcctatctacaaataccttggagttcgtaatagaccacaacaagcaagtactaggtcttatgttcgtaaaacagttgaatttattgtagaacaattaaattcggaagtatttaaagaaggcataactaacctatcaaaatttttaggttttaatggttctgttgaagttcggtatagtacaatttatactaaaaagttttatactggaaatttaaaaaaagaggagttagaagattatttctacaaaatagatgagcaatataaaaactcaacggtaacccctccatttaaattaaactattttaaatctttaacaaaagaagatggagaattagatcggctagtttttttcattaacacactttttaaaacagatagattaataccagtatatagaagcactaaaaaagaactaagttatagggttgataacaaacttgaacatagtttactaaaagaggaatatgaacacctcgataagttacgaaaattaggattggtaaatcctccaagtgttaatttcatacataatgataagcctttaggaatacagcaaacgagttctggagagtttcattttttctccactatggtagggttaatggcgaccgttaagccaggtagtctaattttaattgatgaacctgaaataagtttgcatccgaactggcaaatgaagtatttagcatttattagaaaactctttaatgaaccaaagtataacacttgccatattattattgctactcattcacattttttaatttcagatttacaaggagcgtcttcaaaaataattggactaaaaaaaactaacactaaaattgaaaccttacatatcaacaccaacacatacggttggtcagcagaagaaatacttttagatatttttcaagttcctaccactagaaatcattttgtttctgagcgtattggttcaatactagatgagattgcaaaacccgataaagacactaatttaattaaacaagcagttaaagatttacaagataaaaatattgacaaactatctaatgaagaccctttaaaggaaataatcgataaattaatagaaaaatatggctag

SEQ ID NO: 88401 - DNA, 684 bp, Polaribacter sp. Hel1_85
atggctagtctaagtaaactattagactatactctagtcaataaaacatataacatacttgccgatgagcaactaactattaataataatccaacatatttaaaagaagattgggataaaagtgtttttactacattaaaagggaatatccgcaaacattacgggcgtaggcaaaatagaaagtgtgcgtattgtagattgactataaatccagatgcatacggaaatgcaattgaacatataatgcctagaaaacataaacctcaatggatgtttgttcaacacaatcttacagttgcttgtattggttgtaattcttctaaaggttcagataatacaatgattagtcacgagaataattatggtcataatgcaaatcattgtccaagtaattctaatgaatttaaaatattcaaccctcattttgataaatggtcagaccattttgaaattcaagataaattctttcttgttccaaaaccaaatacgaaaggacctgcaacttacaaattttgtaatatgcaccgataccaaattgtactagactatattgatgttttaaattctcgaaaaaaatctttcaaatcaataactggaagattaagaaaagaaaaaagaaattatgttaaagtagaattagaaaaagcaaaggaatctattcttgattttattgaaaactcttaa

SEQ ID NO: 88402 - DNA, 1599 bp, Polaribacter sp. Hel1_33_49
atgagaatagataaaatctacatagaagggtttaaaaacctcagagatttctcaatagaccttaatgaggaatttatgagtactgtatttcttggtcaaaatgcagcaggtaaatccaacttgttagaagctctagtaataattttcagagacttggatttagaggaagagactgtatttaattatataattgaattccaatgtaaagacaatctattaaaggttgaaggtggtaaaaacacaaaaggaaaatttcaattttataaaggagttaaactgaaagactcaatagcttatgatgtaaagccaatttctaagaccttaataaaaaagaataaatcagattacttaccaaaatatgtgttttcatactattcaggaatcagtaatcgattattggagcattttgacaaacatcaaaaacgattttatgatgaattaataaaaggtgttgatgcaccaccacgaccgctattttatgcacgtcaaattcatagttattttgtgttaatggctttttatgcgttttcagataaaaaggcaagcgaatttctaaaagaatttttaggtattgttggtttagaatcagttttgtttgttttaaaaaaacctgtttgggcaagaagtaaaacggaagcattagatttttggaaagccaaaggtgtagttcgtgaatttctagatgaactttttgaatctgctatggcacctattgttcatgaagatactgttcgagaggattttagaagaagtcataaacaagagcaattgtatttatatctttctaatcaagagaagttagaaaagatcgcaaaaaaatatggcaccaatactgagtttttcaaaagtttagagagcacctatatttccgatttaatacaagaagtaagggttaaggtaaaaaaggttaatgttcatggagatataacttttaaagaactttcagaaggagaacaacaacttttgaccgttttagggttactacgatttacaaaagaagatgagtctttaatcttactagatgagccagatacacatttaaatccattatggaaatggaagtatatgaatttattagaagaatactctggtaaagatgaatctagtcaaattttaatgacgacacatgatccattagttattggcggattaaccaaggagcagataagaatctttcaagctgttaaaaaaatagacaaagaagcaaaagagtatcaacatatagaagcatttgaacctgattttgaccctaaaggattaggtgttgcaggcattttaacaagtgagttctttaatttaccaagtactttggatgaagagactcaaaatgaactgaatgaatatcgttcattagaggtaaaagaaaaacgtggtgatttatctgaaaaagaaaaaacgttattaaccaaatacactaagtactttgaggaattaggtttcaacaaatacactcgcgacccactatacgcaaagtttattgaaagaacagctaatctttcggagttcaaatccataccaaagacaaaagaagcacaacaaaaacaagatgatttaactgtttccattttggaagacttattaaaagaagattcagaatga

SEQ ID NO: 88403 - DNA, 837 bp, Polaribacter sp. Hel1_33_49
atgagaacgatagatataagtaaccttgaaaatttattgccagaaggctggctggaaaacgcaggaacattaagggattcattaattggcaaaacaccagaacaaagaagagcaatttttaaagcaagtcctatctggcaagatttattattggttttaaaagggttgtctaataataaatgttggtattctgaagcccaagaagttatgtctgatatggatgttgaccattttcgtccaaaaaatgaggctagaaacattgatgagaatggcaaatctattaaaagagatggatattggtggttagcttatgattggagaaactatagactgagttcaatttattctaatcgattaagaaaagataaacacacagatcaagagatagcttttggtaaaggttcgtttttcccattaagagaaggttgcaatactgcaacatgcattgatgaattagatgatgaagtcatctacctattagacccaattaatccaaacgatcctgatttgcttttcttttcagatgatggaaaagctattccatctgttgaaaaagaagacgagccttggaactattctagagcgaaagtttctattgatgtttatcatttgaatcatactccgcttaaagatgctcgtttagttgtttggaatctttgtgagagaaaaatcaaccaaattaaaaagataaataggaaagcaattagaactgctggagataatgctagaattgaaatactaaaacaagacttaagagaaatgatttcaaaagaggctgagttttcggcagtggcaatcgcttgtgttcaaaaaaataaaatcagaatggttgcgtaa

SEQ ID NO: 88404 - DNA, 1620 bp, Roseovarius mucosus DSM 17069
atgcgcatcgattggctgtggattggcgaatataaaaacctgaaagacctgacgattgatttcgctcaggggcatctgattaccgtattgattggcaggaacgggactggcaagtcgaatgttctggaggcggcaacagttcttttccgcgaccttatcatgggtgaggatgcgaacgggagcaaaaacaagccgtccttttcttatcgagtttgctatcagatcaaggacaaatgggttcgcattgatgccgatccagcaggcaaagaagcatatcgcgttaaaatcgcgccctacgatcccaatgctgaacctccgcctgctgctatcagctttgaggaagctcctggcgaagcattggctctttccaagttgcgtgatccagatgacggctatctgccgaaatttgtgtttggctattattccggccaaagcgagaggatggaagaggtctttctcaaatatctagaacggtacgacaaagatcttcgggctggaaaaaaccctggcttgaagcgcctattctatgcgcttccagttcatagcaattttgttttgctgtctttcatcgtgaataacgccgagttgacagacaaatttttgcaggaacaacttggccttgaagagggcgggatcgaatccgttctcttcgttcttagacagccttcatggacatccaaggacggcgatccacgcttctggaatgcgcgtggcgtcgtatccgacttcctggctacgctttacgatatatctcttgcgccattgcggatcactcggaaggaaaaggtaagtctatggaactcgcgaactctggaatttctgtatctatttgtgaaagatcttgatgcactgcgcaagctggctggcggaaagagcactgcccagttctttcaagacttggaaagcacctacgtttctgagctgatcgatgaggtgcggatcagggtgaagctgcggaaaaatgacggatcggttactttccgtgagttaagtgaaggcgaacagcagctcctaaccgtgcttgggttgcttcgtttcacagcggaagaggaaagcctgtttctgcttgacgagcccgacacgcacctgaacccaagatggagtgtcgaatatcttcagcatatccgtaattttttgaatgtgaatgggatagaaaagcagagcagtcatgttctcctggccacgcacaatccggttgctgtagctgagcttgagaaggagcaagttcagattctttcccgcgataaggaaacgcaggcgatctcggctgcggagccggatacgcatccgcgtggaatgggctatgcgggtgtaatgaccagtgagatgtttggattaagcgctgcgctggatacgcatactcaagacttactcgagaggaagcgtcgtatcagtgcaatggatgtgcttagcgaagatgacagaaaagcgctgaaggaaatcaatgaggaacttcaaaattacgggtttcgttatgaagtgcgtgatccagaactcaaggaagcgttgcgcaggctggatcaggaggtcaaaccgacaggtgaaagagaggaaatgcccgatgaggccgaaaaagcaagccgcctaattcaggatgccttgaagcaaggggaggactga

SEQ ID NO: 88405 - DNA, 783 bp, Roseovarius mucosus DSM 17069
atgcgctatgtcaatctggatcaattgaagctccctgacggttggcaagcgcgtgcaaatgcggctatcgaaaatgatcccgggaaaattaacgattactccgatgtttggcgcaccctaaagcagccattgatggagctgtcgcacgacaaatgttactattgcgagatcatacaggaacgctctgacggtgcagtagatcattttcgaccgaaaagtaaatatccatggtcggctttcagtccgagcaactatcgttttgcatgtacattctgcaatagtattcggattgataaagaaagcagtaagactggtggaaaaggggataattttcctctcctcgatgatgcgaagcgggcgacatgctgcgaagaggaggtgaatgaaggcccaattcttttggacccttgcaaaccagatgagcctggccttatagactttgacgaaacaggaaagcccattccgacatactcggagcagatgcatgcaggtcgatataaacgcgcaaatgaatcgataagactttaccacttagatcatgctgatctcgttgataaacgaaagacactcgccctttcaataaaacgcaagattgacgcggctgatcggctgttccctcatacagaatctgggaacgtcgacattgatatttcattttcagatcatgtgcggtctctagcgaatagtatttctgagagtgcggagttgtcggcgtttgcacgaaaaattatggctggccatcgagacgttctatgggttgaaaatttgcttcgctcggcatga

SEQ ID NO: 88406 - DNA, 1272 bp, Rhizobium leguminosarum bv. trifolii
ttgtacgcgaagtccctccacatttacgatttcaaatgctttcgaaaggcagagctgcgcctacagtatcccggtcggtcgggcgaaggggtttctgaactcggaaacgtcaatctcgtccttggtgataatgggggtggcaagtcgtcggtacttcgtgcactcgccatcgccgttctggcgccagcccttcttgactctggttttgtgccctatcgtctcgtgcgccgcgtaatgcccggcaacgatcaggttgaaaaggccttcctcaaggtggaaggaatgccggagaagaatgaaatcctacccaatgtgtcgcgacggaaaaagctagagctcatcgcgcggatccaaacaagaggacgtggcaatttggatcggctgcatctcgatagcacgccggactctccaattgccgaggttctctttgacgattactcgccggcttattttgtcgtcggttacggtgcgacgcgccgggtggaaagcggagaattttcaccaagcagtgcgcaacgatcccgtgcgcttagatatcagcggatcgcgggtttgtttgaagatcatgtcgcgttgcgccccatgcaggcgtggctgcctcggttactatcgaaggaccccaagcagcacgagctcgttgtttctcaaatcaacaaggtgctgccttccaacataaggttttccggggcgcgggatgacgaccaggatcaatatatgtttgagtttgagggtgttccaacccccttctctgctctatccgacggatacaaagcattcgttgggtgggtctgtgacctcattggtcacatggctgatgtcgcgaccgacggccggagcatcgccgagttgcccggcattgttctcgtggatgaaatcgatcttcatctgcatccggaatggcaacgaagcgttgtccccgcgcttgcgggggcttttccaaagatccagtttgtattcacgtcacatagcccgctcgtggccagtacggttcgtcgcgaaaacgtatttgtcaccgacgtcgcagaggacggcacagccaccatcaagcagctcttggagcgggtgtatgggcttggcgctgaacagcttctgctctcctcgtatttcggtctccagtcgacacgaccagagtccttcaatcgtcaggcggagacgttgttcgagaaagcagcgaagggtgacgcatcagcggcgcttacatacctagaccaactgacggtgccctcggattcggcaccagcgacaccgactaaacggaatgtcgccaaatga

SEQ ID NO: 88407 - DNA, 888 bp, Rhizobium leguminosarum bv. trifolii
atgatcaggtacgacttcgatagaactgttgtcgaagccgacattcgcgccgtggattcgagatggtttaacaaggccgaaaagcgcacgaaaagcatcgttaagctcggtgctttcgccgagaagacatccatttggagcaagatcaagcccacttttatgaggctgcaaaagaataagtgtgttttctgcgagcgtcaattcgagaacccagactacggcacgattgagttcgacgttgagcactttcgcccgaagtcatcggtggtgacttggccagatgcagtacgtcactcaaagctgaagtacgaatttggaaccggcgacccatatgccactgggtactattggcttgcatatgaattggaaaactatgcggcgtcgtgcaaggtttgcaatacgtcgctcaaactcaattatttccccatagcaggcgaccgggggaacgttttagcgactgtcgatgatctttctagtgagcaaccttatctctgctacccatttggcgacattgacgatgatcctgagacgttgatgacgtttgttgccacaacggcggttccaactgcatcagatgaatttaagaagcgacgtgggaagacgattatagactttttcgatttgaatgggcgcgagcaattacatcgggaaagggcccggatgatcgcaatgtgcggtagcgccctcatggcagatgctgaaggagaagcgacggatcaagatcaactggtaatagcgcgcatggattcgcccgtcttaccgcattccaattgcttgcgggcattcaagcggtcatgggctacggacaaagagcttgcccggcagatttacgaaaaatgcagggcatacgctctgggtggcgatagctccgggccgcccgatctttaa

SEQ ID NO: 88408 - DNA, 1281 bp, Desulfobulbus sp. Tol-SR
atgattaaacatttaaaaatgaccaatgtcgggccggcagcaaagatggagttggaattcggcaagcgactgaacctgctcaccggcgataatggactggggaagagttttttgctggatattgcctggtgggcactgacacgcagatggcctgccgaaattaaccagaaactaaccgcaggaaaaaaggcgctccctgctgctgaagggagagccaaaatcagtttctctttttctggcaagagcaaggaagagagttatgaaagcagttatcttcgcaaggaacaagcctggaccggacggccaggaagaccagcaaatcctggattggtactttatgctatgtcggatggtagctttgcagtctgggatccagatcgtaattattggcgtacacaaggtggattagatgttcaagatagggtacctgcctatgtgtttagtcctatggaggtctgggatggacttcctgggcagggtagcacttggctctgcaatgggctcattcgggactgggccggttggcagaaggagaaaggaagaccattcagtcagttaaaaagtgtgttaaaggtgctttctccctcgaccaaagaaaccttggagcctggcgatttgacacggatcagtttggatgatgtgcgtgacatgccaaccatacgcatgccctatcggcaagatgtggctgttgtgcatgcgtcgtctggtatgcgccgtatcatggcattggcctactttctagtatgggcatgggaagaacacaaacaagcagccaaacaaatcggtgaacctgctacgaagcaaatcacctttcttattgacgaaatcgagtcccatctgcatccgagctggcagcgaagcattgttccggctctgctctctgtcatggagaaattaacaagaaacgctgaggtccaactgatcactgctacgcattctcccttgataatggcctctgtggaaccagttttcgactctcaaaaagatgcttggtttgatttggatctcaccaaggacaaagtcaccctcgctaagcggcagtttgtacgccaaggtgaagtatctcgatggctaatgagcgaagcgtttgacttaggcagcgcccgatcgttaccggctgaaaatttactacggcaagcagctgaaattttatccgaaaaagtgattgaccatgagcgtgcaaaagagctggatgctcagttgcgcggcctgctaggtgataccgatcctttctggattcgctggcgatatgtcggtgagaagcaggggtggttgaaatga

SEQ ID NO: 88409 - DNA, 600 bp, Desulfobulbus sp. Tol-SR
atgatacctgtcgtagcccaacctgagccccgaacattcgaaactaaagtccggaggaagggcttagcccatcttgcccaaaaaggatatgcgctggatcaacctttacctccaagggcagatattaacccatattggcgcgactgtctaaacgatctacataaagtttatggtggtgtctgtgcctatctctgcgttttttttgagcgtgtcatgggaggtggtagcgttgaccactttattgccaagtcagcacatgctgggctagcatatgaatggaataattatcgtcttgtctgttcaacgatgaacagccgcaaacgtgattacgccgacgttctagaccctttttttcttgctcccgagctgtttcggcttcagctttccactggacatatttatccaaatccgaacttggatatcagggctatgcgcatcgttgaagaaaccatagatcgacttggactagatgaccctcaatgtcgcgagttacgtgcgcgatggtatcaggactatcttgagtatggattgcctgctgactatatgaaaaaaaagtcacctttcgtctggcaagaagccaaccgtcaggggctgctatga

SEQ ID NO: 88410 - DNA, 1254 bp, Vibrio tubiashii ATCC 19109; identical to SEQ ID NO: 86442

SEQ ID NO: 88411 - DNA, 660 bp, Vibrio tubiashii ATCC 19109; identical to SEQ ID NO: 86443

SEQ ID NO: 88412 - DNA, 1353 bp, Dickeya chrysanthemi; identical to SEQ ID NO: 88362

SEQ ID NO: 88413 - DNA, 612 bp, Dickeya chrysanthemi; identical to SEQ ID NO: 88363

SEQ ID NO: 88414 - DNA, 1407 bp, Pseudomonas mediterranea CFBP 5447
gtgaaactgatcaggctggagctagaaaactatcgctgcttccctaccctgacgctagagctggattcccagctgactttgttggttgcgcgtaacggccaaggcaaaacaagcttactggacgccatcaaggttgcgttgtggccctatgttcgcggattcgatcttggcagcatgaccaacgacgtcaccggcattcaaccggaagacgtgtttctacgccccctcgcggcgcatcagatggagccgtctctcccggcccgactgacagcccatgcccttttccatgagaaagcctggacatggtcgcgccgccgggaaagtatccgcaagggaacgcaaacccgagaggatgccaccgccaacctgttgcaaaccaccgccgaagcccttgaagtacaaatcttcaacagaacggtggttgaccaccaagacccctttgatcttccggtgttggcgtactacggcacagggcgactctggagtcagaagaagctgacctccgcgcaggaaaaagcggaaaacgcggagctctccagaacctacgcctatcgcgattgccttgacccggcttccagctacaaacatttcgccaagtggtatacacggatctttcgcagctatcgggaagaacagatccgtaacctcgaacgtggaaaactaagcattgatgtgaaggacgaattagcgctcccggtactggcggtacagaacgcggtgaatgccgtcctcgcgacccgtacaggatggcgagacctggcgtatagcagtgaattctctgacctggtgctggaacatcctgtccatggagtattgaaagtcagccaactcagcgatggtattcgcaacatcgtcgccctggctgccgacattgcctatcgctgcgtgaaactcaaccctcacttgggcatttcggcgcctcgtaaaagctctggcgtcgtcttgatcgatgaagtcgacatgcatttgcaccctgcatggcaacaaaccgtcgtacctgacctgctcgatgctttcccacacattcaattcgtcatgacgacgcacagcccacaggtgatcagctcggtgcctgctcattgcatccgggtccttcaaacggtaaccgatgagggcggacgacagatcatcgtcaatgatgtggagcaacagactcagggagttgccagctctcaggtgctggcctacgtcatggacatcgatccgactcctgataacgagccagctcaaaaactaagcaagtacatggcgttgatccagcaaaacctgcatgaaacgacgacagagggtctggaactacggcagtacctggacaagcactttggcgtcaagcacccgaacatgctcgactgccaacggctgatccggctggaaaccttcaaacgcaagaaactgacaaaaccgtga

SEQ ID NO: 88415 - DNA, 651 bp, Pseudomonas mediterranea CFBP 5447
atgcgcaagcttgttagaggtgaaggaccgcgttgcctctcccgctacaaacacggagtgcataaatggtcgccacagtccccgaccgcactggagcgcgagcaggtctgggagtgcctccaagccatgcaggatacccgatgcgcttactgtgaagccgatatcaggacatctcgccatattgagcattttcgacaacgagatagataccctaagggcaccttcgaatggataaacctctttggctcatgctgccgtgaagatgcctgcggtaagttcaaggatcgctgcggcgcctatgaacatgccattctggttaaacctgacgtggacaatcccgacgactatttcattttcgtcagcgacggcaccattgtcccgcgagcaaatctggatgatcggtcgagacacagggcagtcgaaacattgcgaatcttcaacctggatgctcagaacggagcgttgcgtgagatgaggcgagaggcggttcgtccttacctaaacaccgcacaagcactcatggatatgatggatatgcctgaagaatattcggagaacgatattcaggatttccttgaagaggaagttcaaaaaatcgcaagcctgcccttctctacggcgatcaggcacacgctatcgataaagcattga

SEQ ID NO: 88416 - DNA, 1368 bp, Pseudomonas chlororaphis
atggatatcaacagactaatgttggacagtgtcggttgctttaccgacttgaatatggccctcgccccaacacccgaccacgttacaaacgtaacagttattgtgggaaacaatggttcaggcaaaacgaccattttaaaatcgttggctacatcactgagttggctaatcgcaagggttcgtacagaaaagggccacggcagcgctattgcagaggaggatattcaaaacaaggctttaggcgcggtcatcacaataggcatcacggacggttcacatccccgctgcaaccttgtcgaaacgcctgttgaagactatggattcgtttggtccttggcacgaactcaacaaggacgtaaatcagcgcttcatagctcgttgacggaagttagcctgcttgctgatcattatcgtactcaactcaccgtcaacaccaacgcctccctccccctgatcgcctactaccctgtcgagcgctcagttctcgaaatcccattgaaaatcaagaccaaacacacttttgaccaactcgacggttacgataacgccctcaatagaggtgtcgacttccggcgcttcttcgaatggttccgtgagcgcgaggacagtgaaaacgagatcagcattcccaacactattcttgctgaaattgtcgaaaaatacggcaaggatagtgaagtctggagggcgctgtccgaagtaaaaacttccccccgtgatcgccaattgacggcagtccgttcagccattgctgcttttatgcctgaattcaccaacctgcgtgtccagcgtaagcctcgcctccatatggccattgacaaaaacgaggcaaccctcaacgttgcccaactctcccaaggtgagaaatcgatgatggcgctggttggcgatattgccaggcgcctggcgatgatgaacccgtcactcgataatccactcgatggcgacggcatcgttcttattgacgaagtagacctgcacctgcacccgcaatggcagcgtagtctgatccgcaaattgagcgaaactttccggaactgtcagttcgtattgaccacccactccccactggtcatcagcgacaccaaagacgtactggtttacgtcctcaacaacggcaaactccacgaacacaatggtctgtacggactggacgccaaccaggtgctgctggaagtcatggatactgacatccgcaacgagaacgtacagaggagcctgaatcaattgctgaaacatattcaggatgcagacctagaaaacgctcaaaagctcttcgctgagctttcaggtgaactccccgaaggtcatatcgagctggcaaaagccgctctactgatccgcaaactggagttgcgccgtgcgtaa

SEQ ID NO: 88417 - DNA, 630 bp, Pseudomonas chlororaphis
gtgcgtaagatcatcaaaggaactgagccggattcgcttgcaaaatggaagctgaaaaacaaaaccgccacttatcccgacttgccgcccgaagagcgtcaatccgtccgcgccgcctgcattaccgaacaattcggactgtgcgcttattgctgccaagcaatcaccgtagatggctctcacaacgagcatgttgaagcccagaatcgcgtacacaaccgcacattggatttcaccaacatcgtggccagttgcgagaaccgtccgcattgcggacatggacgaggaacacaactgctgcggctgactccgttcatggatgagtgtgaaaccgaactcaagttctacctttcagggctggtcgcaggaaaaacctcgcgcgcagaagaagccatcaaggcgttgaatctgggtcacaccgaagagagcaatcgagcacttatcggcagaagaagaaccttggttgaagcactgatttacaaggtcggggtccaacctggcgaattgccggagatcgaggacaaggaaatactcgacctgctcctggatgatctacttcttcctaaagcgcataagctcgaacccttctcccccgtgctggtgaacatcattcgacaaatgcccgcgtaa

SEQ ID NO: 88418 - DNA, 1251 bp, Janthinobacterium lividum
ttgaaaaataaaattgagtcacttcatctacggggtatgcgacagttccatgaggtcgatgtacacttcaatgccggatttaactttattgctggaccaaatggatgcgggaagacctcgatcttggcaggtatttctcactgtttcaatacaaattttcaatattcgcggttcagtgaaaatgttgagttttgggtcgacttagaagccaataaccgaaattttcgcatcggcattggtgaaggagccttttcaaggttctcctatcgtgacacccaactttataaatgggttcacccgccagttgcggagaatcgcgaatcgctgataattgctgacgtccctaatcgtccagaattactcattccactatttataggtgcgcaacgcagaattaaatattcaaagattcaaggtttgaagcgagaagaggggctccaaaatcagatcgatatgtacattagcaatgcaacgaagtcgctgcatggcgaatggcaggccgacgtcaagcaatggtttatcaataggtattttataatcgagaaggaatggggtaaagaagaggcggcgaattggcagcatatgatcgaaatgctacctcatgtcggcccatttgatagtgacttccgatatattacaatcggaaaagaattagagccagtgtttagcatttacggcaagaaatgctatttggaggaattatctgctggatttcaagcagttctcttaataattgcaaatattatagagtggattgaggcgagtcgaaaagatggagatcggaacgtaaaagaggcaactggcacagttttaattgatgagttggatattcatctgcatccagagtggcaatttaatattcgaaatggcctatcaaggatttttcccaatatccaatttattgtcacgacacattccccacacctgctttcgtcagcagatgcaaatgaagtcattgtaatgccagcacgactgcaaacgaatgagaaattagtcttgcgtccgtcgaatcgttcatatgcaggttggagtacggatcaaattctttctgatgtcatgggggtcaggagcctagacaacaaagtccacgaaaagttagtagcaaaagctttggactgcatcgacacaaagaatgttgaaggcttgcgaacagcgattgctgaactgaaagaggtttgtcaccccaacgacacgatgctagttgttttgacgacgcgccttgcgggactggaggcattagccgatgattaa

SEQ ID NO: 88419 - DNA, 750 bp, Janthinobacterium lividum
atgattaaactgaagcgtcaaccagagccgcaagtaataaaagacaatggtgcagtttggctgttagaattagaatcagcaattgccacacacggaacattgaaaaatattcctgagaatgaaaaatcgaaattgatggctcattacaggcatgcggatattaaggaagcattacggctgagttcaaatggaaagtgcgctttttgcgaatgcatcccagaaggtgggtaccttgaagtggagcatttcaaaccgagttccatttatcatcaatttacttttgtttgggataatcttcttccagcgtgtgcgcagtgtaacgggctgaaaaaggcgcatgatacggtactagaaccaattattaacccttatgagataagtgctattcattgctttgaatacaattcaatgcgggttaaacctatagttggaccgagttatgatgtcgcagaacgaactataatcgtctgcggcttggacggagtccgcctctggaaaccacgggctgatatccttatggccctttatggatttacggattcgattaagatttccatggaagagatcaatgacgccgataccgaacgcaagaaggttatccgcgttagaaagcttaaggaggcgattattacaattgaaaccctagctcaaccaggaagtaagttctcaggattttgtctggcttatctaaggagctgtaccgaatatattgaggcaaagagaattattgcagcatccgaccaagcataa

SEQ ID NO: 88420 - DNA, 1260 bp, Citrobacter freundii; identical to SEQ ID NO: 87814

SEQ ID NO: 88421 - DNA, 789 bp, Citrobacter freundii; identical to SEQ ID NO: 87815

SEQ ID NO: 88422 - DNA, 1305 bp, Candidatus Thiomargarita nelsonii
atgagacttgatcaacttttcgtccaaaatttcaaaggttttgaacacaaaaatatccaattttcaccacaatttaacgtgctaagtggcgataatgctaccggaaaaactgccattcttgatgccatagcagtaggaataggcgcattgtttctgggttttgatagtatttcttcccgccctatcagaacctctgaaatacgtcacatcggatatccattgggagcggaacttaagcttgaaccctatcccccagccatcgtgcgttgtagcggagagatggttgattcaggtatcatcacttgggaacgcagtttacttaaaccagggagtagaacgacataccaaaatgctaaatctatcattgacaaagcgaaacaattacagaaaagagttagagcaggtgatcagtcgttgatattaccagtactcagttattatggcacaggtagattatggttacagaaatcagggcgagtagaaacaataaaaccagactctcgtttatcaaaatatgaaggttgcctagaaccggcatccgatgaaaaacgttttatacgctggcttaagacgatggaaatcgctgctctacagcgacaaattcctataggtgtattagaatgcttacgaaaatccatcagaaattgcttagaaggctgtgaatccgtctattttgatattccgcatgatgaactgataaccactttattacctaataaccaaagccttccagcctatatgctcagtgatgggcaacgtattattttagcaatggtggctgatattgcttacaaagccgcttcgctcaattcacaattggaagaaaaagccgctttagaaacgcctggcattgtattaattgatgaaattgatttgcacttacatcctaattggcaacgaaaaattgttgatagcttaaaaacaacttttcctaaaattcaatttatagctacaactcattctcctttcattatccagtccttacgtgaaggcgaattaattgatcttaatgaatctgaaccggctgaatacgaagatcaaagtattgaaaacatagccgaatacaagatgggagtggaaataccgcaacgtagccaacgctatttagaaatgatgacagccgctaaagagtactaccgcgttttagagcaagccaaggatgtaccgttggaaaaaatagaatcacttaaaaatcgtttggatgaattatccgctccttttagcgaaaatattgcctatcatgcctttttggaaatgcaacgtgaagcagccggacttgggagaaatgcggatgagacctattga

SEQ ID NO: 88423 - DNA, 709 bp, Candidatus Thiomargarita nelsonii
atgagacctattgaacgaggtgaggtaccaactgataccaaaggccaacctaaacaataccaccattatgaccaagctaaaccagatttaatgaatcgcatgggtgaatattgttcattttgtgaaagatttatcccaaccagtttagcagtagagcatatccaatctaaacattatcaaccacagcttgaacgatcatgggataactttttgttgggttgtagtaactgcaattctactaaagggagtcaagttcgagacgatgtaactcaatcgggttattattggcctcatctggacaatacttttcgtgctttcgtttataaacagggtggcattattgacattaatcaggcactcaatgcagaaggacgggagaaagcactaaaaacacttgaattaaccggtttaaataaacatccaaatgcccaagtgaaaccaacaccaaaagataaacgttggaatcatcgtcgagaagcttgggatttagcgcaacaggcaaaaacgttattagctacttctaataataatccatcaatgcgaaattttatcgtaaaacaagctaaaacaaatggtttttggtcaatctggataaccgtttttcagaacgagcctgatattttaaatcgacttatccaagtttttccaggcacttgtcatcaatgttttgattcaaatggtcagccaactcatcgttgtggggggggaa

SEQ ID NO: 88424 - DNA, 1305 bp, Candidatus Thiomargarita nelsonii
atgaaactgaatcgtatcacaattgaaaattttcgcgccattaaaagattagatttaccactcgaaccacaattaactgtcttagtcggcaacaacgccgcaggtaaaacaactattttagatgccattgcggtgggtttaggcgccatattgacacgtttgcctagcgtgagtgggaaaaaatttcgtccaagtgacattttctcaagcgagaacgaacaatcagcaccctatactcgtgtgacgcttgaaagtatagatggcgtgatttgggatcggactgaaaaacgcgatcagaacaaacggactcagcaggaaattccgcctgataaaaagctaggcgagctttatcattttttggaaaatattattaacgacgttcaagatggaaaatcaaccaatttaccggttatagcctactatggcactgatcgtgctgtgttatcttcttccctacagcgtgattttaataaaaaaataaatcgtttcaaagccttggaaaatgcgttggtggcaacacaacgttttcaaacaatgatagaatggtttgcttttcaagaagatatcgagcgtagagaacaaacaaaacgtcgtgattttgaatatcgtttgcccatactggaatctgttcgtcaagcagtctgtcaaatgatgcccggttgttctaatccgcacacactcattaatccgttacgcttgatagtgacgtttgagtacctcaaagggcatcaggagattttatcacttaatcaactgagtgatggatatcgtactactctcgctttcgtgatggatttagcacgacgcatggcacaggcaaatccccatctaggtgaaaaagccattcaaaaatcagaagccatcgtgctcattgatgaagttgatctgcatttgcatccgatgtggcagcaacagctcttggttgatctcatggagacatttcctaatgcacaatttatcgttaccactcatagcgcacaggtgctaacaactatcaagccagaacatattgtattgctaacacggcaaaatgatgatgtcattgctgaacaggcgacttcttcttatggtgcagaaagtgggcggttgcttgttgaaatcatgggagtgaatgagcgtccaccggcagaaaagaacaaatttaccgaattgctaggaaaatattatgatttgattgaaagccatcaaggagaaagcaaagaggctttaagcttgcgttgtgaacttgctaaagaatctcctaatgatcctatattaattaaagctgatatggaaatccgtcggctgcgggctcaatcctcatga

SEQ ID NO: 88425 - DNA, 852 bp, Candidatus Thiomargarita nelsonii
atgaaaaagcttaagcaacttgagactatacctacgggtttgcagcattttttaaaagaatatccccctgaaaaacgagacaagcgggattgggatgcttttaagaatgaagaacatgaaatctacagcgaacttacccaagccttgattaaaatccagcatggattatgcgcttattgtgagattaatcttaccgaaaatgatcgccaaatagaacattttcatcctaagtcggatattccccatgaaaatgattggatgtttgaaataactaacctatttgctgcttgcaaaggaggcactcagacaaatctttttggtacaaaatcacgttaccctgatccgactcgttgtttatcccctatcaagaaaaaccgtagttgtggagaagccaaagatgataatgtgatggatgatgagattataaagcccagtgacttgcctgtttcgccgcctttgttttcaattacacgacgaccatcttcaggtgtcgttaaaccaagcgataaactgggtgccctcaaagtgaataaaaatgcttgccttcaagccggtattgatcctaataaagtgaaagcaacaatagaaacattcaatcttaattgtgatcgtctgtgtttagcccgaaaaaccgttttggaaaaacttgaagaagactttgaacttgaactggcaaacttaggcgaaaacccatcagatcaacaagtcaaatctttattggataagatggctaagtacaatcttgctgttaatcgaaacggaacgctcccagctttttttaccacaatcagagtattttttttgccacaagctgagtctgtacttgcacaatctcctcaaaactggatataa

SEQ ID NO: 88426 - DNA, 1146 bp, Candidatus Thiomargarita nelsonii
atgcgaataaaacaacttcacctaaaaaatattggcgtatttgatagcctcaatttagaatttcagccaagcaaatgtccagataaagctgaaattaatatatttacgggagaaaatggtacaggcaaaagcacattattatatgccttagcaagtgcgaatggcagcagtgaactcttacgtcaaagatttcggacctctaatcctttggctgaagtcatcattgatgaaaccaatgaacaaatgatggcttttgcgtattctggtaatcgtgctctaaaatcttatcaattatctggcattgaagaaataacagaaagtccttttgacaatgcactttcttttaccaatacaacagattcagcaattttaacaaaatggattatctataataaagctaaagaagctttcgcattgatggaaaatgaatctgctaaagctgaaacatatagaaccgccatacagcacattgaatctgttattaaagaaattgttggattgaacattgaatttattttagaaaccgaaccaaaatttaatgtcgttcttaacattgaagggcagcgcttagaattggatgtattgccagatgggtttaaatctattattagttggattgcctcactgtttatgcgtatggatagaatggcggatgataagaatattttagatcgtcattttatattattccttgatgagattgacatacacttgcacccagcttggcaacgcaaaattttacccgtgatacaaaagctttttagaaatgctcaaatttttgtctcaacgcattctccttttgtagtgggctcagttagtgacgcttatgtgtataaatttaaattagaccaaggcatatcccgtttggatagtattgaagaatctaaagcgggtagtagtattttattagttttagatgacatttttgatattgatgaattatttgatattgaaaccgaaaccgagtttgagcagttttatcgcttgagagatgagattatgacggataaaaaaaatgaagacaaaatccctgaattattagaattagcgcgtcatttaacgcaaaaaggcgttgaagtgacaggcgttatcgggagagaactccgccaactctctcgaattatccatcaggatttctcattatga

SEQ ID NO: 88427 - DNA, 459 bp, Candidatus Thiomargarita nelsonii
atgatgccattaaaacgcggtgtagcacccgcctgcctgaaaaaatataaacaatggggacgtgattatgccgcaaaaagacagcaaaatcctaatgtatcattttattggcatcaatatcaaaatcgttcaatcaatcatattctaatagaagaattggaaaaattgacggctaatcattgtgcattttgtgatttttttccattaggcgcacaaagtcgtcaaacgattgaacattttcgcccaaaatcgaaatatccgaaattagcttatgtgtggcagaatttatttttatgttgtgatgtgtgccaaactgccaaacaagaaaaatatgacaaacgattattaaaacccgacgtcaccgcttatgaatttcaccgctattttatcgtcaatcaaacgactggggagattaagccaaatccgcgacaattgaagaaaaagaacgtgccaaaataa

SEQ ID NO: 88428 - DNA, 1185 bp, Candidatus Thiomargarita nelsonii
atggcaaataatgcgactccaccaccggcttactttaaaacactgacaattgaaaatgtgaaatgttttaaagccgagcaaaccatagatttgtccgatggcaatggtaagccagcacaatggacgattattttaggcgacaataacacagggaaaacaacgcttttgaggtgcttggctcgtttcgattttagaacatttatcaaccccagagaaaattcatcagaaaaaaaaatatcacatgatgaaagcattaaatctcacctattaattaaagaatcaggcacttggaaatttaaagaccgtttttgggatgaaaaaatagcaggattaattatttacggctatggcaccgcccgaagaatggacacgagctcgttatccgaaaaagagaataaatatgcaacatccagcctattttctgacgatatgacattaatcaatgcagaagaatggttgctacaaacagattacgccgttaaaaatggcgtcaaggctgctgcctcaagattagcaaaaatcaaacaagtcttgacaagcggtattttgcctgatgtgaccgatttccgttttaccacgactaaagatttaaaaagttttgtcgaatttaaaacggattacggcagcgttcggttaaatgaattaggctatggttatcaaagcatggttgcttgggtggtagatttagctaaacgactctttgaacgttatcctgagagtgaaaacccgcttgctgaaccatctatcgttttggtggatgaaatagatttgcatttacacccagaatggcaaagaaaaatcatccaatttttgacagctcaatttccaagtacgcagtttattgttagctcacacagccccttaattgtacaatctgccaacaatattaatttagtcttgttggaaaaacaaagtgatcatgtcaccattaggcagcctaatctcaccacttaccaaggttggacaattgaggaaattttaaatgaattgatggatttaggagaaaaaacgctgtcagataattatttagcgttgataaaacaatttgacgaagctttggataaagaagattatgctaaggcaaaagcagcttatgatgaattagataaaattctgcatccagaaagcagtcagcggaaattactgcgtatccaaatgtcatctttaatgccagaaacggtatga

SEQ ID NO: 88429 - DNA, 759 bp, Candidatus Thiomargarita nelsonii
atgattcgattacaacaccttccaaaacccactgaactcacagatgaagtggagcaagaattgacggcacgttacaaaaaagacgacaccagtgtttggaaaaagccttatatcattaaggcattattgaaaatgtctaccaacaaatgttgttattgtgagtgtaacatcacaactgaaagcaactatttagaagtagaacattttcatccaaaaagcctctatcctgataaagttgtcgtatgggaaaacttattaccttcttgcaagagatgtaatggaacaaagggcgatcacgatacccaaaaagaagccatcgttcatcccgtcagagataatcctaaatcacatttaactttaaaggcttatcgtttatatcccaaaacagatttaggacaaatgactattaatgttgtcaatttgaatgataggacacgtttagtcaaaaaacgatttaagattggtgtggaactttgtgacgaattagaaaatttattggaactgatcactgagtatgataatgggacaagcacttcaacaagaagacgaaatagaattgttgaaactctcagaaatttaatgaaagaaggcacacgccaatccgattttagcgcaactgctgctactgttattttgcatgaaaagagttattcgcaaatcaagcaacttttgaacaacaataatctatggaataatgaattgaatgacttagaaaaagaagttgaattctgtgctttggatgttgaggacaacgaatga

SEQ ID NO: 88430 - DNA, 1293 bp, Candidatus Thiomargarita nelsonii
atgtacctaagcaaagtaacattcaaaaatgttcaaggatttgaaaatttaacgattgattttatgggcaaccataataatgtacagatgtcttccctatttttaggaaataatagtgctggaaaaaccgcatttctccgctctctcgctttgggaatgtgcgacgaaacaggggctgcgggacttatcgaaaattttcggtgggcttttattaggcaaggtgaaaaggaagctattgttaatattgaatttatgagtcctcatggtcaatatcgtattgtgacagttgtaaaacgtatcagcacacaagagcgattaagacaacaatattaccatctttctgaaactcaacaaatgagagaaataccaccagaagattttccctggcagaatttatttgtttgtggttatggtgcaggacgactttttggagaatcaacaaaagcttatgaaaaatataggatacgagaagccattacaactttatttcgctatgattatcctctgctgtacccagaattaagcctacacagacttatcagggcaacaacgggcaaaaaagatgaaatagacactcttcaacatttcctgacattgatggatgatttgtttatgttagcggaactagaaacaattgaattaacagataatggaattgaagtagtcagtgaaaaagagcgtatttccctattagcgcatggcgatggttataaaaataccgcgacttgggtattagatatgatcacttggaaaatgttagccgatcagaatttccatccacaagaaatggcagggattgtcttacttgatgaagtagaacaacatctacacccaaaatggcaacgccatattattaggcttttaagacagcaatttccaaacattcaatggattatgactactcattctcccttatgcgctgctggtattgcggatttaccagatgaggaaggtcagttattgcgatttaataaagaacatcaaggttttattaaacttatggaaattgcttcgttacgtggtttgaaagccgatcaggtattgacttctcccgcttttggacttgccacaacacgtaatccagagatagccgaaaaactgaattattttagtactctctatttaaaagaatccagaacatcgcaagaagaacatgaatttttggaactcagcgattacctaaatcagcagttacctgaaccggctgaagatagcgaaactagagtgatgcaatctaaattaaaaaaaatgttgggcgatttagctatgctctctaatggaggcgcctcatga

SEQ ID NO: 88431 - DNA, 420 bp, Candidatus Thiomargarita nelsonii
atgattcaactgaaacagcgccccccgattcctgctactttaaaatctaaaaaagtaaaaaagataaagcgtcaaattgcagaaaaaattgaacagggagaagttataacatccgaagattttccaagctattggcgcaaagatgatatcaaagaaacgctttgggaataccataatcgtaagtgttgttattgtgagcgtaagcgtgacttaaaacgagaatctgatgttgagcattttcgtcctaaagcggctgtgacggaagataaggaacatgatggatattggtggttagcttatgagtgggataattattttttttcttgtaagctttgtaatcaagaatataagaaaaagctcaaatcaaatacaacaaaaatctgctggacggggtttgcaaccccgtccgtaacgttttag

SEQ ID NO: 88432 - DNA, 656 bp, Candidatus Thiomargarita nelsonii
ggctccttcccaattgttctcatttgcacaccgagatggagccggtgaatttctcaatccgctttttgataacatttcaaaatgaaggaggggaggaaattttgtcacttgatcaattaagtgatggttatcgcatgatgttagctttagttatgaacttagcgagacgcatgttgcaagccaatccccagcgcaaaaaaaatgcccttgaatcagaagcaattgttttgattgatgaagttgacttgcatttacatcctaagtggcaacagcgtctgttgattgatctcatggcaatatttcccaacacacaatttatcgtgacgacacatagtccgcaggtactcacaacgatcaagccagagcatattattttgttagaacatgaaaaagaagtgattgcagaacaggtgacttcttcttatggtgctgaaagtgggcgtttattaagtgaaatcatggaggtagatgaacgtccaccggcagacgtgaatgaatttactcggctgcttgaacaatattatcaccttattgaacgcaataaaggtgagagcgaggatgctttaaaaatacgttcaaggcttaatgaactgtctattgatgacccagatttaataacagcggatatggaaattgagcggcggcgcgaggcatga

SEQ ID NO: 88433 - DNA, 849 bp, Candidatus Thiomargarita nelsonii
atgaaaaaggtaaaacaattgaatgtggcgccaacgagtttacagcgttttttacaagattttccccagacaagccgccatataagcgattgggaggcatttagaaatgataacggcggcgagacttttcgtgaactgattaataagctgactcacattcaacatggactatgtgcttattgtgagataaatcttgttaaaatggttgaagagcaagctatctatgaccgcgaaatagaacactttcaccccaaatcggatattcctcatcaaagcgattggatgtttgaaatcactaatctgtttgcggcttgtaagggcggttctgaaactaatcgctttggtgaaaaagcgcgtgagggctacaaagatagcgcccgttgcttgccacccatcaaaaaaaatctcagttgtggtggcacaaaagaagataaaatcttagatgaacaaatccttaaaccaagcgaattaccgatttcacctcctttattttcagtctcaattctcaatggtgtgataagtgttgatgagaatgcttgtcatcaagcagggattgatcccgaaaaggcgaaagtgacgataaaagagttaaatcttaactgtaaacgtttatgccaagtgcgaaagcgtattttaaaaaagcttgatgctgattacaggaagctacgcgcaaatcttgaaaataccactttcacacagattgatgcagcactcaatcaaatgaccgcacaatatctcgctgttaaaccagatggcagcctcccagcttttttcacgacaattagcgcatttttcggttcaagggctgaggtatttcttgagcagaagggaattgtaaaaccgaactga

SEQ ID NO: 88434 - DNA, 1146 bp, Candidatus Thiomargarita nelsonii; identical to SEQ ID NO: 88426

SEQ ID NO: 88435 - DNA, 459 bp, Candidatus Thiomargarita nelsonii; identical to SEQ ID NO: 88427

SEQ ID NO: 88436 - DNA, 1305 bp, Candidatus Thiomargarita nelsonii; identical to SEQ ID NO: 88422

SEQ ID NO: 88437 - DNA, 707 bp, Candidatus Thiomargarita nelsonii
atgagacctattgaacgaggtgaggtaccaactgataccaaaggccaacctaaacaataccaccattatgaccaagctaaaccagatttaatgaatcgcatgggtgaatattgttcattttgtgaaagatttatcccaaccagtttagcagtagagcatatccaatctaaacattatcaaccacagcttgaacgatcatgggataactttttgttgggttgtagtaactgcaattctactaaagggagtcaagttcgagacgatgtaactcaatcgggttattattggcctcatctggacaatacttttcgtgctttcgtttataaacagggtggcattattgacattaatcaggcactcaatgcagaaggacgggagaaagcactaaaaacacttgaattaaccggtttaaataaacatccaaatgcccaagtgaaaccaacaccaaaagataaacgttggaatcatcgtcgagaagcttgggatttagcgcaacaggcaaaaacgttattagctacttctaataataatccatcaatgcgaaattttatcgtaaaacaagctaaaacaaatggtttttggtcaatctggataaccgtttttcagaacgagcctgatattttaaatcgacttatccaagtttttccaggcacttgtcatcaatgttttgattcaaatggtcagccaactcatcgttgtgggggggg

SEQ ID NO: 88438 - DNA, 1302 bp, Candidatus Thiomargarita nelsonii
atgaaaattaaaaaactccagctagaaaatttcacacaattcactgaattaaaggtagaattccccagagatgtgacagtatttatcggcaacaatggagccggtaaaacctcactattgcgggcattggcaatacttttaacttggttgattgccagaattgaacgggaaaaaggcaatggtagccccattttagactcggatatcgaaaatgatgctaagtatagcaaaatcacccttgaagtctgcgaatccgataaccgcctatttcagtggacattagtaaagcaacgtaagggttttaagagtgagcagagcagtgaattaaaaaatgtcacccgtctagcagatagctatcgcaaccgccttactcaagacgataatagcagtttgccactaatagcttattatcctgtagagcgtgtcgttttagatattccactaaagattaaaaaacaccatagctttgatcaattggacggttatgataatgcactcacacaaggcgtggattttcgccgattttttgaatggtttcgtgagcgcgaagatgcagaaaatgaaaataatttacaacaaataatgaaattaatctttgaggagaatattcccaaagaacaattacaggataagcttccatacgataagcaattaacggcagtgcgtaatgccattgcagcttttatgtctggtttttctaaattacaagtacagcgcaagcctagattacaaatgacggtagaaaagcatggcaaaatcctagatgtggcacagctctcccaaggtgaaaaaacactgatggcattagtgggagatattgcacgtcgtttggctatgatgaaccccggcttagaaaaaccattgcagggtgagggcatcgtactgattgatgagatcgaactacatttgcatccacaatggcagcgcggcatcatccaacgtttacgcgacacctttccaaattgtcagtttttgctaaccacacactcgccactggtgatcagtgatgctaaaaatgtgcaatgttatatcctagacgagaagcaattaacgcaaatagatgatttatatggtttagatgctaatcaggtgcttttaaaagtcatggataccgacattcgtaatccagaagtggagaaaaaaatcaccgtgttattgaatttgattcaagagagtgaattgtataaagctaaaacggcattatctgaattagaacaagaattgtctgccgatgacttagaattagctaaggctcgtctgttaatcaaacgattagaggtattgcgtgcgaaaaataattaa

SEQ ID NO: 88439 - DNA, 621 bp, Candidatus Thiomargarita nelsonii
gtgcgaaaaataattaaaagaaacgagccaatagcattaagtaactggaagcgacataatcctaacgggcactatcctgacttgagccatgtagaacgtcaagccatccgtgatagctgtttaaaggaacaatattatttgtgtgcttactgttgtcaacgcattgatgataaaaactcacataatgaacatatccaagcacaatctgttgcgcctaatcaaatgcttaatttccataacatagttgccagttgtaaccaatctaaacaatgtggtgacgcgcatggctcaaaaactataccactaacgcccctgatggatgaatgtgagacggaactcaaattttacatctcaggcgaagtcaaaggtataacaacacgcgccactgataccattaagatattaaacttgggtaatggcaacaaagcattaatcaataaacgtaagcaattgcttgacgcactaatttttatgcacagcgagtctccagaagaactgcaattattagatgatgagttattgcaaatactgatggaggaaatcaaccagccccaagatgggcaactttcagcatttgcccctattttacaaaacatcctgcgtcaattcctaaaaaaataa

SEQ ID NO: 88440 - DNA, 1305 bp, Candidatus Thiomargarita nelsonii; identical to SEQ ID NO: 88424

SEQ ID NO: 88441 - DNA, 852 bp, Candidatus Thiomargarita nelsonii; identical to SEQ ID NO: 88425

SEQ ID NO: 88442 - DNA, 1185 bp, Candidatus Thiomargarita nelsonii; identical to SEQ ID NO: 88428

SEQ ID NO: 88443 - DNA, 759 bp, Candidatus Thiomargarita nelsonii; identical to SEQ ID NO: 88429

SEQ ID NO: 88444 - DNA, 335 bp, Candidatus Thiomargarita nelsonii
  modified_base (274)..(283): a, c, t, g, unknown or other
ttgcatccgatctggcagcaacatgtattagttgatctcatggcgacatttcccaaagctcaatttatcgttaccacccatagtacacaagtattaaccactatcaagccggaacatattatattattaacccggcaaaatgataacatcattgctgagcaggcgacttcttcttacggagcggaaagtggacggctgctagttgaaatcatgggagtcaatgagcgcccaccagcaaataaatttacagaattactcggaaaatattatgatnnnnnnnnnncttggaatcccgtcaagtacccgctgccgacgaatttccatatcggctttaa

SEQ ID NO: 88445 - DNA, 849 bp, Candidatus Thiomargarita nelsonii
atgaaaaaagtaaagccaattgatactgtatctgcgggcttgcaacggtttttaaaagcaaaaccgcctgaaaaacgagataaggcagattggaatgcttttaaaaatgaagaaaatgaagcctaccgccaacttattcaagccttgactgacatccagcatggattgtgcgcttattgtgagattaatctcaccgaaaatgatcaccaaatagaacattttcatcctaagtcggatatttcccctgaaacggattggatgtttgagaacactaacctatttgccgcgtgcaaaggaggtactcagacgaatctttttggtagcaaaacacgtcatccggatcagacacgttatttacccccaatcaagaaaaaccgcagttgtggagaagccaaagatgatgaggtgatggatgatgagattattaagcccagtgagttacctatttcaccggctttgttttcaataacacgaaagccaccgcaaggaattgttaataaggttaaagtgggtgctcttaaagtcaatgaaaaagcttgcattcaagcgggtattgatcctaaaaaagtggcagccacaatagacacattcaatctaaattgtgagcgtctatgtttagcccgaaaaaccgttttggaaaaactcgaagaagattttgaactggaattggcaaatttaggcgaaaatccatcagataaagaaatcaagtcggtattagaaaaaatggcggagtactctcttggggtaaatcaagacggaacgctcccagcttttttcaccacaatcagagtatttttttttcctattgcggagtctatactggcacaaatccctcaaaattggatataa

SEQ ID NO: 88446 - DNA, 801 bp, Candidatus Thiomargarita nelsonii
ttggaaacaacggattctaggcaaattattcagtctattgctacccaaaaaatgaaacaagccatagaactgagccaaaacaatcaaaaacaagccgaacagtataatcgagttattcaagaaattgaaaaagccattgaagaaatggttggctgggatattaagtttaaactggaagctaaaccgtttaacctctttttggaaattgatcagaaacgcttagaatttgatgtacttcctgatggtttaaagtcgattattagcctgctcgctgatcttattaggcggctagatcaaatcgtgtggattgatgattgcaatgttttagaacatcattttattttatttcttgatgaaattgacattcatctacatccggcttggcaacgtaagatattgcctgtgatacaaaaaatttttcccaatgcccaaatttttgtctcgacacattcaccttttgtggtaggctctgtcagtgacgcttatgtctatacttttcaattaaaagaaagtggcgtatcgatcttggacaaagtagaaaactctcaggctggaaatagttattctatgattttagaagatatttttggggttgaagaaagttttgatgatgagacagaagccgaatttcgtcaattttatcaattaagagatgacattatgcacggtgatgatgaaaaaataaatgaatggttacaaattgctcgtcatttgatggaaaaaggcatagaagtcacagatattgttgggatggagttgcgccaaatgtcacgtattttgaaaaaggatttatcaatatga

SEQ ID NO: 88447 - DNA, 597 bp, Candidatus Thiomargarita nelsonii
atgatgaaattgacgcgccctccgaagccagcctatttggatggatataaagaatggggaagaaaatatgcgctcaagaaacaacaaggattgaaacctaagtggcataaaaaaataaagcaatgggaaagactgaaaaaagatttagcagaattaacagccgatcattgctctttttgtgatagttatccattggcggctaaaaacaagcaaactatcgaacatttcagaccccgaagtagttacccaaaattggcttacgtctggcataatctgtttctctgttgtgaaacttgtcaaacagcaaaaggcgacgactttaagaaaaatttactcaaaccagatgcggaagaatacgaatttaatcgttattttattgtcaatttcaaaacgggtgatattgaagtcaatactcggggctctaaaaaagaccaagaacgggcaaaaataacgattagaatatatggtttaaacagctatggcagaccaaaagcacgagcggatcattataattgggttaaaaatcaagtaagaaaaaaaaaattaaacaaggataaggatatagatattctatcttatcgctttatgtttgtttag

SEQ ID NO: 88448 - DNA, 1656 bp, Klebsiella pneumoniae
gtgacaaaacaactggaacgtaaagccaaaggtgggagtttactctccgcctttgaactttatcagcaagagaaaaataataaccttcatgacctaaataataaatctgaccaatggttcgagctctgctggaattacctacaacaaccagcccacgatggtaacctcgatatatatcatcctgaaaatcagttttgcctacgttcaatgtcatttacggatttccgccgatttccacaacttgatatcaactttgaagaagacctgaccattatcatcggtaataatggacagggtaaaaccagtattctttatgctattgccaaaactctaagctggttcacagcaaatatcctcaaagaagatagcagcggacaaaggcttaacgaatactcggatatcaggaacgattcagataacaatttctcggatgtcagttctaatttcttttttggaaaaggccttaagaacatttccattagactttcacgctcaactcttggcgcatctgagcgtagagagagcatcatcaaacctgctaaggaggttgctgatatctggcggattatcaatgagaggagaatggttaatcttcctatttttgcactctactctgttgaacgatcgcatccttttagcaagccagcaaaagagagcattgaaaaacgagaagatcgtttcgatgcatacaatcacgccttgaccggcgctggacgcttcgatcattttgttgaatggttcatctatcttcacaaaagagccgaagctcaaggggcatcggcaatcgaactgcttgaagagcaggttaatcatctgaaacagtcagtggaaaatgggctgacttccatggtaccactcttagaagaaacacaaaaaaaactgcttacggctcagatgagaaaagaatctctccaatcggttaacatgctaactgagacggcccaaatggatattgtgtccagagctattaccactgttgtccccagcataagccgaatctgggttgagaccgcatcaggtgcggacattatcaaagttaccaacgatctccaggatgtcaccattgaacagctatctgatgggcagagggtgtttctggctctggtagctgatctcgcgcggcgcatgattatgcttaatccattgttaaaaaatccacttgaaggcagaggtatcgtcttaattgatgagattgaactgcatcttcatccgaaatggcagcaagaagttatcatcgttttacgcaccgtattccctaatattcagtttgtcatcaccactcatagcccaatagtgttatccactactgagatccgctgtattcgagagttcaagcaaaacagtgaaagtggagaactatttcttgactcacctccaattcagaccaaaggaagtgaaaactcagacattcttgagcaagttatgggagttttgtcgaccccgccgaacattgcagagtcttatcttgtcagtaactttgagaaatcaattattgatgatagtgaggagttgagtgccgaatcacgtcgcctttacaacaaaatcatttctcattttggtcagcatagttctgaactaaaaaaagcagacagcttgatacgccttcaccgcatgaagaacaaaatcaacaaagccaaacgcgagaaggatagttaa

SEQ ID NO: 88449 - DNA, 648 bp, Klebsiella pneumoniae
atgaaatcactcaatcgcaccgcaggcccggcgcatttgcatcagtttagggcaggacgcgatccttggatgtctgttgagcaaagcaatatctggccgcatctgttggaaatgcaaggtgaattttgtgcatattgcgagtgcagtctcaatcgaaagcacattgaacactttaggcccagagggaaattccccgcattaacctttgcatggggcaatttattcggatcttgtggcgacagttcaaaaacaggaggttggcaacgttgcgggattttcaaagataatggtgcagggaattacaatccggatcacctcatcaaacctgatgatgataatcctgacgattatcttttatttctgacaacagggcatgtggttccagccaaagatatctccggcaccaaattattaaaagcacaagaaactatccgtgtttttaatctcaacggagatccttctctgctcggcagtaggaaaaaagcgttaaattacatcatggaagaggtaatacttcttcatgagtcttatgaagatcttggagatgcactatggcatgaaatgcgtgacgcagaaattcaagaaattggtaataaagaattctacacagcactaaaacacgcttggcttcataacagtgaatattaa

SEQ ID NO: 88450 - DNA, 1242 bp, Klebsiella pneumoniae
atgaagaaacacattgaaaaaataaactaccaacccaagcatgcttcaggagaaatcaacattcatctagcaggcagagatttaattatcactggcggaaatggatgtggtaagacaacatttttaaatgcaatgaacaagtatatccaacatacatatgttgagaaaaaacatgatgcgaaagaacgtttacttcaaaatttagctcattggcagaaccagatggatcagaatccgaaaggaacaagccagtatgcgcaaagtgaggaacaatgcaaatatgctttaagggagttaaacgaatatgacacaggcgttgaattaacaatacctgatacaatcggcttttgtgcattattagatgaaggaaaagcaatctacaaatatttcattgcagaaagaaaatctgaaataaatgcatcatcaggcgcaacaaaagctagcttagatgataaaatctcgaacaataaatttcaaatcaacgcacagcgactaggcagtgagtttgaaaaccacttagtcaatttgaagacaagacagtcatttgctgaaacctatgataaagattttgaattagccagtaaacttcagcaatggttcaacgaacttgaaaaaaacatatccattttaatggaagatgattcttttgaattgaaatttgactcagatggtttcaactttctccttacccaagacaataaagcaccatatacctttcaaagcctatcttctggttactcatcaatctttaacatattatcggaattaataatggtagccgaggcgtataaaacatctccgcaagatatgcaaggaatagttttaatcgatgaaatagatgcgcaccttcatgtatctctacaaagaaagattttacctttttttaacagtctttacccaaacattcaattcatagtaacaacccactctccatttgttattggttctcttgataatgcagttgtttttgatttaagcagcaaacaagagtttacggatctttccaattattcctatgaggctatagttgaagggttactaggagttccagtagtatcaatgtcgttagaaaaagatataaaacggctttctggattactttcagaaaacacacccgacgtagctgctgtaaccgaattagttgaaaaactatctccccacaatgataaacttgatgatgaaagtgcagtgtttcttataaaagcaaaaatgtttcttcgtgatgacaggaagggggtatga

SEQ ID NO: 88451 - DNA, 660 bp, Klebsiella pneumoniae
atgtttcaagttttaaaaacaatgcctgcacctgcttcactagagaataaggtgtcatatagcagcaaagatgtaatagaacaacttgcaagtgactttcacaataaatgttacatttgtgaaataaaagatccaatatcattaaatgttgagcacttcgaacctcataaaagcattgacaatgagaaaaaatatgattggaagaatctattttttgcatgcgcaagatgtaacaacataaaaagaagtaagtatgatgatatattgaattgcactagcacagatattgacgttcttatggcagtaaagcatgaattccctgtaaccgcccacgcaaaaaaagtaaacattactgccatgttggatgatgaaaagacgaaaatgactgcttctttaattgatgaggttttcaatagcgaaagcaccggaaacaaggagttatcaagaacttatttactaaaaagactgatagcccaatatagaaaattccttgagttacttttccaatatgaggacgaagatacgatagaagaggaaagaatcattgtagagaaaagaataaaaaacatgctgaaagtagaatatgaattctctgcatttttgcgttgggccataattgactcaccaaaattgcatcatttgagagacggcttattttaa

SEQ ID NO: 88452 - DNA, 1251 bp, Vibrio anguillarum; identical to SEQ ID NO: 86412

SEQ ID NO: 88453 - DNA, 690 bp, Vibrio anguillarum; identical to SEQ ID NO: 86413

SEQ ID NO: 88454 - DNA, 1755 bp, Vibrio anguillarum; identical to SEQ ID NO: 86410

SEQ ID NO: 88455 - DNA, 876 bp, Vibrio anguillarum; identical to SEQ ID NO: 86411

SEQ ID NO: 88456 - DNA, 1155 bp, Acinetobacter baumannii LAC-4; identical to SEQ ID NO: 88058

SEQ ID NO: 88457 - DNA, 741 bp, Acinetobacter baumannii LAC-4; identical to SEQ ID NO: 88059

SEQ ID NO: 88458 - DNA, 1662 bp, Aeromonas salmonicida subsp. salmonicida; identical to SEQ ID NO: 86462

SEQ ID NO: 88459 - DNA, 864 bp, Aeromonas salmonicida subsp. salmonicida; identical to SEQ ID NO: 86365

SEQ ID NO: 88460 - DNA, 1662 bp, Aeromonas salmonicida subsp. salmonicida; identical to SEQ ID NO: 86462

SEQ ID NO: 88461 - DNA, 864 bp, Aeromonas salmonicida subsp. salmonicida; identical to SEQ ID NO: 86365

SEQ ID NO: 88462 - DNA, 1323 bp, Vibrio parahaemolyticus
gtgaagatcaaaacgctgaaacttactaactatcgagccttcgacgaattggagctagatttagatcctagactaactgttttagttgcaagaaacggtgctggtaagtccagcatacttgatgcaatctcctcaaatttaggtgcatttttgacccgtttgccaggagtctctggacataacccaaaggattcagatttcagggttacagaatctggtgaaaaaccgccatttatgcgtatttttacccgttcttttgatggtgttgaatgggatcgaactgaaagaagagacaaaacaaaaaagacccaggctctaataccagatggtgtgggcataaaagctctaaacgaatatgtggatcaattcatagatgcgcaaaacgagggtaacgattatgagcttccagtatttatatactacggtactggtcgtggtgttttcgacatccctcaaaggaaaagaggttttggtaaaaaatttccacgttttgaagccttgtctggggcattagaaagtcgcacaaacttcaaacgctttgtcgaatatttctatttcctagagaatgaagaaaataaacttcaaaaagaacatcgttcattcgatttcgaagtacccgaactaaaagccatacgccttgcgattagcagaatgatgccacaatttagcaatccaagatcagccgctccagcaggtctcatgctcgactgggaacacgatggcaccactagtcaacttcgaatcgaacaacttagtgatggatatcgtacgactttagcaatggtaatggatattgctgcacgtatggcagaagcaaacccagaaatgcaagagcctttagaaaccggaggaataatattaatcgatgaagttgacctacatcttcaccccgagtggcaacgggagtttttgccaaaactgcttaacacattccctcaaattcaatttgttgtttctacacattcgccatttattattcagtcactaaatgatggtaagctagtggacttggatcatgtgcagactaactttaataaatctcttaaaaaagaacaaagtattgaagacatagttgaaaacattatgggagtgcacttaccttctagaagtgctcgtttacaaaagatgtacaccgttgctcaggaatactatgctcttcttgataatgccgaaaaatatactgaagaagaaatcgaaagtttgaaacataagctggataaactcatttctccatttagtgaaaatgttgcatatcatgcatttttagagcgtcagagaataaaagctggggttatttcatcagaagaacgggaggctgactaa

SEQ ID NO: 88463 - DNA, 699 bp, Vibrio parahaemolyticus
gtgagaccagtccatcgtggagatgttccagaagataacgaaggtaaccccaaagagtatactgaatatacaaatgcaagaaaggacttgatatctcgcataggggagtattgctcgtattgtgagatggaactagatacgtcgttagcgatcgaacacatcagacccaaagctcatcatagtcatctggagttaaaatgggacaatttcttgttggcttgtactaactgcaactcaactaaaggcgataaagatcctaatccaaatgatatattatggcctcatcttgataatacttttagagcatttgaatacactactgaaggccgagtgaaacccgccccagggcttagtgctgcattgaaacgaaaagcggaagataccatagcacttatggggctagccgcggctccagatacccaaaaagcatcagatagacgctggttaaatcgtcaagaagcttggcaagatgcaatattgtcaaaggctgacctagctgaggctgatttgccagcaatgcggagacaaatagttcggacggctaaggctaaaggatattggagcatatggatgacggtctttcatgatgaccctgatatgcttcgacggtttatagatgtagataattttcctggcactgcgcaagattgctttgatattaatggattgccaatacttagaacaaatggaaaattgtga

SEQ ID NO: 88464 - DNA, 1281 bp, Microcystis aeruginosa NIES-44
atgaaaattaagtctataaagcttattaattatcgaggtgcagtcagtttaaacatcgactttcatcggcaactcaacgtattcataggagttaatggtgcgggaaaatccaccattttagatagtttggcgattatgctttcatggttagttaatcgcctaaaaaatactaatgccagtggacgacagatgagcgaaaccgagattaataatggtcaggggacggctataattgaaatcacgggggtgacggaagatagtcaagagattacttggaaaatagtaaaaactaggactggatatatccacgctggagaacggagtaattttagccaattaaatgaatacactcaacaaatacaacgacaaattactgaacatcaaggacaaattaacttacctttatttgtttattattctgttaatcgagcagtgctggatatacccttaaaaattaaaacaaaacatcaatttgattctctaagtgcctacgaaaatgctttaaccagtgggtcagattttcgcactttttttgaatggtttcgcgagcgcgaagatttagaaaatgaaaatagaaaatatcaggattatctaattaaaccagaaggtttttgttttcctgatccccaattggaagcggttcgggaaacgatcgaacgttttctacccgattttagtaatcttagcgtccgtcgtaatcccttgagaatggaagtaacaaaaaagaatgaaatagttactgttaatcaactttctgatggagaaaaatgtctgattgctatgctgggagatttagctcgaagaatggcgattgctaatcctcaaaatcctgatcccttaacgggtaatggcgttattatcattgacgaaattgatttacatttacatcctcaatggcaaagatttgtagtacctaaattactagaagtttttcctaactgtcaattttttatttccacccattctcctaatattatcactcatgttcagccagaaagtttacacttcatggaacaaacagaaatgggaataaaatttcatcccgtgcaagagtcctacggcaaaaatgttgatcgaattttggaagatttgatgggattagagacaactcgtcccaaggaaatcgctgaagctttgaaagatatctatgaacaaatctctcaaaatcaattagaggcagctaaaaataaaatcaatgatctcagagctaaaattcaagatgatccagaattaattaaagctgaagttattattcgacgcaaggaaattatcggaaaatga

SEQ ID NO: 88465 - DNA, 633 bp, Microcystis aeruginosa NIES-44
atgaagtatattaggaaaagacaagaaccaccagagtttaagaattggaaagagcaagctaactcagattggcagcccgactttaaaaatttagcaggaaaaccaaaagaaatactaattaaagctttgatgacagaacagggggaaatatgttgttattgtgaaaatcgattgattgatggtaaatgccatatagaacattttaaacctcagagtgatcccactgttgatcccttagattatgccaatttgctatgttcctgtcaggcaaatcttacgcctagtgaatttcggtactgtggtaatctaaaaaataactggtttgatgaaaatctcttaatctctccacttaatcccgattgtgagtctcactttgcttttaatgatgatggtgcaattaaacccgcacaagaagatgatcaaaaagcaattaatactatcgaaaagttgggattaaacctcaataaactcaaggcacttcgtaaggcagccatcgatccttttttggatgaggagatagataatgacgaattaaaattttttgtcaatggatatttatgcttagatgatcaacaaagatacaaacctttctggacaacaatcaaatatttgttcagcgatttaattgaataa

SEQ ID NO: 88466 - DNA, 1374 bp, Microcystis aeruginosa NIES-44
atggaaattcaacgggtcatcttaaataacatcgggctatttgaaaagctggaaatttccttggctcctacagagcaaaacccaagcaacattaccgtttttgttggtaataacggggctggtaaaactgctatactaaaagcattagcaacttctcttagttggtttactgctcgtttacttacagaaaaagggagtggtaaccctatttctgaagatgccatatttaatactgctaatgctggcagcattgaaatcgaagtctgggattcctccaactcattaaacaatcctgatcaaagcgatattgaccattatttcagatggattcttgcaaaaagtagaaaaggacgtaaagcccaatataatagcaaccttaatgactgtacgcgcttggccaatcgttatcgtgatgccctcacccatgatgacaaaactagcctacccctaattgcgttttatcctgtcgagcgtgtcgtactcgatattccactaaaaattaggactaagcatacctttttgcaattggacggttatgataactccttaagtcagggcgttgactttcgccgcttttttgaatggttccgagaacgggaagataccgaaaatgaatcaggagttcctgaagacgttctcaaccaactaagaccaataatggctgaaaccaatcaagacttatggcaatggttaaacgaacgcaatgcctccgctaaagatcggcaattaacagcagttcgcaccgccattggccgatttatgccccatctggataaccttagagtccgtcgtaaacctcgtctctacatggcagtggacaaaaatggtgaaaccctcaacctagcccaactttcacaaggcgaaaaatccctaatggctcttgtgggtgatattgcccgccgtctagctatgctgaaccctgccttagaaaatcctttagcaggtgatggtatcgttttgattgatgaagtcgatttgcatctacatccctcttggcaacgtcgcctctgcgagcgcctgaccgaaactttcccaaattgtcagtttgtgctgacaacccattcacctctagtgatcagtgattgtaaaaatgttttgatctacactttagctaatggcgaattgcgacagttaccatctcaatatgggcaagatgctaatactgtcttattagatgtcatgaataccagcattcgtaatgagaaaattgatactgaattgaacgatctgctagatgccatacaagattcaaagctaaccgaggctcaacaattgctggcagaattaagtgaggaactacctgccaatcatctcgaattggtcaaagcaaaactactgctccgtaaacaagaattgcgtcatgggaaccattag

SEQ ID NO: 88467 - DNA, 645 bp, Microcystis aeruginosa NIES-44
atgcgaaccattagtaaaggggctgaaccttgttgtttaaaagcttggaaaaggaagaaccctcatggggcatacgatgatttagataaaacagaagaagggaaagtcgttcgagcaaagattcgagactatgctcttaatgagcagttttatctttgtgcctattgctgccagcgaatcgaaaaaattaatgcttgccataatgagcatatagaagctcaaaagctaaatcctaaacgtacgctcgacttttcaaatattgttgctagttgtaatacccctaatcaatgcggtgatgcacataaatctcaacacctacccctaactcccctgatgacagaatgtgaaacagaactacgattcaaaattagtggacgggtagaaggattgagcgatcgggcagctgacacgattcgagttttaaatttgggtgaccatgaaaaaaataaccgtgctttgatcgaaacacggaagcagttgtctaatgttttattatgggaaaatggcataaatccagatgacggcttagaggatgatgaaatattaaatatattaatcgatgacctatcacaacctcagcaagatcaaatggaacctttcactccagtagtaattaatatcttgagaagttggctccaagcttaa

SEQ ID NO: 88468 - DNA, 1425 bp, Microcystis aeruginosa NIES-44
atgtggccaaataagctagaattttatcgatcgctgttatcctctgggggaatgtcgatgtgggttgaaagtataacactcgaaaacattaaatgcttccagaatcaagagattaaatttattcgtaatcccaataatcaacgtcattggcgcgctaaaccttaccattggatcactttattaggagaaaatggagtaggaaaaagcaggattctacaggctttggctttactgctcgcgggaccagaagcagccaaagaattattaccacgtccgactggttggatatgtaatcccaagacaccgggtaaattaaccgcagtgcttcatcaggaagatggggatgcgggaaaatttggtacggataaaactcgaaaaacttttgcttattcctattttgttacaggcaaggaaaggttagagttaggagccagtaaggacaaacaaacctatacagaaccagcattaatcgaagaaaatagcaaaattttgggttggttgcgagccaatgcttttgcctccgataatcatggttggtttgccgtcggttatggagctttccgtcgtttgacacgagtgagtcaagtgatcattcctagtcttgaacccccgcaacgctctagcaactttttcagccaatttcatgaggatacatctttaagttcttttgagagatggatggtgtatttagattatcgaatagccaaaaatcctgaagatagtaaatccaaacaaatgaaaaaaatcggcgaagaagcaattactaaactgttacccggtaatgtagaaattgctgaagtaactgccgatgccttgattcagtttctagttaacggtcaaaaagttccaaccattagtttatccgatggttttcggagtatgattgctttagccggagatttaatttggcgattattacaatccttccccaatctagataaccccacagaggcttctggagtcgtcttaatcgatgagttagatattcatttacatccttcttggcaaagggaaattgctggatggttacaggaagtttttcccaagcttcaattctttgtcgctactcatagtcctttaatcgctgccggtgcagggccaaattctttaaccctacgaatcgatctggtagcgggtgaatcagagattgtagaaattccttataaagaattagcggctaatgttgatcgtactttaacaagttctgcttttggtttgaaatcaacctttcccactgagacagaaaataaaattaagcgttaccaccaactaaatcgtaaaaataaaaatctggcggcagaagaaaagcaagaatatgaacaactgtcattatttgttcgagaagttaaaccctttggcgaaatcagtcaacctaatagtttagaatcccgaattgatgccttactagaggagcgtttatcttga

SEQ ID NO: 88469 - DNA, 690 bp, Microcystis aeruginosa NIES-44
ttgattcctgtcaccagaatatcagagccacccgtattagctaaaaatgccgctcgttggctagaggctttagaatcaataaaatcaaacaacaaggcaactaaagctgacattaacaaagcacaaaataaataccgtcatccgcaagttaaagaagcattagttaaaatgtttaatgggaaatgcgcttactgtgaaagtaagattatagtggtaacttccggagcgatcaaacatttttatccaaaaagccagtatcctgatctgacttttacttgggagaatttactgctttcttgtgataaatgtaatgatgccaatcacaaaggcacaaattttcctctcgatgatatcacaggaaatcctctgttaatagaccccacggatggagtaaccgatccgaatgcacatcttgaatttgtttgggatgaaatggcaaaattggccagtgtttatggtcgggatcggcgtggtcaaattgttgaagatttgttcgatctcaatggtatgcgtggacgaaaagaattaattaactatcgtagtcaatatattaaaaggttgttagcattattacgtttcgcaaaacaaggagactcggaggctttatctttactgcaagaagcttgtcaaccgggagcggaatattatgcttttgctagtatttatatactgcctcatttgcctccctaa

SEQ ID NO: 88470 - DNA, 1749 bp, Klebsiella pneumoniae; identical to SEQ ID NO: 88310

SEQ ID NO: 88471 - DNA, 858 bp, Klebsiella pneumoniae; identical to SEQ ID NO: 88311

SEQ ID NO: 88472 - DNA, 1455 bp, Vibrio vulnificus
atgtcttttagaattttaggtgtttcaattgatgggatgaaatataaactatcttatccaacgagacacaaagaaaattttatcacagtaatgaccggaaaaaatggtagtggtaaaagcagaatattagagtttatatcaagaaactttgttgttaacgatgactttctccgttattatccagagcgttgggatgacgggttactagaatcaaataaacttgctggttcataccatgctaattctatgcactataattcatctggcatcaatgtttatagcgagattattcataaagatcttgcgatggcctttgatattgatcattttgttgaaaatagatacgacctattcccatccaagcttatttgtttatctacaagtccttttgatcggtttccttcaaataaaagatctttaaagtggatgtcatcaaaccaagatattgaagttaaaaatagtatctatacatatattgggttaaaaaactcttcatcaatatctgtcaagagtatgattacaaatgtaattgatacaatattaaagtcgccagttaaaataaagaataatgttggagtgataagagatactctatcatacttaggttatggtaagcgtattcgactaacatttaaaactgctattcaaagtggctatctgctgcatgatgacatggaaaatgtgatgtcaaaagtagaatcgatgaacgaaatgttatccagtcgagatttgagggagatatcagattcaattagaattttaagagataaacataatagtaaaacagaacaattttcagtgtctatgaacttagttgcggatgaattgtttaatgatgattacatatcatcgattagagttcttttaaataatgacatgataaaaatacttagttttaaactgtcattgaaagaagataatcgaaggttcattacatttcacaatgcgagttcaggagagcaatgtttagcgttgatgatgcttggtattgcgagtgtcatagaagataatgctttgatttgtattgatgagcctgaaattagtctgcatcctgaatggcaagaagaatttattcctatgattagagagtcgttctccttatattccggttgccattttattgtagctacccattcaccgttgattgtatcaaagctcgatagtgataattgtatagttttagatttagataaaaatgtcctcatcgatgacttcaatactaatgaggtttcatcagattatcaattggctactatttttaaatcacccggatttaagaatcagtatctaattaatgaatgtttggatgtcttatctcaattatctttgaatatagataataatgtgaatttggctagaagagctgacaagcttattgagattgaagatgtccttgacaaggatgatccggttttatctttaatatctattataaaaaaagttgtaagagtatag

SEQ ID NO: 88473 - DNA, 636 bp, Vibrio vulnificus
atgattgggaaaaaggttgaatattctaaagcagaaaatgatttgattaaagaatacctacaacaaggcaatatatctggagatgattggagtcataaaagatttgaagctataaaagatacaataaaaaagcactataagaacgagcaggaatatacgtgtccatattgcaaaattaagtatccagtaacacatggaatggtatgggatatagagcacataattgcaaaagatagtaagcctaacttcatgtttgagcctttaaatctttgtgtttcttgtaaggattgtaatggttctaaaagtaatacagaggttttagttaataaaaaaaggaaaacattccctaagaaaaatacggattacaaaatagttcaccctcattttgatgtatatgatgagcatataaatgcaattgttccaggtgatttctatcgtgcacttagcaaaaaaggcgaatttacaataatagaatgtaggctgttgcgtttttatggaactgttaataaagaacagccagatcaagaaataaatgatttagccaaagctttaatcaatgctgaagggttcgctcgagaattaattgaaagagagttgtctaaaaagctagaagagaaggctaaaaaggctccttag

SEQ ID NO: 88474 - DNA, 2541 bp, Vibrio vulnificus
atgacctatcgcgatgaagacctgaaactggctagatctcaggcaagagaaatatggaagatacttaattatgttcgaggggcatctcctatatcgaactatcgttcattagcctattcaattttcttcatacgttatctccaatcaaacactggtcagcattttgatgcaccaaggtttgattcatttaatcttattgcccaatattcttacgaacttataaatcatgctgtccatctaggattaattcatcgtgatgtatccaattttctgtgtgattacttagaaaacacattacattcattcgacaacattaatgagtcttttgttcgtcatgcaatcagagacaggctattacatagaagcacttccatagcgtcactttcgctatctgaactagacttactctttgctgaaaatgaaggtaaatcaagaagtgagttttacactcccaatgatgtgaaccacttggttactgctctcgggttgcgctatcaaccaaagtcagtgtgcgacccatttgcaggagctggaaacacagcattttctttttccaatgtaagtaaagaaagagtttgtatagatactcaagaagtcaacaaggacgcttattttcaactaataatcagccgagtaattaggggaataaaaggtagagatttttttggagactccttatcgcagccgacctatcaggaaaataaatacgatctaattgtttcctttccaccttttggaatgaaaatccccaaatcatctcgggaaaatatctactactcaatgcgtaatgagtggctagacgtagccagcattctgcctgaaagtagaagtgattggtttataacgctatcaatgctgccagcccttactgagagaggcaagttgttagttggtatgtctctagggggcttaacgagaacaggctctgaagccaaagttcgcgaatatttagtgtcccaaggagttatcgaacaagtcattttattaccgaaaaacatccattactcgacgtcaattccgacagtgcttcttgtcctcaattcagggttagggaatcaaaacaatagaagcgtcaagtttgtcgatgcttcgttgttttatgagccagctcgaggtcgaaatgttctatcacccgacaacataaatgcgattgttgaggcttgtgaaaatgacggccgatttagtattagcttaccccctcggcagatagcagaaagacaatttaacttagatccttctctttacgtacgaaaagacctcaaagttagcgaagtcactgtaagcaactttaggggatacacaaatttcaaagtgccaatgcacccttctttgaatgtattggttggagaaaatggtgccggtaaaacttcaatattagaagcggtagcgtgcgggcttggtccttttcttaccgctatgcctgatgcaaagggaaagctgataaaaaaatcggatattcatgtcagttcgaacggggttgcgagttatgctcgtatagcgattgagacaacatcaagcttgagctgggatcttgtagcaaaaggggccgggacatcagagccacctaagataggaacggcagcattaactggctatgccagtcagttggttgatagccaatctgagtttccattgatcgcctactatggaacaagtcgcgccctcaccccaacaagttctaaagtagcaataaaccccttcgaaaaagatattcgtggcgaaggttatgactctgctctagatgctaaggtgaactacggcattataaaaaactggttctcgaaaattgaagtagatgagcttcgaaagcgtgatgagctaaaacaacacaagtttatccacccggcaaagagacttgtctctgaagctgtttatcagattgtagagcgagcaacgagcatagaatttgataaaaacagcaatgatgttgtggtgcattggaaaaatgagaaggatgagtgtgtacagcttaccttagagcagctaagcgaaggctatagaaatatggtcgctttaacaatcgacttagtacgacgtgcctatttacttaaccctgccagtaataacccattagcagtgaatgggattgttctaatcgatgaaattgagcttcacctacacccaagatggcagcagaaagttctaaatgatcttacaagcttgtttaagaacgtccaatttattgttactacgcatagtcctcaagtacttaccactgttcatgcagaatcaatccgaattgtttctgccgatgaaagtgaagcaaaactattaacaggaactagtacttatggctctgaaagtacaagaatgttggaagacgtcttgggtggcaatattcgacctcaacacattgatattgtcaaaaagctaaatcgttatacggaattggtagaagctgatcaatgggatacagatgaggcgttagagcttaaaactgttctatatcgatggggtgggcagacagaagctgaacttcaaaaattagaaactgatattcgtattcgtgagtttgagcgagacaatgaaaaccatcaataa

SEQ ID NO: 88475 - DNA, 798 bp, Vibrio vulnificus
atgaaaaccatcaataaaggagcggaaccaaaccgactgggtgtattcagagcagcaaaccctgacgctttgtgggataaagataaaaaagacaatgaattaattggcgaaactttccgctgttgcggtgcaagatatcaggaaacacagcaacaactacggacggaccaaggcaatttatgtgcatattgtgaacaggatttattgtcaggaacaaacggagctctagatgactgccgcatcgagcattttcacccaaaatcgaaacgcgagcagggagagcctaactggggtttagattgggctaacttactagttgtttgctgtggtggaaatcaaagcaaagttgttgagcctgagcagaggttcgatactgatcggaaaaactattcttgtgatgtaccaaaagatgacaaaattctggatacgactatcttcaacccactaaatttacctcaccacaacatttggaagttttctcgaactacgggccaaatggatgtaaatgagagtgcttgtgaagttcaggggctagacactgaaatggcgcgccaaacaattaaagaactaaatttaaattctccacgcttaatgcgggctcgaaaaatgattcttgaagacctcaatagtcgaatcacagaaagagtgggacgtgggctaacgatagaacaggctcgtagttcattagccacatctatacttaggaaaaatcgagcaggagactggccatcgttttttagtgcaatacgctcctatttaggtcgttcggcagaggctgttttaactcagcctctttaa

SEQ ID NO: 88476 - DNA, 1455 bp, Vibrio vulnificus; identical to SEQ ID NO: 88472

SEQ ID NO: 88477 - DNA, 636 bp, Vibrio vulnificus; identical to SEQ ID NO: 88473

SEQ ID NO: 88478 - DNA, 2541 bp, Vibrio vulnificus; identical to SEQ ID NO: 88474

SEQ ID NO: 88479 - DNA, 798 bp, Vibrio vulnificus; identical to SEQ ID NO: 88475

SEQ ID NO: 88480 - DNA, 324 bp, Aphanizomenon flos-aquae 2012/KM1/D3
atgcacattcaaaaagttattatcaaaaacttccgctgcttcgagcatttggaagttaatttagatcccgatatcaatatttttgttggcaataatggatcaggtaaaagtgcgttattagatggtattgctgcggcaatgtatccgtatgtagttcaaattcaacaaattgtaggcaaaaaatatcgagaagcttcacctgtttttcaaagagatttgccagtccaaaaaaaggataatgaacgaagaaatcaggcagagttcactgtatcaactacaggttttccagattggacaattgtttacaaaaaaaccacctgctga

SEQ ID NO: 88481 - DNA, 747 bp, Aphanizomenon flos-aquae 2012/KM1/D3
gtgaaaaaagtgctgaaatccccagaaccagaggaacttaaaaactataaagagcgattttcttctcaatttaaacgatggaatgatttaaaaaagaataaagaaactttaaatgcaattcgtaaaactttagcatctgatcaaaaaggactttgtgcttattgtgaaatgtctattcatgaaaacaatcgctctgttgagcattttatcccctgtagagaatcaacaaaagaaaataatcatgatctagattggcaaaatatgttaggtatctgtcgtcctccaggtggagtagaagatgatcatgagcaaaattcaaaattactgaaatattcccgttgctgtggtcacaaaaaagatggttttatacctgatagtagattattaaatcctctcaatttaccaacattacgtctatttaaattcagtagtaaagatggtgaaattagacctgatgaaaaagcttgtgaagattctggtattcctatagaaaatgttcaatttactattgataccctggaacttaatgttcaaagattaaagaatctacgattagctgtaattgacgaaatagaaaaagaacttgatgatgagacaattgatataaatgatttagaagagaaaattgcagccgaatattttggtaatggtacagacaattggcctccgtttttcacaactcttcgctgggttttaggtgcaggtgcagaacgacatcttattaatatttcttattcagaaaaataa

SEQ ID NO: 88482 - DNA, 1233 bp, Escherichia coli
atgattatcgaaaaactccatctgaaaaatttcaggcatttccccgaagttaacattaattttaacagaggctttaacttcatcagtggacctaatggttgtgggaaaacatcgatcctggcggctatcggacatactctcaacagtaacacagaatattcacgccatggcgaaaactgtgaatactggattgatgtaactgaacagggaaggaaatttcgcccgggaaaaggggctggctccattcgtcccgcaggctacagaaaagacgctctcatctcccacattttacccccaagagagcagggacgtgaatcaattgattactacaatgctagaaacatattgaaactgccgccattgattattggtgcgcagagaaaaataacatataaaaacattacaggaatgaccagggaaacagatgtaacaggtagtcgaaatcattattgtgacaactccctcaaatatctttacaactcagttgaaagaaatattaaacaatggatgattaaccgatattttataatcgataaggactgggctgttgaggaaaaagaaaactgggagcatctcatcaaaacacttcctgaaatagccccattcaacagtaattttaaatacatcagaaccgggcgggatcttgagcctgttttttcgatatatgaaaaagaatgctaccttgaagaactttcttctggttttcaggctattttatacataataataaccatatttgagtggatagaatcctgcatgccggaaggtgaaaggtgtgtaaaaaatgctgaaggtactgtacttattgatgaactggataaccatctgcatccggaatggcagctgaccatccgcaacggtatatcagccttgtttcctcaattgcagtttattgtaacaacgcattctccacaccttctggcctctgcgaataaaaacgaaatcattctgcttcctccgtcttatgaaaaagagaaatataatatctgtccactggataagacatattcagggtggtcgacggatttaatcctgacgggattaatgggggttctcagcctcgacagcaaggagtatgaaaaacttgttgaagcctgttacaaaaacattgaagaaaatgatattgatgaactgaagcgtaattattcacgacttgaatctgtcagtcatccggatgacagtatcctgattgtacttaaaacccggattgcaggtatggaggctatcagatga

SEQ ID NO: 88483 - DNA, 759 bp, Escherichia coli; identical to SEQ ID NO: 86751

SEQ ID NO: 88484 - DNA, 2292 bp, Escherichia coli; identical to SEQ ID NO: 86352

SEQ ID NO: 88485 - DNA, 927 bp, Escherichia coli; identical to SEQ ID NO: 87543

SEQ ID NO: 88486 - DNA, 2316 bp, Pseudomonas sp. SHC52
gtgcaaaagcttgaaaggccggacaagtcgccggcagttctacggtcgagagcagcgcatcaagcgcgacaacagatgcgcgacttttgggcgctcgatcgacaacgccgagctcagactagcgtgccagctattggactcagttcaacagaccaacgtttaattaccgcggttgccggaatgagcctcaaccggtgcgccttttgcgaagcaaaggaactgctttcggttcaccgtttccgtcctgcaggtaacgcactgccactcgctgaaacgagtaacgcacacctttactacctatggctcgctgacgcttggcagaacctattgccaatttgcactagctgcattccgcgtgagacgcagtttccaactgacggtgcccgtgcgccgctgccgtcgcttcgccagatcgatgcctatgtcgaacgagacgatggtctttggccgtcttatcctcccaaagaaaccattctcctcctcgaccctgcgcgagaccgtgacttcgagaaacacctcgttcccaagctcaacggtgagattattggaagctcgcgaaagggcgagactacagtgctcgtattcgatctcaatcgtgccaagcgccgtcaccagcgccaccagacttatcaatcgctaatcgaccgcctcctagtactgctccgggaaggtaaaaagttcaatgactcgcccgattggaagttgatctttgattttccgatgattgagttcggtggaacttggttcttactgttgcgtcgcattgcgaggtggattgcagtttcgaaagtcgtgagatggaaaacctccagcaacctgatccgtgcgttttttttgcggcttgctgacgatggtgacgctatctatcacctcgaggccgctctttccgcaatagcagaggaggatgagggattgcgcgcccgtcgctggtcaatcggcccgatgtatacggcacgcacatctatagcagccgtcgaaatcagcaatttcaaagcgatcgaggggctacaactgaccttgggcgaacctgctgcacggcggggcgatctagttagtgggcgcgcaccatcactggtgattcttggtgaaaatgcgaccggtaaaagttcgatacttgaggctatatcgctggcgcttactacctccgctgctcgcaccgcacttaatgtgccttggacccagttggttcttgacccctcgcaactcggcctcgaacgcgtaaaaacggcgttgcccgctgaagtgcgcgttaagcttacgaacgatcagtcggtgacgttgacgattgaacatggcgcaccgacggtacgcagtgaactaggaaaccaccacgtgccagtatttgcctatggtgcattccgacgcttcctgaccggtacacgcaggcctgcaccccataagcatatccgcaacctcttcgacggcagcacgctttccaatcccgagccttggctcaaagccctgaaacaagatcagttcgacatggtgatccgcaccttgcgtgacctgctatcgatcgagggggagttcgacgtcatacagcgcgagcgcggttcgcgccaactgcgcatggtcacctccctgacagaaccagacggtgaaatacgttacagccgaaccccgctgcatgcagtctcgtcgggatatcgttcaatgctggccatggtgtgcgacatcctgcgcgggctgcttgatccccaagtatacgaagggtttgagagttttcggaatgccaaaggagtcatcctgattgacgaaatcgaggcccacctacatccgcgctggaaagtgcaggtcatgtccagcctgcgtaacgcgcttcctgggatgacattcatcgtcacgacacatgacccgctatgcctacgtggcatgggagaaggtgaagtggtagtgctccaacgtatcgcggccatcgatagcgcgcgtgaaagtcagatgccaattatcgtagagcgcatgatgggactaccgtcagtcgctgatttgcggatcgaacagcttctaacttccgactttttccagatgctctccacagacgatgctgcagccgaccggagtcttgcagggatcgccgatctcattgccgcgcgcgcgcggggcgatgaactgtccttggaagatagccgtattctcgcggattttgagcgagacattgccagtgcgcttccagttgggtctagtgaagtccatcgcatcgtgcaggacactgtcgcggagtatcttcggcgtcgtcgcgacgccagtagcgaaacactccagcggctgcgtgatgatgccagagctgagattctcgctgcgttggaagcgctctga

SEQ ID NO: 88487 - DNA, 966 bp, Pseudomonas sp. SHC52
atgcgtagggtagatcgcggcagtgtagacgttccaaaatcactcttgctcggcggcgcaggcccggcagagttgacaacggtgaaggaacaccacaacgcaccaaatccgccagctaaccaaaatagtggcaaaaagaagagtttcacttttacagcgtacaaaagtgccgatatacgggccgcccttgagaagttgttttacgacaaatgtgcctactgtgagacagtctatgccgcctcagcacctgtcgacatcgaacactatcgcccgaaaggtgccgttgccgaggacgcggcacacggcggctactggtggatcgcgatggattgggacaatttgctaccaagttgtatcgactgtaaccgcaagcgtgggcaggtcttggtcgagccatcttctagccttgccgtactcgctgcgaacgtaaagccggcggtcacccaatcaggcaaaaaggacagtttccctcttgcagttacgggtgtacgcgcaatgggagaggaagcagaactcgaggacgaacaagcactgcttatcaatccgtgctgtgacgacccagcaactagcttgatgtacagttttgacccagcgcatccggctgggctggttgttccgacaggagagctggatcagcaggtacgcggcgcggtttcgatacagatttatggcctcaatcggctaaagctcgtacaggatagaaccagattgctaagacgtcttgagttcctcggcgatctcgttatcgatctcgcatcctcgattactgaacttgaagcgcctgctgtccagagagcattgcaagggacatcagcagagaacgtcgcatcgaggctgcgtctgctgcgtgaccggactttggccgagataaagtcttttaccaaagacgatgccccctattcatctatggcaagcgcttggctcgagcaatttaaagcgcgaattcgccctgttacacccgtctaa

SEQ ID NO: 88488 - DNA, 1320 bp, Desulfosporosinus sp. BICA1-9
atgccgaacaatgagttttatataaaacaaatcacccttaaaaactttagaggatttgatgatagaacctttgaattagcaaaggatttcacagtctttgtgggtgataatggaaagggaaagacatccgttctcgagggaatgtgtgttgctttaggtggctgggttagaggatttatgagtagtgccaaggattttagaaatatttacaaaaacgatgtcagaagtattaaatcggtagtgtctgcaaagggtctcatcaagcaatatcctgtagaggttgcgtgcctcggagaaataaatggcctggagatagaatggtctcgtgaacttgacgaaaaaggccatacaaaaactggtggcttaaaggatttgtcagaagtaacaaaaaagattgccaaaaaagtaaatactgctaatgatattgatgtgatattacctgtcattgcctattatagctgtttacgtgcttcaaaagaccgtgttagtaatacgggaatcgattccacctctagagtgtatggctattcagggagtcttttaaaggaaaccaaatactttaaaatgttgaattacatccaagagctgcgctatgagtatctggaagatccacataatacacagatgtatataatgttgatggatgcattgacgaagatcgtggaaagtgcagcaggtaagggaagcagagtggactttaaagttaagcacggggaactgatgctagaacatatcaatggtgaacttatccagttctctgaacttagtgacggatataaagggatgatttcacttgtcgcagatatcttctttagaatggcaaaattgaatcctcagttgaaacaaaccttacttttggaaacatcgggtgttgttttaattgatgagttggatttgcatttgcatcctaaatggcagagacaagttgtcggtgacttgaagaaaatatttcccaaagtgcaatttgtggcaacaactcactcgccatttataattcagtctttaggtgaaggtgaacttgtaacattggatggtacaaacttagaggactatgtgggtgcgagtatagaagatatatctgaagaggttatgggtattgaaatgccacaatatagtgctcacaaactggaaatgtataagtcggcctttgaatacttttcggcgctcgatggacttaaacaatttgatgaagcaaaactaaaagaccttaaattggacttggacatattatcaaaaaggtatggagacaatgtagcctactatgcttttatcgaacaaaaatattatgccaaaaaagctgagttggaggcaagacgatga

SEQ ID NO: 88489 - DNA, 690 bp, Desulfosporosinus sp. BICA1-9
atgaggccagtgcataaaggagattctccatatctgacgatcaatcactattctgaagcacaggagtttttgctggagagacttggctactattgttcttattgtgaattaccgataaagcatgttcctcatgtggaacatgttgaatgtaaacatagaggcggatctgagacgaactggaataatctccttttagcatgttctcactgcaatagtagtaaaagtactaaaataggcttgggcgaaagggatactcgtatctggcctgatgaacataacactttcctagctttcaaatatgttggagcattgccggaaataaatgaagaatacttaagaactcaagaagcaggccttctaagtaaggccagaagactttatgaaatacttgatctagggtattatccagggattgcaggaagagaacctaaaaaagaccgacgttataaattcaggaatgaagccttaggtatagcggaagagtcactgattacctggaatgaagttaagaatactgtatattgcgaacgtgtgaaacggagtattataaaccttgcaaaggcaattggtttctttactatttggatgaaggtttttaataatgaacctcaaattaaaacaatactgattgatgaatttccagggactgagaaagaatatttcgatgaatatggagaagctgtcggatga

SEQ ID NO: 88490 - DNA, 1344 bp, Desulfosporosinus sp. BICA1-9
atgattttaaaaagtattaccattgaaaactttagaggaattaaacataacacctttgattttgataataagttcaacttaattataggtaataatggaatgggtaaaacatcagtgttggaagcaatagctattggattaggtggatttatagttgggattgatggtataactacaatacatttcacacctgacgatgtcagaagcataggccatttagtaggtgatggttcatacgatattgaatactttacccctaccgtagttagatgtatcgcggattttgcggacgaagaaattgtatggaatagaagcaaaagtagccaaaagaaaacaactagaacggttacaactaaaaatatttccaaatatgctacaacactcacaaaaaacaaaaacaatgtgtttccagttatcagctatcaaagcgcaggaagaatgtggacgcaaaaacgagataaatgggaagatgtatttacagtaaattatatgcgtaatgtaggttacactcattgtttggcttccgagtccaatattagtatgcttaccaactggtgtcagagaatggagcgcatcgcctatcagaaaaaaacagaacttgctgaatatgaatcagtaaaaaaagctgttggtaagtttattggtgttttagaaaacacagatataaatagtaccatcttctatgatgagcggacaggagaacttgtgtatttttccaatggcgaggccttgccacttagattcatgagtgcaggttatcgtagccttattggaatggttgcggatattgcttatagaatggccatactaaatcctgatttaagacgtgacgttacagagaaaacccctggacttgtcttaattgatgaaattgatttacatattcatccgaaatggcaatggaggattgttgaggctctaatgcaaacatttccatatgttcaatttattgcgactacccattctccagttgtcatagcgtcctgtaaggataaaaaaattataagtctatttgactcagatactagtacaccgattattgagctagatactaaatatataaaatctccatacggctggcgagtaaatgatgttttgaatacattcatgggagttgacgaaagatcgccagaagtaaaaccacaacttgaagaaatcaaacagctgtcgtttaagaaaatcaaaaaccaattatcagatgaagaaaataccaaattaaatcaattgaaagatgatgtgtattcaaatcttccccaaaatgatgctgctgttgaattagcggaacttggctcaattgaggacatcctaaaggaacgagggaagagaaatgcacaaagtagatag

SEQ ID NO: 88491 - DNA, 450 bp, Desulfosporosinus sp. BICA1-9
atgtttgaggggcagtgttgtttttgtgaatccccaattggggttcaggtgtttgaaagaatagaacatttaatgcctaaaagtaaatttccacacctatgttttgaatggtgtaatctcaattattcttgcgaagtgtgtaatagcaaaaaatataaaggggataaatgggatgacgaaaatccaattttaaacccaacattcgatgagataaagaattacttagaaatagatatagaaacggcgaaaatactgtctattaataacgatttgagggcaaaaaccacaatcgaacatactggcctaaatagagagggtttgatcgaacgtcgtagagatattgttaataaattaaaggaattgctaagaatagcagtaaaagccggtgctgtagaagattttaaagatattaaaaatcaatgtcaaagagttggggatatccatttttga

SEQ ID NO: 88492 - DNA, 1431 bp, Pseudomonas putida
ttgttcagattgatacatgttctcaaaccctcaaatcaagaatttgttgctccttcgacaggaggcgcaacacctttcaagagcgttattgttggcgggaatgctacaggtaaaacccgtttcatcgtgtcgctgattgaatcattccgcttactctccgaggcaaaagagcagcacggaaaattcagtaccgtaaagaaaaaaggggctatcactgaacaactgcagttcaaatattacatcaacggcgatttagtcgagtgcgtcgctggcgacttcggtgtaggttttaccgtcgacggggaggaaggctctgcttttgatctccccttaccatcacgagtcctggccattagttccaccgtgaatgataaatttccctttgcggattcagacgaggacgatttctaccgctactgtggagtacgcgagacatccaacgcgtcatggacggcaacgctatcacgtcgcacaatcgagaatctcctcaacattcccttgcggcaccatcaccactcgcttgatgagctatttaaatatttaggtatttcacccacaatcgaagtgacctttagccttaaaaaccttcaaaacttccgcgagctagtggccgaccctggtactttgatgttggcagtccaaggctactcaaatcaaagttccagactgcaagtacaaatgtttcgcaacttcagttatgaagatgctgctcgagcgtgtagtggcttggccaacagggaatttaccggtcgtaacaacagcgtcatcatagacctcagcgacaccctagccgattacagcgacctttatttcggaattaacgtatttcgccggattggcatgatttcagatgtcgagctaaatatccaaaagtttaatacaaaaaaatcttttggattcggccactccagttccggggaaacccaactgctgtacacgttctccagcctcatccgccatgcaaaaccaaactgtctaatcttcatcgacgaaccagagcttagcctgcacccgagttggcaaataaaatatgtggcattgcttaagcgcgcactagcctcatttcctggcagtcatgtcatcatcgccacgcactcacacttcatcatatcggatcttgagaaagaaaccagctcacttcacgtattcgagaacaaggacgaacagctgtgcgtcagaaacgttgagtactcaacatacgcctggagtgccgaccatattctgtatgatgtttttgatgtaagaaccgtgggcaacttagctttcgaaagcgatcttgccgaagcgctgaagttaatctcaagcaagccaaaagactgccaccgactggtccagctgaagaagaaatttgaacgcttagtatttaacgaatccgacccactccacagggtcattaaaaatattgcggagattgtcaatgcccatcagtga

SEQ ID NO: 88493 - DNA, 630 bp, Pseudomonas putida
atgcccatcagtgaatggtatttgaacatcaccgaattgccggcattcgatcaggctactgttgactaccttgaggggttgaaaccgcacaaagccgaacagtgggatatcaaaaccaatcgaatgaaggcttataaggccagtcttcttgaacagctactcaaaatccagaacaacaggtgtgtttactgcggcactggtttgatgcgccaactcgtggacagagaacattttgctcacaaggatcaaaaaggcggctggccagagttcatgtttctcacagagaaccttttcgcagcatgcggttactgcaaccgaatgcttaaaggtactaaacccatgatcaaactctataacgaaaactacaaaaaatgtaagttccacctagttcacccttatttcgacaccccctcaaaagaaatagcctttgtcaaaaaaggcggcagcgatgcaatttttgttgagaaaataactaacaaaggaaaaaacacgatcacgttcttcggactcgactccgcagcagcaatcgctaggcgcgcggggtatattacagaaataaaaatttacgagcagctgacggctgagaatgccgctgaagtgaaagaaatttcgcactaccggccgagttag

SEQ ID NO: 88494 - DNA, 1365 bp, Dickeya solani
atgatccatgaacttagccttgccaatgttgggcccgccagcaccatgcatctcacatttggcaatcggctcaacctgttaaccggcgataatggtctgggaaagagttttttactggatattatttggtgggcgctgactcgtcgatggcccgcagaggtgaaccctaaactggttgcgggcaaaaaggcgctgcctgcgttcggcctggcaggtgaagaggcaagtattgctttttcatttgccggtaaggtcaagactgaacgttatgaaagccattacgagagtacctatgcccgacgtgagcagagctggactggccgtgccggtcggccgaccaaccctggactggtgctgtatgcgatggcggatggcagctttgcggtgtgggatccgcaccgtaattactggcgcacgcaggatggcattgatgtgcaggagcgggttccggcctatgtgttaaacccgactgaagtgtgggatggtttgccgggtgacgaacgctcctggctctgtaacgggttgatccgtgatattgccagttggcaaaaagagaaaggcgcggcgttcaaacatcttaatgccgtgctgaaggtgctttccccctcgataaccgaagtgctctcgctgggggaactgacccgcatcagtctggatgacgtacgtgaaataccgaccctcaggatgccttaccaaaaagatgtgcctgtgctccatgcgtcttcgggaatgcggcgtattctggcgctggcttattttttggtatgggcctgggaggaacaccagcgagccgccagtattgtgggggaagacgtcagccctcagattacgttcctgattgatgaagttgagtctcatcttcatcctagttggcagcgcagtattgttcccgctttgctgaaagtgatgggaaagctgaacgccaaagcacaggtgcagttgatcactaccacgcattctccgctggtgatgacctcggtagagccattatttgatggctcacgagatgcatggtttgatctggattttctacatggtgcggtggtgctggagcggcgtgaatttgaaaaacacggtgatgtgaccaactggctgacgagcgaggcgttcgatttaaaaagtggcagaccgctggagtatgagcgactggttgaggacgcggcaaagctgctgaataagtctgatgcatcggaaaaggagctggacgcgatgtatcagcagttgctggcggctctcgatgttaaagatgagttcctgtttcgctggcggtttatccgtggaaaaaaagcaaacccggagcaaaataataagaagataaaaaaaggacgcaaagatgattccggtggtgttacaggcggagcctga

SEQ ID NO: 88495 - DNA, 612 bp, Dickeya solani
atgattccggtggtgttacaggcggagcctgatgattttgatgtcgaggtgcgtcagagagggcataactggttgagtaaaaagggtattgctcttaatgcaccaccgccgaaggcttcggatttaccgaactattggacgcacagcaattattcgctttgggaatcttattgcggtgtctgcgcctatctggcgatttattttgagtgggtgacaggggcatcttctaccgaccatttcgtcgctaaatcccataatgccggtgacgcctatgaatggaacaattatcgcctaagttcattggggccaaatcgcaacaagaatgactttgatgacgtcttggatccaatcagcttgcagccggatacctttgtaattaatttcctgtcgggtgagattagccctaattatgcgttatatcctaacgcttcgccgtatgccacgcaggcagaatcgacaatatcccggcttaggctcgatagtcaggagcatcgacggatgcgtacacgccattttgagaaatatatcaacggggattggtcgcttgatagcctgaaagatgactcccctttcgtgtatgccgagattgtgcgtcaggggctgactcgttaa

SEQ ID NO: 88496 - DNA, 1398 bp, Salmonella enterica subsp. enterica; identical to SEQ ID NO: 86590

SEQ ID NO: 88497 - DNA, 597 bp, Salmonella enterica subsp. enterica; identical to SEQ ID NO: 87603

SEQ ID NO: 88498 - DNA, 1398 bp, Salmonella enterica subsp. enterica; identical to SEQ ID NO: 86590

SEQ ID NO: 88499 - DNA, 597 bp, Salmonella enterica subsp. enterica; identical to SEQ ID NO: 87603

SEQ ID NO: 88500 - DNA, 1410 bp, Salmonella enterica subsp. enterica; identical to SEQ ID NO: 87624

SEQ ID NO: 88501 - DNA, 597 bp, Salmonella enterica subsp. enterica
atgactctgcttctcaatgagcaatatcatctttgctgttacagtgaaatccgtgctgatttgcgtggcctcggctatcacattgaacacgtcgaaaataaaagtcagcagccagggcgaaccttcgattatcaaaatctcgccgccagcgcgttagactctgagaatggtttgccccagcttggcatcaacgcgttcggtggtcatgcacagggaaagaataaatctgtggatatggcaaagtttattcattgccacctccctgactgttctcgttattttgcctatttatctaatgggcatgtggttccttcaatagatttaactgagcaggaagctgagtacgcacagtacaccattgatcatctgaacctgaacagcggattccttcaaacggaacgtcgtaatcattgggaagagctggaacagcttttcgatgaacatattgagaaagtctgggatctgcaacaattactccagcttgatctggttccgacaccagaccataaactgcatgagttcttcagctttacacgccagttctttcagcaagaagcagagcaggtattacaggattacgctcccgaattgatgtaa

SEQ ID NO: 88502 - DNA, 1398 bp, Salmonella enterica subsp. enterica
atgagaatcgacaaactttcactgcttaactttcgttgcttcagacagctcgatattacttttgatgagcacattacgattctggttgcaccgaatggcgcgggcaagacggcagtgctggatgcgatacgcctggcgctgtttccctttattcgtggttttgatgccagcctctacgtaaaagataaatcgctggcgatccgtacagaagatgtacgtctggttttccgccccgaagcgctgaacatggaaatgtcgtctccggccatgattacggctaccggggaatgggaaagtggaaaaacggcaacctggatgctcgacaagcgaggagaacagccgccgcatgaagataagacagcggcgcagcttacccgttggggtgaacaacttcagacgctggtgcgtgaagagcataatttgcagcaggttgaacttcccctaatgctttatctggggactgctcgcttgtggtatcaggaacgttatgaggcacagcctactgaacagcgtctggataacagcgtcttttcacgtttgtctggttatgacgattgcctttctgccacatcaaactataagcaatttgaacaatggtatagctggttatggcttagctaccgtgaacatcaaatcacacaacttgaatcaccttcagcaaagttaaaagaaggtgttcgtgttcagcggatgaaagaagctattcaagccatccagcaaaccattaactgtctgacgcaggaagtgactggctggcacgatctggaatacagctccagccataaccagcaattggtgatgaaccatccacagcacggtaagattcccttatcccagctcagcgacggcctgcgtaatgcggttgcgatggtagcggatatcgcgtttcgctgtgtcaaactcaacccccatttacgcgatgaagccgccttaaaaacacaggggattgtgctgatcgatgaagtcgatatgttcctgcacccagcctggcagcagcaaattatccagtctttgcgcagcgcatttccactaatccagtttattgtcactacccatagcccgcaggttatcagcacggtaaaacgtgaatccattcgtctgcttgagcaggatgagaatggcaacgggaaagcgttgatgccgctcggagcgacctacggcgagccgagtaacgacgtgctacaaagtgtgatgggtgtcgatccgcaacctccgattaaggagaaggctgacctacaaaagctgacggcttgggtagatcaagggaagtacgacgagccagaagcacagcaactgatggctgcattacaggtggcgctgggtgatcaacatccacaactccaacgcttacagcgcagcattgcccggcagaacatgctgaaagggaaagcgcaatga

SEQ ID NO: 88503 - DNA, 597 bp, Salmonella enterica subsp. enterica
atgactctgcttctcaatgagcaatatcacctttgctgttacagcgaaatccgtgctgatttgcgtggcctcggctatcacattgaacacgtcgaaaataaaagtcagcagccagggcgaaccttcgattatcaaaatctcgccgccagcgcgttagactctgagaatggtttgcacctgtttggtatcaacgctttcggcggtcacgcaagaggaaaacaagaggccgtggatatggcaaattttattcattgtcacctccctgactgttctcgttattttgcttacctttctgatggccgaatagtaccggctgatgagctaaatgcccaggaaatggagagggcagagtacaccattgatctactaaatctgaacagcggattccttcaaacggaacgtcgtaatcattgggaagagctggaacagctttttgaggaacatattgaaaaaggctgggatctgcaacaattacttcagcttgagctggtcccttcaccagatcataaactgcatgaattcttcagcattacacgccagtttttccagcaagaagctgaacaggtattacagatccacgccccagcattaatttaa

SEQ ID NO: 88504 - DNA, 1398 bp, Salmonella enterica subsp. enterica; identical to SEQ ID NO: 86590

SEQ ID NO: 88505 - DNA, 597 bp, Salmonella enterica subsp. enterica; identical to SEQ ID NO: 87603

SEQ ID NO: 88506 - DNA, 1398 bp, Salmonella enterica subsp. enterica; identical to SEQ ID NO: 86590

SEQ ID NO: 88507 - DNA, 597 bp, Salmonella enterica subsp. enterica; identical to SEQ ID NO: 87603

SEQ ID NO: 88508 - DNA, 1398 bp, Salmonella enterica subsp. enterica; identical to SEQ ID NO: 86590

SEQ ID NO: 88509 - DNA, 597 bp, Salmonella enterica subsp. enterica; identical to SEQ ID NO: 87603

SEQ ID NO: 88510 - DNA, 1398 bp, Salmonella enterica subsp. enterica; identical to SEQ ID NO: 86590

SEQ ID NO: 88511 - DNA, 597 bp, Salmonella enterica subsp. enterica; identical to SEQ ID NO: 87603

SEQ ID NO: 88512 - DNA, 1398 bp, Salmonella enterica subsp. enterica; identical to SEQ ID NO: 86590

SEQ ID NO: 88513 - DNA, 597 bp, Salmonella enterica subsp. enterica; identical to SEQ ID NO: 87603

SEQ ID NO: 88514 - DNA, 1434 bp, Pectobacterium carotovorum subsp. brasiliense
atgaaattagataaaataacccttaaaaattttcgttgctattcaagtctagagattgatctccaccgagaaatgacagtactcgttgccaacaatgggcaaggtaaaacttcaatactagacgctatccgagtggcactttggccattcgtaagtcagtttgatcttgccaatacgccttataaagatcccgctaataccataacaattgatgatgtaaggattatcaaagcgacaagatctccgagtgctactggatccggagctttagacacaatggtgagaaagcttccttcttcggtttctgcgataggtgattatgggcaaggaaccgttgagtggcagcggtttcgagatagagaagctgctaaatctcaaaccaaagatgataagaactgccgagagctaaaagcttttgcaagaaatctgcaaaggcaagcacgcgagcacgatcaggaaccaattacccttcctgtctttggttactacggaaccggtagactttggaaagaaaaacggctaacggaatttaagcgtggtcagaatggcaatgacgaaaatattcgtactttcgcattacgtgattgcctagacccagcatctagctaccgtcagtttgaagattggtttaccgatgcctacaaaaaagtattggagtatcaaattgctcaattacagcaaggggaaacttttattgaagttgacccaaaacttaaaagccccgttaaggttgttcaaaatgctgttaacgaagttttaaagcccgtaggttggaaaaatctccaatttagccagcgggatgacgagtctttggtgttacgacacgataaatacggggtgatgaaagccgaccgccttagtgatggtattaaaaatatgcttgccatggttgctgatattgcttatcggtccgtgctattgaatggtcatttaggtgaagaagcagctaaaaaatcacctggcgttgtaatgattgatgaggtcgacatgcaccttcatccacaatggcaacaaaccgtgattggttcgttaaagcatgcgtttccaaatgttcaatttattgtgacgactcacagcccgcaagtgctttctacagtttctgctgaatgtattcgagttttaaagcatgatgtggatccggatactggtgaaattatctcaattgccgaacggcaagaaaatcaaacaattggcacatctagtagcgatattcttgtcgactatcaaaaagtaaaccccattcctccagtaaaagaagctagctgggtagttgagtacaccgcattaatagaaacagggatgcatgatagtgaaaaaggaaaagcactacggcaaaagcttattgaggtttatggtcaatctcatcgagttctgttagatgcagacaaacttattcgttttcagatctttaagaaaaaaaataccaagagttga

SEQ ID NO: 88515 - DNA, 687 bp, Pectobacterium carotovorum subsp. brasiliense
atgcacaagctgaatcgcaacattgtagaatcgcccgcacgtctgaatcattatgaccaccaacttcactcatggagtgatttggatagcgaatgcaaaaaacagttacgcgctgctttagtaaagatgcatgggatcccagacgtgactaccgaagatgcgtccgaatacggcgtgcgctgtgcttattgtgagggagccatacatcatgaaggccacattgagcatttccgtcgcaaaaatcagtcacatttccccgagttaacctttgaatggacaaacttgttcttatcctgtggttctcaagaacactgtggccactacaaagatcggcctaaaggtgcagggtataacgctgattgtttaatcaaaccggatattcatgatcctgatacctatcttttcttccactcgtcaggtcaagtagaacctcgatctgggctaggaaatacggatagacaaaaagccaacgagacaatttgtgtttttggcctcgatcgagggacactgcctagtgaaagagctagagcagttaaagcatacaaagacacagtacttaatgaactggatgaaattttgtcttgggagccagagctacgagctgactacattcaaaatgaaattgaagaaactcagtggcaaccatattcaacaacgattaaacactttttatcgagcaacttttaa

SEQ ID NO: 88516 - DNA, 1464 bp, Pectobacterium carotovorum subsp. carotovorum
atgaaaataaagcaattcaagttgcacaatgttgggcgttttgcgtctctggatgcccccattgcgccaacggctgattatccttccaatgtcacggtactggtcggtaacaacggcgcaggcaagacatccattctacaggcactggcaacgtcgctcggttggttagtggcacgaatacgcagtgaaaaaggcaccagcgccaccatcagcgaaagcaccatcactaaccgacagccttctgctgccattgagattgcggttcacggtggcacacagcacctcgaatctggtgaggaaaaagaagcgagttacagttggacgctggcaaaagcccgtagcggccaaaaaggacaacatgtcagccagttgaacgacctttccgcactggcggatcgctaccgaaccgcgttaaccgaaaatgatcaaagcagcctgccgttaatcgctttttatccggttgaacgcagcgtgctggatattccgctgaaaataaaaggcaaacatcggttccaacaattggatggatacgataattcgctcaatcaaggcgtagattttcgtcggtttttcgaatggtttcgtgagcgggaagatattgaaaatgaagatggagaggcgctggcattcttgagaatgatggaggagtcccctgagagggtttcaaggattctcaatgatcttgaaaatgtcccggaaagactcaacaaaatagagacagggagatttaaagagctatctggtgaaataaaaaaactctcagatgcttttcaactgatgagtgaaataaaggacacgtcaaaagatcctcaactgaccgctgttcgatcagctatcgccgcttttatgccagacttttctaacctccgagtgcgtcgtaaaccccacttgtatatgtccgtcgataaaaacggtgaaactttcaacgtactgcaactttctcagggcgaaaagtcactgatggcactggtgggggatatcgcacgtcggttggcaatcatgaacccagcattagataacccgctgcatgggcaaggcgttattctgatcgatgaagtcgatatgcacctgcacccctcgtggcaacgcagcattattgaacggctaaccacgaccttcccacactgccaatttattttgaccacccactcaccgctggtgattagcgacagtaaagacgtgctggtgtattcactggatgacggcaagctcactgaggtgccatcccaatatggtcaggatgccaacagcgtcttactggaagtcatggacacacacatccgcaacgcgcacatcgcctcaaaatttaacgatctgttggatttaatccagcgcaaacagttagcacaagccaaaacgttgttgaacgaactgacagaagagttgccccctactaatttggagctaaccaaagctcgcctattactgcgcaaacaggagttacgcggtgagaagaataactaa

SEQ ID NO: 88517 - DNA, 633 bp, Pectobacterium carotovorum subsp. carotovorum
gtgagaagaataactaaaggcactgaacctgtcagtctgacagcctggaaacgtgccaatcctactggtcgatatgatgatctgataccagtcgctcgtcaggacatccgtgaggcctgtaccaaagagcaatttggcctgtgtgcctactgttgtagaccgataagtggagatcaccaggacacaatgaatgagcatgttcaggctcgcaactctgcaccacagcgcagcctcgacttcaccaacattgtggcgagttgcaaaacaccaaaccagtgcgatgccgcccacggttcacaatctttttcactcacgccattgatggcagcttgtgaaacagaattgcaatttatgatcagcgggcgcgtcaccggcaccacatcacgcgcacaagataccattcgggtgcttaatctcggtgacagtgaaactcataacaaaaaactgattgaaacacgtaagcaagctatcaataccatcttatggatgaatgggattgagcctgatgagggcctggaagatgacgaactgctgcaatccatcattaacgatctctgtacacctaagaatggtctacttgaaccttacgcacctgtgttggttaatatcttgagagggtggttgtcagtatag

SEQ ID NO: 88518 - DNA, 1440 bp, Pectobacterium carotovorum subsp. carotovorum
atgaaaataaagcaagtcaagttgcacaatgtcgggcgttttgcgtctttggatgcccccatcgcgccaacggctgattatccttccaatatcacggtactggtcggtaacaacggcgcaggaaagacatctattctaaaagcaatggcaacgtcgctcggttggttagtggcacgaatacgcagcgaaaaaggcaccagcgccactatcagcgaaaacaccatcactaaccgacagccttccgccgccattgagattacggttcacggtggtgcacagcatccagagcctgatggggaaaaagaagcgagttatagctggacgctagcgaaggcacgtagcggccaaaaagggcagcatgtcagccagttgaatgacctctccgcactgtctgatctttaccgcaccgcgttaactgaaaatgatgaaagcagcctgccgctaatcgcgttttatccggttgaacgcagcgtgctggatattccgctgaaaataaaaggcaagcaccgtttccaacagttggatggatacgataattcgctcaatcaaggcgtagattttcgtcgatttttcgaatggtttcggttacgagaagatattgaaaatgagacgataccatccttgacggataccatttctaatatacttaacagcaaccctgaacaatttattagtcaagcccttgatcctgatgacaataaagatatcgatattaaagcagaagtaacgaagctaaaaaatgtactatccaaattaaaactatctgaaaaatctaataaagatccacagcttgatgctgttcgacatgccatttaccactttatgtcaggcttttctaacctaagagttcgccgtaagcctcggttgcatatgtccgtcgataaaaacggtgaaaccttcaacgtactgcaactttctcagggtgaaaagtcgctgatggcattggtgggggatatagcacgccgtctggcaatgatgaaccccgcattagataacccgctgcatgggcaaggcgttattctgatcgatgaagtagatatgcacctgcacccctcgtggcaacgcagtatcattgaacggctgaccaccaccttcccacactgccagtttattttgaccacccactcaccgctggtgatcagcgacagcaaagatgtgttggtgtacttattggatgacggcaagctcactgaggtgcaatcccaatatggtcaggatgccaacagcgtcttactggatgtaatggatacagatatccgcaatgcgcatatcgccttaaaatttaacgatctgttggatttaatccagcgcaagcagttagcacaagccaaaacgctgttgaaccaactgacagaagagttacctgccactaatttggagctaaccaaagctcgcctattactgcgcaaacaggagttacgcggtgagagaaataactaa

SEQ ID NO: 88519 - DNA, 633 bp, Pectobacterium carotovorum subsp. carotovorum
gtgagagaaataactaaaagcgttgagcctgcctgtctgacagtctggaaacgtgccaatcctactggtcactatgatgacctgacaccagccgttcgtcaggacatccgtgacgcctgtaccaaagagcaatttggcctgtgtgcctactgttgtaaaccgataagtggtggtagccatgacaccatgaatgaacatgttcaggctcataactccgcaccacaactcagcctcgacttcaccaacatcgtggcgagttgcaccacgccaaaccagtgcgatgcagcccacggttcacaatatttttcactcacgccattaatgacagcgtgtgaaacagagttgcaatttatgatcagcgggcgcgtcactggcaccacatctcgtgcacaagaaaccattcgggtgcttaatctcggtgataatgaaactcataacaaaaaactgattgaaatacgcaagcaggctatcaacaccctattattgagggatggaattgatcctgctaaaggcttggaggatgacgagctattgcaatccatcattaacgatctctgtatacctaaggatggcatgcttgaaccctacgcccccgtgttggttaatatcttgagagggtggctgtcagtgtag

SEQ ID NO: 88520 - DNA, 1434 bp, Pectobacterium carotovorum subsp. carotovorum; identical to SEQ ID NO: 88514

SEQ ID NO: 88521 - DNA, 687 bp, Pectobacterium carotovorum subsp. carotovorum; identical to SEQ ID NO: 88515

SEQ ID NO: 88522 - DNA, 1440 bp, Pectobacterium carotovorum subsp. carotovorum
atgaaaataaagcaagtcaagttgcacaatgtcgggcgttttgcgtctctggatgcccccattgcgccaacagctgatcatccttccaatgtcacggtactggtcggcaacaatggcgcaggcaagacatctattttacaggcattggcaacctcactcggctggctagtggcgagaatgcgcagcgaaaaaggcaccagcggtactatcagcgaaagtaccatcacgaaacgacagccttctgctgccattgagattgcggttcacggtggcacacagcatcaaaaatccagtgaggaaaaagaagcaagttacagttggacgctggcaaaaatccgtagcggccaaaaagggcaacatgtcagccagttgaacgacctttccgcgctagcggatcgctaccgcaccgcgttaaccgaaaatgatcaaagcagcctgccgttaattgctttttatccagttgaacgcagcgtgctggatattccgctgaaaataaaaggcaaacaccgttttcaacagttggatgggtacgataactcactcaacaggggcgtagattttcgccggtttttcgaatggtttcggctacgagaagatattgaaaacgagacgaaaccatccttgacggatactatttctaatatactcgacaacaaccctgaacaatttattagtcaagcccttgatcctgacaaaaataaagatatcgatattgaagccgaagtaacgacgctaaagaatgtactatccaaattaaaactatccgaaaaatcgaataaagacccacaacttgatgcagttcggaatgctatctatcactttatgctaggtttttctaacctccgaatacgccgcactcctcggctacatatgtccgtcgataaaaacggtgaaaccttcaacgtactgcaactttctcagggtgaaaaatcgctgatggcgctggtaggggatatcgcacgtcggttagcaatgatgaacccagaattagataacccgctacatgggcaaggcgttattctgatcgatgaagtcgatatgcacctgcatccctcgtggcaacgcagcattattgaacggctaaccaccaccttcccacactgccagtttattttgaccacccactcaccgctggtgatcagcgacagtaaagacgtgctggtgtattcactggatgacggcaagctcactgaggtgccatcccaatatggtcaggatgccaacagcgtcttactcgaagtcatggacacacacatccgcaacgcgcacatcgcctcaaaatttaacgatctgttggatttaatccagcgcaaacagttagcacaagccaaaacgttgttgaacgaactgacagaagagttgccccccactaatttggagctaaccaaagctcgcctattactgcgcaaacaggagttacgcggtgagaagaataactaa

SEQ ID NO: 88523 - DNA, 633 bp, Pectobacterium carotovorum subsp. carotovorum
gtgagaagaataactaaaggcgctgaacctgtcagtctgacagcctggaaacgtgccaatcctactggtcgatatgatgatctgacaccagccgctcgtcaggacatccgtgaggcctgtaccaaagagcaatttggcctgtgtgcctactgttgtagaccgataagtggtgatcaccaggacaccatgaatgaacatgttcaggctcgcaactctgcaccgcagcgtagcctagatttcaccaacattgtggcgagttgcaccacgccaaatcagtgcgatgccgcccaccgttcacaatctttttcactcacgccattgatggcagcttgtgaaacagaattgcaatttatgatcagcgggcgcgtcactggcaccacatcacgcgcacaagataccattcgggtgcttaatctcggtgacagtgaaactcataacaaaaaactgattgaaacacgtaagcaagctatcaataccatcttatggacgaatgggattgagcctgatgaggggctggaagatgacgaactgctgcaatccatcattgacgatctctgtaaacctaagaatggtctacttgaaccttacgcacctgtgttggttaatatcttgagagggtggttgtcagtatag

SEQ ID NO: 88524 - DNA, 1518 bp, Pectobacterium carotovorum subsp. carotovorum
atggatatcattattgtaccccgagagcaacgtattcctgcctcaggcattagtacggcttacctgcatgtggatcgttggaatgacttttcattcattacaatgttttacatgtatctgtttgatcagaacggtgaacggcatgaaattgggaatatcaagattggctttcaaggacaaactactgaaaaatcaacttactccacgttagggagcaagcttagaattctcccagaaggatatttttccgttggtcaggatgtcgactattatcagaaaatttcgaatttaccagaatccgtcaaagtttcgttacttgaggcgctcaaagatatagcttatgcaccagaacttatagatcttgttaaggatgaagaggtttttaaaacgtctttgcttcggtatgttagcttgtctgttattaaaggtcagtttgcgcgagtgcttgagggaaagaatccactgactaattttgagtttaagttcattcgccctgcacaagacaaaatttccgatatcgaattatcatttaaggtgaaagtaggagaaaaaccaagtaccaatattcatgcgatcataggtcgtaatggtgtggggaaaacgacaattctaaacggaatgattgaagctgttaccagtaaaggtacgtcgaatgcaaaattttatgatctggaggggtggagtgatgacccgattgataatgattactttagtagtttagtctctgtgtcatttagcgcattcgatccattcgagccaccaagtgaacagcctgatccatcaaagggaacttgctacttctatataggtttgaaaaaaaaaggagagtcgctgaaagggctaaatgatattcatgaagactttctacaagctttgacgctatgctttagccagattcctaagcgtgaaagatggctgcaggctattgatactttggagtctgatgaaaattttgcaaacatggagctgaaaaatctagcgggatataatggtgagatgctcgttagtaatgcacggaaacgtataaaaagaatgagctccggtcacgcggttgtgttattaacacttacacgtttagtcgcaacggtagaagaaaaaacgttagtgctaattgatgaaccagagagccatcttcatccaccgttgctgtctgcttttattcgtgcgctgtctgatttgctacttgatagaaatggtgtttctattattgcaactcactcacctgtggtacttcaagaagtccctaaacgatgtgtttggaaaatcaatcgttcaagattgtctaccgaatctcgcaggccagacattgaaacatttggtgagaatgtaggaatcttaacaagagaggtatttggtcttgaagttgttaaatccggttttcacgatttattagtccgatcagttaagtcaggtggaacatatgaggagatagtcgatgagtatcgtaaccagcttggtgttgaagcccgagctctattaaaagcgcttgtcacacacagagatcggagtgttaagtga

SEQ ID NO: 88525 - DNA, 858 bp, Pectobacterium carotovorum subsp. carotovorum
atgttgaaacttaaacaacctgcttacacatatgccgatatgctgactagctgccgcgaaggcataactggtaatccgggcttgttgctgaaagtaaatgaagcaataactgatttgcaaacattggcagcttcatacagcgcatcggcattaactggtgaactttatacaatacaaccactgcaaaacaaagatgaggaagaccccattgttgtaggtcggttaaataaatctgactttgttaagctttatggaaattatgttgttgggaagaaaaagcctgctcgaactatttatgatgccctgatgactgctgctaatgaaaaatgcccattttgtggtgggatcgggcgtcctcgaaatttagatcattatttgccgaaagctcactatcctcagttttctatattgcctgttaatcttgtgccagcttgtcgagattgtaatatggatggtaaaggggaagcttttgcaagaaatgaagcagaacagatcatacatccctatttagacgatagccgttattatgatgaacagtggatatcggctagatacttggttggcaagaatgatgagcccggagttattgagtattttgtttctccacctgctgattgggatgatgcacataaacaaagagtggaaaaacattttaacgattttgatttatctttaagatactcgaaagaagctggtgcgaggttagttgtgcttttagctctatataactcagtactgccatttttcggagataaaaatgctgctaaagaccttatatttcaaacaataatcagtaattcgccttttgtgaatcactgggaacgggttatgtgtttggctcttatgtcagacttgtag

SEQ ID NO: 88526 - DNA, 1404 bp, Pectobacterium carotovorum subsp. carotovorum
atgtcgtacattaaaaccataaatttttctgcacatgcaatattcaatacttcagaagtaagactcaaaaacaagagaagaactgagggaagtaatttcattactttaatcattggagaaaatggaacagggaaaagcgaatttctaaaggaaattgttgaatattttagacttcgagagcagtcaaaaggtaaagccattagtaagtttattagaatagacacacccattgataaaaacaccaaatggcccgaaaaattaatagcctcatcatttagtttgaatgataagttcccattcttaaataaagacgcagaagaaaaaaataaaggtttttacagatatcttgggattagaactgcaagcaataatgcttttacaggtaagattagagatgaattatttcattgcatggtgaagattggtgcaaatccatctaggttgagaatttttaaagaaataattaatgactttggtcttccattaaattataaattcgacttttcacaatccagaggtgttgaggaactttttgaaaactctcgccaaaagtcaattgtaactttaagcaccatagtcaaagagatggttgatagtttcaaaatatcaaataggtttgcaccatcaactttaattaaaatgcaagatgacgtaatacttaagaatgatgtcttgagaaaaataaataaaacattcaaagatactgaaaaaaatattagcattaatttcgacctcgatgaaatgctcaaagttggccttccgaaaaatgcacatgaagtagattacgttcttaaatcgagactgataaccttaactgatttctctcccggtggaaatataaagtttcaacatttgagttcagggcagtttcatttattaaagagcatcattacattaatggcagagcttgaagacagctctttaattttaattgatgaaccagaaattagtttacatccgagttggcagataaattatatgtcagtgttaaataaaatgatatctcaatttaataattgccatgttgttgtagctacgcactcacacttaattgttacgacgttacccttgaaaaactctgatgtcattgttgctagaaaaagtaaaattaatgggcagatatttttcagttcactcgatggctcaccatctggatggtccgcagacatgattctatatagtgtttttggcgttttgaataaaaacaatcaatcattcgattatgatgtaaaatttgtagcttcatccatgagcaactggacgcaaacatcagaaaacataaaaaaattacgtgaggcagtattacggctatctcaatacaagcttcccgatgcggatccattaagtaagtttattgttcaatccgagatttttttatcgaaggttgaaaatgagactttataa

SEQ ID NO: 88527 - DNA, 684 bp, Pectobacterium carotovorum subsp. carotovorum
atgagactttataaattcgttaaacctttacaggcgtttatcttgactggaagtgaagtcgcacttgcaaataagtgtaatctattaggtgctaagtcatggaaatctaatgcttctgagttaaacacttttattcgcggtgatataaaagcaagggatgcacttaagaaaaaaatcaaaactactttgaagggataccaagaaaatcactgtttttactgtgggattcatttttcacttttaaaaaatgaaaattcaaatgttcatatagaccacttttatcctaaaggagctgaacatgggaattatgagaagttcgtattcgaaatgaataaccttgtcttatcttgctgtctatgtaatggattaggtgttaaaggagaaaatgattacggaataaacaatagcgagtctattctcagaattggcagcactattatacacccatattttgataatattgatgagcacttctttctaaatgaaaataccggtgtaattgagtttattaatattgataaatccaaagcaattaaaaccgaagaggtttttagattaaattcccccgcgcaaataagggctaggcttggagatattttagttgaacttcatgactcgggaagatctttgagcgaaaggataacggattctattgggctttgtggcagggtggctttaaattga

SEQ ID NO: 88528 - DNA, 1356 bp, Arthrobacter sp. W1
gtgcatattacccgacttgaccttcagtcatatcgacgttttgaacagttctccatcgagcttgacccgaaactgactgtcatcgtagcgcgcaatggtcagggcaagaccacagtcttagaagctgttgttgccgcgttgggaccatttgttggtgcttttgatgagggccgcggtcaccatttgcaacaaagcgacgtgcatcgaaagaccacttcggagcaatggccagcaaatgaaccacaatatcccgtaatagtttcggctgagttggcccgcgatggcgacagtaacattgagtggagccgtcggttgaacagcgggaaaaaaggttctaagacaacggtcaaggaagccgcgccgctggtcagctggggcaaaacacttcagaacgatgtgcgtgagggaataccgattgatcttcccgtcgttgcctactacagttccaaccggctgtggctgagtaatatgaatcgtcgcagtaggtcctcagcaattttaactaagagccggacggctgcctatgaagacgctcttgcgacgtctgtggctagctttttccaactcgaagaatggatgaagaccacttacttagcttcaatgcaagagagcgtgcgcgctgacaggacgaatcgattcgctggctggctcgtaggggtctccaattgcgtcgattacgtgatggctgaagagggctgggccgacttcaaattcaactttgcacttgacgagctttctatggaccatccagatcatggggtcttgcctgtttcaatgcttagtgacggagttagggccatcatttccttggtgggcgaccttgccttaagatgcgttcgtctaaaccctcacttgggggttgatgcgccgaatagaacaaaaggcatcgtgttaatcgacgaagttgacctgcacttgcatccgtcgtggcaacagcgcgttgttcgaactctccgaaatgcttttcctgaagtccaattcatcttgacgactcacagcccgcaggtgatttctaccgtgtccagtaatcaaacgcgtatcgtgcaaagagaccatgatgggcgttggcaagcattcccgcctgacgagcaggtgaagggtctcgaaagctcagtcgccctatctgacgtcatgggcgttagtccggtgccagatattccggaatccaaaatgatccgtgactattcgtacttggtggaaagcggcaaaaaagaatcgggggaaggcctagcgctgcgcaagcaactcgaaggactatatggaccgactcatcgagttttgatcgaagcagatcgccttgatcgttttcaagtactcaaaaccggtcttcgtaaacgccaacggaacaacgggtaa

SEQ ID NO: 88529 - DNA, 717 bp, Arthrobacter sp. W1
atgcatttcttggacagggcttctatcgaaaaaccagaatgtcttggcaactacgtttacccggagcgaaactgggatagtttcggaagttcttgtaaaaagaagctgcgcgcagcgcttgttgaactacaaggtgaaccaggagtgtccaacgcgccaggcgctgaagaatttggagtccggtgtgcctattgcgagagcttcatacatcatgatgggcatatcgaacattttcgccgaaaaaatcctaatcactttcctgagctaactttctcttgggagaatttgtttctcgcgtgtggggcgacaactcactgcgggcacttcaaggatgccccacgctccgagatttatgacccgaatgatctggtcaagccggatgtggaagatcctcgaccgttcttctttttctccgttcaaggttcgatacatgctcgcgacgggctttcagcgtcagaccggcacaaggccgttgaaacgatccgggtttttaacctcgatgatcccaacttggtagcaaaacgtcgcaaagcaatggcctcacttcgcgaaaaatacgatgagctcttgagcgagtttgatgacttgctcgttggggacaaatcagaatccgagatgagagacattgaggcattgatcagtgagtggattcaaggtgaaatccaagcatcgaagtaccaaccattctcatccgcggtgcaggatttgttcgcctga

SEQ ID NO: 88530 - DNA, 981 bp, Halocynthiibacter arcticus
atgaacgagcaaagtgagggcgggcggatattgtgtttgtccgggaccatgcacgacaaatacgctccaagcatatatcgcgctaagtcccggagcgagagagttatctaccttggaaacaaggtaaacaataacatgatatccgatgtggcaccatttcgcacgctcagcacatttcttttgcgaaaattatctgccgaagacggtttggacagcttgtcgaaaaaaactgcgtctacggcattgaataaattgaaatttcaggaccgtataggattgaaatttcgctacagtaaggggcgaaaatcagatattgccgatctggttgagccagagcttttttgcagcctaactgatatacgactggataacatcgaagctattcggggctatatcacgcaccttgatgcaggcgacatcaccctttcggacataaagttcattaaagaaggtgagacctttggcttggcggatttgagctccggagaaaagcaatatgcgctttcgctactcggaatgatctactgtggaaaccctaactgcaccgtctatttcgacgagccggaaaactcgctgcacccctcatggcagatgagtattgtaaaggatttggtcgaaatctcagatcacctatttccaaattcgacaattattgtagcaacccactcacccttgatcaccagtagtgtccgcggggcaaaagtgtttacctgtaactttccggctgaacaattgtggggcaagtcggatctatttggaaagccaagtgattcggttttgagagatcaatttaatctttactcatcaagatctccagaagtgtataagtgtatcaatcgatgcctggatctaatagcccgaaaccagacaaccaccctcgagttcgaagaagagcgagaccttcttagatccttcgatctccagcctaatgaagatgacccccttcatgacgtgatacaaacaattttgggaataccgtaa

SEQ ID NO: 88531 - DNA, 678 bp, Halocynthiibacter arcticus
atggccaaaattaggccagttgcgaggtacgcactaaagaggcaaaaatataagggttgtatttcgaagctcctatccggggattgtgaatggggtgataaggacctgaaacctctcaaagacgaaattaggaagctactcagagttgagcaaaatgaggtatgcccttattgtcaaagaattataattccggagcgtcgaaacttaaatgaacacattgagcatgttcttgataagtccaaggcgaagtacaagaagttttcgctcacggcttcaaatttgattctggcgtgccacggctgtaacgtagaaaagggacaaaaggaccttcttaactctggaacgccagcccctatatatttgcgccttattgacctgccatttatctggccgcatccatgtgtcgatgacatggttaggtgcgttcataaagctccaggtcccgtctactcgccaattgaaggatcaggcaaagaagccgaagcagagcgtatgataaaggatctaaagctcaacgacacgcgaaacatcgaaagtcggtacggcagactcgtagaaagaagagacaggataatgactttactcgggcgacttgccagaattaacgatgagaaaagtcgacggcgcatggctcctttaattttagaaaatgagaaagttgctgctgcactaaattga

SEQ ID NO: 88532 - DNA, 1182 bp, Flavobacterium sp. JRM
atgcttagaataaagaacattactataaaaaatattggtccaattaaaaatttaaacttgaattttgatgatcattttaatattatttgcgggcaaaatggtattggaaaaacaacaattcttgattgtttggcacaatcgtttggaagttgggggatctcactaaaaaaaacagccaatactatagctggcaattgggaaatttcaatattatcaaacggaaatgttataaataataatattaaagttgattcattccatcctcatgaaagttcatcacttgtaggatctatttttcaaagcctatcgaatggagtaattgtctttaaaacacatcgagacatccaatatcaaagtttaaattctgtaaataccgatcctgtaaaagacatatcatctttttcccaagaaacaataggtggttcgttatctcatgatttaaaaagttggttcgttcatagacatctttggtctgcacatctaaatcatctaagtgagaatcaaataaaaaatataaatctagccaaagaatgctttcaaattcttaatccaaatatctcatttgaccaagttaatccaactacaaatgacattttacttaaaacaccaagtggtgaaatatatttcgaatatttatcttccggatataaatcttgtatttccatattaattggattgataaaagaagtcgagttcagatataaaaatccaagtaaatttgtaaaagatttcgatggcatagtatttattgatgaaatagatctgcatttacatcctgaatggcaggcaaaaatatatgaagcgttaaaaattattcttccaaaagcgcaaattttcacttccactcacagtccacatattatacaagttgcaaaaccaaatgaaataattcccttaatcttagatagtttagatgaagtaaggcttaacgaaattataaataaagattatggttgccaaggttggactgttgaagaaattttgagtgatattatgggtatgaatgagactagaacagattcatatttaaatgctatttcaaacttcaatactgcaatagataatgaagataccgaaactgctactcatcaatttaatattcttgacaaaatgttacatccagaaaattcattaaaaaaaatattaaaaatccaattaacaggaattgcagaaaatgattaa

SEQ ID NO: 88533 - DNA, 753 bp, Flavobacterium sp. JRM
atgattaaattagaaagaacttcaaaacctgtagaattgactgtagaattacagactcaactcacaaatgaatttaaactaacagctaaatcggtttggaataaagactttattaaaaataatttattgaaattttctcataataaatgttgttattgtgaaatgaatataaaagaagaaagtaaatatttagaagtagaacattttcatcataaaaatttttataaagatgaagtattagaatgggaaaatttacttccttcatgtaaaaaatgcaatgctactaaaaatgaccacgatacagttaaagaaccaattatagatccttcaaaaattgatcctaaaaaacatttaaaatattggcgttatcgaataaaaggctatgatgatattggaaaattaaccgtatctgtattaaaccttaatgatcaggatagattagtaaagatgagattcgaaataggaaatgcaattcaaataaaactagaactattcaatgaattactaactgattatatcaatggtattaaaacaacaacacaaaggaaaaataggatcgttaacggggtaaaagatttaatgaaagaaggtcttcctaattcagtttattcagctacaacagcaacgataatagtaaccgatacagaatttagcatcttaaaggctaatttaattttagttaatctttgggatgatgaactatcaaaattagaatcaactttaaacaattatgctctagacttggaaagataa

SEQ ID NO: 88534 - DNA, 1437 bp, Dickeya zeae EC1
atgaaaataaagcaattccggttgcacaatgtcgggcgctttacctctctcgacgctctcatcgcgccaacggctgattatccttccaatgtaacggtgctggtcggcaataacggtgccgggaaaacttccattttgcaggcgttggcgacctcgctcagttggctggtagcgcgggtgcgtagtgaaaaaggcagcggtagcgttattagcgaagacaccattaccaacggccatgcttccgccgcgattgaggtcatggtgcagaatacgccactctccggtaacgctgctgacaacgacgctgaatatcattggacactggcaaaagcccacagtggcaaaaaaggacagcacgccagccagttgaatgcactttccacacttgccgatcgctaccgtattgccttgacgcaagatgaacaaagcagtctgccgttaatcgccttttatccggtcgaacgcagcgtgctggatattccactgaagataagaaataaacaccattttcaacaaatcgatgggtatgacaacgcgctcaatcagggtgtagatttccgacgttttttcgaatggtttcgtgagcgggaagatattgaaaacgaggcaacaccatccctggtcgatgttctttccaatatactcgacaacaatccagaacaatttattacccaaactctcgaccctgagaaaaataaaaatgtcgatgtcaaagacgaaatagctaaattaaaaacagcgttatcagaattaaagcaatccgaaaaatcgaataaagatccacagcttgatgccgtgcgacacgccatttactgttttatgccaggtttttctaatttaagagtacgccgcaaacctcgcctgcatatgtcgatcagcaaagagggaaagccgtttaacgtgctgcaactgtcgcaaggcgaaaaatcactgatggcgctggtaggcgacattgcgcgccgtctggcgataatgaatccagcattggataacccgctgcacgggcagggtatcgtgctgattgatgaagtggatatgcacctgcacccgtcgtggcagcgcagcattatcgaacggctcaccaccaccttcccaaactgtcagtttattttgaccacccactcgccgctggtgatcagcgattgcaaggacgtgttagtgtactcactggataacggcgaactggcaatcgtgccatcccaatacggtcaggatgccaacagcgtcttacttgaagtgatggatacgcatattcgtaatgcaataatcacggaaaaattgggtgacctgctggacatgattcaacaccatcaattaacacaagccaaaacgttgctggaagaactgacggaagagttgcccgccaccaatctggaactgaccaaagcccgcttattactgcgcaaacaggagttacgcggtgagaaaaatcactaa

SEQ ID NO: 88535 - DNA, 633 bp, Dickeya zeae EC1
gtgagaaaaatcactaaaggtacggagcctgccagtctgacagcctggaaacgcgccaaccccaacggccgctatgacaagttgaccgaaaccgaacggcaggacatccgcgatgcctgtgccaaagagcagttttacctgtgtgcctactgctgcaaaccgatcagcggtgataacagcgacaccatgaatgagcatgtgcaggcacgaaaattagcgcctcgccgtagcctcgatttcactaacatcgtcgccagttgtaccacgaagaaccagtgcgacgctgcccacggttcacaaccgttttcacttaccccactcatggcggaatgcgaaaccgaattgcaatttatgattagcgggcgtgtcgaaggcaagacagaacgtgctcaggaggccatcaaggtactaaaccttggtgataagaaagggaataacaaaccgctgattgaggcacgcaaaaaatttatcgatagcctgttactgactaacggtatcgatcctaatgaaggtctggaggacgacgatctgctacgagcagttattaatgacttcagttccccgcaaaacggcaggcttgaaccttacgcaccggtgctggttaatatcctgaaaagctggctgtcggcataa

SEQ ID NO: 88536 - DNA, 1338 bp, Xanthomonas citri subsp. citri A306; identical to SEQ ID NO: 85890

SEQ ID NO: 88537 - DNA, 384 bp, Xanthomonas citri subsp. citri A306
atgggctctcccgtcgaacacatcgcccctaaggcgatgtacctcggatacatgtttgagcctctcaacctgtgcgtctgctgtcctgactgtaatgagtacaagagcaacagagaggttcatgttgatcctcccattaagggttacttgcctgtcgcttatccgaatgatccagaaaagtttagaatcgtgcatccgcactttgatgagtactcacagcacattagacgagcgggaatcctctatataccgttgagcgagaaaggcagttacaccttctatgtctgccatctcggccgctatctgagcgagctaggtatgaccgaagagctatttaacgacttgaatgccgttatgcagcgccaccggttccatgagggatag

SEQ ID NO: 88538 - DNA, 1245 bp, Hassallia byssoidea VB512170
atgttaaaagaacttcacctccagcaagttggtcctgctgcccattttgatgttgcatttaccaacaggctcaatatatttacgggtgataatggtttaggtaaaagttttttactcgatatcgcttggtggatgatgactacaaattgggcagagcaaccagcgtacccacagcaagttagaggtgaaaatccacaaattacaggcgtagttagcactaaaaaaaatataagagaatatcagagttactttgatttttatgaacaacaatggcgtagtttacaaatgcctcctttattaaaagaggtagttatttatgtgcgggttgatggtagtttttctgtttttgacccggctcgccaacgcgatattgcttataattttaatccaaatacactttggaatggattaaagtcaaaaaataaagttctttgtaatggtctaattcaagattgggtaacatggcaaaatcaaccaaataaatatccatttaaactattttctcatgtcattaaaaaacttgcacctcacccctcagaatggatagaagtgggagaaccaacgcgagtttctattgaagacgtgcgcgatattcctacagttaatctgccttatgggaatgttcctgtcactcaaacatcagccggaatgaagcgtattctgggactagcttatttactagtttggacttggtacgaacataaaaaagcttcggaattacggcaacaaaagccagtaaatcagataattttactaattgatgaaattgaatctcatttacatcctcgttggcagagagtgattttaccagctattttagctgtagtgaaagaattacaacccaggatgaagatacaggctttagtaactactcattctccacttgttcttgcttccttagagccaaattttaatgagcaagaagataaactatttttatttaaattacaaaatagagaggttagccttgacgaagtaccttggtcaaaacaaggggatacagttggatggttaacctcagaaatttttggtctcaaacaagcccgttccaaagaagcagaaattgcaattgaagcagcagaggcttggatgcgtgatgatgatatgaatgcgtttccagaaaatctgagaataccaacacaaatccagaccgaacttcaaagagttttaccaggacatgacccattttggccccgttggatagttacaacggagaaaagaaattctgggttatcagaggtataa

SEQ ID NO: 88539 - DNA, 588 bp, Hassallia byssoidea VB512170
atgatgccatttaatcctcctccagaaccgcctgattttaataaaaaagtgcgacaaccaggaaatacttggttgagaaaaaatccagatcccaaaaaaggaaccagagattattggtcgcctttcaaaagttatttagctgatggatttaataatctttgtggctatagcgttatgtacgaaccagttggtacggtagagcattatcgcagccgtgaaaattatcgcaatctcgcttacgaatggagtaatttacgctttgcttctgcttggattaatagtagtaaaggtacacttgacgaccagatacttgatccttttgatttgggagaagattggtttgaaattttacttccttccctacaattagtattaacagataaagttcctccgcaacaacgtcaaaaggcagaatttactttgaaacggttgcggttacgggatgatgaaagagtcttgcgtcagcgtcaacaatggtatcaactttatttggatggggatttgactttacaaggattagaaaaaaaagctcctttgatagcgcgtgcgataaagaaacagcagcaggctatttctcaacaagaataa

SEQ ID NO: 88540 - DNA, 1356 bp, Vibrio owensii CAIM 1854 = LMG 25443
atgatagaaaaaattactatccataattttaagttgttctctgatgaaacttttactttgaacccacaattcaatttaattgtgggagtcaatggtagtgggaaaagctctctcttaaaagctctcgccgtgtctttagccggttgggctcatgcgtatattaaaagtgaatcaaacttaagaccaattgagcgctcagaaattcgagagattcaacgccaaggaagattcgatctatctaaggaaactagcattgaggtgtatggtgagtttccaatcgttgatagaaatctagaatctaaaagaggatatgtccaatggaaacgctttcgacaggaaggcgatactaaaacatatctatcgggtaatattagatatttaaatacatggtctggtgaatactacccaactgaatataatttaattttatctaaccttggacatgacgtcttaaaatatattgaatctggcgaacagtttgatttgccattgattgcattttatgagtgtgatcgattatggatatccaaaaatcaagctaacattgaaagtgcggcacgaaaacagcattctcgctttgatccttatttggattgttttcacactgggactgatagcaatgctattgaagaatggttgctaaaactagagctgagtgaattacaaaagaaaaatgtgaatcctgttaagaaagcgatcgaaatagcggcaatgtctgcgttagaagattgtattgggtttcgctttgatcttgaagaatctagggtaatggttgagtttaaagaaaacttgactataccatttgagcatttaagtgatggtcaaagaacaatattaagccttttttgtgatatagcgcgaagagctgcgattctaaaccctcatctagatggtgaagccataaaaatggtagaaggcgtcgtattaatagatgagatcgatttacacttacaccctaaatggcaaagaaaaatcgttgaaagcttgcgtaacacttttcctaatattcaatttgtatgtacaactcattctccatttattatacagtctatccgttctagtgaagagataatcatgatgacgggagagccactattaaactatgcaaataaaagtgtagaagagatttcaaaaaatatgggggtagaaagacctgatgtatcgatcaaatatgaagaaatgaaagaaattgctaaatcctttatggaagaattggaagaactggattgtacagatagagaaaaacaggaagaatttaagaagcgcttagcctctgctgtagcaccatatgcagacaaccctgcttatcaagcatttctagaattacaaatgctatcaaagtttggagagaaataa

SEQ ID NO: 88541 - DNA, 783 bp, Vibrio owensii CAIM 1854 = LMG 25443
atgaggccatttagaagaaatagttctccatttgatagtgatctcaaacattatgaagatgcgaaaacagaattaatctctaggataagcagaggtgaatttgctagcaagcatgtgacatcgtattgtagttattgcgagagatcgatacctactaacttagcagtggaacatatacagcctaagaaaggaagttatgcaaaaccagaacttcagggtagatggtctaactttcttctagcttgtgtgaactgtaactcttcaaaaggcagtagaggagtgttttttgattacttcttttttcctgatcgagataatacatttaacgcttttaagtactcatctgatggttctataactgttaattcaagtaatcatcttgctattcaaggcgtagctaaaaatactctctggttaactggattggataaaactgtaaggaatacgtatgactctgaaggtaagataatagcacaagatagaataagtcaaagagcagaggtatggggtatcgctgaaaaccacttagaaatttatactaaaaataaaggtaatgctggaataaaagaattaatcgtttcttcaatgttaggtcacggttattttagtgtttggatgacagtttttaaagactgtcccgaaatgaaaaactcatttattgattcaatctcaggaacaagagaaagcggttgttttgatcagcatggagattctagcttccgacatagcaataaagataaactttctgacagtaagtttaagttctactctgataaaatttaa

SEQ ID NO: 88542 - DNA, 1230 bp, Vibrio owensii CAIM 1854 = LMG 25443
atgattgaatcaatagatttcaaattgattggtactagtgataagtacgttaccattaacttaaacggaaaaaacctcataatcacaggtggaaacggctgcggcaagactcgttttctacgtcagttagatcaatacctaaagcaattctttaataggaaaatacagtctaaagaagccactcaacaacaattgaacaattaccaaacacagttagatcgcattggcgtatcggaccaaaattacaatttctacgctaacaaagttcagttattcaaagggcagttagaacgtatatctaacgaaaacatggatatcagtgattctgatgctctgttcgaattggttaacaaaaatcaatttatccttcgttttttcgaagcgaatcgacttgcaagtaacattgctggaaatggtcaaattgaaagcatatctaacgtgaagcaggctggtaaatcccaaggtttcgaagaggattcaagtaatcagttcgaaaaatatctagtcagttattacaactatggttcgcatgtaattgctcgtgaaaataatccagagaaagagcaacagataaacgaatggtttgaaaaagtacaaaatgatctccgtaacctgtttgaagataatgaactaattcttcaatataaccctgaggaacaagccttctacattcaccaagaaggaaaggagccatatcgatttaataacttgtcttctggctacagttcaattctaagcatttacgccgatttactgatgaaagtcgagttgcgtgatataccagcggaagatatcactggtttcgttttaattgatgaaattgatgcgcatctgcatgtttcgattcaacgaaaaatcttttctttctttgacaaggctttcccaaagattcagttcattgtaactacgcattcaccttttgttgttcagtcggtaaatgactcaataatttatgatctaagtaaacttgaaacactggaagacctttctatgtactcatatgagtcgattttaaaaggactactaggtgttgaaagtacttccgatatattaaacaaacaattggatgagatggctgaaatcattaatcaagagccagtaaatacggaacgattacaggaactaattgacggaatagagccgcatgaggggcagttaaacgctcgttcacgtgcattccttttactaggtaagaatgctcttttagattcgaccgatggtgaggggtaa

SEQ ID NO: 88543 - DNA, 666 bp, Vibrio owensii CAIM 1854 = LMG 25443
atgttcaatgttgttcgaacataccctacaccagatagcatcactaagaatcaatacaatgaagtggatgttctcaagaaattaaagcctatgttcttcgagaagtgctacctgtgtgaacgagatgagatccaagatgtagaagtggaacatttcattccgcacaaaaaagttcccgaattgaaatacaactgggagaacttgtactactcatgctctcgatgcaatagcatcaaaagcagtacgcatatcaatcttttagattgtgctaatcgtttttacgatgttggtgcaatggttaaatgcttgatgccttctacacctgatggagatgttgaagtttcggcaaccagtgcaaaaccatgcacccaaacagaaaacacggtgacattactagaggcttgctacaacctagagaatacggctttaagaggtattagccgtactgctctgatggatcaaatgtgggagtattataccaagttgctattagcaaggcaggtgctccgtaacaagagttcaggacgaacagcaaagcaagaagcagaagaaactttcgaagcaatgcttaatgtaaaacatccattctctatattttggcgatactactacttgaacgattcttaccttgtggataatcatcctcagttaagagttgggttttaa

SEQ ID NO: 88544 - DNA, 1302 bp, Azotobacter chroococcum NCIMB 8003
atgctgaacagcctcatgctcgaaggcgtcggtcccgccgagcggctggacatcgagttcaaacctcgcctgaacttcctgaccggcgacaacggtctgggcaagagcttcgtgctggatatcgcctggtggtcgctgacccgtacctgggcgcgaggcgtgatggcggctccgcgtcttgatgccaagcagtcaagcattgattactgctacaccggcagtgccggcccgtttgcctataaaagccggttcgaccatcaatcccagcaatggtcggtcaagcaaggtcgtccggccgttccgggcgtggtcatctatgccggcgtggatggcagcttctcggtctgggatccggcgcgaaactactggaaggccgaaaaggaagacacagcctccccgagtcggccgcgcagcttcgacttcactccggacgaggtctggaatggcttgctttccagcgatggcaagacccagttgtgcaacgggctgatccacgactgggtgttgtggcaagagggcggcaagcctgctttcgacgatctggtgaaggtactggatgccttgtcgccctctggcgtggagaagctacgtccaggccagcccatgcgagtaggcgacagcgtcaaggaacagccgtcgctgcacatgccttacggccaggatgtcccgctgctccatgcttcggctggcatgcgccgtatcacggcattggcctatctgctggtctggacctggcgcgagcatcaactggcccatgagcgctaccgtgtcccgcaagctcgggaaatcattttcctgatcgacgaaatcgagtgccacctgcatccgcaatggcagcgccgtatcgtgccagccctgctcaatgtcatgaatgcgctgaccgggactcgggatgttccggtgcaactgctggctgctacccactcgccgctggtactgacctcagtcgagccggagtttgatcgtgagcgtgactgcatctgggacttcgatctgatcgatggtgaggtacaggcggcgctttacccctattcgcgcaagggggatgtgaatgcctggctgtcttccgaggtgttcaatctgaaagaacccagctctgtgcccgccgaagaggcgctggagcaggcccgtgccttcctgcgagaagtcgcagcgactcagcagccgctgacgactgaacagaaacagaagctgcaagacatcgacgaaaagctgcgtgccagtctgagcgatgtggatgccttctggattcgctggagccagtttcgcgagcaacaggtaggacaggcatgctcagggtag

SEQ ID NO: 88545 - DNA, 711 bp, Azotobacter chroococcum NCIMB 8003
atgctcagggtagagatggccgctgaacccgtggatttcgataccaaggtcaggaaacccggcctgcgggccattgccgagctggcgggcgaagccgatttgcccaaacgccgcggtcgcccccgaaacgcggtagcggcagcgcgagagcagatccccgccgacaagtttccggccatctggaccaaggccctgcccgaattgctggatgcctacggcagggtttgtgcctatatgagcatctacatcgaacctgtgacaggtgcggcctcggtggatcacatgctgcccaagtctctcgactggcgcgaagtctacgagtggcgtaactaccggctggcctgctcattgatgaacagccgcaagaatgcctatcaggatgtgctggatcctttcgagatcgaggatgactggttccgcctggaactggtcggctaccaagttatccccggcgcgaaccttgacccggaaatccatggccatgtcgaggccaccatcgagcgcctgaagctcaacggccacgattgcctgcaactgcgcgaggactatgccatggcttttttccagggcgatatcagcctggactatttacgccggcgagctccgttcctggccagggaaattgaagcgcgacagcggctggctgttctgtccgagctggctgccatggatcaggaactggggttgggctacgaagtaaacaaggattga

SEQ ID NO: 88546 - DNA, 1239 bp, Hafnia alvei
atgagtaattttataaaatctattaatcaactttcattcatgaaaaagcgtgatattgttatcaatggaaaaaatttaattttagtaggagacaatggagcggggaaaacaaagttcttaactgcgctacactcttatttaatacaggtttttaatcagagtatttctactacattagagcagttgacgaaagataaagctatgtttgagaatcaactaaaaaacataaccgagggttctaatgattatcaatcaatgattggtactattgaatattatgattcattgataagagatagagagaattttgatgtgatattttgtaactctggtgaattcttcaatgaagtaaaaaggaaaaatgtatttttgcgtttcttccaagcacatcgccgctatgaaagcaatgatttaaatttattgacaagcgtagatgcattgtttgaagagtttaaagcaaatacacttaataatgctaatgttcagaccagtagttactttgaaaaatatcttgtttcgatgtcaaattatgccttgatcgaaaagggggccggtggtgttgaggaatttgaacgtgtagtaaaagttattggtaaagttgaaagtgacctccgagaattgtttgaagatttcagtttgaaattatcttataacagaaaaaaattgcggatggagattgaacaaaactataaagagccctttggtttgaataccctgccatcaggctttgcttctatattagctgtttatgctgaactaatcatgctatcagaacttagtggtaaaggtaagggtaatatagaggggattgttttaatagacgagattgatgctcatttacatgtgactgtacaaaagaaagtgttcgagtttttttctaaaagctttccgtgcgtccaatttattatatccacccattcaccttttgttgttcaatcagtttctgatgcaattatttacaatcttagtaatggagagagattggaggatttatctgtatactcatatacgtcgattgtcaaagggttactaggtgaatcgggaaattcagcagaattagagaaaacattacaagaactagatagtctatctaaagataatgattttggctctcgttttaatgaaatacttctttccttggagcaaaactttatagttttagattcacgcgctcaagcgatagttatgggggcaaagtcgcggcagatagattgggaggaggctcagggaaatgtttaa

SEQ ID NO: 88547 - DNA, 675 bp, Hafnia alvei
atgtttaatgttcaacgttcaatacctgaacctctaagcttggcgctccagacaagttataaaggtcaagatgttattgatgcattaagagctatatttcatgataaatgttacctatgtgagcaagactccatctcctctccagaagtagagcattttgtaccacataataaaacagccgcattaaaatttggatggaataatcttttctactcctgtagaagatgtaatagcataaaaagtaacacccatacaaacttgttggatggaagcaattcgcaattagatgtgtttagtgaaataattcattatgctggaaatgcagcaatgggtgaagttgtaattaaagctagcagtgctaatccttctccggaaactgttaactcagttaatttgattagcaaatgcttcaacgatgaaaacactagtttaagaggcatttcgaaggagagtttgttagagattctgttagaggactatactaaattcctcattcatagaaatgttttggcgtaccgaggaagtactcaaagagaaattcaggccgcgaaagaaaagttatcggtgatgtgccaggttcaacatcgcttttcagttttttggaagtggcacattattaatgatgttacagttaatagaaaattcccagcaataagggttgaattggatttttaa

SEQ ID NO: 88548 - DNA, 1326 bp, Hafnia alvei
atgcgtcaacaataccgattagaaagcataacactgcgcgatgttggcgtgtttgagcatacccgttttgattttccacagatcaaaaacgaagaaaaagatgcagagaaagcggaaatccatattttcaccggcccaaatggctgtgggaaaagtactctgctgtatgcgttggcggcggtgtttgaaggacactttactgggcaatctcccattgttaagcgatttcgttcatctcagggcaggataaattatctgttcaatgaggagcaaggttcttatattggcagacactttgatgaggattttgtcggtaccgattacagtgtctggattggctccaatcatgaagtaataaaggaaaggcatcactcaatccggaattttacatctgataagatgataacatttccgttttctgtatttgcatactccggctatcagcatagtcatgttcaaaataaaatagatatttcacaagatattaaattatcaccatttgaaaattctttatcttttttcaatcctgtaaatacggaggggtttttaaattgggtcgcaagaaatcgaatgaagagcgttctttcatcaattaatgacgcttctaatgttgcacttttatatgatggtgccatcactaaagtgagggggtttttaaaagacatttgcgatttagatattgattttaaactacaggttcaatctttagatattgaaatgcttattggggatgagcaagttagttttgaggttcttcctgatggactgaagtctattataagttgggttgccgatttagctcgcaggctggacgcgattccttggcaagaaaatcgcgatatcttttcccagcctattatcttattcctcgacgaagtcgatattcatctgcaccctaaatggcagcgccgaattcttcctgccattcaaaaactgctacccaatgctcaagtgtttgtctcaactcactcaccttttgtagtgggctccgttgaggatgcctttgtttaccgcctgccagatcctcagagaacggtatgtagagatcctgcatcggcagaggtgataacgccaacgccgtctgctgcaggtaaaagctatcagctgattttagatgaagtgtttggcattgaagagcaatttgacgttgaaactgaagcgttgcttgaaaaattctatcagctaaaaaaggcttatttatccaatccacaagatgatagccagctcgttgcattggcggcagaattaagcagcaaaggctctgaagttgcaactattgtgagcatggagctgcgtcaaataacgcggttggtgaataaaggttaa

SEQ ID NO: 88549 - DNA, 600 bp, Hafnia alvei
atgtataagtttatccgcagtgagtgccctgagtacttagccttatgttgggagtcactcactgctcaacaccgtcaagccaaagaaaataaccctaaacataagtttgattggtatgcgggttttaaatatggcacgacactagacatactattcacaatgaatgtcggtcattgtgcgttttgtgacggtggcggaattggcgaacaaagccgtaagaccattgaacattttaagcctaaaagccttttcccagatttagcctataaatgggaaaacctttacccttgttgcgatcaatgccaaagccaaaaacgcgagcggtttgatcctgacttgctcattgccgacgatatcgcttatcaatttgatggctacttcatgctcgattaccgcactggcgctattgagccctccgcggcagttgattcaaatcatcagagacgtgcacaggtcaccattgagcactacgggctaaacttaccagaaaggaaaagagggcgattgcgagaactgcaacactatcaacgccgagacaaggacgtaagccaacttgatgattttagctatcgttactttttgcaggattacactgattaa

SEQ ID NO: 88550 - DNA, 1905 bp, Pseudomonas batumici
ttgcctaccgagctgcagcttgaaacctatgtactggagaacctgggcacatggcccggctatccgctcaaggagcggcatgtcctgctcgatccctgcgagcgaatcaatattgctgatcacctgtctgtcgatctttcgggcgagctgtctgcactgacagagcgtggacgtgaaacgattactcatttcaagctcaatcgcggtcagttgctcaagcagcgtgcgagcaagctcaaggtgtatttcgatgaactgatcgacgagcagctttctcggtcggaggaggacaagctgttcccgccggtccttgattttgccgcgatggagtttggcggtctctggtacctgctgtgccgtcgcatagtgttggagctttcaccggctcgagtgccgccgctggcactttcgcctggtcgcattggtgcgacgctgcgcacgattgtccgaaacctgagttttcaagactggtgtggagggcttgaagccaggctggcacttgcggatgtgcaaaggctcgtccaggcgccagagccgccgtcggccttgcctcgggagtactcgccactggcctcggttcacttgaacaatttcaagggaatcgagcaactcgaactgctgatgccatccgcgcaggaggctccaacgccgaacgtgaggccggctcaaccggccttgctggtcctgggtgaaaatgccgccggcaagagctccatcctcgaagccacggccctggcgctgtgctccgaagaggcccgcgcgcaactaccgatcgacgttgcctcgctacccctcgatcctgagttgttgggtgcaggacaggtgccgcgatgcacttcggcgacggtgaccgtcaccttccagaacgccagtaaacgagaactgatcatcgccggcggaacctactggcacgaaggcacccccatcgcgccaccggtctttgcctacggcgccttccgccaataccagaaacaggtgcggcgctacagcccgggcaaatcgatcatcaacctcttcgactccacggccctgttgtccaacccggaaaaatggttgttgggcctcaagcaggtcgagttcgacagtgtggtgcgagcgctgcgggatatcctctccatcgagggcgagttcgaggtcatggagcgcgatttcgaaaaccagcgctgcctgatcgtcacggcggctgccggtagccaggccctgtgccgaaccccgctgagcctggcgtcctcgggctatcgctcggtgctggcgatggtctgcgacatcatccagggcttgatgaatcggcgcatcaaccctcacttcgaaagcctggaaaccgcccaggccgtggtcctgatcgacgaggtcgaagcccacctgcatcctcgctggaagatccagatcatgggtgcactgcgcagcgccttgccgaacgtgacctttatcgctaccacccacgatccgctgtgcctgcgcggcatgcgggacggcgaggtgatcgtcatgcagcgggtcgccagcgcggacaatcccgacagcgagtggccggtcatggtggagcaggtgatccggctccccaacgtcagccaactgaccatcgagcagttgctgacctcggactttttcagcctcagttccaccgaccagccggacaccgagcgcgagctggcgatgttcgccgacctgctggcggcccgggagcggggccagcctctgagcgacgcccagcagcaggcctggagccgtttcgaacgggatatcagcgatgccttgccggtgggggccaccgaagttcagcggctggtgcaggaagcggtggtggagtatctgcaaaaccgtcgacaggccagtgcgctcaaactcggcgagctacgggaaaaatccagacagcggatcctcgctatcctggagggaatctga

SEQ ID NO: 88551 - DNA, 996 bp, Pseudomonas batumici
atgcgcgccgtcattcgaacgactgccaaggcgccgcaggcgctgtccggagccgactcgcccgccgccagggagctgcaaaagctcaaggcctggtttgccgcgcctgtcggcagcccgccggcttttacggtgtacaaggccgacagcgtcaagcagcagctcgacgagctgttccacggcaaatgcgcctattgcgaaagcttcttcgcctcgaccgcgccggtggatgtcgagcattaccggcccaagggcgcggtgtccgaggacgccagccatcccggctattggtgggtcgccatggattgggacaacctgttgcccagttgcatcgactgcaatcgcaagcgcaagcaggtcacccccaggctctcggccaggctgctgacgctgcgggacgaccgccaggggttcaaccagggccgcctgctgctctccgggaagaaggacagctttccgatcctcggccagcgcgccatgtccgacgcggcggaccttgccgccgagtacccgctgctgctcgatccgtgccgcgacaacccggacgaacacctgaaattccatatcgaccggagcaacctgatcggcctggtactgcccagacctcacacgggcgcggaccttgtgcccatggccgaagccgtcatggacgaccatctccaggacgcgttgacagccggcgtgagcctcaagggcagcgtctcgattcatgtctacggccttaaccgcctgggcctggtgcaggagcgcacacggctgctgcgccagctggagttcctggaaatgctggcgctggaagtgggggagatggcggacaagctggtacctgatcccgaggcgccgccctccgccacggttgccagtatcgccaagcgcctgtacctgctccaggaccgggtcctcggggaaatgaagcgcatggcccggcccgaggcgccttactcagccatggtccgggcctggatcgaggatttcaaggtacgcttgcaggcctga

SEQ ID NO: 88552 - DNA, 2289 bp, Mesorhizobium plurifarium
atggcgaatcgccaggcgctccagtccttcatgagctattcaagtgagaggatctcgcaatcggtaacgcctcgggccttcctttcactggaggagccaagcgttcaaaacgctctgcaccgactctttcacggaaagtgcgcgttttgcgagagcaaggacacaatcaagccataccggttccgcccaccggccgaggctgagccgtttcagtccgcaatcgacggacatctctattatgcctggctggtcgacgcttgggataacatctactccatttgcgataattgccacccattgcgccgaggacggtccaaattctttccggttaaggggcgccgggcaaggattccggcccacagcgaaattgccaaatttgtcgaggagtccaccgggctgtggccattctacccgccgcatgagaaaccattgctcgtcgagccttgcgagcaaaaggatttcacgcaatttttccacgtcgagctgtctggcaaactcgtcgcaaaaagcgagcgcgctgccacgacgatcgagacattcgatctcaatcgtgaagacctgatcaaacgccgggaggcggcatttgccgagcgccttgcggcgttggaagcagcgatcggcaggtcatctggcaaggacctttttcaagatcaggtggacctcattactgcgtttgcggatctggagttcggtggaacatggttcttgctattgcggcgcctatgcatggctgtcggttccggcggcggtcccttgccggcgctatcaatgcagcggattcgcaggttcctctaccgattaagagccagatcagacgcaatgcttcgcctgtcatccgcgatagaggcaactggggaggccgacaagattggcctagatgccgaattcgccagcacggttcggcgaacgggcacaatgcgcgttcagtcagtctccttgcgcaatttcaaggcgctggaggaactcgacttcacgatgcccgagccaatgcatcctgccggccggccaacagatgcggcccccgcgccgtcaatcctgatcctcggcgagaacgcggccggcaaaagttctatcctggaagccatcgcccttgcgctgtcggatgaggcagcgcgcgatgagctcgcgctcgatgcgacggactttgtgctcaagcctcagtacatgggtgcaccatcattgtcctcgcccggcacttccagcgttgtgctcactttcgaagacggatccattttgaccatgaccgctgccggtagcggctttgatgtggtgttgccatttgctgcatcgcaactcccccctgtcttcgcatacggcgctttccggcactatttgcgcaaacagcgcaaccacagtccggccaaatatattcaaaacctcatgcgttccgacgaagtcctctcgaatccggaaaagtggctgttggggctcgacgacgcggttttcgcgatggtcgtccgtcaactccgatatgtactcagtatcgagggcgagttcgaagtcatccgccgcaaccgggaggatggaaggtgttacatcgtgacggccatagtcagccctgacggcaatgttcgttatgcactgaccccgtttgaggttgcctcctcaggcttcaggaccgtcttggcaatggtctgtgatatcttccagggaatactcgatccgcgtgtcaacgggacggtcgacaatctggcgcaggcctcaggtgtggttcttatcgacgaggtcgaggctcaccttcatccgcgctggaaaatgaacatcatgcgtggtctcagacaagccttgccaaacatgacgttcatcgcaactacccacgaccccttatgcttgcgcggcatgggtgacaaggaagtcatggtgcttcagcgctcctcccgcgaagctgacgagggaatcggtatcctgcccgtattcgtcgagaagatgcagcatttgcctgcgacctctcaactgaccgtcgagcaaatccttacgtctgacttcttccaactctactccgccgatgcgccggaactggaggggcaattcgcccggattgccgacatcctgggcaaaaggaatcgcggcgaggttctcaatgccgtcgacaggcagactttgcaggttttcgagagcgacatcgcgtctgccatgccggtcggcacgtcggaagtacaccggctcgttcaagaggcggtcgccttgttcctgcaggaacgcaggaaggcgtccgacgatcacctgcagataatcagagagaactccaaacaggaaattcttgcgattttgcgtggagctgggacatga

SEQ ID NO: 88553 - DNA, 924 bp, Mesorhizobium plurifarium
atgagggctgtcaatcgaaacgaagttttcctgccagcctccatcctcaagcgcggcgaggccgagttggcgagcgtcaaacttcatatcgccgacgcaaatcccaaaaagggagtgttcgatttccaagtctacaaggacgaggaaatcaagaaggcactgcataagctttttcatggcaaatgcgcctattgcgaaactttctactcggccagcgcgcccgttgacatcgagcatttccgcccgaaaggcgctgtcagcgaggacaagaatcatccaggctactggtggttggcgatgagttgggacaacctccttccaagttgcatcgattgcaatcgaaagcggaagcagctgatcctgactgaaaagaggagcagtctggcggatctgtggaatgaaggccgcctggccagggccgtccaagggatgcaatcgggaaaaaaagacagttttccggtccgcggcactcggttgaggccggaagaaaagcattacgaccaggagcaggctctgttgataaacccctgcgccgatgatcctcggctttacctctcgttcggcaaggtgcagaggggatcacttcccctggcgatatcacttgatgcggaagaacctcattccagaggcaatatctcgatacaagtctacggcctcaatcgtttggcattagttcaggatcgcaccagggtgctgcgccagttggaatttctttccgatgtggtgctcgaactcagtgccgtcatcgacaagatcgcaaccctgccggagcacgtaaaaaccgaattggaccgggtcccctatagactgaaacagctaagggatagaacgcttgtggaaatgcgaagcatggctgacccggtccagccttactcggccatggttgcggaatggctgcacgcctttgcggcgaagctcaggtga

SEQ ID NO: 88554 - DNA, 1233 bp, Capnocytophaga canimorsus
atgaaattacacaaattatatttaaaaaacataggtccttttttggaaggcgaaattgagtttgaccaagttaccattctcacaggagaaaacggaacaggaaaaaccgtagtacttgatgctatccgaaaaatgttattagggaatgattactatcgtattcttcctaaaatgagaaatatccgaagagaaaattcctttaaaatagacttatctttgtcgtttaataaaaaaaaaatagaaatagaatcagataggataaacaataattacttatttgaaagttttgaaataaaaaaatcaggttctcaatattatgatttaggaagtgtattcagcaatagcacaaaagccaaaggcaatctttggatagctaattattggacttcgcaaaatgatcactcagattttcatattccgagtttagattttatcaaacctgaaaattatttgatagattgccttgatggtattcaaaaaaatgctgaaactactaaaatcgttacttttttggattactacaagtcctcagataagcccgaagagaaaaaagaaggagagttcatttttgaaattttgaaaaaaatattcaaaatcagcctatacgagggtgaatttgtatatgtggacagaagccgactaatgccggtcatcattcaaaatggtgtggaagtttctttggataaattaagtagcggaaacctctatttggtgcaaagacttatcggattgcttgggcaaatgtattccgtgtacaaactcaacaatttgcctttggaagaaatgtgcaacacacccggattactgctcattgacgaggcagaaaaccatctccacccaaaatggcaaaagactttcatcaaatctattttggaactcttccctaacttgcaaatcgttgcggctacgcattcgccgttcattgttggttcggtggaaaacgcaaaaatctatgtttgcaaaccagaaacagaccattccatcatagtagatgaaacggcaaattattccaacaaaccgattgaggaaatccttatttctgaggtttttggagggacaacaccttttgcaaatgaggaaatcaacaagttattaaaggaacgaaaagaagctatcgaaaaaggcgacaaacaagaggaagaacgcaccgaaaaacgattgttggaacttaatccgcaatatttttcatatttagaaatggataaattgttagatgagctaaagaataaataa

SEQ ID NO: 88555 - DNA, 618 bp, Capnocytophaga canimorsus
atggtacatttagaacgattgacaaagcctgatgttttggcaaaaaacgaaactaaatggacagagaattttattcagtcaggcaaagacagacccagcagtagcaaatacggacatcctgaaataaaagaagctttggcgagtattagtgctaataaatgtttttatagcgagattttactttccccaatttcagatgctcaaatagaccactatgtagaggtgtcagaagataaaacaaaagcctttgattggaataatctctattttactcataaaaattgtaatataggcaaaagtcctaataaaagcattccagtttcagaatgtttagaccctttcacagatagtaatgaggagatagaaaaacatctttattttgaagatgaaatgattttatcagacactgaaaaaggaaaaagaaccattcagaaatataacttaaatagtgattatttcaatttgcaacgaagtagaacattaaataaatttcaacaagcaatcgttttatgtttacaagataaagtatcaaaagaagaagtgatacgattcgcaaattctgacagacctttttcattaatgataagactttatttgaaaaaacataatattttataa

SEQ ID NO: 88556 - DNA, 1230 bp, Capnocytophaga cynodegmi
atgaaattacacaaattatatttaaaaaacataggtccttttttggaaggcaaaattgagtttgaccaagttactattctcacaggagaaaacggaacaggaaaaaccgtagtgcttgatgccatccgaaaaatgttattgagcggaagatggacaaacgcactctcaaaaatgagaaacatccacagagatgattctttcaaaatagaactatctttattgtttaataatgagacattcaagatagaaacaaatagcatagccaataacctatatgaaagttttgaaataaaaaaatcaggttctccatattatgatttaggaagtgtattcagcgatagcagaaatgccaaaggcaatctttggatagctaattattggacttcgcaaaatgaccactcagatttccatattccgagtttagattttatcaaacctgaaaattatttgattgatagtcttgatggtatccaaaaaaatgcagaaacgaccaaaatcgttacttttttggattactacaaatcctcagataaacccgaagaaaaaaaagaaggagagttcatttttgaaattttgaaaaaaatattcaaaatcagcctgtatgaaggcgaatttgtatatgtggacagaagccgactgatgcccattatcattcaaaatggtgtggaagtttctttggataaattaagtagcggaaatctctatttagtgcaaagacttatcggattgcttgggcaaatgtattccgtgtacaaactcaacaatttgcctttggaagaaatgtgcaacacacccggattgctgctcattgacgaggcagaaaaccatctccacccaaaatggcaaaagactttcattaaatctattttggaacttttccctaacttgcaaatcgttgcggctacgcattcgccgttcattgttggttcggtggaaaacgcaaaaatctatgtttgcaaaccagaaacagaccattccatcatagtagatgaaacggcaaattattccaacaaaccgattgaggaaatccttatttctgaggtttttggagggacaacaccttttgcaaatgaggaaatcaacaagttattaaaggaacgaaaagaagctatcgaaaaaggcaacaaacaagaggaagaacgcaccgaaaaacgattgttggaacttaatccgcaatatttttcatatttagaaatggataaattgttagatgagctaaagaataaataa

SEQ ID NO: 88557 - DNA, 618 bp, Capnocytophaga cynodegmi
atggtacatttagaacgattgacaaagcctgatgttttggcaaaaaacgaaactaaatggacagagaattttattcagtcaggcaaagacagacccagcagtagtaaatacggacatcctgaaataaaagaagctttagcgagtattagtgctaataaatgtttttatagcgagattttactttccccaatttcagatgctcaaatagatcactatgtagaggtgtcagaagataaaacaaaagcctttgattggaataatctctattttactcataaaaattgtaatataggcaaaagtcctaataagagcattccagtttcagaatgtttagaccctttcacagatagtaatgaggagatagaaaaacatctttattttgaagatgaaatgattttatcagatactgaaaaaggaaaaagaacgattcagaaatataacttaaatagtgattatttcaatttgcaacgaagtagaacattaaataaatttcaacaagcaatcgttttatgtttacaagataaagtatcaaaagaagaagtgatacgattcgcaaattctgacagacctttttcattaatgataagactttatttgaaaaaacataatattttataa

SEQ ID NO: 88558 - DNA, 1233 bp, Capnocytophaga canimorsus
atgaaattacacaaattatatttaaaaaatataggtccttttttggaaggcgaaattgagtttgaccaagttaccattctcacaggagaaaacggaacaggaaaaaccgtagtacttgatgctattcgaaaaatgttattagggaatgattactatcgtattcttcctaaaatgagaaatatccgaagagaaaattcctttaaaatagacttatctttgtcgtttaataaaaaaaaaatagaaatagaatcagataggataaacaataattacttatttgaaagttttgaaataaaaaaatcaggttctcaatattatgatttaggaagtgtattcagcaatagcacaaaagccaaaggcaatctttggatagctaattattggacttcgcaaaatgaccactcagattttcatattccgagtttagattttatcaaacctgaaaattatttaatagatgctcttgatggtatccaaaaaaatgcagaaacgaccaaaatcgttacttttttggattactacaaatcctcagataaacccgaagaaaaaaaagaaggagagttcatttttgaaattttgaaaaaaatattcaaaatcagcctgtatgaaggcgaatttgtatatgtggacagaagccgactgatgcccattatcattcaaaatggtgtggaagtttctttggataaattaagtagcggaaatctctatttagtgcaaagacttatcggattgcttgggcaaatgtattccgtgtacaaactcaacaatttgcctttggaagaaatgtgcaacacacccggattactgctcattgacgaggcagaaaaccatctccacccaaaatggcaaaagactttcatcaaatctattttggaactcttccctaacttgcaaatcgttgcggctacgcattcgccgtttattgttggttcggtagaaaacgcaaaaatctatgtttgcaaaccagaaacagaccattccatcatagtagatgaaacggcaaattattccaacaagccgattgaggaaatccttatttctgaggtttttggagggacaacaccttttgcaaatgaggaaatcaacaagttattaaaggaacgaaaagaagctatcgaaaaaggcgacaaacaagaggaagaacgcaccgaaaaacgattgttggaacttaatccgcaatatttttcatatttagaaatggataaattgttagatgagctaaagaataaataa

SEQ ID NO: 88559 - DNA, 618 bp, Capnocytophaga canimorsus
atgatacatttagaacgattgacaaagcctgatgttttggcaaaaaacgaagctaaatggacagagaattttattcagtcaggcaaaaacagacccagcagtagcaaatacggacatcctgaaataaaagaagctttggcaagtattagtgctaataaatgtttttatagcgagattttactttccccaatttcagatgctcaaatagaccactatgtagaggtgtcagaagataaaacaaaagcctttgattggaataatctctattttactcataaaaattgtaatataggcaaaagtcctaataaaagcattccagtttcagaatgtttagacccttttacagatagtaatgaggagatagaaaaacatctttattttgaagatgaaatgattttatcagacactgaaaaaggaaaaagaaccattcagaaatataacttaaatagtgattatttcaatttacaacgaagtagaacattaaataaatttcaacaagcaatcgttttgtgtttacaagataaagtatcaaaagaagaagtgatacgattcgcaaattctgacagacctttttcattaatgataagactttatttgaaaaaacataatattttataa

SEQ ID NO: 88560 - DNA, 2349 bp, Pseudomonas fluorescens
atgcaaagatttttacgcaacaaagtacctccctccattttccgcgaagagcaattcaggaagtccagagagcaactgctggatttcttcagtctggacactcaggagcgctctcaaacccgtgtgcccatggaagacctggaactgaatctgaaccaggtcagccctgtatatgatgcgctgggacaaatgtttcgatggaaatgcgcattttgcgaaagcaaggatcatccacttccctaccgattccgaccaacgtcgtctgcaacctctacgatgggagggattgactcgcatctctactatgtctggctcgccaatgcctgggaaaatatctatcccatctgtctgaagtgtattccgcgtcagccttcgttctttccggtcaagggcaaacgtgctccgattccgaaccttgagcaattgcgccagtatgccgatgacaatctcggttcttggcgcttctccacataccgcgagacagccgttttgcttgatccgtgcgttgatcagcgttttgaaaagcactttttcccctccgttaatggcgagctgctgccactgtctgaagagggcgatatcacaatcgccaattttcgcctggaccgtccagaattgaatgaactgcgggaagccagacttcggcagtaccgtgaagaactattggcgtctggtgaacacctgccgcgattacgccaggctacctttcagacctattttgactttgccgaacttgagttcggtggcctgtggtacctgcaatgccggcgaattgcgctgtacttgtcacaaagagctggcctgacaatgcctaccggccgctccggggtggcaaagacactgaaaaccctgctttcagtcggggactatcagcagacgcgtgaacaattgcaggggtggattaaagaaactgacttcggccgtaaaaccttgaacataccgccaacggactatggcgttctgggcactgagccagaccagcagaagacacctgtgccgctggtttacccgtccttgcgttccatcgaacttcagcatttcaaggcaatcgagcacctcgaattgaatctcggcacactcagcgccgaatcgcagttgagcaatgaaaccctacagccagcactgctgatactgggtgaaaacgccaccggaaaaagttcgattctcgaagcgattgcgcttgctctgagccatccagatacacctgccaccttgaacctgacacctgcctcctttgtactttctccagcccaactgggctcggatgacgtggcctctaaaaccccggcacaggtacgtttgagtttcgacgaggggcaagccaaagtcttgaggattgatgacaacgtctttcgaccagatggaccggatgatgtaccgccagtgttcgcttatggcgcctttcgccaataccagaaaagatctcctccggctcatgaagccgatcatgcgatcatcaacctgttcgaaacggatcgcctactggccaatccggagcactggctgctcgggctggaaggcgaagacttcaatgacgtagcccgtgcattgaaaatcatcatgtctgtggacggcgacataaaagtcatcgaaaaagcgcccgacggtaaatcttgcctgatcgtgacggtccccgccggtgtagtgactaggacaccgctcaatgatgtgtcctcaggctacagaaccatcctggcaatggtatgcgacatcatgcaacggctcatggaccgtcgcgtccatccccgttttcaaggacttgagcatgcccaggctgtggtgttaatcgacgaagtcgaagcgcacctgcacccgcgctggaaaattcagatcatgcatgtgttgcgcaaggccttgcccaaggtcacgttcatcgccaccagccatgaccccctatgtctgcgcggcatgcagaaaggagaagtcgtggtcgttcaacgtcggtccaaggctggcggggcaaagactcagtacgccacgtgcattgagcaattgagtgatctaccggactcctcccggttgacgatcgagcagttgctaacgtccgattttttcaatttgatgtcaactgaccagccggaaatggagaagcaattggccagcgtggccgatctattgagcaagcgcaaaaacagagaagtgttgaccgcccaagaacagcgggtcatggcctatttcgaagatgaggtcaacgacgcgcttcccgttggcaccagtgaggcccagcgtgtcgttcaggaggctgtcgccgaatttcttcagcggcgaaagaaggagccttccagtgagtgggaaacgatacgtgtggaaaccaagaccaaaatactgaatatcctcaaggacttttga

SEQ ID NO: 88561 - DNA, 1101 bp, Pseudomonas fluorescens
gtgcgcttcgttgaccgatccctcgtgaaaaagcccctggcgatgttgccgagaaagaccacagtcagtgccgcggatcaggaactcactgatttaaccgcctatttcaaagaaaaaacggctgcacttgagaccttggcgcgcgccagagccacgctggcggccgatgatccggttgtgattgaagccgcaaaggcagtggactccttgaaaaaaccccttttcaagacctatcgcaaaaactcggtcaaaacccagttgttagcgctgtttcatggcaagtgcgcgtattgcgaaacgttctaccctgccgtggccccggttgacgtagagcattacaggccgaaggggggcgtaaatgatactgaccatacggggtattggtggctggcgatggattgggaaaacctgcttcccagctgcatccattgcaaccgactgaacgaacacatcacaccggtgctctcaacccaattggttgaactgcgcagtgaccacttaggcttcagcaagcaacgcagggtcactacaggtaaaggcaaccattttccaatcctggggccgcgcgcgacacaggactcgagggactgttcaacggaatacgcgttgttactcaatccctgccgggatgatccacaagagcatttagccttccatgtcgactgcgaaaagctcattgggttggtgttaccaaaaccacacgatggcgcggggctacctgaagttattccaacccaatatctactcccggaattcaaaggtgaaattgataaggcgcttgaagacaagctcagtcttcgtggcgcggtatcgatccatacctacgggctgaaccgtttgggattggtccaggatcgcacgcgagtactgcgccaactcgcctttatggaggagtcagtaaaggatctttgcgcgatgattctgaaactcgaagtgtgcaggaatgctccgtgcgcggatgaaaacaagcgcatcataaaacgaatggaagcattgatagaccgtacggtgcgacatatgaaagagatggccaagcctcaagcaccctactcgacgatggttcgcgaatatctggctggtttcgagaagcgcctcgtctga

SEQ ID NO: 88562 - DNA, 1392 bp, Tolypothrix campylonemoides VB511288
atgaaagtcaagcgcctcataatgaattctttccgtggaatcggcgatttgacgctcgatttcgatgaagtgggtccaactgtacttatcggtgtcaatggggtaggaaaatctaggatacttgattgtcttgctattctcctgtcacagtatacagggcgggttcaagatgattccacacgttccttaagcgaacaggacataacgaatggacacaaacaaacgcagattgaaattacaatttctctgaaccaaggagaggatataacttggtctttgagccaggaacgccaagagggcaaatctggtcaaagtccagctaatcggttggaggctatcaaattattagctgatatcagcagcgagcaacgtctgcaaaaccttagccgtggtggtaatgacttgaggaaatttttacaaacagctgtagaaatactaagtcaggaagttgacgaagtgagccaagaacctttagaaaaggtggttgacgaaatcaacagccaattagcaaataacgagaacgctagcatacctttgccagtttactatccggtgaaccgtgccgttcttgatatgcctttggagatttccgaggaatatttaatgactcaaagaaatgcctatgaccaagcactgactggcggaagaattgactttaaaggcttatttgaatggtttagaaaacgggaagatttggaaaatgaattgcgacgggataacccaagccatcgcgacaaacagttggaagcggtcagaggggcaatatcatctttacaaccagatttttcagatttgcgagttgagcgatcgcccctacgaatgactgtaaaaaaacaaggtcagcaactcatcgtcaatcaattatctgatggtgaaaaatgcttattagcattggtgggtgatttggcaaggcgcttggcgatcgccaacccaggtttaagcgatccactccaagggaatggtgttgttctcattgatgaaattgaattgcacctgcatccaaaatggcaacggcaaattattccagctttgactagaacattccccaattgtcagtttatcatcaccactcactcgccacaggtactgagtcatgtcaaacctgatagcatctacctcctagaagcaacacctgaaggtatcgttactgaacaaccagaaaattcgtttggtagagatagtaaccagattctagaagacttgatgggtgtatccgaaagaccacaggaaattaaagaaaacctccgtgatttattcagattaattgaccagggacatctcgatagcgctaagcaattgcgccaaaacttagccgatgaaattggagaagacgatccggagtttgtacgagcagatgtccttattcgacgcaaggaaattctaaatcgatga

SEQ ID NO: 88563 - DNA, 645 bp, Tolypothrix campylonemoides VB511288
atgaaatatattcaaaagggtagagaaccggatagcttaacgaaatggaagcagaaactcggtaaaagaacacctgattggaaagccttcccacaagcaatcaaaaatcaagtgtacgagtcgctattacaagagcaaggttacatctgtggctattgtggtatgtcgatagctaggaagcaatgccatatagaacactttagacccaagagtgtttataaacacttgacatttgagtacacaaatctgatagcttcatgccaaggcgaagatgaacacagacctcgcgtaccagtgcattgtggacataaaaaacacgcctggttcgatgaggaactgatgatttcccctctagatcccaaatgtggagattactttaagtactctggttttggagaaattctgccatcggatgacccagataagcaaaaagcggctaatacgacaattcaaaagctggcactcagtattgataaattgagaaagatgaggcgtgcagcaattgatgcagcgttgcaagcgactagtggattaacagatgcagagatacagctccttgctcagggctatgataaaccagatgtagatggacgatacacaccgttttctgctgcaattacgtatattttaaagcagtatttttga

SEQ ID NO: 88564 - DNA, 1407 bp, Scytonema tolypothrichoides VB-61278
atgaaactcaagcgcctaaacatgaactcttttcgtggaatcggcgatttgacgcttgatttcgctgaaatggaaccaactgtctttcttggtatcaatggtgtcgggaaatctagcattttagactgtcttgctattcttttttctcagctgacagggcgaattcaaaacagtaactctatacgtcacctcagtgaacaggacatcactaacacaggtcataaaacccatatttcaataacaatttctctgaagccagaagaagaagtaacctggtctttaactcaggaacgcaaagagggtaaatcggcgaaaagcacgggcgaagtgcgattagaagcgataaaatctttgatagatggtattagtcagcaacgcctacaaaagcttgggcgtggagacgaagtgacaaacgctttacaagcagcctcaatactgctaagtcagatagaagctgatgaagtgaatcaaaatcctttaaaagatttacaaacactggttgataacataaacaatcagttagaaaatcatgataatgctagtattcctttggctgtttattatccagtcaatcgtgccgttattgatatgcctttggaaatttccgaggaacatttatttacccaaagaaatgcctacgaccaagcactgactggtggaagaattgatttcaaaagtttctttgaatggtttagaaaccgggaagatttggaaaatgaattgcgacgggataatccgaaccatcgagataagcagttagaagcggtgagaggagctgtatcatctttacaaccagatttttctgatttacgagttgagcgatcgcccctacgcatgactgtcaaaaaacaaggtcaagaactcatcgtcaatcaattatcagatggcgaaaaatgcttgctagcaatggtgggtgatttggcaagacgtttggctatcgccaacccaggtttagataatccactagaagggaaaggtgttgttctcattgatgaaattgaactacatttgcaccccaaatggcaacggcaagttattacagcgatgaccaaaacattccctaattgtcagtttattatcaccacccattcaccacaagtggttagtcatgtcaaaccagacagcatttacctcctacaagcaacacctgatggaatcgttgctgaacgtcctgaaaattcttttggcagagatagcaatcaaattctagaagacctcatggaggtatcagaaagacctcaggaaatcaaagacagtctccagaatttgtttagattaattgatcagggacatctcgataacgctaagcaattgcgccaaaatttagccgacaaaattggagaagacgatccggagtttgtcagggcagatgttcttatccgacgcaaggaaattcttaatcgatga

SEQ ID NO: 88565 - DNA, 645 bp, Scytonema tolypothrichoides VB-61278
atgaagtatatccacaagagtaaagaacctgatagcttcacgaaatggaagcagaaactaggtagccgaatacccgactggaaatcttttccacaaccagtaaaaaatgaagtttatcactcattactacaagagcaaggttttgtttgttgctactgtggtatgtccataggcagaaagcaatgccacattgaacattttagacccaagagtgtttatagagatctcacatttgagtacaccaatcttatcgcttcatgccaaggcgaagatgaacacaaacctcgtgtaccagtgcattgtggacacaaaaaacaagcttggttcgatgaagaactgatgatttcccccttagacccaaaatgtgcagattatttcaagtactctggttttggagaaatattgccaacagatgataaggacaaacaagcccctgctaaaaccacaattcaaaaactagcactcagcattgataaattgagaaaaatgagacgtgcagctattgatgctgtacttatggcgactgacgggttaacagctacagaagtacagctacttactcagggttatcaaaaaccagatgcaaatggaaggtatacaccattttctgcggcaattacttatatactcaagcagtatttttga

SEQ ID NO: 88566 - DNA, 1287 bp, Thioploca ingrica
atggatccagaaccaaatgagatcttccaagtaaaaaagcttaaattagaaaattttcgaggctttgagcaagttgaattagaatttcatcgaaatttaacggttttaataggcgacaatggtactgggaaaacagctattttagattgtcttgctattttgttaactaatttttcaaaacggattcttagaataaaaaacgattttgaagaaaatattaacattttagatattaaacaagataaacttaaaaccactgatgaaatttatttgttaatagaacataaacaagaaaaagtagaaatgaaatggagtatcagttttaataaaaactacggatctgatagttaccttcaaggtcttgatattttacaaggtgttccaaaaccatggtatacaaataatgaagaaaacctccctattctgatttactaccctaccagtacggctgcactaattaacttcattgatttcaaaaatgcccgagatgattttagaactgacatcttgaccatttatgaccatgctttagacaaaaaagcttttaattttacttatttctttgaatggtaccgttggcaggaaaatattgaaaaacaactcggtaagaatccgacgcttgaccaagtacgccaagctatctatagcctacttagtgatgatcataatcaatttactaacttggctattaattggctcaataatccgagtggagaaatgctcattcaaaaaaatgcgacggttttaaatattaaccaattatcatctggggaaaaaactttactcgccttagttgctgatttggcacggcgtttagcgattgctaatccgcatcgagagcagccattaactggtaatggtattgttttaattgatgaaatcgatttgcatttacacccacgttggcagcggcgtgttattcctcaattaagcaaaattttccccaattgtcaattgattgtgacgacgcattcgccgttggtgctaagtcaggtaaagcctgaaaatgtcgttattttggaaaattttcaggtggtcaaaaatacacctcatacttttggcagagataataattctattctttatgagttaatggctgttaaacagcgtccggatgacatgcaaaaacagcttgataaagtttacgaattgctggatgagggtaacaaagcagccgctcaagaattattaaaacaactttcccaagatttaggtgaaaatgatacagctatagtaagagcttatcatcatttggcttttatggatgaggcagatgaaacagattga

SEQ ID NO: 88567 - DNA, 642 bp, Thioploca ingrica
atgaaacagattgagaaaagtaaagagccagcttcattattagcccatcgcaaaaaaattcattcgaattatgacaattatccagaaaaggatgaattgcgggattatttattaaaagaacaaggtcagatctgttgttattgtatgcaacgtattagcaaggaaaatatgaaagttgaacattggcaacctcaaagtaaatatccggagaaacaattagattatcaaaatttattagcggcttgtcgaggaaacgagggtgaaccaaaacatcttcaacattgtgatacccataagagtgaacaagaaatgattcttaatccgcttgataaattaataaaatctataaaatatagaaaagatggcagaatatactctgatgatcccaacatcgatcaagatctcaataaaatcctgaatctaaatacacaaaccttagtcaataatcgcgcagcaattatggatgacgtgatacaaaatcttaccaacctaaaaggcaacaaagccgattgggcggttgcccatgtcaaaagaaaaattcaacaatatgaaactaaaaccgctggtaaatatcatccttattgccaagtaatcatttactttcttaacaaacgctttgctcaagaattaggttatttttaa

SEQ ID NO: 88568 - DNA, 708 bp, Pseudomonas sp. StFLB209
atgattaatggatatggtgtcaaaagcgaaaccaaggtcataatgccctcagaccctcaacaaataaaaaattttgagggttttcgggacgcgctcagacttatacttccaaaaacgctcggatttgaagacctcgaagtaagggattacgaaatcgttttttgttgcaacaaaggggcagatgaattcctgctggaaaccgcgtcgggaggaatcgctgcgcttattgatattgcctggcagatctacatgtttgacaacgacgcgaaagagcctttcgcggttgtaattgacgaggtcgaaaaccatttacacccaagcatgcaacgcactctgttacccagcttggtggctgcgttcccacatgctaaatttatcgtaacgacccatagccctctgatcgtgacatcggtcgagaactcccatgtatatgcgcttcgctatgatgagaataagaaagtccgctcctatttactggatttcaaaagtgaggttaaaaatgctgttgatattctcgatgaggttctaggtgtttcgacaacgattccagactgggcaatagttaagcttacttccataataaggaagtatgccgacgccgaccccacggctgaatccttggttaatatgcgcgatgacttagagcgcaatgggctcggtcggctgttcccccaagcaattgcaactattgcaggggataataaatga

SEQ ID NO: 88569 - DNA, 576 bp, Pseudomonas sp. StFLB209
atgatacgacttcatcgcccggcatgtccaaacccgatagctcttcgggccaactataaaaactctgagaacaaagcagcgttggaaggtgcttctaatggtaaatgcatgtactgtgaaagtcatgtgtctcacgtgtatttcggagatgtagagcatataaaaccgaaagctgaaaatagattcccgcacttagagtttgaatggagcaatcttggattttgttgtgctcggtgcaataatgctaaaaaagatcaatttgatgaaaactgccctttgatagacccgtactctgaagacccttctgaacaccttatagcatttgggacgatcatgcgtcacaaagctggaagtgaacgaggggccatcaccatcattacaactgatttaaatcgtgcggagctcatcgaacgcagggcgatgcgcttagcggatcttcaacacgcgcttgatgcgtgctatagaacctcgaacgtagcactgcaaaatattctgctccacgcattggaagccgaaagtgatagttcgaaggagttttctttattttcggctgctttaatggccgcaaacaaataa

SEQ ID NO: 88570 - DNA, 1638 bp, Sulfurovum sp. FS08-3
gtgcgattaaaaaaagtagaaattattgagtatcgaaattttaaaaatagtgtgattgattttgaaaagtctaataattttccaaatgtttttgccattgcgagtaaaaatgggggtggcaaaagtacactattgcaatttgtatttacatttctgcactgttttatggacaaagaacgaaagcaatatcttcaaaatatcttagagtatttgcctgaaatgacgcaaaaaaccgatttggttacgtttgtgattgaagagaatcatcaagagtataacttagatttttctattttgccaaccgtaacagagacaatggattttaatctctatttagatagccaagagatacaagaacaaattttagattatcaaaaaaatgatcaaaaatatcaacgcatactgcaactcaaaaaagaccttgaatccaatgatagaattactcccatcatggaaaataatctaaattacatcaaaaaccatgtcaaaagcatgggggatatggagttggattttttgtacgacaaagcaaaagcaacaaaagatttgcaaatatataaaaatcttatagagattattatcaataaaaatgctatttcggaggatactctcaatgagctaaaagagttgaatatcaaagtcaatcatcaagtgaaaaatttggaggatgtattaaatcaaaacaatatactctacattacccatcttttaaataccaaaaacgtccttttgctccaaaccaatatgcccaaagagcttttagttacattaacaaataaagtttttttaactgctccatcgtcgcaagtatttttatttttatcgagccaagagaaacatacaatatttaatgagttttccaacacaaatagctattacgaatcctattatgaaaaagtcaaaaaagcaaaaaaagagttaaaaaacttttttacttacgattttgcctcaaccgatttgattttggaagcttttaaaaaagcctctgttgaggatttgaaaatcaaaagagagactgggcattatggcaataggtacgatgaattaaccaatgaactcaaaaattttttagatggcaaagagattggcgagaatagagagggtaatggtgttatttttactttaaaaaagagcgattaccctttgtctcccgaagacttaagtcacggagagcttaaaaaactgggtatttatatatggttaaaacatattgtcgaaaaagattcaattattttgatggatgaactcgatattgccctacacccgcaatggcaatatgaattggtcaaagatttaacaaaatggtcacaagggagtcaatttttattggcaacgcactcaccgcaaatattgagttctacttactataaaaatattattaaattagacaagggaaaagttgagcgatataccaaacctcccattgatagagatataaactctatcattacacaagtgatggatgcacctgattttcctatggatttgttgcttttgcataaagcgtatcgaacacttatcaatgacggaaaaatagagagcgatgaggcaaaaaaattaaaggaagagattttggaacatgagagtgaaagctcatcattttttcaagatattaattttgatttagagttgatgtaa

SEQ ID NO: 88571 - DNA, 624 bp, Sulfurovum sp. FS08-3
atgcggtacattcaaaaagtacaaccgcctcaattttttatagaggatacgctcaatttagaatcatggagtagttatttttctcataaaaagcataaattaaaagaacatcttttggaacacgagcaaaattatctatgctgttattgcgaaagcaaaatatcatcggatacaaactcttctcatgtcgagcatattcgaccaaaaggacacgataaatatcctcatcttacttttgagtatcataatttagccgtttcatgcaatggaacgtgtcaaaatttgcccaatgattcaacaatacacaattgtggtcatatcaaaagcaatgagtatgatgaaaatctttttttgaatcctgtagagttagaagatattagagattattttgaatatgatatagatgagggaaagatagaagcatcagcaaaaaatgaacaaaaagcttcttatatgattgatactttgcgtttaaacgatggaggattaaccaaagcaagagaaaaagctttggaaaattttattgagaaaatgaagaaaatagaagctaatttacgaagagaagaaattaaaaagatacttaaagaagaaaaacttgaacaaatctctttttttgagatttag

SEQ ID NO: 88572 - DNA, 1502 bp, Sulfurovum sp. FS08-3
tcggattggtttatgactccattggagagtacgataaagcactggagttttatcaaaagtctcttgctattagagaagaagttttgggcataaagcaccccgataccgccacaagctacaataatatcggagaggtttataaatctaaaggagagtacgataaagcactggagttttatcaaaaggctcttgctatacgagaagaagttttgggcataaagcacccagatactgctacaagctacaataatatcgctcatttgtactacgcaatggaaaaatatgaagagtcagctaagtatatgcaaaaagcgaaggatatttgggagaaagttttgcctgataatcatcccaatttgatgagtgccaaagaaaacttatctatcattcaacaatccatcaaacccataaaaatcgataagagctatcttgatgccattaaaatcaaaaactatttttcacttatagatgtagagatagaaaatttgggtgataaaagagagatatattttgtaggtgagaatggggatggtaaaacgattttgcttcaagcgattgttttggctttgaaaggtagagacaaagattatacaaaattggcttatgattatatcaaagagataaaagataaaatgatacttgaaacaaaagatacacaatacccctcaaagtatcatcaatacaaaaatctcaaaaatatatttgcgtacggtatcaatcgcaataaggtcgatgaagataactttgatacgagtggatattcgggactctttgatacaccgcaattggcttatacaacattttttaaaaaacccgagaagatattaagcaaaaaatcaccaatagttgataagtttattgataagctagaggatttgatggacaacaagctcacaatcgatagaaacagtgagggtgagttaagatttaaaggtgtagataggtttaatatgctctcggaggggtacaaaaccactattatttggctcactgatttgctctcacgcctgatggaaaaacaacccgatattcaagcactcaaagattatgaggctattgtacttattgatgaagtcgatttgtatctccatcccaaatggaaatataactttatgtacaaactacgcacaatcttcccaaagattcaatttatcgtcacaacccactctcttgtgactgtattgggagctagtgaagatgcggtgttttataaactctatcgtgacgaagaggggcgaacgcaagtaagtcagcagatagatgatatttcacactacacagccaatattttgatgacctctcctctctttgatttggatagcatgaaagtaagaggatttgataagaatgagcgtcttagcagtgatgattatatctatcgagagatacaccaagccgtacgagaatatatgcaaaacaatccaagtgccatgagtgaggagttgaagcaaaaagtcaaagatgaactcaaagcacgaatggctcaattgagacaaaaatga

SEQ ID NO: 88573 - DNA, 891 bp, Sulfurovum sp. FS08-3
atgagagagatagacccacatagacgaggtaaagtacacaatcatctccatagtgagaaagtaagtaaggcttttataaaaaatatagccgataataaacactctacaggtagtgtctatagcgatgataagagcgataagaaagatagcatcaagtggactttaaaagagatatatcatcaaaaatgtgccttttgtgagtctaaattaaccaatgattatggcgatatagaacactatcgacctaaaaataaaagtgaaaaagagtctaaagattgcgataagggaaaatcttactactggttggcttttggttgggataatttactacctgcgtgcaaacgatgcaatggcaaaaaatcaaactgttttgatatagatggggaatacaaagagtatgagggtgaaagtttggaagatttgcacctcgttacacaaaagtacaatgaggttgaaaaaccaaagcttatacaccctgaatacgatagatttgaaaaggatattgtgtttgattccgaaggcaaaatgcgttcggataatgaacgagtagcttataccattcgagtctgcgacttaaatagagaaaacttagttggttcgcgtgaagaaattgttactgattttatctcaaaactcaatagacatcttttgacttttgataaagtgttcaatggtaataacttagaagagtgtttggaatactttaaggtaagcatagaggatttttgcaaagaatcaagaaaagagtatgaatactcgctaattagaaaatatatcaaagataaccttatagaatttcttgaatctatagagatagggtatgacgataaagggtttgcgatacttattatcgaaagtgcttttggtgagttttgtttggaagataagtag

SEQ ID NO: 88574 - DNA, 1206 bp, Sulfurovum sp. FS08-3
ttgcttcaaaatttcactattgaatttaatgagaaaatcaatattataatcggtgagaactctagcggaaagacttcactactacaagctattacactagccttgcttgataaaaatgtagccattcaaacaggcaaaaacccttacagtcaatacatcacaaaagataccgatgtttcaacaattacactcacaatggatgagtttgaaaaaaagatagtgctacatgaagcatctaggagtgtagaaaataatttcttatcaccgtttgtattggcttacagttcgagtatctttaccaagtatggtgaggttgaatcgttggtagagaaactacttgcccaaaaagtatatgaagattttacaaaatcaatttttaccgattatattgatacactctataatccaaaagctattctaaatgtcctaaaagataagaaaagtaaacgagccaaagaagtagaaaaaatttttgttggtacaattaatagctttttatcgactttggatgattttagtttagaaataggagataagagtggtaattattgctttagagacaaaaagaaaaaagagtttacgctcaaaaatttaagcgaagggtatcgcaatagtatcctactcattggtgacatactcatcaaagtactaggtgtcggaaagaaacccgatacaatcgagggtgttatcctcatagatgaatttgacagacacctccaccccaaatggcaaagcaacttagtaaccaagctcacaactatttttccatatattcaatttatcttgacgacgcataatccgatgtcggtattggggagagaagccaacgagattactatcatcaaagaagaagataaagaactcaaagctatcaaaaagagcggtacaaaaaatattgatgcaggtacggtgcttgttaaatactttggtgtaaatttggtgagtaatgtaatgcatgacaatctcaaacgctttacgcaattgaaattaaaaaatcaagaattatccgaagaggaaacaaaggagtttgcaaaattagaagaagatttaagcgagacagtggctactaactttatatacaacaatggatattttaaatttttgaagtttgcaaaaacacatcaagatattgattttgatgaactcgatgaattaagcgaagaggagttggatagattattaagtgattttgaggaatcactatga

SEQ ID NO: 88575 - DNA, 750 bp, Sulfurovum sp. FS08-3
atgattaatatgcgacctatctatttggatgcttctttccaaaaagcattgcaaaaatttcacaagaagcttcctcaggagtgttacgagacaaccgattgtgagtggtcattgtttaaaaaagcttttttgaagttttcaaaatacaaatgtcctatttgtgaagacagggtaagaagatatgacgatatcgaccattttagaccaaaagaagaggcgttgtacccttttttgaagtgttgctatcaaaattatatagttatgtgtagcgaatgcaataggttttataaaaaaagtaacttcccattattgaaccctactcaaaaagctacaagtgtcgtagaactcaaaaacgaaaaacctctactcgtcaatccaatgcatgatgacatatttgaactgtttcaattagaatttatagtatcaaataaaaataataaaaagatgctagtagttgctccaaaagatggcattgatgacgaaagcagacaaaaagcccaagccacaatagagctttatggtattgggaattgtgatgataatgataaaattgatgattgtagaattgatttactagagaatcattatgaccaatttatcgaattagcaaaaagagcaaaaaaatattttgaagacaaaacagagcgaaatagagttttactaggcaaaaaaataaaggaaaaaccaagtttggaaaaatacggttttgtagagttcatcaaaaaaggtcaatttaaaattgcaatttga

SEQ ID NO: 88576 - DNA, 1644 bp, Vibrio sp. JCM 19232
atgaatgctaaatcacttcgtgctataaaatcacgagctaataaaggaaatatagcctctcgctttcagctttttgaaatgtttcaagatggtaaagatgttgaattagatttagaacaggcgtttgagcacttaaaaaagtgtacgcaggaattagcatttcatgaaggggacaatatctctgccaaacaccctttacgtttaaactctattagcttctatgacttcagacgctttgggcacttgtcgtttagtccaaaaaccaatctctctgtgatcatcggaaataatggtgcaggaaaaagttcaatcttagaaggcatagcaaaggctttttcacaaattaacaataaccttatttatcgcaatgctagcgcgcagaccttagaaccaacagatgtaagagtaggtattactggaacagctgagattatattgaggtttgaccttggtgaggggactcgatatcaaggtaagtttgttaccgcatctaaggggtttacttcaaatagtgcaactgatttgactgagcttaaatctctttctcgcctatttagaagggttaatgaggaaggaaataagactctaaagcaacagttagacttaccattgcttgcattctattcagttggtcgctctcaaattaaacctcagctaacttacaatgaagcagagtttgacatgaattcccgcttagatgtgattgacaaatcagcaattgacggtgaagggaacgttgaagactttttacgttggtttatttacgctgataatctagccaattatggtgactttgatcgtttagaccgaataaaatccgaggtagcggcgtataaatcaattctcgatgttcatacagagagtggagcaaaagaagaacatcccctgtacggtgtctatattgagcgactttcagatatgaatgcgttagaagcgaggctaagccagtttgatttatcgcttgaattgaagcgcttgaagtgcgttaaagatgcggttatctcatcagttgagactatttcggatatttatattgagcgggctacgggtaaggcaaaagttatgctgataaactctggtgtgtccgtgaactttagacaagcatccaaaggtcaacaagtatatcttgcattagttgcggacattgctcgtcgtatggcttacttgaatgttaacttggataacttattacacggtcaggggattgttctaatagatgaggttgaactgcacttacaccctagttggcaacaaggggtaattgaaaggttacaaaaaacgtttccgaatatacagtttattattacaactcatagcccacaagtcttagcaaatgttaaggctgagaacatttttattataactccaaatggtgatgacaaattctcattagaccacccacatcaagcatacggtttgaccagtaatgatattctaaacgaagtgatgcaacctcactccatgcaatctttagctcgaaatgtagttgtcgaagagcgtctatctaatattcaccggctcatatctgaaaaaaagtatgatcaagcaacagagtgtattgaggaactagagattgaaatcaatggtgaaattcctgagttagtcgaagcaaagctatccatcgacctagcgagttggaaatag

SEQ ID NO: 88577 - DNA, 702 bp, Vibrio sp. JCM 19232
atgtattcaatcgtaaagtctattcaaccaaattccttggttacatataagaatgatccaaatgcgagctatgaaaacctccctaaaaatgtaaagttggatataaaatggtcactgctgaccgagcaaggtttcgtgtgtgcttattgtatgactccgatcgatgaaaataagatgcggatagaacattgggcatgtcagaaagagcatgaggacaaggaattagattattcaaatatgcttgcttgttgtactggcaatgagaatcaacgagatgaagagtatatctgtgacaaaatgaaaggaaataaatctcttagatattctccagcatgctatggtcatagaattaatgagcgtatttattatgaacatgggaatggtacgattcattcaagtgttgcagagtttgatgagcaattaaggtcggttctaaatttgaattatcatcgtttagtttctaatcgtaaagctgctttaagagctatacatgctagactagagacagtgaaaaaaggcggaaacgctactaaaaatgatatagaaggcttacttagagatgtttgttctcgtagagcaacgaaagtgaaaaggaaagttgacgttttgggacaaaacttcactattgaatggccagaaaaacataagcctttttatggttttttaagtgattacctacaacacaaactgcaaggtaaatag

SEQ ID NO: 88578 - DNA, 1449 bp, Flavobacterium hibernum
atgaaaataaaaagtgtgtatataccagattttttaatcctaaaagattttaaaatcgtttttgaacataataaagacttagcagtcattattggtgataatggtagtggtaaatctaccctcctcgaagtaatagcttatatttttggccatttacacaaatattttgttttagatgataaaactgcggaatttattgatggttatgaaattgaatttacttcaacatataaatcgaaggtatatgaaatctatctcaaaagtatttatattagtcaaaaaacgaacactttcaaaccagtaataagaattaatggcaacgaaatgtcgatatcccaaattgaaaaagaatttggagggtttagtaactttcttccgtcgaggattggggtttactatgctggagaggctaaatttttacaagcgttaagtgaacattttgaaaataaatttattgatgacctcattaaaaaagggaatccgtacactttaaatccattaaatttgccgaaggaaagacctttttattatgtaaaagatatttatttaggattaattttgctttcacttttggtaaatgctggtaaaaataatgaaattaaaaaattattattaaagttattgggagaagttgatatgggaggtattgacactattataacaataaaaaaaccaatttgggcaaaaagtgataaagatacactatggggaataaactcaaattttgtagaacaatttgtacataagcttaatgctactgcgagtaaagttgacaatgagaagaaagacactatattttatacttattatggaatcttagatcttgtaaatttattttcagattcagaagatagtgactatgcttttatggttctcgataccttattttataatggtcttttagaaaatatttcaataacattaaagaagactgatggcacagaaatagattctgaaagattaagtgaagggcaacgacaatttattgttacaagtggtttaagcgctttatggaaagatcaagaaaataaattatttctatatgatgagcctgatgtttttcttcatcctaaatggcaacgtgaattcataccttttattaaaccatattttcagaattcgtttgcaattttgactactcataacccttcgtttataagtagtttagataattcatttggtagtctatatcattttgctgaagggaagttacatcagcataaatctaaatattacggaagagatgtcaatgatgtgataagagaaattatgggtggggaaattaggccagaatgggcagaaaaaaagattaatgaagttgatggtttgttggatgttgattatgaaaaaggtctgaaaaattttaataaattgaaagagttattgtcttcagatgattctgaaataattagattacaaacaaagattgattttttaaaagacttttaa

SEQ ID NO: 88579 - DNA, 681 bp, Flavobacterium hibernum
atggaaaaaatcataaaacttgggacagatccagttccgttagattctttcaaaaaagcaaggattgatgaaggtggtgaatttagagctacaacttatttagattttgtaaaccctgaaaaaaatagttacaaaaaagtactcctagaagagcaattttatttatgtgcatactgtaataaattattatcagaagagaatttacatcacttaaaaattgaacattggtatcctcaatccctatgtaaaaaagatgccaattataagactattaatgcggcagatatattacattctaatatgttgttagtttgcaacggtgaaagtgtaaatccaaaatatagacattgtgattcttctagaacgccgaaaaaaatgttaacaattaaacctcaagatagtgggtatagttttgatctttttttacgatatgaaggtggaaagttaatttctagtgatcatgatattaatattgatataaaagaattaaatcttaatcatgaagatttaatgtataaaagaagaattgttttggatcaatttagaaaaattttattatcccttaatagaaattctattaataaagtagcattattaaaaaaatattcgaatccaaatagtgaaggcagaaaagctcaatattgcactttgatcttaaacgaaattaaaaagatcaaataa

SEQ ID NO: 88580 - DNA, 1365 bp, Prevotella sp. P4-65
atgcgacagattataattaagaactttcgttgttacgaagaaaaagtcataagatttcgtcgtggcattaacctattgattggagacaattcagtaggcaagacctcattgcttcgtgtatgcaacttagtgatgaacgcattcttttccggatatagtgacgaaaacacagtatggaaaagtgcagacgatgatgattttcgtgagataaaaagcgaagatgtggttgacaacgaccttcctatcaacatcacctttgaccttgacaaagaagacctgccggatattgtattggaaggcggtaaaaaggtctgcctacagacgaacgaaccggaagtggaggaaggatgtgcaagattttatattgaaaagaaatcaaagaagaatgcccgcaatcttgttaccggtcttaagaacctaaaggctttttcttctatgctgcaaaagtcatcacataccatcaacaatggtgtagcaatacaaaagaacgcccttcctttgtttgcatactttaccaccgaggacatccacaccacaagaaagtttgacaaagaaaagaagaatttcaagaaatatccgcagaaaccttcgttcggatattttgaaagtttcgactgtaagggactgcttgactgttggataaagcgaatgcttgtgctcaaagaagcaaaaaaaggagaaagcgaaatagaatgtgtgagaaaggctgtggtccgttcattaggccctaagggatgtggcatcattgacgatatggacataagacacaacgacggtgaggtattcttccactattgtgatggcagagaagtgcgctccaatctcctctccgacggatacagacgcctggtgagcattgtggttgacatagctttccgttgcgcccttctcaacaaagtcatgtatggcgacgaggcatacaagcacactcatggaacagtaatcatcgacgagattgacgaacatcttcatccggaacttcaggttcgcatcatgaaggctttgcatgagacgttccccaaaattcagttcatagtaagcacccatgccccattggtgatgtcgtcagtggaaacaaacgaagacaatgtggtgtataagctggaatacatagatgggaagtattcgcataaggagctgaacacttacggtctggacgcttcgacgattatggatgtatacatggaccagacacctcgtgacttggctatcgatgcagaaataaaggcaatagaaaagctcattgatgcagaagaatattcagaagcaagaaaattgcttgatatgatgcttgaacgtccaggcagtgaagcaaatcctgaattaacaagaatagaggcaacattatcattctttgaagattag

SEQ ID NO: 88581 - DNA, 675 bp, Prevotella sp. P4-65
atgatagagataacgaaaaacaaagagcccaaagaatggactgaatatagaaacactccgggcgtggattaccaatcaatcccagaacttgtagaatcgttgttgaaagagcagggatatatttgcgcctattgcatgcgcaggatccctcatcgtgacaaattatataagaaagacggaataaaatatgtgcttacagacgaaagccatcgtattgagcatatcctgtctcgagataaccatcctgaaaggaaacttgattacaataatatggtgatttgttgtccaggacatattggtgacgaagaccattgcgaccgattgaaaggaagcaatgacatttcattctcaccgttggattctgcatttatatcgaccctgtcatataagactgatggagagattgtgtcatcagaacagaaatataacaaggaaatcaatgaggtgcttaaccttaatacaccgttgcttaaacagaacaggaaagagagttgggaaagtgtaaagagggaactgattgcaataaagaaaggcaatgcatggaacaaagccgtaatagagaaatacatcaagaaataccgctcaatgcacattaaagacggcaagtcacaatacattccatattgtgggatagttatatataatctccaaaagaaatataggcagattcaataa

SEQ ID NO: 88582 - DNA, 1350 bp, Prevotella sp. P5-125
atgagaataaatgatataaccataaaaaacttcagaggcttcatagaggagaggcgctttgagtttgactctaaaatgaatgttatcctgggtgataacacaactggtaagacatctctgcttcatgccgtgcagattgctctcggagcatatctacaggcattgaagattattcctggaggtaaggcattcagtagaaatttcttatcaactgactatgtgaagagatatagtgaggcaaataaggatttcatacaggatacgggtaaacctgagatttctgtaaacgctgatttctttgctattgtgtataatcttgatgattatagtcatgacgatcaagtccattcaatttcatggacacgttcgagtaacagtatatccaagagaagcgctaatgagttgatgttagaggtgacggctatggagcaggaaagaatatcggcagatacaacccataagaattccgtatttcctctattcttagcttttggaagcaatcgtcttgagaagaattatcgtaaggcgcagaaaacgcgtgcacgtgaatcaagacttgaaaaggcgtataaatgttcgcttgatggccagcaggtagactttaaaagtgcgtttaattggatttataaatacaattttagcctcaaaaaaggagcagagttcgaaggaacagaccgagccttttttgaagcgattgcacatgctatacctgcaatcaaggggtttagagttgatacaaagaataatgaactcgcagccagagttcaaatgacaaaagatccggaaccttattggttgacctatgacatgatgagcgacggttttaaggctatgatcaatatctgtgcagagattgcctatcgttgtattcaactcaatggattcatcggagtggaagcagtcagaagcactccaggtatcgttatgattgacgagattgatctcttccttcatcctcactggcagcagcacgtacttcaggatttacagaatgccttcccaaggatgcaattcatcgtaacaacccactctccgtttattgtgcagagtgtggatagccagaatgtgatagcactcgatagtcagaatgctcctatctctccgaataatagaggcatagaggaaattcttgcctgtgaaatgggtatgcagggaatgttgcgtagcaaaacatatagaaccaaacaggaactggctaaaaaatacttcgaactggtcaaagctggcaaatcgggtgaggcagaaactgaagaagtaaagaagaaactcaacgagttagagcttgaggcaggattgttacatgacccagcatacgaagcattcttaaaattaaatcgtggtaagctatga

SEQ ID NO: 88583 - DNA, 735 bp, Prevotella sp. P5-125
atgagaccgttagataaaaagaacgctggcgatagcattgacctttacgctgatatatttgatatgggtaccactgtacacacaatcaaatcagaatataaggaatatggtaaggctcgcaaagtgcttcttgctaattttggcaattattgctcgtactgcgagaattattttgccaatggtgctacgtttcagactgagcatgtacagcctaagggattggagaaatatgctcatctaaagactgtttgggacaattttttgctttcatgccctacctgtaattacaagaaaggcgataatgatgtaatatatgaagatattcacctccctcaccgtaataatacgtacttgagcttagtgtataaagaagcgggggttgtcgaagtgaatccggctttatctgcagagtcgcaggcaagagcacaagccctaattgaccttgtaaagttggataatcctgattcggaaacagactttcgttgtgatgtacgcagacaaacctgggacaaggctcagatgtttttaaaaaagtatgagaatggcgaatatgaactccgcgatatgatcaatacaataaaggagtgttgctgttggtcaatctggtttactgtgttcaaggatcatcctgaggtacgtaaggaattgatagataagtttccgggtacggctaaggactgttttgatccaaacaatggatatgaaccaatagcatgtgtttctcatcctgtttaa

SEQ ID NO: 88584 - DNA, 1365 bp, Prevotella sp. P4-76
atgcgacagattataattaagaactttcgttgttacgaagaaaaagtcataagatttcgtcgtggcattaacctattgattggagacaattcagtaggcaagacctcattgcttcgtgtatgcaacttagtgatgaacgccttcttttccggatatagtgacgaaaacacagtatggaaaagtgcagacgatgatgattttcgtgagataaaaagcgaagatgtggttgacaacgaccttcctatcaacatcacctttgaccttgacaaagaagacctgccggatattgtattggaaggcggtaaaaaggtctgcctacagacgaacgaaccggaagtggaggaaggatgtgcaagattttatattgaaaagaaatcaaagaagaatgcccgcaatcttgttaccggccttaagaacctaaaggctttttcttctatgctgcaaaagtcatcacataccatcaacaatggtgtagcaatacaaaagaacgcccttcctttgtttgcatactttaccaccgaggacatccacaccacaagaaagtttgacaaagaaaagaagaatttcaagaaatatcctcagaaaccttcgttcggatattttgaaagtttcgactgtaagggactgctggactgttggataaagcgaatgcttgtgctcaaagaagcaaaaaaaggagaaagcgaaatagaatgtgtgagaaaggctgtggtccgttcattaggccctgagggatgtggcatcattgacgatatggacataagacacaacgacggtgaggtattcttccaatattgtgatggcagagaagtgcgctccaatctcctctccgacggatacagacgcctggtgagcattgtggttgacatagctttccgttgcgcccttctcaacaaagtcatgtatggcgacgaggcatacaagcacactcatggaacagtaatcatcgacgagattgacgaacatcttcatccggaacttcaggtgcgcatcatgaaggctttgcatgaaacgttccccaagattcagttcatagtaagcacccatgccccattggtgatgtcgtcggtggaaacaaacgaagacaatgtggtgtataagctggaatacaaagatgggaagtattcgcataaggagctgaacacttacggtctggacgcttcgacgattatggatgtatacatggaccagacacctcgtgacttggctatcgatgcagaaataaaggcaatagaaaagctcattgatgcagaagaatattcagaagcaagaaaattgcttgatatgatgcttgaacgtccaggcagtgaagcaaatcctgaattgacaagaatagaggcaacattatcattctttgaagattag

SEQ ID NO: 88585 - DNA, 675 bp, Prevotella sp. P4-76
atgatagagataacgaaaaacaaagagcccaaagaatggactgaatatagaaacactccgggcgtggattaccaatcaatcccagaacttgtagaatcgttgttgaaagagcagggatatatctgtgcatattgcatgcgcaggatccctcatcgtgacaaattatataagaaagacggaataaaatatgtgcttacagacgaaagccatcgtattgagcatatcctgtctcgagataaccatcctgaaaggaaacttgattacaataatatggtgatttgttgtccaggacatattggtgacgaagaccattgcgaccgattgaaaggaagcaatgacatttcattctcaccgttggattctgcatttatatcgaccctgtcatataagactgatggagagattgtgtcatcagaacagaaatataacaaggaaatcaatgaggtgcttaaccttaatacaccgttgcttaaacagaacaggaaagagagttgggaaagtgtaaagagggaactgattgcaataaagaaaggcaatgcatggaacaaagccgtaatagagaaatacatcaagaaataccgctcaatgcacattaaagacggcaagtcacaatacattccatattgtgggatagttatatataatctccaaaagaaatataggcagattcaataa

SEQ ID NO: 88586 - DNA, 1428 bp, Vibrio harveyi
atgaaactaacctcggttaacttaaatgacacggaatatcaactttccaatggagatgaggataagtccaatacatttacgatcattataggaaaaaatggtacgggaaaaagcaggctactaacaaaaattacgaatacacttctaaaagctaaacgctatagccaaaaccatcccaaactgaaacacaaaaaagttcaagaaatgacctttaagagcaaagatagggtcattactatcaactccgcaatgggtaaaagtggtagaatccttgagagaaacaagcgaacaagagaatatatgtgtaagaagctcattgtagcttcaataagtccctttgataaattccctttaccagaacaaaatctaagtcatagaaatagcaaaagtttttataattatgtagggtttaaaactgataaaaactcattatccgacaaaaatctattaattagatttgcaacttcgattgttagttcacgaagtaatattgcagtaaaaagaacccttaggctattaggttataaaagtgatatctccattcgattcaagcataattcagatcgatattttagaactagtgactacctaaataataacttaacatttagtgaaatcgttttaaacaacaaggaactatatagtaaagttctacacgataataactatttaatgtcaaaaatgattcttgaagaactaagccttgacagcaacacaagaattggtaaaaaaaccataaacgacttgattggcaatgaaagcttacctgaattttacagcacaagtaatgaactagatgacaaactacgatcttcattaattcgatcattggagttaaatatatctgaagtatccagcattgcattaagaaaaataggatcaaataataacctaactcttaatgacgctagttcaggcgaacgttcattgttattacttgtttgctccattgctagccaaatcagcaacgatagtgtcattttaatagatgaaccggagatcagtttacaccctgaatggcaagaaacatttatcgatcttatatcaaaagcgtttgcacattatcagaggtgccactttataatagcgactcattctccattagttatatctaatcttcccaaagaagattgttatattttaaacatggattccaataagacatttgaatctcaggactatttcaataaatctgctgattttcaattagccaaactttttaatacaccaggtttccaaaatgagtatttgaaccgactatgcgtttctgtactaagtgacttctccgaaggtaaagtcatatctgaagaacaagaaaataacattacatttttaatatctattcaaaatgagcttgatgaacgagacactgtaaagtctttaattgaaataatcaaaaaggcttgggaagtttcaaagtcatgttaa

SEQ ID NO: 88587 - DNA, 657 bp, Vibrio harveyi
atgttaacacccatttcatacactcaagatgataaagacttaattgcacgcaaaaagtctgaaaataattttactcataagtcttggtctgatgaagatttaacaccaattaaagactctataaaaaatcattaccataaaattcaaaaaagcatttgcccttattgcaagcaacagctcaattctacccatggtagatattgggatatagagcatattatacctcgctcacatgtacctaacttcatgtttgaaccccaaaacctctgcatgagttgtgttgagtgtaactcagaaaaatcagacaaaaaggtaactagtagtacagcaaaaactagatatccgactaacacactgcaattctcaattattcaccctcatcttgacaactatgaagaacacctattggttgtcgaagctgggctgttttattaccctttaaagccaaaaggtaggaaaaccgttgaggtctgtgggctcaatcgtttctacgagtatgctggttttggcaacaatgggaacgtatttcaaacgattcaagctttaaccaccgcggcttcatcggtcgaagatgatgtcataaaacaacaaatactcggacaaataactgcactagcattgcgtggtatggttgaaaataagcaaagtactgattga

SEQ ID NO: 88588 - DNA, 1443 bp, Vibrio harveyi
atgtctttcagagtcttacgagtttcgatcgatggcaagaatcatgatttatcgcttccggttgagaatgatgaaaattttattacggtgattaccggtaaaaatggtagtgggaagagtcgaattttagagtttatttcgaataactttgtacagaatgatgactttttgaggttttctccccatagatggactcgtgggcttaacaagcttaggcttaggtatgactctaacacgataacctatcaatctagtggttatgatgtggtgggagaaattcttcataaagacctagcaatggcttttgtgtcagaaagtcacccaaatgaacgatatgatatttttccatcaaggcttgtatgtttatctacaagtccattcgataggttccctccaactaaacgtactaaaaaatctgatgacgtaacttgtgaggagcctcaagaaagcatttatacatatgtgggattgaaaaacagctctgcagcactgtctgtcaaaggactgattacaaacgtcatagatactatattgaagtcttctgaaagaattaaaaaaaatgtaggagcgattagagacacacttgactatcttggatatggaaaaagaatacggttaacgtttaaatcgacgctaccgagtaatgccttgctctacggcgacctcaatgcttccgtactgcttattttggaagagcgccctgaacttacagagcaagcagatcacatattaaaagctgtttcagttttgcgttcaaagcacgctaagtcgaagggacagttttctgtatctatgcagttagtcgaacctgagcttttaagcgatgaatatatgcaagctgttaggcttttgctgaatctgggtttgataagaattttaggttttaagctgtctctcaaagctgataatcgaaaatttattacttttaaccatgccagttccggggagcaatgtttagccttaatgatgttaggcatagcaagtgttatcgaagacaactcattagtttgtatagatgagcctgagattagcctgcatccagagtggcaggaagaatttataccaatgattcaaaagtcctttaatttttacaaaggttgtcactttatcattgcaacgcattcgccattgattatttctaagcttaatgcttctagttgttgtgttctcgacttagatagaaacaaattagttgaagaactcaacagcaaagagttttcgtctgattatcagttggccactctttttgattcgcctggatttaaaaaccaatatttacttaatgagagtctcgagatcttgtctttgttatctaagtctgtgtttattccagaagatactctttcaagagctcgaagtattattgacattattccaaacttagatgaagaagatcccgttctctctttggcttctgcaattaaaaaagttgttgaggtttag

SEQ ID NO: 88589 - DNA, 639 bp, Vibrio harveyi
atgataggagctgaggttacttattcttgcgatgagcaaagaattattgatgattatttgaaacataatggttcaaaaggcgaagattggtcgaagggaggctttgatcccattagaaaatcaataaaggtacactacaggaaagagcagaactacacatgtccctattgtaaagtaaagtatcctgtgaagcatgggatggtttgggatattgaacacataatacccaaagataagaaaccacagtttatgtttgagccgaaaaacctatgtgtctcatgtaaagactgtaatggggcgaagggaaataaagaggttctagttaatagtcgtcgaaaaacttttcctagtaagagctcagactacaaattagttcatcctcatttggatgattatgaaaaacatatagacgcggtttgtccgggggatttatatagacctttgagtgaaaaaggagagtttacgattgtgacttgtagattactccgtttctatagcttggtggataaagagcaaccggacaatgagattgatgagcttgctaaggcaatgattagcgcttcaggggttgctagagagttactggaaggtgagttggtaaagagaattaaatcaaaacagcaagcaagtgaagaataa

SEQ ID NO: 88590 - DNA, 1245 bp, Vibrio alginolyticus
atgtctggctatctaactaaaattaaagctaaaattccttattctgacaaagaagtagacatcaacgtcgatggcaaaactctgatcttaactggtggaaatggttgcggtaagacccaactacttaactatcttaacgaaaaactacatgaccgcataataaagagagacaactctgcgttagtacaactagaacaacaaaaagtacgttacgaaaagatgattgatcgtgatggccctgcaagccagagttatgattcttgggtgcaacatttacaaaagactgttcagaaaatagacgaactcaagcaaccaccaataacgttatctgatctggaagggtttattttaaaacacaaagatttgaaagcggtccttcttcatttcgaagcagggagaaagtcagacatcttgaaaccatcgtcagttacatcattgagtagccttaaagaaaaagatcgattatctgtaacaaacccacatcaaaagaaaactgcatcatccctctttgaagagttcctggttacaagtattgccaatcaggcattttctgaatccaagaaaattaacaatgacccagtagaagcagagcgcattgataaatggtttaagaaactagaggctgatttgcagaacctctttgaagatgatgaacttagactcgttttccaatcggacacattctcatttgagatacatcagccacacaaagaaccctacacatttcaaagcttgtcatctgggttttcttcaatcatggctgtgtatgccgatttaattaccaaaatatcattacgtttaatagatccagatgacctaacgggaatcgttttaattgacgaaatagacgcacaccttcatgtatcaatacagaaaaaaatcctagctttccttaaaaatgcatttccgaaagttcagtttatcttgactacacattcaccgtttgtagtgtcatctgtagatgatgctgtaattttcgacctgtctcaactcaagcaagtcgaagatctttctatgtattcttatgaggctgttctggagggcttatttggtgttcttccagtttctagtttacttcaacagaatattgaagcattagccaagttacttgaaaagcaccctgttgatgttgaagaggttcagtcacttttagagaaactgcctgaagatgaagattcgctggattctgaatcactttactttgttaattccgcaaagttagcaatcaataaagcgaagaggtag

SEQ ID NO: 88591 - DNA, 669 bp, Vibrio alginolyticus
atgttcaatgtagttagaagtgaaccagctcctgcatcattagcagatgggaaaaagtatgactccgaagatgtttgggaggccttaaaaaaggtatttcacaagaaatgttatatctgcgaaacatttgaaccacaagatattaatgtagagcactttgttccacatgagggtgatgaaaaattaaagtatgactgggacaatttatacttttcatgtggtcgctgtaacaatatcaaactcgctaagtatgatgagcttttagattgctgtgatcctactattgatgtcgttcgtgcaatcaagcaccttcctccatcgactccatatgcgaagaaacttcatattaaagcgcaagccactgattacaagactgaattaactgcggagttgttagataaagtattcaacagtgagcacactccaaacaaagctgtttcctcggcatttctaagaaaaaaagtctttgaacgatataacctactactatcgcaattgaacaaatactacaagccaatggcgctacaagaagaaaaggacgatgcggtcgcacgtatcaaacttctcctaaaaccatcgtctccgtacagtgcattcataagttggtgcattatggacgatgaggagttagggccaatgttacatgattttataggtgagactgaataa

SEQ ID NO: 88592 - DNA, 1443 bp, Vibrio harveyi
atgtctttcagagtcttacgagtttcgatcgatggcaagaatcatgatttatcgcttccggttgagaatgatgaaaattttattacggtgattaccggtaaaaatggtagtgggaagagtcgaattttagagtttatttcgaataactttgtacagaatgatgactttttgaggttttctccccatagatggactcgtgggcttaacaagcttaggcttagatatgactctaacacgataacctatcaatctagtggttatgatgtggtgggagaaattcttcataaagacctagcaatggcttttgtgtcagaaagtcacccaaatgaacgatatgatatttttccatcaaggcttgtatgtttatctacaagtccattcgataggttccctccaactaaacgtactaaaaaatctgatgacgtaacttgtgaggagcctcaagaaagcatttatacatatgtgggattgaaaaacagctctgcagcactgtctgtcaaaggactgattacaaacgtcatagatactatattgaagtcttctgaaagaattaaaaaaaatgtaggagcgattagagacacacttgactatcttggatatggaaaaagaatacggttaacgtttaaatcgacgctaccgagtaatgccttgctctacggcgacctcaatgcttccgtactgcttattttggaagagcgccctgaacttacagagcaagcagatcacatattaaaagctgtttcagttttgcgttcaaagcacgctaagtcgaagggacagttttctgtatctatgcagttagtcgaacctgagcttttaagcgatgaatatatgcaagctgttaggcttttgctgaatctgggtttgataagaattttaggttttaagctgtctctcaaagctgataatcgaaaatttattacttttaaccatgccagttccggggagcaatgtttagccttaatgatgttaggcatagcaagtgttatcgaagacaactcattagtttgtatagatgagcctgagattagcctgcatccagagtggcaggaagaatttataccaatgattcaaaagtcctttaatttttacaaaggttgtcactttatcattgcaacgcattcgccattgattatttctaagcttaatgcttctagttgttgtgttctcgacttagatagaaacaaattagttgaagaactcaacagcaaagagttttcgtctgattatcagttggccactctttttgattcgcctggatttaaaaaccaatatttacttaatgagagtctcgagatcttgtctttgttatctaagtctgtgtttattccagaagatactctttcaagagctcgaagtattattgacattattccaaacttagatgaagaagatcccgttctctctttggcttctgcaattaaaaaagttgttgaggtttag

SEQ ID NO: 88593 - DNA, 639 bp, Vibrio harveyi; identical to SEQ ID NO: 88589

SEQ ID NO: 88594 - DNA, 1245 bp, Vibrio alginolyticus; identical to SEQ ID NO: 88590

SEQ ID NO: 88595 - DNA, 669 bp, Vibrio alginolyticus; identical to SEQ ID NO: 88591

SEQ ID NO: 88596 - DNA, 1224 bp, Yersinia enterocolitica; identical to SEQ ID NO: 86710

SEQ ID NO: 88597 - DNA, 654 bp, Yersinia enterocolitica; identical to SEQ ID NO: 86711

SEQ ID NO: 88598 - DNA, 1443 bp, Variovorax paradoxus
atgcacggtcgcgcgagcgggtcgtgcgcgggacgtatgttgacgcatctcaattccatgggcggtggctttgagcggagactggccatcgcgccgcaggttgaaccaggaggaaactggtttacggtcttcattgctgaaaatgggggacgcaagagctacctcttgcggtgtttggtcgaggtggcactcggaaggcaccaatacgtggccgacaaggggtcctccatccttctcaccgcacccgcgaaactgccaaggcgggtcatcgcgatttccggaacacccctcgatcgctttccacgaactggaacgcgtgacctcaagatccggcgccgcaagatgcccgacgatttcgtgtacctcggtccccgggcgagcaatgggatggcaggagtcgcgcaaagcgagcgaagcctcgtcggctcactgctgtccaatcgctaccgtctgaaggagcgggcgtcgctgttaacggaggcattctcgtcactgggcctgtcaccacgtatcgacgtgttactccaaggctcttccgagaggggaggttcacgagaaaagatcgcagagagcctatacacactggagcagtcgcttggggaccgacccgaggatgaagccctcgagttgtactccaccatggagaagtatcgagccaatatcggcaagatcaatcgggaactcgaacgcctctccaacaagacggaggctaggcttcgtctgggaatagatcacgccactataggagctaggaccttcatcgacgtcccgatgtgggagctgctcattcgccttggccatgtcgtgatcaccggcacgcgctttcacaggatcaagcacgatgagaccgtgctgggtgatgaattgagctctgggcaatggggatggcttggcacttttgcatccctcgccgccgagatcagggacgactcgctgatcctagtggatgagccggagaacagccttcatcctcgctggcaacaggagttcatccgggagctccatgcgatggtctccaatttcagggactgccaggtggtggtcgccacgcactccccgctgatcgcctcggggatatccgaggaatggggaagcatccgcaccctcaccaagccgacgagaaagggagcgcacgtgcacagcaaggaactccccactgcattcggttggagcgcctcggacgtttatggcgagatgtttggactggaatcgactcgtgccccggatttcatggacgacgccaacaccgccctgcgcaagctgtcgatgaggaggcccatcaccgacgatgagcgtgaacagtggatcaagcaatttcgcggtcgtatcgacattcttccttcccacgattccatgcgtgatgtactcgaagggatcatcgcccggcttaagaagcaagacacgggagaatcgcccggtcatggcaagaacaagaacgcatga

SEQ ID NO: 88599 - DNA, 822 bp, Variovorax paradoxus
atgagccgattcagtacgatcaagttcacgcgatccgacaacgccctgctcaacgaggtgcgcgcattggcgggtaagaagtggtcaaccgaccttgacgcgatcaagcgcctgaggacccgactgcgcgagctccagaaccatcggtgctgctactgccaggcacctatcgagtcggacgaatcgggatttcgcgagctcgagcacatcctgccaaagaacaagagctacaggtgcacgcatgcgcgagggaccagcaacgaccaggataaacgccgctccacgcttggctaccaggaattcactttcgagcctatcaacctggcgatcagttgcaagcaatgcaacaactacaagggtatgcacgaccctctaaaggacaggaccacggcacgtcccctcaacaagttcccgagcgccgctcaacttatctggttccaccctcacacggaaaagtacgagacgcacatcacgatcgatgaggacttcggcttcactggccaaactgcgggcggccgcgccatcatcgccgagtgcaggttgttcgactcggaagtgctgggccgcaaattccttgagcgggctagggtgcgcgccaagcaagccgaatccttccgacaggcagttgacgcactcgccagcggcatcgagctcaaggccttcagcaaagcgcacgccatccagacattggcgcaagagcgcgggattcccacggcagaggccaaggacatcatcaacaaacgattgacctatgcgacgagtgtccagacgatgaaacagtatttcgattcgatccttaaatacgaggtcaatacgatctga

SEQ ID NO: 88600 - DNA, 1368 bp, Pseudomonas viridiflava
gtgaaactcaatcagctatctttgcgggattaccgctgttttgatgcgctcgaaattgattttcatccggaacttaccgttttggttgcgagcaatggtgcgggtaaaacatcgatcctcgacgctatcgcgatagcatttggaccttatgttggggcattcgatgaggctgttggcaagcattttgaacctagtgacattcgtcaggtacgagcgcgaaccacggttacccatgagatggaatattctgccaagggagtaagactcgaagcgagaggtataatccctggtagcgtcgcagagcgaatagatgatttgccatcaagatggcgacgtagcctcactggtcctactaaaaccaagacgtcgatcaaagacgcaaaggagttgatagattacggcaagcgtatgcaggaagctgttcgtacgccaggcagcgatgtggtcttgcctctgctcgcttattatggcactggtcgattatggcaacagaaaaatcagaaaaggcaatcatggtccgagaaaattgttcggacgtctcgcactgtcgggtataccgactgcctggaccctgcatccaagtacaaagcgttcgtggagtggtttcggtactggaactttaatgccaaagagctgcgtatcaaggccttggaactgagagaaacggctgtcgtaagcgaatttgatgggtatatcgaatcggtcagtgctgccgtcaatgcatgcctcgaacccgccggttggaagaacatcgaatactcgttctcgcgggatgctttggttgcccaccacgatgattttggtgagcttcctgttgagttattgagtgatggtattcgcaatatgattggcatggttgcggatatcggatttcgagcaactaagctgaatggccaactaggggcccacgccgcgaagtctacgccaggaatcgtgctcattgatgaggtggatatgcatcttcaccctcgatggcagcagacgattctttcgcagcttagagatgcatttcccagacttcaattcatcgtgaccactcacagcccacaggtattgacgactgtcccttcggagtctattcgtattcttaggggtaataaggtttattcggcgccgcccggcacggagggttcggagccggagcgaatgctgaagcaggtgttggggctggaagaggtgcgtccgcctggtaatcctgctacacaagaattaaaagagtacctagcgttagttgatcgagaccaatggagcagtgagcgtgcaaaaacgcttcgcgagcgattggatcggcgctatcaagggcaggaacctgctttgttggatgctgacttgcaaattgacaatcgtaaatgggagctgggcgattga

SEQ ID NO: 88601 - DNA, 819 bp, Pseudomonas viridiflava
atgggagctgggcgattgaagctggtggcaaggactgccgagcctgatgaattgaaagcctatcgagaagccaatccgacgtttggctgggacgagatgcgtcaggatgcagaagggcgtgcggtctatgacgttattcgcccacgcttgattgaaggccaaggcggcatctgcgcattctgtgaaattgagatcataaatctcgatccgacgcactgccgcgtcgagcactttcatcccaagtcagacaggtcaacgcctcacaactgggcactggactggcaaaacatgattgctgtctgcatgggtggttcacaacgacatcaggtcttgccttatacgaaagagcctttacctgaaaaccttagttgcgatgcgcacaaggataaaatgattcagagccatcggctggaggagtgctgcgaggggtggattatcaatccggtggctttgcccgctttccccaggctattttttctagaaaaaagcactggggaattgttgccagatgggcaatgttgctcggaagtcagcgtggagggaaacaagcaccctactactcaggctctggtagagtacacgatcaacatgctgaatctaaactgcgaccgtttgtgtgaggctcggaagagcgtactttggaatattgagcgtaacaaaaagcgactgcgtgatgctgcgaaaacaccacggcaaggtatggatgagttggcgggccgttttttacagcagcggtggccaggcttttttactactatacgtttctgtctaggggacgcagcggagcgatatctacaaaacaataagtatcgtgggtga

SEQ ID NO: 88602 - DNA, 1323 bp, Flavobacterium sp. MEB061
atgaaaatttcaaaattacatatcaatcagtttagacatttagaaaatctagattttgattttacttatcctgaggattttcacattgaagaaaaaagaggaaaacctttagagaagatatgttttattgggcaaagcgctacgggtaagactggtttattagagttaatttatcaagaatcttatagacttcaaaaagccgttagatttgaagaaattccagaacataaaacactaaattttaatgaatcaagaggagtaattactttcgctactgatattgttaatcaaatttttgaaatagaaaaaactaatcaagacgcaatattttatcaacttcacacaaaaaagaatttttctgaaaaagaaattgaagaattaattccatttaaagaagaactaaacttattgtattttaaagccaatttaatatcagaagcgaatattgatatttttacaaaaaatcctattgatttaattgaagcatatcgtaaaaacactgaagttaatatagaaaatttattagacaaaagatcttttagcaatcgaaacttagtttttaatgataatgttaatcctaacatttggctatatcttttaagtgaaattttagaatatcgtaaaaatttcacacaaagaatctctgaattaattcacattaaagatggatctgtagatttatcaaatttaggttctgagattcaaaaatggcaaatagataatccaaataaagtagaattatttgcagaaaaattcaatcctattttaaaaaaattatccctagagattgatatagtcaatactttgtatccaataccaattaaaaacaaaaaaacaaatgtaagtattccaattgaaagtgccagtacgggtactaaaggtcttttactgtcatttttgcctctttataaattaaacacaaaagattcaataattttaattgatgaacctgaaagatccctatatcctgatatgcaaatggatttaatggattattataaaaatctcgccccagaagctcaatttattgttgcgacacactctccttttattgctgcttcgtttgagccagaagaacgattcattttacattttgacaaagaaggaaaagtacaggtcaaatctggtaaatcacctattggagatgatccaaatgacatgctttataatgattttgaaattgattatataaacaaatatggcaaaaaagtatataatgaatatcttgaaaaaagaagacaattgctgtttgaaaaaaatgaagaaataaaacaaaaacttcaagatgaaattgaatctattggagataagtataatttttaa

SEQ ID NO: 88603 - DNA, 591 bp, Flavobacterium sp. MEB061
atgaaaagagttttaaaatctccgctttctctaattatttctgataagatcatttataaatctaagggagataattctaaattaggttctcttcttttaaaagaacaaaaaggattttgtgcttatacagaacattatattggatttgatgatgcaaatgacactgagcattttaatccaaatttaaaagatcaactagaagacaattattataattggtacaaagtcaaacaccttccaaatcaaagaaaaactaatagttggattgagccaatattgatgccatacgccgatgattttgaaagtagaattatctatgatgaaggcgaatattttgcaagacctaatgacgatgaagcaaacaatctaatcattttattagacttaaataatcaaaaaagagttgaagacagaaaaaactacattaagcgaagaagagaatctataaatgatcgaaagcttcaaactgatatagaaataaaaaaatattttcaagacaaaattgataatgaaattaattcaatttgttatttaagagcgattcaagaagaattcaaaatagacatttggaacatgattcctgaattataa

SEQ ID NO: 88604 - DNA, 1257 bp, Bacillus thuringiensis serovar kurstaki; identical to SEQ ID NO: 87076

SEQ ID NO: 88605 - DNA, 648 bp, Bacillus thuringiensis serovar kurstaki; identical to SEQ ID NO: 87077

SEQ ID NO: 88606 - DNA, 2208 bp, Pseudomonas fluorescens
atgtaccatgatgatcgcgaaatcagtgccaaccggattatcgaaacgcttgaggcccgcataaagggggtcatcaacgtccccgaatacacccgtttcctgttgatgctggtgatcatctccaaggtaggcaagccttccggcacgctgtacgcgagcgcccaaaaaatgatggaaaacccggaactggcttcgatcaaactcagtgacttcaaccatctgttgcttgaagcagaaaacatcattgaacctggcgaggacgcggactttctgctgacgcatctggccgcgaaagctatttctttgccattagggatcgattatcgccatccgaagctcgtctccgcactggttggcaccattcaatcgaccttgccgacgtccctgtttgaagtaaacccgaacacagccgaactttccctggggttgctgggtgctcaccccagggattcttttccgatgtccgatgatattgccccacacctacgagacctcatcagcttccgactggctgcaatggatatccgggctaacttcgtgaccgccaagaactatcgccactcgtcgccagcgaccttccttgtggatgcgccctaccctgactcgacccaaatgctctatgggcttaaaaacatgctggataatcaggtccagggaaggctggtgctgatctataactgggcccacgcaaatacttccgatacgtggtctcgattgtatgcgctgatcgaaaaccgcggccgggtggaagccgtcatcggcttcagcagcttgcccaacgcttcggattactgcacggcaatcattatcaacaccgatttgacccagcgggaaacgctttacgtcgacgtttccttgtcaaacaagtcgctgccgccgctcgatggcatcgagcgaatgctacttgccggctgtatctacaacctttggcaaggccgcgctgcccaccggcacgacgagtacctttccagtgaggtaaggcgttttctcaacaactatttcagcgcaggcttcagaccgatctcgcggctctgcaatacgacgcagaaacggcccggcactgtcctgaaagccgtcctgaccaagagacttctactcaagactgcctccggcggatcttcccaacgaacccgctccgataacagcaagttcattgcggatgttctgttacgccgtggcaagccctgttgtgtctacattatcggcaacaacggcgagggtaagagtttcctactcagcgacatcgcctaccaactggcagaagctgaaaatcgcagtgtcggcctccccttgtctcatgcggaccgcttccccgccgacgatactgctatcaagcatctgttcgattacaaaagtgcacgcaacacccagataaccaaagagatcggtgctttttcatccgatcccggcaaagtcgagttactcagggaatgcttgggtctgatcggttttcgctcgccgatatatctgatcctgaagtccgaactcagccacgaccgcttcggcgaccagcgtcgagaaacactcgatctttcagacgtcgaggatatgcgctacctcaaccgtgatagaagttcgatcggcgagtatgaggtcaacttcatccgcgaaaggcaccgtacgatccccttcaacaacctcagctccggggagcaaagcatcatcggcctgttgatcaagatcctcgcctcggactccggccagaccacctttttgatcgacgagcctgaaattagcttgcacgtcagttggcaacagcggcttccgcgcatcctcaatctgctgagcgatcgcttgaacgcatccttcgtgatagccactcatgctcccatcctcattgccaacgcagcagatggcgatatttgctacctgtccaggatcggtatcctggatgagatagcggccgaagagcgacactccgtggaaacgctgctcatggagggcttcaaaacctataccccgcacaatcgtgaagtgcatgagcaatgcgcgaaactggtggccgcccttatctcggatatgaacacacccgatgcggccctcaagcctgaagcggcaatcgagaagctcaaaacattcaagacgaccattgagaccagcggccggggcgaacaggatgagcgccaggccagcgatctcgatttgatcgaaaagaccctggcagcgatcgaaatgctgcgtgaagaaagtgagccttaccatggttga

SEQ ID NO: 88607 - DNA, 807 bp, Pseudomonas fluorescens
atggttgatcttacccaggcggagatggacgcggtacgtgcacgctatgagggtgcatgccacgaacgtgagattcatcgcaagaagacgctcgaacatctgtcgaagcaggatgccctcgccgttgccgaattcaaacggcgccaaacagggttgcgcgcctcgaaaaccgatctatggagcaaactgacgaagcacaggaacggttttaaatccgggataaccggcccgttgatccgcaaggccttgcgatcatttctggaacaggaacagaacgggctttgctgttactgccagcgtccgctcgttaatattgcctatgccaaacccattgagcacattcttccgcgggcgacattcgtccagtacaccttccacttctggaacttggcgattgcctgtttcgactgcaaccagataaagctcgacaatgtctgggctggcaccgacaaacatggtttgcaagcgtatccggcccccgctacgttcactgaaatgtatcatccaaggtttcatcgctttgccgaacatgtacgcttcatccgcgtacagaccaacgaccacatcatttctatctatcgtggtgtaagcgaacagggccggcatctttgtctgaatctgctcaaagacctgtctgcacgtgagatcgtgcttaacagcaagccggagctcaaggatgcgctggaggtgatcaatgctcatgtggcatcaaatgaaggtaacctggcgtctgagctggagacgttccgtcaggcacttgcaaagtccacatccctgttgatcaaaaatggcggtgccgccagttag

SEQ ID NO: 88608 - DNA, 1251 bp, Pseudomonas fluorescens
atggacgatgtgtacatagaaagtttgcatgtaagcagtgttcgtcagttcgatcaattcaatatagtttttaataaaggattcaatttcattgcaggtccgaatggatgtggtaaaacttcaatactgacatgcattgctcattgcttcagcggcgttgatagctcgtcgcgctttgatgaaaattccgctttttgggttaatatcaccaatgccgataataagtatcgagtaggccttggtcagggggctttccaaaagggtgcatataggaatccaagaatacagctatgggctgtgccgcctaccgaggcggataggatatcactagatagctcaaatcatactagagcgttggccgggttttgtcctttgtttattggggcttctcgcagcattaagtataaggcgcttgcgggtatggctagagaggaggccatcgagcaaagtaggcgcgggtatatttctaacgctaccaactctctagatggatcatggagtccagatataaagcagtggttagttaatagatactttattatcgacaaggaatgggccgttgaggaaaggcttaattggaatcatttacttgaaaatctaaaggaggtaggtccttttgaaagctgttttacttttgttgagataggaagagatcatgagcctgtgttttctgtatatgggcggttgtgttatctggaggagctttcctctggttatcaagcggttctttcaataattgctaatatttttgaatgggtcgaaagtgtaaatgaagtaggaagtcggagtgtgaaagatgcaaaagggtctgtgttgattgatgagttggatcttcatttgcatccggaatggcaacttactctacgagatgcactccacacaatgtttcctaatctacagttcatagtaaccactcactcacctcatattctcgcttctgctaaggctaatgaagtcatagctatgccatcaggaccatttcccctgaactgcaatgtggggcccacatcaaattcgtatgcgggatggagcactgatcaaatactccttgaggtcatggatgtgcaaagcttggagaataaactccatgaggagttggtggcgaatgcgctcgatcaaatagataaaaaatccattgacgggttgaggctggctattgtcgagctgtcgaaagttagtcatccaaacgattctatagtaacggtattgggtgcgcgtttggcatctttgatggcgactcaaaatgattaa

SEQ ID NO: 88609 - DNA, 747 bp, Pseudomonas fluorescens
atgattaagctcacaaggaaagatgagcctgaagtattgagaattaataaggttcgatggctggccgagttgcgcgctgctattgataagtacggttcatacaagaatatacctatttctgaaaaaaactccctaacggccagctaccgtcatcaagatataaaagccgcattgattgaaagctcatatggtaaatgcgccttttgtgaatgtgtaccggctgagggtgggaatgtagaggttgaacattttaaaccaaaatctatttatccggacctaactttcgaatggactaattttttgccgtcgtgtcgaaagtgtaatggcactaagctttttcatgataccgggttagagccgatcatcaatccttatgatgatgacccaagcttggttttttattttgatgagttgcaattaaaagtcttggagtcgactgatgcatctatcggtttgaaaactatcgaagtgtgtggtttgaataccgttcgtctatggcgtccacgagcagatattttggtcagtttgtattgctttgccagtagtttagaggaggctttgactaatttcaaagaggcagaaacggaaggtaaacgagtaagcaggtttagaaaaatttcagaggctgttgatcaaatagagctcctgacgaaagagaaagaaaaatattcctttttttgtcttagctttttgaaaaaatgcaatgcatatatagaggctaaatcgatacttgatgagggtctataa

SEQ ID NO: 88610 - DNA, 1263 bp, Pseudomonas fluorescens
atgcttgattatctgcacatgaaaaacgtggggcccgctcctgagctcgaagttaactgggcgccacgaatcaatctgatcacgggtgacaatggactggggaaaagctttttgctggacctggcctggtgggcgctgacgcgcacctgggccaatacgccagcgcttcctgtaaaccccggcaagtcctcaatcgaatatgttgtaaaaggtaaatccggcgtcgcccagcctgtcgtatcgacctataaacgcgaagacagctcctggcccttgaagcaaagccgtcccaccatgcccggcatcgtggtttacgtacgcatcgacggcggcttttccgtctgggatccggcccgcaattactggcgctccgataaggatcgccccgctgcgtatcacttcactgccgacgccgtatgggatggcctcgatgtcaacgggcaaagagtctgtgaaggcctggagcgagactgggtcaactggcaagacggccgtaaaccccagttcaaagcgctggaaaacgccttgcgcgacctctcccctgccactgaaccgctatgcgtcggggcgcccagacgcgtctacctgggcgagggtcgagaacgaccaacactcaccatcggcaatcagaacgtgcccgtcacgctggcctcggcaggcgtaagacgaatattggggctggcttattttctcgtgtgggcctggtatgaacaccaggcagctgccgcgctgctcgataaaaaacccgagcgccggtttgtcatcctgttcgacgagcccgagactcatttacatccaaggtggcaacgcacgctgatgcccagcctgttgcaagctatcaagaccttgcgcgggaaccacggtgccgcgcctccccaactcctgattgctacgcactcgccgcttgtcgccgcctcccttgagccgatattcgatgaagaacaggacgatcagattcaattgtcgatccaggaccatggggtcgcgctgacacaaggacactgggcggcccagggtgacgccagcagttggttggtctctgacacgttcggactggaacaggcgcgctcgctggaggcagaaaaagccatcgaggcggccgaagcgttcatgcgtggcgagaagcaactgcctgaaggactcaagacccgagccgccatccacaaggcactacaaaaactgcttcctgcccacgatgaattctggccgcgctggctgatcgagagcgacctcctgacgctcaatggcgagggcaatcaatga

SEQ ID NO: 88611 - DNA, 570 bp, Pseudomonas fluorescens
atgatcccggtgacccggccaaaggaacccgccgactttgataaaaatgtcagaacaccgggaacacaatggctcaaggataatcccggcgctcctcgcccctcaccgctctggaacaaatgctcgcaagcgctggccgatcattacgccaacctatgtgcctatgcggccatgcttgaccctaccggcggaacggttgaccactacctcagctacaagaacttcccaggcctgacctatgaatggagcaattaccgcttcgcctctggcactttgaattccagcaagaaaaccgctgatgacacggtgcttgacccctatgacgtgggcccaggctggttcgaaatcattttgccgtcgcttcagatgcgcaccacagaagcgatacctgcggcttatcgtgaaaaagccgagtacacactcaagcgacttaaattgcgtgacggtgagcgcgtcattcgctggcgccagagttggtacaacatgtacaaacaaaaaaagctgacccttgaaggactccgtgaagttgcgccgttgattgcagatgccgttgaaaaagcagccctgtga

SEQ ID NO: 88612 - DNA, 1242 bp, Vibrio parahaemolyticus VP551; identical to SEQ ID NO: 86358

SEQ ID NO: 88613 - DNA, 666 bp, Vibrio parahaemolyticus VP551; identical to SEQ ID NO: 86125

SEQ ID NO: 88614 - DNA, 1413 bp, Vibrio parahaemolyticus VP551; identical to SEQ ID NO: 86314

SEQ ID NO: 88615 - DNA, 645 bp, Vibrio parahaemolyticus VP551; identical to SEQ ID NO: 86309

SEQ ID NO: 88616 - DNA, 1242 bp, Vibrio parahaemolyticus 930; identical to SEQ ID NO: 86358

SEQ ID NO: 88617 - DNA, 666 bp, Vibrio parahaemolyticus 930; identical to SEQ ID NO: 86125

SEQ ID NO: 88618 - DNA, 1413 bp, Vibrio parahaemolyticus 930; identical to SEQ ID NO: 86314

SEQ ID NO: 88619 - DNA, 645 bp, Vibrio parahaemolyticus 930; identical to SEQ ID NO: 86309

SEQ ID NO: 88620 - DNA, 1242 bp, Vibrio parahaemolyticus 863; identical to SEQ ID NO: 86358

SEQ ID NO: 88621 - DNA, 666 bp, Vibrio parahaemolyticus 863; identical to SEQ ID NO: 86125

SEQ ID NO: 88622 - DNA, 1413 bp, Vibrio parahaemolyticus 863; identical to SEQ ID NO: 86314

SEQ ID NO: 88623 - DNA, 645 bp, Vibrio parahaemolyticus 863; identical to SEQ ID NO: 86309

SEQ ID NO: 88624 - DNA, 1251 bp, Vibrio parahaemolyticus 49
atggaaaacgataattcgattaaactgattgatacgataattcctaactcagacaaacacgtaacaatctctcttgaaggcaaaaaccttatcatcacaggtggcaatggctgcggcaagactcgcctcctaaatcaaatttacgagaacatttcggctcaagtagagcaaatgagtcataaaaccgcagatcagattaggaacgatataagtaatcgtgagcggtggatgaatgactccagtccgacgaatgcgaactatcatcaatataaggagcaaataagagagttagaactaaaacttgctgatatcgataaggtgaaagtaacactgggggacttggttaaatactgcaccgaattcaacgaaaaaaaggcactacttcgtttattcccagcagtcagagaacagtctctggctcatactggctcatatgacagtcttgctcgcttaaagaaagaagacgagcgaaattctctttctcaagactcaagttctcaatttgaacgctacttagttgctttctacaattacggtagtcatctattagctcgtgttgacgataaggctcagggtgcaaaagtagatgcgtggttcgataacgtaacaagtcaattacaatacctattcgaagatgaaaccctcaagttggattacaatgctgaagagcaggctttctacattaaacaggatggtaaagacccatacagatttgacaaactatcatcaggctatcaatcaattcttagcatctatgctgaccttttgatgaaagtagaattaaaagaagttagcgcccaagagctatctggagttgtcttcattgatgagattgacgctcaccttcacgtatcactccaaagaaaaatattctctttctttgaccaagcgttccctaaagttcagttcatcgttactactcactcacctttcgtagtccaatcagtgaataattccgttatctatgatttgagtgcgaatgagcaattagaagacctttcgatgtactcatacgaatcgattctaaaaggcttattgggagttgaaagcaaatcaagcatcctagatggattgatagaagaactagcaacacaaattcaagtgaagaaacctgattggaatactatcatcgatcttattcgtagaattaaaccaaatgagcgcaacttagatacacattcgagcaatgttttaaagcaagccgaaatacagctcatggatgagcgcactaaaaatggaacggaggaataa

SEQ ID NO: 88625 - DNA, 690 bp, Vibrio parahaemolyticus 49; identical to SEQ ID NO: 87375

SEQ ID NO: 88626 - DNA, 1764 bp, Vibrio parahaemolyticus 49
atgcgcttagcttcatttactatcggttcagatcgtgaaggtgaacgccaacgatttaaaaacctcaaaaatgttactatcgactttgaagaacaagagtggatcaccttagtcataggttggaatggcactggtaagtcaaacgtacttgaggcattggcggtactgtttcgtgatttgatcatggggaaaaatgacaaaggggaaaaagataaacccacttttgcctataccttgaggtatttttgccatcataaagaaatagaaatcagcgccgaccctgatcgcgctaaagatgcctatttggtgagctatcgagatttgggagaaaagatagaaaacacgacgctacaggtagatttgttcagtgaattaactgatgacgcaacccttttgggacttaaatttaatgagttcaaaaagcgccaagatgagtttttacccaaatatgtgtttggctactattcaggccatagtgaccggttgcagtcggtttttcgcccgtaccttcagcaatatgataaaaagctacgtaactcaaagtcggaagacccaggactaagacgcctgttttatgccttgcctgtgcatagccaatttgtgctgttagcctttgtgcttaaccaagatgatttagtcaggcattttttagatactcagctcggcctagaaacggatgaaaatgctgaaagtattgactcggtgttgctggaactcaatgagccctcatggaatttaaataagagtaaagatccaaaaggtacttatggtgcgtgcaaagataagcctgatattttttggggcgctgaaggtgtggtgcgcgattttttaaatcgagttcataaagtggctactgcaccaattaaaattagccgtaaagatgatgcgaccttatggaataaaaaaggtcgtgaatacttgtatatgtttatcaaggacgttaaacggctcactgagctagttggtgaccaagagcctagggagtttttccgcgaccttgaaagtacctatgtttctgagctaatcagtgaagtgcgtattcgcgttaagcttaaaaagaacgatggtagcgtaacttttcgtgagttaagcgaaggtgagcagcagctattgacggtgttaggcctactgagatttaccgctgaagaagaaagcttgtttctattggatgagcctgatacccacttaaatcctaagtggagcgtcgattatattgattatctcaataagtttgtcacttctggctctaaaggtgaaaacaatagccacatcgtgttaaccacccataacccaattgccatcgccgaattaactcgcgatcaggtacaaatattaagccgcgatgatgaaacccgcaccattgaatcacacaagccgaactttgaccccagaggcatgggctacgcgggtattattaccagtgacatgtttggtttggcgacgtcggttgatagctataccgaagatttattagagcgcaaaaggcagattaccgctaaagatgaagcgctaactacaactgaaaaggcagatctgcaatccatcaacttagagttagagaatctcggatttagattctcaaaccgcgatagagtatttgaagaatatctgcgtgcacgttatgaattcgattcacgagctgaaagtaagcaaaaaatcgaccaattaccttcagatgaaaaacgtgctgcgagtaaaaagttaatccaacaggttttagcaaagcttaaacaagaaagtggagaagaagatgagaagaattga

SEQ ID NO: 88627 - DNA, 783 bp, Vibrio parahaemolyticus 49
atgagaagaattgatttgcgcaaacttaatccttctccagattggcgagctcgtgctcaaagtaaacaatctgaaatcgataatgggcttatcgaggcaaaagcagcttcttctatttggtctgagttgaagccgcagctaaaagatttgtctaatggtaagtgttggtactgtgagtcaagggaagatagatcagacaacgcagtagatcactttcgccctaaaagcctctacccttggtttgcgcttgattatgaaaattttcgcttcgcttgcacttattgcaacagcattagaaagaaccctgaaacaggagaaagtggaggcaaaggtgatcattttcctttattgtctggaaccaaagcaagcaatagactccaacgtaacactgaagactacatattgattgatccttgtgaaccagctgacgtcggcctgcttgattttaaagaagacggcttaccttgtgcaaagtatccttcacaaaccaaccgtaatagacgagcaatagattccatcaaatactaccatttagatcatcctgatttggtcgaagcaagaaggttgctagctctagatataagagattggattgaaagtgcagatgcaatttatgatgcgaatgatcagggcgatcctaaaactgaaaaagcattcaaaggttatgttagcaatattgcgaaagcaatttctgttgatgctcccttttctgtttttgcgaagaaaatggttaaaggttatcaagatcgggaatggatagaagttttattggaatgcgcttaa

SEQ ID NO: 88628 - DNA, 1749 bp, Enterobacter aerogenes
atgcaactgctgcgcatccttatcccaacttttcgcaatctgcgcgacctcgacattgctttcgcaacgcacttgcagccaacagcaagcgcaacagatgcagcacccaaactcatccgtagccatgccctgattggtcagaatggtgccggtaagtccaacctaatcgaagcgttgcttaccattttccgcgatgttgatctggaccgtgaagcggcgttcgattacacgctggaatacagcattcgggaatacatggtgcgtattgaagcggatacttccaagcagaagcgcccctacgtatgggtggatggtaaagctgaatcacaaggctatttgctgaaaaaccgtgagctgctgcctgcgcatatttttgcttattactcgggccgtaatgagcgtatcgaagccttgtttcaagagcaccagcgccgcttcaaccagcgccaggaaatcgctacagatgaagtactgtctgagcaactgctggagaactttaccggctcagagtcagatattcgcgccgttgaagaagccaaacgccgtcatgagtcgcggctgaagcaagcgggggacgaccgcttgcgccgcctgttttattgtcgcggcggccatagccaactggtgctgttggcctgcctgctgtctgacgatccggtgtttcagaaggtgctaaagaacctgcatattgagtcgctggagtccgcactgtttgtgctgaaagaaccataccgcctgcgtgaaaagcgccgtagcggcaaattcgaccagcaggaactgaacgaaggtgacccgcgcttttggtatgcgcgcggcaatgtggtgagcgaattcctcgataaactttggcaggtggcttgggctccgattgagcaagaggcgaccaaacagatcgacttccgtggccgtactgaaaaacagaagcagctatacctgttcgtgccaaatcaggagaaacttaaacaacttggtgaactcgtcggcagtgccgatagtttcttccgctacgccgagggtgcctatattggtgacctgatcgaagaagtgcgtattatggtgaagaagcgcgatgaacacggtggccaggtaagcttcacacatttatcagaaggcgagctgcaaatgcttaccgtgttaggcctgatgcgcattacccgtgaagaccagtgcctgttcctgcttgatgaacccgacactcacctgaatcctatctggaagttgcgctatttcgacgatattgaaggcgtaatgagttccgatactgcagcaccattaaggagtgagtcacagataatcataaccactcatgaccccatgatggtaggtagtctaaagcgtgagcaagtttatataatgcgtcgtgatggtaaccgtacattggtcgataccccggatgagcacccgcaagggatgggcgttacagggttactcaagagcgacttgtttggtttgtcgtccacgctggatatcgaaaccgaacgccgcttgtttcgtcgcaatgaactgttcgtcctgtcacctcgcaccctcgaagaagatgaggaactgagccgtttgtcagctgagctggctgacttaggcttttcgaccgccgactttcgtgatcccgactacgcaatgtttgtgcgcaagatggcgcaacatcgacgtttccgcaaacccgtgctcacaccagaggaacagaccgagcaggatgctatcgccgattcgatcattgatgagattttacgagaggaggatgaccaatga

SEQ ID NO: 88629 - DNA, 858 bp, Enterobacter aerogenes
atgatctggattgacctagagcacaagcgacctaccgatacaaacattccgaactgggtaccatggacacaagcacgatgggatgcttggttggcgaaatcggcccaactagtagctgccttggctgccttggacgcagaagacgaacgaaacgaacgcaacgcactgatagatgccaatagtgcgcactggggtgtactgaaggaatggttgttggccttgtcagcgggtaaatgctggttttctgaggtacgtgagctgtactcacattacgatgtggagcattttcgccccaagaaagaagctaaggcgttggatgcaagcctgcgtgatggctactggtggctagcatttgactacatgaatttccgtgtgtgtggcaatgtcggtaaccgtaaaaaaggtgggtggtttccactcaaggacggctcactttgttcaacctattccgagccctgtgaggaatctgaaacgcgttatctactcgatccgattgatgatgatgacgttgcgcttatcgccttcgacgaagaagggaaggtcatccctatgccaggttcctctgcttgggaacaggagcgagtcaatgagacggtaaagcgactcaaactcaatgaacatccccccctggcagaagctcgtcgcaaagtctggcagcaagtggacaggctaatcgatgattatacaaaagctaaagctcgctgcagaacaggcaataatccagtagccaaagcgaagttgaccgaggttcgagctagagtgcgcgaaatgaccagcacaacagctgaattatcagctgtagctcgttggtgtttgctggtgcgcaacgatccacagctttctaggttggttgggtga

SEQ ID NO: 88630 - DNA, 1398 bp, Salmonella enterica subsp. enterica; identical to SEQ ID NO: 87652

SEQ ID NO: 88631 - DNA, 597 bp, Salmonella enterica subsp. enterica; identical to SEQ ID NO: 87653

SEQ ID NO: 88632 - DNA, 1398 bp, Salmonella enterica subsp. enterica; identical to SEQ ID NO: 87652

SEQ ID NO: 88633 - DNA, 597 bp, Salmonella enterica subsp. enterica; identical to SEQ ID NO: 87653

SEQ ID NO: 88634 - DNA, 1662 bp, Aeromonas salmonicida subsp. salmonicida; identical to SEQ ID NO: 86462

SEQ ID NO: 88635 - DNA, 864 bp, Aeromonas salmonicida subsp. salmonicida; identical to SEQ ID NO: 86365

SEQ ID NO: 88636 - DNA, 1359 bp, Pseudomonas amygdali pv. tabaci; identical to SEQ ID NO: 86098

SEQ ID NO: 88637 - DNA, 651 bp, Pseudomonas amygdali pv. tabaci; identical to SEQ ID NO: 86163

SEQ ID NO: 88638 - DNA, 1293 bp, Pseudomonas sp. 10-1B
atgcttaagaacctgacgtttgaaggtgttggccctgcagagaggctcgccatcgacttcacaccgcgcctgaatttcctgaccggcgacaatggtctgggaaaaagttttgttttggacattgcctggtggtcactaacgcgtacttggcccagagatggcatagccactccgcgtaagggcgccagtcagtcgagcatcgcgtactgctatgaaggaagcaccggcgagtttgcctacaaaagtaattttgaccatgagtcccagcaatggtcggtcaagcagagtcgtccggcgattcctggggtagtgatctatgcaggtgttgatggcagcttctcagtgtgggacccggcccgtaactactggaagggagatcggggggaggccgcagcaccgaaccgtccacgtagcttcgacttttcacctgatgcggtttggaatggcttgctttccagcgacggtaaaacccaactctgcaacgggctgatcagtgattgggttctgtggcaggaaggtagcaagcccgctttcgatgatctggtcaaagtgctggatgctctatcaccttctggtgtggaaaaaatgaagccagggcagccgatgcgtgtgggcgatagtgttcgtgacattccctcactgcgcatgccttacggacaagatgtaccgttgactcaggcttcggctggaatgcgtcgtatcgcggcattagcttaccttctggtatggacctggcgagagcatcaactggcttacgagcgttatcgggttcaaccggccagagagatcatctttctcattgatgaaatcgagtgccacctgcatccggaatggcaacgccgtattgtcccagcgctgctcaatgtcatgaatgcactgaccggcagccgtgaggtacctgtacagctattggcggcgactcactcgccgttggtgctggcttcggtcgaacctgattttgacggttcgcgtgactgcatctgggatttcgatcttgtcggcaccgaagtgcaggcatcgctctatccgtattcgcgtaaaggagatgtgaatgcctggctatcttccgaggttttcaacctgaaggagccaagttctgtagctgccgaagaggcattggggcgtgcccggacattcttgcgggaagtcagcctacagaaggagcctttgacagctgagcagaagagcacactctgcgatattgactcggcacttcggggtagcctgagtgatgtcgattctttctggattcgctggagccattttcgcgagcagcgggtgggccacggatga

SEQ ID NO: 88639 - DNA, 660 bp, Pseudomonas sp. 10-1B
atgattcgagtcgagctggtggatgagcctgagagctttgatgagacagtaagaaaaccagggcttcgcgccattgccgaactggtaggtgaagagggcttgtctgcgcgcagagggcggcccaggaaggtagtggcgccaacacgggaagatattcccgctgacaagtttccagctgtgtggaccaatgccctgccggacttgatggaagcatacggccgtctctgcgcttacatctgtatctatattgagcgagtcacaggcggtggttcagtggaccatatgctacccaagtcttgttcatggcaggatgtatatgagtggaagaactaccgcttggcctgcactcttatgaatgcccgaaagaacaactatcaggatgtgctggatcctttcgaggtcgaggatgggtggttccgtattgaactggtcagctatcaggtcatccccggcgaaggtcttgacccgatgaccaaggcgcaagtgctcgccactatcgagcgcctgaaactgaacgatcacgattgtttgaaagttcgtgaggaatacgcaacagcatttttcgatggtgacatcaaattggactatttgcggcgacgtgcgccgtttttggctagggagatagaggggcgtgctgatgaaaggatactgggcgcctaa

SEQ ID NO: 88640 - DNA, 1398 bp, Escherichia coli; identical to SEQ ID NO: 86108

SEQ ID NO: 88641 - DNA, 606 bp, Escherichia coli; identical to SEQ ID NO: 86549

SEQ ID NO: 88642 - DNA, 1317 bp, Skermanella aerolata KACC 11604
atggcacaatctggaactggattcaagacgctacgcattgagggttggcgacagttcgacagtatcgaaatcgagctacacccgcgtctcacggtactgactggccccaacggcgcaggcaagagttccttgttgcgcatcttcacgcgccatttcggctttgacagacaatttcttgcaactccacagcacactgcaaccggcggctactcgtactcaccaggcatattcaagaggttcttaagcaaactgctgtccagtcgccaagaaaacctgtccccgcagatacaagaacccaacgaaatcgggacgctcagctatactaatgggaaggaaaccaggcttcacgtgccccaaacgtcaaatgtccaatacagtgtaattatcaataaccagcaggcagtgaatggtattcacatcgactcacatcagccgatcccgacgtttcagcaggttggccaaattcccatgaccatcatttcacccagcgttgcatatcaaagctacaatagcgagttaatgaataggtatcaaggcggctattctggccactcgcccacttaccgcatgaaagaagccatcatttcaatggcgatgttcggcgagggcaacagccaagtccagggaaatactgaggtactcggcgcatatcacggcttcgtggaggcgctccggaagatgttgcccgagacactcggattcatagatatctcgattcgaccgccagaggtggtgataatcactcgatcaggcgagtttttgatcgatgcatcctcggggggcttgatgacgctcatcgacctcacgtggcgtttgcatctgttttcactgacatgcgaatttttcgtcgtcacgattgacgaacccgagaaccacctgcacccgaccatgcagcggtctcttatgccacagatcatgaacgcatttccgcaggcgcagttcatcatcgccacacatagcccgttcatggtgtcctcggttagggattcgaacgtctacgtgctacgctacgctgagcatggcaacgtcgcgttggggggtgagcaaatcatgcccactcagtcgagccgagtcataagcgagcggctggacacgatcaacaaggcgggcagcgcgagtgagatactccgcgaggtgctgggcgtaagagcgactatcccccaatgggtcgaggagggactcaacattgttgtcgcccgctatcgtcagcagccgatcacccaagataccctcaaggagttgcgcagagaactcgccaagcttggttacggcgagctttaccccgacgcactggcaacactgacccaaggccgatga

SEQ ID NO: 88643 - DNA, 672 bp, Skermanella aerolata KACC 11604
atgataaagctcaacaagggccatgccccacccatcctccagcagaagtcagccgagtggacccggaccgtcatggacaagctcgctggcggcgaggaaccgaccaaggcggacaaaggccgctacgcccacccggagatcaaggcggcgctggtggcagagacgcacggtaaatgcgcttactgtgaaagcaaagtgcgccacatagcacacggggacatcgagcacgtcgtaccgaaatcggttgtaccagcgcgctggttcgactgggacaacctcacgctctcctgcgacatctgcaacggacgaaagtccgacttccacggcgatcatgatacctttattgatccttatgccgtcgatccggaacaacacttctggatagtcggggagaccgtcttcccccgaccaggctgcgatgctgcggcacttaccgaaaggcttttaggcttgaatcgggctgagcttgtagagcgacgctccgagcggctgaaaggactcatgaagctgttggaggtaatcgagcgtaccgtcgatcccaacctcaagggcatcctccaagccgactttgcagaggaagcagcggaggacaaagagtacgcagcccttgcacgcgaggtgatgcggatggcccatgcaaagttagggcatgctgcccatcagttggcttag

SEQ ID NO: 88644 - DNA, 1398 bp, Streptomyces iranensis
gtgtacgtgacgaggctgcggctggacggtgtccgtggattccatgggccgcgcaccgtggacctcgacttcacccggcccgatggcggctacgcgggctggacggtgctggccgggcgcaacggctcgggcaagaccacgttattgcgggccatcgcgctgtgcctcgcgggaaaccggcgagcctcccagctggacgacgatctggaaggctggttgtcggacggccgggagcatgcctggctcaccgcggcgctgcggtccgactcaggagaggacccagggagcgccaaggcgatcgggaaggggccccggacggctgaattcgaggtgcggctccagtggaagcccgaggacgcgctctttccggaatcgggcgatgtcatgcccactgaggtgaggttcagcgggggtcgggaggcgggcgcactgtggtcgtcgtcacccgtcggctggtttcacgccgggtacggaccgttccgcaggctgtccggagccggggtgtaccacgaacgccagacccgtgccgcccatcgcggcgcagccagccgcgccgcggcgatgcggacgctcttccacgagcaggccgcgctgaccgaggccgtcgactggctggtctcggcacatctctaccggctggaggagcggtcgggagcccaggacctcctggacaccgtcatcgcgctgctcaaccacgatctgctgcccgatgactaccgcgtcgtcgaagtcgattccgacggaccgtggctgtgccggaacgacggccggggcgcgatgttcccgttgcaccagatgagtgacggattccgcaccgttgtcgctctggtcctcgacatcgtctggcggatgtataccgcctatggacatctggatctcagatggcggcgtattgagtctcaggggcccgaaccgtatctgccgcactcgggcgtggtactgattgacgaggtcgacgcgcacctccacgtctcctggcaaaagcgcatcggggagtggctcaaggcacacttcccggcgatccagttcatcgtcaccacccacagcccgtacatctgccaggccgccgacgagcgcggtctgatccgcttgcccggtccggacgaggcgcggcccccggaggtggtctccgaggcgttgtggaagcgcatcgtgtacggaacaggcgatgacgccgcgctctcggacctgttcgggctggacaccccgtactcgggcgaggcccaggaactgcggaaggaactggtggcgctggaggcacgcgtggtcacggggcaggccacggacgaggaagaggaccgccacgaggctctgcggcagcgattgaagagttcgccgcggaccagggtctcggaggtggaggcccgcttgaagcgcctcggggcctttgacgaatga

SEQ ID NO: 88645 - DNA, 744 bp, Streptomyces iranensis
gtgcagcgcatcgagctgccgcgacaactggtggctcacgcggcggaactgacggaaagagtgacgaaggccgagccgggagaacggtacgacctcgcgcgcggtctgtggaaccacaccacgcagcgccgcaagctcgtcacgccgctgcgccgattattggggcagatggcgcacggcaaccgctgctgcatgtactgctgcgacgacctcagtacggacgtcgatcacttcgagccgttggcggtcaacccgttacggactttcgattggctgaaccacctcctcgcctgcacgacctgcaacagccatcacaaaggagatcgtttcccgctggacaactcgggtgagccgttgctcatcgatcccacgcgggaagatccttacgagcacctgtacctgggccttgagaacggggagtacacagggctgacggacaaggggcgggcgaccctggatgtgtgcgggctgaacagggacgagctgcccgacgctcgacgcggtgcacgggatgtggtgtgcatgtgcgtgagcacctggcagcggggccgggagaaggggaacgagcgcaacatggcagtagccgtgcgcaccatccgcgagcagcctttcgccgacgtggcccagttcatgcttcgacaggccgtcctgccgaaagccagggtcgctttcgccttcgacctcggggacgagacgctcgatctgctccgggttccggagctgcgcgcggccctgctcgtctga

SEQ ID NO: 88646 - DNA, 1191 bp, Bacillus thuringiensis serovar morrisoni
atgttagttataaaagaattaaaaattgatgggattggcggtattaatagccttaaacttaattttaacgaggggttaaatttgatttgcggtccaaatggtgtagggaaaaccacaattcttgaaagtattggccatatgtttagtaatggtagtcgtagtaaggttaagagaaatgttaaatttgatcaggggagttgtgaaattagctattcaacattcctagatactatacatacacagtcatgtattttaaggaattatgaagaaaatgattcgctggattggcatggtggaaatgcaaatttggctaaagaggtcattgtcttcaaagctcaaagatcattcacttatacgcaattagattctcttcgtaaagatacggaaacaagtgatggtaaatttctggatgattctatgaatggaattcaatttttcgactttaagaattggtttatccatcgttttttatttagtcatgtagataatgaattaacaacagtacaaaaagagaattttaaacttgcgacagattgttttggtattttagataatagcattcgttttagtagtgttaaaagtgatacattcgatataattataagtacctcaaatggtgaaatctattttgagtatctatcatcaggattcaaatcatgtatctatattattcatgggttaattaaagaaatagagtatcgttttaaaaacgatggtggtattaaagttcaagattatgaagggctaatactaatcgatgagttggaccttcatttacatccacagtggcaagcgaaaatgatttatttaataaagcatatattacctaaagctcaaattattgcaacaacacatagtcctcatatggtacaagctgcagcaattaatgaacttatagctttaggaatcgatgaagatgcggatgtatatgtaagacaactacctaatgttcaatatggatttcagggatggactgttgaggaaatattggaagacgttatggggttagatgaaacacggtctccaatgtacatagaggctataactgaatttgaaaaatctctagatgaagaaaatgaggagaagatatttgaagcttattataagttagatttaatgctacacccaagtaatccacttcgcaagttgttaaagttacaagtagctcaattcgggagggttatagagtga

SEQ ID NO: 88647 - DNA, 774 bp, Bacillus thuringiensis serovar morrisoni
gtgattcatttaaaacgccctaatagtcctagtaaacttataaatgaagaagcaaaactaactcaagaatttcttcaaaatggtaatagtgtttggggaaagccttatattaagcttgctcttctagagatgtcaaataacaaatgtgtatactgtgaatgtagactagatgaagagagtaagtatatggaggtagagcactttctaccaaaagatacttatcctaatctagttgtcaattggagaaatttattaccaagttgtaaaagatgtaatggaaaaaaagggacacatgattcaaaaaaagaacctattatcaatcctactgttgatactccaagtaatcatataaaaatgtttaactattgcctaaagggaaaagatttaaaagggaaaacaacagttgatgtattgcacctaaaccaacttgatagattagtatacccaagaatgttaattggaacaaaaactatagaaacagtagaaaaacttttagaaatggcagagaactttaatttgaatattaatgctactgggcgtatcaaaagtcgtattatacatggcactacacagttgctcatagaagctcaaccgcattccgaatattctgcgacagttgcctcggttttatttaacaatgaagattttgttaagttaaaagagattatgattaagtgcacaatctggaatacagaacatcaaaagttactgtctaatgcagaaagaaatattttggtagagccactttacaattgcctcaataataagaattaa

SEQ ID NO: 88648 - DNA, 1632 bp, Halomonas meridiana
atgcgtatcgactggttttggctagataattataaaaatcttagcgatttaacgattaatttttctcaagatcatctaatcactgtactgatcggtcgcaatggcaccggcaagtccaatgtgctggaagccctgaccattatctttcgagatctgttgatggcagagcggattccatcattcaaataccggattgcttatgaaatccgtgaccgatgggtattcgtcgatgcggatccagacagaaagagtccctatcgagcaaaaacaataagtaaagatgaccagcccgagccttatccggttggagctctcttcgaagatctgaaaggtgaattgatcagccggactaagctggttggtgaagactccatgtatcttccgcgctttctgtttggttactactcgggtgaaagcgagcggatgagggaagtgtttcgaaaatatcttaaaagctacgatgacaagctgattaagaaccttgatccagggctaaagcgtatgtttttcgctgagcccgtgcacagcaattttgtgctgctgtcctttattgtaaataacaaagcacagactgacgaatttctgcaaaagcaattaggacttgaggaaggtggcattgagtctgtgttgttcgtgctcaagcagccttattggtacaacaaaaatgcgaccgggggcgatgctcgtttctggaactcaaaaggcattgtgcgagactttcttgccaaactatatgatatttcattggcaccgattcgcgttaaacgacgtgaattatatgatgttaggcgttctagagaacttgaatatctttacctttttgcaaaggatatcgatgcccttcgagagctagctcaagggaaatcatcggctgcatttttccgagacttggagagtacgcacgtttcaggattgattgatgaggtaaggatcagggttaaactgaaaaagaatgacggctctgtcacatttcgtgaacttagtgaaggtgaacaacagttattaactgttcttggtcttctgcagtttacatccgcagaagccagtctatttcttttagatgaacctgatacgcatcttaatccgcgttggagtgtcgagtaccttcaacatatccgagattttctcaaagatgagaacgataagaatcaatctagccatgtccttctggcaacacataatcctattgcggttgcagagttgcgaaaagagcaagtgcagatactaaaacgtgatgatgagactttgagtatttcggctcaggaacctgatgttgatccaattgggatgggatatgctggcgttataacgagcgagatgtttggtttgaatgctgctgtcgacactactacccagaagttacttgagatacaacgaattttgtctgttaaaagtcaattgagcgagagagaaaaagctgatcttgaagatgcaactagcaagctggaaactttggggttccgttaccaaatgcgtgacccagtttatacagagtatttgaaggctcgcgctgagaaaagctctcttaagaagagggagagtgatgaaagtgaagaagcattagatcctgatgaaacacgccgcttagtcttagaagctttaaaaaatatggaagatgagggggagtcatga

SEQ ID NO: 88649 - DNA, 780 bp, Halomonas meridiana
atgaggtttattgatgttgcttttattgttccccctgagggtttcgcagataaggttatagcggcgcaggaggatgatgacgagaatattgataagcattcacatatttggcgagaatgcaaaaccagcctcaagcacgcttcttacgataagtgctactattgcgaaatgaaagatatacgctcagatggcactgtagatcactatcgcccgaaatcaaaatataaatgggctgcttacagatttgataactttcgcttcgcgtgtactttttgcaatagccgtagaacggatcagaagacaggtgaagtcggtgggaaaggagcggatttcccgctttttgaaggttgtgtacgtgcaacttgccccgaagagtctgatgatgagctacctcttctacttgacccttgcaacgcagctgatccagatgcactggattatcgcactgacggagcaacggtgccaaagagtgaaattgagacggaccctcaaagaatgagggctgtgacttcgattgaagcataccacttgaatcactctgacttgcaggaagcaagaagacagacggcaattgaaattcaagagaagattatagaggccgaagcttcgatgaaacgtttcacgaatggtgatatcacagcacggcaggcatactcgtcggctatccgagatcttaaacgacggttggatcaacgtgctgaactctcagcattttccaaacgagttctgcaagcctataggaataaaccgcttgtcgagcaaatcttggcggctgcttag

SEQ ID NO: 88650 - DNA, 1422 bp, Thalassomonas viridans
atgaaaatatatgaactttatataagtaactttcgtaaattcactaaagcacggtttcgttttaatgcccagtcgaatgttacggttctaattggtgataatgcaacgggtaagtcagcaattttaaattccttgtcgattatgatcagtagttatttactggactttaaagttcccggggctgtacggcatattcgtaaagacgaagttcatttaaaacaggttgtgcatgatggtgtagcctcattggaacctcaatggtctgaaggggttgctttgtcgtgcatagggtctttacatgaactctaccagggggatgattcgacttttcgtaatgcaatttcctggtcaagggagctgacctctgaagcgagtaagacaacgcgcattaatgccaaattaataaccggcgccggaaaaaatgcccgtatggctgtagagcagggggagggggtgctgttacctgttttggcttattatggcactggccgcctgtggcacagcaaaaaagatatcccgcttgctgagcctgattctcgtgcaataggttatcgtgactgtttagatccggcttcaaaccacaatttgtttttaaaatggtttagcaggctggaattggcttcaatacagaagcggaaaaaatatggcgtattggaagctgtgcgcgaagccgtcaggcaatgtattcctcaatgcagcaatatctattttgattttgaatttaaccaattaatgacagagtttgaagacggccgcctgctggggtttgacaatttaagcgatggttaccgcaatatgctggctattgttgccgatatatcgcaccgggcggcacgcttaaacccccatttgggtagtgatgcggcagtaaatacgccgggcatagtgctgatagatgaaattgatctgcatttacatcctaagtggcagcgtattattgtcaataatttgcgtgaagcatttcctaaggtccagtttattgtttctacccattcgccgtttattattcaatcattaaaagccggagaagtgatagatctcaatgctacttcgcatttagccgtagagggacagctgccgcaggcagggtgcctggttgactatgatgctgaacagccggctgagccttctcctgcgaaaggctttagcgaacgaagcattgaagatattgtagaagatgttatgggcataggtttgccttcaagaagtgcccggcttgaaagaatgtataaagttgccgagaagtactacgaattgttggatcagggaagtaaagcatcaggagaagaaaaagaaaaattaaaggctgaacttgatcagttgagtgccccctttagtgaaaatgttgcttaccatgcgtttttggagcgtaagcgtattaaggcgggcattttgtctcaagaagaaaaagaaacacaataa

SEQ ID NO: 88651 - DNA, 699 bp, Thalassomonas viridans
atgcggccagtaaagcgaggagaagtacccgttgatagtcaggggcaggcgaaacaataccgcgaatatgccaatgcaaggaaagatttaatttcacggctgggcgagtattgctcttactgtgaaatggagcttgatgcatcattggcggttgagcatatacagcctaaaaaatatcatgaagacttggagttggcatgggaaaactttttactggcctgtaccaactgtaactcaactaaaggggatgaagatccggctcttgaagacattttatggccgcatctggataatactttccgggcgtttgcatacggtgaagaaggcagggttaagccggctgaagggctgagcagtgaactaaaaagaaaagcagaggccatgatagccctaaccggtttggctgtgaccccagacagacaaacagcttcagaccgccgttggctgaaccggcaggaggcatggagagaagctgtggcagccaaagaagatttgttagagagcgatacgcctgccatgcgcagacaaataataagaacagccagggctaaagggtactggagtatatggatgacgatatttcatgacgacatagatatgcttacccggttaattcagcaagaaaactttgccggaactgctcagggctgctttgatgccagcgcagagccgatagccaggcctggtggtcaaatttag

SEQ ID NO: 88652 - DNA, 1176 bp, Paenibacillus sp. IHBB 10380
gtgttaaaaatcgaaaatctgtatatacaaaatattaatagtcttgatagggttgatattaaatttaataaagggtttaacattatatgtggtcaaaatggaacgggaaaaactacaattttgaattgcattttagcttcgtttagaagaaaaaaattagggatattaaatgtgaatacgatgggaaatcacggtttttgggagatcgattactataataacgatagattaaatagtagagttcattatatccataatgatgacgatttaaattattctcaacatattaagggtgataagttaatcagttccaactatataattagtttctcagtaaataatagacacatgaatgctcagaactttggagtcaattctttgaagcaatggttgtacaaaaattactatcgttcagatttaacagattctaaagaaaataatttttctctcgtaaaagaatgcttcagtatgatcgatccaaatatagtatttcacaaaattgaagaagttatagatgaaagaaagttaatgaagaatcaatacagagtagatgttagccattcaattgaattgtttgtgcgaaatcacagaggaattattaaaattgatcagatgtcatcaggctatcaatccgttttggtgatacttctaagtttggtcaggaaaattgaatccttggatcgattcggtgttagtgtttacaattttgaaggaattctcttaattgatgaaatagatttatatcttcatcctgaatggcaaaaaaaacttattgagataataagatggctacttcctaatgctcaaataattacaacaacacatagtccccatgttatacaatcagcaaaaccaggtgaaattattcctttaggcattgataagtatggagaagtttatatccgagatttgcccgatagtagcgaatttgggtatcaaggatggactattgaagagattcttatggatgtaatgggattgaaggaaacaagatcagacgagtataaaaaggctataaaagaatttgataaagctatggataatgaagatagtaacagaacggtgaagtcttatagaagattagaaaatatgttacatcccaataatccatcactaaaaatacttagattacagatagcttcaattgggggattagaaaatgatacggataaatag

SEQ ID NO: 88653 - DNA, 753 bp, Paenibacillus sp. IHBB 10380
atgatacggataaataggctatcgtgtcctcccgaacttactgacgacaaaaagagagaactaactcagaagtttataacggaaaaacatagcgtatgggcaattacttatataaaagatgcattgtttaaaatgtcaaatggtaagtgctgtttttgtgaatgcaagctaggcgaagaaggaaagtatatgcacgttgaacattttcatcacaaagatagttatcctactgaagttgttgagtggaaaaatcttcttccttgttgtgtgagatgtaattctaataaaggcactcatgatacagttatcgagcctataataaatgttacattaactgatccaagggatcatcttataattgataactatcgttttagagctaagaacaacagtcagttagggaggacaactattgaagtgatttttctgaatgattctgatcaattagttaatccacgttttgacattgggaataaagctaaagaatctctggaactaattcttgataaagctcaggaatataaaaatggaattagtacttcaacaagaagaaaaaatattattataaatggtcttaaaagtttactgaaagaagctcatcctgattctcaatttagtgccattgtagcgacagtagttttaaaagatattaattatactgaattaaaagaaattctcaattcattgaatttatgggatgaagaattacaacggattgagtttgaagttttaaatactagtttttatagttaa

SEQ ID NO: 88654 - DNA, 1437 bp, Agrobacterium arsenijevicii
atgctcattaagacagtaaaatttgtcaggaacggcacgaccagcgaagagatcgaactgtcgcgcgcgagtgaaaattcggcaaacttcttcaccgttataaacggcgaaaatggaacagggaaaagtgctctgttgagaatcatctccgacggtgctctcggtctggaggccagtcgacagagcaaactgtatgcaagtgaaattgtcctgggagtatccggcactatttcaaggaccatcgccctatctggaacccacaatgaccgcttcccgttgaacacgggtgtcgaactgcggatgaattcgagtcggttcgatctgatggagtttcactatttcgggcccaagcaatctggctatctcgcctcggcggcccgagcggcaaatagtatcgtccattcgttactaaccgaagagacttggtcacacgcaggcaatcagaacgcggcatatcttctagactaccttggatttcgccccgaactgaggataggattttctttaaattccaagaaaatgcaaaaggattactacaattatttaaatcatttgcaaagtcacatcgcagagatagagcttgaattaccttcggcatcaaagctttcaccaacgatccgactgagtgtacaaagcgcgcagcgtatccttgaagaccgaaaggtgcgtttgcgtgcctcgaaacgtggcgctttattcacttctcttgatctgatcaacggtcgacaatttctgaacgaatcgcacgaatttctcgaattagtcggcgtagagccgatggtgacaccaagccagtggcttgcggacttgatcgctttgggtgttctcaccgccacgttggaagttgagtcggctggtggaaaaaccgcgaagcaagacctcggtgaactcagctcaggtcagtggcagcttatcaataccttgctcaatctttgcttgatagtgaaggacaacacacttgtcctcatagatgaacccgaaaacagtctccatccaaaatggcaaagcgaattcattggattagtacgaaagctgatttctcatcgtagtggttgccatgtggttattgcgacgcactcaccgctcatcgcggcctccttgcttcctcatgaaggcgaactaataggttttaaacgaagcggaattggcaacaccatcgaggtccagcgcgagggtattgcttacggttggcttccaggtgatgtcctcactgacgtattcgatatgaattcttctcgcccgccagagctgactaaagcaatcaatagggcgcttgaactcctcaagctcgacaaaacatcaagcaaagaattacgcggaatagctagaaacgttcgcattctaagaagaagtctaccaaaccacgatccactcaatccagttctcaatgctattgattcaatagcgtttcctcaggacaaagaacaccaggtataa

SEQ ID NO: 88655 - DNA, 777 bp, Agrobacterium arsenijevicii
atggcatattatagaataccggtagacacttacggggaagaaatagttgagctatttaatattgccactgcatccggccgagactggggaagttcggcacatgacaaggcaaaattggcattgaagacagccctattcgatgctcaaggcgggaggtgcgcctattgccgacggcccataaaatgggaaatcggacataatgaaatagaccatatccttccgaaatcgccgtcagggaacgaaaataaatttacgctgaacgatagagacagccgtcgatcaacggcgggataccctggctttaccttcacgccgaaaaatctcgcacttgcctgcaggcgttgcaatcaacgaaaagggacctttgatgcgcgcaagcatcgtaatgttgatccagaaccagcgtacagcgtagatgataactattacgagtgggttcacccacacatccacgattattcggatcacatcgaaatccttgaaggcttcatctttcacgcaaaagaagcatctccgaatggtgagtgcgttatctcggtctgtggtctggacgatgtagcaaccgttgaacgcgctgcagctgatctccggattaagaatgcggaggactacgctgtcgcactcggtagtatgttacatcagctgaaagactatgggtgggcgcatattatcgaagccgtccaagagcggtttccagacattcccccagaggagatcgcctttacagccgcgatatttgaatctggtctgaagcgcggagctgcaacaacgcgttga

SEQ ID NO: 88656 - DNA, 834 bp, Morganella morganii
atgagatcagaacgaactccagcagagtatagagtcgaatatctaaaaaattctttccagaatttggctaatggttatgttcctgaagttaagcaatggatgattaacagatactttattatagaaaaagactgggctattgaagaaagaaaaaattgggagtacattatatcccatcttgattttatttttggaggggataaaagattctcttttgggaatattgaaagagaccttgaaccgagctttattcttgatggttcactagtttacttagaggacctttcgtctggttttaaatctatactgtcaattgttttatcaatagttgagtggatagagaaaactaatgatagaactaacatggatattaagacggcagacggagtggtacttatagatgagctagatgcacatttacatccatcatggcaaacaaaaataaggaaaatattaaaaaccatatttccagacatccagtttatagttacatcacactcccctcatataataagtagtgcggaagctggagaagtaatagttttgaaacgtgatggtaatgatatgagctatgatatcattgataagcctttggatgcttggaaaactgatgatatatattcccttgtgatgggggtgaatacggtacatcagcaaacactttctgatattgtgaataaaatagaagatttaattaatggggagctttttgatgaagctttggagttaatagatgagtactctaataaaatacctgaatcagatcctactgcaatgattttaaggaaacagataaattctgttcaattaaaaattgaacggggcatcaaatga

SEQ ID NO: 88657 - DNA, 726 bp, Morganella morganii
atgattaaaataataagagggaatgagccagatgtgttgattgctaaaaaagttacttggactcagggtttattagatgaggtcgagaaatatcaaagttacgataatataccagatgatattaagaaaaaaataacatctcgctatcgaaatgaacatattaagagtgttttattttccacttcacatgataagtgtgctttttgtgagtgcatcccttctgaaggtgggaattatgtacaagttgaacactttcaccctaagtcaaaatacccaagcgaatgcttcgaatgggataattttcttccatgctgtggtatatgtaacaataataaaggtattcttgatacgaaaaatgttgagatattaaatccatatgacgatgaaattgagggcgctttttctgtaagctatctaaaactcttgccaaatgcacagaatcagaaggcaataaatactgagaaagagatctccttgaattcagataggctaattgtttctcgtgttggtatattaatgaaattacagattcaaactgaagaaattagacagtggatcgacgttttgttagagtctgataccgatagaaaatatcagatacgaataaataagttaaaagataaaataaatacggtggaagcatttattaaaccggagtgctcacatagtttcttttgttctgaaattataaaagatgacatccattacttaaaagcaaaaaattaa

SEQ ID NO: 88658 - DNA, 1248 bp, Photobacterium leiognathi
atgtcaggctatctaacgaaaattaaaacgaagattccttactctgataaagtcgtagatatcgacgtcaacggtaaaacactgatcttaactggtggaaacggctgtggtaaaactcaactactaaactatgtttacgaaaaattaattgctcgtgtgataaaaagaaacaactctacgatacagaaacttcaacaatctattgtaaacctcgagcaacttattaacagtgagggtcctacaaatcgctcgtacgatacttgggttcgacaaatagaagatgctaaggagcaaatagaagaactagagaaccctccaatcaacctatctgatcttgaagacttcgtgctaaagtacaaagatttccgagccgttcttcttcaatttgaggctggtaggaagtcagacattctaaaaccatcttctgttgccccaatcgatagtctcaaagagaaggatcgagacacagtttcacgcccacatcaacagaaaaccacctcttccatctttgaagagtttctaataacaagcatcgcaaaccaagcattttccgaatctaagaaaatcaacaataaccctgaagaagctgaacgaattgataaatggttcaacaagttagaggctgacttacagaagctttttgaagataatgaacttaaattagtttttaactctgactcattctctttcaaaatccatcaaccgagcaaagaaccttatacattccaaacattgtcatctggcttttcttctataatggcagtctacgctgacttaattgctaaagtttctctacgttcaatagatccagaagagttaaccggtgtagtcatgattgacgagatagacgctcaccttcatgtttcattacaaaagaaaatattatcgtttttaacaagagcatttcctaaagttcagtttatcgttactactcattcgccgtttgttgtctcatctgttgatgatgctgtcatttatgacttgtctaagctggagcaagttgaagacttatctatgtactcatacgaagcagtacttgaaggcttgtttggcgtacttccaatttctaacttacttcaacaaaacatcgaagcactagctaagctactagaaaaacatccgattaaccttgatgaagttcaatcacttttagataagctaccgcaagatgaagattcattggattctgaatcactctactttgttaattcagcaaaactggcaatcaacaaagcaaagaggcagtag

SEQ ID NO: 88659 - DNA, 669 bp, Photobacterium leiognathi
atgttcaatgtagtaagaaatgaaccagttcctgcttcgctagctgaaaaacgaaagtacggctctgaagatgtgtggaaagcactaaacaaagtattccataaaaaatgctatatctgtgaaactagtgaacctcaagacattaacgttgaacacttcgtaccacatgagggtgatgaagatttaaagttcgattggaataacttgtatttctcgtgtgggcgttgtaacaacataaaacttgctaagtatgatgatcttcttgactgctgtgacccagatactgatgttgttcgcgctgttaaacatttaccaccatcaactccatacgcaaaacggcttcaaattgaagctcaacatgatgacgataaaactaagttgacagcggaactcttggacaaagtttttaacagtgaacatacacctaacaaagcagtttcagcagcgttcctaagaaagagagtgtttgaacaatacaatcttctattaaagcaattaaataattactatgaccctattgcattaccggaagaaaaagcaagtgctgttgagcgcatcaagctccttctcaaagctacttctccatacagtgcatttataagttggtgcatcatggaagatgaagaattagggcctatgttgcaagactttattggcatacctgagtag

SEQ ID NO: 88660 - DNA, 1614 bp, Escherichia coli
atgaaagtcgataaactacatattcgctcacgctttaaaaaccttgaaaacgtgaaagtggactttgacgaagaccacctgatgacagtagttgtgggccgaaatggttccggtaaatccaatgttcttgaagcattggtggctatatttcgaaatctagatcttggtgaagctccacctttttcttatgaattagtttatcgactaggagagtgccacaaacctaatcagcccagtgaaagatggctagaaattactattgatgctgatccaaaacgcggcacactggcaaagcaatacgaagtatgtatgcgcgaccttttaagtaacgatacatccaaggacatgttcgatgagcagccttcaggaatcgtcattccgttttcaaaagttaagcgagataaaagtggtaaagcaccatacctaccaaactatgtctttgcatattattcaggtcccagtgatcgcctagaaagctacttcaagaaacaccgaaccgatttttatcgtcatttattaaatgacaaaccggataaaaaacttgatcttaagggtgatattcgcccacttttttatgccaaaccctatcatagccagtttgtacttttggcattttttctatcagacgaaaatagccctcaacgaaaatttataaaagaacatttgggtattgaagacttagacagcattcattttgtaatgcgccaacctggctgggcaaaacaaaaaggcgagctattctggggtgctcgcggcgtagttcgtcgtttcctagatgagctaataaaatatgcactagcgcctataaaagtgacacgtcaggaagatacttcattaacaggaaataatgtccgaaacgaattcttccatttatttttacccaatatcgaagtactgcacacatttgctaaaggattaagtgacgacgaactttttaaaatgctagaaagtacacttctatcagaaattatctctgaagtcagcatacgagtgaaagtatctggcagcaaagaacctctcactttcagggaactcagtgaaggtgaacaacaactactaacagtgttgggtctacttaaatttactggaggtaaagactccttatttttactcgacgagccggacacccatcttaatccatcatgggccgtaaaataccttaaattcctgcgtgaatttgttcctaatcaagagactagccacttgctgatggtaacacatcaccctcttgctattgctgaactaaagaaagaacaagtccaagttatgaagcgagacaatcaaagccaaatatcagcaaaaatgccaattgaaagcccgcgagggatggggatcaacttaattttgcgtagcgatatgtttggtctgcaaacaacactcgatgatgataccaaccagagacttacaagcagaaatgaactcgcggcaaaagagatattatctaaagagaaaataattcgcgaacccggatttcaccctgaagatgaagaacaatacttagctagacttaatactgagcttgaacacttagggtttaacctcgcaacagatgatccagattaccttgagtttcttcgtcagaagtatcataccaaaaatgaggaaaaccattaa

SEQ ID NO: 88661 - DNA, 810 bp, Escherichia coli
atgcgttggatttgcaaggacgaaattgaggagtgcttgactcaagcatggagagagatggctgacagagcaaaagctgagttaattgccgctccagacgaagctgcacgaaaagcgatattaaaaagagctgcatcctcaaatatttggcgtgaattttataatttgctgcctgactctttaaagcgtaaatgttggtattgtgaagccgaggagatcaggtcagatatgccggttgatcacttcagaccaaaaaacaaggttgaagatgataggcaacatgatggctactggtggttagcatttgattggcaaaactatcgatgcgcatgcacattctgcaatagccgtagagtttttgatgaaactaaaggcggcaaagcatgtcgtttcccgcttgaaaaccccgaagagcgggcctttactcctgaggaccaagcaaaactcagcaatgagcgcccgtattttcttgatcctttcaacccggatgatgaaaagctactttggtttgataatgatgggttgccaatcgccaagccattagcaacaactgagcagcaaacaaaggtcagaaattctattgaaatatttcatctccatgaaagcagaatagtcagggccagaaacaaagtacgcttagaggtagagaggcaaattagaaaaataaaggataacgatgatgtacaagcagctaaagctaaattgcgacgcatggttagagatactgaaaaattatcacgcgctgcagttgtttacttaagagcacatagagagctcccagaggtgaaagacatattggacttggtttag

SEQ ID NO: 88662 - DNA, 1413 bp, Vibrio parahaemolyticus; identical to SEQ ID NO: 86314

SEQ ID NO: 88663 - DNA, 645 bp, Vibrio parahaemolyticus; identical to SEQ ID NO: 86309

SEQ ID NO: 88664 - DNA, 1230 bp, Vibrio parahaemolyticus; identical to SEQ ID NO: 86310

SEQ ID NO: 88665 - DNA, 666 bp, Vibrio parahaemolyticus; identical to SEQ ID NO: 86125

SEQ ID NO: 88666 - DNA, 1722 bp, Pseudomonas pseudoalcaligenes; identical to SEQ ID NO: 86708

SEQ ID NO: 88667 - DNA, 813 bp, Pseudomonas pseudoalcaligenes; identical to SEQ ID NO: 86709

SEQ ID NO: 88668 - DNA, 1242 bp, Clostridium sordellii
ttgaatacgaaatatatatctagtttacatgtaaagggatttaggctatttgaaacattaaatgtaagatttaatcctagatttaattttataataggctctaatggatgtggaaaaacatctatattaagagctatagtaatctcttattcacagtatttattagaagattctagattacaatcaaattttgaagcatggatagattttatagaaaatgacaaaaaaaatagaataggtgtgctacctagcaattatgcgaatataagaaatgattatagatcaagtcaatcgattcctgccgataagccacctactgatgaaggttgtgaatcttattacaattatgaggctgaaaaattaaaatttgcaccgttggtactaggtgcatttaggaagattgattatagaagaattgaggggatgagaagagaagaaaatttaactgaatccattagaaagtatatccaaaatgctccttcaagtttaaatggtggatatcttcctgatataaaacaatggatgataaaccgttattttcagatagaaaaagaatgggcatatatagaaaaaagcaactgggactggctaataaaaaatatagatacattagctcctaaagactcaaaatttaggtttattaaaatcgaaaaagatttagaaccagtatttactataaatgataaagaatgttatttagaagaattatctacaggatttcaatctatactatcgatggtattagctatatttgaatggatagaagcaactaatgaaaaagatgataaattagtgaaaaatgcagccggaacagttataatagatgagctagatgtacatctacacccagaatggcagctaatattaagggatagcttagaagtgatgtttcctaaactacaatttatagttacgacacactcaccacatctaatagcatctgcaaaagaaggcgaaataatagttgttccagaaaaaaacactaaccttgatttatatccaagaaaagataaatattcaggatggaatacagatcaaattctaagtgaattaatgggcgtgaaaagtctagataataaggaatacttcagaatggttgaaaaaggaatggaatatatcaatgaagccaatattgaaggattatctcatattatagataaactagaagaaatagctcatccctctgatactataatatctgtacttaaaataaaacaggcgtctttaagtttaaaggattag

SEQ ID NO: 88669 - DNA, 768 bp, Clostridium sordellii; identical to SEQ ID NO: 87319

SEQ ID NO: 88670 - DNA, 1293 bp, Aliivibrio wodanis
atgaaactacataccgtatcagttaaaaattttcgttgttataaagacgaaacgtttcgttttcaccctcaagttaatttaattgtagggcaaaatgcgacaggtaaaacagcggtactggatgcagtttctgtcgctatcgcaacatggttacttggttttaagaagaagaacgataaaaaacgattagagccaagcgatgccgccttatcgtatgtagaaaaagaagatgaagctcaatttatagaggcgtggcctgtggttgtttcagcctcgggaatggtaaaagaaaaaaccatctcgtgggagcgatcaaaagagtcaccagcagggaatactcgctatggcaacgcaggagatctaatttcattagcgaaagcgtgtgatgacaatcttgctgatgatatttcactgcctcttattagttattacggcactatgcgtttatggcaagatcctaaagcatcgaaagccaaaccctcattaactaaatcaagtgccaaaccatccagacttgatggctataagcattgtgttgatccacgtattgcccttaaagaattggttgcttggtttgctcgccaagagtggcaagcgtttcagctaggtaaagagccaaccatgttgacggtcgttcgtaaagccgtggtcagttgtatcgataacgcagagcagctacgttatgatcctaaaagagaagagttactattaacgctcaaagacgcagagcctcaaccatttaatttattaagtgacggtcaacgctgtgtgttagctttagtcgccgatatcgctcaaaaagccgcattactaaacccacatcttggtgaagctgttttagaacaaacagaaggtgtggttttaatcgatgagcttgatctgcatttacaccctaaatggcaacgtcatgtcattgaggatttacgcactacattcccaaatgttcagtttatttgcactacgcattcgccatttttaattcaatctttacgctcaagtgaagagttgattatgcttgatggacaagtgccagtacaggtcgcaaataaaaccttagaagacattgccgttggtatcatgaatgtcaattcacctgaagtcagtgaaagatattccaagatgaaaggggttgcgacagaatacctaaaagcactaagtgagacggatatggtggctgaagataagcttgaacaatataaagagagactggctaactcattagcgccttatgcggataatccagcattccaagcctttttggaaatgcaacgagtcgctaaactaggggagtag

SEQ ID NO: 88671 - DNA, 738 bp, Aliivibrio wodanis
atgcgaccaatcagaaaaggcgtttccccagttgctggtgactttaataaatacgaggatgctaaaccagaactggttagtcgattaggtttatattgtagttattgtgaaaggaaaatcgtcaccttattggccgttgagcatattgagccaaaagatggcgcttatggacaaccgcatttagaaaaacaatggtcaaattttttattagcgtgtactaattgtaattcttgtaaaggcagtaaaaaagtggattttaaacggttactctttcccgaccgtgataatacgttttacgcttatagttacgactttgatggtacggttcattattcacctcagttgctgcctcgtcaaaaggttatggcaagaaataccttgcgcttagtcggcttagaaaaaccagttcaggtgtttactgattcaaataatcagcaagttgctttagaccgtagtgctcaaagaatggaagcatttggggtggcacaagtcgccttatcattattggaaaacgagcctaatagtgacagcacaaaagcagcgattgttatgatggctaagcaagccggtttttttagtatctggatgaaagtattcaatgcttatcctgatatgaaagttcgatttatccagacgttcgaaggcaccgcagagagcggctgttttgatatgacaacaggtacttcaatcgtacctgcacttaattcagataggcttacccaaggcggtaaagtttaa

SEQ ID NO: 88672 - DNA, 1623 bp, Vibrio cholerae; identical to SEQ ID NO: 85886

SEQ ID NO: 88673 - DNA, 618 bp, Vibrio cholerae; identical to SEQ ID NO: 85887

SEQ ID NO: 88674 - DNA, 1077 bp, Saccharothrix sp. ST-888
atgtacgtcgccagactcgggatcgacagcatcgggggcttccggggcgagcgcgccctcgacctggacctgaccaggcccgacggctcgcacgccggctggacggtgttcgccgggcccaacggctccggaaagaccgcactgctgcatgccgtcgcccacgcgctcgggtgcggccccggcgacccgtcctggctggacgagggcgaggtgcgaatcgtcgacagcggggcggaggagctgcgctggcggctcatccggaccgacggcgtcctcgccgaacaccgctcgggcgcccgtacggccggcgcacccgtcgccacccgcctgtacggctccgcttcgctggacggcggcccgcactggccggccgggcgccgcggcgagtccttactcgcgctgctcggtgacggactgctgcccgacggccaccgcatcgcccggctcgaccgggacggcctctgggtcgcccgcggcggccgtgccctcccggcggacgccctcggcgcgggcgtcagggccgttctcgcgctggtcctcgacctgctcggggccgcccgatcggccgaccccgacgaggagttggtgatcgacggcgagcctcccaccgtccccgcgcccggcgtcgccctgatcgacgaggccgaggcccacctccacctggcccggcagcagtggctcggcgagtggctggtcgcgcacttccccaacgtccagttcctggtctcgacccacagcccgtacatctgccaggccgccgaccccggcggcctgatccggctgccgggtcccaccgagcaggccccgccccgggtcctggacgaggacctccaccagcgcatcgtctacggcagcggcgacgacaccgcgctcaccgaactcttcggactgcccagcgtccactccccgcaggccgaggccgaacgccggctgctgatcgccctggagcgcaagctgtacgcgggcaaggcgtccaccgccgacatcgccgagtaccgcgccctcggcgcccggctgaacagctcgctcaccgcccgggtggacgaggccaggaccgaccgaggcggcacccggtga

SEQ ID NO: 88675 - DNA, 738 bp, Saccharothrix sp. ST-888
gtgatcccgctccaacggccgccgctgcacgaccggttggccgccgacctggcccggcgcaccgacgcgctgcgcaccgccgggcccagcaccgccaccgggcgggccgcctggcgcaccgcccgcgagcccaaggcccggctgcgcgccctgctgaaccggatggcgcccgggctggtccgctgcatgtactgcggcgacaacctcggcaccgacatcgaccacttcgaacccatcgcccgcgccccgctgcgcaccttcgactggcacaaccacctgctcgcctgcgcctactgcaacagcaaccgcaagcgcgaccgcttcccctgcgaccccgtcaccggcgcccacctgctgatcgacccctcccgcgaggacccggccgaccacctgcagctctacctggagtccggcgcgtaccgggggctgacgcccaagggccacgccaccatcgacgtgttcggcctcaactcccgtggtgagctggtccgggggcggcgactggctttcaccgtggtcaagtccctgctgcgcgagtggcaccgccaacgcggcgcagccccggacctcgcaggggagttgaccgacgcactggcggtgctctggcaggcggacgtgctccgcgcggtcctccgcctcacccgcaccccggcgctcgcggaggtggtcctgggcgcggaggcgtacgccgcgctgagccaactcgccgacgaggagccgcgtttcggtacgcagtga

SEQ ID NO: 88676 - DNA, 1410 bp, Enterobacter sp. 35699
atgaaaattgaacaagttagcttaaaaaacttccgatgttttgagcagctagatgtgactttccacccgcagttgacggtgttaaccgcccccaatggtgcgggcaaaacgacgatccttgatgcagttcgcattgcgttatggccctttgtcaaaggctttgatctgggtagccaaacaggcaagtcagccaccattcagattgaagatgtgcgtcttgaacgccgcgagcaagagatggaaccgatattaccctgccagattacagctcaggccacaggtatccccattcgtgaaaaacagccacatctgttcgaatggcaacaggtccgcgagcaagtcaagccacgaactcaaagcaaaggtgataggtcgacacaagttctgacccggctcgccaagaactaccagtctgtcatctacaaggggcagcaagccgaagcagatactatcgagttacccttgattgtctatttaggtactggccgtctatggtatcaggggcgctatacctcagaagcggaggataaaaagctcgatgttagcgtattttctcgtctttggggttatcaaaactgtctgacggcgacctcgagctataagcagtttgaatcctggtatggctgggtatttcgcagctatcgcgagctgcaaattggtcagctagaaaatcagatcaagccccaggatcagagctcgttggcctacttttccgctgccattgaggttgtgcagcatgccatcaacactctcacgagttcactgaccggttggcacgacctgcaataccgcgccagcatggggcagcaactggtgatggaacactctcagcatggctatatgccgctcgcgatgctcagtgatggtctgcgcaatatggtggccactgtgtcggatatcgcttttcgctgtatcaagctgaatccacatctgaaggatgaagctgcacagaaaactgcaggcatcgtgctgattgacgaagtggatatgttcctgcatccggcgtggcaacaacaagtacttggggcgctccaagaggcatttcccttgctgcaatttattgtcaccacccatagcccgcaggtcctcaccacagtagccaaagagaatattcgtcaacttggctctgatgaacacggcgcctatgccagaataccgccttttagcccgctggcccatgaaaacagtgatgcactggccaaggttatggaaactcatagccagccaagcctgccgctgcaagagaccattagtgaatacgaattactggttagatcaggagaggaaacatctgaacgagcaacaactctgttggcaacccttgagcaggcgggatatcagtttcatgagagtgatctggccacttggcgattcttggcacagcgtaagctggcagcaaaagggtcataa

SEQ ID NO: 88677 - DNA, 594 bp, Enterobacter sp. 35699
atgatagaacttcagcatcgtgcgatgccaaccccggcgttgacgcaataccgcacagccaacccggcagccacagccgcagattttgatagcactgcatttaaagcggtgaaagatgcagtaaaagccgatctgcatcaagaccagggtgttctgtgtgtctattgtgaacagcatcttaagtcaactgaggggcaagttgagcatatcaagcccaaagcgggggcaaacgcacatcctcatctctgttttgactattacaactatgcccatagctgcatcaataaccagacctgtggccagcgcaaagggaatggcttgttgcccattgagcccggtccaagttgcaaccagcaatgggccatagccagtagcagcggttgggttgaaccgctacccacgctaaccagaaggctgcgtcatcctgtcgtacaaacgcgcgacatgctggggttgaataaggatcccaatctggtcagtgaacggaaaaaatggttcacccaagcagttactgtgctaaaaacggcgccagacgattttgaccaatttttgcgattagcgccatttcgcgcactgattgcagcatctatctaa

SEQ ID NO: 88678 - DNA, 1176 bp, Enterobacter cloacae
atgcttagcgctgacttgctcttacattctccaaatgactattttattcttgtaggtaaaaatgggagcggcaaaagcatactgctgcatgacctggcagagagtttgcacaatgaaggttacagcacagttgctgtgtcaaatacactattcgataaatttgaagttcatcccaatagttttaactatgactatattggaagtaaattaggtaggaatttccctgctcaagcaataaagagaactctttcaactaaaagccaaaataaagtaagtcgtattttttcagttttgaatcatatcggctatgaacaatctattggtattaaagtaaaatttcgtaaaaaattcaaagatgccattcgatattcaagaaacacatcaggtgatatttatcctgttttcttcgacagtagtgatcaagaaatacctgacgaacttaaaatggctatcgataaagctattcaccaagtcaattatggatatagtactttaatttggctaaccaatgatgataacgttttttatgaaggaaatttcgattcgtatttgcttttattaagctatgaacgtcttttgaaaaaagcgaatataatatctggcatagaagtcctcttaactaaagatgatgtttcattcccgttgaaacatgcaagctctggagagttatcttttatagctttacttgtccacctcgcattttgtgttaacgatagttcatttatacttattgatgaacctgaaaatagtttgcaccccaaatggcaaaatgagtatttcgaacttcttaaaggagcgataggttataatagatgtaaagttattgtagcaactcactcacctcttataattgcttctgcctcagaagataatcaagtatcaatttacaaacgtggaattaatggttttagtcaaataaattcttacgatgataatgctgaagagctatacatagactatttcgatacgctaacacctaaaaatagagctttatctaatagatgtgtggatattatagaccagttttcaagtggccaaatatctttacaaacagcacgcgagcgtttgcaagaatttagaaaaatggcaaatgatttagcccaaatgaaattcctctctggggttgatgttttgcttgataaagtttctaatggaaaagggaaaactcatgggtaa

SEQ ID NO: 88679 - DNA, 594 bp, Enterobacter cloacae
atggatcatgctgtcgcgcagggccatcagttctggagtgatagctctctcgaagctatcaaaagaaaaattaaagattatttgcgtgagaaccaaaaacactgctgttgttattgctctagaaatatagatgatgaatttaatatggttcttgatatagaacatattattccgaaatcaaaaatagtgtcggaaatgtttcaaatgaataatctggctgtgtcttgcaaaagatgtaatatgagaattaaaggagaggatatatcatttattgatgctgattttcaaagtttcaaagaggcaggtgattactatcaatcaaacagctataaatttatccaccctaaccttgatacttgggatggaaatcttaattacattgtagctcaagttaataggcgaaaagttgtttattatcaagtcgttgacgatagtcctaaaggtacgtatgcaaagaaatactttgaattggataaaatacaggcaaatacttttgatgaagcgcaggaagcgactgctagaaaagaaccaaatgatcctgaaatagcgaaagaattttcaaaattagtaactacaatgctaggtcaagaataa

SEQ ID NO: 88680 - DNA, 1176 bp, Enterobacter cloacae; identical to SEQ ID NO: 88678

SEQ ID NO: 88681 - DNA, 594 bp, Enterobacter cloacae; identical to SEQ ID NO: 88679

SEQ ID NO: 88682 - DNA, 1176 bp, Enterobacter cloacae; identical to SEQ ID NO: 88678

SEQ ID NO: 88683 - DNA, 594 bp, Enterobacter cloacae; identical to SEQ ID NO: 88679

SEQ ID NO: 88684 - DNA, 1659 bp, Enterobacter cloacae
atggaaaaaataattagaacgcttaagagcaaggctcaaaaaaatgatattttagccaactatacattatatgataaatatctagaaggagaagacacaaaatctaatatcaatattgccatgcaatatttaaataaatgctatgaactattagaaatgcgtgaggaagtccatgagaagcctttatcgcgattaaaaattgagaagttgatccttaaagactttagaaaatttagagagctggaagttacattccatgataaaataaccgttattatcggtgataatggctccgggaaaacgactattacggatgctttggcaaaattgctaagttggttaagcgcgagaattgaaactgccaaaaaaggcgcaaaaacactaactccatccgaaataaatataaacagcgaagatttctcagaaataatatctcaccttagcttctataataaaaatatatttagctcaagcttgtcaagaccaacacttggattcaaaggaagaaaagtaagtgatttagaggattttaataacatctctgaactatatagagtggttaatgcatcatcaaaagaaaattatgaccgcgaacttaatcttcccctcttttgctattactcagttgatagagcatcttcctactcaacgtttaatagtaatagtaattctcaggagcctcagtcacgatttaaggcatataacggtgcgctcgatggtcctggtcgtttcaacgaattttttgattggtttctttttattaataattatcttggctcgtcagttgttaatactcccgaagaactatccttaataaaagaaatcgaagcttttgaagaattgaaacttgacgtaaacagtcctcttttttcgatttataaagaaaaaaagaaatcttttgaaaaaataaaaaaaagtaaagataacgaactaaataaacacgttatgttacaaaatgatgttgttaaaaaagcaataatctcatcagtgactagcgtaagtgatatattcacagacagcagtacaggtaaacatgaattaaagataataaatgatggtgtgcttataaatattaatcaagcatctcaaggccaaaaaacattaatagcaatgatcgcagacttatcacgtcgattagttttgttaaaccccaaccttaaaaatcctttatacggtcagggtattgtgataattgatgagatagagctacatcttcatcctcagtggcaacagtctattgtacattcattgacatcaacatttcctaatattcaattcataataactacccatagccctcaaattctttcaactgtagataaagattgcattaggaaaattaaagaaacaactgaaggtaattatgaggtctatactcctaaattccaaactaaaggagtccaaagcacaaagatccttgagtatattatggaaacaaattctattcccgacctcgaggaagctcgcagagtggatcttttttcctcattattacagcaaggtaaaaaggaaaaggcactggaagtattggagatattgaaagaacatttttcagaatttgagggacaagaacatcccgttattcaaaaatgcattaatcagttaaaaatttatgatatgaaacatcgcattttaggcaataaggataacgataaatga

SEQ ID NO: 88685 - DNA, 672 bp, Enterobacter cloacae
atgaaaaaacttaatcgtggattatcaacccccccaacattattagagaactattcttaccttacgaatagctgggacgatataacttccagaaagaaaagaaaaatatggcgagaaataaagaaatttcaagaggatttttgtgtatattgcgaactgcctgcttcgtacggaaacgggcatatcgaacatttctttcataaaggagaaaatgatgatggagctaaaccttttatccacttgacgtttgaatggaataatttatttggctgctgtgcttccagtacacattgcggtcattacaaagaccaaatattagttggtgggttacatagaaaatacgatcctaataaactgttaaaacctgatgatctagatcctcaaaacttctttgtatttactccttctggagatattattccaaatgaagaaataaacgataatgacaaagaaatagctgaggaaactattaaagctttaaatttaaaagagccttcattgcagtcatctagaagatctcaaattaatgcatgcactgaaagattattagaacttaattccatagaaggaataatacctgagaatcaatttaatgcagaatatacaaaaattatgaatgaatttagtatacaaaaacacagaacggcagtaaaacaaacctgttttatatga

SEQ ID NO: 88686 - DNA, 1083 bp, Burkholderia pseudomallei 7894
atgctcttaacctatacatcccaagcggggcgatacgagtttgtaaaagatggacaatattcagactccacagcgaacacgttttcaatcatcgttggcaaaaacgggaccggcaagagtcgattgctgagagcggtcgtgctagcgctgtttggaggagaaatccgcgaagaacttgtagacccgcgcgatagagctgaacttcggcagctcgctttcgagcttgatacgacgcgagccccgacacaggtaatatgtgttgccacaagcccatttgacagatttcctcttctgcgccgtagccagaacatacctggttacacgtaccttggtatgcgcggtctgtcgagcgccaatcaaagcctcgcctatttgtcgaaaatcgcaaacacgcttgtcgattctgtccttagcgacgaaaggcaggccggtgcgattgccggggtattgacctacctcggatatgagccgtcaattcgcttgtcgtggcagcccttatcgcaacgattgatagatgaccttacccaagccgacgaccttcatcatgccacccatgagctgattcgccgcggtcctcccatgtttcccaatgaagtggcctccaattatcaacggatcattgatacgccgcctcataagctccgacaggcgctggagttagcgcgtaatcttcgaatcgagaagttttcgcgcttcgttgagctacgtcttagccaagacggatttgccactgacggctattacggaattaatctcgaggaaatcttcttactcgttaatacagggttgcttcggctacgccaagtagaactctgtaagtcagggagcaacgaaggcttcctcattagtcacgcgagttctggcgaacaagccgtggttctcagtctactgggcattggaagtcaaattcgagacggtagtcttgtttgcattgacgaacccgaagtgtgtctgcatccagagtggcaggaaaagtacatccagctcctctactcgactttccagcatttcacgggctgtcacttcgtcattgcgacgcactcgctgacctgccccctacaaacagggccagccggagtctag

SEQ ID NO: 88687 - DNA, 654 bp, Burkholderia pseudomallei 7894
atgcctgacatcgcaaatcctgtcgcatataccgacgatttgagcaggctggtgcaatcgaaggtgaacgacccggcgttcacacatcagcaatgggggcatgatgacctcgaaccgcttcgctcacatgtgcgtgcacactatcgaaacgaacagcgggccatctgctcgttctgccgcagcccccttggcctgcgggcggccgaaaactgccaggtcgaacacattgtcccaaagtctatccgcccggaattcatgtttgagcccaaaaacctgtgcgttgtatgtgctgactgcaatgccatcaagcgggaccaagaggtgactgcttccatcccgaacaccgtggctcctcgacgtgcacaacagcggtatccacgcacgacagccgccttcctgattgtgcacccgcatttcgacacttacagcgagcacattctgatttatcacggtttctatgtcgaccggtcgcccaaggggcgctttaccatcggagcatgcaaattgaatcgccggctgcacgagtttggatgggatgagaatattgtcaatagaccaacgcttatggaagcggcacagcaatatgtcgattcggaaccaggggtcgaccggctttccgccctccagcgtctccgagaagaagttttgtcgtga

SEQ ID NO: 88688 - DNA, 1290 bp, Burkholderia multivorans ATCC BAA-247
atgtacattcgtcgcgcaagcataaaaaatatcagaacgatcaaggaattcaccctcgtcttcgagggtgctgagacggccgggtggcacgttattctcggggccaacggctcgggaaagtccagcgtagttcgttctatcgcactcgcgctggccggtcccaaagaagcggctgcgcttcgacaaaactggaatacttggcagcgcaacgggtcaagtcacggtcgtgtagagatggaaatcgaggcgggacccaaggacatcgtgacgggcaaggggcgtggctacgcgatgatcgaatatgcgctcgaatttcgcccgatcgaatccacaatcggtggcccccgtgtagagctggtcgcgcacaaagacggcaagaccaaggctgaacgatctgtatggggtacaaattcggggtggttttctgcgtcgtttggtccgtttcggcgtttttctggcggggatcaggcgtttgagcgcttgtacttcacgaacccgcggctcgcatgccatctgacggcgttcggtgaagacgtggccttgactgaggggctacgatggctgcgcgacctccgcgttcaacagttggagagtagtccagactccggacggcttctggataagcttgtggactttctcaatgcgtcggatcttctgccccatggcgccaaaatcactgcggtccgggcggaggaagtattgctggaggatgcaaacggtttctccgtcggcgtcgagcaaatgagcgacggttatcgctccgtcctatcgatgatcttcgagatactgcgccagatgacgaagtcgtatggttcggacaatgtgcggggggcgttagatgtggaaagcacgactgtgaagcttcccggtgtcgttgttatcgacgaaatcgatgcacaccttcatccaacttggcaacgtgatatcgggccatggttcacgaagtgtttcccagaggtccagttcattgttacgacccacagcccaatcatctgccgatcggcgaagtcggtctggtatctcccagagccgggaacagaagaaaaaagtcaccgcgttgaaggcgttgcgctgcaacgtctcatacacggatcgatcctcgatgcgtatggaacggagttttttggtcgggacatagctcggtcggacgattcgaaggaccttctcgccgaactcgcgatcttgaacaggaaagcgctgagctcaaagctcagcgatgacgagcgcacaaggatgcagaaattgcgagccatgttgccgacggacgcaaccgataccagcaccgagtaa

SEQ ID NO: 88689 - DNA, 849 bp, Burkholderia multivorans ATCC BAA-247
atgctgcgcatatctgacaaggacttggccgcgtctgcgaacaccgtgctgaaccagatgcaatcacaagtgaatcgtgaagctgcctatccggaccaagttaccaaagcattggcgctttgggatgcgaagcggggctcaaagcctcgcagagaggcttttgcgacgattcgcgacacgctagcgaccatgtgcatcgggccagtgcgctgcgcgtactgtgaggattcggctgccgatgaaatcgagcacgtttatcccaaatctttgtttcctgaacgcgcgttccagtggtcaaacttactgttcgcgtgcggaccgtgtaacggccccaagagcaacaagtttggtattcttgctttgggcaaggtcgtggagttttgcaggacgaaggataaatcggatactcctcctcctgctggcatctcggctctggttgacccgcgcgtcgaagatccaaccgagctcctggaactggacctcggcggagttacacccgacggacataaaatttcgggcacctttatgtttgtacctcggtccggaataagcgagtccgaagaggcacgagctatcttcacgatagacacgctagggctgaaccgggaagtccttcgtatggcccgacgaaacgcgtttagtgggtttcgtgcgaggctttgggaatatgtcacgaagatcaaaggaaatgcgccagcggaggctctggatcacttgcgggcagagatcattagcacgccgcacctgtccgtgttcttcgagatgcgcaggcaacgatccgcgctgcccgaagtagaccaactgcttaaggacgcccccgatgccgctttgtggcgtctgtcaccgtag

SEQ ID NO: 88690 - DNA, 1413 bp, Vibrio parahaemolyticus; identical to SEQ ID NO: 86314

SEQ ID NO: 88691 - DNA, 645 bp, Vibrio parahaemolyticus; identical to SEQ ID NO: 86309

SEQ ID NO: 88692 - DNA, 1230 bp, Vibrio parahaemolyticus; identical to SEQ ID NO: 86310

SEQ ID NO: 88693 - DNA, 666 bp, Vibrio parahaemolyticus; identical to SEQ ID NO: 86125

SEQ ID NO: 88694 - DNA, 1236 bp, Candidatus Magnetoovum chiemensis
atgagatttaaaaaacttaaaatcaccaattggcgacaatttgaagacgtagaaattcaatttaacgaaagactaacagtcctaaccggagctaacgccagcggtaaaacgacaatcttaaatatcctcgctgctcattgcggtttgggttgggatacaacattcttagccactccagaaatggacaaagcgtcaagaaattggaaatggaacgactcgtcgccgtcagacagttatgattcgagttacaataaaataggcgagattgaatattctacaggagataaatgcgatttatcaattggaagcaatcatggcgcagaatataaaatactctttgctggtaaagaagacgtttctggtttctttattccatcccaccgagcagtttttaaataccaacagatgctcaatatcccacgagaaattatagataaaactcaagcgtttaaaaaaggttattctggcaataaaactcgttatttcggcactactaatgtgcaatctattagctttaacataaaagagacccttttttcatggaatattttcggcagaggcaatcctgagattgaacctaatgaggtcttattggaatattacttggggtttgagaatatcttgaaaaagataattccccatgaggttggatttaaaaaatttgtaattcgtaattttgagatagttttagagtgcgaatcaggcgattttatattagaggctgtttctggcggattaagcacaattatagaattggcttggctaatttattgcttagttgaaaaagacgagcagttcactgtattaatagatgagatagaaaatcatctgcaccctacaatgcaaagaagattattgtcctacttcttagacgctttccctcatgtgagttttattgtttcaactcatagtccattgattgtggggtcggttagggagtcagaggcttatgtcctaacgtttaacgataaaaagaaagtcgttagtcaaagattagacctaaagaataaagcaaaaaccgcctctgaaatactcgatgaggcgttaggcgtttcttttactatgccaatttgggcggaagagaaattgaacgagatcgtaaacaaatacgtaaaacttgaaattacagaaacgacattttatgatatgaaagcagaattgtcagaagttggattagaaagacttatcccagaatctatagccaatctaattaaacaaaaagatgataaaaattaa

SEQ ID NO: 88695 - DNA, 576 bp, Candidatus Magnetoovum chiemensis
atgataaaaattaatcgccctccatgtccaaaccccgctgctcttcgttcaaactataaagatcctgaaaataagggggctttgaaagacgcttcctgtggtaaatgtatgtattgtgaaagcaaagtaacacacattgattttggtgatgttgaacatattaagccaaaatttaaatatccagagctagagtttgcgtggtcgaatttaggttttgtctgttccaaatgtaataattcaaaaggaaagaaatacgatgagactacgccttatattaatccctacgaagaagaccccgatgattatgttgttgcctttggttctgttctatggccttatcagcaaaatgaaagaggacagttaacgattgacgatattcagttaaaccgcaccgatttaattgaaagaagaaaagaacgtttggcttcaatcacgaagtatattggcgcgtggcaaggaacacgcaatgaattcttaaagcgcattgcgcttcaagagctaaaagatgaatgttgcgaggataaagaatattctttgttcgttagagcatttttaaaattacacgacataatttaa

SEQ ID NO: 88696 - DNA, 1623 bp, Vibrio cholerae O1 biovar El Tor; identical to SEQ ID NO: 85886

SEQ ID NO: 88697 - DNA, 618 bp, Vibrio cholerae O1 biovar El Tor; identical to SEQ ID NO: 85887

SEQ ID NO: 88698 - DNA, 1338 bp, Xanthomonas citri subsp. citri; identical to SEQ ID NO: 85890

SEQ ID NO: 88699 - DNA, 384 bp, Xanthomonas citri subsp. citri; identical to SEQ ID NO: 88537

SEQ ID NO: 88700 - DNA, 1338 bp, Xanthomonas citri subsp. citri; identical to SEQ ID NO: 85890

SEQ ID NO: 88701 - DNA, 384 bp, Xanthomonas citri subsp. citri; identical to SEQ ID NO: 88537

SEQ ID NO: 88702 - DNA, 1338 bp, Xanthomonas citri subsp. citri; identical to SEQ ID NO: 85890

SEQ ID NO: 88703 - DNA, 384 bp, Xanthomonas citri subsp. citri
atgggctctcccgtcgaacacatcgcccctaaggcgatgtacctcggatacatgtttgagcctctcaacctatgcgtctgctgtcctgactgtaatgagtacaagagcaacagagaggttcatgttgatcctcccattaagggttacttgcctgtcgcttatccgaatgatccagaaaagtttagaatcgtgcatccgcactttgatgagtactcacagcacattagacgagcgggaatcctctatataccgttgagcgagaaaggcagttacaccttctatgtctgccatctcggccgctatctgagcgagctaggtatgaccgaagagctatttaacgacttgaatgccgttatgcagcgccaccggttccatgagggatag

SEQ ID NO: 88704 - DNA, 1338 bp, Xanthomonas citri subsp. citri; identical to SEQ ID NO: 85890

SEQ ID NO: 88705 - DNA, 384 bp, Xanthomonas citri subsp. citri; identical to SEQ ID NO: 88537

SEQ ID NO: 88706 - DNA, 1338 bp, Xanthomonas citri subsp. citri; identical to SEQ ID NO: 85890

SEQ ID NO: 88707 - DNA, 384 bp, Xanthomonas citri subsp. citri; identical to SEQ ID NO: 88537

SEQ ID NO: 88708 - DNA, 1344 bp, Peptococcaceae bacterium BRH_c23; identical to SEQ ID NO: 88490

SEQ ID NO: 88709 - DNA, 450 bp, Peptococcaceae bacterium BRH_c23; identical to SEQ ID NO: 88491

SEQ ID NO: 88710 - DNA, 1320 bp, Peptococcaceae bacterium BRH_c23; identical to SEQ ID NO: 88488

SEQ ID NO: 88711 - DNA, 690 bp, Peptococcaceae bacterium BRH_c23; identical to SEQ ID NO: 88489

SEQ ID NO: 88712 - DNA, 510 bp, Candidatus Magnetobacterium bavaricum
atggttttagaacttataatgagaatggaaccgcatagaactaatatctataacattcaaggaattgtgttgatagacgaaatcgagacgcacttgcatgtttcgctgcagaaagagatattgccgctcttaacatcgttctttccaaagattcaattcatcgttacaacccattcaccgtttgtattaagttcgattgacaacgccgtaatctgtgacttggaaaatcgtataatagcaagtgacttcagcggatattcctatgacggtatcgtggaggtttactttgataatgatacatatgcgcaagacgttaaagataaaatcagggaatatgaactattggtgaagaaatatacaacacttacaaaagaagagaagagtagaattataagattaagaatgtacttacaggatatccctgcaccgttatcaagagggttaaaactaaaatttatgcagatagagtcaaaacgaaaagaaaatgagagccggaattttacaggttag

SEQ ID NO: 88713 - DNA, 580 bp, Candidatus Magnetobacterium bavaricum
atggttaacgtaaaaagatcatatcccgaaccaatcgctctatctaaaaagagaacgaagggaagaggtaagccctctaatataaaactctctaagattaaaggtgttttagggacattgaagagggacttcaataacaaatgctatatttgtgagcaaaaagagtttaccgatatggaaattgaccattttattccacacggagatgataaagagttgatgctttgctgggacaacttattttttgtttgtggacattgtaatagcgtaaaatcagatatatacaataatatatacactcctatttttgatgataaggaaatcctaaattgtacagatccacatcatgatgttgttaattggattaaatacgaacatgatttattatcagaaccaatggtaatattaactacggttgtaaacgatgaagcatatagaaaaatagtcgataacaccgttgaacttttagtatatgtctattctggaaaatcaattgctcaagagcatcaagctgagaatttaaggaaaagtttagaaaaggaaatggtttatttttatgagattctgcaacaatactatg

SEQ ID NO: 88714 - DNA, 1146 bp, Candidatus Magnetobacterium bavaricum
atgacagacgaagacatatacataaccagggtaaatatccatagtgtcaggcatctgaaggatatcgagatacccctttcggagattgagcgaaaacatctgatcttcacaggcatcaacggaagcggtaagacctcggtgctggaggcgataaaagagtatttggatagtcataaagagagaagcgtccttactgataacagtagaatagagttattttttaatcttaagatttactatagtagttattatactttataccataccggcaatcatatcctggctttttttaatgctaagagaaaagcagaattgatacaaccaaacggtataaaaaaagttgacttaaagaaactatattcttttaacgataaagcgagttctgaattcatacaacacatcgtaaatttacaagtagacaggctttttgccgaaaagggaaatgagatagaaactgttaataaaatagataactggtttgagatgtttgagcaaagccttaaatatctgtttgaagataacgaggttaaattagaatttgatataaaaaattacgactataacatagtcaaaaaaggcagagagaaatttacgtttaatcaactttctgacggctattcggcaatcttcgatatagtctcagaactcataatgaggatggaatcatacagaaccaagagctatgatattcaaggaattgtgttgatcgacgaaatcgagacacacttacacgtctcgctgcaaaaaaagattttgccgtttctgacatcgttttttccgaaggttcagttcatcgttacaactcactcaccgtttgtattaagttcgattgaaaacgctgtaatctgtgacttgcagaacaatataatagcaagtgacttcagtgggtactcctatgacggcatcatagagtcttactttgatattgataagtattcacaagacattaaagataagatcgaagagtatgagaggttggcattggctgaaacgcttactgaagaagaagaaggcagaatgatagaactaaggatatacttgaaagaaatccctgcgttcttatcaaaaggattaaaactaaaatttatgaaaatagaatcaaagcggagagaaaaacatatatctgcagctactcaactagtataa

SEQ ID NO: 88715 - DNA, 714 bp, Candidatus Magnetobacterium bavaricum
atggttaatatagaaagatcataccctgaaccagaagctttggcagaagagaaaaagaaggttaacggtaaaccaaatgagacgactatcctggagagattgcagacggatttcaagaacaaatgctatatatgtgaacaaacatcacttgccagcggtatcacagttgagcattttgttccacatagaaataataaggaattaaaatttcaatgggagaatttgtttttttcttgtagtcattgtaatagcgtaaaatcaataaaatacaatactaatgatgacaacgaaatactgaattgtacaaatccaaaccatgatgtcgtcagatggattaagtatgagtatgatataagctataaatgtagcgtgaaattaactgcagatggaatcgataaggaatacaagaaagtcattgacaatacagttaaactcttaacagaagtttactgtggaaacttatcaactcaaaagtctaagacagctaatttaaagttggaggcagctaatttaaggaagtcattagaaaacaacctcatttgttttgaaatgtccctacaagaatatgaacagagcatgtattttgatgaaaaaaaacaatgcatcaaaaaaataataaccgagctaaaaaaagactctgcctttacggcgtttaaacgttggattattatgaaatcaaaataccgtttaatatttgaagattactttgattaa

SEQ ID NO: 88716 - DNA, 1638 bp, Streptomyces albulus ZPM; identical to SEQ ID NO: 87110

SEQ ID NO: 88717 - DNA, 1110 bp, Streptomyces albulus ZPM; identical to SEQ ID NO: 87111

SEQ ID NO: 88718 - DNA, 1638 bp, Streptomyces albulus ZPM; identical to SEQ ID NO: 87110

SEQ ID NO: 88719 - DNA, 1110 bp, Streptomyces albulus ZPM; identical to SEQ ID NO: 87111

SEQ ID NO: 88720 - DNA, 1623 bp, Vibrio cholerae O1 biovar El Tor; identical to SEQ ID NO: 85886

SEQ ID NO: 88721 - DNA, 618 bp, Vibrio cholerae O1 biovar El Tor; identical to SEQ ID NO: 85887

SEQ ID NO: 88722 - DNA, 639 bp, Elstera litoralis
atgggtgaagtacccgttacactggcctcagccggaattatcaaaattctcagccttgcctatatgattgtgaatttctggcaggaacataaatttgctgcaaagattcaaggaattgaacattcaaaagcgcttctccttctcatcgacgaaatcgaaacccatcttcatcccaaatggcagcgcaaaattctcgccgccgtgctcgaagtcgccaaggccattacggaagacgaaggctttcaggtgcaagtcatctgcaccacccattcgcccatcgtgctgacggggatggagccgcatttcgatccgaagatagatcagatctttaatcttaaactccctcctgcggctaatggtgataccgcaagagttaaattagaccccatcgactttgagaaacacgggtctgtcggcgaatggctcattgaagtctttggtgaaggggatattccaaaggagaatgccgaagccctagaaaaacgcgcggctttatttgaacaaaaaaaaccgactcaagccgagattgacgaagttgatcggctgatgcgggcgcatttcgcgccggatcatcccgagcgaacccactgggtttggctcgctaagcaaaaaggactaacgccacgaggtcagcaatga

SEQ ID NO: 88723 - DNA, 607 bp, Elstera litoralis
atgatcccgcttatacttgctgatgagccccattggtttgatgcgggcgtgcgccaaaagggacgcgctcatctcgcgaccgtcgaagcgcagcggactgagccacttcaatctaagcacttccaagcattctgggcgcgttacacccgggagatacatgctatttacagtgggatttgcgcattcactggattgtatatcgattttgatgaaaaaatagaggatcagaaggtctcaattgaccacttcagacccaaggtaaaatacaaaagcttagcctatgaatgggctaattaccgtctctgcatgaaaaaaatcaaccaaagaaagggtgactcagaagagatcatcgaccctatttcgataccagacaatttcttttatctcaatatcgatgacggctctgtgaaactccgcgagtttccagggcatgaaacttgggtcgaagcctgcaagaccacaattgatacacttgggctcaacaataagcatttgaggagaagacgcagccaattgatacagagctaccgtataagcggtgataaagatgagctcaaatttcgagcgcccttcctttattatgcgctgaaatatcagggcgttatcc

SEQ ID NO: 88724 - DNA, 1608 bp, Pantoea sp. SM3
atgaaagttgacaagttgcatattcgctcacgctttaaaaacctagagaatgtgctggtagacttcgacgaaaatcatttaatgactgtggtggtaggacgtaatggctccggtaaatccaacgttatcgaagcattagtatctatatttcgcaatcttgacttaggtgaagcgccaattttttcttatgagttagattttcaacttggcaaggagggggggactaagtggtatgacgtaaaagtcgatgctgatccaagtcgcggaacgttagctaagcaatatcaggtgtttgtcaaagataaacatagtagtcaaacagattataagcttatccccttttctaaagttaaacgtgataaaaacactaaacaagctgagtatcttcctaactttctgttcgcctactattcaggtccttcagatagattagaaaaatatttccgaaaacatcgtgatgattattatcgggagttactttataacaagcttgatctgaaagatgatattagaaccctattttatgctaagtctttccatagccaatttgttttaatggctttttttcttagccctaaattcgaaaaagaacgcatttttttaaagagagaactcggtattgaaagccttgactcaatacattttgttttaaggcggcctgcgtgggaaagagataaagatgacatgttttggggggctgatggtgtcgtccgaaaattcattgatttaatttacccccacgctttagctccgttaaagattaaccgaaatgagggtactagtcttacgggaaaaaaacagaaaaatgacttcgttcatatatttcttccttctgtagaggctcttcatgaaatagcaaaacagttaacaccgagcgttttttttaaaatgcttgaaagtacagtgctttctgaaattatctcggaagttcatgtccgggttaaagtaacttacactcaagaaccaataacatttcaggagctcagtgaaggcgagcaacaattactaactgtattgggattacttcagtttacaggcggtaaagactcattatttttgcttgatgagcctgacacacatcttaacccttcatgggctgtgaaatatcttaaattcttgcgagaatttgtacctaatcatgaaacttgccatttattgatggtcactcatcaccctctagccattgctgaactgaaaaaacaacaagttcaagtaatgtggcgtgatgaaaaacattgtgtacattcgcaagaaccttatctagatccccgtggcgcgggctttatgggcacacttactgagatttttggtctaaatacaacattggacttagagactcaaaagttattggacgataggaacgaactgtcccatattgaagcacgaactacagctcagaatacccaattggatattctcaatgatgaactaaataggttgggcttttcattcgaaaaccgagacccattatatagcgattttcttttagcatggaaagatcttacgtacagtgataaaccacctttgactcccgatgatgcagctcacagacgagaagcaatgaaaaaagttatccaaatacttcaagctaaaaaggttggcgaatga

SEQ ID NO: 88725 - DNA, 843 bp, Pantoea sp. SM3
atgatttatatcaaacgagatgcatcgctgattccagaaaaggtatttgatgtcgctcaacgcgctcaaaatgagttggaaagattaccagtcgagcaaagaaaagattttattaaaaaaaagtctcatatatggagaggctttgctaaatatttagccaaaatgtcttatggaaaatgctggtattctgaggctaaagatgcaggtgcaaattttgacgtagatcacttcagacctaaagcagaagcaaaaagagaagaaaatttaatcgatgcagaaggttatgcatggcttgcatttgactgggaaaatttcagactatcagctcagaactgtaatcgtctaaataccgatctgtctggtattaccgtaggaaaaggaaattggttcccacttctgacaggtagttctaaggcaacttgggataatcgttgcataactgatgaaaaagtaatgcttctagatccagtagttcaaaccgacctcacttatatagactatgacgatagtggtagattcacttcaagcaggcactgtattgggcaggcagcattaagaattcaacagtcagcaattatttacggccttaattttgagagaatgcgtgaggcacgatttcagatcatgaaagaagcaaaagagcttcttgaaactatacaccaaagcgttgcggatttttatcttatgggtgatgaggcacctatgagaacaattgaacgtcaaattgaacagctaaaggcaaaaacccgtgctgatgcaccattcagccgtgcaataagagctcagcttataaaacttggagcagaagactatttgattgacagaagtttggacgtggcatga

SEQ ID NO: 88726 - DNA, 1329 bp, Komagataeibacter intermedius TF2
atgctgcgcctgaagtcaattgaaatttgcaattttcgcgcgattaagcatgggaccatccggctcgatcgttacttgacggtgctggtcggggaaaatgcctccggaaagaccgcgatcctagatgcgatcggctacgccctgacaccgttgttcgctggcgcgctaagaggtcgctcagtggtagagttcgacgactttcgggtcgagggtcttgctgatcccgccggcgagatcacgcgcgtgccgataattacactcgttaccgagactgatgacgaagagtggacgatcgatttcaaactcgatcatgatggtcggcgacaaaacatttcgggcgtcctgagcgggccggttcgtaatctccccaaggaagtcgctcgaaacgaacctggtggtgccccaatcgtcgtcagctacatggcagatcgcggcatgccctcaaagaggtcggcctcggcggcggcaaatgcgaagcggcatgccggggcgaccgggcgtgctggtggctatatcggcgccttagatagccgggcagtgttcgaagaggccgtggaatggttcgaagcgatcgagaatcttgagttgcgcaacaatcgcgagatagctggcagctatcatgatccacgccttgaggctgtccggcgggcgataaagaagctggtacctggcttgtgcaatccccgaatggtgggccttccaccgcgcctgatggtcgatgcagttttgccagaacggccacccgagagcctgtcagtcgatcagttgagcggcggctaccgggcgatgcttgcgatcgtcatggatttggcgcgcagaatggcggagctcaacccagatctgcccgagccgctttccacgggcggcatcgtgatgattgacgagatcgacctgcacctgcatccaaagtggcagcaattggtggtcaatggtctgcgaacagcttttccgcaggtgcagtttatcctaaccacgcacagcccccagatattgactacgctcgacccgaaaaatattcggaacctcaaatggcgtgacggaaagcttctccaggaggacgtgccgtccacctccggcgcagaggcgggccgccttctggcggaagtgatgggcgtctccgagcgaccgccggccacgatctcgaggttcgttgatctgctcgacaggtatcgcaatattgtcctgcaagagaagtgggactcaccggaagcgaatacgctcttgagcgaacttcgcgaagcgtcgccggacgacccaatcctgggcgcgctcaacctcgagcgccgacgcctttcagcgcagaagcggagagcagctgatgaagcatag

SEQ ID NO: 88727 - DNA, 816 bp, Komagataeibacter intermedius TF2
atgaagcatagttccccgttacccgccgcccctcatctattcgcggagtatcttgccaacgccgcgccggcgacttggaagggctttcgtgcagaggcgcgtgacgcgtatgacgagctatgcgaggctctaagtgcacgtcagcgtgggctatgcgtcttttgcgagatcgacctcatcacgagccagggctttcatgcgcgtgagatagagcattggcggccgaagtcgctggaccagcatggcgcgatggactggaccttcggaattaataatctgcaattgggctgtctcggtggctcaagacgatggccgctcgccgaccacgaccgcacaggcgatcccaagccagggccgaacctttcctgcggcgcatcgaagggcaaccgggatcccgcactccccatggatggggtgctaccctaccgaccatcagatctgcccgaaggccctaccatgtttgtcgttgcaagcaacggtgaaatacggccagttggcaattgcgcggcacatggtctcgatgccgctcggctgatcgcaactatcgctttcctcggtttgaactgtacccggttgaagaacgccagggaggcgatcttacgctccctcgacgaggcgctgcttcagtatctggaaaacgccgaaggcaacagcgaagacgagcgcttcgatgtggcttatcagaatcttgcacgcgattccgccccagatcccgttggcaatctaccgcccttcgtatcaacaatccggtcgttctttgggccgaacctggatccggtgctttttccaatttcgggctggtcgaacggcgattga

SEQ ID NO: 88728 - DNA, 1374 bp, Escherichia coli; identical to SEQ ID NO: 88056

SEQ ID NO: 88729 - DNA, 636 bp, Escherichia coli; identical to SEQ ID NO: 86043

SEQ ID NO: 88730 - DNA, 1374 bp, Escherichia coli; identical to SEQ ID NO: 88056

SEQ ID NO: 88731 - DNA, 636 bp, Escherichia coli; identical to SEQ ID NO: 86043

SEQ ID NO: 88732 - DNA, 1659 bp, Enterobacter cloacae
gtgacgaaacaactcgaacgaagcgccagaggtggaaacctgctcgccgcctttgaactgtatcagcgtggcacagacaacagtccgtctgatgagataatagagaaggcagaggaatggttctctatctgctggaattatctgcagaacgccgtgcgcgatgatgaggctaattacaagcctgaaaacgctttttgcattcgtacactgtcactgaccgattaccgtcgtttctcgcatcttgatgtgaactttgaagacgatctcacaattatcatcggcaataacgggcgtggtaaaaccagcattttatccgcaattgcgaagacactgagttggttcagcgcgaacattcttaaagaagacagcagtggacagcgactcagcgaatatactgacatcaaaaacgattcagtagacaaattcaccgatgtcagcaccagcttcttctttgggaaggggcttaagcatctctccgtgagactttcgcgatcggcactcggtgtggcagaacgacgagagagcatcgtcaagcccgcgaagtcgtttggagatatctggcggattattaatgaaacgagaactgtcaaccttcccacgtttgcgtattattccgttgaacgctcccaccctttgagtaagcctgccaaagatggaacggacagaagggatgaccgctttgatgcttacaatcacgcattgacgggccctgggcgttttgatcatttcgttgaatggtttattgcgctgcataagcgacgtgaggcgagtagctcttcgcagcttgatgaactgcaaactctagtcagagatctgcaacgctctgtagacgggggtatgctctccttaagaccgttgctcgatgacgcgcggcggaaaattcaaattgcgcaattaaaagatgtgacgacagcaaaaaacatgcactccgttgccgcacagatgacaatcgtcgcaagtgcaattacagcggttgttccaagcatcagtaatatttgggtggaaacggcttcaggtgcagatgtcattaaggtcaccaacgatcagcaggacgtatccgtcgatcagatttcggacggtcagcgagtgtttttagcattagtcgctgatcttgcgcgtcgtttggttatgctgaaccctgtgcttgttaatccgcttgccgggcgtggtattgttctaatagatgagcttgaactccatctgcatcctcaatggcagcaggatgttgttactaacctccgggcagttttccccaatgtgcagtttattatcacaactcacagcccaattattctttccacggccgagaagcgttgtataagggtctttggagaaaacagagaaagcgcagagtcatttttagagttgccgccgatccagactcgaggaagcgaaaatgcggagatccttgagcaggtcatgaaggttttttcccttcccccaaatgttgaagaagcccaatggttagatgatttcgaactggcactcacaggtgaatacaaagacctcagcgaaaccgcccgcacgatttatgacaaaattaaagggcattttggacctgacagtcctgagcttaaaaaagcggacagcctgatccgccttcgccgtatgaaagctaggataagtgaggcaaaacgtgagaagggtagtgaaggatga

SEQ ID NO: 88733 - DNA, 648 bp, Enterobacter cloacae
atgaagcagctgatccgtagggaaggacccgcgcaactggccaggtttacggctgggcgtgatcaatggggatatgttgacttggtcgatatttggtcacacctattactcatgcagggtggtttttgcgcctactgcgagtgtcggcttaaccgaaaacacgttgaacactttagacccagaaaagactttccggcactgacatttgaatggactaatttgtttggctcctgtggcgatacacacaaggcggggggctgggaacggtgcggcatatataaagatgacggcgctgagctctacgatgccaaccagcttattaagcctgatgatgatatcccggatgactatttgctattcctgactaccggacgtgtagtacccattccggggttaaccggccccgccctgataaaagcccaggagactatccgcgtttttaacctcaatggtgacccggcgctttttggcagccgaagagccgcgataacctccattatggctgaagttgaggagctttatgctgttcaagacgagattgaagaggaattgtggagtgagatgctccactttgagatccagcggttagaagacgttgagttcagcacggccttaaagcatgcttggcgatataacaatgcttattag

SEQ ID NO: 88734 - DNA, 1176 bp, Enterobacter cloacae; identical to SEQ ID NO: 88678

SEQ ID NO: 88735 - DNA, 594 bp, Enterobacter cloacae; identical to SEQ ID NO: 88679

SEQ ID NO: 88736 - DNA, 1176 bp, Enterobacter cloacae; identical to SEQ ID NO: 88678

SEQ ID NO: 88737 - DNA, 594 bp, Enterobacter cloacae; identical to SEQ ID NO: 88679

SEQ ID NO: 88738 - DNA, 1737 bp, Enterobacter cloacae
atgcaactgcttcgcatccgtatcccaaacttccgcaatctgcgcgatctcaacattgctttcgatacccacttgcagcctgccgatgcaccacccaaacccatccgcagccacgccctgattggtcagaacggcaccggcaagtccaacctgattgaggcactaatcaccatcttccgtgatgtcgatctcgatcgtgaagcagcattcaattacacactggaatacagtattcacggccatgttgtgcgtattgaagccgattctgccaagcagaagcgtccctatgtatgggtagatgataaagctgcctcacagggctttttgctcaaaaaccgcgagttactgccagcacatatttttgcctattactccggtcgcaatgagcgtattgaagcgctgtttcatgaacatgagcgacgctttaatcagcgccaggaaatcaccactaacgaagtcctgtccgaacaacttctggagaactttactggctccgacgcggatattcgtgcgattgaagaagccaaacgtcgccgtgaagtgcggctgaagcaagtgggcgatgaccgtctgcgacgcctgttctattgtcgcggtggacacagccaactggtacttctggcttgtctgttatcggacgaccctgtgtttcagaaggtactaaagaacctgcacatcgaatcgttagaatccgctctcttcgttttaaaagagccgcaccggctacgtgaaaagcgccgcaatggaaagttcgaagtgcaggaactgaatgaaggtgacccacgcttttggtatgctcgcagcaatgtggtcagcgagtttcttgacaagctctggaaggttgcttgggcccccattgaacaggagacaaccaaacagattgattttcgtggtcgcacagagaagcaaaagcagctgtacttgtttgtgtcaagccaagaaaagcttaagcaattgggagagtcgatcggcagcaccgacagtttctttcgctacgctgaaggagcctatattggtgatctgatcgatgaaatacgtattgtggttaagaaacgtgatgaacatggtggtaaggtaagttttactcacctttctgaaggtgaattacaaatactcaccgtgcttggtttgatgcggattacccgtgacgacaattgtttgttcctccttgatgaacccgacacccatctgaaccctatctggaaattgcgctacttcgacgatattgaaggggtactaagtgcggatgatgcatcgctgctacagagcgagtcgcaaataattattacaacccatgatcctatgatggtgggcagtctgaagcgtgaacaggtacatatactgcgtcgcgatggtaatatcactctggtagatagtccggaagaacatccgcaaggaatgggcgtaacagggttgctcaagagtgagctgtttggcttatcatccacgctggatatcgaaaccgagcgccgcttgtttcggcgcaatgaactttttgcactcgacgaaagaactaatgatcaagatgatgaactacgccgtttgagtgtggagttggcagatttgggcttttcaaatgcggatttcaaagaccctttctatgcgaagtttgtacgacgaatggccaaacataccaagttccacaaaccaattcttacgcctgaggaacaagctgaacaggataaaatcgccgactcaatcatcgatgagattttacgtgaggatgatggacaatga

SEQ ID NO: 88739 - DNA, 852 bp, Enterobacter cloacae
atgatcttcatcgacttggaaaataagcttccaacggatatggatttgcatcctgatgttcgctggagcgaggctgattggaacgcttggcagaaagagtctgttcgcttgattggtgagcttgccaagctcaatgcagcaggccaaatcaaagaacgtaatgaattgattgataagcaaagtggccactggggaaagttgaaaccatggcttctcgtactatcgggtggaaaatgctggtttactgaagcgcgagatattgcttcgcatttagacgtggagcattttcgccctaagaaggctacgcgtaatgttaagggacccgaacgagatgggtactggtggttggccttcgactatatgaacttccgaattgctggcactgtacctaatagaaagaagggtgcgtggtttcctcttcgctatggctcgccatgttcaagttatgcgcgtcgctgtgaaggagatgagattccgcacttcttagatcctacaaatgcttatgacgttacattactcgcttttgacgaagaagggaaagcggtgcctgcaccaggtatttctcgttgggataatattagggttagacgtaccgtagaccgcttaaaactctccgaacatcaagccttggcagaggaacgtcgtaaggtttggcaaagaactacgaagctgataaataagtattttcaggcactggctagtactcgaacttctgccgctgcccgtgagcaagtgaaggacacagcacgtgatatactctgccttactaagcctgaaaccgaactttcatcggtggcgaaatggtgcgttcgcttacgcaacgatccacaactttcccggctggttgggtaa

SEQ ID NO: 88740 - DNA, 1176 bp, Enterobacter cloacae; identical to SEQ ID NO: 88678

SEQ ID NO: 88741 - DNA, 594 bp, Enterobacter cloacae; identical to SEQ ID NO: 88679

SEQ ID NO: 88742 - DNA, 1176 bp, Enterobacter cloacae; identical to SEQ ID NO: 88678

SEQ ID NO: 88743 - DNA, 594 bp, Enterobacter cloacae; identical to SEQ ID NO: 88679

SEQ ID NO: 88744 - DNA, 1176 bp, Enterobacter cloacae; identical to SEQ ID NO: 88678

SEQ ID NO: 88745 - DNA, 594 bp, Enterobacter cloacae; identical to SEQ ID NO: 88679

SEQ ID NO: 88746 - DNA, 1176 bp, Enterobacter cloacae; identical to SEQ ID NO: 88678

SEQ ID NO: 88747 - DNA, 594 bp, Enterobacter cloacae; identical to SEQ ID NO: 88679

SEQ ID NO: 88748 - DNA, 1176 bp, Enterobacter cloacae; identical to SEQ ID NO: 88678

SEQ ID NO: 88749 - DNA, 594 bp, Enterobacter cloacae; identical to SEQ ID NO: 88679

SEQ ID NO: 88750 - DNA, 1749 bp, Enterobacter cloacae
atgcaactgcttcgcattcgtatcccagtcttccgcaatctgcgtgatctcgacatatctttcgatacccacctgcagtcttcggaaagtgcgataaatgtactgcccaaacccattcgtagccacgcgctaattggccagaacggcatcggcaagtccaacctgattgaggcactaatcaccatcttccgtgatgtcgatctcgatcgtgaagccgcattcaattacacactggaatacagtattcacggccatgttgtgcgtattgaagccgattctgccaagcagaagcgtccctatgtatgggtagatgataaagctgcctcacagggctttttgctcaaaaaccgcgagttactgccagcacatatttttgcctattactccggtcgcaatgagcgtattgaagcgctgtttcatgaacatgagcgacgctttaatcagcgccaggaaatcaccactaacgaagtcctgtccgaacaacttctggagaactttactggctccgacgcggatattcgtgcgattgaagaagccaaacgtcgccgtgaagtgcggctgaagcaagtgggcgatgaccgtctgcgacgcctgttctattgtcgcggtggacacagccaactggtacttctggcttgtctgctatcggacgaccctgtgtttcagaaggtactaaagaacctgcacatcgaatcgttagaatccgctctcttcgttttaaaagagccacaccggctacgtgaaaagcgccgcaatggaaagttcgaagtgcaggaactgaatgaaggtgacccacgcttttggtatgctcgcagcaatgtggtcagcgagtttcttgacaagctctggaaggttgcttgggcccccattgaacaggagacaaccaaacagattgattttcgtggtcgcacagagaagcaaaagcagctgtacttatttgtgtcaagccaagaaaagcttaagcaattgggagagtcgatcggcagcaccgacagtttctttcgctacgctgaaggagcctatattggtgatctgatcgatgaaatacgtattgtggttaagaaacgtgatgaacatggtggaaaggtaagctttactcacctttccgaaggtgaattacaaatactcaccgtgcttggtttgatgaggattacccgtgacgacaactgtttgttcctccttgatgaacccgacacccatctgaaccctatctggaaattgcgctacttcgacgatattgaaggcgtgctaagtgcggatgatgcatcgctgctacagagcgagtcgcaaataattattacaacccatgatcctatgatggtgggtagtctgaagcgtgaacaggtacatatactgcgtcgcgatggtaatatcactctggtagatagtccggaagaacatccgcaaggaatgggtgtaaccgggttgcttaaaagtgaactgtttggcttgtcatccacattagatatcgaaaccgagcgccgcttgtttcgccgtaatgaactttttgctctcgatgaaagaactcatgaacaagatgatgaactacgccgtttgagttcagagttggcagacttaggcttttcaaatgcggatttcaaagaccctttctatgctaagtttgtacgacgaatggccaaacataccaaattccacaaaccaactcttactcctgaagaacaagctgaacaggacataatcgccgactcaatcatcgatgaaattttacgtgaggatgatggacaatga

SEQ ID NO: 88751 - DNA, 852 bp, Enterobacter cloacae
atgatcttcatcgacttagaaaataagcttccaacggatatggatttgcatcctgatgttcgctggagcgaggctgattggaacgcctggcagaaagagtctgttcgcttgattggtgagcttgcaaagctcaatgccgcaggccaaatcaaagaacgtaatgaattgattgataagcaaagtggccactggggaaagttgaaaccatggcttctcgcactatcgggtggaaaatgctggtttactgaagcgcgagatattgcttcgcatttagacgtggagcattttcgcccaaagaaggctactcgtaatgttaagggacccgaacgagatgggtactggtggttggccttcgactatatgaacttccgaattgctggtaccgtacctaatagaaagaagggcgcgtggtttcctcttcgctatggttcgccatgttcaagttatgcgcaccgctgtgaaggagatgagattccgcacttcatagatcctacaaatgcttatgacgtaacattactcgcttttgacgaagaagggaaagctgtgcctgcaccaggtatttctcgttgggataatatcagagttagacgtaccgtagaccgcttaaaactctccgaacatcaagccttatcagaggaacgtcgcaaggtctggcaaaaaactacaaaactgataaataagtattttcaggcactggctagtactcgaacttctgcagttgcccgtgagcaagtgaaggtagcagcacgtgacatactctgtcttactaagcctgaaaccgaactttcatcggtggcgaaatggtgcgttcgcttgcgcaacgatccacaactttcccggctggttgggtag

SEQ ID NO: 88752 - DNA, 1176 bp, Enterobacter cloacae; identical to SEQ ID NO: 88678

SEQ ID NO: 88753 - DNA, 594 bp, Enterobacter cloacae; identical to SEQ ID NO: 88679

SEQ ID NO: 88754 - DNA, 1380 bp, Enterobacter cloacae; identical to SEQ ID NO: 87572

SEQ ID NO: 88755 - DNA, 636 bp, Enterobacter cloacae; identical to SEQ ID NO: 87573

SEQ ID NO: 88756 - DNA, 2928 bp, Marinomonas sp. S3726
atgcgcgattttaaaacaatacaaaatttaatgggtgatctaccagaggaagtcacaaaagcttacttgattggtagcacaggggcaggtaaaagctcattagttcagcaaatacttggaacaacggaagttaactttccaactacaactcaacgcagaacgactgttgcaccaactgaatatgtaattaacagtttattaccttttaaaagtactattttattaaagaaaaaagaagaccttgtttttgcaattgaagatttgatttttgaagcaataaaaaaaaccttggataaaaactctaatttaagtgatattatttatgaatttgagcagtcgcctgatgaaaggtttaaattaaaacatatagtttcagattcaattatagagaaacaagctgaaacattaataaataagctaaggcctttaaatttagatgtaaatgatgatggtttttttgataacttaaaggttaacaatattgttgatgatataaaaaagaatcttattggtgaaattgaatttaatttttcaaaaacatgtcctgattcgggaaatcttttcgaacaagaaacaatagaaataatagggataaatgataaagataaatttattattaaaaataaagatttactcaaaaatgaatttggctccatatctgcattagttgaatatgttagaattgaaggtgacttgttatcttcaaaatttcataacagttcaaattttgttttaattgatggggaaggcattggccattcttacagtgagaaacgtgatacgctgtcaacaaggcactatgactattttgatttttgtaatcatattattcttattggtgatgcagaggaagcttttgcaacaggtgggcaaggtgtaattgaaagtatatgcttaaatggctatcaagataaatttcaactagtgttttctaaaacagataaattggataatactgatgtaaacggttatataagaaggaatttacataatttatcatcagcgcttagtaagcaaagtatagaatttagtgtagaaaataaagacacctttaaatttggagagttaaataaaaaagaactcagtcaccatacttcagggcagataataaaattactaaaagtaataaatagtaaaattgaaagaaatattattgatttagagtatgattattcagttttttattcaactattaataataatgaatttcatgaagagtttataaatcggctcgataatgaacactgggcagtgttaaaagctttcagtaaaaggctaagttggaaggattttgaatatcgccatctaaaacctttaagttgggttctaacttttatcatgagagatataaatttatttttgaccaaaaataatttggtttcagaaatatgtgactcacaaaataaaatcaaaagaactttctctaaaaatttgagagattttattttcaaagaactgattatagagaaatctcacttatggaaacaagcctatgagatgagaggaagaggttctcatcaaaatagaaaaaatttcattttcgataatattataacaacttttttgcctaaagaaagttcaaaagcctttctggattttagagaaaaacttaaaaaattattgataaattcaggtgctttggaaatgaaagaaccaatacgaacaacaatatgtaaaattaaaataacaaatatatttggtaatcgtgatatagagtggaatttacaggatgatattaatcttctggttggtaaaaatggatcaggaaaaagtactgtattaaatttacttagtgcatgtatatctaataataaagaaatacttgactattataactacccatatgttgaattaacaataaaaaaagagtttgaaaatggtcaaaattctgaacaagtattaaaagcaaatacaccttctttaaacttaaacccaataattattccttcacttaatgatttaagtcggttttctaataaaaatgaaagtttaactttggatttagtaattgagaatttgacaaataaatttagtaagtatcaaagaaatgttaagcagattataagtaatagatcagaggagttagaaagtaaaagaaataaaatacttgaaaatattaccgacagtactcctgaatctttgttagaatttaagaaactttctgttgaaattaatagtattatagataatgaatcaaaagttttacttaaatttaaaaaagtaatggataaatatttcttagatactgagaaaaccataataatagatgacgataatgatgcgctagtaattgaattgtcatcaccggaaaagaagagaataaaattaaatcaactctcttcaggtgaaaaacaattactgattatatttctaaatgtgattttaaactctggaaaatcatctattttaatcatggatgagccagaaacatctctacatgttgagtggcagtcttcttttattgacaatgtaaaagagttaaatccaaaaatgcaaattgtatcaactacacataatccactgattctattaaatcgtaatcaaaatgaaattggaattatagattataaaagtacttgcatcgatactagtaaaatagggacgaaatacctagatatttcgtcagttcttcttgaacactttaatttatcgtctctaattggaaaagatatgagagataaaataaaagagtactcatcgttgcaaataataaattcgcctaatgatgaagaagtagaacgaattgaaaagataaagttagaacttgataatagtttctctagtgaaattctttataatagaaattattataagtttttaaagtttttaagagataataaagaaattgattttaatagatttgaatctattgaacctgaagatatggaagaatttcttgaagagtttggagagtttttcaatgattag

SEQ ID NO: 88757 - DNA, 753 bp, Marinomonas sp. S3726
atgattagtatgaaagatctttatgaacatagtgactacgaaaataccaagaaagaatttctcgcttcgaataatgcgaaacggtggtcaatttttaaacctgttcatttaaaggtaactaagaataagtgccctatatgcgaatgtcgtttagatggttcattaactcgaccaagtaataatagtcaaagtatttctattgaggctacaattgatcattatcgaccgaaaaaaaatggcttgtatccattccttaaatatgaggataaaaactatattgtgatgtgttctgattgcaataacttatataaaggatgtgaatttcccctttttcctcctgctattcgaggcacatgttcagaatctatcaagaaagaacaaccattaatagttaatccattaacagacaaccttagtgaattatttaatgtccgattcgttatgtcacaaacagggcgtaacttattagagctgactcctagaaataataatggctatgaatatgagaaagctttgaaaacaattaaaatgttcgggattggtcattatgatgaatttcttcattcaaacaataatgctaaattacttaggcttgaaattttatcttcacattatcaaaaatttaaaaattttataagggctttgaaaactggagataaagaaatggctttattagaatataaaaacaataacctttctgaatttggtttaattaatcttataaaaaaacagcagttctcagactttacataa

SEQ ID NO: 88758 - DNA, 1308 bp, Oleispira antarctica RB-8
atgaaaataaaacgattaaaacttaatcactttcgtcgtttctctgacctagagattgaatttgatgaacaactaacggtattggttgctagaaacggtgctggcaagtccagtattttagatgctatagcaaccttgcttgggtcattcttaactcgtgttcccaaagtagctggaataaacccgaaggaaactgattttcagttattacctaatggtaagaaaccaccttatatgcgcatagcctgcgaaacatttgaaggtattaagtgggatcgaacagaaaaacgagatcagactaagaaaacagctgaagcgatacctgaagcgaagggtattaaagacttaaataattatgtggatcaatttattgatgcagataacgaaggtgaaacttacgagcttcctatttttatttattatggaacgggtcgtggtgtatttgaaatgccacagcgtacaaaaggctttaataagatatttaggcgttttgatgcgtttactgggggactagaaagcagagcaaattttaagagctttgttgaatatttttattctttagaaaaaacagagagtgaccgccagcaagaagtgcgatcatttgatatagacattccagagcttcgtgcaatacgcaaagcgattacggcaatgcttcctgatttttcaaatcccaaaggcgctaagcctgctggtattcaggtcgattggaaagtaggtgagcagacgaagaaacttcgtattgaacaactcagtgacggctatcgaacgaccttagctatggttatggatattgcaggccgtatggctgaagccaatccagagatggatgatcctttattagcttctggtattgtattgattgatgaagtagatttgcatttacatcctggctggcagcaaacgatattgctagatttaatgcgaacgttcaaaaaccttcaatttatagtatctacacatagcccgcaggtaatttcatccgttaagcctaaatgcttgagagtgattgattggatgggtgagaagccaagtattaaatcagtctcgttctctgaaggtgctgaatcgcaacaggttttaatggaagttttagggcttgaatctccacgcgtaaaagacctcccaattgtacaaaacttaattcaataccaagaattggtttctaaggacttatgggatacccaagaagcactgagcttacgaaagaagcttgatgcctggggttctgagtatgaacctgagttagctcgattagatatcgatattcgtttgaaagaaatggatcgtcttgatgaagaaaattga

SEQ ID NO: 88759 - DNA, 768 bp, Oleispira antarctica RB-8
atgaagaaaattgataagacagatgctcctaccaagctcgaagcatataggcggttacgcccaacagcaaagtgggagaagtttgtagataaaactaatagaagaaagcaggctcagaatcacataaaaggcgatcaaggcggtctttgtgcctattgtgaaattaatttaaagaatgctgatgaaaatggaaaggcagactttagagttgaacattttcaccctaaatctgactattcgaccgtgcataactggcatttagattggcagaatctattaggctgttgccatggaggaagtcaagctaacgtagttgaggcgggagagcgccacagtagtcctgatcattcatgtgatgtacctaagggaaatgagaattgggatgatgtgattctgaatccgttaaatattccacatacgcctattttattttcctttaatcgaacagatggcgcaatttcgctcaataacgataattgcgatcaagtaggtgtggataaagttaaagcacaagcaacgattgataatttacgacttgatagtgaccgcttacgacgattaagaaaagctgcgcttgataatgtaaatgactccctcaaggaattaattgcggaaggtatgaaaatagaggatgcgcgatctaggcttgctagaggattgttaaggaaaaacgatcaagatcactggccagcattcttttcgtcattgcgtgattatctgggaagcgctgctgagcaccaattaacggatattggttatattggctaa

SEQ ID NO: 88760 - DNA, 1272 bp, Pseudomonas fluorescens
atgcgcctggaccgtctccacattcagaattttcgttgctacgaagatgccactttcgactttcagccaggtttcaacctggtggtgggggttaacgggagtgggaagacttcgttgttgcaggcggtggctgcatcattcgttgaattttccaacgcaatgacatccgaccgaaccttctcaataaacgatgatgttcgtgttgttgttgataaattccaaggcagaactcgttacgaaaaaaaattccctctttggatagtgagtacaggggatgttttgggtgcaaacgaatggaaaacgttcagccttgttgaggattcacctgcagcttcgaataaacagctgaaaaataaggttgaccaagtacttgccttatctgaagcaaaaacgattccggacctccccgtcctttcgttttaccgcgcggaccgacgctggaagagtgcaaatatttcggcagagttcgcagcccagcaaaaagtttcccgctttgatagctatagcaactggtatgacgcagtcacggatctaaaggacttcgaaagctggctgatcgccaagacgctggagcgaatgcaaaccttgctggacgagggaatgacgtccgctccatttgacgacgaattagcatgggtaaaccaagcgattcagtttgcactgccacaatcgacggacttacgttacgacctccggatgcagtgtttgctcgtagatatgaacaatgggcaaacccttcctttcaatctgctgagcgatggccaacgcggcatggtcgccctcttcgccgatatcgcccgccgcatgtgcatccttaacccgcacatgggcaaggacgtcctgaaaaaaacttcgggggtcgtcatcatcgacgagctggatatccatcttcatccagcctggcagcgcagcattgtctcggcattgaggcaggcatttcccaaagtccaattcatcaccgcgagccactcacctcagatcatcggcagcctgagacctgaagaagtcatagttctaagtgatggtgatgctcaccatcctcgagtcacttacgggctggactctagcagcattcttgaggaggtcatggacgtttctcaacgcgaaccaaagattgaagcaatgctctcggaactgttttccactcttgaagataacgaccttgaaaaagccaagctgctgcttcaggcactcaagaaaaaagctccggatctgcccgaattcctgagagccgaagcattgctcaggcgtaaggagattattggccgatga

SEQ ID NO: 88761 - DNA, 642 bp, Pseudomonas fluorescens
atgaagcgagtgatcaaaggaactgagcctgcttcatttatccggtggaaagcgttagcgagtgaagagtggagtccctcttattcgatattgcgaaatccagagaaacaagaactacatgaaagcctgatccgtgaacagggttttgtatgttgctattgcgggaacaaagtaactctgcaaaccagtcacatagagcactttcgtcctcaaaaacccttcgaccatttgggtctggtgtacacaaatctccatgcctcctgccaaggcgaaaccgaagaaccaaaacctgcccactgcgggcacaacaagggtaatagattctccgaagacgctcatgtatcgccgctggacgaaaactgcgagagccatttcagatacacgctgattggccagatagaaagcgcgaaaactggcacgcctgccgagaacatgatcgacatactcgccctcgacatcagttttctcaacaatcgccgtaaagagaaactggagggcatcttcgatgacgacttcctggccgatttttctgtcaaagaactcgaagcgatcattcaacaataccgccaaccgcagaatggccagcatgacgctttcgaccacatcatcgcccgctacgccgaacaactcctcggtcgttga

SEQ ID NO: 88762 - DNA, 1272 bp, Pseudomonas fluorescens
atgcgcctggaccgtctccacattcaaaattttcgttgttacgaagatgctactttcgactttcagccgggtttcaatctggtggtgggggttaatgggagcgggaagacttctttgttgcaggctgcggccgtttcgttcattgaatatgcgaattcgataaaactacagcccatcggcttagacctgaacgacgtgcgctttgtcatcaacaaatttgaaagccgtagccgcttcgaaagaaagttcccgcttctgcttgcagctcagggagatattttaggagtcaataaatgggaaaccactcaagcgagtgagcatctccctcctttggtagatcttgagttaatgcttgcaacagataaagagctcgcaaagttcgacctcggagaaagtgtcgagctacccgttctcgctttctatcgatctaatcgtcaatggaaaggcgcaaatatttcggccgagtttgcggcacagcaaaaaatctcccgcttggacggatacacgaattggtttgatgcagttaccgacttaaaagacttcgaaagttggctgatcggcaagacgctcgaacgcatgcaaagtttgctggattcaaaaacggcaataccgacattcgatgacgaactgacgctggttaatcaagcaatcgggatagctctgccgaatgcaaaaaaccttcgttacgacctcaggcttcaaagcctattgatagatgttgaaggaggcataaccattcccttcaacaaccttagtgacggccagcgaggcatggtcgccctcttcgcagacatcgcacgtcgcatgtgcatcctcaaccctcacatgggcaaggacgtcctgaaaaacacttcaggcgtagtcatcatcgacgaactggacatccatcttcacccagcctggcaacgcaacatcgtgcctgcgctgaaacaagttttcccgaaagtccaattcatcgccgccagccactcccctcaaatcatcggtagcctcaagcccgaagaagtcatcattctgcacaacggcgatccatcccacccacgggtcacctacggcctggactccagcagcgtgctggaggaagtgatgggggttacccaacgcgaacccgaaattgaaaaaatgctctcggaactgttttcaacactggaagacaacgacctgaagaaagccaaggcgcaactcaaggcactgaagttgagagcccctgatcttccggaattcgctggagcagaggcgctgatcaggcgcaaggagatcctcggtaaatga

SEQ ID NO: 88763 - DNA, 645 bp, Pseudomonas fluorescens
atgaaacgagtgctcaaaggaattgaacccgcttcatttacaagatggaaaagctcggcaaacgaagagtggagtcctacttatccaacactgcaaaatccgcaaaagcgtgatttgcacaacagtttgctgcaagaacaaggcttcttctgttgctactgcggtagagagatagatactgccagcagtcatatcgaacacttcaggcctcaagaacactatgaggagttggcattggagtaccataacctccacgcctcctgcctgcgagagacaacacctggcaatccattgcactgcggtcatcgcaaaggcaactggtttgacgaagcgcagcatatctcaccgatggatgagcattgcgagcaccgtttccgttatctgcagaccggcgaaattcaagcaaccgaacgagacgatctgccggcaacgaaaatgattgaagtactggcactcgatattgcctacctcaacaatcgccgacagagcacaatccgtggtttattcgatgacgagttcatcacacaggccagtgaggaagacctggtccgcctcgttgctgctattcgctctaacagtatccttgagcaaaaagctttcgatcacgtgatcgcacgctacgccgaacagctcattggacactga

SEQ ID NO: 88764 - DNA, 1584 bp, Pseudomonas fluorescens
atgaaagtagataagctacatattcggtcgcaattcaagaacctcgaaaatgtcgttgtcgattttgacgagcacaacctcatgactgtgattgttggccgtaacggatctggcaagtctaacgtattggaagctttagtagcgatttttcgaaatctcgacttaggcgaagaagcgcccttttcttaccacttgacttaccggcttggccaaaaagaatcctcacgttggcaagaaatccaaattgacgcggatccgtcacgtggcagcctggcaaaacagtacacaagtagatatagaaatctgattaaaaacgatgaaaccgagtcgtcaacagatgacacggtgtggacctctataccattttcaaagttgaagaggaacaaggacagccttgccccctttctcccaaagtatgtgtttgcttactattccgggcctagcgataggctagaacggtacttcaggaagcaccgaacagatttctatagaaaactactcaaggacgaactaaatttaaaaggggatattaggcctttattttacgccaaaccgcatcatagccagtttgtcctgctggcgtttttcctatccgaacaagatagtgttgaaaaatcttttttacgcgagcatttgggaattgagggtttagatagtatacactttgtaatgcggcaacctgaatgggcaaagcaaaaaggtgagcttttttggggggctaggggtgtagtcagaagattccttgacgatctaataaaatttaccatcgcaccggtaaaagtcactcgacaagaagacacatccctcaccggtagcaatataaagaatgagtttctccacttgttcttacctgatttgaaagcattacgtgatttcgccaaagatttgtcgcctggcgagcttttcaagatgctagaaagcactctgctttctgagatcatttccggagtaagcatacgtgtcaaagtatctagaagtgacacaccgcttacttttagcgagcttagcgaaggcgagcaacaactattaacggtgttaggtttactgaaattcacaggaggtgaagattcgctttttttacttgacgaaccagacactcacctcaatccatcttgggcggtcaaataccttagtttcctccgaaactttgttcctaaccatgagacaagccatcttcttatggtaacccatcatccactagcaattgccgaacttgaaaagaatcaggtccaagtaatgaagtcggatgatagtggaaaagtgcatgctcaagagccagaggaaagtccacgaggcatgggtataaaccttatccttcgtagcgacatgttcggcctcagcactacattagatgacattactcaaaacaagcttgactcacgaaatcgccttgctagtaaggatgaactctcggaggaacgaattcagcgagagccagaacagcctgccgaaacagagctggagtatttggcgcgtttgaataaggaactttcaaatcttggattcaacttatcttcagatgacccagattttatggattttctaaagaaaaaatatcatggtgtttctagcgaggcaagctga

SEQ ID NO: 88765 - DNA, 810 bp, Pseudomonas fluorescens
atgcgctggatttgtaaagacgatgtcgaagaatgcttaagccaggcgtggcgtgatgcggcaaaccttgctcaacagactttacttactgagcaggaccccatcaagcgaaaagcgattctaaaaaaatctgcctcatctgatatctggcgatctttctacgagttgcttcctgaaaatctcaaaaaaaaatgctggtactgcgaggttgatgatattcgggcggacatgcctgtggaccactttcgtccaaaaaataaagttgaagacgagaaggaacactcaggatattggtggctagcgtacaattgggataattatcggtgcgcatgcactttttgcaatagcaggcgtgtatttgatgagaccgaaggtggaaaagcctgcaaattccccctgtccaatccgcaaagccgcgcatttacgccaaatgatatccagcttttaacaaatgaaattcctgaccttttagacccgttcaatccagatgatgagaagcttctctggtttgatcgagatggaaagccagagcctaaacccggagcaactgaagaggagtgtcgcaaagtgaaaaactctattgatatttttcacttacacgaaacacgaattgtcagatccagaaataagataaggcttgaagttgaaaacttcgtgactaaaattcggcaaggtcaagacgtgcatcaagctaagatagcactacgtaaaatggtccggaacaccgagaggctatcccgagctgcaatcgtgtatttacgaccacatcgtgatcttccggaagtaatggaaatattacaactcgattaa

SEQ ID NO: 88766 - DNA, 2196 bp, Pseudomonas fluorescens
atgcgcaaagttttgcgacccgtttcgccccccgaattcctgacttcgccccgcgtacacgaagaaaaagcaaagattcttgcgtatctgcgtcgagatcaaagggatcgcttgcagcgtcgagacaatttgaacgaggagctgttctttgacacatccttgattaacgacctgcggcgcttgtttcagaataagtgcgcgttctgtgagacacgtacagtgtcctacggtcgtgtcctgcacatgcgccctttacgttcggtctacgactcgacgaaggtgaattcagattattacctctggctagcatttgaatggcgtaacttgttttacacctgtgaatattgcgcaaaagccaagctggatcagtttccggtcgtcggcgtcagggctccctatctggcatcttttgaggacgttcaaaaatacgaagtgccgttactgctcgatcctacctatgatgagcccagtaaagacctcgactttcattccaacggcctagtcgttgggaactcaaaaaaagggttggcaaccatcgaagtcttcggtctaaatcgagacgaattggtgtctgcccgcaggctgcgcattcaggagttctttgactcgctggttttcgaaggtaaggaagcccctctgagcgtgatgcttgatcctgattcagaacatttgggcgctctgctaagtgttatcaagaaaatttccaaggcgtggtcatttaacggcccccccatacgagggaacggctccagcctcagtcgaggctttatcgatgcttggacgagagcttctgaacaagaacggatgcagttgccgggtgtgctggatgagcttcaacgcgaggctcagcgagtgctcacgtctccccctaagttcgatatcacggaagatgacggactcgacgatgtctaccaacccaaaatgaaggaaggtgagatctcgacgataaagatctcaaatttcaaagcgctcgaaaacctcaccctcacgatggcctccagccggcgggctagcaccggatggccctcactgatgattctgggcgagaactccactggaaaatccagcgtcttgtgcgcaattgcccttgcgcttataggtcgcaaggaagctgcaaagcttcgaaaatatattcccgacctcgtgcacagcgtcgacaccagccgccatgatcagcttgaaaacagactggtcgatgtgagtatcggttttcactactcagagcacgtggcgtcgtttagctacgcgcccgagctgcgtgagatccgaggctctgatagccctgcaacagtagttattggctatggtcctcgacgtttttttgattacaagaagcaacatttgcccgacggggctgcggcgcgcgtcagaacgctgttcaatcccttagcaacaatcccctaccccggcgcctggcttgcagaacagaccggctcaacattcaatacgattgccgccgcgctgcgaatcgtacttgctctggatgaaaaggatgagttgatacgttatggcgatgacctggcggtacgtgccaatggccgtactacgacgatcaactcgctcagcgagggctaccgttccgtcttcgtcatgaccgtcgatatcatccgggagttgttggaccactgggacgacattgaacaggcccaagccgttgtactgattgacgagttggagacccatctgcaccctcgatggaaaatgcaggtgatgactgcgctacggcgggtatttccgcgtgttcagtttatcgttacgacacatgatccgttgtgtcttcgcggcatggatgatccggaagtgatcgtattgcgccgggattcggatagctttatcaagcccgtggaagatttaccaagctttaagagcatgaccgctgaacagctttttacctcagattactttggccttaacagcacaactgatccctctacctccattgagtttgctcggttagcaggggacgtcgtccggagatcgcctgagggaaacttggaagtcgcgccggcgaaggaaacagaagagttgatcaatcgattggtcctaggcgacagcgtcagcgaacaggtcgtccaggaggctctcatgaaatatcttgagcaacgagaggccaaaaaaggcgatgtgcttcccgagcttcgggaagaggccgtcgatgcggtcattaaggcgcttaccgaagaatgggaaggctaa

SEQ ID NO: 88767 - DNA, 888 bp, Pseudomonas fluorescens
ttgcggtactacaccgcatcagcgagggtggccggagagaagctcacaagctatacattcactgagtatagtgctggggatgtaaccaccacgttacgtcgtctgttcaacaataagtgtgcctactgtgagggttacctttctgacgatgtagacattgagcattttcggcccaagggtgggattaccgaagatggtacacacgatggatattggtggttaacccattcctggaccaaccttctcgcatcctgcaagcactgcaatcagagcaggtacaaccaccttgttgcgcaacatgcaacggttgctgatgttttaaagcttcaggctactactgctagaacagcttatggaaaggcaaaccagttccccatccaggggctgcgtgctacctatacggcttcggatcttgacgcggaacaggctttgcttattgatcccaccgctgagaaccccgcaccttattttgaatggtcgcgagaggggcactatagcgtcgtactccctcggcccactgacgaccggacgcaggccagaggcttggcggcgatcaacgtctttgccctaaataggctttatctcgtgaaggatcgcacggaacggctaaacgaacttcgaacgcatgcccaatcgatcgttcagtcgcttgaaaaagacatgcgagtaggtggcagccaagaatgccttgatgaggctttggagcgcgttcgtattctccggacctaccataatccgtcaaagagacacacggcgatggtggaagcctttgtagatgaatttgtcgccgcactcagagatcgggttgcatcgaacgctcagcccgttgcaatgaacagttttatgccgcatccatccgatgaggacgaaatcgatgaagacacctaa

SEQ ID NO: 88768 - DNA, 1236 bp, Klebsiella pneumoniae
atgtcttttaatattgtaaatgatggtgttggtaatgaaattagattagaggggcgtaagtttatagatggtgatagtaaatatcttctcccttccgttttgacatgtatatcaacaagcccatttgataaattttcatcagaacgtaggttttataactccaaacatgatattaacacattttatcattactttgggttgaaagatttaggacggaaaaatgccattcatgcttttatagaaaaaatcctatattcaagaattaatagttcattaaaaaatgacagagagtcatttgaaaaaatattgggttttttaaattaccagcctaaaataaaaattgagttcagaactagagttaggcttaaaaaactatttgagcttgatgatgaagagcttataagacaaattgaaaagccaatatttacaccaacgggtatatataagtggagtaaaaatcaatctaattatgatgtgcctagaataagaaattcattatttctcattaacgattatattttagcctcctcagatatacgttcgaattcaggttcagaggcaaggtattttgatgttgagataaatgctcttaatgaaaacatgataaatatatctgaacacgtgatgcatgagatgttatatttaatggagttgaatttattatctattagagatatatatctttataaaaaatcaggtgatgaagttatattatatgaagctagttctggtgagcagtgtttactaattaacacatttggtattgctaatagcattgcagataatgctttaatactgatagatgagccagaagtaagtcttcatccagagtggcaggaggtttatattgaattgcttatggatgtctttagtcataagaaaggatgtcactttattattgcaactcactcccctcaaataatatccaaccttaaaaaagataactgttttattactactcttgaaaatggcaaaacatatcatgctaaggatttcataaataagtcagcagattttcaactagcaactttaatggagactcctgggcatgagaatgaatatttaaaaagactggcagtaaatatattaagtaaaatttctgccaatgaagagttgagtgatcaagatataaatgatgttctatggcttaaggatatatctaaaaatctagagccgaacgatacagtcatgtttcttattggtttgatcgttaagagcaaggtgtctttaaaatga

SEQ ID NO: 88769 - DNA, 639 bp, Klebsiella pneumoniae
atgatttctaatgcttatttgtataataatgattttcaggaaaggataaatgcaaaaataagctcagaggggttttgttctgattcatggtctgataatgatattagtgatattaaagagtcaataaagcaattttatatacctgaacaaaaccatatttgtccttattgccaacaaagatttttgactaacaatgggaggcaatgggatatagaacatataataccacgccaaactcaagttggtttcatgtttaccccacagaatttatgtgtctgttgccctgattgtaatagtcataaaggatataaaaaaacaacgactagtgtcgctaaaaaaacgctacctacaaaatcgcacttatatcttatcgttcacccacacttcgataaatatgacgatcatatagaggtcattgaacccggatatctctatagagcaaaaagtaagaaaggtgaaaatacaatgtatgtttgttcattaaacaggttttatcagttttctggttataattctgcagtagcaacagatcatcgtttgatgatgttggcaaatggtttatcttctgcacagagcgaagaagagaaaaggcaaatacgtcgagaaatgatatctatatcactacgggcaaacatatag

SEQ ID NO: 88770 - DNA, 2208 bp, Pseudomonas kilonensis
atgtaccatgatgatcgtgaaatcaacgccgacaaattgatcgaaacgcttgaagcccaggtaaagaggttcaccagtctccatgaggaagcgcggctcttactgatgctggtgatcgtcgccaggatcggcaagccgtccaacattctgtacacgctctcccaaaagctgatggagccaccggtgcttgcttcgatcaagctcagtgagtttagcagtctgctgcatgaagccgagaatcttatcgagcctggcgaagacgcagactttttaatcactcatctggccgcaaaagcgatttcgttggcattaggtattgattaccgccatccgaaactggtcgccgcattggttggcaccattcaatcgaccttgtcgacgcccctgtttgaagcaatcccgagtacagccgaactgtcgctggggttgctcggtgactatccgaaagactcttttccgatgtccgacgatgttagccagcaccaatgggatctgatcagcatccgcttggcagcaatggatatcaggcctaatttcatcgcgttcaagaatcatcgtcgaccagttcaatcgacggtcctcctggacgcgccctaccctgatccgacccgaatgctgtatgggcttcaaaacatgctggacgatcaggtacaaggtcggctggtgctcattcacaactggacccgcgccaatatggcggatacgtggtcgcgcttgtatgcgttgatcgagaaccgtgcccaggtggaagcggtcatcgccttcagcagcccgcctaccgcttcagattactgtacggcgattattatcaatacttctccgactcagcgagaaacgctttatatcgatgtttccctgtcaaacaaatcgctgccaccgttggatgctatcgaacggatgctcctcgccggctgcatctacaacctttggcaaggccgcgtcgcccacagtcacttcgagtatctttccagtgatgtacggcgttttctcaatagctatttcagcgctggcttcaggccaatttcgcggctctgcaacgcaattgagaggcggcccggcaatgtcttgagggccgtcctgaccaagagattgttactcaaggccgcgtctggcgaatcttcgcggcgtacccgttcggataacagcaaattgatagcggatgtgctggaacaccgtggcaggccgtgttgcgtctatatcattggcaacaatggcgaaggaaagagtttcctgctcaccgacatcgtctaccaactagtggaagctggaaaacgcagcgtaggccttcccttgtcccatgctgaccgtttcccggtcgacgacggcactatcaagcatcttttcgagtacaaaggtgctcgcaggacccagattgccaaggaggtaagtgccatttcgtccgctccaggcaaagtcgagttgcttagggagtgcctggggctggtcggattccggtccctgatttatttgatcctgaagtccgagctcagccacgaccgcttcggcgtcccacgtcgagaaacgcttgatctttcagatgctgacgataggcgttacttcaaccgtgatagaagttcgatcggcgagtacgaagtcaacttcattcgcgaggggcaccgtacgattcccttcgacaatctcagttccggggagcaaagcatcattggcctgctgatcaagatcattgcctcggacgccgaccggccgacgtttctgatcgacgagcctgagatcagcctgcacgttagttggcaacaacggcttccccgcatcctcaatctcttgagtgatcgcttgaacgtttccttcgtgatagctactcattcaccgatcctcattgccaacgcagcggatgacgatatttgctacgtgtccagcatcggcatcctggatgagatccctgtcattgagcgacactccgtggagacgctactcatggatggtttcgaaacctatacgccgcacaaccgtgaagttcatgagcagtgtgcaaagctggttgcttctcttatctcggatgcgaacacacccaacgcggccatcaaattcgaaacggcgatcgagaagctcaaaacctttaggacgaccatccaaaaaaacggccaaggtgaagatgatgaacgacaggccagcgatcttgacttgatcgaaaaaaccctggctgcgatcgtgatgttgcgtgaagaaagcgagcctcgccatggttga

SEQ ID NO: 88771 - DNA, 807 bp, Pseudomonas kilonensis
atggttgatctcacccaggaagcgatggacgccgcacgtgcacagtatgaaggtgattgccacgagcgtgagactcatcgcaagaagacactggaacatctggcgacccagaatgccgctgccattgccgagttcaagcgacgccaaaaagggctgcccgcctcgaagcaagatctatggagcaaactgacaaagcacagaaaaagtttcaaatccggtgtaaccggcccgttaatccgcaaagccttgcgagctttcctggagcgggagcagaacgggctgtgctgttactgccagcgcccactggtgaatattgcctatgccaaacccatcgagcacattcttccgcgtgcgacgttcgtccagtacacatttcacttctggaacctggcgattgcctgtttcgattgcaaccagataaaactcgaccatgtttgggccagcgtcgataaacgggaccttgaggagtatccggcacctgctgcgttcactgaaatgtatcaccctagatttcatcgttttgctgagcatgtacgctttatccgcgtacagaccaatgatcacctcgtttcgatctatcgcggtgtaagcgaccagggccggcatctttgtcttaatctgctcaaagacctgtccgcacgtgagattgtgctcaacagcaatccagagttgaaaggagcgttggaggtgatcaatgctcatgcgtcgtcaaatgaaggcgccttggcgcctgaactggaggcctttcaccaggcacttgcgaagtccacttcccaattgataaaaaatggcgcgatgccccgttag

SEQ ID NO: 88772 - DNA, 1398 bp, Salmonella enterica subsp. salamae
atgagaatcgacaaactttcactgcttaactttcgttgcttcagacagctcgatattacctttgatgagcacattacgattctggttgcaccgaatggcgcgggcaagacgacagtgctggatgcggtacgcctggcgttgtttccctttattcgtggttttgatgccagcctctacgtaaaagataaatcgctggcgatccgtacaaaagatgtacgtctggttttccgcactgaagcgctgaacatggaaatgtcatctccggccatgattacggctaccggggaatgggaaagtggaaagacggcaacctggatgctcgacaagcgaggagaacagccgccgcatgaagataagacagcggcgcagcttacccgttggggtgaacaacttcagacgctggtgcgtgaagagcatagtttgcagcaggttgaacttcccctaatgctttatctggggactgctcgcttgtggtatcaggaacgttatgaggcacagcctactgaacagcgtctggataacagcgccttttcacgtttgtctggttatgacgattgcctttctgccacatcaaattataagcaatttgaacaatggtatagctggttatggcttagctaccgtgaacatcaaatcacacaacttgaatcaccttcagcaaagttaaaagaaggtgttcgtgttcagcggatgaaagaagctattcaagccatccagcaagccattaactgtctgacgcaggaagtgactggctggcacgatctggaatacagctccagccataaccagcaattggtgatgaaccatccacagcacggtaagattcccttatcccagctcagcgacggcctgcgtaatgcggttgcgatggtagcggatatcgcctttcgctgtgtcaaactcaacccccatttacgcgatgaagccgccttaaaaacacaggggattgtgctaatcgatgaagtcgatatgttcctgcacccggcctggcagcagcaaattatccagtctttgcgcagcgcatttccactgatccagtttattgtcactacccatagcccgcaggttatcagcacggtaaaacgcgaatccattcgtctgcttgagcaggatgagaatggcaacgggaaagcgttgatgccgctcggagcgacctacggcgagccgagtaacgacgtgctacaaagtgtgatggatgtcgatccgcagcctcccgttaaggaaaaagaagacctgaaaaaactgacagagttagtcgatcaggggaaatacaataaacgggaaacacagcaactcatggctaccttgcaagacgcactaggtgaacatcacccacagttaaagcgtttacagcgtagcattgcccggcaggagttactgaaagggaaagcgcaatga

SEQ ID NO: 88773 - DNA, 585 bp, Salmonella enterica subsp. salamae
ttgaatgaacaatatcagctatgctgttatgccgaagtacgtgctgatcttcgtggtcttggctatcacattgagcacgttgagaataagagccagcatccggaacgtacttttgattatcagaatctcgctgccagtgctttagactcagcaaatggtctacgccagtacggtaaaaatgcttttggcggccattctcaaggaaagaacaagtcggtggatatggcaaaatttatccactgtcatatacccgattgttctcgttattttgcttacctgtctgatggtcggatagttcctgctgatgggttaaatgcgcaagaaatggagaacgcacagtacaccattgatctactaaacctgaatagtggctttctacaaaccgagcgccgtaattactgggaagaactggaacaaatttttgatgaaaacataggaaacagacagaatcttcaattattacttcaaattaatctggtcccttcgtcagatcataaactgcatgaattcttcagcattacacgccagtttttccagcaagaagctgaacaggtattacagagccacgccccagcattaatttaa

SEQ ID NO: 88774 - DNA, 1176 bp, Enterobacter cloacae; identical to SEQ ID NO: 88678

SEQ ID NO: 88775 - DNA, 594 bp, Enterobacter cloacae; identical to SEQ ID NO: 88679

SEQ ID NO: 88776 - DNA, 1113 bp, Vibrio cholerae
atgcaaaatattaatatatatgtaggtgaaaatggtgcaggtaagagtcgtaaacttgcagaaatcgcacaagaagcaatttatgcagggcgagcagtgattgctattgcaacatctttgaatgacaaataccctaaacgacgcgctgataaaccctattactatatgggtcctagattaggtcgttcattagcaaagcaagctatcaagtcatcaatagcaaaattaaatgataaaaatgggcttttacgattaaatactctacttagcattctagagtatacaaatcttaaaccacaaattggattgaaagttaaaggttttgatgagaactttgacgatagcatagatagtatagaatttgaaaatgttagagagaaagaacttgtaacaactctatgttatcagatccgacaattttacgatgagtctcgtgaagaagtacaatggattagcaactacagtcgttttgaatatggcctatctggtgaagtgctctcagatttaatcaaacacgaaaagttgctaatacattacaagttattacgttcgacagagttatatatacacaatcaagagctaactcttcctattgagaagatgagttctggacaattatctttaatatctacaacattttttattgctgcacatttagaggataatactatcattttgattgatgagcctgaaaatagtctgcatcctgattggcagcgtcaatatataggaaatcttaaaaatctatttccatatcaagactttgagtgtcatatcgcaactcattcaccaatgcttattgctggtgcggttgatgaaaagttcgttgaagtatttcgtcatgatggtaataagtttaagcaaataatatcagatacaaaaaatattgaagatgcatacttagatcagttcggtattgtaacaccagagaacaatgctttatcagagcgatgcatagatataattaacaatgtggattttggtgttatatctaaaagcgaagcttttaaaaaaattgaagagtacaagagaaaatcctatgacataaaacagcaagagttcttagatggagtttatgtaataattaaagagttagaggtgcatagtggctaa

SEQ ID NO: 88777 - DNA, 606 bp, Vibrio cholerae
gtggctaagctaacttttacagctaatgaaataaaaaaaatgcaagctgcatcggctaaaggttataatggctggaatgataaaaaacttgatggaattaaacgtaaaattaaggatcataaaaggatagatacttgcgatttatgttgctattgccagcgtgatattagagcagaatttaacatgtcactggacatcgaacatatcatacctaaaagtgcacgtgtaaagcatatgtttacgatgaagaacctaagtgtatcttgtaaaaagtgtaatatgaaaattaagaatgaggatctaagttttctggttgatgatataatgaatttgcctagtaatatattcaaaagtcgttattacaagttcatacatccaaatctagataatgtgtttagacatttacagagaaactgtattcaacaagggcgtgttcgtctagttaagtaccatttccctactaatagtgataagggtaagtacacctacgaatatttcaaattgaaagagtttgaaatggaaaaagctaaccaagctcaaggtcggcgaaaaaataaaattaataatcagaagatagaagaagcattcagaaagctcactcagtaa

SEQ ID NO: 88778 - DNA, 1257 bp, Bacillus thuringiensis serovar mexicanensis; identical to SEQ ID NO: 87076

SEQ ID NO: 88779 - DNA, 648 bp, Bacillus thuringiensis serovar mexicanensis; identical to SEQ ID NO: 87077

SEQ ID NO: 88780 - DNA, 1230 bp, Vibrio parahaemolyticus; identical to SEQ ID NO: 86310

SEQ ID NO: 88781 - DNA, 666 bp, Vibrio parahaemolyticus; identical to SEQ ID NO: 86125

SEQ ID NO: 88782 - DNA, 1413 bp, Vibrio parahaemolyticus; identical to SEQ ID NO: 86314

SEQ ID NO: 88783 - DNA, 645 bp, Vibrio parahaemolyticus; identical to SEQ ID NO: 86309

SEQ ID NO: 88784 - DNA, 1323 bp, Photobacterium halotolerans
gtgaagatcaaaacgttgaaacttactaactatcgagccttcgacgaattagagttagatttagatcctcaactaactgttttagttgcaagaaacggtgctggtaaatccagcatacttgatgctatctcctcaaacttaggagcatttttgacccgtttgccaggcgtctctggtcataacccgaaggactcagacttcagggttacagactctggcgaaaaaccgccatttatgcgtatttttacccgctcttttgatggtgttgaatgggatagaactgaaaggcgagacaaagcaaaaaagactcaagcacttataccagatggtgtgggtataaaagcgttaaatgaatatgtggatcagttcatagatgcgcaaaacgagggtaaggattatgagcttccagtatttatatattatggtactggtcgtggtgttttcgacatcccgcaaaggaaaagaggatttggtaaaaagttcccacgctttgaagcattatcaggggcattagaaagccgtacaaattttaaacgttttgttgaatatttctattacctagaaaacgaagaaaatagacttcaaaaagaacatcgctcatttgatttcgaagtgccagaattaagagctatacgccttgcggttagccgaatgatgccacagtttagtaacccaagatcagctgctccagcgggtcttatgatcgattggaatcacaattgcaccactagtcaacttcgaatcgagcagcttagcgatggatatcgaaccactttagcaatggtaatggatatcgccgcacgtatggcagaagccaacccagatacaaaagaacctttagaaaccaaaggaatgatattaatcgacgaagttgaccttcatcttcatccggaatggcaacgagagtttttaccaaaactacttagcacattccctaaaattcaatttgttgtttctacacattctccgtttattattcaatcgctaagtgatggaaaactagtggacttagatcatataaaaactgaattcaataagtctctaaaaaaagaacaaagtattgaagacatagttgaaaacattatgggtgtgtccctaccttctagaagtgctcgcttgcaaaagatgtatgatgtcgctcagaaatactatgatctgcttgatgaagctgataaaacatccccagaagaaatcgaggatttgaaacataagctggatgaactaacttctccatttagtgagaacgttgcgtatcatgcatttttagaacgccagcgaataaaagcaggagtcatttcatccgaagaacgagaggacgactaa

SEQ ID NO: 88785 - DNA, 699 bp, Photobacterium halotolerans
gtgagaccagttcaccgtggagatgtaccaaaagataaagccggcaatcctaaagaatataccgagtatgctaatgcaagaaaagacttaatatctcgtataggggagtactgttcgtattgtgaaatggaactagatacatcgttagctatcgaacatattaggcccaaagcaattcatagcgaacttgaattaaaatgggacaatttcttgttagcttgtaccaactgcaactcaactaaaggggacaaagaccctaatctaaaagatatattgtggcctcatcttgataatacttttagagcatttgaatacactacggaaggccgtgtaaagtctgcctcttggcttaatgaggatttgaaaaaaaaagcggaatataccatagcacttatagggttagatgcgacccctaatacccaaaaagcttcagatagacgatggttaaatcgtcaagagacttggcaagaagcaaagttatcaaaggccgatctagctgaagctgatttaccagcaatgcggagacaaataattcgtacggctaaagctaagggatattggagcatatggatgacagtttttagtgatgaccctgacatgcttcgacgccttatagatataagtaatttttccggtaccgcacaagaatgttttgatgttaatggattaccaatagccagagtgaacggagaattgtga

SEQ ID NO: 88786 - DNA, 1212 bp, Arthrospira sp. PCC 8005; identical to SEQ ID NO: 86296

SEQ ID NO: 88787 - DNA, 720 bp, Arthrospira sp. PCC 8005; identical to SEQ ID NO: 86273

SEQ ID NO: 88788 - DNA, 1647 bp, Xenorhabdus bovienii
atgaaaaagaatagacatattcgcgcattggaaatgaatgcaaagaaaggtgatttgctcgctaattttaatctctatcaagaatatttgagcggagaaatgaatgtagaaaagaacgaatcactatcagaatattactttgagcaatgttgtgttctgatagaagaaaataattttatattagagtccttaaagctcatagattttcgtcgattcaaaaaactgaatattgagaaaggattagatagacatcttactgtttttattggcactaatggtgaaggaaaaacttcaattattgaagctatcagtaaaacattaagttggttaaatgctaatatcttaaaagaagatggtcaaggaagtggtataacctatgacgatattcataatgaaagtgaaggttatgctgatatttatactgaattcaagtatggcgttgacactagaataaatgctcgtttatcaagagcaattgaagctgcatcgaaaaaacgtgatagtgaagtagtaggtttgaaatctattgctaatatgtggagaattattaatgataagcgaagaattaatcttcctttatttgcttcatatttaattgaacgttcttatcctttgaaaattaataaaagaaattttctgatcgatatacctgaaaagcgaaggttacgtttcgatgcttatactgatgctcttagaggtactggcaaatttgaaaattttgtagattggtttatttctttgagtaaaataaaaaaatatggaacctcaattttcaatgaagaattgaatcaattaaaaaaacaaattgaaattaaagttatgaatgaaattctttcaacaatctatgatgattctattttaaaggaaatgaaaaataaatatctggaatctttggaagaaaaacaagatgatggttctcatgaatctattattgtttctaaagtgattgaagcaatttcacatgtagtacccagtgttgaagatatttgggtcacagataaatctggtgttgatgagattctcgttttaattgatggaaaagcagttaaattaactcagctttcagatggtcaacgagtatttattgctttagtcgctgatttaactcgaagattggtattattaaaccctgaaaaagaaaaccctttggaaggaaatggtattgtgcttattgatgaaatcgagcttcatctgcatcctaaatggcagcaaagcataattacaacgcttcaggaaacctttcccaatatccaatttattatttctactcatagcccacaagtgttgtccacagtgaatagaaaaaatattcgttattttagtggagaagatgatacaggagcagtttggctgagagtacctgattttcaaacaaagggcgttgcaaatagcgatgttcttgaacaattgatgaatactttttccattccggatcttccagagtcaaaatgggttaacgatctaatcgaattggttgaaaaagataattatgaaaataattcgaatgctaaagagttattcaataagatcaaagaacattttggtgatgagcatccagaagttaaacgttgtgaaagtcacattcgtcttcaaagcttgaaagttaaggctcgtaaaaaatttgataagaaaaaggatgaaaattga

SEQ ID NO: 88789 - DNA, 507 bp, Xenorhabdus bovienii
ttgaagaaattagaacgtcaggaagctccagactgtttatctaattttaaacatggcgtagatagttggggagcggttccgaaggatgaaatatggtcaaaattggagcagatgcaaggtgaattttgtgcttattgtgaatgtagattgaaggggaagagtaaacatatagagcactttaggaagcgtgaaacgtttccagataaagcttttaattggggtaatctgtttggttcctgtggagatcctcaaaaaactggagggtggggatgttgtgggatatataaggataatagaaagctgaacccaccatgtgatatcaataaactgatcaaacctgatgaagaagatcctggtgactatttgcttttcttaatttctggccatgttgtccctcagcgaaatttgtgtgacagagaaagacaaaaagcggaagaaacgatccgtgtatttaatttgaataatgatacatcgttatttaatagtcggaagaatactatagagtaa

SEQ ID NO: 88790 - DNA, 1383 bp, Spirosoma radiotolerans
atgaagataaccggaatagacattggcgaataccgccagttcaagaatataaaatttgactttacctatccaaatgaccatccaaaagctggccagccattagagaaggtgtgttttatcgggcagagcggaacgggaaagacgacgttgctaagaataatttgggatttttttcaagttataaatgatggctatcaaatctcaacgaatagattttcgattcctacagtcagtcattatgatacattcagagccaatgtttctgtacatgcaaaaatctccgatcaagcaatccgttttggatccgagtttcttcgtagtccttccgatttatatacaaataatgacaaagatattgccggtagcagtttggattggattcagtcacaacctagtaatatttatgatgctataaaatcttacagcaagctatgcttgtacatagacgaatctgctcttagttatgcatacagtcttactgcaaacagaaatgaagataacagggcctatttagctagcacagatgagctttttctcattaatgagaaaagacaagagtctattgatagactggcccaatcaaaaacactggccttccactctttggatggacgttatttgtggtcttatttacttaatgatattgaaaaatatgatgaaagcttaaagaaagttgccattgatcttattcagaaaaatggcagtttttcacctcatcgcttatctgaaagcctaaataagtggcaaactgaaaaccctaatcctaaggttgatatcgctactaattgcctaaattctgttttgaaagatttttttcttgaagttgatacagaaggtactgaagcgttaattgtaataaaaacgaagggtggtaaacagctggcttttaatggcttaagtactggaacgaagcaactattggtaacagctattcctatttataaaagccaaattaataagggagttattttattcgatgaacctgaacactccttattcccggatattcagcgaaagctggtagattattacacttcccttgcccctgaagcacaattcttcttcgccactcattcgcctatcatcgcatcagcttttgagccatgcgaacggttcgttctatattttgatgaaaatggcgaagtaaattatcataccggtgttgcaccagaaggtgacgacccgaatgatattttgcgtcaggatttcgcgatggctgagttgatgttacagaaaggtcttgatgaatatgagtggtatcggcagcttgcgatgcagattagggcagaaacggatgaggaaaagaaaaatcaacttattgccgaacggcttgaattaggaaatcgctacaatttcgctggtcaatatgcgcagagtaaataa

SEQ ID NO: 88791 - DNA, 591 bp, Spirosoma radiotolerans
atgcgcagagtaaataagtcagacagttcagttattctgcaagagaagttgacgtacagagtcgggggcgacaataaaaagttggcaaatgtgctttgcgatgaacaacacaatatctgcgcttacacggaaacgtatttgggacgttcggacaaaaaagatatagagcactttaaccccacgctaaaagacacgcctgatgatagctatcagaattggtttttagttaaggctcaatggaacggtgaaaaggcgtcgaagtgggaacagtatcaacccattttaaacccaacagatgaggcttttgaagagcgaattatttattttgaaggtgactatttagctgcttcgcttaatgatcaagaggctattaaccttatcaaactcctaaaactagatgatgaaggattggcatttgaacgacgttgctacttggagaacctcaaagaaacgcttattctgtcagacaaaacggctcaacagtatattgatgacttgttaatgacaagaccgagtctagtttattacacccgtgccatcgaagaagaattaggagtgaaagtcaatttcgacctagtaaaaactaaatga

SEQ ID NO: 88792 - DNA, 1413 bp, Vibrio parahaemolyticus; identical to SEQ ID NO: 86314

SEQ ID NO: 88793 - DNA, 645 bp, Vibrio parahaemolyticus; identical to SEQ ID NO: 86309

SEQ ID NO: 88794 - DNA, 1230 bp, Vibrio parahaemolyticus; identical to SEQ ID NO: 86310

SEQ ID NO: 88795 - DNA, 666 bp, Vibrio parahaemolyticus; identical to SEQ ID NO: 86125

SEQ ID NO: 88796 - DNA, 1251 bp, Methanosarcina mazei
atgaggatcaaaagccttcaagtaacgaaccttcgggcgtttgaacaggcagaatttgaatttatgccaagagtgaatcttctagtaggcgtgaacggggtaggtaagactaccgtactcgatgcattgcggatgtgcttgtcaaaaattcttcttgatataactgcttctcgtagccgtaaaataccttttgttgatgaagacataagggttcaatctaattttatgacagttaattgtacttttgaacttcaagataaagatttcacttttattgttcataagaatcgcgaaagcagtgtaccactggattccaccaatattcgtgaacaagtcttagaaacacctgataaggaaagttaccacccattcttaccggtctcatctcataattctaaaaaagctctttctaatcaattgggagtcttcttctcaacacgtcgctccctagtatctgatgcttttccatcagtttataagtcctcaggaggcccgtcaggcgcatatgcagaagcccttataagccgtgaacttcgattggcagagattgctcattggatgcatgtacaggaagaacttggaagggaaaatccactatcaatcaaacacttttcagcgcttcaagaagctacagaacgtttcctaccaaaatgcaagaacttacgagcagaagtgtcggcaaaacctcagttaatcgttgataaagcaggagttactctgaaccttcgtcagctatcagatggagaaagagggatgttttctttagttttagatctggcaaagagactttctcaggccaatccacaactcgataatcctatcaaagatggatcagccatcgtattgattgatgaaatagacctccatctacatccaaaatggcaaagaacagtaattaaacagttaactgagacttttccaaaatgtcagttcattgctactacacactctcctcaaatagttgcggcagttgagcctgaacaagttctgcttctaactaattctggagtaattcatccagatagaacacgaggactcgactcaaattggattctgcgacatctgatggaggccgatgaccgaccatctgaatcatcctctgcagttagggaggtagaatcgctaataagcgacgcagagtttgaaggtgcacgtgcagcaattgcaaaatatcgtaggactggactagaccttccagaatggtcgatgcttgaagctcgaatggcacgaatggagttgttaggcgaatga

SEQ ID NO: 88797 - DNA, 708 bp, Methanosarcina mazei
atgaagcgtattagtaaaaccagagcaccgcatagctatcttaaatggtgtaaactggttcgtgggactcaagatgaagattacagacgcctacaaaatccagagaaagcagacctccatagaaaattgttggaggaacaaggttggctatgtgcttacacgatgaaaagcattaacgaagagaattcacatattgagcacattaagcctgaaagcctttgccgagctgacttggttggttctgatctcgactacaataacatgattgcttgcttcccacttatagggatgaatagacagtttcgatatggagcacaaaagaaggctgactggtgggaaaaggatggtatcgaattcatatctccattaaatccagcctgtgaaaattattttcactttgatttgaagggaaatattactcctgtgataaactctgaagctgcaaatactactatcaatgttctttctctagatcatccatcactaactgaagagcgagagatggctatcaatggttttatttacggttcaggtgacaaaccgttatctaagcctaaaacgatccaagcacttcaaacaatttgcactaaagatagagaagggcgcttctatggattctgcattgtggtccgagatgcactccagcatcatttgaagatccttgaaaagatagaacagaaaaagaagttttcatgcaggagaacatga

SEQ ID NO: 88798 - DNA, 1269 bp, Pseudomonas syringae pv. persicae; identical to SEQ ID NO: 85894

SEQ ID NO: 88799 - DNA, 645 bp, Pseudomonas syringae pv. persicae; identical to SEQ ID NO: 85895

SEQ ID NO: 88800 - DNA, 1281 bp, Hafnia alvei
atgcgtcaacaataccggttagaaagcataacactgcgcgatgttggcgtgtttgagcatacccattttgattttccacagatcaaaagcgaagaaaaagacgctgagaaagcggaaatccatattttcaccggcccaaatggctgtgggaaaagtactctgctgtatgcgttggctgcggtgtttgatgaggagcctgttaataatcccctgatagcagcgagattcacgcagagcgaaagttatatagcttttaatttttcgggacaaggtgggaatattaagcatggatttaatattggaagcataattcctgatagcataagggaatatagtaaattcaaatcatggccagtaaaattttctgcttttgcttattcaggtcaatgtaagcttgctgatttattcgttttatctcttactaatgggatagagcaggcagtgcataatccttttgaaaatgctttgtcgtttaataatactgttcgtcctaaagtattagctcaatggattgcaaataatagaactcatgcggctctggcacggcaagataacgatctggaagaagctaccttatatgatgtgtctttagatcggattagcaaatttatttttgatgtatgcgatttagatattcgttttcgtcttgagcgtaaaccactagcgatttcacttaatgttaatgggacgaatgtcaattttgatgttcttcctgatggactaaaatcgattatcggctgggttgcggatttagctctccgccttgaatctattccttggcaagaaaatcgcgatatcttttcccagcctattatcttattcctcgacgaagttgatattcatctgcaccctaaatggcagcgccgaattcttcctgccattcaaaaactgctaccaaatgcacaagtgtttgtctcaactcactcaccttttgtagtgggctccgttgaggatgcctttgtttaccgcctgccagatcctcagagaacggtatgtagagatcctgcatcggcagaggtgataacgccaacgccgtctgctgcagggaaaagctatcagctgattttagatgaagtgtttggcattgaagagcaatttgacgttgaaactgaagcgttgcttgaaaaattctatcagctaaaaaaggcttatttatccaatccacaagatgatagccagctcgttgcattggcggcagaattaagcagcaaaggctctgaagttgcaactattgtgagcatggagctgcgtcaaataacgcggttggtgaagaaaggttaa

SEQ ID NO: 88801 - DNA, 600 bp, Hafnia alvei; identical to SEQ ID NO: 88265

SEQ ID NO: 88802 - DNA, 1281 bp, Microcystis aeruginosa NIES-2549
atgagaattaagtctataaagcttattaattatcgaggtgcagtcagtttaaacatcgactttcatcggcaattaaacgtatttataggagttaatggggcgggaaaatcaaccattttagacagtttggctattatgctttcatggttagttaatcgcctaaaaaacactaatgccagtggacaacagattagcgaaaccgagattaataatggtcaggggacggctataattgaaatcactggggtgacggaagatagtcaagagattacttggaaaatagtaaaaactaggactggatatatccacgctggagaacggagtaattttagccaattaaatgaatacagtcaagaaatacaacgacaaattactgaacatcaaggacaaattaacttacctttatttgtttattattctgttaatcgagccgtggtagatataccattaaaaattaaaacaaaacatcaatttgattctctaagtgcctacgaaaatgctttaaccagtggatcagattttcgcactttttttgaatggtttcgcgaacgtgaagatttagaaaatgaaaatagaaaatatcaggattatctaattaaaccagaaggtttttgttttcctgatccccaattggaagcggttcgggaaacgatcgaacgttttctacccgattttactaatcttagcgtccgtcgtaatcctttgagaatggaagtaacaaaaaagaataaaatagttactgttaatcaactttctgatggagaaaaatgtctgattgctatgcttggagatttagctcgaagaatggcgattgctaatcctcaaaatccttatcccttaacgggtaatggtgttattatcattgacgaaattgatttacatttacatcctcaatggcaaagatttgtagtacctaaattactagaagtttttcctaactgtcaattttttatttccacccattctcctaatattatcactcatgttcaaccagaaagtttacacttcatggaacaaacagaaatgggaataaaatttcatcccgtgcaagagtcctacggcaaaaatgttgatcgaattttggaagatttgatgggattagagacaactcgtcccaaggaaatcgctgaagctttgaaagatatctatgaacaaatttctcaaaatcaattagaggcagctaaaaataaaatcaatgatctcagagctaaaattcaagatgatccagaattaattaaagctgaagttattattcgacgcaaggaaattatcggaaaatga

SEQ ID NO: 88803 - DNA, 633 bp, Microcystis aeruginosa NIES-2549
atgaagtatattagaaaaagacaagaaccaccagagtttaagaattggaaagagcaagctaactcagattggcagcccgactttagaaatttagcgggaaaaccaaaagaaatactaattaaagctttgatgacagaacagggggaaatatgttgttattgtgaaaatcgattgattgatggtaaatggcatatagaacattttaaacctcaaagtgatcccagtgttgatcccctagattatgccaatttgctatgttcctgtcaggcaaatcttaagcctggtgaacctcggcactgtggtaatctaaaagataactggtttgatgaaaatctcttaatctctccacttaatcccgattgtgagtctcactttgcctttaactatgatggtacaattaaacctgcacaagaagatgatcaaaaagcaattaatactatcgaaaagttgggattaaacctcaataaactcaaggcacttcgtaaggcagccatcgatccttttttggatgaggagatagataatgctcaattaaaagtttttgtcaatggatatttatgcttagatgatcaacaaagatacaatcctttctggacaacaatcaaatatttgttcagtgatttaattgaataa

SEQ ID NO: 88804 - DNA, 1584 bp, Neorhizobium galegae bv. orientalis
atgttaattcaagtcatgtcaaaacttccagtagacaccaaacccgagcaacgtatccttgtagctttgctaccagataactggaatgattggtacaagtggaagacgatgtattctgtcttcatcttcaccaatgatggtaatcgtcatgatcttggaagcgtaaaactcgcggagcgcggcgccaagggcgacgaaaaatcaccctataggcccgaactgcccgaacaaggctttgaacagctagctgagagcttcatctcggtaggacaagacgaaaattactataataccttaaaaggtttggcagattctgaccgggaatattatttgaacgcaatgcgggattgtgcgtttcgtcctgaattattggtcgatttcgaagatgaagaggttctttctgagtcaattttgcgctcagtgcctcgccgaagtgtgagcgggagatatcaccgcctcgcaaatgggaatgccgaggcaactaattacaactttgtctttaatctgccgtttggagaagagagtttcaaggaactgctgccgcttacatttgatgtaataccggagtcgaagccacccacaaacgtccacgtcctgataggccgcaattcggttggcaagacccgcgcactgaacctcatggtccgagctctaataacggatgaagcagaagacgtcatagggtcttttgaagatttatccggtgcccgttccttctcaccattcgatacggaggaaagtactttttttgcaggagtcgtatcagtttctttcagcgccttcgatcgctttggaccacagccggcgacaaaagacggactctcctacagctacatcggcctcaaaaaaccttccccgaaagaacgagacggaaacacaagcgaaccgcaattgaaagacttgggcgaactagctgatgagttcgcgctcagcgcagaagcctgccgtgttggtcgcagaaagcaggcctggtttaaagctcttacaaccctggaatccgaccccctctttcaggaacgcgaaatcagttccctcgctcaaagctacgagggctctaggctagcgaaggatagagagtttttcaaagagttgagctcgggacacggcatcgttttgcttatagttacaaggttagtagaactagtcgaagaacaaacattggttttaatagatgaacctgagacgcacctacacccaccattgctttcagcctttgttcgagcagtatcctctctcctaattgatcgaaacggcgttgctattgctgcgacccactccccagtagtacttcaagaagctcctagctcttgcgtatggaaattgacacgttccggctacgacttaagggctgaacggcccgagaatgaaaccttcggagaaaatgtcggaacgctgactcgggaagtatttggccttgaggtaaccaagtctggcttccacgatctattagataaggcagtaagacagtacccggattacgatgcaattattagcgatttcggagatcaactcggagcggaagcgcgaagtattctccgctcgcttatccgcaatcagaatgctctgggagaagacagtctctaa

SEQ ID NO: 88805 - DNA, 849 bp, Neorhizobium galegae bv. orientalis
atgcgatacctatctcgccccccttttgatgtcgaagctgtagttcaggcatgcaccaataaattggaaaacggagatctcaaagagagattagttgcgacacaagctacccttacccaacaagaaaaaatatacaccgatcactccgattcaaagaactggagtgattttccaaggagtatttcggctggccaccttacgaatgatgaaatgaaatctctgtacaagtatgaaatgacctcggaaaagggagcagcataccgattttattctaaattaaagaattcgtccccgcacggaaagtgccctctttgcgggattggcgtcgtttcatcaatagatcactacctccccaagtcacgatatacagacgttgctataacaccgcataacttagtaccggcgtgcaatgattgtaataaatttaagcacaccagatttcctcggctttattccgagcaactattacatccctattttgatgattttacagagcatcaatggatccaaggggaagtttacgacaatggctcaccggtgatcgcattcaaagttgatagcaacggaaattatagcgatgcggatgaggcgcgccttcatacgcattttcgtgtgctaagattagccgtggtgtacggctcgaatgctgcagagcagttaacaacggaccgcagtgatctcttgaccacctatgctgactccggtgcgttgggggtaaagaaacatctagatgaagaagcaaaacgttatgaaaaaaagaacttaaactcgtggcaatctgtatactaccgcaccctttctgcgtcggattggttcgcaaatgaaggttttctcggtattcccgaataa

SEQ ID NO: 88806 - DNA, 567 bp, Pseudomonas syringae pv. syringae B301D; identical to SEQ ID NO: 87990

SEQ ID NO: 88807 - DNA, 651 bp, Pseudomonas syringae pv. syringae B301D; identical to SEQ ID NO: 86097

SEQ ID NO: 88808 - DNA, 2205 bp, Pseudomonas syringae pv. syringae B301D; identical to SEQ ID NO: 87988

SEQ ID NO: 88809 - DNA, 882 bp, Pseudomonas syringae pv. syringae B301D; identical to SEQ ID NO: 87989

SEQ ID NO: 88810 - DNA, 1314 bp, Myxococcus fulvus 124B02
atgtacctgaagaaagtggtcctcgagaacatccgctccatcgatgcgttggagtgggcgccgtcctcggctccgacgctcgcgggatggcacgtcatcatcggggacaacggtgccggcaagagctcggtcctccgcgcgatggccctcgcgatggtaggccccagcgaggccattgccttgcgtcaggattggaacgagtggctgagatggaagacccagtccggctcgattcacctgaccctgcactgggacaaggtctgggaccagttcgcgaagagcggcaagctgccgaagaacgtcgacctccaggcacgactgcggttccaacgtccggacatcgggcaggtccagctttcgggagaggacgtcgcggtggaccccagccgcaacatctggggcgatggctacggctggttctgcgcctcgtacggtcccttccgacggttcaccggcggagacaaggaccaggagaagttgttcttctccaatcccaagctcgcgcggcacctctcggtgttcggtgaatccgtcgcgctcaccgagagcctggagtggctcaagctgctccagttcaagaacctggagacgaagggactgggcaaggagggccagttgctggaggcgctcaagcagttcatcaaccagcctgacttccttccacacgaggccaggctccactccatcggctcggacggcgtgcgcttcgtcgatggcaatggctgtgagattcctgtcgagaacctgagtgacggctatcgctccgtgctcagcatgacgttcgagctcatccgtcagctcgtgaagacctatggcgcggagcacctcttcgccgtgggtgatgcgacgacggtccaggtgccgggtgtcgtcctcatcgacgaaatcgatgtccacctccaccccacctggcagcgccgtgtcggacactggtttcggaagcacttcccgcacatccagttcatcgtcaccacgcacagcccgctcatctgtcaggcggcgaccgtggggagcatcttccggctcccccggcctggaagtgacgagtcgggtggaatggtcacgggtatcgcgagggaccggctgctgtacggcaacgtcctggacgcttatgggacaggggtcttcggggacgttcccacccgctcggccgaggccatcgcgcagctcgagcgcctggcgctgctcaatcagaaagagctctccgagggcctgagtgccgaggagcgacaggagcaggagcgcctgcgggcaaggactccgacggccgcgagcgcgctcccctcgcccgccgtggaggacctgctcaagtga

SEQ ID NO: 88811 - DNA, 810 bp, Myxococcus fulvus 124B02
gtgattcgtttgccgcaggggcagttgtcagaggctgctcgacaggggctcgagggatatcaacagtccatcgacgcgctgtctgactacgcggagcgagtggcgcaggcgaagaagaggttctcgtcgctcaacaagattggcaaccacaccttcgaccacgtcaaggcaacgctgacgcagatgtgctcgggcgcgcggcgctgcgcctactgcgaggattcagctgccgacgaggtggagcacatccgccccaagacgctctatccggaggtcgtcttcgcgtggatgaactatctctatgcgtgtggcccctgcaatggccgcaagaatgaccacttcgcggtattcgacggaggttcgggtgcgctgacgaaagtggcgagggcccggtcggctcctgtgacgcctcctgttcctggcaggcccgtgttcatcgatccgcgcgtcgaggagcccatggacttcctcgagctcgacctgcgcgacaccttcttctttcggcccaaggcgcctccaggaaccgaggcgtacgttcgcgccgagtacacgattggcatcttgcaactgaaccagcgggagctgcttcctcaagcgcgtcgtgccgcctattgggactacatggcgcacttgaactgctacctccgcgcgaagtcacaggggctgccccaggagcacctcgacatgctgacgaggcaagtccgaacgaggcagcacccctcggtgtggctcgagatgaagcggcagcacgagaagcttcctgacttgctgccccttttcgcccaggtccccgaagcgctcgggtggtga

SEQ ID NO: 88812 - DNA, 1398 bp, Salmonella enterica subsp. enterica serovar Typhimurium; identical to SEQ ID NO: 87652

SEQ ID NO: 88813 - DNA, 726 bp, Salmonella enterica subsp. enterica serovar Typhimurium
atgaggcatgtgataaaaacccgacgtggaacagatgccttactcactgcacatgagcaaccaccacaaaattcagatcaatcaactcgtcgctggcagcgctttggtcgtgagaataaagcagccttaatgactctgcttctcaatgagcaatatcacctttgctgttacagcgaaatccgtgctgatttgcgtggcctcggctatcacattgaacacgtcgaaaataaaagccagcagccagggcgaaccttcgattatcaaaatctcgccgccagcgcgttagactctgagaatggtttgcacctgtttagtatcaacgctttcggcggtcacgcaagaggaaaacaagaggccgtggatatggcaaagtttattcattgtcacctccctgactgttctcgttattttgcttacctttctgatggccgaatagtaccggctgatgagctaaatgcccaggaaatggagagggcagagtacaccattgatctactaaatctgaacagcggattccttcaaacggaacgtcgtaatcattgggaagagctggaacagctttttgaggaacatattgaaaaaggctgggatctgcaacaattacttcagcttgagctggtcccttcgccagatcataaactgcatgaattcttcagcattacacgccagtttttccagcaagaagctgaacaggtattacagatccacgccccagcattaatttaa

SEQ ID NO: 88814 - DNA, 1245 bp, Candidatus Magasanikbacteria bacterium GW2011_GWA2_56_11
atggatttcaaaaaattaaaaattacagcggagtggcaacaatttgaaaatatcgaaatagatttccatgatcggttgactattttaacaggcgcaaatgcaagtggtaaaacaactctgttgcatcttttagcaagacattgcggttgggatgcaaaatccttagcaactccaaaaaaggacataaaaaccaaggtttggaaatggttctcttccttttgggtggaagatgaggagccaaaagatactaaaggtgaattaaattatagtgatggacaaaaagctatattgaaggtgccaaaagaacaaaacgaggcacaatacaacatgcaaatcgaggggcaacaaggagtaaagtgctttttcatcccctcacatagatcaatattcagataccaaaaagtaactcaaattccaaccgcaaatacaatcaacaaaaaacaggctttcgataaagtttggaatagtaacaaaagtagatatggtggcggaaatgacgttccaagtagttttcatataaaagaagctctcatttgctggagtatttttggccaaggcaacaaagatatggatgcgaatgaaacccttctcgaatattacaatggttttcaagaggtacttaaaaaagtactgcccaaaactttaggttttcaaaaatttgctatacgaaactcagaggttctactgatttgtacatcaggtgagtttgttattgatgcttcatctggtggaataagcgcaataatagaccttgcttggcaaatttatttttatgccacagaggaaaaagataatcccaattttactgttttaatagatgaagttgaaaatcatcttcatccgacaatgcaacggcaaatattgccagacttccttggggcgtttccaaatacacgctttatcgtctctactcataatccgctcattgttggttcagttaaagaatcaaatgtatacgccttgagatataacgaaaacaataaaattgtcagtgaacgactagacttcataaataaagcaaagacagcggcggaaatattggatgaagttttgggcgtggcctttacaatgccaatatgggtagaagataagttgaatgagatagtcgcaaaatactcgaaagaaagcattaccaaagaaaaatttactcaaatgcgcaatgagttaaaggaaatgggactagagaaaatcatgcccgaagccgtttacagcttaattgaaaattcaaatgatcaaactaagtag

SEQ ID NO: 88815 - DNA, 582 bp, Candidatus Magasanikbacteria bacterium GW2011_GWA2_56_11
atgatcaaactaagtagaccacaatgcccaaatcaagaggcattgagaacaaattataaacaccctgacaacaaggcggttctcatcttggccagtcatgataaatgcatgtattgcgaaagcaaagtatcccatacttactacggtgacattgaacacataaagccaaagtcaaaattcccaggcttagaatttgattggggaaatttaggatacgtctgtgcacgttgcaacggctataaatctgacaaatatgatgaagcaaatccaatccttaatccatacgatgaagaccccgaaacacatatagtcgtattgggagctttctttgcacataaggataattcaacaaaaggaaaaattaccattgaagagcaaagcggcgtgcacctaaaccgcccagctttaattgaaagacgacaagatagaatcaatttgctcaaaaaagttattggagcatgtgcaaagctagaagatagtgcaaaagaagcagtattagaaagcataaaaccagaggcagaagaagacaaagaatactcgttatgcgttaaagcactgttaaaaactgaaggtattgattga

SEQ ID NO: 88816 - DNA, 1434 bp, Acinetobacter sp. AG1
atgcaaatacaaagctttagtctaaaaaatattgggcaattccaagacctaagcgtgtctttagcaccgactacacaatttacatccaatattacggtttttattggtaataacggtagtggtaagacatccctgttaaagtccattacaacggtattaacttggtatgttgcacgtttaaaacacgataaatctaatggtacgccaatccctgaaaccgttattttaaatagtgcaaactcggcgatggtcgagattacggtcaatgatttagacctacaactacaaaccaaagcctatacatggcgtattactaaaaaccgcacggcgagaaaagctgaatttactacgcatttaacagaattaaatcaattagctagttattataaacaatggttgggtgaagatgatcaaagtagcttgcctttaattgcattttatcccgttgagcgtagcgtgatcgacatccccttaaaaatacgggaaaagcatcaatttttacaaatagatggttatgataatgcgttaaataacgccgtagattttagacgcttttttgagtggtttagagatcgtgaagatgttgagaatgagcttttattaaatgaagtgcatggatttaataagatacttagtgaacaaattgagattataggattactaaagaaattacataatgaagataccaaatctcaagaaattcaagtgttaactaaacgattaaccgatttgcaaaacattataaaatttaaagataataaagttactttagtaacagatacacaattactagcagtacgtaatgcaatttatgcctttatccctgaatttagcaacttgcgtgtaagacgcaaaccacgtttacatatgtcagtcgacaaaaataataagacattaaacttgactcaattgtcacaaggtgaaaaatcattaatggctttggtgggagatatagcccgacgtctagccatgatgaatcctaaactgaataatccattgcatggtaaaggtattattttaattgatgaaattgatatgcacttgcacccgcaatggcaaagatcaatcatacaacgattacaaacaaccttcccgaattgtcaatttatcctatccacacattcgccattggttatatccgatacccaaaacattttggtctatgacttggatgggcaggaagttaatgctttaccatcattgtatgggcaagatgccaatacggtattattgcaatacatggatacaagctatcgtaatcccgaagtggcagaacaaattatccaagcaatggatgcaatccaaaataatgattttgaacttgcaaaccaattaatccaaacccttaaatctgaacttggcgaaagtcagttagacgttatgcgtcttgttgctatgttgaaaaaaagaaccctagcaaagcaggggaaataa

SEQ ID NO: 88817 - DNA, 648 bp, Acinetobacter sp. AG1
ttgcaactgattattaaagggattgaaccgactaatttagctgaatataaacgtaaaaatcccacccatagatatgacgatttaggtgaagacccagaacaaatacgccctacaattagacaagcgtgtttagaagaacagttatacttatgtgcatactgttgtcggcagattgggtcaaaagaccacgactgcatgaatgagcatattttgccacgacaacgttacccacaatatagttttgattttaataatattgtggcgagttgcacgacaaaagggtcttgtgatgatgctaaagaaaatcaagaaattactattagcccattatccccacgttgtgaaactgagtttaaatttaatatcagtggtacggttgcaggattaaccaatgatgctaaacaaactattgatgtacttaaactaggtgatagcttgcaacaaaaccaaaagctagttgatatacgtaaacatgcaattgccaattttttatttagtcaaagtaccacgatagatgacttaatcgaggatgatgagttattaacattattggttgaagatttacaacaaacaacagagggtaagttacaaccatttgccccgattataaccaaagcacttaaaaactggattgatggaaataaataa

SEQ ID NO: 88818 - DNA, 1749 bp, Serratia fonticola
atgcaattgctgcgcatcctcatcccaacttttcgcaatctgcgcgatctcgacatcgctttcgcaacgcacttacagccaacggcgagtacaacagatgcaccgctcaagcccatccgtagccacgccctgattggtcaaaacggcaccggcaagtccaacctgatcgaggcgctgatcaccctctttcgcgatgtggatctggaccgcgaatcggcgttcgattacacgctggaatatagcattcgtggtcatgttgtgcgcattgaggccgataccgccaagcagaagcgcccctatgtgtgggtggacggtaaagccgaatcacagggctatttgctgaaaaaccgtgagctgctgcctgcgcatatttttgcctattactcgggccgcaacgagcgtatcgaaaccttgtttcaagaacaccagcgccgcttcaaccagcgccaggaaatcactacagatgaagtgctgtctgagcaactgctggaaaaatttaccggctccgaggcagatattcgcgctgtcgaagaagccaaacaccgccgcgagtcgcggctgaaacaagcaggtgacgaccgcctgcgccgcctgttttactgtcgtggtggccatagccaactggtgctgctggcctgcctactgtctgacgacccagtgtttcagaaggtgctgaagaacctgcacattgagtcgctggagtccgcactgttcgtgctgaaagaaccgcatcgcctgcgagaaaagcgccgcggtggcaagtttgacgaacaggaactgaacgaaggcgacccgcgcttctggtatgcgcgtggcaatgtggtgagcgagttcctcgacaagctgtggcaagtggcttgggctccgattgagcaagaggcgaccaaacagatcgacttccgtggtcgcaccgaaaaacagaagcagctgtaccttttcgtgccaagtcaggagaagcttaaactacttggcgaactggtcggcagtaccgacagttttttccgctacgccgagggggcttacattggtgacctgatcgaagaagtgcgcatcacggtgaagaagcgcgatgaacacggcggcaaggtaagcttcacccatctgtcagaaggcgagctgcaaatgctcaccgtgttgggcctgatgcgcatcacccgtgacgaccaatgcctgttcctgcttgatgaacccgacacccacctgaacccgatctggaagctgcgctacttcgacgatattgaaggtgtgctgagttccgatgatgcagcgctggtacaaagcgagtcgcagataatcatcactacccatgaccccatgatggtgggcagtctgaagcgtgaacaggtacacatactacgtcgcgatggtaatcgcacgctggtcgatacacctgacgagcatccgcaagggatgggcgtaacggggttactcaagagcgaattatttggtttgtcgtccacactggatatcgaaaccgagcgccgcttgtttcggcgcaatgaactgtttgcactcgatgaaagaatccctgagcaagatgatgaattacgccgtttgagtgcggagttggcagacttaggtttttcaaatgcggatttcaaagatccgttctatgccaagtttgtacgacgaatggccaaacacactaggttccacaaaccaattcttacgcctgaggaacagatagagcaggatataatagccgacgctattatcgatgaaatcttacgtgaggaggataaccagtga

SEQ ID NO: 88819 - DNA, 852 bp, Serratia fonticola
gtgatcttcatcgacttagaaaacaagctgccaactgatgctgatttacctcctgatattcgttggaaaaaagctgattgggaagcttggctgatagaatccgaacgtctgataagcgaacttgccaaactcaatactgcaggcaagctcaaagaacgtaatgaattgatcgataagcacagcgggcactggggaaagctgaagccgtggcttcttgctctgtcaggcggaaaatgttggtttaccgaagcacgtgatattgcatcacatttagatgtggaacattttcgtccgaagaaagctgctcgcaacgccaagggaccagaacgagatgggtattggtggttggccttcgactacatgaactttcgaattgctggcacagtacctaatcgaaagaaaggcgcatggttccctcttcgccatggctcaccgtgttcaacctatgtgtctcgttgtgaaggagatgaaattccacactttcttgacccgactaatgcccacgacgtgactctgcttgctttcgatgaggaggggaaggccgttcctgctcctggtattccacgctgggattatgtacgagtgtggcgtactgtagatcgcttaaaactctctgaacaccaagctttagctgaggagcgacggaaggtgtggcaaaacaccacaaagctgattaataaataccttcaagcactcacgaaggcacgaacctctgcggctgcccgtgagcaagtgaagactgcggcacgtgacatactctgtctcaccaagcctgagactgagctttcagcagtggcgaaatggtgtgttcgcctgcgcaacgatccacagctttccagattggtagggtga

SEQ ID NO: 88820 - DNA, 1413 bp, Vibrio parahaemolyticus; identical to SEQ ID NO: 86314

SEQ ID NO: 88821 - DNA, 645 bp, Vibrio parahaemolyticus; identical to SEQ ID NO: 86309

SEQ ID NO: 88822 - DNA, 1230 bp, Vibrio parahaemolyticus; identical to SEQ ID NO: 86310

SEQ ID NO: 88823 - DNA, 666 bp, Vibrio parahaemolyticus; identical to SEQ ID NO: 86125

SEQ ID NO: 88824 - DNA, 1266 bp, Pseudomonas amygdali pv. lachrymans; identical to SEQ ID NO: 86100

SEQ ID NO: 88825 - DNA, 684 bp, Pseudomonas amygdali pv. lachrymans; identical to SEQ ID NO: 86101

SEQ ID NO: 88826 - DNA, 1359 bp, Pseudomonas amygdali pv. tabaci str. ATCC 11528; identical to SEQ ID NO: 86098

SEQ ID NO: 88827 - DNA, 651 bp, Pseudomonas amygdali pv. tabaci str. ATCC 11528; identical to SEQ ID NO: 86163

SEQ ID NO: 88828 - DNA, 1623 bp, Morganella morganii
atgaaagtcgacaaactacatattcgttcacgctttaaaaatctcgaaaacgtgacagtggactttgctaaaaatcatctgatgaccgttatagtgggccgtaatggttccggtaaatcgaacgttctggaagctttggttgatatattccgcaaccttgatttaggcgaagccccaacgttttcttatgagttgtattttcaacttggtgaagaagacgggatgaagtggtatgacgttaaggtggatgcagacccaagcagaggaacaccagcaaagcaataccaagtttcggttaaagacaaacataatagccaggaaggctacaaacctatacccttttctagggtaaagcgcgataagaaaactcaacaagcggaatatcttcctaactttctgtttgcttactattctggaccatcggatagattagagaaatactttcgaaaacatcgtgatgattattatcgggatttactctacaacaagctcagtttggaagcagatattcgatcactattttatgcaaagccttttcatagccaatttgttttgatggctttttttcttagccctgagctcgaaaaagagcgtattttcttacaaaaagagctcggcatagagagtcttgattcaatacattttgtgctaagacgccctgcatgggaaagagataaagaagacagattctggggggcagaaggcgtcgtccgtcgtttcatagatctactttatccacacgcactagctccagtgaaggtaactcgaaatgaagataccagtctcacagggaaaaataaaaaaaatgatttcattcatatattcctaccatcagttgaaactttgcatgaaatagctaagcagctaacaccaagcattttcttcaaaatgctcgaaagtactgtactttccgaaataatttctgaagttcatatacgagttaaggtaacccatgctaaaaatcctatcaccttccaagagcttagtgaaggtgaacaacaactcctaaccatattaggtctgctcaaattcacaggtggtaaagattccttgtttttgctcgatgagcctgacactcaccttaacccatcatgggccgttaattaccttaaattcctacgtgaattcgtacccaaccatgaaacctgccatttactgatggtaacacatcatcctctagctattgctgaattagaaaaacagcaagttcaagtgatgtggagagactctaattttcaggttcacgcacaagagccagaagaaagccctagaggcatgggctatggtggaatccttactagtgatatgttcggcctgcgaacgacactggataactcaaccgagcgcttgttacgattacgtcgccgttttactgaaaaaccagaattgtctcctattcaggctggacgactgaaaaaaatagataaaacgatagaaagtcttggctttacaacggcacattgggatgaagagtatgctcagtatttgcgtgtccgtcgagaaatagaaacggaagctgaagccgctaataccacacctgagctgaaacgtcttcgaaaagagcgtgccaaagctattgttcaacgcatactcgctgcagaacaggaagaaaataaaaaatga

SEQ ID NO: 88829 - DNA, 864 bp, Morganella morganii
atgaggcacttagacattgatttcaacaagctcacgctaccggatggttggaaaaagaaagcacagaagctgtcggaattacttgtaacggcgaaagatgcgaagcaacgttctgagattattgataaaaatcaggatcactggaaagcagtaaagcctacattagcgtccttattcaactataaatgttggtatacagaggcaccacagcaggggacagatgttgatatcgatcattttcgacccaagaaacgtgtacaagaaacattatcgatgacaacacctcatgatggttactggtggttaacattttgtcttgaaaattatcgtttaagctgcattgtagcaaaccgtcgaagagctgatgtcgaaactggagttacaggcggtaaagccgatcactttcccttgtgcgacgaaagcatgagagcgatgactcctgattgtgaccttgaagaagagcaaccattactactagatcccttaaaggctactgacgtacagttgctacaatttaaacctgacggtgaagccatgcctcggttttcaaaagaagaacatgctcgtaagtttatgcgagcagatcaatccattttgttttatagtctcaatcactctgattttgttcgttgccgtatagagttaagagatcagattgaaaaagatgtcaaagccgcaaaaaggtatttcaataaattagaaaccggcgatgcggacaacgatctcgcatatgagcacacaatttgccgattacggaaaatgagaagtaaagatgcaccattttcaagtttttgtattgcttacttggacggattcaggcataggtcagaatatgatggcgtgcttgatgccgtctatttgtaa

SEQ ID NO: 88830 - DNA, 1275 bp, Candidatus Synechococcus spongiarum 142
atgaagttggcgcgtgtggagattgagaactatcgagcgattgagaagctccacctgccgctgcatcccagcttgacggtgcttcacggggataacgggcatggcaagaccagcgtcctgacggcaatcgctacgggccttggaagtattccggagcagttacccgatgtgtcgagcattgtatttctcaaatcggaccggcgcggctcccgtccgttgcgggtggggctcacggctgtggatggcatcacgtgggaccggcgtgtgggtgggccacggagaaggaatgttctccaggccttaaaggatgccatgaatgccattgtgaacgcagatcgggaggaaaccgaaccgctcgacttgcccatcgtggccttttacgacactgaccgggccgtgttcaaaccaccgcagcgccgtacgggattcggaaccaaatttccccgttatggggcattggaaggcgccctgtccccccgtaccgactttcgggacttcttcgagtggttctacgccaaggaaaatgaggagctgagggagcaaaaggagcgtcaggacttcagcagcacactcagggacctggaggccgtgcgccaggccatccaaaacatggtccccggtgcaatcaatccccggaccaaactcagtccgctgcgtttcgtggtctctattcagttggacgacggaaagctggaagaactctccattgaccagttgagcggcggctaccagatcatgcttgctctggcagccgatctggcgcgccggatggctcagggaaatccccatcgggacgatcctctccaggcggaagcggtggtgttgatcgacgagattgaactgcacttgcacccttcctggcagcagaggatcctgaccgacctcacaaggactttccccaatgcccagttcatcgtgtccacccacagcccccaggtgctgacgactgttaaaccagaacatgtggtagagctgcagcgggagcaggggggaatcgtggcgggatcagcagcagcccccacctatggcgcagaagcgggtgatgtgctcgcgacggtcatgggggtagacgagcggccagacccagacggaaacaagtttgtggagaagctggcggattacacgcatcttgtggcggatggcaagggcgagtcttctgaggccatcagcctgcggcaagaattggatgagttgtcaccacgggatcctgcactggaccgagctgatatcgagatcaggcggcgcaagctgttccggagcatgggcaggtcctga

SEQ ID NO: 88831 - DNA, 723 bp, Candidatus Synechococcus spongiarum 142
atgaagcgtatccgggcactggacgggcctaccccaggtcttgcacactacctggaacgggacggcgaacaagcgacatgggaaggtttccgcagtcaccaggcgggtgatgcttaccgggaactggtgtcaggccttgagcatattcagcacgggctatgtggatactgcgaggtcaacatcatcgacaacgacaggcaagtcgagcatgtcattcctcaaagtgattctgcgcaaggtagggctcacgcacttgacccgacgaacatgatggtctgctgcaaaggtggaactctggaaaccagtggtgatcaggaacggcggatggagccggtcagaaaacaccgcagttgcggtgaggccaagggaaagcgaaaccttcgtgatagggaatttattgatccaagagacctgcccgcgctgccatctctaatacgggtggattataacggcaggatcgaggctgatgcggatgcctgccaaaaggcctcgattgctgttgacagggtagaaaataccatcaacatcctggggctgaacgtcaagcgcttgcagcgcgctcgtgagaaacactgggctgctctcagtgaattctatcaggagtatttggatgatcctcaggtgatacaggaagctgcgcgaaaggaacttttaccagaggaggatggccgcctaccgcgattcttttccaccagccgcttcatactttgggccggtggctga

SEQ ID NO: 88832 - DNA, 1296 bp, Candidatus Synechococcus spongiarum 142
atgcgcattgatcggctcaccgtcttgaacttcaggagatttgagaagcgtaccttccagcttcatcaccagttcacgctgctggtgggtgacaacggcgcaggcaagacgacaattctggacgcgcttcgggttggcgcgggcgcgtatttgctggggatccccgattcaccagcaccagcaccccctatcatacgggactatatgcggctagagacccggcgagagggagagttccccacctttgaacccgtcactccgtgcgtggtccgttgcgaggggcagatgcatggccgggatctgtactggtctcggaagcgggcctcggtccgtgggcgaaccaatcgcgttggcgcacgggcacttgtgcagtacatcaacagttacgttcagggagacaggctggcgatgaactaccccctgattgccttctatggcactaaccgtggctcggtcgagcaacgggaaactcagcaggcgctctctgcagtgcgccagccgctcggcaaagcgtcccggtttgaaacctataggggctgccttgaaccaacggtatcatcggaattactgcgcaagtggatcaagaagatggagctgatcgcactcaaggaaaagcagccacttcagagccttgatgcggtctatggagccattgtgggctgtgtcgatggtgtggagcgggcagtgtacgacttcgagattgatgacatagtgctggacttcaagaacggggagtgttttccgttcgggctgctgagcgcagggcagagaagcatgacggtgcttgccgctgatgtggcgtggcgttgtgttcaattgaacccccatctagcggggcaagcactgagggagaccgaaggcgtggtactgattgatgagctggacctccacctgcaccccaactggcagcgcatgatcgtgcgcaaccttctatccctctttccgaaattgcagtttatcgcaacgacccattccccgttcatcattcaatcgctggatgggcaaggcttgatcaacctcagcaatgataatgttctccaagagcgaaaggaaccgtacagtattgaagacgtatccgaggagaccatgggtgtggatacgccacagcgcagcaagcgatttctagagatggaaactgcggcgcggcgctactatgaactcctcgatcaatgcagagacgaacatcatcctgatgtggcacaggcaaagaaggaactggatcggatcgaggcccatttctccgacaacccggcatatgccgccttcttgaagttacatcgttacgcggcggagtaa

SEQ ID NO: 88833 - DNA, 630 bp, Candidatus Synechococcus spongiarum 142
atgagaccaggccagcgcggcccgtggcccatcagcaatgatggcagcagaatcttctttcggcaataccagcaagcagaaaagtgtctcatttgcagaattggtgagtattgcagctactgtgaacgctgtggagatctccatgtagagcacatgattccaaaatcggtcgcgaaagatcttgaaaccgagtggtctaatctcctgcttgggtgcagcaactgcaatagccgcaagtccaacaaaaacgattcgcgtgacgggtatctctggccggatcgcgacgatacattcagtgctttcgtgtatcagttgagcggacatgtgtccgtgaacgggacactggctaggggcgagtattgtaaggcgtcggcgttgtttaatctcgtggggctgggggcagaggaatcgcttacggacaagcgccatcgcaagagacgtcaggcatggaatatggcgctcaaggctcgatgtcatatctgcgatgacaactcaaggaatgttgttgatcttgtgatcactctcgccctggaaataggattcttcagcatctggatggctgtttttcacgacgacgaggatatgcgctgccgcttgacagaggcattcccgggaacccggctgggatga

SEQ ID NO: 88834 - DNA, 1524 bp, Acinetobacter baumannii; identical to SEQ ID NO: 87022

SEQ ID NO: 88835 - DNA, 672 bp, Acinetobacter baumannii; identical to SEQ ID NO: 87023

SEQ ID NO: 88836 - DNA, 2292 bp, Escherichia coli; identical to SEQ ID NO: 86352

SEQ ID NO: 88837 - DNA, 927 bp, Escherichia coli; identical to SEQ ID NO: 86963

SEQ ID NO: 88838 - DNA, 1578 bp, Haemophilus haemolyticus
atgaaaaataaagacattcttgaactatataaaaattgggatggagaaacactccctccagatgaactaatggaattggtttctcaaaatccatttagtttgcttgatgttcagattgttaattacaaagcattttctgatagagtatcagttaagtttgaagataataaaaaaccaattttatttgtgggcgttaatgctagtggtaaaacaactatcgctgatgctattgctatagcattaagtaaaattaatagtgctatttataataagaatactgattcaggtgatgtaatagaagaaagagatataaacaagaaaaatgatccatatcaaccggctttaatagagttaaatttaggatatactaaaactaaattaactgaagttatcgttgcaagatcacctaatggctctcctaagacaatttctagcacgctcatacaggcgaaaaaattaggtgcgctatatagctatatactagctaaagataatttagatttacctctttatttattttatggagtagaacgctcatcgttaaaaactaaagataaatttgataaagcagattttatatctaaagtagaaagattaaatgcgataccacagaaactaaaaagcacattaaattttaatgattttttattatggtttaagtatttagatgatgctaataatcaagatctagtaaatgcattagaaagtgttaaaagtgaattagctaatatagaagggaaagttaatgaactagattcatatgacaacgatatgttaactggattaaatgcagctaatgaattactaaaaaaaatgaattcaatagcgtctatttattctaaactagaaaacgtaaaaaataataatgaagtagacacagaaaaaggaaaacaattacagaagattaaagaaactattattaattttattccagatatcatagatataaaaatagatagaaatctttcctatccatttatagttaaaaagcaagatggttcacaatttcctttgtcagaattgtcccaaggagaaaaatcaatcatatctttagtgggagatcttgttagacgtatgcttatcttaaacccacataaagaaaatcctcttgatactccagcgattgttattattgatgaattagaacttcacttacatccacaatggcaagaagaagttatttctagattagaacgtacctttaaaaatactaaatttattttaactacgcatactccaactattgttagttcaatcataaatgaaaatctttaccttattacagataatcagattatagcaggtaaacatcttgattttggtacatatggtgctgaatacgctagtatctatacactcttatataatataaattcaagatcagataatgaaataaaagaaaaattagagcggtatttatatttagtaaatgaaaatcaatatacttctgaagaagcaataatgcttaggaaggaattagaaaaaaactttaaaggtaatgaaccatctttagaagaagctaagttaattatcgaaaataaagaatgggaaaagtctttatatgaagaaggtcaataa

SEQ ID NO: 88839 - DNA, 789 bp, Haemophilus haemolyticus
atgaagaaggtcaataagtcaagcataccaaatgttttactaaattatagaagcacaagtgaatcttatacttggacagctttcagagaaaataaaaaatcttacaaaagagtaaaaaaacaaatttttaaagatcaaggagggatatgtgcttattgtgaacaagatttttcctgttcacaaggagatgatgactatataactcagatgattgaacatttccatcctaaaagagatattggttctaataagaattgggctttagattggaataacttacttggttgctgtacaggaggaaaagaatctaataaaattacatttcctactcctgaaaatttaagttgtgatcaatataaagaaatcgcattacctcagataaataatgtcgaaggttatcttataaacccaattgatatgccagcatttccttgtttatttaaaattaatcaagttacgggatatattttagcaaatgaaaaaaattgtgaaaaagttaattttaacataaataattttaaaacaacagtagaacttgttgagaatactataagagtattaaatttgaattgcgtacggttattacagaagagaaaagcccacattaaaaattataataatctcattaatatagctaagaaaaatgaaaactcagctattttccaagaactatgtagccgtttcctagcaaaaaagaataataaataccattctttctttacaacataccgtattttattgtcttctcatgctgaaaattatttacaaaaaaataatttttcaggataa

SEQ ID NO: 88840 - DNA, 1251 bp, Bacillus cereus
atgtttaaagttagaacgttggatattcaaaggattaatagcatccaggatttatttatagggtttaatcctggattaaattttatttgtggaccgaatggtatagggaaaacaaccatattgaattgtattacaagtgcatttaacggtgtaccgttatctgggattttcccacataataatgctaaatatggtgaatttagtattgatgtggaagatcatttattctcaaaacgtgcttttttttatataggtgaacatccagaagatatgttttcattagagtatcggaaaactaggcatagagctattaatgtttataaggggaattgtattaatttcaatattcgcacaagagcttttgaatacagtctgcagatggtaggagagcggtttaatcatataaagtcatggttgtatacaaattattataaagatgaaatggatacttataaattttataatttacagcttgttcaacaatgttttaatttattggatcctaatatcagttttggaagaattacagaaacaataattactgataggcatccgttgagtagacatactaggtatagagagaaaatcggggtaaatgttaattcgattttaaaacatggaggaggctatacgcctagacgtaaaagtctagatatgtttgtaaatactcctcatggtgaagtattagtggagtgtttgtcttcggggtataaatcctctttaacagttttattagggataattagggggatagagtcctcttcaacaacgaacctagtgaacgaatttaatggaataataattattgatgaaatagatttacatttacatccgcaatggcaagctaaacttgtagatgctattagaaagctagtacctaaagcgcaggtgatttgtacgactcatagtccacatataatccaagctgcaaaaccagaagaagtaatagctctaggagaggatgttaatggtaatatttctgttaaggaaattccatctcctagcgaatatggttttcaaggatggacaattgaagagattcttacagatgtaatgggcttagggcaaacaatgtcacctttatttatagagtcgttagaaaaatttaatgtagctttgcgaaaaaaagatagagaaatgttaatgtgtgaatataaaaaacttcgaaaaatggttcatcctcagaatcctttagcgacattacttagtgtgcaagcgggcgagttaatgatttgggaggatttaaaatga

SEQ ID NO: 88841 - DNA, 768 bp, Bacillus cereus
atgatttatgtagaaagaccctccaagcctttaaaccttactgatgaacatgttcaagcactcacagataaatttaaaaagactaaaagtgctgtttggaaaaaagattatattgctgagtctcttatgaaaatgactaataataagtgtgttttttgtgagtgcaggttaggagaagaggggaaatatatggaagttgagcatttttatccaaagtcattgtatccttcaaaagttattttttggggaaacttatttccaatttgtagtcgttgtaataaagcaaagggagatcatgatactcaactctatccaattattaatccttgtttaaataatccaaaagcacatttgtattttgaaaattatagtatcttcgggaaagattctagtcatttgggaattttaactgagaaagtattgaatttaaatgacacgaggcaattggctactcctcgttttttagttggggcaagtgtaatgaaaaagctgcaagaaattgcacaaacggtcaacagatatgatagacaatctgcagttattggggatgattatgacatcataaataggacgaaggctcttttacaacatgcgacgcctgaaatggaatatagtgcaacagtagctactgttatcatatcttctagtttttacgagccaatgaaagagcaaatgattactaaaggtttgtggaatgtggatctaaatcaattggatggaattgcaagagggatatctttagaagtaaggatacccgcagcgacttga

SEQ ID NO: 88842 - DNA, 1332 bp, Arcobacter butzleri L348
atgaagcttaaaaaattatacatagaaagttttaaaaatttaaaaaagattaactttgatttcattgcaaataataatattaatgtattaattggtaataatggttgtggcaaaagtaatgttattgaagctataagttctatcttctcaacactttatttaaataagaaagaatttgaatttgaatttgaattagtatatgacttacaagttagtgaagatattttcgatactataagaataaatttttttgaaaataaactagaaataaaatcattattaaatgaagaattattagattcatcgaaattcttaccatcacaaataattactatttatagtggagaagaatcaagactttgggaaaaatattacaataatttttatgaaaaatataaatctgaatacattaagaatttaagtccatatttatttccaaaacaagaactattatatattaataaatattattgggatattgctttcctaactttagcttcttcttttattgatacagatgatatttcacctaataaagtaataaaaagtatttcttttgaatttaatcaagatacaataaaagcattgtatgaaaaatctccaagtcttgttacaacttttactaatacattaagtgaaggcaaagaacaaattgatctttcacttgaagaatttcgggatagagctgtagactcacataaaactttatttcaaaagttagcaacggcatatctaccaaaaaatgaaaaagaaaaattaattaatgatataactattacttttgaagatgatactaatctaaatgatttgagtgagggagaaaaaaaacgtttacttttaaaaacagtattaaatattcttgcagaagataatactttagttttatttgacgaaccagatgtatttttacatcctaaatggcaaagtgaattaataaaaaattttatagataataaaaaatcttctgtatcgattcttttaacaacacattctccaaatatattaaaaaatatctctagcaacaatgtatttgttctgaaaaaaaatattgaaggaaatatatatcaagaaagaccagtaagtagtttattgggaagagatgtaaactctatattggatgaaactatggatgtttctgaaaggaataaagaagttgaacaactatttaaaaagtattttgaatatatttctaaaaaagattttgaccaagttaaattaatagaaaaagaaattttagagattacaaaagatgaggaatatttttacgatgatgaacctaagtttgctaaagctaaagcagtaattcaaagaatgaagatgtttgataaatga

SEQ ID NO: 88843 - DNA, 732 bp, Arcobacter butzleri L348
atgaaaaaaattatcaaaatagctactaatgaaccagaatcttttattaattggaagagcacccaacctgtagaaggttgggaaccttgttgggatacattgggtggtcaagagaaaaaagatttgagaaaagctttggttcaagaacaaggttatatatgctgttattgtcaacaaagaataacattatgtgaaaaaactgagatagaacatatttatccaagagaaaaatgtattagagaaaaaaaatacaaagcaatagaatatagtaatttaattgcatcttgtgaaggaaatcaacctaaatattataataaaaccaaacagaaatatgagaaaagacatgaagatttaggtaataaaatagttcactgtaataattttaggaaaagtgaagaattacctatttcccctctatttgccaattgtgaaaaatattttacttatacttatgaaggtgatattcttgctgttaaagataattcagatgcacaaataactattgataatttaaatttaaaagtattaaataagaagagaaaagaatatattgaaggaacattatttaaattagatgataattttgaaataactggagaatttgttgatggatttgataaaaatgagtatttagataaatttatgaatatgaatgatattgataatgatggtgagctaaagtactacgaatattcaggagtaatagtaaatttattaaatcaattagattaa

SEQ ID NO: 88844 - DNA, 1977 bp, Arcobacter butzleri L355
atgtttccactcaatttttttcttaataaattcaaaagtggttttttatcagacgaaatatcagaatatttaaaaatagctcctggagttgataagtttaaatatgaaatacaagctagtgagtattataataagattgtaaatttatctataaataattttgaaaagaatgtttttaatattgaagattcttatggagagagttcttattgtttttattgtgggcaaaaagcagaggttataattccagcttatatgcataatggttcaggaataaatttatggatgtacaaagactggagatttacaacattactctgttcttcatgtgataaacatgcgggaaaaagaaaagtgtcttacaaaaaaaagttttctgaaatttctccaaatcatccaaaacaaatacttaaattagaaccagatatattattaccttcactagaacctgcttttaaacattttaaatatctaaaaaatggaacattagaacctttaacaataagaggtaaatcaactataaagtgtttttctttaaatagacaagatttagttgaacgtagaatggactatatgattcaatatgaaagagaaaaagaatttaatcaaaatatgacttcattagatgttttattttgtattgctcaagaaaaagattttgatttagataatgatgaatatatggaagatttagcaaaatttttgcatgagaaaagtaacttatacgcagatagaaatgaaattcataatttattaaaaatagaattcccaattactacatataaacagatttctgaaaatagaataagaacaagatactattatcctaatttttcgggattaaaaaacataaaattaacaggtatacgtggctttgaagagaatcaaatattgaattttgatggaagaaaaagtttaattttaataggagaaaatggtgtaggtaaatctactttattagaattaattaaacgtatcattaatccacatactaagcttaccttaactgatttaataaatatgggaagtgatgatgcaaaaattgaagttgaatataatgatttttctataagtaagttagacttttccgttactcaagggtatataaatggtaaaaaacaattatgtaatttgattgaaatttcagagcttagaattttaaatagacaaattgcaagattaattaattggatttctctaattcataatgaagaatcaaatagtgaatttaattcattatttgattggattgaacgacaactaaaaatattactttcattacctactgaagcaatattaaaagtagaaggtggtcatgtattttggttaagaaataataatgctactcaacgagaatatttagagaactttagtagtggttataaatctataatgattattttttattctattgtttccaaattcattaactcatattctgttaacgcatttaatattgttaaggaagcgttatcaaatacagtagtttcaattgatgaaatagaattacatctacatcctgtatttaaaaagacaattattgaaaaacttaaaaaagtttttcctgaagtattatttataattactactcatgatcctttagttttaaaatcagcaggtgttgatacaaaagttatacttcttgaaaaaatagataataaaacaattataaatgaagaattaccagatcataaatatatgtctactggacaaattttaacaagtcctatatttggtttatctactattgaatcaagtaaagaaattcaaaataatttagatgcttattataaagcattagagcaaaaaaattgggaaattgttgataaatatagagaaaaattagctgatagcggattatttggaaatacttatagagaattaatagcaatgtcagcagttgatgcatatttagttaaaaaagaaattccaagtgtagatgttattgctaagattttagagaatttagatgcgtaa

SEQ ID NO: 88845 - DNA, 1158 bp, Arcobacter butzleri L355
atgcgtaaattatcaattcttaatcctatacctcctaatatggatagaaattcaactgttactcaaacaaataatcttgaaaatttaaacaaaataaatgcttatgtttctggaaataaacctgaattaatttttagaggatataactcaaataaagaaaaaataagattattagcagatggctgttgtgcttattgtggtataagagttgatgaacattatacaacagttgttgaacattataaacctaaagcagagttacattttagagttaatgaaattagattagatggattattgttaccagaagcttctcgttcaggaaaacatgataaaataacagataaatgtttatttggatattttcaggatggtaattatgttgaaaatttacttccctcttgtggtgcatgtaattctgggttaggaaacaatggaatctatgtagaaaataaaaaagggaaaggaaatattgaatacaatataccttatggtaaaaacaattttttcccaattttatatactaatagaaatagtagtggaaagctttctgatcatagagtgaataagctttatattccagatactgcaacagataaatcattgttatttaatccttattttgatgatcctgatgaacttttttcatttgaatttgataaatacatagttgctgctgatggagtaggtcatatagtaaaaattaaaccaaataaaagtgcaagtaaatttaatcgtttgaaagcacaagtttctattaatttattgggacttaacagggcaaatttatgtattgcaagatataacaaatataaagccctagaagatataagattagaaatagatgaagctgcttataaaagagattttaatttgaatttatgggctaaattttctcttaattttacaaaagagtttcataaaaatcatgctcaaatgtttggctatggaaaaaaattagctaaagaaatgggattttatttaagaaaagtattaattgaaaaatttccaaatgaatcaagaggaattttaaattatgtaattacctttgatgaattaataaataaactaagtatatttgctaaaacatattatgatccaagacaaattaatcgacaagtaaataatgttcagagggatatcctaaaccacagatag

SEQ ID NO: 88846 - DNA, 1644 bp, Enterobacter aerogenes
attaaggatatcactgaaggaaaggttgagactaaaggagatggcattgctgatgaaattgtaactttggttaaagaaaagatttatagtaaaaggttaagagtaagtcaagttggtgtctacggtgttcgcggaattgaagatatcacgctgagcattgaggatgaccttacggttataatcggtaataacgggtcgggtaaatcaactatactcgatagtttaagtttgacattatcatggctaaaagcaagtattcttaaagaagagggggtgggaacttatttaagagaattggatataaataattcgagggatgtttcttatggaagtgtaacatgtcgactttgtttagaagaagagaactttaatttcctttcaactaaatcaaagccggggaggtctttgagtaggcgtagtgctttgcaagagattaaagctttaggtggtctttatagacatgttaattctcagtttgctgattctaatcttcccttggttgctcattattctgttgcgagatctaatgaaggcacaaaagatgattttgctaaggtggggtctcagattggtatcaaggacaagtggggtaaatttgatgcctacgaagacgtacttaaagacagacatgatttcaacgagtttattgtttggttagggagaatagacagcatagctcgtcaaggtggcgggataaacgaagaaatcagtaagttacagtctgaaataaatagtacaattaatttacttaaaatgtttaaggataagggtaatgaccagtcctttattcttcctttggaagagataataaaaaagaagaataaagaaatatccaatatatacaatgagaatttcaatcgggatgaggtgttggcctctaaggtgttcaaacacattaaacaggctataacaattttcattcctgatataaatgatgtcagattggtatatgaacaagaaggcgttaaattagttttatataaaaacaataaggaaattagtgctcagcaactatctcagggtgaaaaatcgcttttgtctttgattggtgatttgactcgtaggttagtgcttctaaacccaagtcttgacaatcctcttgaaggagaaggaatagttcttattgatgagatagatttgcacttacatccttcttggcagcaaactgttatacttaatcttcaaaatacattccctaatctgcaactgattgtaacaacacatagtccacaagtgctcagtaccgtctactctaggtctatccgatcacttcatgaagtgaatgatgttctaaatacaattccaagtcttgatgttaataataaaataatagcgtctgaaactcctgagtttcaaactagaggagttatgagtactgatattttatctaaaatcatgggtattgatccagttcctttagttaaggaagcgaaatgggtccaagaatatcttgcagcaattgaatatgataaaaatactgaggggtattacgctgacttgtgggcagatattgttgagcattttggtgagaatcatccagtggtaatatcctgcaaaaatgctgttaggttaaaaggtatgagaggtaagatcagggagatgaaaaaaaataaaaatgaagatatcaaaaagggaaaggagtga

SEQ ID NO: 88847 - DNA, 639 bp, Enterobacter aerogenes
atgcataaactttcaaggtgtgcttccccagttacgttgtcagattatgattacaaagttcataaatgggatgattatattcaagatgtaaacaataaaaatgatgtgtgggatggattgtttttgatgcaaggacatagatgtgcttattgcgaatgtgaacttttgacttattataaaggacatgttgagcattttgttcaaaaaggtaggtttcctcagtacacatttgagtggggcaatctctttggttcatgtcgtagaagtgatggttgtggcttttataaagacaatcaaccttatctgcaaggtgatattttgaaggttgatgaagatgatcctgatgattatttcgactttcttgatgatggcagtattgtcatcaaaccaaacttgacgccccaaaatgcgcatcgagcgcgtgaaacgttgagggtttttaatcttgatgctgagcatggggcgctgaggcagcagagagctacagcaaggaaactctattgtaatcttattgatgagctgagtgagtactatgataaatatggtgctgatgagaattttgaagagcttcttgatgagaatttagctgcaatagaaggagttccatttcaaacggctattcgtcatggattttattga

SEQ ID NO: 88848 - DNA, 866 bp, Escherichia coli
tacgctatttcggcgctgtaagagaaaataacatatctcattcaggaactattgacagtttaaaaactttaaaggatgaggagatttcagttagtttatctcaggatacaagcaataaatttgaacgttatttggtttcgttttataactatgggagtcatttaattgctagagagaatgataaagttaaaggggataaggtagattcttggttttattttttacaaaaacaatttcagtatttatttgaggatgattcattaaagcttaattatgatgcggaggagcaaacattttatattttgcaggataacaaatctccttatagatttaatcaactttcatcaggctatcagtctattttaagtatatatgctgacttattgatgaaagttgaacttaaaggtatcacatctgatgagttatcgggggttgtatttattgatgaaattgatgctcatttgcatgtttcattacaacgaaaaatcttctcattttttgttaatgccttcccaaatatccaattcattgtcacaactcactctccttttgttgtccaatctgttaatgatgcgataatttatgatttaagcacaaacgaacaacttgaagatctatctatgtattcctatgaagcaattgttaaaggtttacttggtgttgatactcaatcagatatactcaataaacaattggataaattagcattgctaataaatgaggatgttattaatacagatgcgctgcaagatgttataaataaaatccagccatatgaaaaccaattagatatgaggtctagaacttttttattgatgggcaagaatgctcttttagatgcgaaagatgcaactgaaggagaatga

SEQ ID NO: 88849 - DNA, 666 bp, Escherichia coli; identical to SEQ ID NO: 86599

SEQ ID NO: 88850 - DNA, 2292 bp, Escherichia coli; identical to SEQ ID NO: 86352

SEQ ID NO: 88851 - DNA, 927 bp, Escherichia coli; identical to SEQ ID NO: 86963

SEQ ID NO: 88852 - DNA, 1623 bp, Escherichia coli
atgaatttagagacttgctatgttgattttttagagttggaatcacatgtgataaacgaggattatttgaaggagtctgttgagcttcaaaagctaatatctactttaaatgagagtaagtttcatttaaataaaataggtatacatgattttaaacggataagagaactacagatttctttagaagatgatttgactgtttttgtcggggataacggattcggtaaaagcactattttggatgcaatagcaattgttttgagttggttgagatcaaatattgaaaaggagagtaagcctggtacttatattaaaagccatgaagttaataactctgttgatgttgagtatgcatcaattgatgcaaatataaaactcaaggactttaataccagtattttgattactaaagcgaaagagggggcatattattctagaaataatgaattgttggaggtaaaaaaacttgcaagtatttatagacttgtgaataaatatgttgataatgcaagcttgcctttgatggcatattattctattgcgcgttcttatataggcggcggggttgataggaaaagaaaaaatgctaaaactaaaactgtatggtcaaaattcgatgtgtatgatgaaatcgagtttgacagaaatgattttaccgatttttttcaatggcttgtatttcttcataacagagcttcacaagagaaattgagtgagtcacaaacgacaatcaatgcgttattttcagatattcagagtttgaaagcaacattaactcaactatctgcgattgataatattgattcaacagttataaaaggtttagagctttcgcttaaagaaaaattgaactacatgaaatctctgcaatcaggagaacataagtttaataatgcagtatcactttatgatagtgttataaataccattctaaagttcttgcctgaatttcagtggattaagcttgtttatggtgatgatgattataagattatccttaaaaaaggagaggttgaattagatattcaacagttgtctcaaggtgagaaaactatatttactttagttggtgatttggctcgacgtttaattttacttaatccaaatttatctaatcctctattgggatatgggattgttttaattgatgaaattgatttgcatttgcatccgcaatggcaacagacaattattgagcgtttgacatctacattcccaaatgttcaatttgtaattactacccatagcccacaggttttatccactgttagctctcgttcagtgcgtattctacaggaagtggaagtagatggtgttaatgatttgatagtgtctcaccccgactatcaaataaaaggtgttagtaatcaggatgcacttttatatggaatgagaactgatcctataccctctactaaagaaaatggttggcttgaagaatataaaaaattggttgagcttaatcgttatagcagtgacgaggctcttttgttaagagaaaaagttattaaacatttcggattagaccatcctttagttcaagagtgtgatgatcttatatctgttttggagttcaaaaataagataaatcagcacttttctggaagtaaggatgtaaaatga

SEQ ID NO: 88853 - DNA, 684 bp, Escherichia coli
atgaaatatctatctaggcaaatgccagggccttccgttcttaataaatttgactataggagggatgattggaattccctatcatcaaatgataaaaaagaaatatgggaagaaataataaaaatgcaaggtaaattatgtgcttattgcgagaaaaaaatagagcatcataaaagtggtggcaaaaataaagttgagaggcatattgagcatttttacaggaaaagttattacaaaaatttaactttcgagtggtctaatttgtttggctcatgtggtgagccgcaaaggtgtgggttttataaggataagcaaaaatataacgatgatgatttaattaaagctgatagacaaaatccagatgtttttttccattttttggaaaatggtgatgttcatattagagaaggcttgaatgagaaagaacacaaaatggcagaggttacgttaagagtatttaacttaaacccgtcctcaggaggagtcaaggcggaaagaagacgtgcaatagaattaagcatgacattaataaaggaactggtcggatgtgcatctcagcttattgaatcaggatgtgaaattgaagatgttagatctatggtctttgatgagtttaaaaagaatgtaaaagatagatgctttaccactgcgataaagcatgtttttgagaatagaatgccttaa

SEQ ID NO: 88854 - DNA, 1251 bp, Escherichia coli
atgctcaataaaagcaatgtaataaaacatatacatgtgttacttcctgatacaaataagaacataaatataaatgttgatggtaaaaatgtcataattacaggggggaatggatgtggaaaaactaggtttttaaaactactatatgagcaggtgtctgctcaaatagaacagtatgaatataaaacatatgatcaaataaaacaagaaatatcaaacagacaaaattggatgcaacatacacctccgacggatagaaattatttcagttggaaacaggaaatatctgattatgaaaaacagttaaaaaaaatgagagatatacgcattgaactagctgatttaaataaatactgtatcgatttcaatgagagaaagtctttattacgctatttcggcgctgtaagagaaaataacatatctcattcaggaactattgacagtttaaaaactttaaaggatgaggagatttcagttagtttatctcaggatacaagcaataaatttgaacgttatttggtttcgttttataactatgggagtcatttaattgctagagagaatgataaagttaaaggggataaggtagattcttggttttattttttacaaaaacaatttcagtatttatttgaggatgattcattaaagcttaattatgatgcggaggagcaaacattttatattttgcaggataacaaatctccttatagatttaatcaactttcatcaggctatcagtctattttaagtatatatgctgacttattgatgaaagttgaacttaaaggtatcacatctgatgagttatcgggggttgtatttattgatgaaattgatgctcatttgcatgtttcattacaacgaaaaatcttctcattttttgttaatgccttcccaaatatccaattcattgtcacaactcactctccttttgttgtccaatctgttaatgatgcgataatttatgatttaagcacaaacgaacaacttgaagatctatctatgtattcctatgaagcaattgttaaaggtttacttggtgttgatactcaatcagatatactcaataaacaattggataaattagcattgctaataaatgaggatgttattaatacagatgcgctgcaagatgttataaataaaatccagccatatgaaaaccaattagatatgaggtctagaacttttttattgatgggcaagaatgctcttttagatgcgaaagatgcaactgaaggagaatga

SEQ ID NO: 88855 - DNA, 666 bp, Escherichia coli; identical to SEQ ID NO: 86599

SEQ ID NO: 88856 - DNA, 1254 bp, Bacillus thuringiensis
atactaaaaaatctgcaaataaaggattggaaccaatttgaaagagttgatattgattttcatcctaggttaacggtcttgactggcgcaaatggtgcgggtaaaagtacaattctaagaatgtttagcacacagcttggctggggctataatgaaacggctataccatcgaaagaatctactacatctttgaaatataaaagtggtggtagaagaaaaattcaacctagagagcaacaagataagataaatattgggagtttagagtgttttaatggtaagactgcaaacctatttgttccagatttaactccttcagcaaattattgtataaattatgaaactcctggtctcaattactatactaataattctttagatttaaaaggtatcaatattccttctcatagaatagcgtattcttataaaccagttggaaacattcctgtaagacctgcttctagagaagaagcttttagcttatttaaccactctttaatgaataaattatttgaaagttatggagattccccttcctttcaaatgaaatcaacacttataagtttagctctatttggtgaaggtaattcgcatgttaatgaaaataaagaagcattagatttatttttaggatttatcgaaatactaaaagtacttcttccaccaacattgggttttaaaaagatttcaattagagatggtgaagtggtattagaaacaaatagtggggatttcttattagatgctgtttctggcggtataggtgcaatattagatttagcatggcaaatctatatgtatgatggagataaatacgagccatatattgtattaattgatgaggcggaaaatcatttacatgcttcaatgcagagaagattaatgccgagtttacttcaagcctttcctaatgcacaattcataatttctacacatagccctttaatggtaaactctgtaagagattcttccatctttgtgctaaaatataatgaaaatcatttagtagttagcgagttattagacttcgaaaataaggcgtcgaatgcttcagaaatcttaagagatgtattaggtgtccctataacaatgccactatgggtagagaacaaattagaagagattttaaagagttttaaaggatacgaaattacacctgaaagttatagtagactaaaagatgaacttgctacagttggattgagagatcatttgcctcaggcattaggaatccttcaaggaggtatctactaa

SEQ ID NO: 88857 - DNA, 648 bp, Bacillus thuringiensis; identical to SEQ ID NO: 87077

SEQ ID NO: 88858 - DNA, 1407 bp, Bifidobacterium bifidum
atgacgaactatcggaagtttgggggccgattcagtgccgatgccaacagcaacggcggacattcagatagcatggttccagggctgaccgttgacttcgacaggcagatgaccgtattggtcggcgaaaacggtgccggaaagaccgcggtgctggatgccgccgccgtggcgttgggcacgttcctgaaagcgtttccagaggtttccggattgcggattcaagggagcgatgcgcgccgcaaatattattcacaatacggggaaaccgatatccaagagcagtttcccgtcagtatctatgcgcaagcggacatcgcgcagccggtgcagtggagaacagtgcaggaacgagggaatccgattgctgttcctatcgaatggcgacgggaactgaacagtgcgaacgggagcaccacattttccaaggcgtctgagatatgcagtttgtcagagatgtatcagaagctggttcaaatggatccagatgcggtgcttccgctactggcctactatggcacggatcgattgggactgcacggcagaatgacgggaaaggcaagagcatccgctttcaaaaatcgttttcgcggatatgatagatgtcttcaatccagtctgaattacaggcagatggatgcttggtggcgcaagcaatatgaccggtctctgaaagggtatgacgtacctacctaccgcgcagtatgcaagaccgttgaacggtgcttggagacgcttctgcgcgagaatgggcatgcgactgaggcccggctcgaatatgatttcgatgatggtttgcgactgagctacacggattccgatggagtgcgcttggagagcatgccgctgtggaccttgagcgacggataccgcggcgtggtgggactcgtgtccgacatcgcatggcggattgcggcgctgaacccgttcatgggcgattccgtgattgattggacgcccggcgtggtgcttatcgatgaggtcgacttgcatcttcacccgaaatggcagtcctgcattcttggcgtgctgatgaagtcgttcccgcaaatccaatttatcgtcaccacgcatgcgccgatggtgatctcctccgtggcatcggacaggttgcgcgtcatcacgttggatgacaagaacgatggaatctatcaggcggtttccccaaaaaacgagacatatggcagcagtgcgagcctggttctgcgccatgtgatgggatctctggacaagccgcggaaagtacaggatctgttcgaccgattctcccggcagatggatgccgatgagttccccgaggcgaaacagacattgggggagctggagcgaacgataggcgctgacaatcctgatctcagcggtgcccgttcctcgtatttcttctatgccggggaggtgagggactga

SEQ ID NO: 88859 - DNA, 870 bp, Bifidobacterium bifidum
atgctgtacgtggacaaagacaatgcgcatccgccgagcattgagattgccaaggcgaagcgtgtgctgaaaaacactgatggcgtggaggtttgctatgactctctgggacagcttcaagaggcatctcagttaatcccccacttgtgggatagtttgggcgccgatcagggatggctgtgcgtttactgcatgcggtgtatagcggtgcagccggtgagtggcgtctcgcggaagctgcataacgagcactatattcctcgtcatcaggactacgagggatacgaagaggcaagacgacatggcaaggaggcggagctgccttaccctcaatttacgcaggctgatcttgaccgttactctctggattatcgcaatctgtttgccgtatgcgatggaaaatatcagaaagacgaaaaggcgccagcccgagacggacatcgtgccccgcatcgtaaggaggatgaggaaagcagcggccccaaggtgacatgtgatacgttgcgaggcaacagcaagctgaccgttgatcccaggaggaaagaccacatcgattcgttgagttacggcaaatttgacgctacactgagttcatccattccggaagtcaacgatgatatcaatgtgcggttgaatcttaactatcactggttgaaagaagaacgtgcgatggcgctggttggcctttaccaatggtttgaaaaaaatgcgtcggagcgggatttcccacgcaagtgcagggagagactgcaggaacttcaacaaggcaaggacggcaagttgcagccgttcgcgcccatgttgatatgggcgttgacaaaacgaatgcggcggttaccgcacccgccccagcgcttaccttcgcagtag

SEQ ID NO: 88860 - DNA, 1407 bp, Bifidobacterium bifidum; identical to SEQ ID NO: 88858

SEQ ID NO: 88861 - DNA, 870 bp, Bifidobacterium bifidum; identical to SEQ ID NO: 88859

SEQ ID NO: 88862 - DNA, 1407 bp, Bifidobacterium bifidum; identical to SEQ ID NO: 86210

SEQ ID NO: 88863 - DNA, 867 bp, Bifidobacterium bifidum
atgctgtacgtggacaaagacaatgcgcatccgccgagcattgagattgccaaggcgaagcgtgtgctgaaaaacactgatggcgtggaggtttgctatgactctctgggacagcttcaagaggcatctcagttaatcccccacttgtgggatagtttgggcgccgatcagggatggctgtgcgtttactgcatgcggtgtatagcggtgcagccggtgagtggcgtctcgcggaagatgcataacgagcactatattcctcgtcatcaggactacgagggatacgaagaggcaagacgacatggcaaggaggcggagctgccttaccctcaatatacgcaggctgatcttgaccgtcactctctggattatcgcaatctgtttgccgtatgcgatggaaaatatcagaaagacgaaaaggcgtcagcccgagacggacatcgtgccccgcatcgtaaggaggatgaggaaagcagcggccccaaggtgacatgtgatacgttgcgaggcaacagcaagctgaccgttgatcccaggaggaaagaccacatcgattcgttgagttacggcaaatttgacgctacactgagttcatccattccggaagtcaacgatgatatcaatgtgcggttgaatcttaactatcactggttgaaagaagaacgtgcgatggcgctggttggcctttaccaatggtttgaaaaaaatgcgtcggagcgggatttcccacgcaagtgcagggagagactgcaggaacttcaacaaggcaaggacggcaagttgcagccgttcgcgcccatgttgatatgggcgttgaaaaaacgaatgcggcggttaccgccgccccagcgcttaccttcgcagtag

SEQ ID NO: 88864 - DNA, 1317 bp, Corynebacterium epidermidicanis
atgattcggctaacccgtatggagttaactaacttccggaaatacgagacccttcgcataacttttgaccctaaagtcactgttatcgtaggtggcaacggcgcaggtaagtcttcggtgttggatgcagctgcaattgccttgggctcattcttcttgccgtttcctacgatttcacaagggcgcaacatccagcaagacgatgcatttgctttttcgaagcggaccggggaggactcggttgatgtcaggcgccgctatccggttagcgtccacgcttatggcgaatatgatggacgtgaaattgaatgggtacgctcgaagctgtctgaacgtggcaatatgacaactcgcgatgctagagaactcagcgatattgcgcgaggactttacgaaaatatcagttcggatggcacggatgcgccgcccgtggaattacccctcatttcttattatggaactggacgactgtgggcacaaaggcgaggcagaacgtcggacctgcgcaaaccggggaatcgcgaagatggttattcgtccgcattggaacctcgagccgatgaaaagagtcttacctcgtggttgaagcggtcgacgatgcttgggttgcaaaaaggccgggtgccagcaacgttgcgtgccgttcaggccgccgtagaacgtgcgattcgagcggtcacgggatcagaacgtgcgaacgtttattatgatctcgagcttgacacaattgctgtggaatacacagagtctacaggtcgcttaattgcgcttcccatggcgcaactcagcgatgggtatcgcacgactttgtccatgatcgcggatattgcttatcgaatggcggaactcaatcctcatttcgagaatgaggtcattgagcgcacagggggtgtggtgttgattgatgaagtagatctccatctacatccaacctggcaggaacggataatcggggaccttacagatatttttccaagggttcaattcattgtcacaactcatgctcccagcgtggtctcctcggttcaaagtacgcaagtccgcattttggacagcaaagatggaacgcatcttgaagcaaagacccctggaaatcaaacttatgggcgtgacgtgccatcgatatttcgtgaggtaatggatgctcctgaacgccctcaagaggtgagcgaaagcctccgcaaagtgcaacaggcaattgatctagaagattttgaggaagcttcccgccttcttgagcagcttaaatccaaggtgggaagtaatgatcctgaagtgactgggctcgaaaccacgttgtacctggagcagatctag

SEQ ID NO: 88865 - DNA, 762 bp, Corynebacterium epidermidicanis
gtgttgtacattgagaaaaactcgaattcccgcggggctaatgctctgcggaatgcctgccatgccttggactcaactcctgacaccgaggcttcttacgacaagcttgacagcagtgtccgcagagaggttttggagagtcttcttcaagaacagggccatgtttgtgcatattgtatgaggcggatttgtctcagtgggcatccaaaagctaaggtaggcaatactgccgcaattgagcactacattgtccaaaatccttcggaagaatatcgcgaacggcttccggatgagctcaagagttacgacgaacgcgcttactcaatcgactacaagaacttactcgcggtttgccccggaggaagcgaaggggcgaccgcgcagtgctgtgacaaatcgcggactcttaaatccaatgtaaatcagccgttacgaattgatccgacaaatgaaacacacatcaagcggatcgagtattacacggatggacgcatttattcgaataatcctgatcacaacgttgaccttgatcaactgctcaaccttaatgagccggcgttcagctttgcacaaaaccgactggcaactttacaatcgttgcaaagaaaaattcaggacacctttagtggagaaatcagtcttgaacaatggacgaaatatcgaaatagtctggttgctgccgaagctaccgaaaagccaccatatctaggaatcttgctctggtggctggacaaaaagatccgcaaagcttcgcgacgatag

SEQ ID NO: 88866 - DNA, 1410 bp, Klebsiella oxytoca; identical to SEQ ID NO: 86646

SEQ ID NO: 88867 - DNA, 594 bp, Klebsiella oxytoca; identical to SEQ ID NO: 86647

SEQ ID NO: 88868 - DNA, 1380 bp, Enterobacter cloacae; identical to SEQ ID NO: 87572

SEQ ID NO: 88869 - DNA, 636 bp, Enterobacter cloacae; identical to SEQ ID NO: 87573

SEQ ID NO: 88870 - DNA, 1857 bp, Enterobacter sp. GN02730
atgcaactgctgcgcattctcatcccaacctttcgcaatctgcgcgatctcgacatcgcttttgcaacgcacttgcagccaacggcaagtgcaacagatgcaccaaccaaacccatccgtagccatgccctgattggccagaacggcaccggcaagtccaatttgatcgaagcattgatcaccatcttccgtgatgttgatctcgaccgtgaagccgccttcgatttcacgctggaatacagcattcgtggtcatgtgatacgtattggggctgatacttccaggcaaaaacgcccctatgtgtgggtggatggtaaagctgaatcacaaggctatttgctgaaaaaccgtgagctactgcctgcgcatatttttgcttattactcgggccgtaacgagcgtatcgaagccttgtttcaagagcaccagcgccgcttcaaccagcgccaagaaatcaccacggctgaagtgctatccgatacatatgaggctcctgatcgaatgatcgagcttgaagaagcattgcgtaagttcagcgggaaagaacagaacaatctcagcgaagctgaacgcaatgagcttcgcgggattcaggatgaactaaagccatttaacgaacaaagagcacaattcttggcaaaagcagagaatcgacatcgtgagcgcattaagcatcttggcgacgaccgcttgcgccgcctgttctattgtcgcggtggccacagccaactggtgctcctggcttgtctactatctgatgacccagtgtttcagaaggtgctaaagaacctacacatcgagtcgctggagtcggcactgtttgtgctgaaagaaccttaccgactacgtgaaaaacggcgcagcggcaaattcgacgagcaagagctgaacgagggtgatccacgattctggtatgcgcgcggaaatgtggtgagcgaattcctcgacaagctctggcaagtggcttgggctccgattgagcaagaggcaaccaaacagatcgacttccgtggccgcaacgaaaaacaaaaacagctgtacctttttgtgccaagtcaggagaagcttaagctacttggcgaactgatcggcagtaccgacagtttcttccgctacgccgagggggcttacattggtgacctgatcgaagaagtgcgtattacggtgaagaagcgcgatgagcacggcggcaaagtaagcttcacacatttatctgaaggcgagctgcaaatgctcaccgtgttaggcctgatgcgcattacccgtgaagaccagtgcttgttcctgcttgatgaacccgacacccacctaaatcctatctggaagttgcgctatttcgacgatattgaaggcgtgctgagttccgataatgcaacgatggttaaaagcgagtcgcaaataatcatcaccactcatgaccccatgatggtgggcagcttgaagcgcgagcaagtatatatcctgcgtcgtgatggtaaccgtacgttggtcgagatcccggatgagcacccgcaagggatgggcgtcacagggctactcaagagcgaattatttggtttgtcatccacactggatatcgaaaccgagcgacgcctattccggcgcaatgaactgttcgtcctgtcacctcgctcccccgaagaagatgaggaactgagccgcttgtcagcagagctggctgacctgggcttttcgaccgccgacttccgtgatcccgactacgcaatgtttgtgcgcaagatggcgcaacaccgccgtttccgcaaacccgtgctcacacccgaggaacaggccgagcaggatgccattgccgattcgatcattgatgagattttgcgagaggaggatggtgagtga

SEQ ID NO: 88871 - DNA, 858 bp, Enterobacter sp. GN02730
gtgatttttatagatcttgaaaataagctccctaccgatgccgaccttcctgcggatattcgctggtcaccagccgattgggatgcttggttgaaagagtctgatcgcctggtagacgaacttgccaagctcgatgctgcggaaacaattaaagagcgtaatgagttgatcgacaaacacagcagccattggggaaaactgaagccttggttactggcgttgtctgggggtaaatgctggttttcagaggtacgcgaactgtactcacattacgatgtggagcattttcgccccaagaaagaagctaaggcattggatacaagtctgcgtgatggctactggtggctggcatttgactacatgaattttcgcgtgtgcggcaatgttggtaaccgcaaaaaaggtgggtggtttccactcaaggacggctcactttgttctacctattccgaaccttgtgaagaatccgaaacgcgttatctactcgatcctattgatgacgatgacgttgcgcttatcgccttcgacgaagaagggaaggtcattcctatgccaggttcctctgcctgggagcaggagcgggtcaacgagacggtaaagcgactcaaactcaatgaacatccccccctggcagaagctcgtcgcaaagtctggcagcaagttgacagactaattgatgattttacacaagccaaatcccgttgcacgacaggcaataatccagcagccaaagcaaagttgatcgaagttcgagctcgagtgcgcgcaatgaccaccactacagctgaattatcggctgttgctcgttggtgtttgctggtacgcaacgatccacagctttctaggttggttgggtga

SEQ ID NO: 88872 - DNA, 1227 bp, Enterobacter sp. GN02825; identical to SEQ ID NO: 87698

SEQ ID NO: 88873 - DNA, 654 bp, Enterobacter sp. GN02825; identical to SEQ ID NO: 87699

SEQ ID NO: 88874 - DNA, 1662 bp, Enterobacter cloacae
atgaaagtcgacaaactgcatattcgctcacgctttaaaaatcttgaagacgtgaaagtggactttgacgaagaccatctgatgacagttgtggtggggcgtaatggttctggaaaatccaacgttcttgaagccttggtagcaatatttagaaatctcgatctgggcgaaactccccctttttcttacgaactgatttatcgcctcggtgagcctcataagtccaaccaacccagcgagcgatggcttgaaataactatagatgccgatccagagcgcggtacgctggcaaagcaatatgaagtactggtgcgcgatcttctaagtaacaacatatcagaagacatgtttgataaaccgcctttagggctcgctgttccattttcaaaagtaaagcgtggtaaaaatggcaaagcaccttatctgccaaactatgtctttgcatactattcaggccccagcgatagacttgagaggcattttaagaaacatcgcacggatttttaccgtaggttacttgaggataagctggaactaaaaggtgacatccgaccgttgttctacgctaaacctcaccatagccaattcgtgctccttgcctttttcttatcagaaaaagacagtgccgaaaaagattttttgcgacagcatttaggtattgaaggactagatagtattcattttgtgatgcgccaaccaggttgggctaaacagaagggcgaattattctggggagccagaggcgttgttcgtcgttttctggatgaactgatacaacacacgctgtcaccgataaaagtgacacgccaagaagatacatcgttaaccggaagtaatattcgcaatgagttcttgcacctgtttttacccgatgtagatgcattgcgcgaatttgctaaagatctcagtgccgatgagctatttaaaatgcttgaaagcaccttactttcagaaattatctctgaagtcagcatacgagtgaaggtttcaagtagcaaagtacctctcacttttagtgagcttagtgaaggagaacaacagttactcactgtattaggcctgcttaaattcactggtggtaaagattctttgtttttgctcgacgagcctgacactcatcttaatccgtcatgggccgttaaatatcttaaatttctgcgtgagtttgtacctaatcacgagaccagccatttgttgatggttactcatcaccctctagctattgctgaattagagaagcagcaagttcaggtaatgtggagggactctaattttcaggttcatgcacatgagccagaggaaagtcccagaggtatggggtatggtggaatacttacaagcgatatgttcggtctacgaacaacactagataattctactgaacgtctgctgagattacgccgtagctttaccgaaaaacaagagttaacgtctattcaagcagggcgcctaagaaaaattgatcgggcgatagaaggtcttggctttacgactgcacattgggatgaagagtatgctcagtatttacgtgtgcgtcgggaggttgagatggaatctgaagccattaccgtcactccagaacttaaacgcattcgaaaagagcgcgccaaagagatcgttacacgcatactcgctgcagaacgggacgaacataaaaaatga

SEQ ID NO: 88875 - DNA, 864 bp, Enterobacter cloacae
atgaggcatttaaatattgattttaaccaactcacactgcctgagggttggcaagataaagcacagaatttatcaaaattactattacaggcggaaaatgcaaaacaacgttctgagattattgagaaaaatcaggaccattggaaatctgtgaagcctgtattagcagccctatttaattacaaatgttggtatacagaagcgccacagcagggaacagatgtggatgtcgatcattttcgccccaaaaaacgtgtacaagaaacactatcaacgacaacacctcatgatggttactggtggttggcatttagtcttcaaaattatcgctttagctgcattgttgcaaaccgtcgaagaactgatgtaggtactggggtgacaggaggaaaagccgatcactttcccttgtgtgatgaaagcgtaagagcaaagacccctgattgtgacctagaagaagaacaaccaatattgctggatccattaaaggctaccgatgtattgttgttgcagttcaagccagacggtgaagccatgcctcggttttcagaagaaaatcatgctcgtaagtttatgcgagcggatcgatccattatattttataacctcaatcattcggattttgtccgttgtcgcatagaactacgggatcagattgaaaaggatgttaaagccgcaaaaaggtacttcaacaaattagagaccggcgatgcagacaacgaccttgcatatgaacagacaatttgtcgcttacgaaaaatgaggggtatagaagcaccattctcaagtttttgtatcgcttatttagatgggttcaggcataagccggaatatgatggcgttcttgatgcagtctatttataa

SEQ ID NO: 88876 - DNA, 1305 bp, Archangium gephyra
atgaggatccagcgcatcgaactcgagaattttcgcagcttcgcgtcccgtacgttcgatctcgcgccatcattcaacctcctcatcggtgacaacggcgccgggaagacggccatcctcgatgcgctcgccatcggcgccggggcgatctttctcggcctggatggagcatcgcctccgggcatccaccgcgatgacgtgcgccgtgtcacgcatgggttgggggatgtgccctccctcgaggccatctatccatcgaggatcacctgctctggaaccgtcggggacacgtccatggattggacgcggaccctcgagggcccgaagaagcacacgacgcacggcggcgccggtgacctggcccggctcgcggagaactggagcgagcaggtgcgcgctggcgcggagctcaccctcccgctcgtctcgtactacggcacggggcggttgtggctccagcggcgtacgcggcattccacggcttccgacggtgcgcgcgtcctgcggcccggctccaggcttcgcggctacgcgggctgcctcgatccctcctccgaccacaagggcttcgtctcctggttcaagacgatggagctgatccagctccaaaaaggccagaaacttggaacactcgatgcggtgaagcactcgattcgcaagtgcctgcgcggttgggacgaggtgctctacgacgtacggctcggtaccctggtggcccgtagtcaggacaggcagttgcctttcgagatgctgagcgacggcgtccgcaacatgctggccatggtgggcgatatcgcgtaccggaccgccaccttgaacccgcacctgcgggagcaggccccttcgaagacccccggcatcgttctcatcgatgagctggatctgcacctgcatccgcactggcagcgggaggtggtggatgatctgcgcagtgtctttccggccatccagttcgtggccaccacgcactcgccattcatcatccagtccctgcgcaagaacgagctcatcaacctcgatgatccggcgagggagacgctaccgagccgcagcatcgaggacatcgccgaggaggtgatgggggtcgaggttccgcagcgcagccaccggcacaaggaaatgatggcggcggcgcgtgcgtactatgaggcgctcgaggaggcgaagggcaccagtggggagcggctggaggagctcaagcggaggctggatgagctctccgctccgttcagcgacgacgtcgcctatcacgcgttcctcgagatgcagcggcgcgcggcgaagctcccgggagatgccgggtga

SEQ ID NO: 88877 - DNA, 699 bp, Archangium gephyra
gtgaggcccgtggtgcgcggctcctggccgttggacgccgagggcaagccacggtccttcccggagtactccgaggcacgaggtgagctgatcgcccggatgggtgagtactgctcgttctgcgagagccagctcaatgcgagcctcgctgtcgagcacgtccttccgaaggagcgtcatccggagtacgagctggactggaacaacttcctgctcgcgtgcgtgaactgcaacagcacgaagggcgacaagcccatcaaactggcgagctactactggcccgatcgcgacaacacggcccgcgccttctcctatggtgccgatggagtcgtgagacccgcaccggggctgacggatgagcagcagcagatcgcgcaacgcacgatcgggctcaccgggctcgacaagacacccaagacccatgcgaaggcgagcgaccggcgctggatgcatcgccgtgatgcatgggggcgtgccgagcgcgcgcgtgtctgtctcgccacccacgacaccgaggccatgcggcaaagcatcgtcgagcaggcgacggcgctcgggttctggtcgatctggatgacggtcttcgccgcggatctggatatgcgccgacggctcatcaccgcgttcgtgggaaccccggtggattgtttcgatgcgcgaacgctggaaccggctcaccgcccgggaggcgcgctctaa

SEQ ID NO: 88878 - DNA, 1245 bp, Archangium gephyra
atgctcgaagggctgaagctggagggagtggggccgagccctcggatgtcgttctcgttcgccccgcgtctcaacctgctgaccggggacaatggtctcggcaagacgttcgtgctggatctggcgtggtgggcgctgaccgcccatgagcgggagccgctccccgccctgcccaggaaggattggccgggaagggccagggtcgaggcatcgatcgtcaggaacgatggcaagcgccataccgttgttcagaccattccaccgcacctggttgattcgagtggattcgccatcaatccaggcctgaccctctatgcacgtgtggatgggagcttctccgtgtgggatcccatccgtaacgacctgcgctggcagcacggcatgcatacgccactgccagagtatgagttctcacgggaagaactctgggacggtctggcgcggaatggccgcgccgtgtgtaacgggctcattcgcgactgggtgtcctggcagctcaagaggtcggagcccttcgagcgtctgcggcgtgtcctccgggtactctccgcacacgagcaggagcccttgacgcctggagagcccacgcgcatcggtatcgacgacgtgcgggacatccccacgctggagatgccctacggcaccattccgctcacccacgcatccgccgcggtcagacggatcgtcgggctcgcctacctgctcgtctgggcctgggaggaacaccaacgagccgccgagcttcttcgggaggagacatccaaatccctcgtgctgctcgtggacgaagtggaggcacaccttcatccccggtggcagcggctcatcctgccgtccctgatgtccgtggccagtgagctgcgtcccgacgtcaaggtgcagatcctcgcggtcactcacgccccaatgttgttggcctccgtcgagccccacttcgatccggagcaggacgcgctcttcatgttcgacctcgtcggtggcgacgtgaaggtcacgcgtgctgactggcggccccggggagatgccaacgcctggctcacgtcggaggtcttcgatctcaaggagccccgctccgtggaggccgaggaagccatcacccgcgccaaggccgccctcaaggacccgcagctgcccatcgagaaggtgcgggagatccacaacgagctctaccggctgctcaaggatacggatcccttctggcctcgctggctggcccgtgcggaggctgcggggatcgagccgtga

SEQ ID NO: 88879 - DNA, 582 bp, Archangium gephyra
gtgatccacgtcgagccccagcccgagccttcggacttcgactccaaggtccgtcagccgggtcagtccgatctcccttcaccggaaggtgaattgcgtccgcattggcaacactgcgcgttacaactctggcacgcctaccgcggcatctgtgcctactcgagtctctacatcccgcgcgggacgggcgcgcgctcagtcgatcacctcctgccgaagtcgaagcaccgcgacctgacgtacgagtggtccaactaccggctcgcctgtgtccggatgaatgcacgcaagaatgcgctggagagcgtgctcgatccgtttgaggtccaggatggttggttcgcgcttgagctctccacgctccaggtcattccggcagaagggctacctgcggatttgcgtcagcgcgtcgaggagaccattgagcttctggacctgaatgatggcgaattcatccaggcccgtacggagtactacgaagtattccggagcggagaaatgccgttcagcctcatccggaaatacttcccgttcctggccaaggagctcatccggcagggagttgtacgagagagcacctga

SEQ ID NO: 88880 - DNA, 1731 bp, Pseudomonas aeruginosa; identical to SEQ ID NO: 87804

SEQ ID NO: 88881 - DNA, 813 bp, Pseudomonas aeruginosa; identical to SEQ ID NO: 87805

SEQ ID NO: 88882 - DNA, 1323 bp, Robinsoniella sp. RHS
atggtattgaatacgctccacattagaaattatagatgttttgaggatacagatattaatttagataatcatttaacattgtttgtcggaaagaatggggcagggaaatccacgatactagatgcaatagcgatagcaatcagctcttttttatgtggtattgaaggaactgtgagcaggaatattcataaagaggatgcgagatataatttttatgaattagatggcattattgattcacagcaccagtttccggtagaaattacaggctatggtatatgtaacggtaaaaagaacgtaatatggacacgttcattaaattctgccggaggaaaaacgacattaaaggatgcccatgagatcattaatattgcagagcagatgcagaaacagattatgctgggagatgcgcatattgttctgcctatattatcctattatggaacaggcaggctttatgcccagaaaaaagagaagagaaatttaaaagcccttcaaaagtttagtcggcaggtgggatacctggactgtatggcagctgagtcaaatgaaaaaatgatgctgaactggtttgaaaaaatgacattgaaaagcctgcagaatcagcaaaagactggcagcgtagaaaaaataacacaattaaaagtagtggaagaagctgtctgtaaatgtttccgggaaattagtggagctaaagatcctactatctcctttgatcttgactcacatcggatcataatggaatatacaaatgatgccggagaaaaatgtagatttgcacttaatgagatgagtgatggatataagaatacattaagtatgattagtgatatagcttaccgaatggcagtactgaaccctcagctgggagagcaggtactggcggaaactccaggtattattttaattgatgagattgacctgcatcttcatcccgagtggcagcagacaatattaaaagatctgcagagtgtatttccaaaagtgcagtttataattacttcacacgctccggcggtcataaattctgttgagaaggagcgcattcggattcttgataatagtaaagtttatatgcctgtagagcagacctatggaagagatgcaaattctattttgagagaagtgatgggagttggggaacgtccagcggatgttcagcagttgttgtcagatttctatcaggccattgacagagaagaagtaataaaagcggaggaattgttaaaccgattagaagaaatcataggaaatagcgatcctgaaataagcggtgcaagagtaacgttggattttgagaaaatgcaggaggaatcacagtga

SEQ ID NO: 88883 - DNA, 672 bp, Robinsoniella sp. RHS
gtgatattaattcggaaagaaaaggaaccgaatagtctattacagtataggaaaagtaatcaagaagcatgttatgaagatttgccgtcgaaaccacgtgaagatattcgtagacaaatgtggtgggaacaaaaaggattgtgtgcgtattgcatgtgtaagcttaaggcgccggaagacgtaagaattgaacattacagcgccagacatcccaagagcggaacatatgatgcaacgaatacattggactataaaagtatgctgggagtatgctatggaaatagccttcatccaggagtaaaagaggaagacaagacctgtgatgcccacagaggaaatattccgttgaccgtagatcctcgtgacatttactcgattagaaaaatccgctatacatcagatggttatattacctcattggatgcagagataagaaaagatgtagaaaagacactcaatctaaattgtaaagccagatcactgccagagaacagaaaaaatgtattgattcaggcaaaacgtgagattaggaatatgtgtggaaataggagccatgatacatatttggcagtattagagagtgtgtataaaaggtatgcagaacaaaagatgctcacaccttattgtggaattgtgatttcgtggctagagaagcaacttagcataaactaa

SEQ ID NO: 88884 - DNA, 1413 bp, Aliivibrio fischeri; identical to SEQ ID NO: 85910

SEQ ID NO: 88885 - DNA, 636 bp, Aliivibrio fischeri; identical to SEQ ID NO: 85911

SEQ ID NO: 88886 - DNA, 1464 bp, Photobacterium aphoticum
atgagattccaaatattgaaggtaacgctcgataacactgaatatgagatttcaaagttcaaagaaagcaaaaataatcttattagcgttatgacaggaaaaaacggcgcaggaaagagccgcatactagaatttatcactaatagtttttatgttagtgatgactttctactagagtacccagagaactggagttttcatttcaacaatcctaactctgactatagtcacaatcaagttatgtaccgtgctggtactgaagtgtgcgaaatgcagaggataaacagtaaactcgcgagtatatttaaaacatcaaagtttattgaaaaccgatatgatctttttcctagtcgattgatatgtttatctacaagcccattcgatcgctttcctttaaataccaaaaaagcatccaaacaaagtatatattcatatataggaatgaaaaacagtaagcgtagtagttctttagtatccctagtttctaatgtcattgatagtatgttcaaggaaccagagaagattgaaactaatctcgaagttataaaaaaaaccctttcatatttaggatatgggaatcgtatattagtatcttatcgttccaactttaagttaaacgaaactgaactatcaagacaggtagtgtcagatattctatcaagtgttgacggcccagtatttaatgaaagaagaattggttcttatcaatgggatcaggctgtagaagaagtctatcggagcattcagactttaatttctgctaatggttggaagtggaagtcatcatttagtatcccgataaatttatcaaaagggaattttttagaagatgattatattaaatcgatccaagttttatcgatgtatgaattgttttcaattaagagcttaaagttatctatatctggagataaccgaaagtttgtagactttacacatgcaagttctggtgaacagtgcttatctttaatgttgttgggaattgctagtcaaattgaagatggctcattgatctgtatcgatgaaccagagataagcctacaccctgagtggcaagaagagtttgtaccactcatcgataatttgttctcaaattacaaaggatgtcactttgtgattgctacgcactcccctttgattatttcaaaacttgttggtgatcattgcagtgttttagaccttgatagaaatgaacagatagaattatctaataacagaggttattcttctgactatcaattggcaactctttttaaatctcccggatttaaaaatgaatatttagtcaatgaaagtctagatattctcacatccttatctaaagaggtgaatgtcgatgaagatgtactgcagcgagctgaagtactgattaacttactggagaagttagatgagatagatcctgtttattctctaatctcaacaattaaaaaagtaattgaggtcgttgttaatgatcgataa

SEQ ID NO: 88887 - DNA, 630 bp, Photobacterium aphoticum
atgatcgataacgaagttgaatattcagaggaacaaattcagctaataactcagtacttggaaagagagaatattagcggagatgactggggaaacgaagaattcaatgaaataagaggggtaatcaagaatcattacaaaatagaacaaggttataaatgtccttattgtaccgtcgtttatcctgttaatcatggtatggcttgggatatagaacatattgtagctaaagataaaaaagttcagtttatgtttgaacctagaaatctttgtgtagcatgtaaagattgtaatgccgcaaaaagttcaaaagaagtactcaccaacccaactagggttagattccctaaaaatagtagggactataagatagtacatccacattttgatgagtatagtgaacatataagtgctgttgttcctggtgagttttatagacctttaacggagaagggggagtttacaattattacttgcagattactgaggttttatggtgttgttcaaagagagcaaccagaacaagaaataaatgacttggccaaggttctaattaattcagagggggcagcaaggcgtgtaatagaagacgaattggttcgtagaattacagcaaaaagaaagccataa

SEQ ID NO: 88888 - DNA, 1332 bp, Aeromonas hydrophila
atggccgttattccacagttcagattcaaaacgcacaacgggcaagaaaaggccgtcgacctaattttgccaattgccactgtacctaattcgctctacacgacaaccattgtgaccggccagaacggctcgcaaaaaagtaccttattgagagaactggcatattctcttatttcatcccccgacgcttggagcccagtaaaaaatgagatacgttactcgaatgtgctttgtatatctggttctactgctgaccgatttccacaaaaggaggaaagcggtgggcgccgttcaaaattcgacgttccccattacacctatgttggtcagcgtatttattcaaatctgctaagcaagcgtgctccattagagactatacttggtttcgcactagccccagataaacgcaatcgattccaatggagattcttctccgaagctcacgatattgcgggggttaattcaaacgtgcaatgtacgttaagttttaaacataccactaatggaaaacatattgatgtattgggcgatattcaagccattacaaaagatgataaccatcgctcatcaaaaagacctcttgtgtcatatgcaatggcgcaatggttacttgacaattttacctatgaagaattcaacacactcaccgccatccttaaaaaacaaataccaattaagcgtcagtcaatatctctagaactttccgcagaaggtccaacctgctcacaagttgatttgaatgttcttcgacttggcttgctaatcggcttattttctctgagagactttcttgtacatagtcgagtgactgacaaaaaattttctgtgctagagttgagttctggcgagttcagcatgtactccactattctcgcagttggattcgggattgagaaaactggcgtgattttaattgatgagcccgagaataatcttcacccacaatggcagcgagatctgatggaagccatcttcaacgtgtgctctgaagtgcttgagaacagccatatcattatcagcacccattctcctttaattgttggtgctgctcgtccaggtagtttcatcgtagacatgacgaatgaacaccccagtacacaggtcgtctcgtatggagcgtccgctgatgagttacttctagctcagtttggtgttggatcgagtagaaacaaggttgtggtcgatacggttcaaaaggcagttgctatggttgaaagcggtaactttgaaagtgctgaattccgtcagcaaatccctcaacttgagcgtatccgagattctctttcggccgatgaccccatgattaacgtcattgaagcgcttcttgaataa

SEQ ID NO: 88889 - DNA, 726 bp, Aeromonas hydrophila
atgaacaccggtttcgagaaaataatcccaaccccaattgttttagcccaaacgcttgttgcgttaaattcttacacttggaattcaggcgcaaatgaggttataaactttaaagggaatctgaaagtagctctacggaaggctcaatgtggtagatgctgtttttgtcggcgtcaattatatgatgactacgcaacccatcttgaacattttttagataaagaaagttttaatgagtatcgttttgaagtcttcaacttagcattatcttgtggaacttgtaacggtaaaaaaaatggggctttctcaacctggagtaaaaacaacagaagggcggctgcaaattttattgggcccacaacaccatcccggttgagcccatttttaaatgggcctttgtcgccgaacgctcaatacccaaaccagcccgctgcattcagctgggtacaccctcattttcatttatattcagagcatatttcaatttcccgaggatgggtgttcaaatacctgacaaatgtgggaaaaaatacgattgatggtgtgaagctaaatgatgtaggtgaaattgaaagacgtgctctagcagagaaacttgaaaaccgtggtagtcggctgtcaaagctagtctgtgccatgtctgaactagaatttcatcgtgccagtgacgtaggaacagccttggccaaggccatacgaagaaagcgtgcttctatagggcaataa

SEQ ID NO: 88890 - DNA, 1443 bp, Enterobacter cloacae
ttgtttacactattatcatttaatattacacacaaagagaatgaaatttatgactgcatatttacagataatcaaaggcacatccgaaatctcccgttgagtagtattgtcattggagaaaatggttctggtaaaagttatttgctatcacaggttgcagatttcttcagatttattcaaaggatcataagcaaagaaaagaaaccatattacaaatatgaatttgcatcagtgaaatatttgattgattcagatttaattgttataaaaaaggacaggaataaggttttttgttttgttaatgatgttccctctgatatatcccacgtaagattaccaactaaagtaatagctatgtcctttatggttaatgataagttttctttttcgaggttcgaagaagacgatttttatgattatcgtggagttagagcaacgtctaatgcttcttatactagtacaattaaaagaatgataaccaacgcattaatattgtcgataggttatagagataaactaaaggcgataaaagatactttgcattttttgggtatgagtgaaaaattagctattacttacaatctcaataggaaaactttattaaaaagacaaccgccacttaatgctatactaaggaaaatagatgcaattttgcgacgaaagcagtacgttaatgagaatgagttttacaaaataaaagataatcctgaagtcatacttcatgatatagctattttgagcgaggaatgcagggagaaaaatggtaggatacatctcactcttgaccttagtgatgaaggggagggaagtaaaacatcattattccagtctttatcacgcttggaaaagttagagtttatatctaaccctgacgtggaattctataaaaaagataatttttcatttgaagaaaccagttctggtgaaaagaatattatttttaccatccttaatttaattgcaagtatcaaaaagaattcattgattttaattgatgagccagagttaagtttgcatcccacctggcaaatgaaatacattaatttcataaagaaatcaatagcttataattttgattgtcatcttatatttgcatcgcattcacattttatggtgtcagatttagaatcaaaatcttcatcactaacatctataaatcaatgtaatgggaaaagaatatgtgaacatattgaatatagcacatatgcttggtctgtagagaacatactgtacaaggtttttcatttacgtacaattagaaatgctcaagttgaaatggatctttatgaattatcaggtctcatatctcaaaaaagctcagatattaagagagtggagaaaatacttacgcatttggaaaggatagtattagatgtaaatgatcccttaaatgtgattatagaacaggggcgaatctatattggtgacttccatgataaatag

SEQ ID NO: 88891 - DNA, 573 bp, Enterobacter cloacae
atgaataagataaactcgcttaaaccttttgagggtgggagctgggatagaaaagatatagcgattattatttttaaacggttattaagaaagcagttattaacagcccagaatgattgttgtgcatactgtggtttaccattaggtgaaacagggaaaacagaaattgagcatttagttgcaaaaggtggacctaaaaggccaaagcatgtagagtttacttttgaagttgaaaatctttatttatcgtgtaatttatgtaatagtcctttgaaaaaaggcactaaagaaacacttatttataaagatcctatctcttattctaactgtacttttagtattgtacatcctagatatgacacacctggcatgcattattcatgggttgtaagcgctgtagaggttctcatacaaggaatttccgacaaaggtcgagagagtattaaaatgtttaaacttgactcaactcctcataatgaagcacgagctagaatagaaatgtcaaggagatataaaatgctcattgaccctccgcaaattgcactgataaacgcaatactccaatataattga

SEQ ID NO: 88892 - DNA, 1443 bp, Enterobacter cloacae; identical to SEQ ID NO: 88890

SEQ ID NO: 88893 - DNA, 573 bp, Enterobacter cloacae; identical to SEQ ID NO: 88891

SEQ ID NO: 88894 - DNA, 1398 bp, Escherichia coli; identical to SEQ ID NO: 86202

SEQ ID NO: 88895 - DNA, 732 bp, Escherichia coli
atgaggcatgtgatcaaaactcaacttgggtccgttgccttactgaccgcacatgaaaacccaccacaagatgctgatcaatcaaccaggcgctggcgaaatttcagaagagataaagccgctgtaatggtccagctcattaacgagcagtatcacctttgttgctacagtgaaatacgctctgatcttcgtggtcttggttatcacattgagcacgttgagaataagagccagcatccagaacgtacttttgattatcagaatctcgctgccagtgcattagattcaggggagaacggcggtttatcttccctgaaaggaaaaaatgcttttggcggtcatgcccaaggaaaacaagatgttgtagatatggcaaaatttatccattgccatattcgcgattgttcccgttattttgcttacctttctgatggtcggatagttcctgctgatgagttaaatgcacaagaaacggagaacgcgcaatacactatcgatctactgaacctgaacagcggattccttcaaacggaacgtcgtaatcattgggaagagctggagcagctttttgatgaacacattgaaaaagattgggatttgcagcaattactccagcttgatttggtttcaacaccagaccataaactgcatgaattcttcagcattacacgccagtttttccagcaagaagctgaacaggtattacagagccacgccccagcattaatttaa

SEQ ID NO: 88896 - DNA, 1398 bp, Escherichia coli; identical to SEQ ID NO: 86202

SEQ ID NO: 88897 - DNA, 732 bp, Escherichia coli; identical to SEQ ID NO: 86109

SEQ ID NO: 88898 - DNA, 1398 bp, Escherichia coli; identical to SEQ ID NO: 86202

SEQ ID NO: 88899 - DNA, 732 bp, Escherichia coli; identical to SEQ ID NO: 86109

SEQ ID NO: 88900 - DNA, 1659 bp, Klebsiella pneumoniae
atgaaagtcgacaaactatatatccgctcacgctttaaaaatctagaaaacgtgaaagtggattttgacgaaaatcatctgatgaccgttgtggtaggtcgtaatggttccggtaaatccaacgttctagaagccttagtatctatattccgcaatcttgacttaggtgaggcgccagcgttttcatacgaactgacttatcgattgggtgaacctcacaaacccaatcgacccagtaatcgatggctggaaatcactattgatgccgatccaaatcgtggaacgctggcaaagcaatacgaagtacgtatgcgcaatcttttgaatgacagcttacctgaagacatatttgatgaaaagactttaggtatagttattccattttcaaaggttaagcgcaataaagaaggtaaagcgccgtacctgcccaactatgtgtttgcctactattcaggtcctagtgatcgattagaaagctacttcaagaaacatcggacagatttttatcgtcatttattaaatgataagccggataaaaagctaaatcttaagggcgacattcgtccgcttttttatgcaaaaccctaccacagccagtttgtactcttggcatttttcttatctgacgaaaatagccctcagcgcacttttattaaggaacatttaggcatagaagatttagatagcattcactttgtgatgcgacaacctggctgggcaaaacaaaaaggcgagctattctggggtgcacgtggcgtagtccgccgtttcctagatgagctaataaaatatacgctagcacctataaaagtgacacgacaagaagatacatctttaactggtagtcatgttcgaaacgaattttttcatttatttttacctaatgtcgaagtactacacacatttgcaaaaggattaagtgatgacgagctttttaaaatgctcgaaagtacactgctatcagaaattatctctgaagtaagtattcgggtgaaagtatccagtagcaaagtacctcttactttccgagaactcagcgaaggagaacaacaactactaaccgtgttgggactactcaaattcaccggcggcaaagactccttgtttttactcgacgaacctgacacccaccttaatccgtcatgggccattaagtatctgaaattcctgcgtgaattcgtacccaaccatgaaactagccatttactgatggttacacaccatcctttggctattgctgagctaaagaaacagcaagtccaagtcatgtggcgtgatgatgagtataatgttcactcacaagaaccttacatagatccacgtggtgctggttttatggccacacttactgaagtttttggtctaaatacaacattggatcttgagacccaaaagttactggatgataggaacgaactggcccacatcgaaagccgaacagaagctcagagcaaccaactagatctccttaatgatgagttaaacagacttgggttttcatttgaaaacagagatccattatacagtgagttccttttagcatggcaagatctaaaatacagtgaaaggccacccttaacgccagataaagcagctcagagacgagttgccatgaagaaggtaattgaggtacttcaagctaagaaggctagcgaatga

SEQ ID NO: 88901 - DNA, 843 bp, Klebsiella pneumoniae
atgattttcatcaaacgagacgctgcgcttattcctgaaaaggtacttaatgttgctcagcgggcacaaaatgctctggaacaattacccgccgagcagaggaaagatttcatcaagaaaaagtctcatatatggagaggcttttcaaagtatcttgccaaaatgtcttatggtaagtgctggtattctgaggctaaagatgcgggtgcaaatttcgatgtagatcatttcagacctaaagcagaagcaaaaagggctgaaaatttagtcgatgtcgaaggttatgcatggttagcatttgattggaaaaacttccgactttccgctcaaaattgtaaccgtttgaacacggatgaatcaggtaacaccgtaggtaaaggtagctggttccccctgctaaatggtagccctaaagcaagctgggataatcgttgtattaatgatgaaagagtcactcttctggaccctgtagttcaagctgacctcacctatatagactatgacgacaacggtagatttacttcgagtagacactgtattggacaagcagcattaaggatacaacagtctgctgttatttatggtcttaattttgagaaaatgcgtgaagcacgatttcaggtcatgagagaagcaaaagaacttctcgaaactattcaacaaagtgttgaggacttagatccattaggtgatgaagcaccaatgagaactatagagcgacagatagaacaactgaaggccaaaacacgggctgatgcaccatttagccgtgcagtgagagcacagcttataaaacttggtgcagaggattacttaattgatagaagtttggatgcagcttga

SEQ ID NO: 88902 - DNA, 1659 bp, Klebsiella pneumoniae; identical to SEQ ID NO: 88900

SEQ ID NO: 88903 - DNA, 843 bp, Klebsiella pneumoniae; identical to SEQ ID NO: 88901

SEQ ID NO: 88904 - DNA, 1659 bp, Klebsiella pneumoniae
atgaaagtcgacaaactatatatccgctcacgctttaaaaatctagaaaacgtgaaagtggattttgacgaaaatcatctgatgaccgttgtggtaggtcgtaatggttccggtaaatccaacgttctagaagccttagtatctatattccgcaatcttgacttaggtgaggcgccagcgttttcatacgaactgacttatcgattgggtgaacctcacaaacccaatcgacccagtaatcgatggctggaaatcactattgatgccgatccaaatcgcggaacgctggcaaagcaatacgaagtacgtatgcgcaatcttttgaatgacagcttacctgaagacatatttgatgaaaagactttaggtatagttattccattttcaaaggttaagcgcaataaagaaggtaaagcgccgtacctgcccaactatgtgtttgcctactattcaggtcctagtgatcgattagaaagctacttcaagaaacatcggacagatttttatcgtcatttattaaatgataagccggataaaaagctaaatcttaagggcgacattcgtccgcttttttatgcaaaaccctaccacagccagtttgtactcttggcatttttcttatctgacgaaaatagccctcagcgcacttttattaaggaacatttaggcatagaagatttagatagcattcactttgtgatgcgacaacctggctgggcaaaacaaaaaggcgagctattctggggtgcacgtggcgtagtccgccgtttcctagatgagctaataaaatatacgctagcacctataaaagtgacacgacaagaagatacatctttaactggtagtcatgttcgaaacgaattttttcatttatttttacctgatgtcgaagtactacacacatttgcaaaaggattaagtgatgacgagctttttaaaatgctcgaaagtacactgctatcagaaattatctctgaagtaagtattcgggtgaaagtatccagtagcaaagtacctcttactttccgagaactcagcgaaggagaacaacaactactaaccgtgttgggactactcaaattcaccggcggcaaagactccttgtttttactcgacgaacctgacacccaccttaatccgtcatgggccattaagtatctgaaattcctgcgtgaattcgtacccaaccatgaaactagccatttactgatggttacacaccatcctttggctattgcagagctaaagaaacagcaagtccaagtcatgtggcgtgatgatgagtataatgttcactcacaagaaccttacatagatccacgtggtgctggttttatggccacacttactgaagtttttggtctaaatacaacattggatcttgagacccaaaagttactggatgataggaacgaactggcccacatcgaaagccgaacagaagctcagagcaaccaactagatctccttaatgatgagttaaacagacttgggttttcatttgaaaacagagatccattatacagtgagttccttttagcatggcaagatctaaaatacagtgaaaggccacccttaacgccagataaagcagctcagagacgagttgccatgaagaaggtaattgaggtacttcaagctaagaaggctagcgaatga

SEQ ID NO: 88905 - DNA, 843 bp, Klebsiella pneumoniae; identical to SEQ ID NO: 88901

SEQ ID NO: 88906 - DNA, 2538 bp, Klebsiella pneumoniae
atgacaaatgaccatgaagaactagaacttgctaaagctcaggcaaaagaaatatggaagatccttgattatgttcgaggagcatcacctatatctaattatcgctcattagcgtattcaatattcttcgtacgctatcttcaatccaatacaggtcagcattttgaggcaggaaggttagactcttttaatgttataaccctgtattcctacgatcttataaactatgctgttcaacttggattgattcatagcgacgtatctcaattcttaattgattatttagaaaacacactccattcatttgtcaatattgatgaatcttttgttcgctatgcaattagagatgatctactcaataaaaccactacaatagcgtctctttctttgtcagaactggatttactttttgccgagaatgaaggtaagtcaggaggtgaattttatacccctatagacgtcaacttattggttaaaacattagggttgagttatcaaccaaagtcaatatgtgatccatttgcaggtgctggaaatacagcatttccttttgccagcactggtattgaaaaagttagaattgacactcaagaaattaatagagatgcttactttaaactagtaataagtagaaccatcaggaaaatagaaggtcgagactatttcggcgattccctatcacaacccttatatcaggaaaataaatacgatctaattgtttctttcccaccctttggcatgaagatacctaaagctactcgaaataacatttactataaaactagtaataagtggttagatattgctgaaatcttgccagaaagtagaagtgattggtttataacattatcaatgcttccagcccttactgaggggggtaagatactagtaggtatgtcacttggagctttgacaagaacaggctctgaggcaaaggtccgtgagtatttagtctctcgcggaataatcgaacaagtgattcttttacctaaaaatattcattactctacggctatctcaactgtactacttgttctcaactcaggagcaagtaatataaatgccagaagtattaaatttgtcgatgcttcactattttacgaacctgctcgtggtcgaaacaccctgacaacgcaaaatatcaatgaaatcgttgaagcttgtcataaagatggccgatttagcattagctcatcttatacccaaatagcaaatagagactttaatttagacccctctctttatgtacgtaaggatctcaaaatcagtgagatttctttaaaaaattttagaggatactctgactttaaagtttcgatacatccttctttaaatgtattggttggtgagaacggcgttgggaaaacctcgatattagaagcattagcatgtggccttggtcctttccttactgctatgcctgatgctaaaggaaaactaataaaaaaatcagatatccatataagtacaaaaggaatcgcaaattatgctcgaatatcgattgaaacaacatcaagtttaagttgggatcttgtggcaaaggggattgatgtttacgagccccctaagataggaacatcagcattaacaagctacgctactcatcttgtagatagtcagtctgaatatccactcattgcttattatgggactaaccgtgcacttacttctaccagttctaaagttgcaataaacccattcgaaaaagaaaatcgtggggaaggatatgactttgccttagatgctaaagtaaactacggcatcttaaagaactggttttcaaaaatagaggttgatgagcttcgaaaacgtgatgaactaaaagaccataaattcattcatccggcgaagagacttgtttcagaggctgtttatcagatcgttgatcgagctacatgcttggagttcgacaaaaatagtaacgatgttatggttcattggaaaaatgagcagggagagtgcgtaaaacttacattagaacaactaagtgaagggtatagaaatgtggtatccctgaccattgacctagttagacgtgcttatttacttaatcctactaagccgaaaccgctaacagttaatgggatcgttttaattgatgaaattgaacttcacttgcaccctagatggcagcaaaagattttaaatgaccttactaagctatttaagaatattcagtttattgtcacgacacatagtcctcaagtcttaacaaccatcagtgctgattgtatccgcattgtttccgtcaatgctaacgaagcaaaattagtgacaggaactactacttacggttctgaaagctccagaatgctggaagatgttttaggtggaaacaatcgtgcccaacaccttgatatagttaaaaaactaaaccgttatacggaattagtagaggcagaccaatgggataccgatgaggcattagaactcaaaaaagagttatataaatggggggggcagacagaagacgagcttctaaagttagaaactgatattcgaattcgcgagttcgagcgtggcaatgaaaaaaattaa

SEQ ID NO: 88907 - DNA, 789 bp, Klebsiella pneumoniae
atgaaaaaaattaataagctagatgagccaaatcgacttggtgtgttcaaagccactcatcctaatgctttgtgggagagggataaaaactcaattgaagaggctttccgttgttgcactgccagatatcaagaaactctgcaacaattacgtacggaccaaggtaatttatgtgcatattgtgaacaggatttaatgtctggaactaatggtgcattagatgactgccgtattgagcattttcacccgaaatctaaacgggcacagggagaacctaattgggctttggaatggagcaatttgttagttgtttgctgtggcggaaatcaaagtaaagttgttaatcctgagcaaagatttgatgctgatccaaaaaactactcttgcgatgtaccaaagagcgacaaaattttagattccattatattaaatccagttaatttacctgaattaaatatttggaagtttcatcgttcttcggggcaaatgtccgtaaatgaaggttcctgtttagaatttggtataaatgttgaaatggcacaccgaacaattaaagagttgaatttaaattcccctcgattaattagatttcgaaagactattctggataatctcaacattttaatcacagaaagactgaagaagggacaaacaatagagcaagctgttagatttattgccatctcactctttcgaaaaaatggagctggtgattggccctctttttttagtgcaacacgatattatttaggtcagcaggctgagcttgttttaacccaacctatttaa

SEQ ID NO: 88908 - DNA, 1653 bp, Klebsiella pneumoniae; identical to SEQ ID NO: 87688

SEQ ID NO: 88909 - DNA, 924 bp, Klebsiella pneumoniae
atgcattttatcgacaaagatgaaatagagattagattaccagatgattggcagaataaaattgatgaagtttggttatacgtgcaagaaaaaattcaagaagctgatgctgctgttagggttaaagctgctcaggaacaatggtctgatgataaattatcatgtgagttaaataaatcgattgcaagcgcgcgtaagaaggctatcaacgctaaaagtgatgtttgggggcaacttagcgagatcctctcggagttgtcatttggcaagtgctggtattgtgaatcaacggaacttagatcagataatccaattgatcattttaggcctaaaggaaaagttgctgaatgccctgatcatccaggttattggtggttagctttcgattggtcaaattatcggtattcttgcacatattgtaactctcgtagagttaatacagatactgctggcggcaaacaggatcattttcctattcttcccccttacacttggaataaaagaagagaagatgagtttatagaaaatcctatattacttgatcctactgatattgatgatgtgaatttactaacattcaatattaatggtgaagcatgtcctaatgttgatgataaaacatcacctttgtataaaagagctaaagaatctgtggatttgtaccacctaaatcatactcccaccaaaaatgcaagaaaaagagtatatcaaactgtaagaaggctcgtttcgaatataaatagtttgagcgcccagaacttcgaagcaaacaaattaactataaaagatttaaaaacgcaactacataagatgattagggtttcttgcccctcgacttcattcaattctgcagctagaatatatctccgggagttttataattctcatgcttgggttaaagacatgcttgataggggttattaa

SEQ ID NO: 88910 - DNA, 2538 bp, Klebsiella pneumoniae
atgacaaatgaccatgaagaactagaatttgctaaagctcaggcaaaagaaatatggaagatccttgattatgttcgaggagcatcacctatatctaattatcgctcattagcgtattcaatattcttcgtacgctatcttcaatccaatacaggtcagcattttgaggcaggaaggttcgactcttttaatgttataaccctgtattcctacgatcttataaactatgctgttcaacttggattgattcatagcgacgtatctcaattcttaattgattatttagaaaacacgctccattcatttgtcaatattgatgaatcttttgttcgctatgcaattagagatgatctactcaataaaaccactacaatagcgtctctttctttgtcagaactggatttactttttgccgagaatgaaggtaagtcaggaggtgaattttatacccctatagacgtcaacttattggttaaaacattagggttgagttatcaaccaaagtcaatatgtgatccatttgcaggtgctggaaacacagcatttccttttgccaatactggtattgaaaaagttaggattgacactcaagaaattaatagagatgcttactttaaactagtaataagtagaactatcaggaaaatagaaggtcgagactatttcggcgattccctatcacaacccttatatcaggaaaataaatatgatctaattgtttctttcccaccttttggcatgaaaatacctaaagctactcgaaataatatttactataaaactagtaataagtggctagatattgctgaaatcttgccagaaagtagaagtgattggtttataacattatcaatgcttccagcccttactgaggggggtaagatactagtaggtatgtcacttggagctttgacaagaacaggctctgaggcaaaggtccgtgagtatttagtctctcgcggaataatcgaacaagtgattcttttacctaaaaatattcattactctacggctatctcaactgtactacttgttctcaactcaggaacaagtaacataaatgccagaagtattaaatttgtcgatgcttcactattttacgagcctgctcgtggtcgaaacaccctcacaacgcaaaatatcaatgaaatcgttgaagcttgtcataaagatggccgatttagcattagctcatctcatacccaaatagcaaatagagactttaatttagacccctctctttatgtacgtaaggatctcaaaatcagtgagatttctttaaaaaattttagcggatactctgactttaaagtttcgatacatccttctttaaatgtattggttggtgagaacggcgttgggaaaacctcgatattagaagcattagcatgtggccttggtcctttccttactgctatgcctgatgctaaaggaaaactaataaaaaaatcagatatccatataagtacaaaaggaatcgcaaattatgctcgaatatcgattgaaacaacatcaagtttaagttgggatcttgtagcaaaggggattgatgtttacgagccccctaagataggaacatcagcattaacaagctacgctactcatcttgtagatagtcagtctgaatatccactcattgcttattatgggactaaccgtgcacttacttctaccagttctaaagttgcaataaacccattcgaaaaagaaaatcgtggggaaggatatgactttgctttagatgctaaagttaactacggcatcttaaagaactggttttcaaaaatagaggttgatgagcttcgaaaacgtgatgaactaaaagaccataaattcattcatccggctaagagacttgtttcagaggctgtttatcagattgttgatcgagctacatgcttggagttcgacaaaaatagtaacgatgttatagttcattggaaaaatgagcagggagagtgcgtaaaacttacattagaacaactaagtgaagggtatagaaatgtggtatccctgaccattgatctagttagacgtgcttatttacttaatcctactaagccgaaaccgctaacagttaatgggatcgttttaattgatgaaattgaacttcacttgcaccctagatggcagcaaaagattttaaatgaccttactaagctatttaagaatattcagtttattgtcacgacacatagtcctcaagtcttaacaaccatcagtgctgattgtatccgcattgtttccgtcaatgctaacgaagcaaaattagtgacaggaactactacttacggttctgaaagctccagaatgctggaagatgttttaggtggaaacaatcgtgcccaacaccttgatatagttaaaaaattaaaccgttatacggaattagtagaggcagaccaatgggataccgatgaggcattagagctcaaaaaagagttatataaatggggggggcagacagaagacgagcttctaaagttagaaactgatattcgaattcgcgagttcgagcgtggcaatgaaaaaaattaa

SEQ ID NO: 88911 - DNA, 789 bp, Klebsiella pneumoniae
atgaaaaaaattaataagctagatgagccaaatcgacttggtgtgttcaaagctactcatcctaatgctttgtgggagagggataaaaactcaattgaagaggctttccgttgttgcactgccagatatcaagaaactctgcaacaattacgtacggaccaaggtaatttatgtgcatattgtgaacaggatttaatgtctggaactaatggtgcattagatgactgccgtattgagcattttcacccgaaatctaaacgggcactgggagaacctaattgggctttggaatggagcaatttgttagttgtttgctgtggcggaaatcaaagtaaagttgttaatcctgagcaaagatttgatgctgatccaaaaaactactcttgcgatgtaccaaagagcgacaaaattttagattccattatattaaatccagttaatttacctgaattaaatatttggaagtttcatcgttcttcggggcaaatgtccgtaaatgaagattcctgtttagaatttggtataaatgttgaaatggcacaccgaacaattaaagagttgaatttaaattcccctcgactaattagatttcgaaagactattctggataatctcaacattttaatcacagaaagactgaagaagggacaaacaatagagcaagctgttagatttattgccatatcgctctttcgaaaaaatggagctggtgattggccctctttttttagtgcaacacgatattatttaggtcagcaggctgagcttgttttaacccaacctatttaa

SEQ ID NO: 88912 - DNA, 1593 bp, Klebsiella pneumoniae; identical to SEQ ID NO: 87692

SEQ ID NO: 88913 - DNA, 630 bp, Klebsiella pneumoniae; identical to SEQ ID NO: 87693

SEQ ID NO: 88914 - DNA, 1722 bp, Klebsiella pneumoniae; identical to SEQ ID NO: 87690

SEQ ID NO: 88915 - DNA, 810 bp, Klebsiella pneumoniae; identical to SEQ ID NO: 87691

SEQ ID NO: 88916 - DNA, 1524 bp, Klebsiella pneumoniae
atgtttagaataaattcaatcatgaacgacagtcgagacaaggtaagagtccatgactttagtgaagactcacataacaattattacacaattctcactggcgataatgcaagcggcaaatctagtttattaagtaaggctataaatttctttctgtttagcaatgtaaataacaacgatcgcaaccccgctgttgaacttgaatgtttatcagagaggaatcctagcaaaatcattgccatatgcaactcaaagtttgatagattcacatccaataaaatcctcaatgataaattaaataataaagaagcaactcaaattacaatgagttacattcacccagaggtaaatgacaataccaggagagggatatcgggtattgttgaccaatgcattaaaaattcattgcgtcataaaaacataagaggtttgcaagacgctaatagagtgagagaagcatttatgatgtttgggttgcaatctgatttgcaccttaagtgtactttgaatacacaaaacataaagtatgtcttgtctatattaagcagtctggttaatggtggggtgatactgtctgacgaaggtattacgcataccaagaaaattgattattcaaaaaacgaagagttgaaaaataaaaacttcaagttggacaagtctattgaaattattttaagagaaagtgaatataaaaaccatttggatggattatacgacacgttgctaatgttagatgcagggaagtttacacagggaaattttagtagtatatatttttctgttgcagaaggaacaattagcacggaatctaaatatctatttgatgatctaaatgaagctgaaataattaatattttatttgtattggatgtgattaatgtttctgatattcaggttatgcatcttaactcaaaaaaagaagtcaacatagtttcactgagttctgggcagagaacattattcggcaatgcaattgtattaagtggatatgtagaaaaaaactgcatgatatgtattgacgaaccagagaatagtttacatcctgaatggcaacttaattttatgcgtttcatctctcttttatgccccgacactcttgaagctcatatacttattgcgacgcattcacctcaaattatttctggtatgcagtttgataatggttgtgtgctgtccctagaaaatagagataattttgattcaataataagaaaagaaaaaaaatatgaagaagatgggttttatgaactacagcctttgaaagcctatagagagcagtctgctggaaaacaacttacaggtgtttttaaaagccctgggtataaaaatgactttatcataaaaaaattactcttaatactgtctaagatatcaaaaaaaatcgctcttacaaaagatgataatgaatttatggacgaaatcagcatactcattgataaaaagagaataccggaaggagaccctgtacaactgatattcaagcagatccttagctttgagtatgcaaggagctctgatgattaa

SEQ ID NO: 88917 - DNA, 675 bp, Klebsiella pneumoniae
atgattaatagacctattgtatacagcgcaacagctcaggaatttgtcgatacattcaatggagacgcctcgcattgggatggtacgtgcgcagtgcgtaaagccttccgaaaagaagttagagattattatcgcgatgaacaagagttcacatgtccttattgtgggagattaagagaagaatttcatggtgggcaatgggatattgatcatattatccccaaatcttcttacccacaatatctctacaccccaagaaatcttgctgttacgtgcaaagactgtaatacgcataaatccaaaaaaaaaccactactaattacactcgacagcggagcaccctaccctgagaatactgtgtcttacaaaataatacatccgcattttgactcttacaatgaacatattacgctaagaaaagataaaaaaggtcgatcatatcatgaggtaattacagataaaggccgcgaaactttccttatgtgcaatttgattcggttcagcgaagtgatttgtggcacctctgagtttattcctgagttgggaactgaaattggtatcactaatagctttagtgagtcagttcaagtatggttggcggattatgacgatctaaatcctgtcgatgcggaaatcgccttacaggctctgatgcaaaaaataagcctgcgttga

SEQ ID NO: 88918 - DNA, 1584 bp, Citrobacter sp. MGH104
atgttgaatcaacatcctaaaatccagaagattattcgacttgcccagcaaggtgatgtggttgcggcattccaaatacatgattatttcaaaaaaggtaagtttgttgatatagatcttcaaatagctgagcaatatttaaatattgcgcttgataatttcaaaaagcaagaagtacatttatcatctctttcgttacttaatttcaggggtattgagcgcctaacttatcagattaaaaaaaatcaagttattattggtaataatggtgccggtaaaacgactattcttgatgctatttatttgtgcctttcatggcttgttcaaaggattgtccatgttggaggtaaaggcaaggaaattgatatgagcgatattacggtcggtaatcaagatggatatagctctattattgcagaattaacattaaacgataaatttaaaccaaaaattgaattgtgtgaagctatctccggcagtgctgtgggcaaaaagagctattacttggaattcaatagacttggtgctttatataaattagcttgcgaaaaagatatcagttttgaattgcctgtatttgcatattatggggtaatgcggtcagttgacgtttcatcgaaagattttactgaatttgatgatacagcaaatattgattcatctaatcgatttgatggatataatggctgtttgtcgggtaaagctgatttcaagagttttttccgttggtataaaagacttgatgatcaagttaaacatcaaaaaagcaattcgatagatttagatttaaaaatagtatcagaattgaaaagtattgatttcagtggtgataattcaaaacaaaatttattagatattatcaatagggttcaagagcagcagaaccaagtttcgaaatcttgggcgttaaaggctcaagaaatggtaaataatattattccaagctttatggatggatttagtgatcttaaagtagagttaaatccttatttacacatatcgataataaagaatggaaataaattaaatattttacaattatctcaaggtgagaaatctcttattgctctagtatttgatataagccgtagaatgatgatacttaatcctcatttagacgatccatttaaagctcatggcattatactaatcgatgaattggagcttcatttgcatcctaaatggcagagaaatgtgcttaatagcttaaactctatattccctaactgtcagtttattatatcaacccattctccacaagtaatcagtgaagtcaaaaatgataatatattaattcttgagaaaaataacagaggtaaacttagttacttttcacctaaacaatcttatggtttaacttctaatcaaattctcaacgaacttatggactcggaggatattaagttagatagagcaccagaaatacaagaaaggattgaccacatttttaaattgattgcagatcataatttagaagatgcaaaatctgaaattgaagaattagaacatgatattaacggtgaaattccggaattggttagcgcgaagtttgatattgatatgttcggatgggatgaaaaatga

SEQ ID NO: 88919 - DNA, 651 bp, Citrobacter sp. MGH104
atgaaatcaattgttaaaggtagagaacctagaactttaacagaatatcgactgcaaaattcggaatatgatggccctggattttctcctgttaaaaatgatattaagtcgtcacttcttgctgagcaaggatatttatgtgcttactgtatggcaagaatatcagcggataatatgaaagttgaacactgggcatgtcaagaccgttatggcaatcttcagttagtgtactcaaatatgttgggttgttgtaaaggaggagaagatgcggataatgaaagaggttatgataaattaacgtgcgatagtagaaaaggaaacttagatattaaattcaacccaagtaatccacaggatcatataggtagagtaatcagctacgatggtaatggggttgttttctcgaatgatgaagaatttaactatcagataaataatgtcttaaatcttaacaaaagccgtctaaaagataatagaaaggaactactgcaaaatatacgacatagactcgatgaaaaacctggcaacagaaccaaggcagaacttggtaagctactttcggccgtcaatagtgttgacgcacttggtaagttacgggagtattgcggatttttggccttttatcttgaggaaaaaataaaaaaggtttga

SEQ ID NO: 88920 - DNA, 1233 bp, Citrobacter sp. MGH104
atgggtaatttcatcaataaaataatgcaaaacatccctgccatacaaagagaaattactttaaatggtaagaacttgataattgttggtaataatggggctggtaaaacaaaattccttcatgctttaaatgattatttaagtaaagtttttaataaagattatatggttactctgaagcaattggaagaatataagaaagaacaggaaaaccagttaaagcattatgaaaatgttaattctcgttaccacacagtaaaacaaaatattggttattatgatgtgcgaattaaagaaaggctatgttttgatgttattttcgaaaagcctgacttattgtttggcgatataaaagacaatagggttataactaggttcttccctgctcatcgacgctatttaagtaatggtcaaaatttgctaactagtgttgatactctattcaatgactttaaagcagtttcgcctcaacaacttgtaacatgtgattattttgagcgatatttggtttcaatgtcaaattatgccctaattgaaaaaggggccgagtctatagatgagtatgaacgtgttattaaagtaatatcgaaaatcgagaatgacctgaaggttctatttgaagatgagactttgtctattcattacaaccggaaaaaacttcgaattgaaatacttcaggaaggcaaggaaccttcaggctttgataatcttccttctgggtttgcttctgtgctagctatatacgctgaactgattatgcttgcagagttgagtgaaggaacaaaggatgatattagagggattgttttggtcgatgagattgatgctcatttgcatgttacagtacaaaaaaaggtatttaattttttctcagaaagttttcctaatgtacagtttattattacaacccattctccttttgtagttcaatcagtttcagatgcagtcatctttaacttgaatactggggaacaaatggaaaatctttcagtatattcatacacatctataattaaaggtttgctgggggaatctgggaactcctcagaattagaggatttgctttccgaaattgataagatgtcaaaagataatgattttggtagccgttttattgaattaagcgccttgttggaacaaaattttagtgtattagacgcacgagctaaagctgtgtttatgggagccaaagcaaaaatggttgactgggaggaggcgcaggataatgtttaa

SEQ ID NO: 88921 - DNA, 675 bp, Citrobacter sp. MGH104
atgtttaatgttattcgtactatgccagcgcctgctagcttggctttgcagcgtgattataaaggaaaagatgtaattgatgctttacgagaaattttccatgacaaatgttacttatgtgagcaggatttaatttcagcgcctgaagtcgaacattttgtacctcacaataaaactcccgctttactatatgggtggaataatcttttttactcttgtaggcgatgcaatagtataaaaagtaacaaccataccaatttgttggacgggagtgatcctaatttggatgtcttcagtgaaattgttcattatgcaggtaatgctgcaactggaaatgtgcttattaaagcaagtagcccgtatccgtcacaagaaaccattaatactgtaaatttaatacataaatgttttaatgatgataataccagcttgaaaggaatatcaaaagaaagtctccttgaactcttgctagaggattatgcgctatttataggttataggattaaattggttcacagaagtagtacccctcgagaaatacaagaggcaaaagaaaaactttcagttatgtgtcaagttcaacatcggttttcagtgttctggaagtggcatgtcatagatgatgctatgcttaatagaaagcatccaaacataaggcgtgaacttgctttttaa

SEQ ID NO: 88922 - DNA, 2154 bp, Citrobacter sp. MGH105
atgagaaagattaaaagactcaacgccgacatcccagacgatttaaaaccggctcgtattgttcaagaagaaagcgagttgagaaaatattttctccagtcacctaaattgcgtagtcacagccgtcctcccattaataaagaaattttttattctgaaagcgtttggtctgcattgcagaaaaccttccatagccgctgtgcttggtgtgaaacccatgttgcgtcacatgatggggaaattgtccattttcgccctctcagtaacgcaaaagggctaaaggaagaggaaagtctggattcttacggttggttggcatatgtgtgggacaatctttttttgtcgtgctcagggtgtaatcgtgtgcgtcgtaattacttccctgttgggtccgcacgagctccagttctttcgacgtggagaggtgcaaacattctagaaacggtattgttgattaatccctgtctggatgaccccattcggcacctgtcgctcagtcgtgatgggacactggtggccttaacagataaggggcagcacaccctcatgctttttgatctcaaccgaactgacctgattttttcccgacaaaaacaaatcaatcatgtccattccttcttccccggaagggaaggttctgtcgatgaattccaaaaattttatttaagtgatgattgccctcagggtatagtaaatttgatcatagctatgtttatgaaggagcatgttggggggagaccatgccgttccacaaacaaagtcgaatcctttatcaacgacagcgtgaaacttgggtactttgcatttgataacaatgcggataccctagtagagatatttgaggaaattgagcagctaagttacagggatgttgaatatgacaaatttgccagcatcttagattatgaaagtcaggcctctcgtcatctgaaaaaaatcgatattcatcattttaaaggccttggtcacttcaccctgaatctgaaacacagtgagtcaaaatctcttgccccttgtatgatgctactaggagaaaatgcgacaggcaaaagttcaattcttcaatctattgcactagcaatgatgaccgcagctcagcgtaaaaaactgaacctggtctatgacgactttattgcccgggacaatggtgagtggactgtagatcatattcaacctgctgagattagtcttacatttaatgatggtacgagtagcatgtttcgtatcgatgaaaatttcaatgccatcggggaaggtgttagcaacattgtttttctggcatatggggcaagacgctttgtgaaaccacttaagcaaggaggcctaagaaatagtattataagcaatacgttattcaatccagttgctctgttgtcaaatccaaccggatggttacaagaatgtgatgatgacgtgtttctgtcagttgctagggcaatgaaggagatccttgctctaaaacaggatgatatcattttccgcaatgaccaaagacatatcatggtccgtgcgcacaagcgtaacacaccgcttgaaaatatgagtgatggctacaaggctttgttttatgtggctatcgacattatgcgtcatatgcttaagcgttgggacaacctggaatatgcttccggaattgtcataattgatgaaattgaaacacatctgcatccacggtggaaaatgcaggtggtgagcgctttccggcgagcaatgccaggaatccagttcatatttacgacccacgaccctctatgtttgcgaggaatgtttgatggtgaagtgcatgtgttaaaacgtgatgaaatgcactcaatcaccgaggaagacgatctgcctaggtttcagggattgagaacggaacaacttcttacatctgagtattttggtcttcttacacctaatgatccggatcttgaacggaggctagaagatattgccggacaagagggagaccatcaggcggagtatattcgtcaggtagaacaggaactcagtgaaatgactgtgcttggcacgactctgagccagcgtgtagtccatgaggcattagcgcgatatttgatttccgtaacgcgaaagcagcctgaagccaaagatattaaagaggatgccatcagagctatccttaacgtcctggttcaaaaaggttattga

SEQ ID NO: 88923 - DNA, 909 bp, Citrobacter sp. MGH105
atgattaaaattgatcgttcagccgagccggtaccgacctcactaaccatggcgggtaatgttgttgataatgaacgtactgccgcgcaaagctattacacagctgtaccagctccgagtaaaacttataaatttaagcgatataaagaagatgatatcgtcgaagctttagaacgcctttttcatgggaaatgtgcctattgtgagagtaaatacattggcacccagaaaatggatgttgagcattaccgccccaaaggaaaagtaaatgaaagtcagacacacccaggctactggtggctagctcttgattgggataatttattgccctcgtgcacagactgcaatcgacgtcgcggacagaagatcgctgttttagaggcagatggaactattgtttttaccgatacgatggaaaatgctggtaaggaatgtgcctttcctgtttccggcccctaccgggcgtggaatagccaagataacctcgcccttgaagtccctctattgatcaacccctgccaacatgatcctgatgaccatcttagttggcatatcagtaatacgaaggcgccgatcctattggcaaaattattgggggcacagccggatcagaagggtgtaagtagcattgaaatcatggggttaaatagatttggactggtgaatgagcgggcagcagtgttacaacagattgaagttcaagtaaaaaatatttaccagctgatagacattacagcgattatgccagcctgtgaagcgagggatcgctgcctaataaagattgggcaggatatcgatgagttgcatgcctgctataaacctaaccggcagtatgcctcaatggtgaaatcctacatcgaaccgcatatgaaaacgctaaagcgatatcttgttgggttgttgccatga

SEQ ID NO: 88924 - DNA, 1380 bp, Enterobacter sp. MGH85; identical to SEQ ID NO: 87572

SEQ ID NO: 88925 - DNA, 636 bp, Enterobacter sp. MGH85; identical to SEQ ID NO: 87573

SEQ ID NO: 88926 - DNA, 1227 bp, Enterobacter sp. BIDMC93
ttgaaatttacaatcgatactattaatgggatagatgcttttaatagcaaaagttttaaaattgatgttggtggaaagaatttaattatcactggtaataatggggcagggaaaactaggtttctaggaaaaataaaggaaaaaattgacaacctgattcaatcatatgatatgcccacccttgaaaattttaaaaaaacattgaaagataatcacgaagcaatgttaaatacccctcctggcgcaggggtatatgatcagtttaaatttaccattactgaaatggaaaaacggatagatgaatttaatcattttaatatagagtttaacgatgcctatggatttaaaactcaaataaaaaaacgagatgcttttgtttattttttcccagctatgcgttcagcaaacatctataatgatggaaggattactagtagagagacgttactctctgaatataataataatatccaagatgctaatttcgatgcgggacagttgctagaaagatatgtagtgacgctttggaattattctcttttgaaaaaagccaatggagatgtgagtgattatgaacgcgtgtttggtactattaccagtatccaaaacgatttgcgtgagctttttgaagactcgtccctaagattggattttaacctagaagaattaaagatatttattgtgcaagataataaagaaccatttggtatgaatcaattatcatctgggttttcatcgatcctcagtgtgtatgcgcatttaataatgcgagctgaattggataaggttggaaaaaaagacatgcttggtattgtaattattgatgagatagatgctcatttacatgttactttgcaaaagaaagttttttcatttttctcaacttcattccctaacgtacaatttataatatctactcactcaccattcgttttgcaatcggtttcaaattctgtaatttttaacttgagcagttatgaacaaatggaagatttatcgctgtattcttatacttcaattgtcaagggtttgcttggagaaagtgaggaatcagatagattgaagcggctagtagatgaattactaaaattagtagatgacaataatttcactataagatttgattctcttgtaaatttattagacaagaatgtggagcaccttgattcgcgttcaagagcatcattggcgcttgcgaaaagcaaacgtcttgactctgaggagtga

SEQ ID NO: 88927 - DNA, 672 bp, Enterobacter sp. BIDMC93
atgtttaatgttataaggaattatcctgagccactggacttaagtcgaaaaatttataatagtccggaaattgtgggacgactcagacaaattttccatgataaatgttatttatgcgaacaaggtgatttatcagacccagaggtagagcattttaaacctcatggtgggagtgatgaactcctgtatggatgggataatcttttttattcctgtagtcgctgcaatagtattaaaagtcacactcaccgtgatttgttggattgtacgtcttctgatgtcgatgtgtttgaggaaataatacatcttgcaggcaattcagtaaacgggtttatcgatgtcagacctagttctaacgcacctactcaggaaactctaaatactgttagattattacaaaaatgttataattcagaaaacacagcgttcagaggtataacaaaagaaaatctaatggaaaagattcaagacgattttgcttattatactgaactacgtatggtcttagctaatctcaggtcaactgataatgaaattgctcaggctttagaaagaatgaaggttatttgtaagccatcctatccattttctgttttttggcgctggcatgttataaccgatgtcagattgaataggatacacaataatcttagggaatcgttagatttttga

SEQ ID NO: 88928 - DNA, 664 bp, Enterobacter sp. BIDMC100
ccgtgatagacagcttactgctgtccgttccgctatttataagttcatgcctgaattttctaatttacgggttcgaagaaaacctcggctgcatatgtcgatagataaaaatggggaaccattcgatgtcgcacagctttcacaaggtgaaaagtctctgatggctctgatcggtgatattgccagacgtttatccgtgatgaatcccgaattaaaaaatccacttgaaggtgatggcatcgttgtcatcgatgaagttgacatgcatttacatccgaaatggcaacgttcgttgattaagcaacttactacaacttttcccaaatgtcagtttgtgctttctactcattccccgttagtgattagtgactgtaaaaatgttctggcatacctgatcggtgacgaggaacttatccaactgccttcgctatatggtcaagatgctaatactgtattgctagaaattatggatacagatatccgaaatgcggaaattaatgaatcactgagtatggctttagatgcaatccatgattctaatctttctcaagccaaagagataatacagcagcttgaggaagaacttccaagtggtaatttggaattatcaaaagcaaaacttttacttcgcaaaaaggagttaaaagatgcgcaaaataactaa

SEQ ID NO: 88929 - DNA, 636 bp, Enterobacter sp. BIDMC100; identical to SEQ ID NO: 87573

SEQ ID NO: 88930 - DNA, 1662 bp, Pluralibacter gergoviae
gtgaactcaaagtatactaaagcaccgaatgacatccgtacattattgcagtcctatgtaattaaaactgaagatggtttggagttcagtaaggagaacgttcctgaagaagtatctttgttgtacaaggaactcgaagatgcatcctttattattaataaagtcgccatttcagactataaaagagtcagagatctttttgtctcgttagacaaaaaattaacagtgtttgttggtgataatggttacggtaaaaccaccatccttgaagcgctgtttattgccttaagttggtttagggcaaatgttcaaaaagaagataaaagtggttttcatataaaagatggtgatattaacaatcacaatgatgtcaattatgctgcaataactgcacatttcaaacttaaaaatataacttcaaatattttagtcacacgcgttaaagatggggtgtcgcaaaaaagaaataatgagttgctttccataaaagagatggcttcattttttcgcgttgtaaactcatattatgacgatgtaagcttgcctgtccttgcatattactctgtatcaagatcctcaaatggtgcaggtatagataataaaaggaatattaataattccgtgcgaagatggactaaacttgatgcttatgaagatatagaatttgatcgccgtgacttcggggaatttttaaactggttcatatttgttaataataaagcattgtctgaagagtctttgataccaaagcaagaaagagatcaacttgttattgatatttcaaagcttaaagtatccttagaggttttgaaatctttcagagatgttgatagacgaacaataatagatattgaaacccaaatcgctaataaagaattaaatcttaatactttaccgtctgcactaaatgtagatggcgtaagtcgttcaaaagatattgttgctaatgttaaaaaagcgataattaatttccttcctgaaattagttctgttgatcttcagtatactgaaaatgaagttcgtttggttcttgcaaaggatgatttgttattagatgcacagcaactttctcagggagagaaaactatacttacattagtgggcgatttaacgagacgtttggtattgttaaatcccgggttaaataacccccttcaagggaaaggtattgtgctaattgatgagatcgaccttcatttacatcctagctggcagcaaaatattattgaaaaattgcagcatacatttcctaatatacagttcattattactactcatagtcctcaaattgtatcgacagttccaagtaaatgcttacgtattcttgaggagataaaaaatccttcgacgggggagaaggaattacgtgtgctcttaccttcatctcaaacaaaaggcactaagaattcgtatgctttgctttatgggatgaaaacagatcctatacctagtgtaaaagaagttgcgtggttgagcacttataagaaattgattgaaaataggctgcaggattcggatgaggccataatgataaggaaaaaattagataaacattatggggtcgaccacccattattgcttgagtgtgatggtattattcgtgttttaaagctaaaggataaagtgcagggtgggcctagaaataagggatctgaacaatga

SEQ ID NO: 88931 - DNA, 669 bp, Pluralibacter gergoviae
atgaaattccttactagagatccagttggtccagaagttttagccgagtttgactacaacattcatgactggaatgcttttaaacggcgacataagcaattagtgtgggtcgatttagttaaaatgcaagggaagaggtgtgcgtactgtgagcggaaaatagatattcacaacagtgatgataagcatatcgaacactttttgcgtagatgtcgacataggcatttgacatttgaatggtcaaacttgttcggctcttgtgcagaaagtaaacattgcggtttttacaaagatgagcagaactatcaggagcaagacctaattaaggctgatagtgatgatccgacgtattttttccattttggtattaatggaaatatggatattcgttcgggattatcgcgaaacgatcagcgaagagctgaggttactataagggttttcaacctaaatggtgaaaaaggcggtgtaaaaactgagcgtattaacgcaatatcagaaacatggtcattgatagaaaaatttatttcaattgctgaggagtttatcgaggaggggctttatgatgatagtgtccgtaatgatcttcgagacgaatattataaggaaatagaccccagaccattctctactgcgctacgtgatgtttttgatacgatgcttccttaa

SEQ ID NO: 88932 - DNA, 1731 bp, Pectobacterium carotovorum subsp. carotovorum ICMP 5702; identical to SEQ ID NO: 88334

SEQ ID NO: 88933 - DNA, 804 bp, Pectobacterium carotovorum subsp. carotovorum ICMP 5702; identical to SEQ ID NO: 88335

SEQ ID NO: 88934 - DNA, 1368 bp, Pseudomonas sp. DSM 28140
gtgaaactcaatcagctatctttacgggattaccgctgttttgatgcgctcgaaatcgattttcatccggaacttactgttttggttgcgagcaatggtgcaggtaaaacgtcgattctcgatgctatcgcagtagcgtttgggccatacgttggagccttcgatgaggctgttggcaagcactttgagcctagtgacattcgtcaggtccgagcgcgaaccacgcttactcatgagatggagtattccgccaagggagtaagacttgaagcgagaggtgtgatccctggtagcgtcgcagagcaactagatgatttaccatcaatatggcgccggagcctcactggcccgactaaaaccaagacgtcggtcaaggacgcaaaggagttgagagattgcggcaagcgtatgcaggaagctgttcgtactcctggcagcgatgtagtcttgcctctgctcgcttattatggcactggacgattgtggcaacagaaaaaccagaaaaagcagtcttggtccaataaaattgtccggacgtctcgcactgtcgggtataccgactgcttagaccctgcatccaagtacaaagcgttcgtggagtggtttcggtactggaactttaatgccaaggagctgcgtatcaaggccttggagctgagagaaacggctgtcgtaagcgaatttgacgggtatatcgaatcagtcagtgctgccgtcaatgcatgcctcgaacccgccggttggaagaatatcgagtactcgttctcgcgggatgctctggttgcccatcacgatgatttcggtgagcttcctgttgagttattgagtgatggtattcgcaatatgattggcatggttgcggatatcggatttcgagcaactaagctcaatggccaactaggggcccacgccgcgaagtctacgccaggaatcgtgctcattgatgaggtggatatgcatcttcaccctcgatggcagcagacgattctttcgcagcttagaaatgcatttcccagacttcaattcatcgtgaccactcacagcccacaggtattgacgactgtaccttcggagtctattcgcattcttcggggtaacaaggtttattcggctccgcccggtacggagggttcggagccggagcgaatgctgaagcaggtgttggggctggaagaggtgcgtccgcctggtaatcctgctacacaagaattaaaagagtacctagcgttagttgatcgagaccaatggagcagtgagcgtgcaaaaacgcttcgcgagcgtttggatcggcgctatcaagggcaggaacctgctttgttggatgctgacttgcaaattgacaatcgcaaatgggagttgggcgattga

SEQ ID NO: 88935 - DNA, 819 bp, Pseudomonas sp. DSM 28140
atgggagttgggcgattgaagcgggtggtaaggactgccgagcctgatgaattgaaagcctatcgagaagccaatccgatgtttggctgggacgagatgcgtcaggatgcagaagggcgtgcggtctatgacgttattcgcccacgcctgattgaaggtcaaggcggcatctgcgcattctgtgaaattgagatcataagtctcgatccgacgcgctgccgcgtcgagcactttcatcccaagtcagacagggcaacacctcacaactgggcgctggactggcagaacatgattgctgtctgcatgggcggttcacaacgacatcacgccttgccttatacgaaagagcctttacctgaaaaccttagttgcgatgcgcacaaggataaaatgattcagagccatcggctggaggagtgttgcgaggggtggattatcaatccggtggctttgcccgcttttcccaggctatttttcctagaaaaaagcactggggaattgttgccagatgggcaatgttgctcggaagtcagcgtggagggaaacaaacatcctactactcaggcgctggtagagcacacgatcaacatgctgaatcttaactgcgaccgtttgtgtgaggctcggaagagcgtactttggaatattgagcgtaacaaaaagcgactgcgtgatgctgcgaaaacaccccagcaaggtatggatgagttggcgggccgttttttacagcagcggtggccaggcttttttactactatccgtttctgtctaggggccgcagcggagcgatatctacagaacaacgagtatcgtgggtga

SEQ ID NO: 88936 - DNA, 1272 bp, Mycobacterium obuense
atgaaacctgagagcgcaacggtaccgagtggtaacggcttcgatacgctgcggttgcaccgctggcgccaattcgaagacgtcgacatcgactttcatcccaggctcactgttctgactggtgcgaacgcctcgggtaagacgacgatcttgaacttgctcggacgccatttcaattggcaatctcagttcctcgcggttccccgtcgcactaggtcaggaccgctagagtggctcgctacttatgacgaacccgatgagacgatcagcgtcgaaaacatgattaagtatgttggggaactacgctactgggacggatctgaagctcagattgccatttcgaaacgagcggatgccgagatcgacttaagcttgccggggtccgctacggtccgtggaatctacgtgtcttcacatcgcactgtaggtcgctatcagaaactcgcaacaattccatcggagttttcgcaagtgtcgctcatacacgaccaatactggaacgaagcgatcgcccgatactcaaacagctacaccgctaagagtcctatcaccagcatgaaagagtccttgatcgctgccgccacatggggagcaagtacagccgacaacgaagcgaacgtgaccgcgcaacgcgtatggactgagtttcaagaagcgctaaggctggttttacctgacagctttcggtttcagcgtctagtcatacgttcaccggaactgttgatctatacagatagcggcgagtttttgattgactcggcttccggcggtatagcgtcaataattgagttgacctggcaggtctatttaagaagttgggattcggataatttcacagtatgtatcgacgaacccgagaaccatctacacccaagtcttcaacgttcgctcatacccggtctactcaaagcgttcccacggattacgtttatagcggcaactcacagtccgttcattgttacttcggtcgcggacagtaacgtttatgtgttagccccgtcggcggagcatgacggcaagatcatcagtacgctgctcgataccgcgaataagtcggggacggcggacgaaattcttcgtagagtgcttggcgtacctacgacgatcccaatttgggccgagaatcagcttcaacagctcatagactcgctagaaggcagttcatttgcggataagttgcgtcagattcaggacgctctcactggtctaggattccaggatcagtttcccgctgcgctagatgcgttggaggatcgcgaaacaggtgcgtaa

SEQ ID NO: 88937 - DNA, 651 bp, Mycobacterium obuense
atgcgttggaggatcgcgaaacaggtgcgtaaactggacaaaagcgatattccagcaagcttggccgcgaacggtgctcagtggactgctaaattcatggcagtaccggacccaagtaagccagtcgtgtggcgcgatgacgaacttgtagcatctctgaaaaccgaaactcacgcgaagtgcgcttactgcgaaggcaagatcttggacgtgtcctacgcgcatgtagagcacattctacctaaatcagaacgcccagaactcgtagtaacttggaccaatctaactattgcttgccaagtgtgcaataccgagaaacgggaatatcatgatgtaagtctgcctctggtgaatcccttcaccgatgatccaactgaatttctcgaattcaatgggccatttattagtgagaaagacggcaatgctcgcggcgaacgcaccgtcgaccgtctgaatttgggcagaacccccttgctcttggctagggctgagaaaattgatttcatccgccgcttgctgtcccgttggcagacggctacaggtaccgaaaaagacacgtttgaactggtcataacgagagagcttgaagatgaccgggaattcgtgcagtccctacgggctttcgcttctgccaagggatttccaacctaa

SEQ ID NO: 88938 - DNA, 2193 bp, Bacillus cereus
gtgatttttataaatagaggatcagccccaccatttttgtattcaaataaaattaaaacagaaatagagaagatgaattattattatagtctagatatttcagcaagagataaatcaagatatgaaacaaaaaatccttttcctcttgaattgaaacgagcattagaggatttattccaaggtaaatgtgcatactgtgaatcgattataaatagtgcaaactcttatggccaaattaatcattaccgcccggcaaaaggtgtctattttaatgatcattacagccctgaccactattggtggttaaaatatgagtggagtaatttgtattatgtctgtcaattatgtggtaatagaaagcataaaaaattcccgatattaggtaagccagctcctattggtgcaattggagctgaacttcttagcgaagaacctttaattttggatccgtgctctgatatacctgaaaatcatttaatatacaatgagaatggtgaggtacatagtaaaactcaaaaaggaaagtataccatctcattactgggtttgaatcgtgaacaactagttgccgggcgaagacgctccttacatctttttcaaaatagttgtgagagatttattcagttatttcaaagcaactttaatgatacagagatattccgggatacatatgaaagtttattaaaagaggttgattcctccgcagagtattgcggaataaagcgacaatttttacttgattggattgaaaaagattctaattacaagcgtattttttcagacgaaatatatggttatttagccaaaacatcgttaataactaaagaaaatcaaataaatagtaacttatcatttatagagcatgaagatgaaatagaagattataacctgaaagaaaaggataaattgataaattactttgttaaacagcgtttgataacaagaatagtcatttctaattttaaaagtattgaacaactagatctcaaattaaatattgaagatgaacaagcgccttggttaatgttattaggtgaaaatggatgcgggaaaagttccattttacaaggaattgctttatgtttaatggataattctcaaaggaaaaatctcaaattggatgcaactgggtatttgaaaaaaaatgctaaatcaggatttgttcagatatttataagtggtagtagtaagcctattgaaatacaattcaatgaggagagtagcgaatttattagtaatcaaaaatcacaaaaagttttggttcttggctatggagatacacgtctgttacccagtgataaacacaaaagtccagaagtatcaatatctcggactgaaaacttatttgatccttactcaccattaatagacccaagtatatttttatataatttaagcagtgaagagttccattacgtacgttcatctttagaatccttattggttcttaaagaaggagaatcgataaaaaagggaaatgaattaaatcaaattcttgtaacaactaatggtacaacagtagaactggatagattaagtacaggatttcgatctgtcatcgctcttacaacagatattatgatgacaatgaaggagttctggaaagacagcaaagatgcacagggaattgtgttattagatgaaatagatgctcatttgcaccctcgttggaaattacagatagttaataaattaagagatacttttcctagaatacaattttttactaccagccatgatccactttgcttacgtggattaaaaaaacatgaggttgctgttcttagacgagcgaataacaataaaattacagtgaaacttcatcttccaaatgctgataattttgaaatagatcaaatccttacttctgaatattttggactgcatagtactgcttcaccagagtacgataaactaatgaagcgttattatgaattactttctattccaaactctaataggacggatgacattgagaaagaaatagaaaaagtgaaagatgcccttggagaatttgaaattcttggccaaaccccaagagatcaaattttatatcaaatattagatgaatatattgccaaaaatcaagattttgaaaatgaagatattaataaaatggacgataataccaaagataatgttcttaatcttttgcagaaatatcagttagatgaaagtgagggggaaaggtga

SEQ ID NO: 88939 - DNA, 870 bp, Bacillus cereus
gtgatttatgtaaatcgatctaatgtttctatgccagcagtattagacaccagcaattcctcctcgctaggttcaattgagactcaggattgtatagcttattattttaatagtccatcagatccttttgactttaaaatttatagagatcctgaggttgttagaaaactaaatgaccttttttatgggaaatgtgcatactgcgaaagttctgtccagacagttaataatattgaagtagagcactatcgccctaagggtcgtataagggttaaaaaagaaggtaaatggacatggactcagacaggatactactggctaggggctgtttgggaaaaccttcttccctcatgtacattttgtaatcagctacgtaaacatgaaacagaagacggacaaatgattactgctggaaaatggtcatatttccctttagaaaatgagaatcaacgcgtatttttaccgacaggaaacttgggagaagaaagtcctttgttgctaaacccttgtgttgatgacccaagtaaacatcttgattttcagactgatggtacagtcacccatcgtactgaaagaggaaggatatcgttggggatatatgggttgtggcggcgtgatttaaaaagaagaagacacgaaaaagtgaaagaaattgaatttttaattatacgagtaagacaaaatttaaaaatgctatcaatatgtaaagaaatagatatgagagttcatctgttacaagagctagatgaattactagctcatttgaaaacttttacagaacctgagaaactttacgcaggtgtagcaaaacagttaataagctctttttttaacgaaatttctcaagatttaactagggtttctgtttag

SEQ ID NO: 88940 - DNA, 1413 bp, Vibrio sp. J2-1
ttgaggttaggcaagttaagattaaataagcatagtattttcggtgatgttgaggtgaatctttctcatgaaagctcgtcaagtaactatagaacaatcattcttggtccaaatggcactggaaaaagtagctttcttggtgggatagcagacatactctctattgagttttcgaaagataaaaataaatcgttgaaaagctataaagaagattacgatttagaaatagtaattgattctgaaaaatataacattagacctgattttgaaaaagttgaattagatattgagaaagttattgcggtaactagcactatgcaagatagatttccatttatcgctaaaaacagtgtgagaagatctgataaatacatatatttaggcatgaagaccgcttcaaataatatattcttttcaaatttgaaagagaatatattattaagtttattcccaatatattacgatgctaaaaggactaaaacggctataaatgtcctaagtaaattagggtttggagataactttaagtttcaaattaataagggtcgtaactactctaaagtgttaaaagctcttatcaataatgaagccattagttataatgataactatgatgctaaaaacctgaaagagttcattgattcaaagtatgctaaagaaaataggctgaaaatatcaaatctatttgatgagataaatgaaaaagataaaggttacttgattaacgtgaaacttgaggatagaaataggtttaatgataaagtttcatatctagagttaatcaaaaagttactgtccaataatgttatatcgattggtgatttatccttattttctaccagtggatatgacatgaatcaggctagttccggagagtttaatgtattgagaacatttctatctgtgatagctaatgtttcagacaatacagtagtattgattgatgagccagaggtaagtctgcaccctaattggcagatggaatttatatctatattagacttagcattaagtcattataaagggtgtcattctataatagccactcactcgcactttatattgtccaatattagcaacgaagactctagtattattagtctattaccgagctctgagtctagaaacgtttatgttagtgacttaaatctagagctttatggatggtctcctgaaaatgtactctatcgtgcattcggtgttacagggtatagaaataagtattttgagatcgatttaagaataattatcgactttctatctgagtctaaggctgaccatacagaatttatagaagcagtttgcagagtagaaccttttaaattagaagtgaatgaccctttatataaaattattgagaatgcaaggaataaaagagataaaatcttgttagggttgtcaaataatggctaa

SEQ ID NO: 88941 - DNA, 666 bp, Vibrio sp. J2-1
atggctaattatagatacattgaaaaattatcaagagaaattttgtattctgaagaagaacagcaatggatagatactcttatcaattccgatttagaaccaacaagaatatggagtggtgaggttaattctataggtgtaagacgaaaagatagagattcaataataaagaaaataaaaaaagaactagaagaaatacaagaagggtattgctattattgtggtttcaagtttaattttagagttggtgaaagaggtgtgaaaaatattcatcgtgagcacattgcacctaaaagtttgtataaggcgtttacttttacttctaaaaatttagttttggcatgtaatatatgtaatggtgatgattataaaggagacttaaacaccataagtagtcttgattctgattatgataattgtaattttaatattattcatccctacttagacaataaaagtgatcatctatcactggaagaagatggaactttggcaaatgttaatggttcacaaaaagggaagaatactcgtgaaatgtttggtttggatgagatatttcatattgagaatagaaggcaatacataatttgtaaatcgtataatgttggttcaatatatgaactgaacttggaagaattacttctgcgtaatagggccgtgttttag

SEQ ID NO: 88942 - DNA, 1626 bp, Proteus vulgaris
atgagagatagaaagagaaatgcaaaaagcggaaatttgcttgcatcttttgccctttatttagaatgtgctcaaagtccttctgatgaaaaaagagaacaggcagaacaatggtttaatgattgttggcattacttacaggacagtaatgaaaataaatcagtaggatttacacctaaaaataaattttatcttcgatctataacacttgatgattttcgctgtttttcatatttagatattcaatttgaatcggatttaacagtgattattggtaataatggccaaggtaaaagtagtatattactagccatcgctaaaacattaagttggtttagtgcaaatattttaaaagaggatagtcctggtcagcgttttagtgaaataacagatattaagaatgattcgaataagaaatatactgatgttattactcaattctattttggtcagggcttgaaaaatatttctgcacgactttctcgctcagctttggggaaggcagaaagacgtgagggagaagtcaaagcgataaaagcagttgctgatatttggcgtgtaattaatgataaaaaaacagtaaatttgcctaactttcaatttttctccgttgaacgctctcagccgctaggtcgattaccaaaggatagttcaggacaaagagaagcgcgatttgatgcttataatcatgctttagcgggtggtgggcgtattgatcattttatagaatggtttattacattacataaaaagacagctgaccattcagcgtcatcgattgatgagctgacccaacatgttacggatttacgcctttcaattgaaagtgggcttagttcacttcgacctcttttagaaaaagcagaagagcagcttcaatacctattattacaatcacgggatgaaatcaaaaagttaaatattacgcaaaaagaaatggtggtgaaagccatttgcaataccgtacctagtatcagtaatctctgggttgaaactctttctgggagtgatttaataaagattaccaatgataatgaagatgttaccatcgaacaactttctgatggacaacgtatttttcttgtattggttgctgatatcgcaagacgaatggtaatgctaaatcctttgctagcaaatccgctagagggtcaaggtattattcttatcgatgaaatcgaactgcatttacatcctaaatggcagcaaagtgttatacaaaatctaagaagcacatttcctaacatacaatttattattacgactcatagcccagtcgttctctctactgttgataaacgatgtattcgaatgttttcgggaaataaaacgttaattaagcctgagtttcaaactcaaggtgttattaattccgatattcttgaacaaattatgggcgtatttgctacgccacctcaaataccccaatctcattgggtcagtgaatttgatgagttaattgagaaaaatggttttgaggataataaatttgccaaagatttatatgagaaaatcaaggatcattttggtgaaaatagtgttgaattaaaaaaatgcgatagtttaattcgtattagaaaaatgaaacaaagagtattaaataaaaaccttggcaaggggaattaa

SEQ ID NO: 88943 - DNA, 651 bp, Proteus vulgaris
atgaagtttttacgacggaatgaaacgacacttgaatgtcttgaaaactttgttggaggccgagataattggaatgaagtgaataaagagaccatctgggcatcacttgatgtaatgcaaaaaggcttttgtgcttattgtgaatgttctttaaagcgaaagcatattgaacattttagaacacgtgacttgcatacaaatcttacttttgtatggagtaatcttttcggttcttgcggtgattcaagccaaaaaggtggttggaataggtgtggaatatataaagataatggcgctggcagctatgatgttgaaagcttaatcaagccagatgaagataatccaaatgatttttttctatttttaacaacaggcaaagttcgacctaaagataacctaaaagataaagatttagttaaagcagaagaatctattcgcgtctttaatttaaatgatgactcggttttgtttaatagtcgtagaagaagtattgaaagtgaacaaaatgaaatagatatgatgtatagcttatttgatgagttttctgagagtgagtgggaagaactactcacaacagcattagaaagagtgagtcaattagaatttagtaccgctttgactcacgcatggcgctataactaccagtattaa

SEQ ID NO: 88944 - DNA, 1233 bp, Proteus vulgaris
atgattataaaatcaatcaatggcaccattccatttacagagaagaatatttcaattgatttagatgataagaagagtgtagtaattataggtaataatggctcaggaaaaacatctttattgcaagaaataaataagtactttgaaagtattttctctaacaatacgggtaattttattgaggaaataaaaacaaatattgataactacactctatggatgaatgaagcagagtcaaaaaatgactacacttcgtattacagatataaaaaaaacatagatcaagaaaatttgaaattaaaagaatttcaatttaaaatcaatgtggaaatagataatattgatgagatggttaaagaatcttattacaaaaaatttatctacttctatttcagagcatcaagacagataagcattaatgaatctcatggtacaaaacccatttcggaaataaaagaatcttggttgtcagtcgatcaaagttcaatgctaaataaatacacaaatcaagatttagaatcctatctcattaccttatatacgcaagaagcgctttataataaaaataacgaaccagcaaaagcaaataaattatcactatggatacgtgaattagaagaaaaaatatctattttaatggagtgtcgtattaattttgaatttgattatgaaaattataaattgtatatagtaagagatcaatactatagatcatcatttagagagttatcttctggctattcagcaatactggatatatttaccgaaatactatttagagcaagcctttactcaatagaaccttctgagataaaaggtattgtattaatagatgaaatagatgcccatttgcatttatcaatacaaagaaaagtattacctatgttaatatcaacttttcctaaaatacaatttataattactacacattcgccttttgtactcggttccagtgacgattttattatttttgacataacaaaaaatataaatattccatcattaactatgtattcttatgaaaatatagtaaaaaacatacttgacgtggatgttattcctaatacagtgagagaaaaaatacaaaaattaaaagaacaaattgaagctggaggtaaagataaagatttattgaactctattttttcagaattagaatcttcactaagcattttagattccgaatcaaaagcaatatattatacagcgttaaatatgtatataggtgagtga

SEQ ID NO: 88945 - DNA, 675 bp, Proteus vulgaris
atgtttaatacaaaaagagataatgtaatacctcaaggttgtagagataaaacaaattacaaatcgcctgaaataatagaagcattaaataaaatgtttcatggaaaatgttatatatgtgaaactaagaacttacaatcacccagggtggaacacagagttccacatcgaggtgatgataatataaaatatgactggaataatttatttttatcatgtgaacgatgtaatagcattaaatctgatgattttgaatcaacaatagattgctgttcagatgattttattatttctgataatatttttattaaattagaatattgtccgcactggaaaataatcgccagtgaaaaacaacagaacccatctgaagaactattagaaaccatcagattaatcaatatgtgttgtaatcaagataacacacctaccagaaaattaagtaaacaaacactagaaaatgatattaatgaaaactattccttgtttatgtatcacaaaatgaagattataagagggaatgaccatccggatgaaataaatagatctaaaaaatttattattaatatgagaaatccatcatatccattttcagcagtatgggatggcatgatccaatgtgataacattcttagtaataaattagatgaaataaatgagaatagtgataattag

SEQ ID NO: 88946 - DNA, 1242 bp, Pseudomonas sp. KG01
gtgaaaaagtatatcgaaagaatttacggaacaattgaaaataagaacattaaaattgacatcaacactaaaaacaaaaacctaataattaccgggccgaatggctcaggtaaaactcacttcctaacaaacttacatcaaacaataaaaaaccacatattgatgagcgaacaagacacatacgaatacaaaatcaaaagaatcccagttatcgaacaactacttaaaaatataaaagttaaaactgacaatttttacaatctaacttcagagttgcgcgctttaaaaataaacttacgttatcacgattcaaagctaaacatttgcactccagactttcgggaactccgctcaaaaactgaggatctttcagcggtaaatctactattttctgctcatcgccaagctggtattactacgtccgatgcagctcgcggcttagaaaacgaaaaaaccatttatagatcggaaatgaaacataacagagtaggaggctctctcgaaaaacatttagtaaacttaaaaacgcgaagcgcatacgccatagcccatgaacgtgattcttctgtagctcagcttattgagaggtggtttagcgatttagaacaaaacttaaagtttctcatggaagatgaaacgacaactctgaactataatcctgacacgctaaaattcaccattagacgaaaaaacaaactcgatacagacctgcaatccttatcatcaggatacgcctcgatacttgatatttacagcgagcttttaatgcgcgccgcttatttagagatccccccaaacactcttagcggcacagttctgattgatgaattagaagtacacctacatgtctctctccaacgactcatattaccattcttagaaaactcctttccaaacattcaattcattatcacaacacactctccatttattttaacctccatcagcaattcagttgtgtacgacatggggaccaacgtcactacagataaagacctatccctctattcatattcggcagttatggagggattattgggaaccagaaccacttcaaaaatactggacgaaataatcagtgaaatagccgcaatcactcaatccaaaaacggcaatactgaaaaattacgccaatacatcaaaaaagttagcgcatccgaaaattcccttgataatcgctccaaggctttttatctgatgggggttaatagcattttggatgaggaccagaaagatgtttaa

SEQ ID NO: 88947 - DNA, 669 bp, Pseudomonas sp. KG01
atgtttaaagttagtcgacctaccacgcccccaagctgcacaaaaagctcaggctacaacaccgctgaaatagttaaaactctttctcaaatattccaaggcaaatgctatttatgtgaacaaataaatctttccgaccctgaaatcgaacatttagttccacacgaaggggacgatgaaaaaaaattcgactggaacaacctttattattcttgcagcagatgcaatagcataaaaggctctaagcataaaaatattctagactgctgcgacagcaatacggaaatttttaagtccctacaattcagcatgccgggacacccagaccacaacatacgtgtcaatgtcgtcgaatcttataaaaacgaagccactcacaacactgctgctctacttgaaagatgctacaacgaagcggctaccggattacgaggaattacgagaagcaacctaattgataaaatatttgaccacttctgcgacctgctcatattacgtcaaataatagtcaacattaaatccacaagtagtgagatacagttcgccaaagatagactggccgtcatgctcgaaagctcgttcccattttcggccatttggaaatggcatctcctacaagatgaaaaattactggataaaactcgcgacctcattcagccccacctataa

SEQ ID NO: 88948 - DNA, 1629 bp, Vibrio nigripulchritudo AM115; identical to SEQ ID NO: 88242

SEQ ID NO: 88949 - DNA, 789 bp, Vibrio nigripulchritudo AM115; identical to SEQ ID NO: 88243

SEQ ID NO: 88950 - DNA, 1629 bp, Vibrio nigripulchritudo FTn2; identical to SEQ ID NO: 88242

SEQ ID NO: 88951 - DNA, 789 bp, Vibrio nigripulchritudo FTn2; identical to SEQ ID NO: 88243

SEQ ID NO: 88952 - DNA, 1629 bp, Vibrio nigripulchritudo Pon4; identical to SEQ ID NO: 88242

SEQ ID NO: 88953 - DNA, 789 bp, Vibrio nigripulchritudo Pon4; identical to SEQ ID NO: 88243

SEQ ID NO: 88954 - DNA, 1239 bp, Yersinia enterocolitica (type O:3) str. YE12/03; identical to SEQ ID NO: 86452

SEQ ID NO: 88955 - DNA, 657 bp, Yersinia enterocolitica (type O:3) str. YE12/03; identical to SEQ ID NO: 86453

SEQ ID NO: 88956 - DNA, 1233 bp, Salmonella enterica subsp. enterica serovar Newport str. 36807; identical to SEQ ID NO: 86616

SEQ ID NO: 88957 - DNA, 675 bp, Salmonella enterica subsp. enterica serovar Newport str. 36807; identical to SEQ ID NO: 86617

SEQ ID NO: 88958 - DNA, 1233 bp, Salmonella enterica subsp. enterica serovar Newport str. 36805; identical to SEQ ID NO: 86616

SEQ ID NO: 88959 - DNA, 675 bp, Salmonella enterica subsp. enterica serovar Newport str. 36805; identical to SEQ ID NO: 86617

SEQ ID NO: 88960 - DNA, 1233 bp, Salmonella enterica subsp. enterica serovar Newport str. 36802; identical to SEQ ID NO: 86616

SEQ ID NO: 88961 - DNA, 675 bp, Salmonella enterica subsp. enterica serovar Newport str. 36802; identical to SEQ ID NO: 86617

SEQ ID NO: 88962 - DNA, 1233 bp, Salmonella enterica subsp. enterica serovar Newport str. 36799; identical to SEQ ID NO: 86616

SEQ ID NO: 88963 - DNA, 675 bp, Salmonella enterica subsp. enterica serovar Newport str. 36799; identical to SEQ ID NO: 86617

SEQ ID NO: 88964 - DNA, 1233 bp, Salmonella enterica; identical to SEQ ID NO: 86616
  subsp. enterica serovar Newport str. DC_10-449

SEQ ID NO: 88965 - DNA, 675 bp, Salmonella enterica; identical to SEQ ID NO: 86617
  subsp. enterica serovar Newport str. DC_10-449

SEQ ID NO: 88966 - DNA, 1233 bp, Salmonella enterica; identical to SEQ ID NO: 86616
  subsp. enterica serovar Newport str. DC_10-446

SEQ ID NO: 88967 - DNA, 675 bp, Salmonella enterica; identical to SEQ ID NO: 86617
  subsp. enterica serovar Newport str. DC_10-446

SEQ ID NO: 88968 - DNA, 1233 bp, Salmonella enterica subsp. enterica serovar Newport str. 36803; identical to SEQ ID NO: 86616

SEQ ID NO: 88969 - DNA, 675 bp, Salmonella enterica subsp. enterica serovar Newport str. 36803; identical to SEQ ID NO: 86617

SEQ ID NO: 88970 - DNA, 1662 bp, Serratia marcescens subsp. marcescens
atgaacgataataagggcttgaatgcagtttcaagaaatgcatcaaaaggggatgttcagtctttgtatcagttgtatataaatgagtacaatgataacaaagaaaataaaacatacacataccctatactgaacgagatatcttcaaaagcaaatgatggtgaatttatcttgaaggaggttgtattcaataattttagaggtttgagtaatttgacgttaagattggatgatcaaattacggtaattattggtaataatggtgtaggtaagtcaagtattcttgatggtatctccataacgcttagttggttgaagtcaaatattttaagagaagataggccagggagggatataaaagagttagatataaataataatgcgaatttatcatccattacctccagaattagctttgctaatagtgccttcccttttatgattgctaactcaaagcaaggtagtaaagaaaaaataactaatgaccttctacatgtaaaaacattggctgggatctataggcatagcaatgagtttaaccagcaaattaatttgcccttattatcatattattctatacatagagcggatgaagcatccaccggttttgatgggaaaaacaaaaaaaataaaaaaagagtgtccaccaactggacaaaactaggagcatatgaagaaactggattcaatcggcaagactttgatggtttcatcgaatggcttaagttcatttatgttagctctagagaaaactctattgataataaagtgagtatgattaataggctccagtcagaaataaatggcgctttagatgttatccgtcatttgcctgagggatttgagcacatagttgaaccattaaagctagaaatatcgataaaagagaagaggatagtcgatataaaaagtgatcttggactgaataatcaagagtatgctcaacggcttattaatggagttgtcgattcttttctcaagtttcttccaaatttagataagataaatttcaagtttgttaaggactcgttagtcgtaagctttatcaaaaatgggattgagttatcaccaagtcaactgtcgcaaggtgaaaaatcattattgaccctcattggtgatatcgctaagagattagtgcttttgaacccatctctagataaccctctgtgtggaaaagggattgtactgattgatgagattgatttgcatcttcatccgggttggcaacaaataattatagaaaatttaattgagactttccctaatatccagtttgttatatctacacatagtcctcaagtgctaagtacagttcctaaaaagtgcatcagaatattaaaggaggagtgcaacgagttctcagggatgaaagaactcgtagctgtctctccaaaattccaaactaaaggtgtaatgagtgctgatgtattatcgataattatgggaatagacccaaccccatcggttgatgaagctgactggctatatgagtacaaggagttaattgaacttggaaagtatcaaacactgcgtggacttgaactaaaaacaatgctgctaaatcactttggagaggatcacccgctaattatggaatgcaataatataattgctttgcaagaaataaaaaataagattgcagaaaggaaaggtaaaatatag

SEQ ID NO: 88971 - DNA, 684 bp, Serratia marcescens subsp. marcescens
atgcacaagttgactagatgtgatgctccgttagtacttaatgaatttgatcataatatccataattgggatgatcatttcaaatcaaggcacaaggcattagtatgggaaaaaatttttgaaatgcagggacattactgtgcatactgcgagtgtaagttggattcatcagatcctgagaaaactcacttggaacacttcaggcaaaaaggtaaggcggaatataggcatctgacatttgaatggacgaatatatttggttcgtgttgcaatggagagcgttgcggtcgccacaaagataaaagcaatatatcatctgaaaatatagtaaagatggatgaggaagatccggaggattattttatctttttgtcaacgggggcggtcggtattagagatgggttgtctcctgtagaggcggagcgagctgagaatacattgcgagcattcaatttaaatccaaggcgaggtggtgttaagaatgaaagagagcgtgttataaaaacgcacgattatatgattaaagaaatgatagggctaatgaacgaactgaaagatgatgggggtttagagtttttaattgaaattagggattcctacattgaaagggtcaccacagagaaagggccatttgttaccgcgattaagcacgtccttatatctaattgggaacgggcagtgtaa

SEQ ID NO: 88972 - DNA, 1398 bp, Salmonella enterica subsp. enterica serovar Ouakam
atgagaatcgacaaactttcactgcttaactttcgttgcttcagacagctcgatattacttttgatgagcacattacgattctggttgcaccgaatggcgcgggcaagacgacagtgctggatgcgatacgcctggcgctgtttccctttattcgtggttttgatgccagcctctacgtaaaagataaatcgctggcgatccgtacagaagatgtacgtctggttttccgccccgaagcgctgaacatggaaatgtcgtctccggccatgattacggctaccggggaatgggaaagtggaaaaacggcaacctggatgctcgacaagcgaggagaacagccgccgcatgaagataagacagcggcgcagcttacccgttggggtgaacaacttcagacgctggtgcgtgaagagcataatttgcagcaggttgagcttcccctaatgctttatctggggactgctcgcttgtggtatcaggaacgttatgaggcacagcctactgaacagcgtctggataacagcgccttttcacgtttgtctggttatgacgattgcctttctgccacatcaaattataagcaatttgaacaatggtatagctggttatggcttagctaccgtgaacatcaaatcacacaacttgaatcaccttcagcaaagttaaaagaaggtgttcgtgttcagcggatgaaagaagctattcaagccatccagcaagccattaactgtctgacgcaggaagtgactggctggcacgatctggaatacagctccagccataaccagcaattggtgatgaaccatccacagcacggtaagattcccttatcccagctcagcgacggcctgcgtaatgcggttgcgatggtagcggatatcgcgtttcgctgtgtcaaactcaacccccatttacgcgatgaagccgccttaaaaacacaggggattgtgctgatcgatgaagtcgatatgttcctacacccagcctggcagcagcaaattatccagtctttgcgcagcgcatttccactaatccagtttattgtcactacccatagcccgcaggttatcagcacggtaaaacgtgaatccattcgtctgcttgagcaggatgagaatggcaacgggaaagcgttgatgccgctcggagcgacctacggcgagccgagtaacgacgtgctacaaagtgtgatgggtgtcgatccgcaacctccggttaaggagaaggctgacctacaaaagctgacggcttgggtagatcaagggaagtacgacgagccagaagcacagcaactgatggctgcattacaggcggcgctgggtgatcaacatccacaactccaacgcttacagcgcagcattgcccggcagaacatgctgaaagggaaagcgcaatga

SEQ ID NO: 88973 - DNA, 597 bp, Salmonella enterica subsp. enterica serovar Ouakam
atgactctgcttctcaatgagcaatatcacctttgctgttacagcgaaatccgtgctgatttgcgtggcctcggctatcacattgaacacgtcgaaaataaaagtcagcagccagggcgaaccttcgattatcaaaatctcgccgccagcgcgttagactctgagaatggtttgcacctgtttggtatcaacgctttcggcggtcacgcaagaggaaaacaagaggccgtggatatggcaaagtttattcattgtcacctccctgactgttctcgttattttgcttacctttctgatggccgaatagtaccggctgatgagctaaatgcccaggaaatggagagggcagagtacaccattgatctactaaatctgaacagcggattccttcaaacggaacgtcgtaatcattgggaagagctggaacagctttttgaggaacatattgaaaaaggctgggatctgcaacaattacttcagcttgagctggtcccttcgctagatcataaactgcatgaattcttcagcattacacgccagtttttccagcaagaagctgaacaggtattacagaaccacgccccagcattaatttaa

SEQ ID NO: 88974 - DNA, 1398 bp, Escherichia coli; identical to SEQ ID NO: 86108

SEQ ID NO: 88975 - DNA, 606 bp, Escherichia coli; identical to SEQ ID NO: 86549

SEQ ID NO: 88976 - DNA, 1284 bp, Acinetobacter baumannii; identical to SEQ ID NO: 86768

SEQ ID NO: 88977 - DNA, 669 bp, Acinetobacter baumannii; identical to SEQ ID NO: 86769

SEQ ID NO: 88978 - DNA, 1338 bp, bacteria symbiont BFo1 of Frankliniella occidentalis
atggggcaaccttatcgtctcgagagcataacgctcaaagacatcggtatttttgagcatacgcattttgattttccgccgatcattagcgaacagaaggatgctgagaaggccgaaatccatatttttaccgggccaaatggctgcggaaaaagtacgattttatacgcgctggcggcaatatttgagctggcaccggatgatgcgctgatttgcaaaagattccgcagtagccacagtgttgtcgagtttaaattttatgatgaagcgggatattacgcccgcagaaaaaatgatgaagatccctttagcgggttaaagtttggtggcataaatgagtttatttctacaaaagaagctcagagccttttcaaccacagaaccgcgggttttgataaaaacgattctgtcagccgctcaactttcccctttgccgcatttgcctattccggcaatcgttcgccccagggcgtgtttagcgttcaggccattcaaaatatcaagaactcgccgtttgaagacgctttatcttttgagcgcacggtgcggcctggcgtactggcacagtggattgccaataaccgtaccaaagccgcgctggcaagagatgatggcgataatgccgaagcattacaatatgatgctgcactgaaggccatcagcgattttatttatgaaatctgccagttaaaactcaacttccgccttaagcgttccccgctcgatgtggtcattgaggttgatggtctggcagtgacgtttgatgtgttacctgaaggattgaaatcaattatctcctgggtcgctgacctcgctctccgtctggaagatatcccattcacagaacggcgggaaatcttctcccagccgataatcctgttccttgatgaagtggatatccatcttcacccgaaatggcagcgccgtatcctgcctgcggtgcagaaattgttgccgaatgctcaggtctttgtttccacccactcgccttttgtggtcggatcggtcgaggatgcctgggtttatcgcctgcccgatgcgcagcgtaaagtgttacgcgacccttcaattgctgaaaccatcattccagttgcttcggcagcgggcaaaagctatcagctgatccttgaagaggtgttcaacgtcagcgagcagtttgatgtagaaaccgaagcactgctcgatgacttctattgccagcgtgatgcttatctgaaaaatcccgctaatgaccgcgccctgatgatgctagccgatagcattcgtgagcgtagcgacgagctggaattaattattgagatggaactgcgccagattgcgcgtcgtgttaaaggatag

SEQ ID NO: 88979 - DNA, 582 bp, bacteria symbiont BFo1 of Frankliniella occidentalis
atgaacaaattgattcgtggcgctcagccactctgtctggctgcggggtgtcaggagtggaccgatcgttatctgacggcgcatttttcagatccggcagcctcttttagctggtactcccgaaactgttatcagcatatacgcatggcgttactggagatgacacaggatcattgtgcattctgtgatggttttctcggcacggaagcgcgtgaaacggttgaacatttccgccctaagagccgctatccgcaacaggcttttcaatggatcaatctgtttccctgctgtgataaatgtcagagtgccaagcaggaaaaatatgatgagctgttactgaaacctgacgacgcagactatcagtttgcccgttacttcatctgcaactacgccagtggagaactgcatcctgcaccagatattagcgtcttcgatcggcagcgggcagaaaaaaccattgagctttatggcctcaatcttaccctgcgcaagcaggccagagcgcgggagctgattaaattccgtggctctcgcgaagagctacagcttgatgattttccctaccgttacttcctcagctag

SEQ ID NO: 88980 - DNA, 1524 bp, Klebsiella oxytoca 10-5248
atgtttagaataaattcaatcatgaacgacagtcgagacaaggtaagagtccatgactttagtgaagactcacataacaattattacacaattctcactggcgataatgcaagcggcaaatctagtttattaagtaaggctataaatttctttctgtttagcaatgtaaataacaatgatcgcaaccccgctgttgaacttgaatgtttatcagagaggaatcctagcaaaatcattgccatatgcaactcaaagtttgatagattcacatccaataaaatcctcaatgataaattaaataataaagaagcaactcaaattacaatgagttacattcacccagaggtaaatgacaataccaggagagggatatcgggtattgttgaccaatgcattaaaaattcattgcgtcataaaaacataagaggtttgcaagacgctaatagagtgaaagaagcatttatgatgtttgggttgcaatctgatttgcaccttaagtgtactttgaatacacaaaacataaagtatgtcttgtctatattaagcagtctggttaatggtggggtgatactgtctgacgaaggtattacgcataccaagaaaattgattattcaaaaaacgaagagttgaaaaataaaaacttcaagttggacaagtctattgaaattattttaagagaaagtgaatgtaaaaaccatttggatggattatacgacacgttgctaatgttagatgcagggaagtttacacagggaaattttagtagtatatatttttctgttgcagaaggaacaattagcacggaatctaaatatctatttgatgatctaaatgaagctgaaataattaatattttatttatattggatgtgattaatgtttctgatattcaggttatgcatcttaactcaaaaaaagaagtcaacatagtttcactgagttctgggcagagaacattattcggcaatgcaattgtattaagtggatatgtagaaaaaaactgcatgatatgtattgacgaaccagagaatagtttacatcctgaatggcaacttaattttatgcgtttcatctctcttttatgccccgacactcttgaagctcatatacttattgcgacgcattcacctcaaattatttctggtatgcagtttgataatggttgtgtgctgtccctagaaaatagagataattttgattcaataataagaaaagaaaacaaatatgaagaagatgggttttatgaactacagcctttgaaagcctatagagagcagtctgctggaaaacaacttacaggtgtttttaaaagccctgggtataaaaatgactttatcataaaaaaattactcttaatactgtctaagatatcaaaaaaaatcgctcttacaaaagatgataatgaatttatggacgaaatcagcatactcattgataaaaagagaataccggaaggagaccctgtacaactgatattcaagcagatccttagctttgagtatgcaaggaactctgatgattaa

SEQ ID NO: 88981 - DNA, 675 bp, Klebsiella oxytoca 10-5248
atgattaatagacctattgtatacagcgcaacagctcaggaatttgtagatacattcaatggagacgcctcgcattgggatggtacgtgcgcagtgcgtaaagccttccgaaaagaagttagagattatcatcgcgatgaacaagagttcacatgtccttattgtgggagattaagagaagaatttcatggtgggcaatgggatattgatcatattatccccaaatcttcttacccacaatatctctacaccccaagaaatcttgctgttacgtgcaaagactgtaatacgcataaatccaaaaaaaatccactactaattacactcgacagcggagcaccctaccctgagaatactgtgtcttacaaaataatacatccgcattttgactcttacaatgaacatattacgctaagaaaagataaaaaaggtcgatcatatcatgaagtaattacagataaaggccgcgaaactttccttatgtgcaatttgattcggttcagcgaagtgatttgtggcacctctgagtttattcctgagttgggaactgaaattggtatcactaatagctttagtgagtcagttcaagtatggttggcggattatgacgatctaaatcctgtcgatgcggaaatcgccttacaggctctgatgcaaaaaataagcctgcgttga

SEQ ID NO: 88982 - DNA, 1251 bp, Parabacteroides sp. D26
atgataatagaatcaataaaaatagaaaatttcaggggtatagaatatttagaaatacctacattggacgagcatataaatctgttcgtcggtgtcaacggagctggtaagacaagcgtattagattccttctcccttgtgatgtcttggcttttagccagaatcagaaatccgaaatcatccggtacgcttatctcagaatcagatataaaaaacaattcgaaaggtggatgttcaatttctatcaaagtgagaaattccggtgaatggattttatatcgttctaaatcttatgctaaaagtaaggttgataacggaaaaactgaactccgggatatgatggaatatatcaatgagatacatcactgtgtaactcaggggggaaacatacctgtaatcatgtattatccagtaaaccgagccattaacaatgcaccagctcatctgaaaagaggaggaaaagaacctgagatttgggacacctatgaaaacgcactaaaagggaatactgaatttcgttctttttttgaatggtacagaaaacaagaagataacgagaatgagcacatacgtgacaacagaagttatcaagacaaaaaactttctgcaatcagagaagccatcaaaagatttttccctgatttcagtgatcttcgtgttcgtcgtaatcctcaaagatatgttattcaaaaagattctgaaatcattgaattcaaccaattatcacaaggagaaaaatgttacttggctttagtatgcgatctggcacgaaggttcgctatggccaatccaaacagtgactacccactacagggagaaggtattgtattcattgatgaagttgatttgcatttacaccctaaatggcaaatggaaattattgataaattacgaacgatttttcctaattgtcaattcttcttgtcaagccattcaccccatgtactttctgaccttactcctagacagattttcttattggataacggcaatctgaatcatacatcattcaacccttatggaaaactggtgaatgaagtattagccaactacttttccatttcaatggcaagaaacttgaaagtaaaagaacaaataaataaggcatataaggcattaaaagaaaacgattctactacttttcaagaaatatttgaagaattagccaagcaattaggtaaattagatcctgatatggttaatttaaaactggaatccgtaagaaaagagaacgatgaaaaaaataaataa

SEQ ID NO: 88983 - DNA, 627 bp, Parabacteroides sp. D26
atgaaaaaaataaataaatcaggggaaccttcctccttaaccaaattcaaacgtaaaaattcttccaataaatgggaagacattcatacagaacagaatcggtctatatatgaagattgcctgtttcaatgtatggatgaccaaaattacttatgtggctatacagagataaaacttgatgacaactatcacattgatcatttcataaaaagagatattgacccacgccaaacatttgattggcaaaatatgattgcatcggtacacgattccaaatttggagccgattttaaagataaggcagtcaataataacgattataacaaacggttgaaaaaatataactgtattctcaatcctgtaacagagaatatggaaaatcgttttattttttcaacaaatggtgttatcgaaccggcagataggaatgatagagaagcaacagaaaccatccgcgtctttaatttacaggaggattccctgaacagcagacgaaaacaggcaatggaaaatacaagaaaattattggaacaaatggataaggaagctgtaattggatatttacaaggagaagaatttccgagtgctattgcttatgagatttcaaagagtcaacaatttcactaa

SEQ ID NO: 88984 - DNA, 1659 bp, Photorhabdus luminescens subsp. luminescens
atgaccagacaattagaaagaaaagcaaaaggtggaaatttactgtctgcattcgaactttatcagcgtagtttgcaagttgagcgtgaattggatgaaaaacaagctgacgaatggttggaactttgttgggactatttgcaaggtggttacatagatagctcagagacatttcgacctactaaccccttgttccttcgccagctggatttaagtgattttcgtcgtttttcacatctgaaagtgaaccttgaaaaagatctgacggttattattggcaataatggaaaaggtaaaacgagcattctttcggctattgctaaatcactaagctggtttagtgcaaacatactgaaagaagatggtagtggtcagcgtctgagtgaatttacagatatcaggaatgattctgtgaacaaatatgcagatatcaccacgaattttttctttgggaaagggctgaagagcttagcgcttcggttatcccggtcggctcttggtgtttcagaacgaagggatagccggattaaacctgcaaaagatttggctgatgtctggcgtgttgtgaatgaggccaggacaataaatttacccacattcgcgctgtacacggttgaacggtcgcacccattcactaagtttcaaaaggatagtaatgaaagaagggaagaccggtttgatgcctataatcattcgctaacaggcgcaggccgcttcgaccactttattgaatggtacgtttatcttcataagcgaacagccggggatgtttcttcgtcaattgagacgcttagacaacaggtttgtgatctacagaagtccgttgataatggtatggtttcagtggcgccattgcttgaagatatgaaaagtaagctggaatcggcaaccgcgaaatataatttagccctgtcaaagaggctactggctgaatctcttcagaaaaaaatcgtggaacaagccattaccttggtcgtaccaagcatcagtcatatttgggttgagacggagtcaggaatagatgttgtgaaggtcactaatgatggtcaggacgtgactattgagcagctatcagatggacaacgtgtttttcttggattgattgctgaccttgcgcgccgtatggtgatgcttaatcctctcctgaaaaaccctctagaagggagtggcattgtattaattgatgaaattgagcttcatctccatccgaaatggcagcaggatgtgatcactgaccttcaaaaggttttcccgaatatccagtttatcattactacgcacagcccaatagtgctatccacgattgaaagacgatgcatccgtgagtttgctgatattgatgaaagtggcatgcagttcctacaattaccacagatgcaaaccaaaggcagcgaaaatgtgcatattctcgaacaagtgatgggcgtattttccactcctcccaggatcaaagaatcccattgggtcggtaactttgagcaatccttgattgccgatggtgaggaaattagcgtgcaaactcgtacactttacgacaacataaaaaagcattttggcaatgatagtcctgaacttaagaaagctgacagcctcattcgagtccatcaaatgaaaaataaaatcaataaattaaaatcggagaaggataagcaaggatga

SEQ ID NO: 88985 - DNA, 651 bp, Photorhabdus luminescens subsp. luminescens
atgaaagcattaactcgtccgcccaagccgcatgtacttaaccagtttaaagcgggtcagaatacttggatggaaatagaccaaacggagatttggccacatcttgaagaaatgcagggtgcgttctgcgcatactgtgaatgtcgattgaatcgcaaacatattgaacatttcaggcctagggggaagttttctgctctgacatttgattgggaaaatttgtttggttcctgtggggacagttcaaaatcaggtggctgggaacggtgcgggatttacaaagatcatggtgcaggggcatacgatgtaaaccagcttatcaagcctgacgtagagaaccctgacgattttttgttgtttcttacgacaggaagggtaatacctgcatccggacttcaaggtcaagcattaaagaaggcagaggaaaccattcgtgtttttaatttgaatggtgatgcaaaattattcggtagaagaaggactgctctgcaaaatgtgataaaagaagttgaatatttttacttgacctttgaggagcttgaggaagaagaatggactctgttgcttcacgagcaactggaggaacttaagactgaagagtttagtactgccctgaggcatgcatggctgtataacaaacaatttatataa

SEQ ID NO: 88986 - DNA, 1224 bp, Yersinia enterocolitica; identical to SEQ ID NO: 86710

SEQ ID NO: 88987 - DNA, 654 bp, Yersinia enterocolitica; identical to SEQ ID NO: 86711

SEQ ID NO: 88988 - DNA, 1239 bp, Yersinia enterocolitica; identical to SEQ ID NO: 86452

SEQ ID NO: 88989 - DNA, 657 bp, Yersinia enterocolitica
atgtttccggttaataaatctcaagaagctccagcctctctcgcagcaagaagatcctacagtgaaaaagatgtaatcgaagcattgtctcgtgactttcataataaatgttacatatgtgaagttaaagatcccctggttttgaatgtcgagcacttccggccacatggggataatttagacaaaatgtatgattggagaaatttgttttttgcttgtggtcgttgcaataacattaagagagcgaaatttgatgacatgctcgattgtacgaatcaaggcataaacatcttaatatcagtcaaacacgtattcccaactttagcatattccaatcatgtggatataattcctatgaatgatagtgaggaaacaaaacaaactgccgaattgatttatagtgtgtttaatgacgaccacacaggaaataaagatttaacacgtatattcttactaaaaaggctcatgaaaatatataggaaacttcttgaattaactttagattatgatgacgaagatactttagaggaagaaaaggagcatatagcaaaaaaaataaaaaacatgcttaaagttgaatatgaattctccgcctttattcgctggtccataatagatgcaacgaaacttcatcatttaaaagagggcattttttaa

SEQ ID NO: 88990 - DNA, 1239 bp, Yersinia enterocolitica; identical to SEQ ID NO: 86452

SEQ ID NO: 88991 - DNA, 657 bp, Yersinia enterocolitica; identical to SEQ ID NO: 88989

SEQ ID NO: 88992 - DNA, 1227 bp, Yersinia frederiksenii
atgctttgtagcatttccaagataaatattctgatcccatattcaagaaaaaaagctgatattcagttggatggaatgagtctaattattacaggaggtaatggttgtggcaaaacaagttttataacagctatttataactacctaaaaaaaggaatagatgaccctcaaaataataataggcagtatttaacacaacaaattgattatcttgaatctcaattaaagagcattggtagagatggtggaaattataatttcttcagtagccagtcagaaaaccataaaaaacgattaaaagaactcaatgattttaatatagaaataaaatctatagataacaaagatattcgttctttgctgagatttcactcagctacacgacaatctgcaatatcatctccaaatcaagcccccaaacactcagtgcttattgaggaaaataagcattttgctaatgacatagatggcagccaattctttgaaagttatttgttgagtttgaaaaaaaatcaaagttatgcaatagcatttgataaaaatgaaacggaagcaaatcgtattgaagaatggtttgataaaatacagacagacttacggtcattattcgaggattcaaatttaattttggaatttgatacaaaagatgaaaagttttatctacaccaagaggggaaagatagatatacattccaaacactttcagcagggtattcctcaatcttaagtatttatacagatttaattatgagggttgaaatgtggggggtttcacctgataatatacaaggaataatattcattgatgaaattgatgctcacttacatgtatcattacaaaaacaaatattgagatttttcatcaaatcatttcctaaaattcaatttattgttactacgcattctccttttgttgtcacctcagtttcaaatactattatttatgatcttacaaaaaatgaacaaataatagatgtatcctcttattcatatggtgtcgttatggaggagatttttggtgtaataccagaatcacatgtattgatggacaaaattactcatatagaaaacctaacaaataatataacacctgaaaatattgatgaattggaagcaatgatatcatctttggcatccgatcaagaaaatatgagcaacgacacccaagcatttcttgatgctgcacggttaaaattaataaaaacaaaaaaaacaatcgaaaaatag

SEQ ID NO: 88993 - DNA, 654 bp, Yersinia frederiksenii
atgtttaatgtgataaggtcaatgccagcacctgaatcgctgcagagcaagaaaaaatatgataatgaagatgttcatattgcactacaagattgttttcatgaaaaatgttatttatgcgaaacaaaaaaacctttagatattaacattgagcattttcaaccacacaaaggcgatgaaaataaaaaattctcttgggaaaatttatacttagtgtgttcccgttgcaacaatatcaagctagcaaaatatgataaccttcttgattgttgttctattagcgtctgggataaaataaagctaatacccggattttcacctaaagcaagaaagttcattattaccccactatctactgatgataagacccttgaaacagccaaattactagacgatatctacaataatgataatactataaataaaagacttacagcgcggtctctacgatcgcaggtagtccagaccacacacaagctaacacaacatatgattgaatattataatgaagattcaacagatgaagaaaaaaaagtagccattagtaaaatgaaaataatgataaaaaaatcttatccttattctgcattttgtcgttggatgataaaagatgatgaggaactagataaattattatctaatcttatgaactaa

SEQ ID NO: 88994 - DNA, 1239 bp, Yersinia enterocolitica; identical to SEQ ID NO: 86452

SEQ ID NO: 88995 - DNA, 657 bp, Yersinia enterocolitica; identical to SEQ ID NO: 88989

SEQ ID NO: 88996 - DNA, 1239 bp, Yersinia enterocolitica; identical to SEQ ID NO: 86452

SEQ ID NO: 88997 - DNA, 657 bp, Yersinia enterocolitica; identical to SEQ ID NO: 88989

SEQ ID NO: 88998 - DNA, 1374 bp, Yersinia frederiksenii
gtgagaattgaaaggttaaaactgtacgaacataaaatgtttatagatactgaagtgattgtatctaattctgaacagaaaggaaattttaagacagtcgtcattggacccaatggtgctggaaagagttcatttctctcttgcatctgcgatatttttttatgcgaattaagcgcgaatgccgctaaaaagaagaaaataattagcactatgggatttaaatatgagttaaaattaactaatgggcggatagtatcagaatcaagtgataacgattatttcaaaaaaaataaaatacttgccgtaactaatagttacaaggataaattttatttcccaactaaaaatgggattagaaattcacctaattacatatatcttgggctaagaagtgcgtctaataatatattcttttccaatgtcaatgatgatatgcttaaatacttaatcaccatattatttgatgaaaagaaaaaagacagtgctgtaaaggttttgagtgaattaaacttcaaaagatcagtgggaatagttataaagaaagggaagaattataataaattttttgaaaaagataacgttcgttctagtcttagtgatggatctctgaacagatttttgtcttctgaatattacattagcaatgaaagtgacatcttttctattttagctgattttaataagagtaaatacgctgatcttcattttaatttaggttatgacgacgataatagtgatataaatactttagacatagtattaaaacttgttgatgcacgtattctttcggtagaaagattatctctattttcgcatgatggatatgatattaatgaagcgagttcaggagaatttaatatacttagggtgatgttatcgatcatagccaatattgacgataactctttaattttgatcgatgaacctgagataagtttgcacccgaattggcaaattgaattttgtaggcttttagatttggcgattgaaaatttcacaggctgtcatacaattatagcaactcattcacattttattctttcaaatttatctcagttatcatcgacaataatttctatgcaactaagcacattaaataggaaggtatatttgcaaaatacttatcctgaatcctttgggatgtcaccagaaaatacactgtatacgtttttcggtataaccggatacaataataagtattttgaacaagatttgagaattttatttgattacatgactaacaacaatgtggaaaactactctctctttgagaaggctttttatcgattaaatagatttgattttgatgagtcaaaccctataagaaacacacttaaagctgcagagaaaattgtaaaaaaggaagatttatga

SEQ ID NO: 88999 - DNA, 669 bp, Yersinia frederiksenii
atgaggggggactttaaagagattgaatcatttaattttaaaatatatctctccagaaaagaaagaaaattaataaatgccttgattagatctgatcttgagcattcgcagatctgggatggttctattagatctctaggtttgattagaaaggaaagggatgatttaaaaattaaaattaagcaacatttactcaagttacaggatggtttttgtccgtattgtgggtttaagttttcttatcgagttggagaagcgggagacagaaacatacaaagagaacatatagcacctaagtcagagtataaaatatacacatttacaacacgaaatttagttttggcttgttcgatatgtaatggctccgattataaatcaaacagtgataccataaatcaattaggggatacatacagaaattgtgattttaaattaatccatccatatcttgataagcgttcagaacatcttaaattaaatcataatactggagcatatgatctaattgacggaaagcctaagggtaagtttacggtcgatctttttggtttgaatgaaagatttcatagagagaacagactgattcatttgaattatgaaaaatacaatgtcaactcttttgaagatttgatttgtcttctttcttctcaaaaccattctgtaaaataa

SEQ ID NO: 89000 - DNA, 1698 bp, Yersinia aldovae
atgtctgataataataaaatatctagcactttaaggctattggcaagaaatgccgataaaggcgacttaagagcgatatatcaactttttttaaattttctccatggaaattactcagaaccaaataaaaaaagtagtgaccgttatttaactcaattaattgaaaaaattgatggcaaaacactcatattagacgaaatggttctaaatgattttagaggtattaataacttaaaaatacaatttgacacgcggctaacagttcttgttggaaataatggctatggtaaatcaactgttcttgatgctctagctatgacattaagctggttaaaatctaatattttaagagaagatagaccaggcctatcaattaaagaatctgatatcaataataataaaatagtacaatatgcatcaataacctcaaaattttcgcttaataaaactcccttcaccataatgttatcaaaagctaaagaaggcagtcctgagaaaagaaataatgaattagtcgaaataaaatcccttgccagcatatatcgccatgtcagtgagttatcatcaagtataaatctccctctgcttgcctattattcagtttcacgttcaactgaagggggaggtattgactcaaagaaaataaatcaaacaaataaaaatgagtggtcaaaatttgatgcttatgaagacgtatttactgacagacatgattttggtgaattctttaaatggtttatatttataaataatattgcacaacaaaatagcaagtcggaaataaaaaacaaaataaataaacttgttgctgagataaatggcgccgagttagtgctaaaacaaatacaatctgttcaagatattcaactcgagtatcttaaaccaattcaagaagagattaactttaaaacattacagattaaaaatctaaatattgagtattacaagaatgacgataaaactgcttcaaaactcatagagtcaattatactttcgtttgaaaaattccttccagaactaaaaaatattagaattcaatatgataaaaatagcgtcaaactcctagtggaaaaaaatgggctacaaattgatgcgcaacaactatctcaaggtgaaaaatcacttctaactctggtaggtgatttaacaaggcgattggttatattaaactcatctagagaaaatccattagaaggttatggaatagtcttaatagatgaaatcgatctacatttacacccattgtggcagcaaacaatcgttgggaacctattgagcacattcccaaatatccaattaataatctcgacgcatagcccacaagttctatcgacagttgcagcaaaaagtataaaaatattaagtgcgaaatataataaaataacggatcaagatgaaatgagcattcacccacctgaattccaaacaaagggtgttaagagcactgatgttttatctgaggttatgaatactgacccactcccacctattatagaggctgactggatagaagagtatatagagttaattgaaacaggaaattcggattctaacaaggctaccctattaaaagataaaattgtatctcattatggtactgagcatcctattgtcaagaaatgtgaaaatataatattattacaagaaatgaagatagaactggctaaaagacgattaagtaataagggagatgtttaa

SEQ ID NO: 89001 - DNA, 684 bp, Yersinia aldovae
atgcataaacttaatcgctctccggatgctcctgctatcttagatatgtttgatcatacaatacatacatgggatgattttagtaccgagaataaaaaagctgtatgggtaaagctctatgaaatgcaaggtaatagatgcgcatattgtgagaaaacgatcaatcctgaagataaagatgataaacatatcgaacacttcagaagaaaaggagttgaacaatatcaacatttaacatttgaatggactaacttatttgggtcttgttgtgttcgtgatagatgtggaatatttaaagataaacaaaaatacgaagaacacaacctaattaaaatggatgatgaagaccctgaaaaattctttacttttctaagcacagggaaaatatcaataaatgataatttaagtgcggcggatagagaaaaagcacaggtaactttaagagtatttaacttaaatccggatagaaatggcataaaaacggaaaggttaagaatgattgcttctcatgaatatcttgtgcgtgagatgattaagttaatcaatgagttaactagtgaacgtgatatggatttactaaattacgccttagatgaatatcttgaaaaaataagtggacagccttttgaaacagcgatcaaacatattttgatcgctaatttcaaatccagcatttataaataa

SEQ ID NO: 89002 - DNA, 1656 bp, Yersinia pseudotuberculosis
atgaaagtcgacaaactacatgttcgttcacgcttcaaaaaccttgaaaacgtgaaagtggactttgacgaagaccatttgatgacagtagtggtgggccgtaatggttccggtaaatccaacgttcttgaagccttggtagctatatttcgcaacctcgacctgggggaagctccacctttttcttacgagctaatttatcgactcggtgaacgccataagcccgatcaaaccagtgaacgatggctggaaataaccatcgatgctgatccgtctcgtggttctttggcgaaacaatacgatgtgcgcgtacatgacttgttaaacgatgctactaaagaactattttttgatcaaacttcaggaatgcccattccattttcaaaagttaaacgtgataaagaaggtaaagcgccttacctacccaactatgtgtttgcctattattcaggccccagtgatcgactggaaagctacttcaagaaacacaggaccgatttttatcgtcatttattaaacgacaaaccggataaaaagcttgatcttaagggcgacattcgcccgcttttttatgccaaaccctaccacagccagtttgtactcttggcattttttctgtctgacgaaaatagccctcagcgcaaatttattaaagagcatttgggcatagaaggtttagacagcattcactttgtgatgcgacaaccaggctgggcaaaacaaaaaggcgagttattctggggcgctcgcggcgtagtccgtcgtttcctagatgagctaataaaatatacgctagcacctataaaagtgacgcgtcaggaagacacatctttaactggtagtaatgttcgaaatgaattctttcatctatttttacccaatgtcgaagtacttcacgcattcgccgaaggattaagtgacgacgaactatttaaaatgctcgaaagtactctgctatcagaaatcatctctgaagtcagcatacgggtaaaagtatccagtagcgaagaacctctcactttccgagaacttagcgaaggtgaacaacagctactgaccgtattgggcctactcaagttcactggtggtaaagattccttgtttttgctcgacgaacctgacactcaccttaacccgtcatggtccattaaataccttaaattcctgcgtgaattcgtacccaaccatgaaaccagccatttactgatggtcacacatcatcctttggcaattgccgagttgaagagacagcagatacaagtcatgtggcgtgacgatgaacataatattcactcacaagaaccttacatagatcctcgtggcgctggttttatgtccacacttactgagatttttggcctaaacacaacattggatctagaaactcaaaagttattggatgataggaacgaactagctggcattgaaaatcgaacggaagatcagaacaatcaacttgaccttcttaatgatgagttaaatagacttggattttcacttgaaaatagggacccattatacagtgagtttcttttagcatggcaagacctaagatacagtgataggccactattaaccccagataaagcagctcagcgacgagccgctatgaaaaaggtaattgaagcgcttcaagctaaaaaggaccgagaatga

SEQ ID NO: 89003 - DNA, 843 bp, Yersinia pseudotuberculosis
atgattttcatcaaacgagacgccacgcttatcccagcaaaggtatttgctgttgcccaacgtgcgcaagatgctctggaactgctacccgccgagcagaggaaagatttcatcaagaaaaagtctcatatatggagaggtttttcaaaatatctagccaaaatgtcttatggtaaatgctggtactctgaagctaaagatgcaggtgcaaatttcgatgtagatcatttcagacctaaggctgaagcaaaaaggacagagaatttagttgatgcagaaggttatgcgtggctcgcatttgattgggaaaacttcagactttccgctcagaattgtaaccgattgaacacagatgaatcaggtaacaccgtaggcaaaggcagttggttccctctgctaagtggtagccctaaagccaactgggataatcgttgtattaacgatgaaaaaatcactctactagaccccgtagttcaggctgacctcacttatatagactacgacgacaacggtagatttacttggagtaagcactgcgttggactggcagccttaaggattcgggagtctggcgttatttatggccttaatttggagaaaatgcgtgaagcacgatttcaggtcatgagagaagcaaaagaacttctcgtaactatccagcaaattgcagaagacttagacccattaggtgatgaagcacctatgagagcgatcgaacgacaaatagaacagatcaaaaacaaaactcgggctgatgcaccgttttgccgtgcagtaagaacacaacttataaaacttggtgcagaggattacttaattgatcgaagtttggatgtcgcctga

SEQ ID NO: 89004 - DNA, 1236 bp, Yersinia pseudotuberculosis
atgctttgtagcatttccaagatagagattccaattccatactcaagaaaaagagttgatattcggttggacggaagaagtctaattattactgggggtaatggctgcggcaaaacaagttttataaccgcgatttataatcatctaaaaaatggtatagatgatccaaagaataataaccaagttgaattaacgcagcaaattaactggtaccaaacacagttagacaatataggtagagatggtggaaactatgatagtttcactaattcattaaaaaaacttcaagctcggaaaaacgagctcaacaaatttaagattgaagtaaattctattgataataaagaaattcgctctctgctcagatttcattcagctacacgacaatctgcaatattatccccttcacaagcaccaaagcattccgtacttgttgaggaaaataagcattttgccaatgacaaagatggcagtcaattctttgaaagttatttattgagtttgaaaaaaaatcaaagttatgccatagcatttgataaaaatgaaactgaagcaaatcgcattaaaaaatggtttgataaaatacaaacagatttacggttattattcgaagattcaaatttaattttggaatttgatacaaaggatgaaaagttttatctacaccaagatgaaaaagatagatatacattccaaacactttcagctgggtattcatcgatattaagtatttatacagatttaattatgagggttgaaatgtggggtgtttcacctgataatatacagggagtaattttcattgatgaaattgatgctcacttacatgtatccttacaaaaacaaatattgagatttttcattaaatcattccctaaaattcaatttattgttacgacgcattctccttttgttgtcacctcagtttcaagcactattatttatgatcttacaaccaatgagcaaataatagatgtatcctcttattcatatggtgtcgttatggaggagatttttggtgtaataccagaatcacatgtattgatggacaaaattactcatatagaaagcctaacaaataatataacacctgaaaatattgatgaattggaagcaatgatatcatctttggcatccgatcaagaaaatatgagcaacgacacccaagcatttcttgatgctgcacggttaaaattaataaaaacaaaaaaaacaaaaaaaacaatcgaaaaatag

SEQ ID NO: 89005 - DNA, 654 bp, Yersinia pseudotuberculosis
atgtttaatgtgataaggtcaatgccagcacctgaatcgctgcagagcaagaaaaaatatgataatgaagatgttcatattgcactacaagattgttttcatgaaaaatgttatttatgcgaaacaaaaaaacctttagatattaacattgagcattttcaaccacacaaaggcgatgaaaataaaaaattctcttgggaaaatttatacttagtgtgttcccgttgcaacaatatcaagctagcaaaatatgataaccttcttgattgttgttctattagcgtctgggataaaataaagctaatacccggattttcacctaaagcaagaaagttcatcattaccccactatctactgatgataagacccttgaaacagccaaattactagacgatatctacaataatgataatactataaataaaagacttacagcgcggtctctacgatcgcaggtagtccagaccacacacaagctaacacaacatatgattgaatattataatgaagattcaacagatgaagaaaaaaaagtagccattagtaaaatgaaaataatgataaaaaaatcttatccttattctgcattttgtcgttggatgataaaagatgatgaggaattagataaattattatctaatcttatgaactaa

SEQ ID NO: 89006 - DNA, 756 bp, Yersinia enterocolitica; identical to SEQ ID NO: 87092

SEQ ID NO: 89007 - DNA, 657 bp, Yersinia enterocolitica; identical to SEQ ID NO: 86453

SEQ ID NO: 89008 - DNA, 1239 bp, Yersinia enterocolitica; identical to SEQ ID NO: 86452

SEQ ID NO: 89009 - DNA, 657 bp, Yersinia enterocolitica; identical to SEQ ID NO: 88989

SEQ ID NO: 89010 - DNA, 1419 bp, Yersinia intermedia
atgaaacttaaaagtcttggactgaccgcttttcgagggtttgatcggctggatatcaattttgacgagcggttgaccgtggttgccggtgtcaatggcgttggtaaatcaaccatcctgcaggctatagcgatggcgtattcccattccttgcctgaatttacggtttcgcgagagaaagcattgccggtacttgatgccgacatacagcaaggtaagtccacctgcatcattgaaatggaaagcagtggcttgggagctgcgcagttgatcaccttcctatccaaggaaagccttgataaggatgaaaagctggcgcttgggcataagcaagcccagatgaagaagaatttggctcgtctggaaaggggggcgcctgattacaaaaacctaaaaaacgagattacttgggtagacaagcgactggaaggcaactttgagaaacgtttgagatggctgtttaccgacactaatgaaacagaggcaaggctgaagcgccacctaaaaagcagcccaacacaagcactggttgtgtattactcaacacaccgcttgctttcaaggctgccgccaaaacttcagggtacattgcccttcaagcagggggcggcattctcaaaatccctgacgcaacttgagatatcgctgaacgaatttgccaagtggcaacgtgccatattctcgacccgcgtgcttcggaaagaaactgtgcagtatggggaacggattttgaagctgcttcaggaagcaatttccagccttatgccccaggtcaaggaattttggtttcatgagggaaacccacctcgttactctgttatgaaagacgcgacgatggctgagcaggtcaacgacaaaaaagcgggaaagcagttatttttggagcaattatccgacggcgagcgaggattgattgctttggtttttgacctaacgcgccgtcttgctatcgccaatcctaatctcaaaaacccaatagccgagggtgaggcgctggtgctgatcgacgagatcgagctgcacctgcatccgaagtggcaacgcgaggtgctgcaacgtctgagcgacaccttcaaggcttgccagtttgttgtgaccactcattcgccactagtgttgggcgaggtgcctgcaagatgtgtacgcttcctcgaaattgtggatggcaaagtgagtgttgccgttcccactgaggcctatggcatggatgccaatcgtatcctgcaggagctcatgggcgcaccggtgcgcaaccgcgaggtggaggggacgttgaatgccctcttcgagctgatcgaccaggagcgtttcgacgatgcccgtgccgctattagggcccttgaacaaaagctcggcgaggatgagcccgagttaatccgggccagctcgctgatccgctttctggagggcgacgagtag

SEQ ID NO: 89011 - DNA, 591 bp, Yersinia intermedia
ttgaccctgcatcgccagaagctgcatgctgactacgacaattacgctgacaaggctactttgcggcaggtgctagtggccgaacagcgcggcctgtgttgctactgtcagtcacgcatccgggccacgcccgagggcatgaaaatagagcattggcaatgccaggctaaccacccagagcggcagctcgatttcggcaatctgcatggtgcttgcctgggcgggcacggccgccctgaactcgagcagtattgcgatacgcgtaagggcaataataggctgtgcttcagcgtgtgcgacccggcgcaccccattgagcgacagattaagttcttgggtaacgggcggatcgagtctgacgatgtagcaataaacaacgccttgaatggcgtgctaaacctcaactactcccgcctcgtagataaccgcaaagctgtgcttgaggcctttaagcagcggctaggaaaaggggcgctgaacgctgaacaagaactcaggaagtgggatggcactcaagctggggatctccctgaattcgcgcaggtgatggtgttctggttgcaaaagaaaatctctaggggggccgcatga

SEQ ID NO: 89012 - DNA, 1371 bp, Yersinia massiliensis
atgcgagaaccctatcgactggaaggcatagtgctacaagatgtgggcgtgtttgaacacacccgctttgatttcccccctattgaatgcgcagaacgagatgaagagaaagccgagatccatctgtttaccggtggtaatggctgtgggaaaagtacgttgctatatgctctggcggcaatatttcaaccaagtgatgcaggaacgctgataagacgacgttttaaaagccaacggagtgccattgatttttgcttcgcgggtttagcgggaacttatcgtgcgtcgccctcagaaaatgcagccaataatgtttttggcgagactcaattgacgtatggtgacccactaaattacaacattaaaaacagtagctcgagcctactaattagtaatatcggcgatcactataatctttcagtgccatataattcaaaagcttttgattttgctgcctttgcttattcagggcaacgttcaccacagagcaattttacgctatcggccattcaacaaataactaactcaccgtttgaaaatgccttgtcatttgatcaaaccattcgccccggtgtattaacgcagtggattgccaataacagaactcaagcggccttagcacttgctgaaggtatggttgatgaagcaaagcgctatgatctcgccttgtcccgcattagccagtttattaaagtaatctgtgagttagacatcgtatttcgtttgcaacgctcaccactggcagtagcattaaatattgatgggcaagatgttaattttgaagtgttacctgatggtttaaaatccattatttgctgggtcgctgatttagctctccgtttagaagccattccgtggcaacaacagcgcgatatttttgctcagccaataattttatttttggatgaagtcgatattcatttacaccctaaatggcagcggcgcattttaccggcgattcaaaaattactgccaaatgcacaagtgtttgtctctacccactcgccttttgttgtcggttcagttgaggatgcttgggtttatcgtctacccaatccacagcgtagtatttgcctggataattcagtggcagaaactatctcgccaacacactcagcagcaggcaaaagttatcaattaattctggaagaagtctttggtattgaagagcagttcgatatagaaaccgaaagtttattgagtgagttttaccaagctagagatacctacttacaaaaccctcaaggcgacactgacgtcatggagttggcagacaagttgcgtgtaaaaagtgaagaactcgataccattattgagatggagttgcgccagattgctcggcgaatacaaaagaggcccgctggtgtataa

SEQ ID NO: 89013 - DNA, 585 bp, Yersinia massiliensis
gtgtataaaattacccgcatctcaccgccgaagagcctaaatgcaaattataaagcatggaaccgacgttatcaggctgataaggccagcacgccggtaaaagcttttcgttggtataatattgcctgctatcaagaaactcgggatctattgatttcaatgacgcaaaaccattgcgcattttgtgatggcccgctcggtgctgaaagccgcgaaacaattgagcatttcaagcctaaaagtgtttttccagaattggcttttacttgggaaaacttatttccttgttgcgatcgttgccaagggcaaaagcttgaaaagtatgatgacgcattattgaagcctgacgatatcgcttatgaatttgagcgcttctttattgctaactatgccactggagaaatcacaccttcaccccaagcttcagcagcagaacaatatcaggcaaaagtcacaattgaacattacggattgaatttacctcaacgtaaaatcgcacgacgtaaagagctgagatgttatttggcgatgaagcatgagatgttgttagatgaattcagttatcgttatttcttaatggaataa

SEQ ID NO: 89014 - DNA, 1239 bp, Yersinia enterocolitica; identical to SEQ ID NO: 86452

SEQ ID NO: 89015 - DNA, 657 bp, Yersinia enterocolitica; identical to SEQ ID NO: 88989

SEQ ID NO: 89016 - DNA, 1506 bp, Yersinia pekkanenii
atgagctacaatataaaacatatttatcttgatcataaaagcatccgagttttacctcatgactgggaaaataatgaaaatgtatacaccattcttattggtaaaaatggaacaggcaaaagtcgtttattaagtggactagccaattcgttatgttccatacgtgcaaataataagttgctaaagagagatataggaattgttagtcggcacttggttgaaaataataagttaactatttcattattttcaaattataagaatcatacaataaacataagtggtcgctcaatagatttaagtggctttgatattaatcgtgatggtgagtttttttgtcctaaggcattaattgcagtatcaacaagcccttttgataaatttccagaagagcatgattacttttctccattcaagggtaataaaaatgatggattctatagttactatggtttgaatgggtttggtaaaaataaagcaattcattctttgatggaaaaagtattattttcatcagctacaggggctcttgataaagatcgtgttgctgtttctaaggttcttaattttttaggttataatccgcgcttgagagtcatatttagattgcgtcatagtataaatacttacatggataacttatcttcttttagccctaacgaattcatggaatatgttgccgcttcagcaaaattgaatttatcttatctgaaagaaaagtataatatttcatatacaaagattagggatgcatttgttaaactaggtgatcatgcatataaaaatgattcagtaagagagtttgatttcactattgattatgaaaagagtattgtttcagattatcactctgattttttcgataagatcagagtcctatccacaataggtattttctcaataaaagatattatcttatatccgatcattattgatgaaaatgaatattatggtgatgatgtatatgattatggaataagtgtaagtgatgcaagttcagggcagcaatgtattttgctaaatacgctgggaattgcatctagtattaaaaataattctctgattctgattgatgagccagaaatcagtttacaccctgaatggcaggaggcttatattagtttgctaatggaggtttttgaaagctattcaggatgtcattttattattgctacgcactccccacaaataatatcaaatctaagaagcaaaaattgtttcatcactcaaattgataatggagatgttatttcttctgagtcttatacaaataaatctgctgattttcagttagcgactctgtttgctgcacccggtagcgacaacgagtatcttaagagaatagttgttaatcttctgactgttttatcgagtggtaaatatattaaagataaatatattgaagagctagtgctactaaaaaaaagcaaagaccttctcgatgaaagtgatcctgtaaaatacctcattgaccttgcgatagaagtagaaggaagattacaatga

SEQ ID NO: 89017 - DNA, 648 bp, Yersinia pekkanenii
atgatcaatcagccatttttatatacagatgaatacagcaaaaaaatcattgaaaaaatcagtgctgatgatttttgtgggaaaagttggggtgatgaagatctagctgatatatgggcggcaataaagttatattatattttagaacagaattacacttgtgtttattgccagcaaataacgaaaagtactaatggtcgacattgggatatagaacatataatttctagggaaagtgcggctaaatttatgtttgaatcgaggaatttatgtgttacttgtcctgattgcaatattaaaaaaggtgtttcaaaagtaactaacagtaaggcaataagaaaattacctttaaattctaatgattattttatcatacatccacatatagataattatgaagaacatattgaggtaattagagtgggagagttttattttgctaaaagtgaaaaaggtgaaaagactataagtttatgtggattaaatagattctataaatttgttggttatgactcagcggtatctttagatagtcgaattatgctattagcttcaatgatttccgatgcgaaaaatcaagccgagcggaatgatataatgcgtgaaattaccactcttacgttaacagcgttgataaaagagaagtaa

SEQ ID NO: 89018 - DNA, 1227 bp, Yersinia aldovae
atgctctgtagtatttccaagataaatattccaatcccatattcaagaaaaaatgttgatatccaactggatggaatgagcctaattattactggaggtaatggttgtggcaaaacaagttttataacagccatttataactacctaaagaaaggaatagatgacccaaacaacaataacgttcaatttttaacaaatcaaattaacagccatgaacatcaattaaataatattggtagagatgccggaaactataattattacagcagtgagttggaaaaaaataaagcccgactaaaagaaatcaatgattttaaaatcgatataaattctattgataacaaagacactcggtctttgcttaggttccatagcgcgacaagacaatcggcgatctcatcgccaaatcaagcaccaaaacactcagtgcttgttgaagaaaataggcattttgctaatgacaaagatgggagccaattctttgaaagttacttgctaagtttgaaaaaaaatcaaagttatgcaatagcctttgataaaaatgaagccgaagcaaatcgaatcaaagactggttcgataaaatccaaacagatttgcaatcattatttgaagattcaaatctaattttggagtttgatacaaaagatgaaaaattttatctacatcaagaagggaaagataaatatacattccaaacactgtcagcaggatactcatcgatcttaagtatttatactgatctgattatgagggtcgagatgtggggagtttcacctgataacatacaaggaattatatttattgatgaaattgatgctcatttacatgtgtctctacaaaaacagatattgcgttttttcattaaatcattccctaaaattcaatttattgttacgacgcattctccttttgttgtcacctcagtttcaagcactattatttatgatcttacaaccaatgagcaaataatagatgtatcctcttattcatatggtgtcgttatggaggagatttttggtgtaataccagaatcacatgtattgatggacaaaattactcatatagaaagcctaacaaataatataacacctgaaaatattgatgaattggaagcaatgatatcatctttggcatccgatcaagaaaatatgagcaacgacacccaagcatttcttgatgctgcacggttaaaattaataaaaacaaaaaaaacaatcgaaaaatag

SEQ ID NO: 89019 - DNA, 654 bp, Yersinia aldovae
atgtttaatgtgataaggtcaatgccagcacctgaatcgctgcagagcaagaaaaaatatgataatgaagatgttcataatgcactacaagattgttttcatgaaaaatgttatttatgcgaaacaaaaaaacctttagatattaacattgagcattttcaaccacacaaaggcgatgaaaataaaaaattctcttgggaaaatttatacttagtgtgttcccgttgcaacaatatcaagctagcaaaatatgataaccttcttgattgttgttctattagcgtctgggataaaataaagctaatacccggattttcacctaaagcaagaaagttcattattaccccactatctactgatgataagacccttgaaacagccaaattactagacgatatctacaataatgataatactataaataaaagacttacagcgcggtctctacgatcgcaggtagtccagaccacacacaagctaacacaacatatgattgaatattataatgaagattcaacagatgaagaaaaaaaagtagccattagtaaaatgaaaataatgataaaaaaatcttatccttattctgcattttgtcgttggatgataaaagatgatgaggaattagataaattattatctaatcttatgaactaa

SEQ ID NO: 89020 - DNA, 1419 bp, Yersinia intermedia; identical to SEQ ID NO: 89010

SEQ ID NO: 89021 - DNA, 591 bp, Yersinia intermedia
ttgaccctgcatcgccagaagctgcatgctgactacgacaattacgctgacaaggctactttgcggcaggtgctagtggccgaacagcgcggcctgtgttgctactgtcagtcacgcatccgggccacgcccgagggcatgaaaatagagcattggcaatgccaggttaaccacccagagcggcagctcgatttcggcaatctgcatggtgcttgcctgggcgggcacggccgccctgaactcgagcagtattgcgatacgcgtaagggcaataataggctgtgcttcagcgtgtgcgacccggcgcaccccattgagcgacagattaagttcttgggtaacgggcggatcgagtctgacgatgtagcaataaacaacgccttgaatggcgtgctaaacctcaactactcccgcctcgtagataaccgcaaagctgtgcttgaggcctttaagcagcggctaggaaaaggggcgctgaacgctgaacaagaactcaggaagtgggatggcactcaagctggggatctccctgaattcgcgcaggtgatggtgttctggttgcaaaagaaaatctctaggggggccgcatga

SEQ ID NO: 89022 - DNA, 1239 bp, Yersinia enterocolitica; identical to SEQ ID NO: 86452

SEQ ID NO: 89023 - DNA, 657 bp, Yersinia enterocolitica; identical to SEQ ID NO: 88989

SEQ ID NO: 89024 - DNA, 1749 bp, Yersinia pseudotuberculosis
atgcgtctggacaaactaacaattggaagtcttaaagatagcccatcgcatcagtttaaaaatctgaagaatgttactatcgattttgctcaaggacgttgggtgacagtagtaattggttggaatggtactggcaagtctaatgttctagaggctttagctattatatttcgtgacttaattgctaagaaacgcactccagaatttgcctttcaactttcctactgcatgggagcgggtaatgacaagcaaagaatacgcattgatgccgaccctgaccgtaagaaagacgcatttttaatttacgttactaacctaaaagaaaatgaatcaaataataatatccttgatgctcaagatcttgacgttgatgatacaaagctatctgaaaaaccgataaaactgactgcgttccttaactctgatacacagtatctgcctcattatgtattcagctattactctggcgaaagctcacgaatgcatgaagtatttcgtccttatctagaaagttatgatagtaaactgcgtaacggtgtagaccctgggctaaaacgcctattctatgcgatgccagtacatagccagtttgtcttactagcctttatgatccaacaatcagacgatgtacgggaattacttgaaaaagatatgggcattgatccagatgagggtattgaatcagtcctctttgttctaaagcagccaggatggagtaaaagaagaggaaataaaacaaataactcggacggagatgatagattttggggttcaaaaggtgtcgttcaaacctttttagatcgtctgcaaaatatagctatggcaccgattaaagtaaaacgagacaagcaaattactctttggaataaggaatctactgagtttcaatatctttttattaaggatatacatgctctccgaagtcttgttgataatcagtcccctgcacaatttttccgtgacttagaaagtacttatgtttctgagttaattgaagaagttcgtattcgtgtacgcttaaagaaaaatgatggaagtgtaacttttcgtgagctaagtgaaggagagcaacagttactcactgtattaggtttgctacgtttcactgccgaagaagaaagtctttttttgcttgatgagccagatacacatctaaatcctcgttggagtgtggattatatctcttatctaaagaaatttatcatagatggtgcccaacaaacagaaaccagtcatatcctaatgacaacgcataatccacttgccattgccgaattagagcgcgaacaggtacagattttatgtatgtcaaaacaagaggatcgtcgtcaaatcgtcgcatgctatccagaaatagcacctcgaggaatgggatatgctgcgatcgtaacgagtgacatgtttggtatcgcttctacattagatcagccaacccagcttctactcgaagagcagagagcttttgctgccaaagaaacgttaactttagatgagcaacacgaattagattcaattaatgccaagcttgacaggcttggatttagatttttccatccagatgatgaatattcacgttatctacgcttaagaaattcacttttggttgatagatttaatactgaactacctcaagaattagcaaagcaagtggttgaaatgcctcgtgcagagcgtgaggaattagctaaacacttaattgcagagctcctatcgaaacatccaaataaggatgaaggagaaaactcttga

SEQ ID NO: 89025 - DNA, 807 bp, Yersinia pseudotuberculosis
ttgagatatgtaagtcggctaaaattatctatgcctacaggttggttacagcgagctcaaagagctacacaagcggttgcctctggggcagcccctaatgattacgaccatatttggcgtgaattaaaagatggattagcagaattactgcacgacaagtgttggtactgtgagtctcccataacccgttctgataatgcggtagatcattttcgtcctaaaaattgtgttagtgatgcaataaataaacatgatggctataaatggttagctttcgaacgatttaattttcgctatgcttgtacttactgtaatagcaggcgcttaggtgttaatacagcaggaggaaaagcagatcgttttcctctaatcgatgaaacttcacgtgtatatagcgaaggtcccatagatcaagaatatccaatgctcttagatccttgtgaacttacagattggaaattactgggttgtcatcaggaaaatgggcagccttgtgcaactagtatagatcctatatccaaacagcgtgcagaagtttctatagaagtttaccatttgaactatgagcctacttgtaagcatagacatactgttgcagttcaacttatggctgatcttgatgaagctaaacgcctttttgagctgtctacccatgatcagagtagacgaagtgatttcataagagtagctgaacgtttacgacgagcaatagaccgagacgctccatttagtggtgatatgcattttctcatgcgtgggcaacgcagtgctgcgcactcatggatacaagatctattagaggcataa

SEQ ID NO: 89026 - DNA, 1722 bp, Pseudomonas aeruginosa
atgcgcctagataggatcaccataggtagcccgaaaagcagccctacgcatcaattcaaaaatctaaaaaatgtctcaatcgactttgatcagcagcattggattacggtcgtaattggatggaatggcacgggaaagtcaaatgtacttgaggcgcttgctaccatcttccgggacttcattcaaggggcgcgaaaacctgcatttgcattcaatcttgaatacaggatttcttctggttcaactgcgttgcacgtcaatattgatgctgacccggatcggccgcgtgattcacttattattcatgtcgcaacagacgcagaggctaaaagcgatgagttattcgacgcctctttcgagataagttcgaaaacctccgccctacgaggaaaaagaattccgctgaagagtttcttcgatcctaaattcgggtatttgccgcgatatgtatttgcctattattcaggtgaaagtgaccggctctatcaagtattccgtccatacttggaggattttgataaaaaattaaggcggggggaggatcctggattaaaaagactgttttatgccatgccagtacatagccagtttgtcctgctggcattccttattcagcagtccgatgatgtaaggaattttttggccgaacacttgggtattgatccagatgaggggatcgagtcggttttatttgtactgcgagagcccccttggacatctaaagaaggagaccctcgcttttggcgtgctaagggagtcgtcgcctcttttctggaccgcctctacaatattgcattggccccagtcgagctcagccgtcgtgagcgcgtttccctttggagcgacaaggtacttcaattcaaatatttatacgttaaagacatcgcctcgctccgcaaactggtgggtgagcagcgtccggctgaattttttcgtgacatggaaagcacccacgtttcccagctaattgatgaagtacgcattcgggtgcgcctccaaaagaatgacgggacagttacctttcgtgaacttagcgaaggcgaacaacagctattgacggttttaggcctgcttagatttacggctgaaagtgaaagtcttttcttgctggatgagcccgatacgcacttaaatccacgttgggccgtcgactatttcaactatctacgaacctttgctggtcaaagtaatgatgatcgggaaaatagccatatactgttaaccactcataatccgctggcaattgcagagcttgtgcgggagcaggttcaaattctgcagttatcaaaggatgcagaatcgacgcgcattgtcgccgtgcacccggaacttgacccgcgcggcctgggctacgctgcaattgtaacaagcgatatgtttggtatcgcctcaacgcttgatcagccgacgcatttgctcctagagcggcaaagggcatacgcaggtaaagagcacttgacacctgaagagctcgcagccctatctgaaattaactctaaattggaacgacttgggtttcgatttttccatcccgatgaagagtattcccgctacctacgcttgagaagcgctgcactgcgcgctaagtttgagtcggacgatccggagcagttagctaaccggtcaatagcaatggagtccgaagagcgggaggagttggggcagcgactcattcgggaactacttgccgagcagcgcgataagcaggagcccgatcagtga

SEQ ID NO: 89027 - DNA, 813 bp, Pseudomonas aeruginosa
gtgaggtacattgactcgacgcgattgcgtttgcctgatggttggctggagcgtgcggctgcggcaaaaattgcagtcgagaatggtgcgaatccagatgattatgcccggatctggagagaactgaaagacggattggcgaatctttttaatgacaagtgttggtattgcgaagtttcagttcctcgctcggataacgccgttgatcattttcgaccgaaaggccgcgtaagagacgctgagaatgagcatagaggttatcgctggctcgcttttgaacagtcgaattttcggtatgcctgcacgttctgcaattctcgccggaaagatatcgagggtgacactgccggtggaaaggctgataggttcccactgttagacgaggcgcgccgagtttatgagccaggggctgtcactggcgagcgaccaattctggtcgatccttgcgaagtcggggattggcggcttttaggatgcagaaaagagaatgggaagccttgtgccacgagtgatattcccgagcaacgccagcgtgcagatatttcgatagaaatataccatttgcatcacgagccaacttgcaaactgcggcattcagaagctgtaaagcttttaggggatattgaggaggcaaaggcactgttcattgcgacacaatctgatgctttacaagagccagcgttcaaaagggtggctgcgcgaatattgaaatctattcatgtcgacagtgctttcagcggcgaaatgcggtttctgttgagcggagagagggatatggctcactcttggatccagaccttgttggaaacttga

SEQ ID NO: 89028 - DNA, 1245 bp, Yersinia enterocolitica
atgtttcttcatgaagttgaagcagaggaatataaaggttttagtagtataaaaatttcttttgatgcgaattttacaatcttatgtggccctaatggcgttggaaaatcaacagtattattcgctatagcgagtgctttggttacacataataaaaatatatatttgaatgaaaatagccaagtgaggattttgtttacaggaagagatggagttaaatctgaatgtggatttggtcgaggttcttatatgatggaatcttccaggcaaacaacttttaaaggtgggccaagtccatatcaatatagtgacggccgttcaaataggatttatcttaatgatgtcggtgaaagattctcccctctatttattggtcctaatagaaatattttttacaaaaaaatatctgggatgacttctgaaacttcagcagttgaatacagaaaaaaatacctcagagaagcacttgattatcttgcatcaagttattctccagaaataaaacaatggatgataaatagatactttatcattgataaagattgggctgaaatagaaaaaagaaattggaattttattatttctaatttggattatatctttggggaaggtggaagattctcattttataaaatagatagagagttagagccaagttttaaactagatggcaatgtggtttatttagaagatttatcctcaggatttaaatctatactttcaatagttttttctattgttgaatggattgaaaaaactaatgatggagattatatgcttattgataaagcaaccggtgttgttttgatcgatgaacttgatgctcatttacatccatcttggcaaacgaaaataaaatctattctacagaccatatttccaaagttacaatttatcattacgactcattcaccacatataattagtagtgcagaagctaatgaagtcattatattaaagcgacatgatggtaagattgttccatttgttgtaacaaagtcactggcagcttggaaaaccgacgatatatactcctctattatgggagttgatacagtacatcaaaagacgttaaataaagtagtttcggaaattgaagagttgattgatgagaataaactcgatgatgcagttgtccttatagaagagtattctaagaaaatacctgactctgatcctactgcattgactttacgtaaaagaatcaattctcttatcctttccaaggagaaagagaatgattaa

SEQ ID NO: 89029 - DNA, 732 bp, Yersinia enterocolitica
atgattaaattgaatcgtggggttgagccaaatattttaattaataagaaagatgaatggactaaaaaattaatagataagatcaattactttggagggtatgagtttattcctgatgatgtaaagaaatcggtagtttcacattatagtcatgatgaaattaagagtgtattaatagatacaacatttaaaaaatgtgctttctgtgaatgtctacctgaagatggtggtgggtatattcaagtggagcattttcatcctaaatcaatttaccctaatgaatgtttttcatgggaaaattttcttccttcatgtggcatatgtaataataataaaggaactttggatacaaaagtgactccaataataaatccgtatgatgatgatcctaagaaaagtttttattgtaactttttaaaagtgttaccgctaaagaatgatcaaaaagcaattaatactgaaagagagataatgttaaattctaacagattgattaacagtcggactgagttgttaagaaaattgcagattttaactgaagagttgagagatagtattgtgtatctgaaagaagcagatactgacagaaaaatttctaatagaaagagcaaattagatcagaaaattcaagaaattgagttttatatgcatccaaagagtatacatagttttttttgctcacaggttattgaaaatgattgccattacatagaagctaaaacattactatag

SEQ ID NO: 89030 - DNA, 756 bp, Yersinia enterocolitica; identical to SEQ ID NO: 87092

SEQ ID NO: 89031 - DNA, 657 bp, Yersinia enterocolitica; identical to SEQ ID NO: 86453

SEQ ID NO: 89032 - DNA, 756 bp, Yersinia enterocolitica; identical to SEQ ID NO: 87092

SEQ ID NO: 89033 - DNA, 657 bp, Yersinia enterocolitica; identical to SEQ ID NO: 86453

SEQ ID NO: 89034 - DNA, 756 bp, Yersinia enterocolitica; identical to SEQ ID NO: 87092

SEQ ID NO: 89035 - DNA, 657 bp, Yersinia enterocolitica; identical to SEQ ID NO: 86453

SEQ ID NO: 89036 - DNA, 1227 bp, Yersinia enterocolitica
atgctctgtagtatttccaagataaatattccaatcccatattcaagaaaaaatgttgatatccaactggatggaatgagcctaattattactggaggtaatggttgtggcaaaacaagttttataacagccatttataaccacctaaagaaaggaatagatgacccaaacaacaataacgttcaatttttaacaaatcaaattaacagccatgaacatcaattaaataatattggtagagatgccggaaactataattattacagcagtgagttggaaaaaaataaagcccgactaaaagaaatcaatgattttaaaatcgatataaattctattgataacaaagacactcggtctttgcttaggttccatagcgcgacaagacaatcggcgatctcatcgccaaatcaagcaccaaaacactcagtgcttgttgaagaaaataggcattttgctaatgacaaagatgggagccaattctttgaaagttacttgctaagtttgaaaaaaaatcaaagttatgcaatagcctttgataaaaatgaagccgaagcaaatcgaatcaaagactggttcgataaaatccaaacagatttgcaatcattatttgaagattcaaatctaattttggagtttgatacaaaagatgaaaaattttatctacatcaagaagggaaagataaatatacattccaaacactgtcagcaggatactcatcgatcttaagtatttatactgatctgattatgagggtcgagatgtggggagtttcacctgataacatacaaggaattatatttattgatgaaattgatgctcatttacatgtgtctctacaaaaacagatattgcgttttttcattaaatcattccctaaaattcaatttattgttacgacgcattctccttttgttgtcacctcagtttcaagcactattatttatgatcttacaaccaatgagcaaataatagatgtatcctcttattcatatggtgtcgttatggaggagatttttggtgtaataccagaatcacatgtattgatggacaaaattactcatatagaaagcctaacaaataatataacacctgaaaatattgatgaattggaagcaatgatatcatctttggcatccgatcaagaaaatatgagcaacgacacccaagcatttcttgatgctgcacggttaaaattaataaaaacaaaaaaaacaatcgaaaaatag

SEQ ID NO: 89037 - DNA, 654 bp, Yersinia enterocolitica
atgtttaatgtgataaggtcaatgccagcacctgaatcgctgcagagcaagaaaaaatatgataatgaagatgttcatattgcactacaagattgttttcatgaaaaatgttatttatgcgaaacaaaaaaacctttagatattaacattgagcattttcaaccacacaaaggcgatgaaaataaaaaattctcttgggaaaatttatacttagtgtgttcccgttgcaacaatatcaagctagcaaaatatgataaccttcttgattgttgttctattagcgtctgggataaaataaagctaatacccggattttcacctaaagcaagaaagttcattattaccccactatctactgatgataagacccttgaaacagccaaattactagacgatatctacaataatgataatactataaataaaagacttacagcgcggtctctacgatcgcaggtagtccagaccacacacaagctaacacaacatatgattgaatattataatgaagattcaacagatgaagaaaaaaaagtagccattagtaaaatgaaaataatgataaaaaaatcttatccttattctgcattttgtcgttggatgataaaagatgatgaggaattagataaattattatctaatcttatgaactaa

SEQ ID NO: 89038 - DNA, 1236 bp, Bacteroides sp. 3_1_13
atgggtaattttattacgagtatcaaggttaatcatatttttcatttggagaacttttgtataccaatctctgaaaatgaaaaaaaacatctgattattacgggaaagaacggaagtggtaagactattctgttgaatgcaatagtggagcatttaagtcaggtttgtaatgataagatgttgagtttcttagatttaaagaaaaatttagagtctaatcaagcatggttgcagcaagctgagaccactggtgattcgaaaagtattgcttccggccagaataatgttgaatattataaaaatagaattgaagaattttatggaaaagtagaactttcattccatgatatatactccatctctaaggatttttttagtcagaactttattatagcctactatgctgatgaacgtaagtctctttttgtagaacctaagaatcctgttaagccggatttgaagatgaagactgatctgaaacataataaagtagatcagttcttgaattttatggttgactgtaaagtgcaagaggctttagctcgtaatgaaggaaaaacagaggatgctgattatattcgtcaatggtttgtcggcttccgaaatattcttcgtcagatatttgatgatacaaccttagaacttgatttcaattataaagattactctttcctcattcaaacacgcggaaagtcgtttaaattcaccgaactatcagcaggatattcggctgcattagacattgtagctgatttaattttaaaaatgcaatcacagaataatgtggtccgtgcatacgagaaagaaggaattgtgttgattgatgaaatagaaacgcatcttcatttggaactacaaagagtgattttgccgatattgactactatttttcctaacatacagtttgttgtcactactcattccccttttattcttaattctttagagaatgctgttgcttttgatttggagcatcgtgaaccaattgaagacttaacggattattcttatgaagcattagcagaaggttactttggtgttcgtacagactccagtgagattcaaatgcgtttacaacggatggaagaattgattcgttccgatcagctttctatttcggataaaagtgagttggaaatgtatctgcaggattttgataagattccggaagcagttgctcctgctattaaagctaaatattatgatctgaaaagagagtggcaaaataagaattaa

SEQ ID NO: 89039 - DNA, 642 bp, Bacteroides sp. 3_1_13
atgattagaatttgtaaaaatgcagataagccacaaactttagataagagttataatacggacgaggtctgcaaacaattactgatggatcagaatgataaatgttatctatgcgaacggcgtttgacaactgattatcaagtagagcattttaaatcgcaagccaataatggagacttgaaacaaacatgggaaaacttatttgtagcttgtggatactgtaacaataaaaagtcgaataagtatgatgatatcttagatccgactcaatatgatatcgaaactataatagaacattcaaatgattttgttaatcagaaagcaatatttgatagtgataatagaacttctgaagtacttttaacgataaagttattgaatttattatttaatggaaaactatcttataggaattgtcgtgagcaacgattttatgatgaatttattcaaaaaatgaatttcttttcttatgttgttgatgaatatatgtcaggtaagaaagaatattattatccggttataaaagaacagttggatattcgtagtgaatatttgggatttaaatatgcaattattcatagtaacgatttgctgaaacatgattttggagatatgacgatttggaataagaaaggagaatga

SEQ ID NO: 89040 - DNA, 1182 bp, Salmonella enterica subsp. enterica serovar Typhimurium; identical to SEQ ID NO: 87648

SEQ ID NO: 89041 - DNA, 747 bp, Salmonella enterica subsp. enterica serovar Typhimurium; identical to SEQ ID NO: 87649

SEQ ID NO: 89042 - DNA, 1398 bp, Salmonella enterica subsp. enterica serovar Infantis; identical to SEQ ID NO: 86896

SEQ ID NO: 89043 - DNA, 597 bp, Salmonella enterica subsp. enterica serovar Infantis; identical to SEQ ID NO: 86897

SEQ ID NO: 89044 - DNA, 927 bp, Pantoea ananatis
atgcatgataaatacccaccagaaatttataaaaaaaatctttctgatgaaagagttatttaccttggaaataaggtaaataataatatggtctcagatacagcacctttccgagtgctctgcaaacatattctaaataaaattatcacttttagcgaagctcattccaaaagcaatgtattaatacacaatgcacttcaacgcttaaattttgatgagagcattacattcaaattccgttacggcaagaatagaaaaaaagaagttttaacctctgtatcgcctgaattgaaagtcaatctaataactccaaccaatgatttaaccttggtccgtaattatctgcatcacattgaatgtggtgatatattgttatctgatgtcagtttttcccgcaatgatttttcatttggacttgctgaattgagttcaggggaaaagcagtatgctatttcactcttaggtgctatttactgtgggtgttctaatagcatgatttattatgatgaaccagaaaactcccttcatccctcttggcaactaagtataataaatgatcttgcaaatataactaaggagttatttaccaagtccattttaattatagcaacgcattctccattaatagcgagtagcgttcgcaatgatcgagcatatatttgcgatttcccgtcaggacagtcttggcaacgatcatacctacacggccaggcaagtgatgctgttttacgtgagcaatttcatttatactctgcaaggtcgcctgaaatatacattattataaataagtgcttggatgctatcgctagaaataaaacaaacacaacaggattcgaaaaaattaaaaatgaacttagggattataatttagaacttcaaaatgatgaccctttgtatgaagttgtgacaaccattttagggttttaa

SEQ ID NO: 89045 - DNA, 675 bp, Pantoea ananatis
atggcctatatcaaacctgttgcacgtattgccttaaacaaaaaagaatttagaactgttatttcctcgcatttagcaggtaatattaaatggagtgatgatgccctaaagcctctgaaaaatatgataagaactcttcttcgcgaggaacaaaaaggtatgtgtccttattgccaaaggatgatcattcctgaaagacgaaatttaggtgagcatatcgagcatttcttggataaatcaaaagataaatacaagaaattcgcattgacagcatcaaatttagtattagcttgtcaaggttgtaatgttgagaagggaattagagatcttaataaaggaaggccgactcctttatacctcaatgcggctgcaggtccatttctttggcctcatccgtatttcgatgacatgggagcctgcatacaaaaattggctggtcccgtttatgctataattaacggttctggccgtgaaattcaagcaactaagctcataatcgatctaaaactaaatgagatccggaatttagaagtacgctataaccgtctcagttcaagacgcaatcgattaataaaaattctaacaaaactagcagttaaaggtaatcttagaagtcgagaaagaatgatcccgattagtattgaactggggaaagtgaacgatgaattaaactga

SEQ ID NO: 89046 - DNA, 1233 bp, Pseudomonas sp. RIT-PI-a
atgctcgactttctctccttccaaggcgtcggcccttctccagccctgggcccgatcgggctggcgccacgcctcaacttcatcaccggcgacaacggcctgggcaagagcttcgtgctcgatacggcatggtgggtgctgacgcgcacctgggccgcaggcaagccgatcaaggcgcgcgagtcatcggcgctgccggtcatcgattatcgtttcaccggcgtggaccgcagcgccgggcaatgggcctggcagcgagaccgctggacaccggtaggcgacgccacgccgaaccgttcgctggtggtgtatgcccatgccaatggcaccttcagcgcctgggacccggtgcgcaacgcgggtgagctggcggcctatcacttcgatgaaaaccagctgtggcacggtacgtcgatggcggggcaggggcgcctgtgcaacggcttgatcaacgactgggtacgctggcagcgaacccacggctgcaaggcgttcgctgccttgaagcaggtcctgcgcgcattgtcgccgtcgcgcgaggagttgctgctgcccggccggccgtgccatatcggcctgctcgatgaaaccgaatacccgactctgcagcggccccagggacaagtgcccctgcccgaaacctccagtgcgatccgccgcgtcgtggccctggcctacatgctggtctggacctgggaagggcaccgccgggcctgtcgcctggccggagtacggccgagcgatgagctggtgtttctggtggatgaggtcgagtgccatctgcatgcgcagtggcagcgtcgcatcgtccctgcgctgatggatgtggtcggcgcgctgactcgccagcgccttgcggtgcagatgatcgtggccacccattcgccgctggtgctggcctccatggagacccagttcgtcgatgcgcgcgatgcgctcttcaccctgagcgtacaggacggccaggtgcagttgcaccggcaagcctgggcggcgcagggcgatgcggtgaactggctggtgtcccagagtttcggtctgcgccaggcccgctcggtggaagcggaagcggccatcggcgccgccgaagcctggatgcgcggcgagcgatccggcctgcccgaggggctggacagtgaggcatcgatcgagtcgcagttgctgcgagccttgcctgccggggatcatttctggccggtctgggtcgttgccaaaggaggcgtgcaggcatga

SEQ ID NO: 89047 - DNA, 573 bp, Pseudomonas sp. RIT-PI-a
atgatcgagctcgttcatccactgcccgagccccacggcttcgacgagcgctgccgccagcgcggcaacgcctggttgcaggacaatcctgacgttggcaggccgcgggactactggtcgccgttccgtccgcaactgggcgagggcttcgccaaccgctgtgccttcggtgccatgtacattcccagcggcaccgtggagcatttcatcagctgtgatgaggaccgcggcatggcctacgagtggagcaattatcgctatgtcgatgcctggatgaacagtgccaagggcagcaagaaagctgaggactttctcgatccgttcgaggtgcgcgagggctggttcgaggtgttgctgccgtcgctgcaactggtgctgaccgacaaagtgccggaagcggtgcgggcgcgggccgagtacaccctcaagcacctgccattgcgcgacgacgagcgcgtgatgcgcgtgcggcgacagtggttgcgcttgttcgaggagggtaagatcgggctcgaagggctgcgcgagatggcgccgctgattgccgcggcggtggagcggcggggtggttga

SEQ ID NO: 89048 - DNA, 1611 bp, Trabulsiella odontotermitis
atgaaagtcgataaactgcatatccgctcacgctttaaaaatcttgaaaacgtgacagtagactttgacgaagaccaccttatgaccgttgttgtaggccgtaatggttctggtaaatctaacgtcctcgaagcgttggtagctatttttcgcaatctcgatcttggtgaggttccacctttttcttacaaactcgtttatcgtctgggtgaacgcaataaaccggatctacctagtgaacgatggttggaaataacaattgatgcagacccatttcgtggtactttagcgaaacaatacgatgtacaggtaaaagacttgttaatcgacgattctgaacatctgtcaattggacagtcatcagccatatctgttccattttcaaaagttaaacgagataaagaaggtaaggcaccttacctacccaactatgtttttgcctactattcaggaccaagtgatcgactggaaaattacttcaagaaacaccgagccgatttttatcgtcatttgttaaacgacaaacctgataaaaaacttgatctcaagggggatatacgtccgcttttttatgccaaaccattccatagtcaatttgtactcttggcattttttctgtcagataaaaatagccctcaacgaaaattcataaaagaacatttaggtattgaagatttagacagcgttcattttgtaatgcgccaaccaggctgggcaaaacaaaaaggcgagctattctggggcgctcgtggcgtagtccgtcgtttcttggatgagctaataaaacatacgttggcacctataaaagtgactcgtcaggaagatacttcattaactggaagtaatgtccgaaacgaattcttccatctttttttacccaatatcgaggttctgcacgcatttgccaaagggttaagtgacgacgaacttttcaaaatgctcgaaagcactctgctatcagaaattatctctgaagtcagcataagagtgaaagtatctagcagcaaagaacctcttactttccgggaactcagtgaaggtgaacagcaactgctaacagtattgggtctactaaaattcacaggcggtaaagattctttatttttgctcgacgaacccgatacccatcttaatccatcatgggccgtaaaataccttcaattcttgcgtgaatttgttcctaatcaagagactagtcacttactgatggtaacacatcaccctctcgctattgcggagctgaagaaagagcaagtgcaagttatgaaacgagaccatgaaaatcaaatatcagcaaaaatgcccgatgaaagtcctcgagggatggggatcaatttaattttgcgtagcgatatgtttggtttgcaaacaactctcgacgataacactaatcagaaacttataaacagaaacgcactcgctgcaaaagagatattatctaaagagaagatggttcgcgagccaggatataaacctgaagacgatgagcaatacctagccaggcttaatactgagcttgaacacttagggtttaacatcgcaacagatgacccagattaccttgaattccttcgtaacaagtatcataccaaacatgaggaaaaccaataa

SEQ ID NO: 89049 - DNA, 810 bp, Trabulsiella odontotermitis
atgcgttggatttgcaaggatgaaattgaagagtgcttgactcaagcatggagagagatggctgacaatgcaaaagctgagttaatcgccgctccagacgaagcgacaaggaaagtaatattaaaaagggttgcatcctcaaatgtttggcgtgaattttataatttgctacctgactctttaaagcgtaaatgttggtattgtgaagcagaggagatccggtcagatatgccagttgatcacttcagaccaaaaaacaaggttgaagatgataggctacatgacggctactggtggttagcattcgattggcaaaattatcgatgcgcttgcacattctgcaatagccgtagagtttttgatgagacagaaggtggcaaagcatgtcgttttccgcttgaaaacccagatgagcgagcctttacaccagaagatcaagcaaaacttagcaatgagcgcccgtatttccttgatcctttcaacccagatgatgaaaagctgctttggtttgataatgatgggctaccaatcgccaagccattagcaacacccgagcagcaaacaaaggtcggaaattctattgaaatatttcatcttcatgagagcagaattgtcagagccaggaacaaggtacgcttagaggtggagaaacaaattaggaaaataaaggataacgatgatgcacaaacagctaaagccaagctgcgacgcatggtcaaagacactgaaaagttatctcgggctgcagttgtttacttaagagcacatagggagttgcctgaggtgaaagacatattgaacttggtttag

SEQ ID NO: 89050 - DNA, 2334 bp, Pannonibacter phragmitetus
gtgcaatatttcaatcgccagaccgtgccgccgccagcggtgttcaccagtcccactgccggcaacagtcgcgagagcctgagagcactattcgatttcgacagcgaaaagctttctcaatcctttgctccgcgtagctttgttggcctggatgagcagaacgttcgcaatgggttaggtcgcctgttcagaggcaagtgcgcattttgcgaggcggagacttcgacgcgaccctatcggttcaggcctgcgtcggaggcaacgccagtcgcaccgactgacatgaatagccacctctattacgcctggctcgttgacgcatggcagaacatctatccaatctgcacgagctgcgcgccaccagacagggagggttctacttatttcccggtcataggacggcgttgccgtcttccgacgccagacgagctcacccagttcgtcgacgatgctaccgggctttggccaaaccatcccccggccgagaagccattgttgcttgatccgtgcgaaaaaaaggacttcacctcgcattttcgcgtgtcgcccaacggcatcctttttggaaagaacaagtctgcggaagagactatcaactacttcaccctcaaccgtcatgaacgtgtcaatcaacgagcagcaaagttccaaagcctgctatctaccctggatgattacctggccgatggggaccctggtcttttgcggagcatcgttgcctttccggacatggagttcggcggaacgtggttccttctcgtccggcaaatatgtctggcaatcggttatggtggaggtccgacacctgcgctttccatggcgcgcatcgaccgcgcgctcaggcgattgcgatcccaatccgatgctcgacaaagcctgagtgccgctgtcgaggcgatatcccaggccagcgagctggacgttgatgcagagctcgccggtacgactgccagaaccgggaagcttcgtctccaaagggtttcgctcaccaatttcaaggcactcgaaaacctcaccgttgaaattccaaccgccacggagttggggccggaggctgtcagcgtggcaccgtcacttcttattctgggtgagaacgcggccggaaagagctccatcctcgaggcaattgccattgcactcgccacagacgatgctcgggatgagcttgccctcgccccttcggattacattctcaagcccgactatatgggagcgccggaccatgtggcgccggatcactcgaaggttgagctcgtgtttgaagacggcagcaaccatgtgctgacggttgatcgtacgggctttgagatcaactcgaaaatagaccgatcgctcctgccacctgtattcgcctatggggcgtatcgccgatatctgcgcaaacagcggcaatacagcccggccaagtacattacgaatctgatgcggtcggatggaattctttccaatcccgagaaatggcttcttggattggacgcggcaaccttcgtcatggtcgtgaggcagttgcggcatgtcctgagcatcgagggtgatttcgaggtcatccgcagaaaccaggatgagcagcgctgctacatcgtcacgtcgatcccgggtagcaccacgaagttcagtctcacgccactcgaagtcgcctcatcaggcttcaggacagtgctcgccacagtctgcgatatttttcaaggcctgctggatcgccgggtgagcggtggcattgaaactcttgcccaagcccgtgccgtggttctcatcgacgaggtcgaatcacatctccacccccgctggaaaatgggtatcatgcgcggcctgcggcaggcgcttcccaacgtgaccttcatcgccaccacgcatgatcctctctgcttgcgcggaatgggcgatcgggatgttgtcgttctccagcgggtcggcagggatctcaacgccgatgtcaaagtggaaaccaggctgcctgttttcgtcgagcggctgattaacttgccgcccacctcgcatctcactgtcgaacagctcctgacatccgactttttccagctttattcagcggacgcaccggagattgaaggaaagttcgcaaatatcagtgatctactcgcgaaacgcagccagggcgccgagctgtccgaagatgagaagcgcacgttggaagccttcaacgatgatatcgacaacgccttgcccgtcggactatccgaagcccaccggctcgttcaggaggcggtcgcacaatttctcaaggagcggcgcagcgcatccgaggtccgcctgcgtgcgctgcgacagtcgtcgaagaatgagatccttcgtatcctgaggggtgctgcgggatga

SEQ ID NO: 89051 - DNA, 939 bp, Pannonibacter phragmitetus
atgaggtatgttgagcgcaaggaggtgacactgccggcttcggtggccacaaaagccaaaacggagctcgaggcgatcaaagcgcatcggagcaacccggacccggaaaaaggcacattcgagttcaaggtctacaagtcggaagaaatcaaacaggcgctggagaaactcttccacggaaaatgcgcttactgcgagaccttttattcagcgagcgcgccggtcgacgtcgagcactatcggccaaagggtgctgtcgccgagatgaaggaacaccccggttactggtgggtggccatggattgggagaacctcctgccgagctgcattgactgcaaccgcaaacggaagcagaaatttcccggaacagcgacaagcctcgaagagctttggaaattcggcaaggacgcacgcaattttgaagctgatcagtctgggaagaaggacagctttcccgtcgcctcgaccgggacgtggctcatcaacgaggaaaccgatttcggacgcgagccagcactgctgatcaatccgtgcaaagatagaccagagcaatacctcgcatataacgttgcgatggtgggctaccccgcaatcgtccactcgcttgacggaaacggcaaggactcacgcggcaacgcatcaatccaaatatatggcttgaatagacttgggcttgtgcaggaacgcacacgagttctccggcaacttgaatttatcgccgacatcgtgatcgaggtgacagaaatcgcggacaaggtcgaagctttgcccgccgcgcaaaaggttggaatcgaacaggtcctcgaacaggtccccggacgcctccgccttttgcgggaaaggatgctggatgagctgaaggcaatgactgaaccacgggctccctactcagcaatggcaagcgcctggctcgaggacttcatgcgaaaactcgcttga

SEQ ID NO: 89052 - DNA, 807 bp, Chondromyces crocatus
atgccttacggcgacgatgtccccatcatctacgcctcggccggcatgcgccggatcgtcgcactcgcctacctgctcatctggacgtgggacgaacacctcgccgctgccaaggtccgcggcgagccccccgccagagaaatcatcttcctcatcgacgagatcgaagcccacctgcatgcccggtggcagcgaagcatcgtcccagcgctcttgccggtgatggacatcctcaccggccagcacggctcacgcgtccagctcatcaccgcgacccattcccccctcgtcctggcctccgtcgagcccctcttccacgccgagaaggacgcctggttcgacctcgatctcgacaaagcgacccggcccccgtccgtcaagctcacctcgcggacctacgttcgtcacggcgagatcggcaactggctcaccagcgaagccttcgatctgaaggagccccgctccatcgaaggtgagcgagccgtgaaacaagctcggacgctgatgcaccaaggcacagcttccgccaccgccatcgccgctgcggaccaagccctgcgcgacgccggcctgcccgacatcgacccgttctgggtccgctggggctacttccgcgaccgccaagccgcaccggcaccggcaagcaccaagacagcatcgagccgcaaggcaccggcgagcaccaagacagcatcgagccgcaaggcatcgccaagcaccaagacagcatcgagccgtaaggccatgccaagccgcaaggcagcatcgagccgcaaggcaacgtcgagccgaaggaagacgacgtga

SEQ ID NO: 89053 - DNA, 684 bp, Chondromyces crocatus
gtgatccgagttgccctggcccctgagccacccagcttcgaggaacacgtccgccagcgaggccaggaagcaatcacgcgcctcctgggcaagccggtgaagggcaaaggaggccgcaaaccgtcaaccacctatgcccgcgaagaggacatccctccgacgaagctccctctcctctggatcgaacctcgcaagaccgacggcaagagcgcgctcgacgacatgatggccctctacggccagcgctgcgcctacctcgccatgtacatcgagcgagccacgggcagcccgacggtcgaccacttcgtcgcgaagtcgaagaaccggaaactcgcctacgaatggtcgaactaccgcctcagcgccgcgtgcgtgaacaccgccaagggcgtgctggatgtcgtggacccattcgaggtgcaggacggctggttcgaactcgacttcgcgaccctcgacgtccagcgacgccacggcgcaccgaacgcgcagcacccaaagatcgacgccaccctgtccctgttgaaccttcgtgactgccgaaaacagcgcgaagaatacgtgaccagctaccacctcggcccgggcgagggcggcatcgatctcgtctacctggagcaccgcgcccccttcatcgcctccgaacttcggcgccagggcttgctcctgcacggcgacacctga

SEQ ID NO: 89054 - DNA, 2292 bp, Escherichia coli; identical to SEQ ID NO: 86352

SEQ ID NO: 89055 - DNA, 927 bp, Escherichia coli; identical to SEQ ID NO: 86963

SEQ ID NO: 89056 - DNA, 1182 bp, Yersinia enterocolitica
atgaaaatacaaaaaattgatataaaagatattggtggtataaaaagagctattatagactttgatgaatacatgaatattatttgtggtccaaatggaatagggaaaactacaattttagactctgtggcacatagctttatttctacaaacagcaatgtcctcaaaagacatgcccaatctactaatggtcagataaatattgttttaaatgattgcgatagcatcaaagaaagcaatatttcttttgagaaatttgatcctcaggatcattcttatattaatggattgggtcaagcaggaaggaaagtaatttatttgaatatctctaggatgttcaaatatgtatctttatctaatatttctaaagatgaggaaagacaagatcatagcatatattcacttttgacaaatgggatttcggttgcggatatgaaaaattggttcgcaaaacgctgtcttttcgttaatactccagatgctttgagtgataataacaaaattaatttggagttggcaaaaaaatgtttttcattgctcaatgttgaatatagtttttctcgtgtggatgcgaaaaaattcgatgtcttcgtatgtactccaaatggagaaatttggtacgaatatctatcctcaggatttaaatcatgtctgagtattttattcggcattatcaaagagattgagctgagaatgtcagatgatgattgtttagcgcaagattttgatggcattgtgttaatcgatgaattagaaatgcatcttcatcctgaatggcaatccaaaattgtttctgttttgcgaaatacattccctgcaacacaattcatagttactactcatagtcctcatgttatacaaaatgcagagcctaatcaaataattgcattagggaccgatagtaatggatttacttatgtcagagaacttccaagtaatgaatttggttatactggatggacattagacgaggttcttaaagatgtaatgggaatggaagataccagaagccagaaattaaaaaatatgcttgctgaatttgacaaagccattgatgaagaaaataaaattgaagcagaaagtatttatagagaattagatatggcacttcatccatcaaatgtacttagaaaaatgcttagcattgacctttcctcaataagcgaggaggttgaaaagtaa

SEQ ID NO: 89057 - DNA, 747 bp, Yersinia enterocolitica
atgattaagctggaaagaaactttacacctctattcttttctccgcagaatgttagtcgtttaactgaaagatttaagaataatggttcacatgtatggcatcatgatgatgtaaaaaattcgttgatggaaataagtgataaaaaatgtgcgtattgtgaggtaaaacttggtgaaaaaagtacttaccatgaggtagagcattttaaggataagaatgattaccccgatgatgtaatagagtggaataatctattaccctcatgtcgtcattgtaatagttcgaaagggactcatgatgttgtccatgaaccaataattaatcctttcaatgatatcccagcagaatatttttatattaaaaattttagagtaaaaggaaaaaatggaattggcactttgactatagatgttttaaatcttaatgatagagaacatttagtaaaaccacggtgtgaaacaggaactataattgcggaaaaactagaggattctatggttttatttgaggagtatatttcaaatccaacaaatcagaagaagagaaaattaatcggtactgttagaggtatactgaatgaatgtcaaaaaagtgcaatattttcggcagtatcggcgacaatattacatacaagtgaagactatctaattatacgagatattatgaaggctaataatttatgggatgaagatatggagcaacttcatctcatgtcaagaaatataaaattaccgactaaagcctaa

SEQ ID NO: 89058 - DNA, 756 bp, Yersinia enterocolitica; identical to SEQ ID NO: 87092

SEQ ID NO: 89059 - DNA, 657 bp, Yersinia enterocolitica; identical to SEQ ID NO: 86453

SEQ ID NO: 89060 - DNA, 756 bp, Yersinia enterocolitica
atgaatctcggtaatgaatttgaaaatcatttagttaatttaaaaacaagacagtcatttgcaaaaacattcgataacaatgaatcactctacgaatcgatggagacgtggtttattaatttagagaaaagcatttcctttttaatggaagatgaatcattcaaattaatatttgacccagataaatttaaattccatttgcagcaagacagtaagcctccatatacatttcaaactttatcctcaggctattcatctatatttaatattttatctgaacttataatgatgactgaggctaatcatatatctccatcagacttacaaggaatagtattaattgatgaaattgatgcacatctacacgtatcgttacaaagaaaaatactaccattcctaaccaggacatatccaagaattcaatttattgttacaacccattccccttttgtaattggttcattagacaatgcaataatatatgatttaagcaaccaacaagaattttctgatttatcaaattactcttatgaaaccattatcgaaggtttactcggcgttcctgtggtctctatttcattagaaaaagatactaaaaggctatcagctttattagtagaggaaaatgttgataacgctgcaataactgagcttgtagaaaaacttagtccacaccaagaaaatttagatgatgaatcagctgtttttcttttaaaggccagaagggtattgcgcgaagataaggagactaaataa

SEQ ID NO: 89061 - DNA, 657 bp, Yersinia enterocolitica; identical to SEQ ID NO: 86453

SEQ ID NO: 89062 - DNA, 1191 bp, Pseudomonas syringae
ataactggaaaagtactgactacaagtcgagacgttgcgataaatttgaagtcacgcaacttaatagtaattggaaagaacggatcaggaaaaacctcttttcttaaagccttgcacgaaattttaattaacaatatttccgaaggccacattgtaaaactatccgaatatcaaagtgctcttatagagagcgagagaaagctcgctagagacccaaactatcagggcactgtagatcactacaaaaaaattatcgataaaatttcaaacccgttgagggtgacttacacctcttcatcagacttcgtggaacagaataaaagtggcgaggcactaataagactttatgaggcaactagaaaaatcgccatcagcaaagtaacttccgcaaccgcacttatacccgagattcccgagcacaaaaagaaagataacttaggaataaatctagagcagcatttagtcaacttagaaattggcatggctctagcaatgagaaaaaatgacaacgtcaaaacgcataaaatcgaggcttggtttcgtaaattccaagaagatctaaaatttctttttgaggatgaatcaatccatctagtatttaatgacgagactttgtcgtttactttgaagcaggacaaccgcccggcctatccttttcagggtttgtcttctggttatctcgctattttcgatatttatgctgatttgctagtcagaagcgagtatttaagaatactgcctactgatctgcttggtgtcgttctgattgacgaactcgatgcccatcttcatatatctcttcaaagaaaaatcctacctttcctcacacgatccttccccggaattcaattcattgtaacgacccactcaccgtttgttgtgagctccactgatgattcgcttatatatgatatttccactggaaaagaatgcgaggatctctccttattttccttggaacacgttgttgaaggagttttaggcgtaccaccaatctcgcataaaatggaggacttggttgccgaactgtctgcggtcagccatgacgcacagtcctcatctgacgatcttagaaaactccttatcaaattggcgccacacgctgagaccttagatgacgaatcaagaatgttttacgagatggccaaaaataaatatctaataaaaaaacgggatgaacacaatgtttaa

SEQ ID NO: 89063 - DNA, 675 bp, Pseudomonas syringae
atgtttaacgtggtgcgtccgacgaccgttccgacctctttatccagacatcaaagctacagtgagaaagacgtagttgaattgctagacaaggcattccacagtaaatgttacatctgcgagaccaaagagccgcttgcgctaaatgttgagcatttcgaagctcaccaaggatgtaaagcgaaaaaattcgcttgggataacttattttactcatgcgcacgctgcaataattttaagcgccatacctatgatgacatcctcaactgcgccgacctgagcgtcaatgtattaatgctactacgccacgtacctccaatgactccctattcggacatcctaatcgaggcgatggacgagaaccctaagacggtccgcactgcggaattaatctctaggatttttaatgaggacgatacaggcaacaagtctgtggtaagggtgcaacttaggaaacgtgtttacaagcgatacgcaaaagtactccaacacataaacacgtatatagatgaagatgagcttcaagattctaagcagcgcgcgatagaacacctcaaagcgctaatggacgtaaagcaagaatactctgcctttctaaggtggcctatattggaatccccggagctatttaaaatattaggcgcatcgataaatctacatgaggctatggattaa

SEQ ID NO: 89064 - DNA, 1368 bp, Pseudomonas syringae
atggaaatcaccagtttcaagctcaaggatgtcggtcggttcaccgatttgaccgttcagttggcccctacctcgaaacacccctcaaacgtgacggttctggtgggcaacaacggcgccggtaaaaccacccttttaaagtcactggccacctcactgagttggctggtcgccagaattcgtactgagaaaggcaatggcaatcaccttgcagaagaggatattcgtaacggagcttcatctgcattaattttgattggcgtagtatacgagtcacaaggacgctcgagtcttcccgatgccagccctgaagatgctctgttcacatggggcattgcccgcggcaggcaagggcggaaggctcatatccatagctcgctaggaggtgtcagtcgcctggcggatcactaccggaaccacctgaccgcgttcgataaagcatcgcttccattaatcgcttactatccggttgagcgttcggtgctggaaatcccgctaaaaatcagaaccaaacatacctttgatcaactggacggctacgacaactcactgaatcgtggcgtagattttcgacgtttctttgaatggtttcgcgaacgcgaagacagtgaaaatgaaaccggcgtgtccgacgctgccttggcagagatttccgacaaattcggcaaggacagtaaggtctggaaagccctttcccaagtgaaagcctcatcccgtgatcgtcagttgacagcggttcgttccgctatcgcaacgttcatgcctggcttcagcaatctgagagtgcagcgcaagccgcgcctgcatatggcgatagacaaagacggcgtgacgctcaatgtctcccagctgtcgcagggtgaaaagtccatgatggcgttggtcggagacatcgcacgccgattggccatgatgaatcaatcgctggaaaaccctttacacggtgacggaatcgtactgattgatgaagtcgacttacacctgcaccccaaatggcaacgcagtctgatccgacaactgagtgaaacatttcctaattgccagtttgtactgacaactcactctccactcgtcatcagcgacgcaaaagatgtgctgtgctacgtactggatgatggggagttacaagagcgcgatggcctttatggccttgatgccaatcaggttctgttgagcgtcatggataccgatgttcgtaacagcgaggtacagcgaagactgaatcgattgcttgagcgcgtgcaggatggtgacttggacgaagcccggaaattgttttccgagctgtcactggagctttcagacggtcatctggagttggcgaaggccgcactgttgatccgcaaactggagttgcgtcgtgcgtaa

SEQ ID NO: 89065 - DNA, 633 bp, Pseudomonas syringae
gtgcgtaagatcaacaagggtattgagccggaggcgctgactcgatggaagcgcttgaacagcacattacgttaccgggatttgcccgttgaagagagtcggtccattcgctcagcgtgtatctcggaacagtacggcttatgtgcgtattgctgccaggcaatcacgattgacgacgctcataacgagcatattgaggcccaggatcgcgcgcaaaatcgtactttagacttatccaacatagtcgcaagttgccaacgcgcccatcaatgcggccacggtcgaggcacgcgaacactgccactgacgcctttgatggatgaatgcgaaaccgagctgaagttctatctgtctggtctggtaaaggggcataccgaccgagccaatacttctattgaggcgttgaatctgggtcataccgaggaaagcaatcgtggtcttgtcggtgcacgtaaagctctggttgatgcgttgatttatacccagaacctgacacccgacgagttgcagtatgaggacgaagatttcttgggcttacttctggaggacttgcaaacgcctgatgccgggcgcctcctgcccttctcacctgtattgattaatgtaattcgtcatttgctgactcaactttag

SEQ ID NO: 89066 - DNA, 1398 bp, Salmonella enterica subsp. enterica serovar Senftenberg; identical to SEQ ID NO: 86590

SEQ ID NO: 89067 - DNA, 597 bp, Salmonella enterica subsp. enterica serovar Senftenberg; identical to SEQ ID NO: 87603

SEQ ID NO: 89068 - DNA, 1410 bp, Salmonella enterica subsp. enterica serovar Worthington; identical to SEQ ID NO: 87624

SEQ ID NO: 89069 - DNA, 597 bp, Salmonella enterica subsp. enterica serovar Worthington; identical to SEQ ID NO: 88501

SEQ ID NO: 89070 - DNA, 1410 bp, Salmonella enterica subsp. enterica serovar Worthington; identical to SEQ ID NO: 87624

SEQ ID NO: 89071 - DNA, 597 bp, Salmonella enterica subsp. enterica serovar Worthington; identical to SEQ ID NO: 88501

SEQ ID NO: 89072 - DNA, 1398 bp, Salmonella enterica subsp. enterica serovar Mbandaka; identical to SEQ ID NO: 87652

SEQ ID NO: 89073 - DNA, 597 bp, Salmonella enterica subsp. enterica serovar Mbandaka; identical to SEQ ID NO: 87653

SEQ ID NO: 89074 - DNA, 1410 bp, Salmonella enterica subsp. enterica serovar Worthington; identical to SEQ ID NO: 87624

SEQ ID NO: 89075 - DNA, 597 bp, Salmonella enterica subsp. enterica serovar Worthington; identical to SEQ ID NO: 88501

SEQ ID NO: 89076 - DNA, 1371 bp, Yersinia intermedia
atgcgagaaccctatcgactggaaggcatagtgctacaagatgtgggcgtgtttgaacacacccgctttgatttcccccctattgaatgcgcagaacgagatgaagagaaagccgagatccatctgtttaccggcggtaatggctgtgggaaaagtacgttgctttatgctctggcggcaatatttcaaccaggtgaaacaggaacactaataagacgacgctttaaaagccaacggagtgccattgatttttgcttcgcgggtttagcgggaacttaccgtgcgtcgccctcagaaaatgcaaccaataatgtttttggcaagactcaactggcgtttcatgccccactaaattacagcattcaaaacggtctctcgagcctactagttagtaatatcggtgatcactataatttttcagcgccatataattcaaaagcttttgattttgctgcctttgcttattcagggcaacgttcaccacagagcaattttacgctatcggccattcaacaaataactaactcaccgtttgaaaatgccttgtcatttgatcaaaccattcgccccggtgtattaacgcagtggattgccaataacagaactcaagcggccttagcacttgctgaaggtatggttgatgaagcaaagcgctatgatctcgccttgtcccgcattagccaatttattaaagtaatctgcgagttagacatcgtatttcgtttgcaacgctcaccactggcagtggcattaaatattgatgggcaagatgttaattttgaagtgttacctgatggtttaaaatccattatttgctgggtcgccgatttagcactccgtttagaagccattccgtggcaacaacagcgcgatatttttgcccagccaataattttatttttggatgaagtcgatattcatttacaccctaaatggcagcggcgcattttaccggcgattcaaaaattactgccgaatgcacaagtgtttgtctctacccactcgccttttgttgtcggttcagttgaggatgcttgggtttatcgtctacccaatccacagcgtagtatttgcctggataattcagtggcagaaactatctcgccaacacactcagcagcaggcaaaagttatcaattaattctggaagaagtctttggcattgaggagcagttcgatatagaaaccgaaagtttattgagtgagttttaccaagctagagatacctacttacaaaaccctcaagacgatactgacgtcatggagttggcagacaagttgcgtgtaaaaagtgaagaactcgataccattattgagatggaattgcgccagattgctcggcgaatacaaaagaggcccgctggtgtataa

SEQ ID NO: 89077 - DNA, 585 bp, Yersinia intermedia
gtgtataaaattacccgcatctcaccgccgaagagcctaaatgcaaattataaagcatggaaccgacgttatcaggctgataaggccagcacgccggtaaaagcttttcgttggtataatattgcctgctatcaagaaactcgggatctattgatttcaatgacgcaaaaccattgcgcattttgtgatggcccgctcggtgctgaaagccgcgaaacaattgagcatttcaagcctaaaagtgtttttccagaattggcttttacttgggaaaacttatttccttgttgcgatcgttgccaagggcaaaagcttgaaaagtatgatgatgcattattgaagcctgacgatatcgcttatgaatttgagcgcttctttattgctaactatgccactggagaaatcacaccttcaccccaagcttcagcagcagaacaatatcaggcaaaagtcacaattgaacattacggattgaatttacctcaacgtaaaatcgcacgacgtaaagagctgagatgttatttggcgatgaagcatgagatgttgttagatgaattcagttatcgttatttcttaatggaataa

SEQ ID NO: 89078 - DNA, 1506 bp, Yersinia pekkanenii; identical to SEQ ID NO: 89016

SEQ ID NO: 89079 - DNA, 648 bp, Yersinia pekkanenii; identical to SEQ ID NO: 89017

SEQ ID NO: 89080 - DNA, 1623 bp, Vibrio cholerae; identical to SEQ ID NO: 85886

SEQ ID NO: 89081 - DNA, 618 bp, Vibrio cholerae; identical to SEQ ID NO: 85887

SEQ ID NO: 89082 - DNA, 1398 bp, Salmonella enterica subsp. enterica serovar Senftenberg; identical to SEQ ID NO: 86590

SEQ ID NO: 89083 - DNA, 597 bp, Salmonella enterica subsp. enterica serovar Senftenberg; identical to SEQ ID NO: 87603

SEQ ID NO: 89084 - DNA, 540 bp, Vibrio cholerae
ttggtttctgatatcgctcgaagattagtaatactaaatcctagcttagaaaatccgttaaatggatatggtattgttttaatcgatgaaattgatcttcatttacatcctaaatggcaacaaactattgttcaaaaactagaaaataccttcccaaatatccaattcatcctatcaacgcatagcccactagttctaacaacagttacttcggaacaaataaaaataattaatgaattagactatagattcaaattactatctccaacaagcaatccatttggcaaaaatgcctcggatgcactagctatcatggaaacatccgaatctccattagttcatagtgaagaaattttagctcttataaaaaaatatgaatctctggtgaaaagaggacaagaagattgtcgaaagaccaaagagattaaaaaacgcatagaaagcactggatatacatttgatatagcagacattgaaatgtggcgttttatagcagaaaatcgtgaattttttatcgataaatctgaaagtgatgactaa

SEQ ID NO: 89085 - DNA, 618 bp, Vibrio cholerae; identical to SEQ ID NO: 85887

SEQ ID NO: 89086 - DNA, 1398 bp, Salmonella enterica subsp. enterica serovar Mbandaka; identical to SEQ ID NO: 87652

SEQ ID NO: 89087 - DNA, 597 bp, Salmonella enterica subsp. enterica serovar Mbandaka; identical to SEQ ID NO: 87653

SEQ ID NO: 89088 - DNA, 1410 bp, Salmonella enterica subsp. enterica serovar Worthington; identical to SEQ ID NO: 87624

SEQ ID NO: 89089 - DNA, 597 bp, Salmonella enterica subsp. enterica serovar Worthington; identical to SEQ ID NO: 88501

SEQ ID NO: 89090 - DNA, 1398 bp, Salmonella enterica subsp. enterica serovar Senftenberg; identical to SEQ ID NO: 86590

SEQ ID NO: 89091 - DNA, 597 bp, Salmonella enterica subsp. enterica serovar Senftenberg; identical to SEQ ID NO: 87603

SEQ ID NO: 89092 - DNA, 1398 bp, Salmonella enterica subsp. enterica serovar Mbandaka; identical to SEQ ID NO: 87652

SEQ ID NO: 89093 - DNA, 597 bp, Salmonella enterica subsp. enterica serovar Mbandaka; identical to SEQ ID NO: 87653

SEQ ID NO: 89094 - DNA, 1623 bp, Vibrio cholerae; identical to SEQ ID NO: 85886

SEQ ID NO: 89095 - DNA, 618 bp, Vibrio cholerae; identical to SEQ ID NO: 85887

SEQ ID NO: 89096 - DNA, 1623 bp, Vibrio cholerae
atgaatgagccaactagaatccccaaatatgttaaagataaaattagacaggctaaacagggagatctgtactcatcctttactgtttctgagtattactacgatggtgaagttttagaaagggacatagaacagagtgaactatatctaagaaacgtgtcacgtattatcaacaatgctaaaatcagactcagaaatatctccttgtatgattacaagaaattctccaaattaaaattcacgtcatcagaaaaaaatacaacgatcattattggtaataacggttccggaaaaagtactatccttgaatctatatccaaatgcctacaatttctttctgataacatcagaatccaaaataataacaactacaaattccaagattcagaaattaatatccattcaataagcggacaaaccattgtaagatgtattttggaaatagaaaatgatttttctttttcatgtagcctaacaaagaacagagaaaacatatcaagaaaagtgtctagtgagcttgaagaatttaaagctctagcacgcatgtaccaacgctctaatgaactggataataatactctctcttaccctttattagcctattatccagttgaacgttcagtaactcttaaaagagatgacgctgtaaaatattatgaacgaaaaaaagccaaatatagtgataaaagtgaaggtctaaaaaatgcctttgatggcacatctaatttcaatgattttttttcttggtacaaagaaattgatgatattattaatgaattcaaagcaaatgactctataacaaaggaggaaattgaatatttattatctaagactgataacaaagagaaaataggaagtcttatttctcaattactagagaaaaaaaataattacaacaataatgaagatagagaatttttaattagacaacaaaaagtaattcaagagtccataaaaacttttgtatccgatatagatcaagttaagataagtagaacacctcacttagatatgacagttataaaaaatggaagtgagattagtatttttaatctatctcaaggtgagaaaacacttatcgctttggtttctgatatcgctcgaagattagtaatactaaatcctagcttagaaaatccgttaaatggatatggtattgttttaatcgatgaaattgatcttcatttacatcctaaatggcaacaaactattgttcaaaaactagaaaataccttcccaaatatccaattcatcctatcaacgcatagcctactagttctaacaacagttacttcggaacaaataaaaataattaatgaattagactatagattcaaattactatctccaacaagcaatccatttggcaaaaatgcctcggatgcactagctatcatggaaacatccgaatctccattagttcatagtgaagaaattttagctcttataaaaaaatatgaatctctggtgaaaagaggacaagaagattgtcgaaagaccaaagagattaaaaaacgcatagaaagcactggatatacatttgatatagcagacattgaaatgtggcgttttatagcagaaaatcgtgaattttttatcgataaatctgaaagtgatgactaa

SEQ ID NO: 89097 - DNA, 618 bp, Vibrio cholerae; identical to SEQ ID NO: 85887

SEQ ID NO: 89098 - DNA, 1623 bp, Vibrio cholerae; identical to SEQ ID NO: 85886

SEQ ID NO: 89099 - DNA, 618 bp, Vibrio cholerae; identical to SEQ ID NO: 85887

SEQ ID NO: 89100 - DNA, 1623 bp, Vibrio cholerae; identical to SEQ ID NO: 85886

SEQ ID NO: 89101 - DNA, 618 bp, Vibrio cholerae; identical to SEQ ID NO: 85887

SEQ ID NO: 89102 - DNA, 612 bp, Vibrio cholerae
atgacagttataaaaaatggaagtgagattagtatttttaatctatctcagggtgagaaaacacttatcgctttggtttctgatatcgctcgaagattagtaatactaaatcctagcttagaaaatccgttaaatggatatggtattgttttaatcgatgaaattgatcttcatttacatcctaaatggcaacaaactattgttcaaaaactagaaaataccttcccaaatatccaattcatcctatcaacgcatagcccactagttctaacaacagttacttcggaacaaataaaaataattaatgaattagactatagattcaaattactatctccaacaagcaatccatttggcaaaaatgcctcggatgcactagctatcatggaaacatccgaatctccattagttcatagtgaagaaattttagctcttataaaaaaatatgaatctctggtgaaaagaggacaagaagattgtcgaaagaccaaagagattaaaaaacgcatagaaagcactggatatacatttgatatagcagacattgaaatgtggcgttttatagcagaaaatcgtgaattttttatcgataaatctgaaagtgatgactaa

SEQ ID NO: 89103 - DNA, 618 bp, Vibrio cholerae
atgattccattatcacacaataatactcctactgaacttgaaaattatgtcaaattaaaaggtcaatctttgaccattcaagatttcagtgcacatgactttcaaggagtaaagaaaattgtaagagatagactacacactctccaaggtgaactatgtgtatactgtgaaaaaaaatatagcgttgatgaaatgcaagttgaacatattaaaccaaaatcgggaagaaatgctcaacctaatctctgtttcacctacagtaattatgctgtttcatgtattcaagaaaatcgtaagactcaaacttgtggacaaaaaaagaaagataacattttatttattgagccgacatcaccatcatgcaatagtcatttctctttaaacactgatggttttataaatcctcgcgggtttaaaaacagaaaagaaaagcatagtattcaaactacaatcgacatgttaggcttaaataaaccacacctacaactagaaagaaaaaaacaaatagaaagattaatatacattttaaaagcaacaaaacacaatagacatgaactaaccaataaatttataaaaagtggtaattttaaatatattttacgagaacttacaatgtga

SEQ ID NO: 89104 - DNA, 1623 bp, Vibrio cholerae; identical to SEQ ID NO: 85886

SEQ ID NO: 89105 - DNA, 618 bp, Vibrio cholerae; identical to SEQ ID NO: 85887

SEQ ID NO: 89106 - DNA, 1623 bp, Vibrio cholerae; identical to SEQ ID NO: 85886

SEQ ID NO: 89107 - DNA, 618 bp, Vibrio cholerae; identical to SEQ ID NO: 85887

SEQ ID NO: 89108 - DNA, 1623 bp, Vibrio cholerae; identical to SEQ ID NO: 85886

SEQ ID NO: 89109 - DNA, 618 bp, Vibrio cholerae; identical to SEQ ID NO: 85887

SEQ ID NO: 89110 - DNA, 1623 bp, Vibrio cholerae; identical to SEQ ID NO: 85886

SEQ ID NO: 89111 - DNA, 618 bp, Vibrio cholerae; identical to SEQ ID NO: 85887

SEQ ID NO: 89112 - DNA, 612 bp, Vibrio cholerae; identical to SEQ ID NO: 89102

SEQ ID NO: 89113 - DNA, 618 bp, Vibrio cholerae; identical to SEQ ID NO: 89103

SEQ ID NO: 89114 - DNA, 1623 bp, Vibrio cholerae; identical to SEQ ID NO: 86122

SEQ ID NO: 89115 - DNA, 618 bp, Vibrio cholerae; identical to SEQ ID NO: 85887

SEQ ID NO: 89116 - DNA, 612 bp, Vibrio cholerae
atgacagttataaaaaatggaagtgagattagtatttttaatctatctcaaggtgagaaaacacttatcgctttggtttctgatatcgctcgaagattagtaatactaaatcctagcttagaaaatccgttaaatggatatggtattgttttaatcgatgaaattgatcttcatttacatcctaaatggcaacaaactattgttcaaaaactagaaaataccttcccaaatatccaattcatcctatcaacgcatagcccactagttctaacaacagttacttcggaacaaataaaaataattaatgaattagactatagattcaaattactatctccaacaagcaatccatttggcaaaaatgcctcggatgcactagctatcatggaaacatccgaatctccattagttcatagtgaagaaattttagctcttataaaaaaatatgaatctctggtgaaaagaggacaagaagattgtcgaaagaccaaagagattaaaaaacgcatagaaagcactggatatacatttgatatagcagacattgaaatgtggcgttttatagcagaaaatcgtgaattttttatcgataaatctgaaagtgatgactaa

SEQ ID NO: 89117 - DNA, 618 bp, Vibrio cholerae; identical to SEQ ID NO: 85887

SEQ ID NO: 89118 - DNA, 1623 bp, Vibrio cholerae; identical to SEQ ID NO: 85886

SEQ ID NO: 89119 - DNA, 618 bp, Vibrio cholerae; identical to SEQ ID NO: 85887

SEQ ID NO: 89120 - DNA, 1623 bp, Vibrio cholerae; identical to SEQ ID NO: 85886

SEQ ID NO: 89121 - DNA, 618 bp, Vibrio cholerae; identical to SEQ ID NO: 85887

SEQ ID NO: 89122 - DNA, 1623 bp, Vibrio cholerae; identical to SEQ ID NO: 85886

SEQ ID NO: 89123 - DNA, 618 bp, Vibrio cholerae; identical to SEQ ID NO: 85887

SEQ ID NO: 89124 - DNA, 540 bp, Vibrio cholerae; identical to SEQ ID NO: 89084

SEQ ID NO: 89125 - DNA, 618 bp, Vibrio cholerae; identical to SEQ ID NO: 85887

SEQ ID NO: 89126 - DNA, 1623 bp, Vibrio cholerae; identical to SEQ ID NO: 85886

SEQ ID NO: 89127 - DNA, 618 bp, Vibrio cholerae; identical to SEQ ID NO: 85887

SEQ ID NO: 89128 - DNA, 1623 bp, Vibrio cholerae; identical to SEQ ID NO: 85886

SEQ ID NO: 89129 - DNA, 618 bp, Vibrio cholerae; identical to SEQ ID NO: 85887

SEQ ID NO: 89130 - DNA, 1623 bp, Vibrio cholerae; identical to SEQ ID NO: 85886

SEQ ID NO: 89131 - DNA, 618 bp, Vibrio cholerae; identical to SEQ ID NO: 85887

SEQ ID NO: 89132 - DNA, 1623 bp, Vibrio cholerae; identical to SEQ ID NO: 85886

SEQ ID NO: 89133 - DNA, 618 bp, Vibrio cholerae; identical to SEQ ID NO: 85887

SEQ ID NO: 89134 - DNA, 612 bp, Vibrio cholerae; identical to SEQ ID NO: 89102

SEQ ID NO: 89135 - DNA, 618 bp, Vibrio cholerae; identical to SEQ ID NO: 89103

SEQ ID NO: 89136 - DNA, 1467 bp, Vibrio cholerae
gtgtcacgtattatcaacaatgctaaaatcagactcagaaatatctccttgtatgattacaagaaattctccaaattaaaattcacgtcatcagaaaaaaatacaacgatcattattggtaataacggttccggaaaaagtactatccttgaatctatatccaaatgcctacaatttctttctgataacatcagaatccaaaataataacaactacaaattccaagattcagaaattaatatccattcaataagcggacaaaccattgtaagatgtattttggaaatagaaaatgatttttctttttcatgtagcctaacaaagaacagagaaaacatatcaagaaaagtgtctagtgagcttgaagaatttaaagctctagcacgcatgtaccaacgctctaatgaactggataataatactctctcttaccctttattagcctattatccagttgaacgttcagtaactcttaaaagagatgacgctgtaaaatattatgaacgaaaaaaagccaaatatagtgataaaagtgaaggtctaaaaaatgcctttgatggcacatctaatttcaatgattttttttcttggtacaaagaaattgatgatattattaatgaattcaaagcaaatgactctataacaaaggaggaaattgaatatttattatctaagactgataacaaagagaaaataggaagtcttatttctcaattactagagaaaaaaaataattacaacaataatgaagatagagaatttttaattagacaacaaaaagtaattcaagagtccataaaaacttttgtatccgatatagatcaagttaagataagtagaacacctcacttagatatgacagttataaaaaatggaagtgagattagtatttttaatctatctcaaggtgagaaaacacttatcgctttggtttctgatatcgctcgaagattagtaatactaaatcctagcttagaaaatccgttaaatggatatggtattgttttaatcgatgaaattgatcttcatttacatcctaaatggcaacaaactattgttcaaaaactagaaaataccttcccaaatatccaattcatcctatcaacgcatagcccactagttctaacaacagttacttcggaacaaataaaaataattaatgaattagactatagattcaaattactatctccaacaagcaatccatttggcaaaaatgcctcggatgcactagctatcatggaaacatccgaatctccattagttcatagtgaagaaattttagctcttataaaaaaatatgaatctctggtgaaaagaggacaagaagattgtcgaaagaccaaagagattaaaaaacgcatagaaagcactggatatacatttgatatagcagacattgaaatgtggcgttttatagcagaaaatcgtgaattttttatcgataaatctgaaagtgatgactaa

SEQ ID NO: 89137 - DNA, 618 bp, Vibrio cholerae; identical to SEQ ID NO: 85887

SEQ ID NO: 89138 - DNA, 1623 bp, Vibrio cholerae; identical to SEQ ID NO: 85886

SEQ ID NO: 89139 - DNA, 618 bp, Vibrio cholerae; identical to SEQ ID NO: 85887

SEQ ID NO: 89140 - DNA, 1623 bp, Vibrio cholerae; identical to SEQ ID NO: 85886

SEQ ID NO: 89141 - DNA, 618 bp, Vibrio cholerae; identical to SEQ ID NO: 85887

SEQ ID NO: 89142 - DNA, 612 bp, Vibrio cholerae; identical to SEQ ID NO: 89102

SEQ ID NO: 89143 - DNA, 618 bp, Vibrio cholerae; identical to SEQ ID NO: 89103

SEQ ID NO: 89144 - DNA, 1623 bp, Vibrio cholerae; identical to SEQ ID NO: 85886

SEQ ID NO: 89145 - DNA, 618 bp, Vibrio cholerae; identical to SEQ ID NO: 85887

SEQ ID NO: 89146 - DNA, 1623 bp, Vibrio cholerae; identical to SEQ ID NO: 85886

SEQ ID NO: 89147 - DNA, 618 bp, Vibrio cholerae; identical to SEQ ID NO: 85887

SEQ ID NO: 89148 - DNA, 612 bp, Vibrio cholerae; identical to SEQ ID NO: 89116

SEQ ID NO: 89149 - DNA, 618 bp, Vibrio cholerae; identical to SEQ ID NO: 85887

SEQ ID NO: 89150 - DNA, 1623 bp, Vibrio cholerae; identical to SEQ ID NO: 85886

SEQ ID NO: 89151 - DNA, 618 bp, Vibrio cholerae; identical to SEQ ID NO: 85887

SEQ ID NO: 89152 - DNA, 1623 bp, Vibrio cholerae; identical to SEQ ID NO: 85886

SEQ ID NO: 89153 - DNA, 618 bp, Vibrio cholerae; identical to SEQ ID NO: 85887

SEQ ID NO: 89154 - DNA, 1623 bp, Vibrio cholerae; identical to SEQ ID NO: 85886

SEQ ID NO: 89155 - DNA, 618 bp, Vibrio cholerae; identical to SEQ ID NO: 85887

SEQ ID NO: 89156 - DNA, 1623 bp, Vibrio cholerae; identical to SEQ ID NO: 85886

SEQ ID NO: 89157 - DNA, 618 bp, Vibrio cholerae; identical to SEQ ID NO: 85887

SEQ ID NO: 89158 - DNA, 1623 bp, Vibrio cholerae; identical to SEQ ID NO: 85886

SEQ ID NO: 89159 - DNA, 618 bp, Vibrio cholerae; identical to SEQ ID NO: 85887

SEQ ID NO: 89160 - DNA, 612 bp, Vibrio cholerae; identical to SEQ ID NO: 89116

SEQ ID NO: 89161 - DNA, 618 bp, Vibrio cholerae; identical to SEQ ID NO: 85887

SEQ ID NO: 89162 - DNA, 1623 bp, Vibrio cholerae; identical to SEQ ID NO: 89096

SEQ ID NO: 89163 - DNA, 618 bp, Vibrio cholerae; identical to SEQ ID NO: 85887

SEQ ID NO: 89164 - DNA, 612 bp, Vibrio cholerae; identical to SEQ ID NO: 89116

SEQ ID NO: 89165 - DNA, 618 bp, Vibrio cholerae; identical to SEQ ID NO: 85887

SEQ ID NO: 89166 - DNA, 1623 bp, Vibrio cholerae; identical to SEQ ID NO: 85886

SEQ ID NO: 89167 - DNA, 618 bp, Vibrio cholerae; identical to SEQ ID NO: 85887

SEQ ID NO: 89168 - DNA, 1623 bp, Vibrio cholerae; identical to SEQ ID NO: 85886

SEQ ID NO: 89169 - DNA, 618 bp, Vibrio cholerae; identical to SEQ ID NO: 85887

SEQ ID NO: 89170 - DNA, 1623 bp, Vibrio cholerae; identical to SEQ ID NO: 85886

SEQ ID NO: 89171 - DNA, 618 bp, Vibrio cholerae; identical to SEQ ID NO: 85887

SEQ ID NO: 89172 - DNA, 1623 bp, Vibrio cholerae; identical to SEQ ID NO: 85886

SEQ ID NO: 89173 - DNA, 618 bp, Vibrio cholerae; identical to SEQ ID NO: 85887

SEQ ID NO: 89174 - DNA, 612 bp, Vibrio cholerae; identical to SEQ ID NO: 89102

SEQ ID NO: 89175 - DNA, 618 bp, Vibrio cholerae; identical to SEQ ID NO: 89103

SEQ ID NO: 89176 - DNA, 612 bp, Vibrio cholerae; identical to SEQ ID NO: 89102

SEQ ID NO: 89177 - DNA, 636 bp, Vibrio cholerae
  modified_base (129)..(152): a, c, t, g, unknown or other
atgattccattatcacacaataatactcctactgaacttgaaaattatgtcaaattaaaaggtcaatctttgaccattcaagatttcagtgcacatgactttcaaggagtaaagaaaattgtaagagannnnnnnnnnnnnnnnnnnnnnnnacacactctccaaggtgaactatgtgtatactgtgaaaaaaaatatagcgttgatgaaatgcaagttgaacatattaaaccaaaatcgggaagaaatgctcaacctaatctctgtttcacctacagtaattatgctgtttcatgtattcaagaaaatcgtaagactcaaacttgtggacaaaaaaagaaagataacattttatttattgagccgacatcaccatcatgcaatagtcatttctctttaaacactgatggttttataaatcctcgcgggtttaaaaacagaaaagaaaagcatagtattcaaactacaatcgacatgttaggcttaaataaaccacacctacaactagaaagaaaaaaacaaatagaaagattaatatacattttaaaagcaacaaaacacaatagacatgaactaaccaataaatttataaaaagtggtaattttaaatatattttacgagaacttacaatgtga

SEQ ID NO: 89178 - DNA, 612 bp, Vibrio cholerae; identical to SEQ ID NO: 89102

SEQ ID NO: 89179 - DNA, 618 bp, Vibrio cholerae; identical to SEQ ID NO: 89103

SEQ ID NO: 89180 - DNA, 1623 bp, Vibrio cholerae; identical to SEQ ID NO: 86122

SEQ ID NO: 89181 - DNA, 618 bp, Vibrio cholerae; identical to SEQ ID NO: 85887

SEQ ID NO: 89182 - DNA, 1623 bp, Vibrio cholerae; identical to SEQ ID NO: 85886

SEQ ID NO: 89183 - DNA, 618 bp, Vibrio cholerae; identical to SEQ ID NO: 85887

SEQ ID NO: 89184 - DNA, 1623 bp, Vibrio cholerae
atgaatgagccaactagaatccccaaatatgttaaagataaaattagacaggctaaacagggagatctgtactcatcctttactgtttctgagtattactatgatggtgaagttttagaaagggacatagaacagagtgaactatatctaagaaacgtgtcacgtattatcaacaatgctaaaatcagactcagaaatatctccttgtatgattacaagaaattctccaaattaaaattcacgtcatcagaaaaaaatacaacgatcattattggtaataacggttccggaaaaagtactatccttgaatctatatccaaatgcctacaatttctttctgataacatcagaatccaaaataataacaactacaaattccaagattcagaaattaatatccattcaataagcggacaaaccattgtaagatgtattttggaaatagaaaatgatttttctttttcatgtagcctaacaaagaacagagaaaacatatcaagaaaagtgtctagtgagcttgaagaatttaaagctctagcacgcatgtaccaacgctctaatgaactggataataatactctctcttaccctttattagcctattatccagttgaacgttcagtaactcttaaaagagatgacgctgtaaaatattatgaacgaaaaaaagccaaatatagtgataaaagtgaaggtctaaaaaatgcctttgatggcacatctaatttcaatgattttttttcttggtacaaagaaattgatgatattattaatgaattcaaagcaaatgactctataacaaaggaggaaattgaatatttattatctaagactgataacaaagagaaaataggaagtcttatttctcaattactagagaaaaaaaataattacaacaataatgaagatagagaatttttaattagacaacaaaaagtaattcaagagtccataaaaacttttgtatccgatatagatcaagttaagataagtagaacacctcacttagatatgacagttataaaaaatggaagtgagattagtatttttaatctatctcaaggtgagaaaacacttatcgctttggtttctgatatcgctcgaagattagtaatactaaatcctagcttagaaaatccgttaaatggatatggtattgttttaatcgatgaaattgatcttcatttacatcctaaatggcaacaaactattgttcaaaaactagaaaataccttcccaaatatccaattcatcctatcaacgcatagcccactagttctaacaacagttacttcggaacaaataaaaataattaatgaattagactatagattcaaattactatctccaacaagcaatccatttggcaaaaatgcctcggatgcactagctatcatggaaacatccgaatctccattagttcatagtgaagaaattttagctcttataaaaaaatatgaatctctggtgaaaagaggacaagaagattgtcgaaagaccaaagagattaaaaaacgcatagaaagcactggatatacatttgatatagcagacattgaaatgtggcgttttatagcagaaaatcgtgaattttttatcgataaatctgaaagtgatgactaa

SEQ ID NO: 89185 - DNA, 546 bp, Vibrio cholerae
atgattccattatcacacaataatactcctactgaacttgaaaattatgtcaaattaaaaggtcaatctttgaccattcaagatttcagtgcacatgactttcaaggagtaaagaaaattgtaagagatagactacacactctccaaggtgaactatgtgtatactgtgaaaaaaaatatagcgttgatgaaatgcaagttgaacatattaaaccaaaatcgggaagaaatgctcaacctaatctctgtttcacctacagtaattatgctgtttcatgtattcaagaaaatcgtaagactcaaacttgtggacaaaaaaagaaagataacattttatttattgagccgacatcaccatcatgcaatagtcatttctctttagacactgatggttttataaatcctcgcgggtttaaaaacagaaaagaaaagcatagtattcaaactacaatcgacatgttaggcttaaataaaccacacctacaactagaaaaaaaaacaaatagaaagattaatatacattttaaaagcaacaaaacacaatag

SEQ ID NO: 89186 - DNA, 1623 bp, Vibrio cholerae; identical to SEQ ID NO: 85886

SEQ ID NO: 89187 - DNA, 618 bp, Vibrio cholerae; identical to SEQ ID NO: 85887

SEQ ID NO: 89188 - DNA, 1623 bp, Vibrio cholerae; identical to SEQ ID NO: 85886

SEQ ID NO: 89189 - DNA, 618 bp, Vibrio cholerae; identical to SEQ ID NO: 85887

SEQ ID NO: 89190 - DNA, 1623 bp, Vibrio cholerae; identical to SEQ ID NO: 85886

SEQ ID NO: 89191 - DNA, 618 bp, Vibrio cholerae; identical to SEQ ID NO: 85887

SEQ ID NO: 89192 - DNA, 1623 bp, Vibrio cholerae; identical to SEQ ID NO: 85886

SEQ ID NO: 89193 - DNA, 618 bp, Vibrio cholerae; identical to SEQ ID NO: 85887

SEQ ID NO: 89194 - DNA, 612 bp, Vibrio cholerae; identical to SEQ ID NO: 89102

SEQ ID NO: 89195 - DNA, 618 bp, Vibrio cholerae; identical to SEQ ID NO: 89103

SEQ ID NO: 89196 - DNA, 612 bp, Vibrio cholerae; identical to SEQ ID NO: 89116

SEQ ID NO: 89197 - DNA, 618 bp, Vibrio cholerae; identical to SEQ ID NO: 85887

SEQ ID NO: 89198 - DNA, 1623 bp, Vibrio cholerae; identical to SEQ ID NO: 85886

SEQ ID NO: 89199 - DNA, 618 bp, Vibrio cholerae; identical to SEQ ID NO: 85887

SEQ ID NO: 89200 - DNA, 1623 bp, Vibrio cholerae; identical to SEQ ID NO: 85886

SEQ ID NO: 89201 - DNA, 618 bp, Vibrio cholerae; identical to SEQ ID NO: 85887

SEQ ID NO: 89202 - DNA, 1623 bp, Vibrio cholerae; identical to SEQ ID NO: 85886

SEQ ID NO: 89203 - DNA, 618 bp, Vibrio cholerae; identical to SEQ ID NO: 85887

SEQ ID NO: 89204 - DNA, 1623 bp, Vibrio cholerae; identical to SEQ ID NO: 85886

SEQ ID NO: 89205 - DNA, 618 bp, Vibrio cholerae; identical to SEQ ID NO: 85887

SEQ ID NO: 89206 - DNA, 1623 bp, Vibrio cholerae; identical to SEQ ID NO: 85886

SEQ ID NO: 89207 - DNA, 618 bp, Vibrio cholerae; identical to SEQ ID NO: 85887

SEQ ID NO: 89208 - DNA, 1623 bp, Vibrio cholerae; identical to SEQ ID NO: 85886

SEQ ID NO: 89209 - DNA, 618 bp, Vibrio cholerae; identical to SEQ ID NO: 85887

SEQ ID NO: 89210 - DNA, 1623 bp, Vibrio cholerae; identical to SEQ ID NO: 86122

SEQ ID NO: 89211 - DNA, 618 bp, Vibrio cholerae; identical to SEQ ID NO: 85887

SEQ ID NO: 89212 - DNA, 612 bp, Vibrio cholerae; identical to SEQ ID NO: 89116

SEQ ID NO: 89213 - DNA, 618 bp, Vibrio cholerae; identical to SEQ ID NO: 85887

SEQ ID NO: 89214 - DNA, 1623 bp, Vibrio cholerae; identical to SEQ ID NO: 85886

SEQ ID NO: 89215 - DNA, 618 bp, Vibrio cholerae; identical to SEQ ID NO: 85887

SEQ ID NO: 89216 - DNA, 612 bp, Vibrio cholerae; identical to SEQ ID NO: 89116

SEQ ID NO: 89217 - DNA, 618 bp, Vibrio cholerae; identical to SEQ ID NO: 85887

SEQ ID NO: 89218 - DNA, 1623 bp, Vibrio cholerae; identical to SEQ ID NO: 85886

SEQ ID NO: 89219 - DNA, 618 bp, Vibrio cholerae; identical to SEQ ID NO: 85887

SEQ ID NO: 89220 - DNA, 612 bp, Vibrio cholerae; identical to SEQ ID NO: 89102

SEQ ID NO: 89221 - DNA, 618 bp, Vibrio cholerae; identical to SEQ ID NO: 85887

SEQ ID NO: 89222 - DNA, 1623 bp, Vibrio cholerae; identical to SEQ ID NO: 85886

SEQ ID NO: 89223 - DNA, 618 bp, Vibrio cholerae; identical to SEQ ID NO: 85887

SEQ ID NO: 89224 - DNA, 1623 bp, Vibrio cholerae; identical to SEQ ID NO: 85886

SEQ ID NO: 89225 - DNA, 618 bp, Vibrio cholerae; identical to SEQ ID NO: 85887

SEQ ID NO: 89226 - DNA, 1119 bp, Vibrio cholerae
gtgtctagtgagcttgaagaatttaaagctctagcacgcatgtaccaacgctctaatgaactggataataatactctctcttaccctttattagcctattatccagttgaacgttcagtaactcttaaaagagatgacgctgtaaaatattatgaacgaaaaaaagccaaatatagtgataaaagtgaaggtctaaaaaatgcctttgatggcacatctaatttcaatgattttttttcttggtacaaagaaattgatgatattattaatgaattcaaagcaaatgactctataacaaaggaggaaattgaatatttattatctaagactgataacaaagagaaaataggaagtcttatttctcaattactagagaaaaaaaataattacaacaataatgaagatagagaatttttaattagacaacaaaaagtaattcaagagtccataaaaacttttgtatccgatatagatcaagttaagataagtagaacacctcacttagatatgacagttataaaaaatggaagtgagattagtatttttaatctatctcaaggtgagaaaacacttatcgctttggtttctgatatcgctcgaagattagtaatactaaatcctagcttagaaaatccgttaaatggatatggtattgttttaatcgatgaaattgatcttcatttacatcctaaatggcaacaaactattgttcaaaaactagaaaataccttcccaaatatccaattcatcctatcaacgcatagcccactagttctaacaacagttacttcggaacaaataaaaataattaatgaattagactatagattcaaattactatctccaacaagcaatccatttggcaaaaatgcctcggatgcactagctatcatggaaacatccgaatctccattagttcatagtgaagaaattttagctcttataaaaaaatatgaatctctggtgaaaagaggacaagaagattgtcgaaagaccaaagagattaaaaaacgcatagaaagcactggatatacatttgatatagcagacattgaaatgtggcgttttatagcagaaaatcgtgaattttttatcgataaatctgaaagtgatgactaa

SEQ ID NO: 89227 - DNA, 618 bp, Vibrio cholerae; identical to SEQ ID NO: 85887

SEQ ID NO: 89228 - DNA, 1623 bp, Vibrio cholerae; identical to SEQ ID NO: 85886

SEQ ID NO: 89229 - DNA, 618 bp, Vibrio cholerae; identical to SEQ ID NO: 85887

SEQ ID NO: 89230 - DNA, 1623 bp, Vibrio cholerae; identical to SEQ ID NO: 85886

SEQ ID NO: 89231 - DNA, 618 bp, Vibrio cholerae; identical to SEQ ID NO: 85887

SEQ ID NO: 89232 - DNA, 1623 bp, Vibrio cholerae; identical to SEQ ID NO: 85886

SEQ ID NO: 89233 - DNA, 618 bp, Vibrio cholerae; identical to SEQ ID NO: 85887

SEQ ID NO: 89234 - DNA, 1623 bp, Vibrio cholerae; identical to SEQ ID NO: 85886

SEQ ID NO: 89235 - DNA, 618 bp, Vibrio cholerae; identical to SEQ ID NO: 85887

SEQ ID NO: 89236 - DNA, 612 bp, Vibrio cholerae; identical to SEQ ID NO: 89116

SEQ ID NO: 89237 - DNA, 618 bp, Vibrio cholerae; identical to SEQ ID NO: 85887

SEQ ID NO: 89238 - DNA, 1623 bp, Vibrio cholerae; identical to SEQ ID NO: 85886

SEQ ID NO: 89239 - DNA, 618 bp, Vibrio cholerae; identical to SEQ ID NO: 85887

SEQ ID NO: 89240 - DNA, 540 bp, Vibrio cholerae; identical to SEQ ID NO: 89084

SEQ ID NO: 89241 - DNA, 618 bp, Vibrio cholerae; identical to SEQ ID NO: 85887

SEQ ID NO: 89242 - DNA, 612 bp, Vibrio cholerae; identical to SEQ ID NO: 89116

SEQ ID NO: 89243 - DNA, 618 bp, Vibrio cholerae; identical to SEQ ID NO: 85887

SEQ ID NO: 89244 - DNA, 612 bp, Vibrio cholerae; identical to SEQ ID NO: 89116

SEQ ID NO: 89245 - DNA, 618 bp, Vibrio cholerae; identical to SEQ ID NO: 85887

SEQ ID NO: 89246 - DNA, 612 bp, Vibrio cholerae; identical to SEQ ID NO: 89116

SEQ ID NO: 89247 - DNA, 618 bp, Vibrio cholerae; identical to SEQ ID NO: 85887

SEQ ID NO: 89248 - DNA, 1623 bp, Vibrio cholerae; identical to SEQ ID NO: 85886

SEQ ID NO: 89249 - DNA, 618 bp, Vibrio cholerae; identical to SEQ ID NO: 85887

SEQ ID NO: 89250 - DNA, 612 bp, Vibrio cholerae; identical to SEQ ID NO: 89116

SEQ ID NO: 89251 - DNA, 618 bp, Vibrio cholerae; identical to SEQ ID NO: 85887

SEQ ID NO: 89252 - DNA, 612 bp, Vibrio cholerae; identical to SEQ ID NO: 89116

SEQ ID NO: 89253 - DNA, 618 bp, Vibrio cholerae; identical to SEQ ID NO: 85887

SEQ ID NO: 89254 - DNA, 1623 bp, Vibrio cholerae; identical to SEQ ID NO: 85886

SEQ ID NO: 89255 - DNA, 618 bp, Vibrio cholerae; identical to SEQ ID NO: 85887

SEQ ID NO: 89256 - DNA, 612 bp, Vibrio cholerae; identical to SEQ ID NO: 89102

SEQ ID NO: 89257 - DNA, 618 bp, Vibrio cholerae; identical to SEQ ID NO: 89103

SEQ ID NO: 89258 - DNA, 612 bp, Vibrio cholerae; identical to SEQ ID NO: 89102

SEQ ID NO: 89259 - DNA, 618 bp, Vibrio cholerae; identical to SEQ ID NO: 89103

SEQ ID NO: 89260 - DNA, 1623 bp, Vibrio cholerae; identical to SEQ ID NO: 85886

SEQ ID NO: 89261 - DNA, 618 bp, Vibrio cholerae; identical to SEQ ID NO: 85887

SEQ ID NO: 89262 - DNA, 1485 bp, Pseudomonas sp. 250J
atgttcaggaaaatcacggtaaacgagaagaaaagctgtgcggtcgtgcgattgctcgaaggggagtcgcagccatccacctggattacggtaatggtcggccagaatggtgttcgcaagagttacgtgctgcgagccttgctggatgtcgccttgggacaaagtggggcccgtacaggtggccgactgatcgaggtagagggtgggggtaggccaagttgcgtggtgtgtctttctgggacgccgcttgaccgttttccgagggcgagcagtaatagtttctttggcgtgctgaaggagtccctaggtgtaccgcttctatacttcggcgccagggcgactaacgggatggcagggacagcgcaaagcgagcgggcgctcattgccgcgttactcaataatattgaggccgtccgccaacgtggccacttgttggagcgggtgttttcacatttagggttacgcgctcgtatggatattcggctgaagctctccaaggctacggctgacgatcacaagttgtggctcaacacgccgattgacaagcagcacatggtcagggaagacgtcgaaaagcgagcgagccaattactggctcgattcgccgaggcacagtcggcgaggggctgggacgaaactgtcgagcgagcctatggcaggttcatggctcttgattaccttgtcatatacaaactgctgacggggatcaacaagagtcacgctttgccggtgctgaccctgttggatggtgagctttctgttgcgccatcttactgggatgcatacggatggggtgtcggcgaatggctggttctgttgaaagccggttttctcgatacggcaggtacctctttctttcgtttgaccgacgtcgcagagaatagcggtgacgaggaaaaggacgaggcgctcaaactgaaagggcaagatttgagctctggacagtgggggtggctggcaggtttcgccgggttatgtgcagagctacggccaggcagcctggtgctggtggacgagcctgagaatagtcttcatcccaaatggcaacaacaatatacctccatgcttaacagcatcttccgagagtgcggggaggtacaggctgtcattgctacccattcacccctagttgcgtcgggggttgatcctgagtggggtagcgtcgtcgcgctgaggtccggaatgagtttggatgatggcgtgctcgaaatccgaagtgaagccatggagagtacgttcgggtggagtgcctcagatgtctacgagaatattttcggtatcgattcgacgcgtgcgcctggattcactgccacggcagatatcgcgctgtcgttgatcagggaaaagaaaccagtgacgcaacgtgaaatcgaagtcatcagaaaggaattgtctgaggggcgggagacgctgcccatgcacgacccgatgcgtaatgtgattaccagcatcctgcagcgtttttcaggtcagcaggagtcctga

SEQ ID NO: 89263 - DNA, 876 bp, Pseudomonas sp. 250J
atggagctgttcgaaacattggattttgaagaacaggatctgcctctgctaaccgctgttcgggcgcatggtgttgcagggagggcgtggtccatcaatacggatgtcggtaatctgcgttcgaggttgctcactttgcaggggtatcgttgtgcttattgccaggtacccatcgacagagatgaggttgggcatcgagagttggatcatattctaccgaaatccgcatcaagcgaatgcacgcaagcgaaaggaaagagtaatgcgtttggtgaccggcaacatacctttggctatgggcaattcaccttcgagccttacaacctgatcctcacgtgcaaggcctgtaacgccttcaagaagagctttgatcctatgcgtgatcggcagggttacgtggtctctgacgactaccccgatggcaggcaactgctatggttctatccttactcgcagagatactcggatcatatcgaacggggtgatgattggatttatagcaaggtgactgacgaaggcgatgcagttataagaacctgcaagcttgacaaggtcgcagtgctgactatccgttttcaggggcgcgcactggcacttgccagcaacgcaggaaacctgcgtctcgccctgatggccttgggtacccaagtagcgatgggtaactgcagtaagacagacgcccacattgcccttgtcgatgcgctgctattggatgaagaccaagccatttattatctgaatatagtcactaactacttggagaacggtaatttttccgatctggaaaagatcgagcgcttaatggctgcggcgctggagcgagctcatgtgagtccacaggttgccgctgacgtcatcgccacagtgacgcattga

SEQ ID NO: 89264 - DNA, 612 bp, Vibrio cholerae; identical to SEQ ID NO: 89102

SEQ ID NO: 89265 - DNA, 618 bp, Vibrio cholerae; identical to SEQ ID NO: 89103

SEQ ID NO: 89266 - DNA, 1623 bp, Vibrio cholerae; identical to SEQ ID NO: 85886

SEQ ID NO: 89267 - DNA, 618 bp, Vibrio cholerae; identical to SEQ ID NO: 85887

SEQ ID NO: 89268 - DNA, 612 bp, Vibrio cholerae; identical to SEQ ID NO: 89102

SEQ ID NO: 89269 - DNA, 618 bp, Vibrio cholerae; identical to SEQ ID NO: 89103

SEQ ID NO: 89270 - DNA, 1623 bp, Vibrio cholerae; identical to SEQ ID NO: 85886

SEQ ID NO: 89271 - DNA, 618 bp, Vibrio cholerae; identical to SEQ ID NO: 85887

SEQ ID NO: 89272 - DNA, 1623 bp, Vibrio cholerae; identical to SEQ ID NO: 85886

SEQ ID NO: 89273 - DNA, 618 bp, Vibrio cholerae; identical to SEQ ID NO: 85887

SEQ ID NO: 89274 - DNA, 1623 bp, Vibrio cholerae; identical to SEQ ID NO: 89096

SEQ ID NO: 89275 - DNA, 618 bp, Vibrio cholerae; identical to SEQ ID NO: 85887

SEQ ID NO: 89276 - DNA, 612 bp, Vibrio cholerae; identical to SEQ ID NO: 89116

SEQ ID NO: 89277 - DNA, 618 bp, Vibrio cholerae; identical to SEQ ID NO: 85887

SEQ ID NO: 89278 - DNA, 612 bp, Vibrio cholerae; identical to SEQ ID NO: 89102

SEQ ID NO: 89279 - DNA, 618 bp, Vibrio cholerae; identical to SEQ ID NO: 89103

SEQ ID NO: 89280 - DNA, 1623 bp, Vibrio cholerae; identical to SEQ ID NO: 85886

SEQ ID NO: 89281 - DNA, 618 bp, Vibrio cholerae; identical to SEQ ID NO: 85887

SEQ ID NO: 89282 - DNA, 1623 bp, Vibrio cholerae; identical to SEQ ID NO: 85886

SEQ ID NO: 89283 - DNA, 618 bp, Vibrio cholerae; identical to SEQ ID NO: 85887

SEQ ID NO: 89284 - DNA, 1623 bp, Vibrio cholerae; identical to SEQ ID NO: 85886

SEQ ID NO: 89285 - DNA, 618 bp, Vibrio cholerae; identical to SEQ ID NO: 85887

SEQ ID NO: 89286 - DNA, 1623 bp, Vibrio cholerae; identical to SEQ ID NO: 85886

SEQ ID NO: 89287 - DNA, 618 bp, Vibrio cholerae; identical to SEQ ID NO: 85887

SEQ ID NO: 89288 - DNA, 1623 bp, Vibrio cholerae; identical to SEQ ID NO: 85886

SEQ ID NO: 89289 - DNA, 618 bp, Vibrio cholerae; identical to SEQ ID NO: 85887

SEQ ID NO: 89290 - DNA, 1623 bp, Vibrio cholerae; identical to SEQ ID NO: 85886

SEQ ID NO: 89291 - DNA, 618 bp, Vibrio cholerae; identical to SEQ ID NO: 85887

SEQ ID NO: 89292 - DNA, 1623 bp, Vibrio cholerae; identical to SEQ ID NO: 85886

SEQ ID NO: 89293 - DNA, 618 bp, Vibrio cholerae; identical to SEQ ID NO: 85887

SEQ ID NO: 89294 - DNA, 1575 bp, Klebsiella variicola
atgaaaccatatttccttgttaaatattctgtcttggatggatttgaaatcccaatatctggagacagggtagatgaaagtaattatctgtctgtcattgtcggaaagaatggctccgggaaaagtagggttttatataatattgcaatgagtattgcaattaatagtagtttgaaatggtatggagatgaagcatctggtgactatcaattctataatttgcgaagttttttctgggaaaaaaattatcttccaaaattaataggggtttcatatgagtctaatggcgaaaaaagtttattttggccttgcggggaaagtaagcaggattgcagttataggtatataaataaaaccccgcccgctaatattatatgtatatcaagtagttttttccataaattcccttcaactaacgagtggccactaagcgaacgtcctttaagaaaaaatgatgaggatatatatatcaacctatgcatgacagaaatcaacaaaaaaaatggctatcatggggggaggggtagtaatgtttttggtaagggcttaatgaaatctttgcttatgaataaggattcattatcaaatacattaaaaatgcttcggaattatggtggatatgatggtgttgatgtgtcattttgtttcaatgatcaattgcatctttttaaattaaatgaatacaattattcagttgaagattttagagattctttgaatagtatggactttcgcgatctcaacattagtgatgaagaatcatgcgagataatgaataaaattattatatttatggagttggtcaactataaagagttgttaaaagatgaaagatttcaccaagaggctgaggaaattgattatatttttactttccagcatcaatttaaaaggaaacctcacggtgttaatatgtcatttttcgtagatgagaaaggcgagaacagttctttaagtgatgagttaagggaattggtttgttattttaatggctatggattattaactgtaaaggatgtttcatttttcaaatcatccatgtcaattccattatatagcttgagttctggtgagttaaatgtacttacaacactaactcttataaatagtgagataaaagatagctctttaatattaattgatgagccggagattaatttgcatccaaaatggcaggaggaaataataccgaccttgttaaattcttttagtcatatttctgggtgccactttataattgcaactcattcgcctttaattgcagcaagtataaaggaaaacaattcatctgttgttataattggtgataatagaaatgataccattattcttccaggctctaaaattaaagggcagtcatctgattttcaattgttttacacattaaaacacccagggcctcataatgagtatcttataagaaaattgttaacaatcattgccaagagaaaaaatgggatggatatatcccatgaagatgttttgttcattaatgatgtgtctgatctattgattgatgcggacgaaggtgacaaagtcaaatacttactagctcaagcgcttgcattaatttaa

SEQ ID NO: 89295 - DNA, 705 bp, Klebsiella variicola
atgaaaagccaacacacaagacaactcccctcaattgttttttcggcaaaatcaatggattttatttcttcatgtaatcttaaaaatcataagtctatatggaatgtaacggtaggtaaagttattggagttaaaaaagaaataaggcagcattatcttagataccaaaaaaatttgtgtgcatattgtagaacggaggttttacatgatcatgggctctactgggatattgaacatattattccaaaggataaatatgctatttttttatttgaaccaagaaatttagctctttcgtgtcgtcattgtaacagcaaaaaaagcaataaaaaagtatttaacagaagaatatataagaccagcgtttatcctgttgatggggagtttttttcaatagttcatcctcattatgataaatatagcgctcacattgaaatgtatatttatgaggggagggttatatatgaaccgaaatcagataagggtcgcaacacatacgacatgtgcaatttagagcggtttgttcatattgcaataaacgacactggtgacaaaaatgttatagattttatcgatgagaatttattgggtatggacgatgagtgccttttcgagcattcaccgagagagaaaaaactaatggatataatcttaggcatcaaatctagaattgagaaaaaatatctaaacagagattttgcatag

SEQ ID NO: 89296 - DNA, 816 bp, Shinella sp. SUS2
atccgcatcgacggtgatttccgtgacatcgaggtgaagccgggcaaggaaagcgaagccggccgttgcatcatcaatgtgcgcaagaagaagcaggatggcagcgactatatcgtgccgcagcggctcgacatcgtctcgtccggttatcgggccgttctggcgctggtctgcgacgtgctcgaagggctgatggatgccgcgccacatctttccccgcgtgacgcgcgccatggcgaggcgatcgtgcttgtcgacgagatcgaagcgcatctacatccgcgctggaaattgcagatcgttgcgggcctgcgcaaggcgctgccgcgcgttaccttcatcttcacgtcgcatgatccgctctgtgtcaggggcatgcgcgacggtgaggtgatgatgctgcaccgttaccagaacaccggtgacggcccgagttcgatgcccgaagtggtcgagcgcgttgccgatttcgatcatatcgaaacgatgaccgtcgagcagcttctgacctcggacatgttccagctcttctcggccgacgaccggcggaccgatcatacctttgccgcggtggccgaccttctggcccgcgacaggagtatcctcgacgaaagggagcgggccgttctggccgatttcaacgccgccatcgccgacggattgccctatggccgcaccgaggtgacgcgcgtcgttcaagaggcggtcgccgagtaccttgcgatgcggcgcaccgccgccagcacgcgcgtcagtgcggcccgcgaggctgcgaagacggaagtcaaaaaattccttcaaggattgctggaatga

SEQ ID NO: 89297 - DNA, 1044 bp, Shinella sp. SUS2
ctggcaacggaaccggcgatcctgcgcaagccgcgcccgtcggacggcaagtccgaacttcagctcgttacggagcatatggaaaggatcgcggccggggagaaactggaggcgttcgatttcgcccgatacaaggaagcgtctgtcaagaccgccctcgagacgctgttccatggcaaatgtgcctactgcgagagcgtttatgccggcctccagccggtggatgtcgaacactaccggcccaaaggcgaagtcgagggcgctcccggccatcccggctactggtggctggcgatggagtggagcaacctcctgccgagctgcatcgactgcaaccggcgccgcagtcagaagacgccgaagccgggcgaggaccggctggtcgccttgcgtgccaacggtgatttcgaccgctcccgcagcatcctgaccggaaagcagagcgcgttcccgctcgaggaggggagtgtgcacgtggcccgccccggcgacgacatcgaggccgagaagcgtctcttgctcgacccaacgcgtgacgaccctgacctgcacctcgccttccacgttgatcgcgcgcacctgatcagcctcatccatccaaaacccctcgatcccggcggagccgcaggtctccccgatgccctggctgatcctgccgcgatcgcgagcgcagccgtcgcgtcaaggagcagtgctgcgggcgcggtgtcgatccagatctacgggctgaaccggcttggcttggtgcaggcgcgcacgcgcgtgctgcgcgacctcgagttccttctggcaatgagcctgaatctccatgagatcgctgcggacctggccgaaagggtagcagcccggtcgaccgaacttgctaccctgcatggcgcagcaagagagcgcctttccgaagatatcgccatggatgagcgaattgcaggcaagatcggccgctacgcggaggaggcgcaggcacgtatccgcgagatggcccagccgcaggccccttattcaagcctggtccgcgcctggataagggcctacctggcggaatag

SEQ ID NO: 89298 - DNA, 1374 bp, Escherichia coli
atgaaaaggctatattatacccatcatgatagtcgaaccttaaaacttgctatagaaggtgatgtttctgataatgcgaatatttttacagtaattgtaggtaaaaatggcgttgggaaaagcagattgttatctcagattgccaaagactgtattcaagatgttcatttcttgaaaacttttaatccattatttgacagagaaataacaccaaagttaattgccgtatctaccagcccattcgataaattccctccagggcgtaggtcattaaatcaccaaaggaaagaaaataattatcgctatgtgggtatgcgtggagaaggccccttcggcgtatcaaatgctgtatcccttttatcttcagcagcgagaggttggctagagaaacttgcttattcagaaaatcctgcaaatttactcgatgtttttcattctattgattttgagccccatatagagtttgtatttaaaccaacttacaacggaccggacactcctgactataacttcattggtgtatattcagatgagatattaacggaagttaagaagttatatttaaaatacaatataaaaattgacaggaagaatattgagagtctcttaaagttaaactccgaatcacgtcatgatatttacgaagcactggttgaaattaatcgatttgaacctgaacgtagggctgtaaccttgtcagtcgattttaccaatggtgaaacattggttggctcgacttatgcgaacaattatttttctagatcaattcttaaacttatgaacgctggcttcatgagattgatggatatgcgactcataaaaaaaagctatggtcccatgtcacttaaacgtgcgagctcgggagaacaatgtttattagtgatgttgcttggaattgcagggcatataactgatggttctataatactaattgatgaaccggaaataagcttgcatcctcgatggcaggaagagtttatcattatgttaacaaaagcattttcaacttactcaggttgtcaattcataattgcaactcattcaccacaaataatatccaatttgccgaataaaggttgttatataacatctttgtcgaaaaattatctttataaagcaaaatactttagcaaccgatctgcagactatcaacttgcggaactatttgatgccccaggcattatgaatgaatacattgccagattagctttcaatttactttcaaaagttaagactgctaagttagtaacagatgataatttgcgtgaattaaaacaactccagcttctccttgaaaacgttaatagtaatgaccctattaatgaactcgtaaattccgtatctcaggtgtgtgaaatttatgccaaaaattaa

SEQ ID NO: 89299 - DNA, 636 bp, Escherichia coli
atgccaaaaattaaaaatccaattagattcagcgcagagtcattagatattattgagaagaaattgtcttctccagattttaagcataccgactggggagatgatgatttgcaagttctccgtgcagaaattagaaatcattacagagaagaacaaaagctagaatgtgtatattgtcatgagcctattggggtaagagctgcacaagctgctcctatagagcatattgtgccaaaatctcaatatctatgttttatttttgaaccaaagaatctatgtgtagtatgtcctgactgcaatgaattcaaaggtaaaaatgaagtgttatttgaacccgtaataaatggggggcggcgcaaaaactatccaactgcatctgcatcatttcgcatcgttcatccacatatagatgattatgagatgcatattataaaagcaaatcgtgtttatgtggacaaaacacctaaagggcactataccattggaatatgtaaactaaatagattttttcattattttgggatgtgtgatgaatttgttaatgatgcaaaaattgctgaggcaaatgaaaattttttcaaaaaaggtagtattactactaatgaattattggatgatgacattcatttgatttaa

SEQ ID NO: 89300 - DNA, 1338 bp, Porphyromonas gingivalis; identical to SEQ ID NO: 85892

SEQ ID NO: 89301 - DNA, 600 bp, Porphyromonas gingivalis; identical to SEQ ID NO: 85893

SEQ ID NO: 89302 - DNA, 1371 bp, Microcystis panniformis FACHB-1757
atgtgggttgaaagtataacactcgaaaacattaaatgcttccagaatcaagagattaaatttattattcgtaatcccgataataaacgtcgtcaggatgctaaaccttatcattggatcactttattaggagaaaatggagtaggaaaaagcacgattttacaggctttagctttactgctcgcaggaccagaagcagccaaagaattattaccacgtccgactggttggatatgtaatcctaaaacaccgggtaaattaaccgcagtgcttcatcaggaagatggggatgcgggaaaatttggtacggataaaactcgaaaaacttttgcttattcctattttgttacaggcaaggaaaggttagagttaggaggcagtaaggacaaacaaacctatacagaaccagcattaatcgaagaaaatagcaaaattttaagttggttgcgagccaatgcttttgcctccgataatcatggttggtttgccgtcggttatggagctttccgtcgtttgacacgagtgagtcaagtgattattcctagtcttgaacctccgcaacgctctagcaactttttcagccaatttaatgaggatacatctttaagttcttttgagagatggatggtgtatttagattatcgaatagccaaaaatcctgaagatagtcaagccaaacaaatgaaaaaaatcggcgaagaagcaattactaaactgttacccggtaatgtagaaattgctgaagtaactgccgatggcttgattcagtttctagttaacggtcaaaaagttccaaccattagtttatccgatggttttcggagtatgattgctttagctggggatttaatttggcgattattacaatccttccccaatctagataaccccacagaggcttctggagtcgtcttaatcgatgagttagatattcatttacatccttcttggcaaagggaaattgctggatggttacaggaagtttttcccaagcttcaattctttgtcgctactcatagtcctttaatcgctgccggtgcgggggaaaagtctttaaccctacgaatcgatctggtagagggtgaattagagattgtagaaattccttatttagaattagcggctaatgttgatcgtactttaacaagtgctgcttttggtttgaaatcaacctttcccactgatacagaaaataaaattaagcgttaccaccaactaaatcgtaaaaataaaaatctggcagcagaagaaaaggaagaatatgaacaactgtcattatttgttggagaagttaaaccctttagcgaaattagtcaacctaatagtttagaatcccgaattgatgccttactagaggagcgtttatcttga

SEQ ID NO: 89303 - DNA, 690 bp, Microcystis panniformis FACHB-1757
ttgattcctgtcaccagaatatcagagccacgcgtattagctaaaaatgccgctcgttggctagaggctttagaatcaataaaatcaaacaacaaggcaactaaagctcaaattaaccaagcacaaaataaatacagtcatccgcaagttaaagacgcattagttaaaatgtttaatgggaaatgcgcttactgtgaaagtaagattacagtggtaacttacggagcgatcaaacatttttatccaaaaagccagtatcctgatctgacttttacttgggagaatttactgctttcttgtgataaatgtaatgatgccaatcacaaaggcacaaattttcctctcgatgatatcacgggaaatcctctgttaatagaccccacggatggagtaagcgatacgaatacacatcttgaatttgtttgggatgaaatggcaaaattggccagtgtttatggtcgggatcggcgtggtcaaattgttgaagatttgttcgatctcaatggtatgcgtggacgaaaagaattaattaactatcgtagtcaatatattaaaaagttgttagcattattacgttacgcaaaacaaggagactcggaggttttatctgtactgcaagaagcttgtcaaccgggagcggaatattatgcttttgctagtatttatatactgcctcatttgcctccctaa

SEQ ID NO: 89304 - DNA, 1626 bp, Pantoea sp. CFSAN033090
gtgagtgaatcaaaaaaaagactagacataatcttttctgatttcttagaaatgattgaaggtaatttacctgctaacattataagaaactctcaacaattgagagtattaaatgaagctctcaataacgataatttatatctaaaaaaattatcagttagtgactttaaaagattacgagaagtgtttgttactttagaagatgatttaactgtatttgttgcagataacggatacggaaaaacaacgttacttgatgcaattgctatttcgctcagctggttaaggtcaaacattcaaaaaaaagacaagccgggaacctatattaaagatttcgaaattaataattctccagatgctcattatgcatctattgcttcaacgttcaagattcaacagtataattgcaacctgctcattactaatgcaaaagaaggcgtttcatttaaaaggaagaatgaactacaggaaataaaagaaattgcgactatgtatcggcatgttaatacgcttatgaaaaattcaagccttcctttaatggcttattattccatagtgagatcaaatgtcggggggggtgtcgataacaaaagaaagcccattaaaaataaaaactcttggtcaaaatttgaagattatgaagatatagttttcgatagaaatgattttggagatttcttgagctggcttacttttctccgtaacaaagctgcacatgaaaattctgacttatacggtagtgctgatttgcttattaaggaaatagaaagcattactggaacgcttaatcaattatcttcaattaccggtatagataaaaatgttatttctaatctagagatcagccgtgaagaaaaaaggatcatgcttcaaaaggttaacgccaatgataataacctgttaaattcatcagccttttataaaagcgtgactaatgctatccttaaatttttacctgagtttgaaagtatcaatttggtctatggggaaagtgatgtcaaacttgttttgactaaggacaatgtagaactcgatgcccaacaactttcccaaggcgagaaaactatcttgacacttgttggtgatttagcaagaagactatccttactaaacccaatgttagaaaatccattcgaagggcgaggtatagtattaattgatgaaatagaccttcatttacatccacattggcaacagcaaattattgaaaggttgttgacaactttccccaatcttcaattcatcatttcgacgcatagccctcaagtgatttcaactgtccctgaaagatgcattaggattcttgaagaatctttaaacgaatttggtgagaaagagataaaaattgttagtcctagatatcaaactaaaggcttaactaataacgatgcccttttgtatggcatgaaaacagacccaaccccccatctaaaagaggtggcgtggttaaatgaatataaaaaactaatcgagcttggcgaatttaatgatgaaaaaggcacttctctaagagctaagttagatagccatttcggtaaaacgcatcctctgattcttgagtgtgatgaactaatatcgctagttaattttaaacaaaaattgaaaaacaaaaaaacacagagttga

SEQ ID NO: 89305 - DNA, 669 bp, Pantoea sp. CFSAN033090
atgagatttctagtaaggccggtggatggcccagctattttgagaaattttaatcatcaaaacgatgattgggacactctatcgagtgctcataaacgtcttatatgggttgagttgaaaaaaatgcaaggcaacctatgcgcttattgtgaaagaagaatagattttaaaaaggaaggcgataagcacattgaacattttttgaggaagggtattcacccacacttaacttttgcttgggaaaatttatttggatcgtgtggtgaaaagcaacgttgtggttttttcaaggataagcaagattatagtgagtcggacttgttaaagatggatgagttgaatccagagctttattttagatttttttataatggtgatgtcgaaataagacctaacataggtccgagaatgtctcatgttgctcaagtgacattaaaagtcttcaatttaaaacctaacgcaggtggtgtgcgtgcagagcgtaatgctgcaatcaatcgaggcattaagtcaataaaaatttatgccaacattgccaggcagttaattgaggaaggagctgatgtttcagacgctcgtgatttagttcgtgatgaatattacgaaagcattaagaatcacgaatttataaccgctcacaaacatgtttttgaggattttttagcttga

SEQ ID NO: 89306 - DNA, 1365 bp, Marinobacter sp. CP1
atgaagctcgaaactttacaactcactaactttcgacgcttcaagcacctggaaatcagtttccataaaaacttgacagtgttggcggcgcgaaacggacaaggcaaaacgtcagtgcttgatgccgcaactattgcgctgggcactttcgtaggtgctttcgatttgggtaaggccaaacatattgaacagagagacgcccgctacaagcgcgagaaaaacaagccagagagtgagcaacagttccctgttgaagtgaaagcatcgctttcgggtcttaagaaccccgtgctgcggaaactcagcggcgctaaaaacaagaccacgacaaaggatgcggttgaactcgcggcacttggcaagaagatgatgactcaagtgcgaaaccttgagccagttgctctgcccctgctcgcttattatggctctggacggttgtggaacgtacacaaaaacgtgacccgcaagtcagtgctcagcgagagccgtaccatgggctatgaggactgcttcagctctgcttccagctttactcaggttcagcaatggatgaccaaagccacctttgcagcactgcaacagaaaagcatgcaggcctacgaaggttacaacatcgctgaccaaatcgagggcattcaagagacggtaaataccgtgcttagcatcgagggttggagtggattccactacagcgtccaccatgaagaactcgctatgactcacgaggaactgggcgtactaccggtttctctgctcagtgacggcgttcgcgccatggtctctctggtagcagacatggcctggcgttgcgccaaactgaacccccagatgggcgcagatgctcccatgaaaacagaaggcatcgctttcatcgacgaagtcgacatgcacctacaccccaaatggcagcaaactgtgattggttctctccgcgctgcctttccgcgagtgcaattcatcgtcacttctcacagcccccaggtgctgtccacagtgaactctgaatccatccgactcattcgtagtgagcaggaccctgaaaccggagagattcaatcagacgcgacaataccaaccatgcagagccgtggcgtcgccagcaacgaagtaatggctgagctgcaagggattgaccccatacctggcgttgaagaggctcagtggctcaaagactacaaagtacttataacgtcaagccagagttcgcctgaaaacgagaacactaagcagaaactcaaggccaagattctcgatcattttggtgagcagcaccccgaatggctggagtgtcagcgtcttgaacgtttgcagcaaatgaaaaccaagctgagagggaaaacctccgctggtgggtcaaaggactga

SEQ ID NO: 89307 - DNA, 636 bp, Marinobacter sp. CP1
atgcaccaactcgacagaccaccagcaccagattgcctcagcaattatcagcatggccgcgataactggggctgcgttacgcctgcagctaaaaccgaaatctgggccagcctaaatgtgatgcaaggtaaccgttgcgcctactgcgaatgtcatattcgtaccgagcccaacagccaccacgcccatatcgaacattttcggcaaagaagccgccatccccagggaacatttgactggaacaacctgtttggatcctgtaaccgcccagacagctgcggcaaacacaaggatgggcaggcttatcagcctcaagatctcatcaaggccgaccaggaagacccagaatactacctgcgctttttatcagacggccaggttgcgcctgcagacaacttaacggaacaagaacgacacagagccgaggaaacaatccggatattcaatctaaacgggtctctacgccaaattcgagaaacctacgtgatgggataccggcataccgccgaagaatttttggcccttgcggatgaatttgacgaagacgagtggcgcccgttactgcagcaggagctacaagacattgctggacaaccctttgaaaccgccattcgccacgttctaaagattgattaa

SEQ ID NO: 89308 - DNA, 816 bp, Shinella sp. GWS1; identical to SEQ ID NO: 89296

SEQ ID NO: 89309 - DNA, 1044 bp, Shinella sp. GWS1; identical to SEQ ID NO: 89297

SEQ ID NO: 89310 - DNA, 1629 bp, Vibrio alginolyticus
atgatgcctagtcacccaaatcggcagataaataagatcgtatcgaaatcggagtctggtagctttgcggcttctgcgcagttggtccagatatatacagagggtatgatgggtgcacctgtcgatctcgaaaaggttcactactatcgcataaaatgtgccgagcaactaactagtgcaaatctaagattgacttcattaaaattaatgggctatcgagggtttgaatcccttgagattccttttagtcaaaaatcaaacgttactgtgcttgttggcaataacggtagtggtaagtctagcgtgctagatgccatccaaaaatctcttacccactttgtttctcgtttatctacaaggtcttacaatggtgatcagttagatgaattcgatatttccaatgatgttgcttttgcgacagttatccctgagttcaaggttgcggaaactagctttagttttgaattatctctgagccgtccaatgacagagcctaggaaaaaaagtaagttttcggagttaaatgaaattggaaatttgtaccgacttgcgaatactgaaaagaaagaactctcactcccattattagctagttatgccgtagaaagggctaatgatgttacgaccaaggatattgaagaatctgacgaaattttaagcagtcatacttgggataaatctaaagcttatagtaaaagcttaacaggtaaggctgacttcaaactgttctttcgttggtttaaagagcaagttgagtctgagaatgatgaaagtagtgacattaaagttattaaagcacagatagagtcaaaagaaagcgaaattaatagctcattaatgaagtcaattctgtctaatcctgatactactgaaactggtgaaattcttatcaagcagtacaaggagcagatcaatgaacttcaagaacagctgaatgaaaagtctaatgttggaaataaatcactagatactgtgagaagcgctatttataaatttcttcctggcttttctgacattaagttgaaaagaactcctttggatatggttgttaaaaaagatggccgagagtttagcgtattacagctgtctcaaggggagaagagtgttcttgcgttagttgcagatatagcgagaagactgacaatgttgaatccgtcactagctaaccctcttgaaggtaatggcttggtgttgattgatgaaatagatcttcatctgcatccatcgtggcagcagaagattatgcaaagattagaaagtacttttcctaatttgcagttcatagttacaactcacagcccacaagtctgtcatacactagacagtgacaatatatggttgcttaaaggtggtaagaaatttagcgctcccaaaggtgttagaggggcagtgtcttcttgggtattgaaaaccttattttatgtagaagaacgtcctcctgaagatgagattactcaacttttcaacaagtacaaagagttggtatacgctgatcaatatgacagtgttgatgctctaactgcaagagaagtactgatagataactttgggaaagactatgacgaaattgttgagctagacctttatatcgaaaacaaagagtgggagaaagagtttgaggaagattaa

SEQ ID NO: 89311 - DNA, 774 bp, Vibrio alginolyticus
ttgaggaagattaacaaatctaccgaaagcaatattctcactgaatatgccgaggagtttccagactctacttgggatgagtttagacaacataataagggagaatcttactcaactataaagactaagattttttcggaacaatacgaaatttgcgcatattgtgaggtgggtttgaaagatgaacctatccacaataagagaatagaacactttgtttccaagtctgataactcctcgtctcacaatgtccacttagattggtttaacctcattggagtttgtttgggggggactgattacaagaatcgtgaacagtatgaactacctgaaaacttgagttgcgattcccacaaagcgcatattgagggtttggaatcgatagttgataaaaattggaatggcaaagtcctatctcctttaagtattgcccaagaacatgggctgtttggttttgataaggccacaggtaatctgatacctgacttgaaagcatgtaatgagcaagttatagaaggtaatgtatatgagacgacattattgttagttgaagaaacaataagagtttttaacttgaattgtgagaggttgagtgcagctcgcttaaaattatttcaccagcttcaacataaattgagaaaagctaggcaaactcgtgatataggcgttctagagcgatttgttgctagctggaagcgagattaccctctcttttttcagactagtagagatgcaatattgctcgacaacaaacttacctctaagtatttgtga

SEQ ID NO: 89312 - DNA, 1764 bp, Vibrio parahaemolyticus; identical to SEQ ID NO: 88626

SEQ ID NO: 89313 - DNA, 783 bp, Vibrio parahaemolyticus; identical to SEQ ID NO: 88627

SEQ ID NO: 89314 - DNA, 1251 bp, Vibrio parahaemolyticus; identical to SEQ ID NO: 88624

SEQ ID NO: 89315 - DNA, 690 bp, Vibrio parahaemolyticus; identical to SEQ ID NO: 87375

SEQ ID NO: 89316 - DNA, 1326 bp, Vibrio parahaemolyticus
atgaaaatttcaaaaattagtttagaaaactacaaaaaaataagtagcttggacttgatagttcccaagtctaatcgtgtcatttgtttcgtcggagaaaacgggtgcaataaaacctcattaattagcttgatttatcatttgatacgcagaaatacacgaaaccaatctccaagtgatgctcaagatatttattttggtagcactagtgatgtcaacttttcacaaggagtaaacacatgtatttcagaaattcagataactgccgatggcaatgtatatacatcacgtgacggtataattagaaatactttaaaattatccgatgatgataaatccttgtttcaaggaaaattccaattttttaatcctaaagctttaacaaatttctatcgcaacgattggttaaatgcgctagatcttaattcagatgacgtcgtgtcccgaaatgtattgcttttcagacctagccaacgaagtgaggttccttactttgaaagagatcctaagcaagctgtagatcagcaattagcgggaagttcaaatgttataggaagaagaaagtttccctatagagtagaaagtggaatagagagagtagaaaactattttattgaagttttattagattaccttattgatcttcaaaaccagaaaccgcttgaaccaatctatggtaagtttatgaaaatcctttcgtcaatagatgaaagcttctcagaaataagcatttctaaatttccaaataaaggaataagaagtactaatttaccatcattaaagtctttatcttccggacaatcggattggctagtgactgcaatcagtattttggtccagatggtagaaattgctcctcaactcgcgaaatccgttgatgatatatcaggtgttgtttttattgatgaggtcgataaaaactatcaccccaaattccaagaagaattcatgccatggttgctagaaaccttcccaaacattcaattcgtaatcactacacacagtccctatctcgtaagaagtcttgatgaaaacgccttggttgtaaagcttccagatggtgaggttctgaatcatgactttagttattggagtatagaagaagtaagtcataccatttttggtaaagatttaggctttacaaagaaagtacaagaagaattaaagtcgtttgaagaactgttattgacgaataatgaagaagatattaaggctgaatacaaaaggttatcttccaaatcagagtccttggagaggaaggtaaatcagcttgtttacacacttgcttctccagatacattagagatattacatgagacagattga

SEQ ID NO: 89317 - DNA, 825 bp, Vibrio parahaemolyticus
atgagacagattgataggaatagtgtcgcggttcctgcaaacctgctagcactttatcgtaatcagcagttgtatcagtcagagttagataatatctcacaaggacgaaatagcgcaaaagggacaatatacgggcatgatgacgtcaaaaatgcattaaatgcactttacaaaaatgtatgctttatttgtcaaaaaagtttggctactgggtatgaaattgaacattttttaccttggagtactcattttcctgctcgcgcatacgattggaacaatcttcataagagttgcgataagtgtaactcaatgaaacgtaaagtaaaatataagcaacgttgcacaactgataataaaaaagtccttgacatgttgatattgagcccaacatctacatctcaaatagaacagttgattgactttgacccacattcatttgaagctatagataactctaataacaatacaaaagtagcgaaaacagtcgaatttttaaatgatacacaatttatccttgacagaaatcgccactggaacgctttaactgattttttaatgtccgaaccttggtctgagacattacgaaacataaaacatcgatacttgaacttttcaaatataacattagatattgttaataataacactgagtctttaattggagagttttgttatagaatccacaaaggatacctcagcgttaatagcccttataaccgcttttcaaatgctgttataccaaaccgtattcgccttccaattgcgttgctaaaagaatattcttctcagtattgttcaagcacaaaccaaactttaccatggtaa

SEQ ID NO: 89318 - DNA, 1245 bp, Vibrio parahaemolyticus
gtgtctggctatctaactaaaattaaaactaaaatcccatattctgataaggaagtagacatcaacgttgatggcaaaacgctgatcttaactggtggaaatggttgcggtaagacccagctacttaactatctttacgaaaaattacatgaccgcataataaagaaagataacaataacttacagcagctagaaaacctaaaagtacactacgagcagcagattgagcaaggtggtcctgctaacaagaattacgaccattgggttaaacagttacaggatactgttcagaaaattgaagaaatcaaacaacctccaataacattatctgatctggaagggtttgttttaaagcacaaagattttgaagcgctccttcttcctttcgaagcaggaagaaagtcagacatcttgaagccatcgtcagtctcatcattgagcagccttaaagaaaaagatcgattatctgtaacaagtccacatcaaaagcaaactgcatcatccctctttgaagagttcctcgttacaagtatagccaaccaagcattttcagaatccaagaaaattaacaatgaccctgtagaagcagagcgcattgacaaatggtttcagaaactagaggacgacttacagaacctgtttgaagatgaagaacttagactagttttccaatcggactcattatcttttgagatacatcagccacataaagaaccctacacatttcaaagcttgtcatctggtttttcttcaattatggcagtgtatgctgatttaattaccaaagtatcattacgtttaatagatccagatgacctaatgggaattgttctgattgacgagatcgacgctcaccttcatgtatcaatacagaaaaaaatcctagctttccttaaaaatgcatttccgaaagttcagtttatcgtgactactcattcaccgtttgtagtgtcatctgtagatgatgctgtaatttacgacctgtcaaaacttgagcaagtcgaagatctatccatgtattcttatgagtctgttctagagggcttatttggtgttcttccaatttctagtttacttcaacagaatattgaaacactagccaagttacttgaaaagcaccccattgatgttgaagaggttcagtcactattagataaattgcctgaagatgaagattcactggactctgaatccctttactttgttaattccgcaaagctagcaatcaataaagcaaagaggtag

SEQ ID NO: 89319 - DNA, 669 bp, Vibrio parahaemolyticus
gtgttcaatgtagttagaaatgaaccagctcctgcatcactcgcagggggaaaaaagtatgactccgaagatgtttggaaggccttaaaaaaggtatttcacaagaaatgctatatctgtgaaacattcgagccacaagacattaatgtagagcattttgttccacataagggtgatgaaaacttaaagtatgactggaagaatttatacttttcatgtggtcgctgcaataatatcaaactcgctaagtatgatgagcttttagattgctgtgaccctactatcgatgttgttcgtgcaatcaagcaccttcccccatcaactccatatgcaaagaaacttcatattaaagctcaagccacagatgataagactaaattaactgcggagttgttagataaagtcttcaacagtgaacatacgccaaacaaggctgtttcgtcagcatttctaagaaaaagagtctttgaacaatataacctactattgtcgcaattgaacaattactacaagccaatggctttacaggaagaaaaggatgatgcggtcgcacgtataaaacttctcctaaaaccatcttctccatacagtgcattcataagttggtgcattatggacgatgatgagttaggaccaatgctacatgattttataggtggggcagagtaa

SEQ ID NO: 89320 - DNA, 1269 bp, Pseudomonas syringae pv. actinidiae; identical to SEQ ID NO: 87176

SEQ ID NO: 89321 - DNA, 645 bp, Pseudomonas syringae pv. actinidiae
atgagacgcatcatcaagggaactgagcctgcgtcatttaccgaatggaaagccagcgcaaatgaagactggatgcccacttatccaaccttgcagaacccacaaaaacgcgaattgcataacagcctgctacaagagcagcattcttcttgctgctattgcggcagggaaatagaacttgagagcagccacatcgaacatttcaaaccccaggagcactacctgccactggcgctggagtacagcaatctccatgcgtcctgcctgcgcgagaccaaaccaggaaacccgctgcattgcggacatcacaagagcaactggttcgatgaaacgctgcacatttctccactggcagacgattgcgaacagcgatttcgctatctgctgacaggaaaaattcaaaacactgaatccgcagaccttcccgccgccacaatgatcgagaaactcgcactcgatattgcctacctgacaagaaggcgtcaggaagccatcactggcatttttgatgaacagttcatatcgagcgccagtgaagcggagttaacgcatcttgtgcagagtttgcgctcaggagatgccggcaagcaggtcgcctttggccacgtcgttgcccgctatgcggagcagttgctagcgtcctga

SEQ ID NO: 89322 - DNA, 1356 bp, Pseudomonas syringae pv. actinidiae; identical to SEQ ID NO: 87164

SEQ ID NO: 89323 - DNA, 570 bp, Pseudomonas syringae pv. actinidiae
ttgtgttactatagcgaaattcgacctgaccgggttggcctgagtttccatatagagcacgtcgaaaacaagagccaacaccctcagcgtacgtttgactacaataacctcgctgcctgcgcgctggacagtcagagcgatctggaagtgttgaaaatacaaggcgctgaggtatttggtgggcacgcgtcaggtaagtcgaaaggggtcgacatggctcgcttcgtctcgtgtcacatgcccgactgttcgcgcttcttcgcctatttgtctgacggccgtgtagtgcctgctgacggattgtcactggatgaagttgaccgagctgaatacaccatcgacctgctaaaccttaacagcccttatctccaggacttgcgacaatcctggtgggatgagttggaagggctttttgaagatcatgttgatcaagatatgagtctgcattgtctggcggggattgatctcatccctgtgggtgcgagtttaagtcagtttttcagtattacccggaattttttcggaggtatcgctgaagaaatccttgatcaagaggctggtcgctggtaa

SEQ ID NO: 89324 - DNA, 1545 bp, Streptomyces azureus
atgcgtctcctggaagtagagattccgagattcaaaaatctccgcgatttccgagtggagttcgacggcacctctggtgtctcagtgcttgttggtaggaatggggccggcaagtcgaatttgctcgaggcaataacactgatctttcgcgatctagatttaggtgtggcgccttctttcgcctacaggatccggtaccttatccgacagtacgacgttgaggtgtccgcttgggagcaagacggaagatatcgtgttagctgttcagtcggcggagagatcgttccaacggggcgtttcaccggggctgcaggcgcgcgataccggccgcggcacgtgtttggttactactccggcccaagtaatcgcctcgaggaccactttattgctcatcaggagcgattctataaagacttggtcggtggtaacgacaagccgattagaccgctattttacgcgagaaatgttcactctaattttgtgcttctcgcattctttctagatgatgacccggcagttcagtcccttctgcgagatcacctcggtattcaagggctggactccgttttgtttgtgatgcagaagccttcatggaacagcaatgacggtgatccgcgcttctggaatgcgcgcggtaccgtgagggggttgctcgatagcctctaccgtctttcgctggcaccactacgcttgaggacccgcgttaggacaggtttcaatagccacatccgctctgaacatttgttcctctatttggctggcctagaggaggtcagggagttggcgagtggctatgaaagcaatcaagagtttttcaaggcgcttgaaagcacgtacatttctgagctcatcaacgatgtcagaattcgagtgtcactcaataaggctgatgccccgctgacctttagagagcttagtgaaggtgagcagcaattgctattggtcctggggctcatgcggttcaccaaagaagaggaatcattgttcctccttgatgagccggacacgcatctcaatcccgcctggagcgttcagtacaaagagttcttgcatgactttgggggactagatgcaggctctcaggtactcatggcgacccatgaccctttggttgtcgcaagcctcaccaaagatgaggtcagaatcctagagcgtcgagaagacggcaggattgtcgctcttgagccgcttgaggatccaaggggtatgggtgtcggcgccctgctcacaagtgatgtttatgggcttcgatcgcaactggatctggagactctgaggaagcttgaccgtaagagggagctagcgtcgagagagtctgtgctgacccctgacgaggagcaggaactttcagctctgggccatgagctgagggggcttgggctcttgctcgaaaaccgcgacccagaattccaagagttcttgcgggccaagttccgcgcacagagccagccgcaggacgaggtcgttctgtcacgcgaagagattgagcagaacaggcaagaggcagccgaaatcgtgcgtgatctgtttgatgttgatgattga

SEQ ID NO: 89325 - DNA, 855 bp, Streptomyces azureus
ttgattttcattgacattgaagaggtaggactccgtcttagcgctgcgtggcttgagtcggcaaggaaggtgaaggagaatctagcggctgcaagtactgccaaagagagagcgcgcatcattgaggagaacggcaagctctggcgtgacctaaaggctgacctggcggccgtgagtaacggcaaatgttggtactgtgaaactcgcgatcaccgttcagacaacgcggttgaccattacagaccgaagtcctcggtgagaggtgagaaccatccgggttactggtggatagccttcgattataagaactttcgtttcgcttgcactttttgtaactcttggcgtaagggccccgatggcacggctggcggtaagtcggactatttccccatcctcgtaggctctcaacgggctaagggcccggacgatatcctgtccgaggaggtgcccctgctgattgacccttgctgcgccactgacgtagctttgctctggttcgatgagacaggccaagtgtccgctaatcctcattgggcagacattgacagtgcagctcaggagaaagtcgacacttccacccgatattaccatttggatcacgtgtatttggtggaagctcgccgcgcggtatacgccgagatcctcaaactctgcgatgatgctgacaaggcgcaaaggtggtggattaagtcgaagcagtcgtcggctcgggatcgctatcgagaagcaatgtcggacctggtgcgatcgttgaaacgaggcagggagtattcggcggtggcattgtgtgcaatccggggccaccgcgcgacaagtgaggcggcccgggtcgccttcgaatacttgagcaggtag

SEQ ID NO: 89326 - DNA, 1425 bp, Vibrio alginolyticus; identical to SEQ ID NO: 88312

SEQ ID NO: 89327 - DNA, 630 bp, Vibrio alginolyticus; identical to SEQ ID NO: 88313

SEQ ID NO: 89328 - DNA, 1011 bp, Pseudomonas syringae pv. aceris; identical to SEQ ID NO: 86094

SEQ ID NO: 89329 - DNA, 648 bp, Pseudomonas syringae pv. aceris; identical to SEQ ID NO: 86095

SEQ ID NO: 89330 - DNA, 1413 bp, Vibrio parahaemolyticus
atgggctttagagttaaaaaggtaaggaatcacgttctctgggacaaggaaaatgacgatcgtaatgcgtttacggttatcatcggaaataatggctgtggcaaaacagagcttttgattgatacgtgcaacaagtaccacagttattacactagtgccttgcttgataaggatacccatgtcgcatctgctgttcactatctcagagaagacttttcaccacacaattggaaaacagtggagcgtgagtatggacaccgtttacctagaaaactgattgcagcctccactagccagtttgaaaaatttaaagctaattggagcgttcgaaatgatctagtgccgtcaggtttctacgcatatatcggctctaaaccttatatgccatcgttgtctccatcgacgcgtattgcatcaaaagccattcaacagttgttaggggcagagtatttcgaagaacgtaagcacaaggctctggtcgggtttttatcgaagttcgattttggtcaaaagttgctcctgaaattcgaactcacattccctaacgaagatctggagaatatccaaaatcagtcattaactgaacctgaaactcagttgattttgaaaaatgcctatatcgaacacgatgaaatggagttggttgaattactgggttactgcgaaagaattatagaggctcctgcatttgcattaaccgtgggcaatcaaaaccttaatctcatccatctgaagggctctgaacaaaagcctttctctaagctcatcatttcaagaatgctcagagcaggattgattactctttcaagcatacaaacgatgaaagataaatcgctgataaacgaccaatctactgtaaatatcgaaagttccgctatctcgtctttatcaaagcgtagttctggtgaacaatgcttgttcctgctgtttatgagtattatatcgtccatcgaagacaatgcgctgatctgcatcgacgaacctgaaattagtctccatccccaatggcaggaacgcttcgttgatatattaagtgaatcgttttcaagctatcgtggctgtcacttccttatcgcaacacactcaccgcttattgtatctgatataagcgcaaagaattgctgtgtgtacgatatggcaacgaatacattggtggatgcggcgccatatggtgaacgttcctcggactatcagctggcaacgctatttcacaaccctggaaacaacaacgagtatctcttaagccaagttatagaggtgctggatgacatttgtcagtcaaaggaaattgcatctgagacaaagactaaggcgcattggttattaagttatgaacctcgtttgcctgatggagataaggtaaaacgcttactatccattttagagcagacgttagaggcattttccaaatga

SEQ ID NO: 89331 - DNA, 645 bp, Vibrio parahaemolyticus; identical to SEQ ID NO: 86309

SEQ ID NO: 89332 - DNA, 1230 bp, Vibrio parahaemolyticus; identical to SEQ ID NO: 86310

SEQ ID NO: 89333 - DNA, 666 bp, Vibrio parahaemolyticus; identical to SEQ ID NO: 86125

SEQ ID NO: 89334 - DNA, 1230 bp, Vibrio parahaemolyticus; identical to SEQ ID NO: 86310

SEQ ID NO: 89335 - DNA, 666 bp, Vibrio parahaemolyticus; identical to SEQ ID NO: 86125

SEQ ID NO: 89336 - DNA, 1413 bp, Vibrio parahaemolyticus; identical to SEQ ID NO: 89330

SEQ ID NO: 89337 - DNA, 645 bp, Vibrio parahaemolyticus; identical to SEQ ID NO: 86309

SEQ ID NO: 89338 - DNA, 1230 bp, Vibrio parahaemolyticus; identical to SEQ ID NO: 86310

SEQ ID NO: 89339 - DNA, 666 bp, Vibrio parahaemolyticus; identical to SEQ ID NO: 86125

SEQ ID NO: 89340 - DNA, 1413 bp, Vibrio parahaemolyticus; identical to SEQ ID NO: 89330

SEQ ID NO: 89341 - DNA, 645 bp, Vibrio parahaemolyticus; identical to SEQ ID NO: 86309

SEQ ID NO: 89342 - DNA, 1230 bp, Vibrio parahaemolyticus; identical to SEQ ID NO: 86310

SEQ ID NO: 89343 - DNA, 666 bp, Vibrio parahaemolyticus; identical to SEQ ID NO: 86125

SEQ ID NO: 89344 - DNA, 1413 bp, Vibrio parahaemolyticus; identical to SEQ ID NO: 86314

SEQ ID NO: 89345 - DNA, 645 bp, Vibrio parahaemolyticus; identical to SEQ ID NO: 86309

SEQ ID NO: 89346 - DNA, 1230 bp, Vibrio parahaemolyticus; identical to SEQ ID NO: 86310

SEQ ID NO: 89347 - DNA, 666 bp, Vibrio parahaemolyticus; identical to SEQ ID NO: 86125

SEQ ID NO: 89348 - DNA, 1413 bp, Vibrio parahaemolyticus; identical to SEQ ID NO: 89330

SEQ ID NO: 89349 - DNA, 645 bp, Vibrio parahaemolyticus; identical to SEQ ID NO: 86309

SEQ ID NO: 89350 - DNA, 1230 bp, Vibrio parahaemolyticus; identical to SEQ ID NO: 86310

SEQ ID NO: 89351 - DNA, 666 bp, Vibrio parahaemolyticus; identical to SEQ ID NO: 86125

SEQ ID NO: 89352 - DNA, 1413 bp, Vibrio parahaemolyticus; identical to SEQ ID NO: 89330

SEQ ID NO: 89353 - DNA, 645 bp, Vibrio parahaemolyticus; identical to SEQ ID NO: 86309

SEQ ID NO: 89354 - DNA, 1230 bp, Vibrio parahaemolyticus; identical to SEQ ID NO: 86310

SEQ ID NO: 89355 - DNA, 666 bp, Vibrio parahaemolyticus; identical to SEQ ID NO: 86125

SEQ ID NO: 89356 - DNA, 1413 bp, Vibrio parahaemolyticus; identical to SEQ ID NO: 86314

SEQ ID NO: 89357 - DNA, 645 bp, Vibrio parahaemolyticus; identical to SEQ ID NO: 86309

SEQ ID NO: 89358 - DNA, 1230 bp, Vibrio parahaemolyticus; identical to SEQ ID NO: 86310

SEQ ID NO: 89359 - DNA, 666 bp, Vibrio parahaemolyticus; identical to SEQ ID NO: 86125

SEQ ID NO: 89360 - DNA, 1413 bp, Vibrio parahaemolyticus; identical to SEQ ID NO: 86314

SEQ ID NO: 89361 - DNA, 645 bp, Vibrio parahaemolyticus; identical to SEQ ID NO: 86309

SEQ ID NO: 89362 - DNA, 1398 bp, Salmonella enterica subsp. enterica serovar Mbandaka; identical to SEQ ID NO: 87652

SEQ ID NO: 89363 - DNA, 597 bp, Salmonella enterica subsp. enterica serovar Mbandaka; identical to SEQ ID NO: 87653

SEQ ID NO: 89364 - DNA, 1263 bp, Leptotrichia sp. oral taxon 212
atgaaaattaggaacctttatataacagaatataaaggattaagagatataactttaaattttgaaaataataataatatactggatttggttgttttggcaggagcaaatggaagtggtaaaactagagtgttggagagtatttattactactttgaaatgtttagaagtaaagctgttagtttagagttattctatgaaaaaaatgaaaatgaagttttagaaaacttaatgagtactgaaggtttgacagaaattgaaaaggaaatgcaaaaagatattgaatatgcagattgcctaagaaatattagatactacaatcaagattataaagaaggtggaaatcaaaatattaattcaaaaataataagtagaagctttgaaaatttgaaaatatttccaaaaataatttatgttccaacagagataaattttcaaaaaatagaaattgcttctcctatgttagttcaagaatataagtttttaaatattataaattcaaacttaataaaagatgtgccttcgtacatagcaacaagaatagtagaaatggctaacgaacaggaaaatataccaatgggagaaataaggaatgttgtatttagagaaataaatgagatttttgagatactggatttagatataaaagtttcagaaatttccaaagatgcaaaaagtatcccaatttttaccaattcatcaggagataaatttgatataaatgaattatcatctggggaaaaacagttatttttacgaacgttggctataaaaatgctaaatcctgaaaattctattattttgattgatgagcctgaactttcattacatccaaaatggcagcaaagaattgtagatgtatatagaaaaatcggaaaaaacaatcagattattattgcgacacattcaccacatattttaggaagtgtgaaaaaaaagaatattatgttgctggataaaaatgatgatggggaaattatagttaaaacaggccatgaactgtataactcttatggacagccaacggatagagtgttaaaggatattatggggttagaaactactcgggatcctaaagtgtttaagctgctggaagaagcaggagagttagtggataaaaatgaatatgagagtgaagaatttaaaactaaatataaagaactgagagatatactaggtaaaaaagatgaagatttattattaatggatatggatattcaaataaggaaaaaacgaggtttcaagaatgctgaaagtaaataa

SEQ ID NO: 89365 - DNA, 663 bp, Leptotrichia sp. oral taxon 212
atgctgaaagtaaataaaaaagatgagccacagttttttacagaatttaaaagaaagaaaagtcctaaaaattgggacgaacttgataaacctgaaaaccattatatcaaaaaagagttgaaatatcatatgctaaaaaatgaacaaaatataggagataaaagctactgtccttattgcgaaataatattattttctgaaaatattgatttaaaagaagataaggaatgtcacattgagcatataaaacctaaaagtaaatttggaaatcttacttttgattacaggaattttttaatatcatgttcagaaaataaaacttgtggtcatagtaaacaatcaatatggaatgataaattatttataaaccctgttgaagaaaatccggaagaatatttttcttataatatgaggacaggaaaaattattcctaaaaaagaaaatggattggactatgataaagcaataaaaacaattgaaattttaaatctaaatgaagataatttatgtgaatatagaaaaacctatataattaatataataaatactatcagaaaattaaatgatgatgagaaaatagaaattataaattattttgatgaatttccaacactaaaaaagtttttaatagaaaatataggagctttaaaagaaataatttaa

SEQ ID NO: 89366 - DNA, 1647 bp, Vibrio hepatarius
atgaagcttgataaactctggatcggtgagtttaagaatcttaaagatattgagattgactttgaccaaaatgaactcgtgactgtcgtcattggttggaatggcgcgggtaaatcgaatgttattgaagcattggtaataatttttcgtgaccttgatttacacaaagcaccttcgttttcttacaagctagagtatctgtgtcgtggcaaccgcgtaattgtcgaagcaaaggaaaccgcggtgaagaaggaccagtataagattctagtgcatgttgaaggcagccctgagacggttataaccgataaacatactgatttctttaaagatgaaactcgtcagtttttaccatcgaacgtttttggctattactcgggacctagtgaccgattagccacgcatttttatgaccaccagcgtaagtttagagaccaacttctctaccctgaaaagcatggtttgaatgagacaacgcttccgttaagaccgttgttttatgctcaaaaagtacatagtaactttgtcctactttcgttttttctaggtgcagatgaaaaagttaaaaagtttttaaaagagaagctttttatagagggcattgaatcggtgctatttgtgcttaacaagccggattggactagtaagcagggcgattcaaggttttggaatgcgacaggtgttgttaggccatttttagatcggttgttctttgcatctttagctccaatgcgtagaacgatgaaagttcctcatccgatgaagaagaatgccgataatgttgaagctctttttttgtacttaaaggatttggaagctctgaagcaggtgggtgacaaaacttcggataaagatttctttaaattattagaaagtatctatttttccaacctgattcacgaagtacgtattcgagtaaaagtgaagaacaagaatggtagcgatgagtctttgaccttcagagaattaagtgaaggtgaacaacagctgattaccgtactaggcttgttgcgttttacccgtgatgatgaatccctatttttgctagatgaaccagacacgcatttaaaccctgcgtggagtatggagtacattaatttcttaaaagaagttgctggcttcaacttggatgcaaacaaagagaaggctgactctggtgctgtggataacagccatattgtactggcgacgcatgacccaattgtcatttccactctgaagcaagaacaaatcaaaatcatgaagcgtgacgaagatagcttgcaagtttttgctgcgtcaccactctatgagcctaaaggtatgggattctcaggcatccttatgagtgacatgtttggcctgcgttctgatttggacccgaaaacattagaaaagctagatgaacatgcaattctgctggcaaatgaagaacgcacagaggaagaagaagtccgctataaggaactgcaagagcagttagataaatcgggttttattgacgcttactcagacccatatttttctgcttttgttaaagcatggggcagaaagcatggtgataagctattcacgcagacctttttgtcagacagagatagacagcaactggcagatatgaccgatgacattcttgctgagcttgatgcagaagaggctggtgagtaa

SEQ ID NO: 89367 - DNA, 825 bp, Vibrio hepatarius
attgatgctgcagaaattgctactaacgctaaggctgacgaaaaaggctgggatgcacaaaaaagagctgagcaaatagcgattgaaaaggtaaaagctcgtaaaaaagccatctcagcaaaaagtaacgtgtggtcactgctaagtgatattttggcaaagcgttcttatggaaagtgttggtactgcgaaagtaacgagttgcggtctgacaaccctattgatcattttaggccaaaaggaaaggttgctgaatgtcctgatcatccgggttactggtggcttgcgttcgaatggtcaaattatcgatatgcttgtacttactgtaattctaggcgagttgaagtggaaactgccggaggtaagcaagaccattttccagtttttactcctccagattggaatagatctaaggatgataataatgctgaaaagcccaagctgttagacccgtctgatgaagatgactacaagctcttaacttttaataaaaacggtgaagcttgtcctaactgtagcgatgaagattcggaagattaccagaaagcaaaagaatcgatagataaatatcacttgaatcatgagcctacgaaaaaagcccgtaaagcaattaggcagagaattaagcaaattatcgccaacacaaataagctattagaagatggcgtggatatgaaatcgattcaaatcaagtcgaataaaaaggaacttataaaaatgattaggccttcttgtacgacaactaaatttaacactgcggcaaaactatatttaagagagtttgaagataacgcgtgggttaaagaaatattagaccgagattaa

SEQ ID NO: 89368 - DNA, 1248 bp, Vibrio xuii
atgtcaggctatctaactaaaattaaaacgaagattccttactcagataaagaagtggatatcgacgtcaacggtaaaacactgatcttaaccggtggaaacggctgtggtaaaactcaactactaagctatgtttacgaaaaattaattgctcgtgtgatagaaagaaacaacactacgatacagcaacttcaacaaaatattgtaggctacgagcaagctattaagcgtgatggtcctacaaatcgctcgtacgattcttgggttcatcatatggaagatgctaagaagcaaatagaagaactagagaaccctccaatcaacctatctgatcttgaagacttcgtgctaaagtacaaagagttccgagccgttcttcttcaatttgaggcaggtaggaagtcagacattctaaaaccatcttctgttgccccaatcgacagtctcaaagagaaggaccgaaacacagtttcacgtccacatcaacagaaaaccacctcttcgatctttgaagagttcctaataacaagcatcgcgaaccaagcattttccgaatccaagaaaatcaacaataaccctgaagaagctgaacgaattgataaatggttcaacaagttagaggctgacttacagaacctttttgaagatgatgaacttaaattagtttttaagtctgactcattctctttcaaaatccatcaaccgaacaaagaaccttatacattccaaacattgtcatctggcttttcttctatcatggcagtctacgctgacttaattgctaaggtttctctgcgttcaatagatccagaagagttaaccggtgtagtcatgattgacgagatagacgctcaccttcatgtttcactacaaaagaaaatactatcgtttctaacaagagcatttcctaaagttcagtttatcgttactactcattcgccgtttgttgtctcatctgttgatgatgctgtcatttatgacttgtctaagctagagcaagttgaagacctatctatgtactcatacgaagcagtacttgaaggcttgtttggcgtacttccaatttctaacttacttcaacaaaacatcgaagcactagctaagctgctagaaaaacatccgattaaccttgatgaagttcaatcacttttagataagctaccgcaagatgaagattcattggattctgaatcactctactttgttaattcagcaaaactagcaatcaacaaagcaaagaggcagtag

SEQ ID NO: 89369 - DNA, 669 bp, Vibrio xuii
atgttcaatgtagtaagaaatgaaccagctcctgcttcgctagctggtaaacgaaagtacgactcagaagatgtgtggaaagcactaaacaaagtattccacaaaaaatgctatatctgtgaaactagtgaacctcaagacattaatgttgaacacttcgtaccacatgagggtgacgaagatttaaagttcaattggaataacttgtacttctcgtgtggacgttgtaacaacataaaacttgctaagtatgatgatcttctcgactgctgtgatccagatactgatgttgttcgcgctgttaaacatttaccaccatcaactccatacgcaaaacagcttcaaattgaagctcaacatgatgactataaaactaagctaacagcggaactcttggacaaagtttttaacagtgaacacacacctaacaaagcggtttcagcttcgttcctaagaaagagagtgtttgatcaatacaatctgctcttaaagcaattaaacaattactatgaccctgttgctttaccggaagaaaaagcaagtgctgttgagcgcatcaagctacttctcaaagctacttctccatacagtgcatttataagttggtgcatcatgggagatgaagagttaggacctatgttgcatgactttattggcatagctgagtag

SEQ ID NO: 89370 - DNA, 1218 bp, Pseudomonas coronafaciens pv. porri
atgattgtaagtatcacaggaaagcttccaagctcgcaacgtatcttcaatgtagatttacaaggaagaaacctactgatagtaggagggaacggatcaggcaaaacatctttattatcatccctacacgcacaactaaggatacagattatcgaacaagggttaaaacataaaagcgattacgaaagaaatatagcggtagcaaaaaatagtctagaagctgacttactccaccctaacatgcgatctcagtatttagacagtcttaactcaagcgagacagcgctaaagagaattacccatccctatactatttcctacaatgactccgatagctttatccaaaattacagcaaaaaaaccgctgtggtaagcttcgtcccagcacacagaaaatccaatattgaaagtgttacttctgccacttccgtaaagaaagacatatcgcaattgtcacaagaagagaacctaggaaataagttagaacaacatttagtgaatctgaaggtgagatccgcattgggatcacaaattggcagggatgaagctgtcctacgaaaaattgataagtggtttgaagatttcgccgtcagtctacgttacttatttgaggatgacactattcgacttaaatttgatccagacactctaaaattccaacttgcacaagaaggaaaacttgactttacatttcaaaatctttcctcaggatattccgcaatatttgatatttatgctgacttactgatacgaaccgaatacttagatataaccccatcgcaacttactgggattttattgatagatgagattgacgtccacctgcatgtttcgcttcaaagaaaaatcctgccttttctagctggctctttcccaaatgtccaaataattgcgactactcattcgcctttcgtggttacatcgacaactgacactttaatatatgacttgaatacgggcagtgaaaacgaagacctttcgatgttttcgattgaagcagtagtagaaggactattaggagtctcccctgtatctgaaaatctcaaatcgataataacagaacttactgcgatcacgtctgaaaataattttgatctctctcaagccgaagaaattttagaaaaagtacagccctatacagatcatatagatgatgagtctaggatgttttacgagatagcggtaaaccgtataataaaaagccgcaacggagcttga

SEQ ID NO: 89371 - DNA, 657 bp, Pseudomonas coronafaciens pv. porri
atgttcaatgtaaaccgatcatctaaagctcctgcatcgctactaaaaagaacttcatggacggaagcagatgtcatatatgcattgaaagaagactttcacgacaaatgttatatctgcgagacaaagtctccatacatcaacgtcgaacattttcacgcccatttaaatgacgtttcaaaaatgtatgactggaacaatttgttttatgcatgcgcacgatgcaacaacattaagcgacacttatttaacaacttgatagactgtactaatcctgatactgatgcgctgcgacttattaagcattctcctcctctcacaccatactccggggaagtgttaattactcctaccgacgacgatcccaaaaccatccaaactgcgaaccttataagaaaagtttacactgatgataatactgggattaaaactgtcacaggagcagctttgagaaaaagaatatacagacgctatgcgaagttggttgagcagctaaatatatacgatgatgaggacagcctccagtcagaaaaagacgcagctttagagcgcattagaaacttaatgagccgaaaccaagaatactctgcatttttgagatgggccatactagtatcacctgaacttctaagcgttgtaggcgactcgatagactaa

SEQ ID NO: 89372 - DNA, 1218 bp, Pseudomonas coronafaciens pv. porri; identical to SEQ ID NO: 89370

SEQ ID NO: 89373 - DNA, 657 bp, Pseudomonas coronafaciens pv. porri; identical to SEQ ID NO: 89371

SEQ ID NO: 89374 - DNA, 1293 bp, Pseudomonas stutzeri
atgctgaacagcctcaagctagaaggcatcggccccgcagagcggttggccgttgatttcaagccacgactgaacttcctgactggcgacaacgggctgggcaagagtttcgttttggatattgcctggtggtcgcttactcgtacctgggccaggggtgtgatggcggctcctcgttccgatgctgaacaatcgaatattgattactcctacaccgggagtgccgctccgtttacctataaaagtaagtttgaccatcaaagccagcaatggtcggtcaagcaggggcggccagccgttcccggtgtggtgatctacgccggcgtggacggtagcttctcggtctgggatccggcccggaactactggaagggggagaaagaaggcgccgtcacacccgaccggccacgcagtttcgatttcagccccgatgaagtgtggaaaggtctgctttccagtgatggtaaaacgcagctgtgcaatggcctgatcagtgactgggtgctgtggcaagaggggcgcaaagaggccttcgatgacctaacaaaggtgctcgatgccctctcaccctctggactggaaaagctgctgccgggcgagcccatgcgcgtcggttctagcgtaaaagatatcccctcgctccggatgccttacggtcaggacgtgccattgactcacgcctcggccgggatgcggcgtatttcagccttggcttatctattggtttggacttggcgcgagcatcaactggcctgcaagcagtatcgggtcaatccggcgaaggaaatcatcttcctgatcgacgaaattgagtgccacctgcatccgcaatggcagcgccgcatcgtccccgccttgttgaacgtcatgcgtgcgctgacaggaagccgtgatgtgcctgtgcagttgctggctgccacccattccccgctggtactggcctcggtcgagccggaattcgaccttgaccgagattgtatctgggacttcgatctggtcgaggggcaagtaaaagcggctctctacccgtactcacgcaaaggtagcgtaaatgcctggctgacttcgtcagtgtttgacctgaaagagccggcttctgtggacgccgaacaggctctggaaaaagcccgcaccttcttgcgggaagtagtggctactcagcagccgcttacagctccacaaaaacaggcgttggaacaaattgacgccgagctgcgcgccagtctgagtgacgtggattccttctggattcgctggagccaattccgcgaacagcggatgggcgaagcatga

SEQ ID NO: 89375 - DNA, 648 bp, Pseudomonas stutzeri
atgatccgggtagagctggcagatgaacccctggattttgatgcaaaggtcaggcagccgggattgagggccattgccgaactggcgggtgagccaggcttgccgaagcgcaaaggccgccctcgaaaggcgatagccaatagccgtgaacagattccggctgacaaattcccatcttactggaccgagtctcttcctgagctgagaacggcctatgggcatatctgcagctatgtgtgcgtctatatcgagccggtgaccggcgctgcgtcggtcgaccatatgctgcccaagtcgctgtcttggcaagaggcctacgagtggcgcaactatcggttggcctgctcgttgatgaacagccggaaaaacgattatcgcgatgtactcgacccattcgagattgacgatgactggttccagattgagctcgtcggctaccaggtgattccaagaacggatctggatccggcaatcaaaacctgcgtgcaagccactatcgaccgtctgaagctcaacgaccgggactgcctgacggtacgtgaggattatgcgaccgactatttccagggggatatctcgcttggctatctgcgtcgccgtgcgccacttctggccagagaaatcgagaggcaaggcagggccctgtga

SEQ ID NO: 89376 - DNA, 1251 bp, Planktothricoides sp. SR001
atggaaattaatcgcctaagactgaggaattttcgagtttttgaagatgcagagtttcactttaaccctggaatgaatctaatcgttggcatcaacggtgccggtaaatctactgtgcttgatgccttgaggattgccttttcaaagatattacctaattttacggtttctgattctaaaaacaatagcgagagtttcaaagctagtgatattaagattgggtataaaacattagaatttgacgttgattttcaagcatcaggaataccttttgaatgtaatatttggtttgccaaaagcgataactttaaaattaaaccggatagtgagcatattttagacaccataaagaacgcggaaaatcaacctcttgtagtttattttgccacccaacgctcaataattacggtaaaaaaatataaagagaaagatatgtataagatggcttcaggcgatccatctgctgcttttcctgaagcactgaagcctagaaatctacgtctgactgaatttactgattggtatttagcccaaaacgcattgttaaacgaaaattattcaccggcaaaacgaagtattgaggctttaaataaagccgtgacaagttttttagatcaatttactaatttgcgggttgttggtaagtcagatttagtccttgataaagatggattaaccctaaatattaatcagctttcagatggtgaacgaggtcttttagccttgatactcgatctggtaaaacgacttttacaggcaaatcctgatttagaagatcctctaaaggatggaaaagctgtggtgctaattgatgagttggacttacacttgcatccacgctggcaacggatggttgtcaaaaagcttacagagatttttcccagttgccaatttattgccaccactcattcaccgcaaattattggagaagtagaacccactggtttaactttactgcaaaaagagggtgatcgaattctggtgaaacaaaaaggtcttcagtcgttcgggttagattctagttggattcttaaacatttaatggaaactgaaccccgcaattttagagttcagtctcaaatcaattctatagaagatgcactagaagaaggcgatctggactcagccagaaataaacttgacgctttaaaagatatgatctatggacgtgatgatcaagttatccgtcttgaagccagcattaataacctagaggcattagcagatgaagtggattcagaagaagaatga

SEQ ID NO: 89377 - DNA, 717 bp, Planktothricoides sp. SR001
atgaagtggattcagaagaagaatgagcctaatgagttaaaggaatggcgttctcgcaattccaatgatattaattttggttacagtctgatgcgtcaagaccatgctgttgttaaagcagtgactcattctttactagaagaacaaggatggttatgtgcatacactggcttgattattgatgaaggaaaatgtcatattgaacacctcaagcctcaaacacagtgcactcctgctgaaactgttttatatagtaatattgtagcttgctatcctgaaccgaatattggctataaacttccttatggtgctcataagaaagatcactggcctgctcctaatgaacaacatttgtttgtttctcctttagatccaagctgtcaatctcggtttatctttaccttacgaggtcagattaaaagcaaggatggagatgatgcagcagcaatgacaattacaaaacttggtctcgatcatagtgagcttgaagataaacgcaaagcagccattcaaggaacaattggtctaacaaataatctttcgcttaaggatgcaaggagaagactgagaaaattaaagactcaacaaggaggaaaactagatgagttttgttttgttttggttcaagctgtagaaaaacatatttccaggcttgaggcgatcgctaaatctaaagcccaaaagaaagcaaaaaaatcaaaaggaaacaataaatga

SEQ ID NO: 89378 - DNA, 1233 bp, Cronobacter dublinensis subsp. dublinensis LMG 23823
atgcttacagcaataaacgaaatttcaatccctatcccatacacagccaaaaaggccgaacttagccttaatggaaaaaatcttataattacaggaggtaatgggagtggcaaaaccagctttataagttctatctacgaatttttaaaagatggactagatcaaccaaacaataataataaaaagcatcttgagcaacagcttagaaattatgaagacaatctaaaacagggaggccgtgatagtactcattactcatggtatgagcaagaagttataaaaataaaaaaaagactgcatgccctagatgacttccatataacaacatctacaaaagatagtgctaacactcgctcgctccttcgtttccacaaagctcttagagaagcagcaattaccgccccgcagtttgtgccaagactttctgctctagtcgaagagaatgctcatttttctaatgaaaaggatggggacaacatttttgaaaactatttaattagtttgaaaacatcacaaagctacgcaatttctttcgataaagatgaagaaaaggcaacaaaaattcaaaattggtttaataaaatagaaaatgatctacaaggtctatttgaggatacagaacttaaactaaggtttgatagtactgaagggaagttttatcttcatcaaaacatgaaagataaatttacctttcagacgctctcgtctggatattcttcaattttaagaatatacgcggatttgattatgcgcatagaaatgtgggaactgacccctgagagtattgaaggtattgttttcattgacgagatagatgcacatttgcatgtttccttacaaaaacagatactacgtttttttagcaattctttccccaacattcaatttattgttacgactcattcaccctttgttgtctcttctgtgactgatgccgtaatctatgatttatccagcaatcaacaaattgttgatgtatcgtcttattcaaataatgtcatcctacaagagttatttggcgtcaacccaatatcaattgtattatctgataagttagaaaaaatagaaaatatcataacgcgcttagataataataatattgaaacagccttaaatataatacactcgctcgcttcgtcggaagaatcaatggacactgaagccagcgcctttgtagattatgcaaagcttaaaatcatcaagtttaaaaaagagaatgcccaggagaaataa

SEQ ID NO: 89379 - DNA, 654 bp, Cronobacter dublinensis subsp. dublinensis LMG 23823
atgtttagagttaacagaacataccctgctccagtttcactgtctcgtaaattacgttatgacggccctgacgtacatgaagccttacaggaatgtttttttgggaaatgttacatttgcgaaaacaaagatcctctagatataaacatcgagcatttcgtctcaagaaaaattgatgacgaaaaatcttatgactgggataatttatatctatcctgcggtaggtgcaataatataaaactagcaaagcatgatgaactacttgattgctgcaacgaagctgtatggaatcgtataaagctcctacctggattttcagcaaaaactaagaaagtaacagtagaaccactatttcatgataataaaactataactactgccgatctacttgaaaaagtgtataacagcgatcatacaataaataaaaggctaacatcggccgcactacgctcacaaataacaaaaacaacgcaaaaacttatcagaaatatcattgaatattacgaggatgatactccaaacgatcgcaaactatatctcatcgaaaaaattaaagttatgattagacgtgatgctaagttttctgcattttgcagatggattgtcctcgacgatgcagagctttgtgagatattggaacccttcatggactaa

SEQ ID NO: 89380 - DNA, 1749 bp, Cronobacter condimenti 1330
atgcaactgcttcgcattcgtatcccagccttccgcaatctgcgtgatctagacatagctttcgatacccacctacagccttcgggaagtgcgataaatgcactgcccaaacccattcgaagtcacgtgctgattggccaaaatggcactggcaaatccaatctgattgaggggctgatcaccatcttccgtgatgtcgatctcgatcgtgaagcagccttcaattatacactggaatacagtatccacggccatgttgtgcgtattgaagccgattctgccaagcagaaacgcccctatgtatgggtagatgataaagcagcatcacagggctttttgctcaaaaaccgccagttactgccagcacatatttttgcttattactcaggtcgcaatgagcgtattgaagctctgtttcatgaacatgagcgacgctttaatcagcgccaggaaatcaccactaacgaagtcctgtccgaacagcttctggaaaactttactggcaccgacgcggatattcgtgcgattgaagaggccaaacgccgccgtgaagtgcggctgaaacatgtgggcgatgatcgtctgcgacgcctattctattgtcgtggtggacacagccaactggtacttctggcttgtctgctgtcggacgaccctgtgtttcaaaaggtactaaagaacctccacatcgaatcgttagaatccgctctattcgttttgaaagagccgcaccggctgcgtgaaaaacgccgcaatggcaagttcgaagtgcaggaactgaatgaaggtgacccacgcttttggtacgctcgcagtaatgtggtcagcgagtttcttgacaaactctggaaggtggcttgggcccccattgaacaggagacgactaaacatattgattttcgtggtcgcacagagaagcaaaatcaactgtacttgtttgtctcaagccaagagaagcttaaacaattgggagagtcgatcggcagcactgacagtttctttcgttacgctgaaggagcctatattggtgatctgatcgatgaaatacgtattgtggttaaaaagcgtgatgaacatggtggtaaggtaagctttactcacctttctgaaggagaattacaaatgctcaccgtgctcggtttgatgcggatcgcccgagacgataattgcttgttcctgcttgacgaacccgacacccatctgaatccgatctggaaattgcgctacttcgacgatatagaaggtgtactcagctcggatgatacagctctactacagagcgaatcccaaatactcattacaacccatgacccaatgatggttggcagtctgaagcgtgaacaggtacatatactgcgtcgcgatggtaatactacgcttgtcgatagccctgatgaacatccgcaaggaatgggtgtaaccgggttgcttaaaagtgagctgtttggattgtcatccacattggatatcgaaaccgagcgccgcttgtttcgccgtaatgaactttttgctctcgatgaaagaactcatgaacaagatgatgaactacgccgtttgagttcagaattggcagacttaggcttttcaaatgcagatttcaaagaccctttctatgctaagtttgtacgacgaatggccaaacacactaagttccacaaaccagttcttacgccggaggaacaagctgagcaggatacaattgccgactcaatcatcgatgagattttacgtgaggatgatggacaatga

SEQ ID NO: 89381 - DNA, 852 bp, Cronobacter condimenti 1330
atgatcttcatcgacttggaaaataagcttccaacggatatggatttgcatcctgatgttcgctggagcgaggctgattggaacgcttggcagaaagagtctgttcgcttgattggtgagcttgccaagctcaatgaggcaggccaaatcaaagaacgtaatgaattgattgataagcaaagtggccactggggaaagttgaaaccatggcttcttgcactatcggatggaaaatgctggtttactgaagcgcgagatattgcttcgcatttagacgtggaacattttcgcccgaagaaggcttctcgtaatgttaagggacccgaacgagatgggtactggtggttggccttcgactatatgaacttccgcattgctggcactgtacctaatagaaagaagggcgcgtggttccctctccgctatggctcaccatgttcaagttatgcgcaccgctgtgaaggagatgagattccgcacttcatagatcctacaaatgcttatgacgttacattactcgcttttgacgaagaagggaaagcggtgcctgcaccaggtatttctcgttgggataatatcagggttagacgtaccgtagaccgcttaaaactctccgaacatcaagcgttggcagaggaacgtcgtaaggtctggcaaagaactacaaagctgataaataagtattttcaggcactggctagtactcgaacttctgcggttgcccgtgagcaagtgaaggccgcagcacgtgacatactctgtcttactaagcctgaaaccgaactttcatcagtggcgaaatggtgcgttcgcttgcgcaacgatccacaactttccaggctggttgggtaa

SEQ ID NO: 89382 - DNA, 1263 bp, Anabaena sp. wa102
atgctaaaagaacttcatttaaggtctgtaggaccatctcctcaatttgatgttgaatttgctgatagactcaatatctttactggagataatggattaggtaaaagtttcttactagatgttgcttggtgggtacttactggaaactgggtagaacaacctgcttatccgcaaagaaatacagaaacacctccagaaattatctcccaaattatcactctagatgatgatgaaggaaaaaattattcctttaaatttaatttttctaaacaaaaatggcaagatgtaaatgttccctttcatggtgttcccttattaaaaggaataattatttttgttcgcgttgatggaagtttctctatttttgatcctgctcgcaacgatgaagatggctatgattttacccctgatacactttggaatgggttaaaattaaaaggaaaagttatttctaacggtcttattcaagattgggtaacatggcaaaatcaaccccaaaaaacgccatttcaacttttatcaaatgttattaaacaacttgcacctcatcctgatgaatggatagaaataggagaaccaacgcgagtatctgttgatgatgtgcgtgatattccgacaattaatcttccttatggtaatattcccattacccaagcatcagcaggaatgaagcggattttgggacttgcttatttattagtatggacttggtatgaacacgaaaaagcttctgaattaaagcagcaagaaccaatgaatcaaatagttttattaatagatgaaattgagtctcatctccatcctcgctggcaaagagcgattttaccatctattttatcagtagtcaatcagttaaaatcaaatatcacaatacaagctttagttactactcattctccccttgtgctggcttcattagaaccaatatttgatcaagaacaagataaattatttctatttgaactacaaggaaaagaggctgaattaaatgaaatgttctggactaaacaaggagatactgtaggatggttaacatcagaaatatttggactaaaacaagcacgttcccaagaatcagaaaccgcaattgaagcagcagaagcgtggatgcgtaatgataatatgaatacttttcctgaacatttgagaacacaatcacaaattcatcaagaactgcaaagacttttaccaggacatgatccattttggccacgttggatagttacagcagaaaaaagaaattcaaggttatcaaatttataa

SEQ ID NO: 89383 - DNA, 588 bp, Anabaena sp. wa102
atgttgaagttcattcctccaccagaaccagaaaattttgatgcaaaagcacgacaaccaggtaataattggttagaaaaaaatccagataaaaaaagactaaaagattattggtcaaattttaaaagtgatttagctgatggttttggtaatctttgtggttatactgttatgtatgaacctgttggtactgtagaccatttcctatcttgtgaaaatcatcgtcatttagcgtatgaatggaataattaccgttttgcttctggttggattaatagtagtaaaggtactcttgataaccagattcttgacccgtttgaagttgaagatgattggtttgaaattttgttaccttccctacaattagtaataactgatgcagtaccagaagagaaacgccaaaaggctgaatttactttacaaagattacctttacaggatgatgaaagagttcttcgtcagcgtcgagaatggtataagttgtatattgatggtgatcttaccctaacaggattagaaaagaaagctcctttgattgctcgtgcaattagaaaacaacaagctaattctcccttagagaatgtttga

SEQ ID NO: 89384 - DNA, 1332 bp, Anabaena sp. wa102
atgcacattcaaaaagtcattatcaaaaacttccgctgctttgagcatttggaagttaatttagatcccgatatcaatatttttgttggcaataatggatcaggtaagagtgcgttattggatggtattgctgcggcaatgtttgcttcatatatacgttgtattcagctaattgaaagtataagatatcaacaaactaaccctttttcacaagaagatttttcagtcaaacaaaaagaaaatcaacaaaaacattatgcagaatttactgtatcaactacagattttttagattggagaatagtctacgaaaaaaagtttatttataacaaggaagatatttctacagcagtcacaggtatatctttatcagaagaagcaaataaggagttttttgctgagttgcaaaataaatgtgatactttgaaaaatgacccaaaatctgagctttctgtcataggttattataaaagtgatcgtaatttaactaatcttgaataccaagaaaatatttccaatctacctttagatagatttgattctttaaaaaatgctttaagtgcaacagctaattttactgatttagccacttggtttttttggcgtgagtatgaagaattgagagagggaaaaaatcaaaaagatattaactttgaacttccagatttaaagcaaatacgaaaagctatttctactattattgctcctaatgctcgcgtttatttttcaggtgcaacatctgcaaaattgatggttgagtggacaatggaaacaggagaaaaacgagaacttttacttagtcaattaagtgcaggttatcgcaatatgttagcgttggtgatggattttgcgcggcgtttagcacaagcaaacccacacatggaaaacccattatcagcagaagccattttgatgattgatgagttagatttacatttacatccaacgtggcaacaaaatattattcctgatttaaaaaaggtatttcccaacactcaaattatcgccactactcacagtcccgaagttgtaacaacagttaaacaaaatcaggtgaagatattagaagattatcaaatcaaggaatgtccatcacctaccaaggggatgaaaagttcagatattgtcagatatgttttagggttgagtgatttaagaccagatacggaagaatcaagaacactgacacgcctttttgaagcaattgataatggtcaattagaagaagcaaaacgcctcagacaagaattacaacactgggaatcttatgatccagatatgactagagcagatatgcaaatccgcaaattggaacggaggaatgcggtgtga

SEQ ID NO: 89385 - DNA, 744 bp, Anabaena sp. wa102
gtgaaaaaagtgctgaaatccccagaaccagaggaacttaaaaagtataaagggcgattttctttacagataaagcgatggagtgatttaaaaaagaaccgagaaactttgaatgcaattcgtgacactttagcgactgatcaaaagggactttgtgcctattgtgaaatgtcccttcatgagaaaaatcgttctgtagaacattttattcctcgtaaccaatcaacaaaagaaaataatcatgatctagattggcaaaatatgcttgctatctgtcttcctccaggtggaatgaaagatgaagacttggaaaatccacaactactgaaagatttaccatgttgtggcaaaaagaaggatggtgacatacctgatggtagattattaaatcctctgaatttaccaacattacgtctatttaaattcagtagtaaagatggtgaaattagacctgataaaaaagcttgtgaagattctggtattcctatagaaaatgttcaatttactattgatactctggaacttaatgtccaaagattgaaagatcaacgattagttgtaattgacgaaatagaaaaagaacttgatgatgagacaattgatataaatgatttagaagagaaagttgcagccgaatattttggtaatggtacagacaattggcatccgttttttacaactattcgctgggttttaggtgcaggtgcagaacgacatcttatgaatatttattattcaggttaa

SEQ ID NO: 89386 - DNA, 1359 bp, Anabaena sp. wa102
atgcgtattgaagaattacatttacaaaactttcgaggttttcgagaacttaaattaacgcttcctcctgatttggctgtgtttattggagtgaatggttcaggtaaatcgtctattttagatagtattgctatccttttatctcaatttgtagccgacgtgagtgtacattatgaatctcgtctatatattgaagaggatgatattaaaataacttccaatgaagtttttctatctactcgtgttgaagttgattcaaataacaagttgtggtgggaagttagtcaagatagaaaaaggggaatgcaatccacgaaaggagacctttttaattatttgctggagagacttttaaacgaattaattcctattcatgatgatgagcgaattttacaaattaataataaaaatgatttaattttaccaattatcgttttttatcacaccgacagaatattaataaaatcttcagccataaaagatatgagtgaagaggaaagagaaaatacttatgataataatagacttattggttatcaaacagctttttcaggaaatataaatgattttagagatttcctatattggtttaaagaagaagaagaatatgaaaatgaagttagattaacacaagataccaactttagaaatccacgtcttcaaatcataaggaaagtattagaaacatttttagaaaactttcctaatgcggaattttccgatttacacatagtgcgtgcaaattctaaaagagaaggtggtattcgtcgtttaagtaaaccttcgttagttattaaaaaaaatggtgaaaacttcaaactagatcaactttccgacggggaaaaaaccttactaatgatagtggttgatatcgcaagacggttagcaattttaaatcctagtattaataatcctgccgaactgctagaaaaaggaacaggaataatattaattgatgaaatagatttacatttacatcctcaatggcaaagaattgtcattccgagttttagaaaaacatttcccaactgtcaatttattgttactactcattctcctcaagttttgagtgaagtcaaccgagaaaacgtatttattttagaagattcagaaattgtagaattaacaccccatacttttggtagagacagtaactcaattctttctgaggttatgggtgtggaaaaaagacctgtgaaaatgcaagaaagaatagataaatgttttgaaatgatagataatgataacttagaagaagctaaattagaactgcaaaaattatctgaatccttgggaaataatgatccagatatgattcaagcttatacacttattgactttttaaacagggtagaatga

SEQ ID NO: 89387 - DNA, 639 bp, Anabaena sp. wa102
atgaaacgcattatcaaaggttatgaacctcgatgtcttttacaatatcgtcaaataaatggggcaaattatgacggatatagtccaaaaaagtctttaaaagaggcattattgactgaacaagtttatatctgttgctattgtgtgcgacgaatatctgaagataatatggaaattgagcattgcgaaccacaaagtaaatatccagaattacaaataaattataaaaatctccttgcttcttgtttaggtaatcgtcgtagtaaaaaggataatcagcattgtaatccaagaaaaggcgatgcagaaataactattaatccatgcgattctactaaaaattgtgaaaattatatcaaatatagttctactggaaaaattttttctgatgatgaaactatcaatcatgaactaaatgaaattttaaatcttaaccttcaaactctcaaggataatcgtcaaaccaaattatttactctaattaatgcgttaaataaaaaattccctaataaaacttggtcaaaagaagctatcaaaaagaaactagaggaacttagtagcaaagatgtagaaggcaaatatactgaatatgtccaatatattgtttggtatttaagcaaaagattaaataacccttaa

SEQ ID NO: 89388 - DNA, 1374 bp, Escherichia coli
atgaaaagactatattatacccatcatgatagtcgaaccttaaaacttgctatagaaggtgatgtttctgataatgcgaatatttttacagtaattgtaggtaaaaatggcgttggaaaaagcagattgttatctcagattgctaaagactgtattcaagatgttcatttcttgaaaacttttaatccattatttgacagagaaataacaccaaagttaattgccgtatctaccagcccattcgataaattccctgcagggcgtaggtcattaaatcaccaaaggaaagaaaataattatcgctatgtgggtatgcgtggagaaggccccttcggcgtatcaaatgccgtatcccttttatcttcagcagcgagaggttggctagagaaacttgcttattcagaaaatcctgcaaatttactcgatgtttttcattctattgattttgagccccatatagagtttgtatttaaaccaacttacaacggaccggacactcctgactataacttcattggtgtatattcagatgagatattaacggaagttaaggagttatatttaaaatacaatataaaaattgacaggaagaatattgagagtctcttaaagttaaactccgaatcacgtcatgatatttacgaagcactggttgaaattaatcgatttgaacctgaacgtagggctgtaaccttgtcagtcgattttaccaatggtgaaacattggttggctcgacttatgcgaataattatttttctagatcaattcttaaacttatgaacgctggcttcatgagattgatggatatgcgactcataaaaaaaagctatggtcccatgtcacttaaacgtgcgagttcgggagaacaatgtttattagtgatgttgcttggaattgcagggcatataactgatggttctataatattaattgatgaaccggaaataagcttgcatcctcgatggcaggaagagtttatcattatgttaacaaaagcatttttaacttactcaggttgtcaattcataattgcaactcattcaccacaaataatatccaatttgccgaataaaggttgttatataacatctttgtcgaaaagttatctttataaagcaaaatactttagcaaccggtctgcagactatcaacttgcggaactatttgatgcccctggcattatgaatgaatacattgccaggttagctttcaatttactttcaaaagttaagactgctaagttagtaacagatgataattggcgtgaattaaaacaactccaacttctccttgaaaacgttaatagtaatgaccctattaatgaactcgtaaattccgtatctcaggtgtgtgaaatttatgccaaaaattaa

SEQ ID NO: 89389 - DNA, 636 bp, Escherichia coli; identical to SEQ ID NO: 86043

SEQ ID NO: 89390 - DNA, 1374 bp, Escherichia coli
atgaaaagactatattatacccatcatgatagtcgaaccttaaaacttgctatagaaggtgatgtttctgataatgcgaatatttttacagtaattgtaggtaaaaatggcgttggaaaaagcagattgttatctcagattgctaaagactgtattcaagatgttcatttcttgaaaacttttaatccattatttgacagagaaataacaccaaagttaattgccgtatctaccagcccattcgataaattccctccagggcgtaggtcattaaatcaccaaaggaaagaaaataattatcgctatgtgggtatgcgtggagaaggccccttcggcgtatcaaatgccgtatcccttttatcttcagcagcgagaggttggctagagaaacttgcttattcagaaaatcctgcaaatttactcgatgtttttcattctattgattttgagccccatatagagtttgtatttaaaccaacttacaacggaccggacactcctgactataacttcattggtgtatattcagatgagatattaacggaagttaaggagttatatttaaaatacaatataaaaattgacaggaagaatattgagagtctcttaaagttaaactccgaatcacgtcatgatatttacgaagcactggttgaaattaatcgatttgaacctgaacgtagggctgtaaccttgtcagtcgattttaccaatggtgaaacattggttggctcgacttatgcgaataattatttttctagatcaattcttaaacttatgaacgctggcttcatgagattgatggatatgcgactcataaaaaaaagctatggtcccatgtcacttaaacgtgcgagctcgggagaacaatgtttattagtgatgttgcttggaattgcagggcatataactgatggttctataatattaattgatgaaccggaaataagcttgcatcctcgatggcaggaagagtttatcattatgttaacaaaagcatttttaacttactcaggttgtcaattcataattgcaactcattcaccacaaataatatccaatttgccgaataaaggttgttatataacatctttgtcgaaaagttatctttataaagcaaaatactttagcaaccggtctgcagactatcaacttgcggaactatttgatgcccctggcattatgaatgaatacattgccaggttagctttcaatttactttcaaaagttaagactgctaagttagtaacagatgataattggcgtgaattaaaacaactccaacttctccttgaaaacgttaatagtaatgaccctattaatgaactcgtaaattccgtatctcaggtgtgtgaaatttatgccaaaaattaa

SEQ ID NO: 89391 - DNA, 636 bp, Escherichia coli; identical to SEQ ID NO: 86043

SEQ ID NO: 89392 - DNA, 1374 bp, Escherichia coli; identical to SEQ ID NO: 89388

SEQ ID NO: 89393 - DNA, 636 bp, Escherichia coli; identical to SEQ ID NO: 86043

SEQ ID NO: 89394 - DNA, 1374 bp, Escherichia coli
atgaaaagactatattatacccatcatgatagtcgaaccttaaaacttgctatagaaggtgatgtttctgataatgcgaatatttttacagtaattgtaggtaaaaatggcgttggaaaaagcagattgttatctcagattgctaaagactgtattcaagatattcatttcttgaaaacttttaatccattatttgacagagaaataacaccaaagttaattgccgtatctaccagcccattcgataaattccctccagggcgtaggtcattaaatcaccaaaggaaagaaaataattatcgctatgtgggtatgcgtggagaaggccccttcggcgtatcaaatgccgtatcccttttatcttcagcagcgagaggttggctagagaaacttgcttattcagaaaatcctgcaaatttactcgatgtttttcattctattgattttgagccccatatagagtttgtatttaaaccaacttacaacggaccggacactcctgactataacttcattggtgtatattcagatgagatattaacggaagttaaggagttatatttaaaatacaatataaaaattgacaggaagaatattgagagtctcttaaagttaaactccgaatcacgtcatgatatttacgaagcactggttgagattaatcgatttgaacctgaacgtagggctgtaaccttgtcagtcgattttaccaatggtgaaacattggttggctcgacttatgcgaataattatttttctagatcaattcttaaacttatgaacgctggcttcatgagattgatggatatgcgactcataaaaaaaagctatggtcccatgtcacttaaacgtgcgagctcgggagaacaatgtttattagtgatgttgcttggaattgcagggcatataactgatggttctataatactaattgatgaaccggaaataagcttgcatcctcgatggcaggaagagtttatcattatgttaacaaaagcatttttaacttactcaggttgtcaattcataattgcaactcattcaccacaaataatatccaatttgccgaataaaggttgttatataacatctttgtcgaaaagttatctttataaagcaaaatactttagcaaccggtctgcagactatcaacttgcggaactatttgatgcccctggcattatgaatgaatacattgccagattagctttcaatttactttcaaaagttaagactgctaagttagtaacagatgataattggcgtgaattaaaacaactccagcttctccttgaaaacgttaatagtaatgaccctattaatgaactcgtaaattccgtatctcaggtgtgtgaaatttatgccaaaaattaa

SEQ ID NO: 89395 - DNA, 636 bp, Escherichia coli; identical to SEQ ID NO: 86043

SEQ ID NO: 89396 - DNA, 1374 bp, Escherichia coli; identical to SEQ ID NO: 89390

SEQ ID NO: 89397 - DNA, 636 bp, Escherichia coli; identical to SEQ ID NO: 86043

SEQ ID NO: 89398 - DNA, 1374 bp, Escherichia coli; identical to SEQ ID NO: 89394

SEQ ID NO: 89399 - DNA, 636 bp, Escherichia coli; identical to SEQ ID NO: 86043

SEQ ID NO: 89400 - DNA, 1374 bp, Escherichia coli; identical to SEQ ID NO: 89390

SEQ ID NO: 89401 - DNA, 636 bp, Escherichia coli; identical to SEQ ID NO: 86043

SEQ ID NO: 89402 - DNA, 1377 bp, Streptomyces pristinaespiralis
gtgtacgtggcggggctcagagtggacggggtgcgtggtttccacgggcctcgcgcctgcgacctcgatttcacccgtccagccggcggctatgccggctggacggtgatggccgggcggaacggctcgggcaagaccacactgctgcgcatgatcgcgctcacgctgaccggtgagcgccgggcacaccagctggaaccggagctcgaggggtacctgacacacggtgccacccgcggttccgccgtggccaaggtcctcgcgaaccggtccgccgacactatggctcaggacgggaacgagctagtggaggcacggctcgactggcggcccgagcaggacggcagcctcttcgacgaactcgtcgaggactatgagccacccaccgaggtggtcttctcggccccccggcccctcgcctccgcactgtggtcctcggccccgccgcccggctggttctgcgccgcgtatggccccttccgacgcctcaccggcaccggcctctacgagcgcactccgcagcagcttgaccgggccgccgcgctccgcaccctcttcgaggagcagtcggccctaactgaagccttcgattggctgctctccctccacctgcgcaccttggaggagcgccccggaatcggtcagctgaaagcctgggtgcttcggctactcaatgacgggctgctgccggatcgctaccacatcgaggatgtggactcggaggggatgtggcttcggcggcagggtgacagcggcccggagggcgcccggaccgagctgcggcggatgagcgatggtcagcggaccgttatcgccctagtcctggacatcgtcaggcagatgcacgcagcgtatggggacctcgggttcgaggaacacgtcggcggcaggatcgtactgccgcacccgggcgtggtgctcatcgatgagatcgacgcgcacttgcacatgacctggcaaaagaacatcggccagtggctcacgacgcacttcccagcgatccagttcatcgtcaccacccacagcccgtacatctgccaggcagcagacccgggcgggctgatccggctgccgggctcgggggagcaaaaaccgccacaggtggtagacggagagctgtacgggcggatcgtgtttgggacaggggacgacgcagcactctcggacttgttcggcctggactcgccgtattccgacgaggcacgtgaactgcgaagcaaattggccgagttggagtacgacgtcctgcttgggcgggccgacgccgtaaagaccgaggaatacctgcgcttgcgcgatcgcctgtccagttcacccgtggcccgtgtcgatgaagtgatggaacgataccggctgtcccgggagcgcgacgcgtga

SEQ ID NO: 89403 - DNA, 795 bp, Streptomyces pristinaespiralis; identical to SEQ ID NO: 86129

SEQ ID NO: 89404 - DNA, 1272 bp, Bacillus sp. FJAT-22090
atgataaaaaagctggtaatagaagattggaatcagttcgagcgaatagatcttgaacttcaccctagattgactatcattactggtgctaatggttctggaaaaagtacaataataagattaattagtaggttaattggctggagttatgctgaaacgggtgtaccagctacttcacaaaaagttaattctccttttttatctgggattagtttagatagactattagaatcctttaaggaggactatcaaaaagttaatggtaatggtattaatatcggtaaattagaaacagaaaacggtggctacaaacttcttgttccaaaacaagcatctcaagcttcttattccgtaaacttcagttcttacgatacaccagaggcactcaaaggggtaagcataccatcacatcgacttccttttacatatacagctttaaagtcaatcccagttaagccagcatctcagacagaagcctatattttatatgcagaatcattaaagaaaagagcaattcctggtagctattataaccctaatgaagatagtccaacccttcatatgaaatcaactcttatgtccttagctgtgtttggaaaaggtaacgatcatgtaactagtaatacagaagcttataaactatttagagactttgttaaaatccttagggtattattgcccgaaaccttaggttttaacgacatcaatattaaagacggtgagctcttacttttaactaacacaggagagtttttgctagactctgtatcaggaggaattggcgctattattgatttagcatggcaattatatatgtttggtgatatggagagtaataaatttgttgcactcatagatgaagtggaaaaccacttgcacccttctatgcaaagaaacctgcttcctaaacttttagaggcatttcctgaagtacaatttatagttaccacgcacagtccttttataattagctcagtaatcgaatctacagtatacgcttttaaatacaacgaaaataacaaagtggatagtcataaacttgactttgaatataaagcagctaatgctatggagatattaagagatgtcttaggagtaccggtaactttacctatttggattgaagaaaaggttaacagcataatagacagatacaggggagttgagctaacacccgaatcttatgtacaattgaagaatgatttaaaagaagtaggtcttaacgaacatatgccacaggctcttggtcttctacaagggggcaacatgtaa

SEQ ID NO: 89405 - DNA, 657 bp, Bacillus sp. FJAT-22090
atgatacgactaaaaaaattagagaagcctgacattcttgttcaaaagggagaagaatggaaagatgaattaatgacttatgttaatagtggaaaagatattcctaaaaatattcaagggagatatgctcataaagaaataaagaaaactcttcttgaagaaacgaaagaaaaatgtgcatactgtgagagtgttataacaggtatagactacggtgatattgaacatatagaacccaaaaagagggttccgaaaaaaacctttgaatggattaatttaacaatttcctgtggtaagtgcaatcagaataagggacagtattacaatgaaaacttatctttaattaacccatatatagataaacctgaagaagaaataatatttctcggaccctatccttctgcgagaagtgatagagctttaatgactgtaaaacagttaaagttagatagggtagaattattggaaagaagaaccgagtacattaaaaaaattcaaccattaataaatttatatttaaatacttatgataaagagtttcaaaaaataatttatcaggatttaattgaatatacaaaagaaaaacacgaatacagttctatgatgagatgtatactggctacaattaaattaccttttgaaatgcagataagttaa

SEQ ID NO: 89406 - DNA, 1647 bp, Streptomyces rimosus subsp. rimosus
atgcaactgctccagctgaggctgcccgactaccgcggcctgcgggatttcaccctcgacttggaggacgccgtcgaccaggggcaggccatcgccgtgctgatcggccccaacggaggcgggaagtcccgggtcctgcacgcgctcgcggagctcttcggggccctctaccgatgcgccctcggccattcgggccgtgcggacttcggctacgaggtgcgctaccggctccgcggcacgaccgtcgacatcgtgcagccgtccgccgaggcggaaccggccatgtgggtgacgggcgccgccggatcgcgcgacgagacaccgcgtcacgactggttccaccaccttcccgaccacgtcttcggataccaggtgcacggccgggtcccctggggctccgagttcgagcgccacacgcacttcgccgaggcggagttggcccggtggcgcgagcagtggatggagtcctggttcgcctggcaggaccggccggagaacgaggacggggtgtggtcggagcagctggagctgccgatcgtgtgcccgttgtacaccccgggattcctgtgcacacccgactggctccccttggtcctgctctccctggccgcgcagtgggcggatatcttcggcgactacctgcgggaacaggcccgggtggacggggtggtgtccgccgtgctgcacctgcgcgcccccaagtcggtgggggaagagctgtcggccctgccgtactgggggctgggcgggccgccgcgtgccctgttcgccgaggtggcggcatccggccgcttcggaccggtgccagacccggacccgctgtacagcgcgggcacccccgacgacgggttcgtcctcaccatgagcagccccgaggacgtgctcgccttccgcaacctcttcgacagcgacctgtcgatgttcgggcttctgtccaccctccagatggccggctacctgaccgtcgacgtacgcgtccgcaaggcgaacggcgccgtcgtccgggcggaccaattcagctccggagaacagcagatcctcactgtcctcgggctgctgcgactgcagcggggccaggagtcgctcttcctgctcgacgaaccggacgcgcacttccaccccgagtggagccggcgctggtactcgtccgtccagaggatgctcgacgacggacagcgctcgcagttcatcgccgccacccacgagcccctcctcgtctcgaacatgctgcggcggcagatcagggtgctcgacacggacgccgacggacggaccatggcgctcgtcccgggcaccgccccgcgcggccagggggccggggggctgctcacctcggacctgttccgcctccggagccaactcgacgaacacacccaggacttgatcgacacccagtaccgcctcataccggtggccgaggacgaccccgaggcccgccgggaactccaggaggtgaccgaccggctcgacggactgggcttcgccacggggcgccgcgacaaagtgctctcctccttcctggcagaactacaccggcggcgcgcggaactcatcgaacgggcccggaacggcagcaccgtgacgggcgaggagctcgaagcggccgcacgcgtgctcttcgacgagcgcttctcccggggggtctga

SEQ ID NO: 89407 - DNA, 1185 bp, Streptomyces rimosus subsp. rimosus
ctgatccctgtgcgtcacgtggacaacagcggactcaccgcaccgcagacgtgggcggaccgggccgccaaggaactcaagaaactacaagaggacgcggaagacgcggacaagaagctcaccttccgagagatgtggcgggaggacgcgatccgtgaccggctcatcgccctcatggacaaatgctggtactgcgagaccgggttcgtccgctcgccttaccacgtcgaccactaccggccgaaatccgtcgtcgtcggtgaggcggagcaccgcgggtactggtggctcgcttacgatcctgccaactaccgtctctcctgccaccattgcaacagcggcggtgcccgctacggcgatcagagcgccggaaccggcaagggggcccgcttccccctgctcgggcaacgcgcatcggagggcgggagcctggacagtgaactaccagttctgctcgatcccgtggtggccgaggatgccgggctcatgggattcgacgggcagggccatgctcggcgacgccccgagcggccgtactccaatgacgaggtggcacaaggtctgtgccgggtggacgagaccatacgcatgctcgcgctcaactccgaccggctcgtcgagagcaggtccactctaatcaaaagggtggacggactcgtccggctctacctcgccaacgtaggcaacgccagtgtggcactgtacgcccgcaccgagatcgatgaccttacacggacagctgccgaatggagtgcggcggcctcagcggccgaacgcctggcgttcctcgcccacgaccgctcaggaaacgaatcgccctccgagggaggggcgagcggcgacgtagccgaaggcacgagcggcggatccgagcccccggcggccgcggtgacgagccaccgcgtcgacctgagcaccctggtggccgccctgccacccgaggcgttctccgcaggcgagatcgcgttgacgggccgggggaagcgaggcccggccagggcgaccctgctggcggacggcaggatcatctgcttccggcggccctggaacacgcccacgtccgcggcgcgaatggcggccggcgacgacctggtggacgggtggaccttctggtcgttgacggtggacggcacgccccggacgctctccgacctgcgcgactccctaaccaccaaggacagctga

SEQ ID NO: 89408 - DNA, 1680 bp, Streptomyces sp. XY152
atgcccgcacgttccggtccggctgagggggatctgatgcagctgttgcagctgaggctgcccgactaccgcggcctgcaggacttcaccctcgacctggagagcgccgtcgacaaggggcaggccatcgccgtactgattggccccaacggaggcgggaagtcccggattctgcatgcgctcgcggagcttttcggggctctctaccgctgcgccttaggcaattcgggccgtacggacttcgggtacgaggtgcgctaccggctccgcgacacgaccgtcgagatcgtgcagccgtccgccgaggcggatccagtcatgtgggtgacggacgccgccgggtcgcgcgacgagacaccgcgtcacgactggctccgccaccttcccgaccacgtcttcgggtatcaggtgcacggccgggtcccttggggatccgagttcgagcgccacgtgcacttcgccgaggcggagctggcgaggtggcgcgagcagtggacggagtcctggtttgcatggcaggaccggccggagaacgaggagggggtgtggtcagagcatctggagctgccgatcacgtgccccctgtacgcgccgggattcctgtgcacgcccgactggctccccctggtcctgctctccctagccgctcagtgggcggacgttttcggcgactacctcagagagcaagccaggatggacggggtggtgtccgccacgctgcacctgcgcgcccccgcgtcggtagaggcggagttgtcggccctaccgtactggggacttggcgggccgccgcgcgctctgtttaccgaggcagcggcatccggccgcttcggaccggtaccggaatcagacccgttgtatagcgcgggcactcccgatgatgggttcgccctcaccatgagcagccccgaggacgtgctcgcgttccgcaacctctttgacagcgacctgtcgatgttcggactcctatccacccttcagatggccggctacctgaccgtcgacgtgagcgtccgcaaggtgaatggcgccgtcgtccgggcggaccaactaagttccggcgaacagcagatactcaccgtcctcggtctactgcggttgcagcgaggccaagagtcacttttcctgctcgacgaacccaacgcgcacttccaccccgagtggagtcggcgctggtattcgtccgtgcagagcatgctcggcgatggacagcgctcgcagttcatcgctgccacccacgagcccctcctcatctcgaacatgctgcggcagcagatccgggtgctcgagaccgacgccgacggacggaccactgcgctcgtcccagacaccgacccacgaggccaaggagccggcgggctgctcacctcggatctattccgcctccggagccagctcgacgaatacactcaagacctaatcgacacccagtaccacctcataccggtggcggaggacgaccctgaggcccgccgggaactgcaggaggtaaccgatcggctcgacggtctgggcttcgccacggtgcgccgagatagggttctctcttccttcctggcagaactacaccggcggcgcacggaactcatcgaacgggctcgaaacgggactgtgtcaggcgaggaacttgaagcgaccgcacggatactcttcgacgagcgcttctcccggggggtctga

SEQ ID NO: 89409 - DNA, 1185 bp, Streptomyces sp. XY152
ctgatcccggtgcgccatgtggatatcaccggactcgccgcgccgcagaggtgggccgaccgagctgccaaggaacttgagaagctccaagaggatgcggaggacgcggacaaggaactctccttccgtgagatgtggcgggaggacgcgatccgcaaccaactgatcgcccttatggacaaatgctggtactgcgagacattttttgatcgctcgccttacatcgtcgaccattaccggccgaagtccgccatcgtcggcgaggccaagcatcgggggtactggtggcttgcctatgaccccaccaactaccgcctcacctgccattactgcaacagcggcggtgcccgctacggcaatagaagcgccggatcgggcaagggagcccgcttccctctgctcgggcaacgcgcatcagcgggcgaaagcctggagggcgaactgccggtgctccttgatcccgtggtggccgaggacgtcgatctcgttggattcgacaggcagggctacatccggcggaggcccgaacggctccactccgacgaggaggtggctcacgatctctgccgtgtggacgagaccatacgcatactcgcgctcaacgccgaccggctcactgagagaaggtccgccttgatcgataaggtaaagggcctcgtcgagctatacctcatccgcagagacgacgccgttgtggcgcggtacgcccgcaacgagatcgacgacctgacccggacgaccgccgagtggagcgcagcggcagcggcagcggaacgcttggcgctcctcgcctacggccgctcgggagacgaggtgccccctcgtggaggggcagtaggtaatatcgccgaacgcgcgagtggcggaaccgagcccccggcggccacggcgacggcccatcgtgtcgacctgcgaaccctggtggctgccttgccccccgaggcgttctccgcaggcgggatcacactgacaggccgaagtaagcggggtccggtcagcgcaacgctgctggcgaacggcatcatcatgtgcttccggcagcctttggccacgcccacgtccgctgcacggatggctacaggcgacgagaaggcggatgggtggaccttctggtcgttgacggtggacggcacgacccggacgctctccgacctgcgcgacttcctgatcacccagagcggctga

SEQ ID NO: 89410 - DNA, 1326 bp, Streptomyces sp. NRRL F-4707
ttgccggggaccgggggctggaccgtactcgcggggcgcaacggctctggcaagtcaagtgttctgcaggtcttggccctggccctgacaggcccggatgcagcgttgcggctgaacttggacttcacggggtggatcacgaggggtgccgagaccggacgcgccgtggtgagcgtcctccctcatcctgaggttgacccattcacccagaccactccgagcactgcggcggcgcctggcgaggagatccggctggaactggcctggcgtgctgcccatgtgccggggatggagggcgactggccccgtcggccgtatgtcgcgatggactcctggttcgatcctgcctccgccctgactgcgcgcagcggtccgtggtctccggtcatgccgggctggttttgtgcaggatacgggccgtttcgacggctgacagggccgatgcgccgcgcgtacaacaccaaggcgcccattccggcgcctctggccacgctctttcatgaggatgcggccttgaccgagagcgtgtcgtggatggtcgatctccaccatcgttcgcttcaggagctcagcgcagctcggcggagcgagtccgttccggagatgcccgccacgctgctgctcaacaccgtgatgggtttgctgggcgacgggctgctgcccgacgagtaccggctcaacggggtctcggcggatggactgttggtgagcctgcgcggcagtgacgagagcttcccgctgcgtgagatgagcgacggcttccgcaccgtggccgctctcgtgctggacatcgcccgccagatccatgccacctacgggcatctggagaccgaacggacccgtagcggtcacctcaccgtcctccagcccggtgtcgttctcatcgacgaagtggacgcgcaccttcacgtgacgtggcagcgccggattggtgcgtggctctgcgaccacttccccaacattcagttcatcgtgaccactcacagcccctacgtctgccaggccgccgacgaaggcgccctgatccgtcttcccggcccggacgcagatgagccgcccgtcgtggtggatcaggatctctaccggcgagtagttttcggcagtgcggacgacgcggcgctctcggaactgttcggcctggacacgccctactccgggcgcgccgaacggcaccgtcggcggctggtctcgctggagcgcaaggtgtacgccggcactgccaccccgcaagaggtgaacgagtacgaagagctgagccggctgctgaccagttcggtgcagagccgggttgccgaagtcgcagcgcggctggagcaggaaccgtga

SEQ ID NO: 89411 - DNA, 705 bp, Streptomyces sp. NRRL F-4707
ctgcaccgtcaccctgctcccgtgggcacccagaacctcctgcggagatggaccggcagggtccgcgctgcgggagcaaccactgaagcagcacggacggaatggactgcggccaaggctcccagaaggcacgtgaagacgctgttggagtcgatggcgcacggggcggtgcggtgcatgtactgcgacgacagccgcggcaccgacatcgaccacttccagcccctggccatggcccccttgcgcgtcttcgtatgggacaaccacctgctggcctgctcgttctgcaacagcaacgccaagcgggacgagttccccgtagatcctgagggcgcatgcctcctggtcgacccgaccaccgacgatcccgccgatcacctgttcctgatgctgcgcagcggcgagtacggctaccacaccgccaagggagagcacaccatccgcgtcttcggcctgaaccgtcctgatctcgtcatgggccgcaaggacgccttcttcctcgcctgctcggctctgcgggactggcacaggctgcggcaggagggcgacccggaagccgaccgggtggcgcaggcactgcgcgactcccccttcgtcgacgtcgtgcactccatcacccggctcgcgccgggtctcgccgccaccgtggtcggcgagcgcaccgttcccgccgtcggccagtggcgcagcgtgtacggaggctga

SEQ ID NO: 89412 - DNA, 1428 bp, Streptomyces sp. MMG1121
ctgaccccgcccagtgaacgaggacgcgggcagaaggggggacaggtgtacgtaaccggaatcggcttctcgaatgtcagaggcttcacgggagcgcggaccgtcgacgagctcccactgtccgcatcgcatgacggcgacggaggcagctggaccgtactcgccggacgcaacggctcgggcaagtccaccttcttgcgggccctcgccctcaccgtcgcaggcccccaggtggcccgcaccctcgtgcaggacttcagtggctggatcaccaccggcgagcaatcggcctggacgcaggtatatgtccggcccgactacagcgtggaccgactcgttgggcggggcggagcacccatcgaccgtatcgttctcggcctcgactgggcggtccccgaagcgcaggcgggcgggccacgctacggggcatcgccgtcacagccccggttgtctccgtacgacggcgaggaatacggctggaaaggcgccgggcgcggtccctgggccgacaacccccagggctggttctgcgccgcctacgggcccttccgccggctggtgggcggcagcggcgaggctcagcgtctgatgctggcgccgggacctgcgggccgtatggcttcccttttccatgaggacgcgtcactggccgaaggcgtgagctggctcaaggagctgcacctgcggagcttcgaggaacaggaaggcgcccgggagctactggagaccgttctggaactgctctccgacggactcctgccggacggctaccgggccctgcgggtcagcgcggacggactgtgggtggccccggcagggaacgccgaccgggcctaccccctgcgcgagatgagcgacggcttccgcaccgtcgcctccctggtcctcgacatcgtgcggcagctccagacttcgtacggcgccctcgacgcaggcacggacgagggcggacatccggtggtccggatgccgggtgtcgtgatcatcgacgaggtggacgcccacctccacgtcacctggcagcgccggataggcacctggctgcgcagccacttcccccgcatccagttcatcgtcaccagccacagcccgtacatctgccaggcggccgatcccggcgggctgatccggctgccgggtccgcaagaggaccgcggccccgaggtcgtcgacgacgggctgcaccggcgcgtggtgtacggaagcggcgacgacgcggtgctgtccgagttgttcggtctggagacgccctactccgacgaggccgagcggcagcgtgtcaggctcgtacagcttgagcgaaaggtcttccgtgacgaggccgacgatacggagctgcgcgagtaccgtgaactgaccgagctgctcaccagttccctgtccacacgggtcgacgaggtggcggcgaggctcggaggaagccggtga

SEQ ID NO: 89413 - DNA, 678 bp, Streptomyces sp. MMG1121
ctgctggcccgctgcacgggaagcgtcgtgaaaaagggtgccgacagcgcggcggcaacatccgtatgggggagcagccgcgcggccaaacgtgagattcgtgcccggctgcaccgtatggcgcccgccatccagcggtgcatgtactgtctcgacagccagggcaccgacatcgatcacttccagcccaaggcactcgccccgctgcgcacgttcgactggctgaaccacttgctggcctgctcgtattgcaacagcaacgtgaagcgtgaggagtatccctgcgacgaggagaccggggaatgcctgctgctggatcccagcaccgacgatccggccagccacttggcactgttgcctgcgtccgggacgtacgaaggcctcacggcgaagggccggaaaacgatcgtcgtcttcgacctcaaccgcgaagtgctcagacgcggccgggtccgcatgtaccggctgtgccgggatctgctgccggtctggcacgccaaagtcctcctgggtgacctggagggggccggcgagacggccatgactctgcgcgaggagcctttcggcgacgttctgcgtgccctgtgccgacgagcccatacacctgccgttgccgagctgacctacggccggatgctgggcccggctcttcacgcatggcggcatcaggaggcatga

SEQ ID NO: 89414 - DNA, 1335 bp, Saccharothrix sp. NRRL B-16348
atgtacatctcgcaggtccggctgcggaacgtcaaggggttccacggcgcccgcgaagtggatctcaagctcaccgcgcccggctggacggtgatcgcgggccgcaacgggtccggcaagacctcgttgctcagggcgatcgcgctggccgtgagcggtccggcggtggcccgcaacctggtgcccgacttcgagaactgggtcaccgcgggccagcgggagggcgtcgtccaggtccagttcacccacgaccggcgggtggagcggttcggcaagggccgcccgccggagggcaggctgtgggccggcctcggctggacgatgccggacgacgagagccgccccacccaccgcggcctgcagccgtcgctgaaggagaagctggagggcagcaagaccgccgccctccgcggaccgtggcaggacaacccgaccgggtggttctgcgcggcctacggcccgttccggcggctcgtcggcggcgcgggcgaggcgcagcggctgatgctcagccacggcccggtgtcacggctggcgagcctcttccacgaagacgcgtcgctggccgagggcgtcggttggctgatcgagcagcacctgaggtccctggagcgcaggccgggagccgaggagctgaagacggtcgcgctcggcgtgctgtcggacggcctgctgcccgacgactaccggatcgagggcgtcgactccgacggcctgtgggtggtcagcggcgggcaccggttcccgctgcgggagatgagcgacggctaccggaccgtcgccgcgctggtggtggacctgatcaagcagatccacggttcgtacggcgacctgaagaccacgcccaccgcgcacggcctcgccctgaccgcgcccggcgtggtcatcatcgacgaggtggacgcgcacctgcacgtgtcgtggcagaagcggatcggcggctggctcaaggagcacttcccgaacatccagttcatcgtcaccacgcacagcccgtacctgtgccaggccgccgacccgggcgggctgatcaggctgcccgggccggaccagcaggagccgccgcgggtggtcgaccagggcctctacgagcggatcgtctacggcagcggcgacgacgcggtgctctcggagctgttcggcctcgacacgccctactccgaacgcgcgcagcagctgcgggccgagctggtggagctggaggtggcggtgatcggcggcacggccggcgcccgcgcggtgcgccgctacgaggagctgcgtgcgctgctgaccagctcgccggtggcgcgcacgcgcgaggtgtccgcgcggctggaacgcgacgagacgtga

SEQ ID NO: 89415 - DNA, 717 bp, Saccharothrix sp. NRRL B-16348
ctgcccgccgagctggccgaccggctgcccgtgctgaccgcggagatcgggaacgccgcgcaccccacccacacggcccgtgcgctgtggaagcgcgctgtggtgcggcggaacgtgctcgcgccgttgcgacggcggctggaggacatggcgccgggctaccagcggtgcatgtactgcggtgacagccagggcacggacatcgaccacttcgagccgctgtcgctgaacccgctgcgcacgttcgactggctcaaccacctgctggcctgctcgacgtgcaacagcaacctcaagcgggaccggttcccggtggcggacgacggcacgccgctgctggtcgaccccaccaccgaggacccgttcgaccacttgctgctcacgctgtcactgggcgtgtacgtaccgcgcacggagaaaggcaaggccaccatagatgtttgcgggctcaaccgtccggtcctgactcaggggcgggtgcacgcgaagcgggtggtcctgatgtgcctgtcgcggtggacggccgggcgggcgctggacgcggcggacgagatgcgcgaggccgtgctgaccgtgcgggggcagccgttcgccgacgtgtgccaggcgatgctgcggctggccctgtcaccaggcgcggagcgggtgttcgaggaggcgccgtgggcgttggccgtgctgcgggacgacgagctgcgggcgcagctgctcgcgtga

SEQ ID NO: 89416 - DNA, 1170 bp, Pseudomonas sp. 655
atgaaggtcaagcggatcaaaattaccggtgtcggcggtatcgatgacatagttataagcttcgatgatcagatgaatatcataagtggacctaacggaatcgggaaaacaaccattctcgagagtgtcgctcacgcgttttctggctatgaaagccaactattgaagcgaaaggtaagctctgagcgtggaagcgttacgacttttgtcgatctgggagatggggaagttgaggagcggaattttcaagtcgccgagttcagcccgagaaaaaatgaaaatacaagtcccgtcgaacactatgtaaaataccttatctcactaaaggttactcgcacattcgcgtatgtcgcattagattctgtttctcgggacactagtagggatccttatggcacggcgtctagtaacaaatacggcataaatttgatcgaaataaaaagctggttcgtcaaccgatatctttactcagctcactcaggcgccctctcagctgtacaaactcataactttagtcaggctaaaaagttcttttcattattgagtagtgactttgaattcagtagggttgatgctggaactaacgaaataatggtgaataccccagccggagaaatttattatgaatatctttcgtctggttttaagtcgtgcctttcaatactttttggtattgtaaaggaaatcgagtttcgtttcgcagattcagaaataatgctggataacttcgacggcgtaattttgatcgacgagttggagcttcatttacatccagaatggcaggcgaaaatttcttcgattctgacgcaggcatttccaagcgcgcaatttatcactacgacccatagtccacatataatacagactgcaatgccaaagcaggtggtggctctacattatactgatggaaaaattgcgagaaaatcacttccttcgaatgattatggttatcagggttggactgtagaggaagttttgatggatgtgatggggcttggcgatacccgcactgctgtctaccatgtcgcgatccagagttttcagagagccgtagatgaagatgactataaagcagggagcttagcatttggggaactggagaagttactgcatccagaaaatcacttgaggaaacttttggcgttccaacttggcgcactcaaggggtaa

SEQ ID NO: 89417 - DNA, 738 bp, Pseudomonas sp. 655
ttgataaagctggagcgacaacctaagcctgactatctgtctgacgccaccgttatcgagctaacggccaagtttcaaagtgatggcagtagcgtatggaatcatccacaaattaaattaccgttactggtctctagcaacgataagtgtgcttattgcgagtgctctctctcagatgagagtaagtatatggaggttgagcattttaagtataagaatttgtataaagagcttgttgttgagtggaacaatcttcttccggcatgtaaaagatgtaatattgccaagggtgttcacgatgtgggtacggacatactcattaatccttatgaggtggatccgcgcaaccacctcactttcaaactctaccagctcaggggaagagacgaggttggaacttcaaccgtggaggcgctagatctaaataattccgagcgtttggtgttcaagcggtttgaggtaggcgagcaggtttttagttcagtgcgggtcgctattgatcgactggaggcgtacaaactttcttcaacagcgatacggcgtaacaagttgctgagtatagtagaaactattctcaacgagtgtcagcctaaggcaatttatgcggcgaccaccgcaacggtcgctttaaatgatgaagaatttctgagcctcataatggaactccgagctctaggcctatgggaagactatcttgaggcaaaactttctactgcacagggtattgctctttcatga

SEQ ID NO: 89418 - DNA, 1563 bp, Pseudomonas sp. 655
ttgcacagagagaactacgaaaccatacactctgtagtggaagaacgattcaatagccgtctggcattcgtaggtgccgcgaaattatgggtgctcggagcacttacaaaaacgtcaatcagaaaatctccgccatcggagggcgaattttccagcgaactagcaggattcattgcagagtcctccacagcagagtggcaggctttcattgatcggctagccgggatcagcccggctcttgccgagcgaaacgtcactgttcgaaaccctgaaacgaaccctgaaaaattccacttttcccgaattcgggtcattgagatagagaatttcaagggtattcgaaagctgcagataaaccttagtcacgacgccacccaggaacgtggcattgccccggcagcagtgcttctgggcgaaaatgcagtaggaaagagctcgatacttcaggcgattgcattgggtgtgatgagcccaaaattgaggtcccgaatcaactttgattgggaagcaactctgccccgagataccctgacagacggggccgacgatcgacccctagcccttcaatcaaccattaaggttaccttcgatgacggcgaaacaagcgatatccatattcgccgggacggctctttcaccagccagaatctgcgcagcagcttgattcttggctatggtgcgcatcgttcatttcaagatgagcaatcgagtttcagaatcatcaggaaatcttcgagcattgcttccctattcgaaaaaaacaaaccactgccccactcggctacctggctggaattacttgatgacggggattttttcccggtggcacgagcgctgcgcgagatcctgaatctcgacatgagcgacgaaatatatcgactggcgtcaggtgaagtgctcgtacgaagacacaacgaaagcatcccggtctttcgcttgagcgatgggtatcgctcgttatttgccatgagcctggacatcattcgcaacatgctcaaggagtggggaaaccttgaagatgcccgaggaatagtgctgatcgacgaaatcgaattgcatttgcaccctcgatggaaaatgcagatcgtttccgcactgcgccgcgccatgcctcaagtgcagttcatctacaccacccacgaccccctttgtctaagaggcatgctcgacggcgaggttcatgtacttatcagggacgatgaaggctgcgtccaggaaatgactggcttacccgacgtcaccgccatgcgcgcagagcaactgctgacctcggagtacttcggtctggccagcaccgtagaacccgagaccatgcgcaaacttgaccggatcgtgctgtccgattcgcgcagcacctcgcctgatgcgcatttctcagaacaaatgaacgccttttccattatcggcgacacgcctgaaaagcaggttgtcaatgaagcattgcgccggcacatcatcgaacagcttcgttcagacacccttgatagggcagcagtacgagaagacgccgtcaaacttatcctcgcacgcttacgagccgactccaatggagtgggcctgtga

SEQ ID NO: 89419 - DNA, 975 bp, Pseudomonas sp. 655
gtgattttcgtagatcgaaacacggtagacgagccattatcgttggcattgccaaacggcaaaggggctaaggaaagggcccgcgccattaagcactacgcagcattggcaaccccccccgtgttggccaaggcgaaagccacgaaaaatagcggtaaaaaaacaaaagctacagcccccaagaagttcaactttgcagcgtaccgttgcaaggatgtgaagcaaacgctggacaatctatttcatgaaaaatgcgcctattgcgaatcgagctacaaggccgtgatgtctgctcaggtcgaacactttcgtcccaaaggacgcgttagcgaagattcgagccacaaaggctactggtggctagcctcgacgtggacaaatttgttaccaagttgcagccactgcaatacctcggaatatcatgaagtacataaacttactgtcgagcagccttatccgcaaaaaaagcatactggcagatacaaactgggaaaatacgactatttcccgattggtggccagcgggcagtcgccgaaggcgatgatcttgaccgtgaagacgcctaccttatcgacccgacccgccggaacccgaatgatcacttacagtggattgtcgaaggtggcctaagcctgattgcgccggaaagagtgggaaccgcctgggacccctacggactgcacacctaccagatctttggtttgaaccgcaaaaaactggtggaaacacgcacaacattgatgcttgaagtaaagaagcaactactcaaagcgcgcaatgctttgatgaaagcggccaccaaggagcccggtgaattcttcgattatctgtacaaccacgcaatggagatcttcgtcgagctggacgagctgaaggctccctcgaagccctactcagcgatggtgaaaaagcttctggacgaagagcgcaccgagatcatggcagcgttcatggctctcgccaggcgaccataa

SEQ ID NO: 89420 - DNA, 1623 bp, Vibrio cholerae O1 biovar El Tor; identical to SEQ ID NO: 85886

SEQ ID NO: 89421 - DNA, 618 bp, Vibrio cholerae O1 biovar El Tor; identical to SEQ ID NO: 85887

SEQ ID NO: 89422 - DNA, 1245 bp, bacterium 336/3
atgagttttgtagaaaagatagtaataaatgattggaagcaatttagtgatattgaaatagaatttcatccacaattgaccatattaacaggagcgaatggttctggtaaaacaacaatattaaatttattaggaaagttagtatatggtaacattcaagatgaaatagctgtaccatcaattgataaagaaactggaggctttaaatatattcctcgtagtttaaaattaatagataatgttcgaagcaatattataggatatttaaaatatcaagatggagaattttcaaaaataaaaattccagattatgaagtaggtgctgtgtatcatatagagttagataacataaaaagaataacaggagcatacattccatctcacagagtagtattttattatcaacatatcccaaatatttcaacaagaaagattaaaaaatcagaagctcgtttaacatcatcatcaagtataattagtaaactatatcatgatcattcgagtaaatcaacaaattactttataaaagaaacattattgaattgggcaatttcaggtgcgggtaatgattttataatatcagataaagaattaaaagaatactttctagagtttcaagatattttgagaataacattgccaaaatcgctaggtttctcaaaaatagttatcaaaaattatgaaattatttttgaaacaagcacaggagattttatgcttgatgctgtttctggaggtataagtgctattattgatttagtatggctcattttcacatctattgaaaataagtctgaaaatgtattggttataatagatgaagtagagaatcatttacatgcaactatgcaaagagaaattctgccttctttgatagaagcgtttccaaacgttcaatttatagtatcaactcatagcccgcttatcataggttctgtaaaggattcaaatgtttatgcacttagatacaattctgataaaagaatatttaacgaaaaattagatatagttaataaagcaagaagtgcgaatcaaatattagatgaggttcttggtgtatcatttactatgcccgtctgggtcgagaagtctttggaagaaattactaataaatatgcaaatagtgaaataacctctactatatttcatcaaatgagaaatgatttgaaagagcttggtttagaaagtctagttcctttaacaatggaaaaaattattacaaaaatcaatgatcagaataaataa

SEQ ID NO: 89423 - DNA, 660 bp, bacterium 336/3
atgatcagaataaataaaagcttagaacctaatatacttcaaactaataaagtagcgtggacaacggaattattagattatattagtaatggaaaaaaaattcccaagggtgtttacaatcggtataatcattctgaagtaaaggtacaactgaaaatggagtgttttaataaatgtatgtattgtgaaagtgtagtggcacatgtttcacatgagcatatagagcatattcgaccaaaagcaaaagataaatttccaagcctaacatatgaatggaataatttaggattaagttgtccagtttgtaacatgaataaaggagatgagtatgacatcaatcttccttttataaatccatacatcgaaagcccagaagattttataatagctttgggggcttatatttttcataaaccatctaatccgaagggagatttgactatcaggattttaaaattgaatagaccagatcttttggaaagacgcttagaaagaataaaagtaatacacaaccttatagatagatatgtatcacaaacaaatcctatactaaaacaagcaataaaagatgaattagatatagaggtctcacagtataaagaatactatttgtgtgtaaaatctttgtataattctatggttgatgataatcaagcttaa

SEQ ID NO: 89424 - DNA, 1623 bp, Vibrio cholerae; identical to SEQ ID NO: 85886

SEQ ID NO: 89425 - DNA, 618 bp, Vibrio cholerae; identical to SEQ ID NO: 85887

SEQ ID NO: 89426 - DNA, 1374 bp, Escherichia coli; identical to SEQ ID NO: 89390

SEQ ID NO: 89427 - DNA, 636 bp, Escherichia coli; identical to SEQ ID NO: 86043

SEQ ID NO: 89428 - DNA, 1752 bp, Escherichia coli; identical to SEQ ID NO: 88216

SEQ ID NO: 89429 - DNA, 858 bp, Escherichia coli; identical to SEQ ID NO: 86973

SEQ ID NO: 89430 - DNA, 1752 bp, Escherichia coli; identical to SEQ ID NO: 88216

SEQ ID NO: 89431 - DNA, 858 bp, Escherichia coli
atgatttggattgaccttgagcacaagcaacccaccgataccgacattccgaattggacaccgtggacacaagtgcgatgggaggcttggttggcgaaatcagctcaactggtgacagatttggcagctctagatgaggcgggaaagcgtgatgaacgcaacgcactgattgacgccaatagtgctcactggggagctttgaaggaatggctgctagccttgtcggccggtaaatgttggttctcagaggtacgcgagctttactcgcattacgacgtagagcattttcgacctaagaaggaagctaaggctctggataccaccctacgtgatggttattggtggctagctttcgattacatgaattttcgcgcctgtggcaatgttggtaaccgcaaaaaagggggctggtttccactcaaggatggttctctttgttctacttattcagcaccctgtgaagaatctgaaacacgctatctgcttgacccgattgatgacaatgacgttgcgctgatcgccttcgacgaagaaggcaaggtcattcccataccgggctcttctgagtgggagcaggagcgtgtcaacgagacggtaaagcgccttaaactcaatgaacatgtaccattagcagaagcacgtcgcaaagtatggcaacaagtggatcggctgattgacgattttgccaaggccaaagcccgctgctgtgctggtaataacccagccgctaaggcgaaactaaccgagattcgagcgcgtgcccgcgaaatgaccaaccctacagcagagctatctgcggtcgctcgttggtgcttgttaatgcgcaacgatccacagctttccagattggtggggtaa

SEQ ID NO: 89432 - DNA, 1752 bp, Escherichia coli
atgcaactgttgcgcatctgcatccccaactttcgtaatctacgtggtctcgatattgccttcgcgatgcatttgtcagccgctttaggcgcgccagctgatgctcaaccaaagccgatccgcagccacgccctgattggccagaacgggaccggcaagtccaacttgatcgaagcgctgatcaccatcttccgtgatgtcgacctggatcgtgaagctgcgttcgattacacactggaatacagcattcgtgatcatgttgtacgcattgaagcggatacggtcacacaaaagcgcccttacgtgtgggtcgacggcaaagctgaaacgcagggctatttgctgaaaaatcgcgagctgctacccacacatatctttgcttattactcgggccgcaacgagcgcattgaggccttgtttcaagagcatcaacgccgcttcaacctacgacaggaaatcaccaccgacgaggtgctttcagagcagctgttggaaaactttaccggatctgaggcggatatccgcgcggtggaggaagccaaacgccgccgagaatcacgactgaaacaagcaggcgacgaccgcctgcgccgtctgttctactgccgtggtggccatagccagttggtgctgctggcctgcttgctctccgatgaccaggtgtttcagaaggtactgaaaaacctgcacattgaatcactggaatcggctttatttgtactgaaagagccacatcgtctgcgcgaaaaacgccgcagcggcaagttcgacgagcaggaactgatcgagggcgatccacgcttctggtattcccgtggcaatgtggtaagcgagttcctcgacaagctctggcaagtatcttgggctccgattgaacaggaggcaactaagcaaattgacttccgtggccgtagcgaaaaacaaaagcagctgtatctgttcgtgccgaatcaggacaagctcaaacagttgggcgagcttgtcggcagcactgatagtttcttccgctatgccgagggcgcttacatcggtgacttgatcgacgaggtgcgcattacggtcaagaagcgcgatgaatatggcggaaaggtgagtttcacccagctctctgaaggcgagctacagatgctcaccgtgctgggcctgatgcgcataacccgagaggaccactgccttttcctgctcgatgagccggatacccacttgaaccctatctggaagctgcgctacttcgacgatatcgaaggtgtgttggcctctgatgaaggtgcactggtacagggcgagtcgcaaatcctcatcaccactcacgacccgatgatgattggcagcctcaagcgcgagcaggtgcatattctgcgacgcgacaagggacgctctatcgtggatacgcctgatgaacatccgcaaggtatgggagtaaccgggctgctcaagagcgagttgtttggcctctcgtccacgctggatattgaaactgagcgacgccttttccggcgcaatgagctgttcgtaaaatcaccacgctccccagaggaagatacagagctatcacgactttccactgaattggccgatttgggtttttctactgccgattttcgcgatccggactacgcgctattcgtgcgcaaaatggcacagcatcgtcgtttccgcaagcctacgctcacgcccgaggagcaagccgagcaggacgccattgccgattcgattattgatgaaattttgcgtgaggaagaggaccaatga

SEQ ID NO: 89433 - DNA, 858 bp, Escherichia coli; identical to SEQ ID NO: 86973

SEQ ID NO: 89434 - DNA, 1374 bp, Escherichia coli; identical to SEQ ID NO: 86042

SEQ ID NO: 89435 - DNA, 636 bp, Escherichia coli; identical to SEQ ID NO: 86043

SEQ ID NO: 89436 - DNA, 1752 bp, Escherichia coli; identical to SEQ ID NO: 88216

SEQ ID NO: 89437 - DNA, 858 bp, Escherichia coli; identical to SEQ ID NO: 86973

SEQ ID NO: 89438 - DNA, 1374 bp, Escherichia coli; identical to SEQ ID NO: 89390

SEQ ID NO: 89439 - DNA, 636 bp, Escherichia coli; identical to SEQ ID NO: 86043

SEQ ID NO: 89440 - DNA, 1374 bp, Escherichia coli; identical to SEQ ID NO: 89390

SEQ ID NO: 89441 - DNA, 636 bp, Escherichia coli; identical to SEQ ID NO: 86043

SEQ ID NO: 89442 - DNA, 1374 bp, Escherichia coli; identical to SEQ ID NO: 89394

SEQ ID NO: 89443 - DNA, 636 bp, Escherichia coli; identical to SEQ ID NO: 86043

SEQ ID NO: 89444 - DNA, 1752 bp, Escherichia coli; identical to SEQ ID NO: 88216

SEQ ID NO: 89445 - DNA, 858 bp, Escherichia coli; identical to SEQ ID NO: 86973

SEQ ID NO: 89446 - DNA, 1374 bp, Escherichia coli; identical to SEQ ID NO: 89394

SEQ ID NO: 89447 - DNA, 636 bp, Escherichia coli; identical to SEQ ID NO: 86043

SEQ ID NO: 89448 - DNA, 1374 bp, Escherichia coli; identical to SEQ ID NO: 86042

SEQ ID NO: 89449 - DNA, 636 bp, Escherichia coli; identical to SEQ ID NO: 86043

SEQ ID NO: 89450 - DNA, 1374 bp, Escherichia coli; identical to SEQ ID NO: 89390

SEQ ID NO: 89451 - DNA, 636 bp, Escherichia coli; identical to SEQ ID NO: 86043

SEQ ID NO: 89452 - DNA, 1752 bp, Escherichia coli; identical to SEQ ID NO: 88216

SEQ ID NO: 89453 - DNA, 858 bp, Escherichia coli; identical to SEQ ID NO: 86973

SEQ ID NO: 89454 - DNA, 1374 bp, Escherichia coli; identical to SEQ ID NO: 89394

SEQ ID NO: 89455 - DNA, 636 bp, Escherichia coli; identical to SEQ ID NO: 86043

SEQ ID NO: 89456 - DNA, 1374 bp, Escherichia coli; identical to SEQ ID NO: 89390

SEQ ID NO: 89457 - DNA, 636 bp, Escherichia coli; identical to SEQ ID NO: 86043

SEQ ID NO: 89458 - DNA, 1374 bp, Escherichia coli; identical to SEQ ID NO: 89390

SEQ ID NO: 89459 - DNA, 636 bp, Escherichia coli
atgccaaaaattaaaaatccaattagattcagcgcagagtcattagatattattgagaaaaaattgtcttctccagattttaagcataccaactggggagatgatgatttgcaagttctccgtgcagaaattagaaatcattacagagaagaacaaaagctagaatgtgtatattgtcatgagcctattggggtaagagctgcacaagctgctcctatagagcatattgtgccaaaatctcaatatctatgttttatttttgaacctaagaatctatgtgtagtatgtcctgactgcaatgaattcaaaggtaaaaatgaagtgttatttgaacccgtaataaatggggggcggcgcaaaaactatccaactgcatctgcatcatttcgcatcgttcatccacatatagatgattatgagatgcatattataaaagcaaatcgtgtttatgtggacaaaacacctaaagggcactataccattggaatatgtaaactaaatagattttttcattattttgggatgtgtgatgaatttgttaatgatgcaaaaattgctgagacaaatgaaaattttttcaaaaaaggtagtattactactaatgaattattggatgatgacattcatttgatttaa

SEQ ID NO: 89460 - DNA, 1752 bp, Escherichia coli; identical to SEQ ID NO: 88216

SEQ ID NO: 89461 - DNA, 858 bp, Escherichia coli; identical to SEQ ID NO: 86973

SEQ ID NO: 89462 - DNA, 1752 bp, Escherichia coli; identical to SEQ ID NO: 88216

SEQ ID NO: 89463 - DNA, 858 bp, Escherichia coli; identical to SEQ ID NO: 86973

SEQ ID NO: 89464 - DNA, 1374 bp, Escherichia coli; identical to SEQ ID NO: 89388

SEQ ID NO: 89465 - DNA, 636 bp, Escherichia coli; identical to SEQ ID NO: 86043

SEQ ID NO: 89466 - DNA, 1752 bp, Escherichia coli; identical to SEQ ID NO: 88216

SEQ ID NO: 89467 - DNA, 858 bp, Escherichia coli; identical to SEQ ID NO: 86973

SEQ ID NO: 89468 - DNA, 1752 bp, Escherichia coli; identical to SEQ ID NO: 88216

SEQ ID NO: 89469 - DNA, 858 bp, Escherichia coli; identical to SEQ ID NO: 86973

SEQ ID NO: 89470 - DNA, 1182 bp, Escherichia coli
atgaaactgactgagctaactataaacggtatcggggggataaagtccctgtacgtaaaatttaggcctgacatgaatattatatgtgggcctaacggagttggaaaatccacactcttgcttgctgcctcctttccttttcttcatggatacactaatagaataaaacgcaatgtcacttctgaaacaggaagtgttagtctaataatagaagataattctgttaactttaattcagtattagatgttaacgttcatttgcctacagaaacaattcacaactttaataataacggatttgataagaggaaactaataaaatttgaaatattacgtaactttgattataaacatcttgaggcgttgaatgcagataaatcactatccgatgatgctgtttcgcaacagattaatttaggtgtcaatttacatgatatcaaggattggtttgctaagagggatttgtttgaaaaagtagataatggttacggtcctaatacgataaaaaatatacatcttgcaagggagtgtatatcaattttaaaccctcagttttcttacaatcgcgtcgatcctaaatcttacgatatttttgtaaataccccgaccggggtaatatggtatgaatatctgtcctcgggattcaaatcatgtatgagtctccttctcggtattattaaagagatcgagcttcgttatccggagaaagatatttacgcccaagaatttgatggagtgattcttatcgatgaaattgagcttcatttgcatcctgagtggcaggcaagaatcactgaagcccttacgacaacatttccatcagcacaatttattgtcacaactcacagcccacatgtagtacagaatgcaaaaccacatcagatcattgcgttagtaccagataatgatggcacagtgagagtaaaagaacttcctgaaaatggcttgggttattctgcctggacagttgaagaggttttgttagatgtaatggggatggaaagcactctcagtagaaaactacaagaactacttgataatttcgaacgttttgttgatgaagaaaatttcgacaaggcgaaagaaatttatgattatttggatatggcattgcatcaaaacagtattcttcgtaaatctcttaaaataagcctgatgtcaattcgagagagagaagagtaa

SEQ ID NO: 89471 - DNA, 747 bp, Escherichia coli
atgattaagcttgaacggaactttattcctgatttttttactcgtgttgatcttctatctttaactcaggagtttaaagataatggaacatctgtttggcatcatccggaagtaaaatcggcatgtctaaaattaagtaatggcaaatgtgcattttgtgaggtcaagcttgaagaggctagcacctataatgaaattgagcattttaaggataaaaaaaatttccctgatgatgttattagatgggaaaatctccttccttcatgccgtcactgtaatggttcaaaacaacgccataatgttgtactcaatcctataataaatccatgcaacgatttaccgtcagaacacctttatatgatagggtatcgtattaaaggtaaaactgatttaggtaaaacaacagtggatgttttaaactttaatcacagggagcacaagtttataccgcgttgtaaagcaggggaacttatagatagcagtattgatgacgcaatagaaaaacttaattggtttaatgagaatccaagtactagacgtaaaaacattcttatgaatctagtcgaggcaatattaggtgagtgtcagaaaacatctcccttttctgcagtatcagcaacaatgcttcatcgttcagtcgaatattcttatctgaaagaaaccatgcagatgcaaggattatggtcagattatatgcaggaacttcatgatgaatctttgagcctgacgttaccgtcaattcgctag

SEQ ID NO: 89472 - DNA, 1752 bp, Escherichia coli; identical to SEQ ID NO: 88216

SEQ ID NO: 89473 - DNA, 858 bp, Escherichia coli; identical to SEQ ID NO: 86973

SEQ ID NO: 89474 - DNA, 1182 bp, Escherichia coli; identical to SEQ ID NO: 89470

SEQ ID NO: 89475 - DNA, 747 bp, Escherichia coli; identical to SEQ ID NO: 89471

SEQ ID NO: 89476 - DNA, 1374 bp, Escherichia coli; identical to SEQ ID NO: 89394

SEQ ID NO: 89477 - DNA, 636 bp, Escherichia coli; identical to SEQ ID NO: 86043

SEQ ID NO: 89478 - DNA, 1374 bp, Escherichia coli; identical to SEQ ID NO: 89388

SEQ ID NO: 89479 - DNA, 636 bp, Escherichia coli; identical to SEQ ID NO: 86043

SEQ ID NO: 89480 - DNA, 1374 bp, Escherichia coli; identical to SEQ ID NO: 89388

SEQ ID NO: 89481 - DNA, 636 bp, Escherichia coli; identical to SEQ ID NO: 86043

SEQ ID NO: 89482 - DNA, 1374 bp, Escherichia coli; identical to SEQ ID NO: 89394

SEQ ID NO: 89483 - DNA, 636 bp, Escherichia coli; identical to SEQ ID NO: 86043

SEQ ID NO: 89484 - DNA, 1374 bp, Escherichia coli; identical to SEQ ID NO: 86042

SEQ ID NO: 89485 - DNA, 636 bp, Escherichia coli; identical to SEQ ID NO: 86043

SEQ ID NO: 89486 - DNA, 1374 bp, Escherichia coli; identical to SEQ ID NO: 89394

SEQ ID NO: 89487 - DNA, 636 bp, Escherichia coli; identical to SEQ ID NO: 86043

SEQ ID NO: 89488 - DNA, 1374 bp, Escherichia coli; identical to SEQ ID NO: 89390

SEQ ID NO: 89489 - DNA, 636 bp, Escherichia coli; identical to SEQ ID NO: 86043

SEQ ID NO: 89490 - DNA, 1374 bp, Escherichia coli; identical to SEQ ID NO: 89390

SEQ ID NO: 89491 - DNA, 636 bp, Escherichia coli; identical to SEQ ID NO: 86043

SEQ ID NO: 89492 - DNA, 1374 bp, Escherichia coli; identical to SEQ ID NO: 86042

SEQ ID NO: 89493 - DNA, 636 bp, Escherichia coli; identical to SEQ ID NO: 86043

SEQ ID NO: 89494 - DNA, 1374 bp, Escherichia coli; identical to SEQ ID NO: 89394

SEQ ID NO: 89495 - DNA, 636 bp, Escherichia coli; identical to SEQ ID NO: 86043

SEQ ID NO: 89496 - DNA, 1374 bp, Escherichia coli; identical to SEQ ID NO: 89390

SEQ ID NO: 89497 - DNA, 636 bp, Escherichia coli; identical to SEQ ID NO: 86043

SEQ ID NO: 89498 - DNA, 1752 bp, Escherichia coli; identical to SEQ ID NO: 88216

SEQ ID NO: 89499 - DNA, 858 bp, Escherichia coli; identical to SEQ ID NO: 86973

SEQ ID NO: 89500 - DNA, 1374 bp, Escherichia coli; identical to SEQ ID NO: 89390

SEQ ID NO: 89501 - DNA, 636 bp, Escherichia coli; identical to SEQ ID NO: 86043

SEQ ID NO: 89502 - DNA, 1374 bp, Escherichia coli; identical to SEQ ID NO: 89390

SEQ ID NO: 89503 - DNA, 636 bp, Escherichia coli; identical to SEQ ID NO: 89459

SEQ ID NO: 89504 - DNA, 1374 bp, Escherichia coli; identical to SEQ ID NO: 89394

SEQ ID NO: 89505 - DNA, 636 bp, Escherichia coli; identical to SEQ ID NO: 86043

SEQ ID NO: 89506 - DNA, 1026 bp, Candidatus Magnetomorum sp. HK-1
atgaaaccaatccgaatgatagaacataagttagcagaactaactataaaaaaatatagactgtttcaaaattttaaacttgacttgacagatgataaaggaaatcctttagacacagtgattttggcaggaataaatggaagcggaaagacaactattttggattttatttctgatactttattttctgagaataaaaaagataaatctaatatagtaagggtgaagttaactggtaatctgtcggaaatgaaaaagttaggagatcagatacagtcgtcagagctgaatccatttcctatacagaataaagaaataagcaattatattgatcattttattttagacagcaataaattttctaatgttactgttagagaagcgcgcaaagcagcttttgaagaaatcaataagctgtttaatatattagatataaatattcagcttattgataggaaagatggaaagccaatatttaaaaattttcaaggaaaaaaattagggttagaggatttatctgctggagaacaagaactttttataagagttttgaggttaaaaatactttctccaaaaaaaaagatagtattaatagatgaaccagaatttgctctacatccttcctggcagcagaaaattttgatagtttatcaaaaaattttatgcgatggtgataatcaattaatacttgccactcattctcctcaggtgattgcttctgcagatgtaaaaagcgtttttttgctaaaaccaaaccttgaaactaaaaaaattgatgtttctatgcccaaatacacgaaaggtcatacaattaattatgtattatctgaaattatgggagccgattatcgagatacaaagattaacaatgacatagaagaatatttagcgcttattcgaaaaggagagcatgaaacaatcaaaggaattgaattgaaaaatattataaatgatcttgatccaaatagtgaagataaaattcggatagattttgcattgagaagatttaaggtgctaaagaaatga

SEQ ID NO: 89507 - DNA, 666 bp, Candidatus Magnetomorum sp. HK-1
atgagaagaatcataagaaacccaatttcagataaaacttgtaagcaattaaaagaaaaatccaagaaaaagtttaaattatcgaaatatcagcgcaaagaaatagagaaaaatctatttaaatcccagaaacatctttgttgttattgtgaatgccgtattgatgatacgaataaacatgttgaacattttttggatcaagaaacaaataaagatcgtatttatgattacaataatatgtttctttcatgtgatggagaaaaatattcaaataatgaaaataatagacaggaaattatcacttgtggtcatagaaaaggaataaatcaaaatcaggctaaaatcaattatgatcttcttttaaatcctgctgatgaagaacctcacactttgttgaaatatattgatggcctaattacgccttctaaaatatgttctaataaagaaaaagagaaggcgacttatacgataaaaatgttatctcttgattctaatcgtttgaataatacaagaatagaagcaatagttcaattagttaaaaatcttaatttgttaacagacgatgaaaaaaaactttttatagaaaatgttttaaatgaagaacaagaaaggcttcctccatttttctcaacactcaaagataatttttcttttttgttgaactga

SEQ ID NO: 89508 - DNA, 3375 bp, Candidatus Magnetomorum sp. HK-1
atgttacaagaattttcattaaaacattttcgacaagcattttctcaaaaaaaaggttacatcctgattgttgccaatcaacatttttcgaaaattctgcttgaagccataaaatatcagtcgccaggcaatcaatcgttcatccccaaacagattaaagaaattgctatcgctgacaaatacaatgttgataaacctgtttttattatttcttcagcatatataagacatcaaacacttgctgaaattaaaaaagaacaaaaatcccttcaactgtttattgatagacttcaaattttaccagaaaaggaaaagaccagaaaaagcatcagtgatgtttttaaaaatatctacatttttctttctattgaatatccacaattgatcagaagtttatcattttttcccgaccttatcattgatagatccccggaaggtggtttgcaaaaaagtattattccatacgatgaccaattaaacaatgagccaattatcatcaactttaaaatgcttgatattcatgatgtaatgaaagattatttttattactttgttccattgctttatccttcaaccatctataaagaaatcattgtattggaatccttaaaaaaaaatgtttttaaagtaaaagttgttctccatgctcatggcacccgtggccataacaaagggcattctcaactggaagttgtaaaatttgatgccatcagtagaatcaatcgcgaaaaatcggcttttgatcgtatcaataccaataaattttcagatatcatttatcaggtaaggaatactgccttgttcaagggagaatttgtcgctgccatccggtcatcggcggccagtatctttactgatgaaaagcaacaaaaattacgggaagttttagctgagccttctgtttctcaacaggctaaggaaaaagcgattgatcatatttttgatagtttaaaacgtttttatgccacacaggatattcatgaaatcaataatgcgctacatttatatcaggaaacgattttaccatacgccttttatattaaattaaaagactttgacattactcctgtggatgatacctgtgaattaagtcggataaccaataatatcagtatttgtgaagacatgtcatctatatgttgtaaactgattggcatcattcccgatctttcaaaggccaaccgatgcaaattattgtttattgttgaatctgatgacgatgattcagggaaattgttaaaattagtttgtctttatgaagatgaaaactggcgtgaaaacttcaataaaaaaggactgaaaattgaccaaaaagtcatcattcacaatattgaaaaaagaggctggctgtttgaagcatacaaacagtatcgttatattaaggacaaaggcattttaccgacaaaagacagttcaatcagcaaaacaagaatgatcaatgacacaatttctgaacagacgtttagtgacctgataaataaagattcttcaattgaactgccagatagtaaagacatggcatttctgaatgaaaaaacagagttcaatgattttcaggaaatatgcaggactgaagacctgcttatatcaggtcaaaaggatacctatcatattccaaatccactacatatgatttatcaagccattaaaaaacaagatatttttcaaaaagactattcaggtgtcagccatggtgatttaaatatcgataatgtgattgtccattttggtgacacgcattcacacaaagagacacgtattcatttgattgatttatctgaatataatgaaaattttcctttagcatttgatgctgtaactttagaaacaggcattaaattgcatattttatcaaccagcagtgaacaatatcagacgattcatcaattcattgatgcactgatatcttttgaacgacagttatatgaagacttttcaggaaaaactgaggatgattcaacatggtctgatgacatgaaaacgttttttccaataattcagaaaattcgaaaaatggcttttgatcgatatccgatgtcaacagtaaaagcttataaatgctatacccagcaattattattctattctttgcgggcattgtcttatactgatctaacatcacgctcaaaagcatgggcatttataactgctggcatagccggcgaatatttattacaaaaagagagaaaaattaaaccaattaaaccatccactttgcaggtaaacccatctgaaaacatctacattgacaaagaaaaaaatacccctctgccttacgcgatcaaacaaattcatatgtcacagttttatgacacaataaacaccagcgttaaggaacttcccgttgatgcccaatggatttttctgacaggtgaaaatgcttttggtaaaacactcgttcttagagcaatcgccctgggattatgggggaatatcaatagtaatgtacaaaaacaatggtttttaacacaacattcaaaaataggattggaatataaaaaagggtatagcagcatcatcaatatttatggtgataaatatttttcccccattcaaaagcttgtggcgtatggcccttcaagattgattattcaggatattcaaagtaaaaataaaatagaccaggaaagcggccatttatacaatttatttcatgatgatggcattttgttaaatatggaactcgaattaatcaaatggcatgggaataataagaaatatggaatcgttaaagatgtattactgcgtgtaatgccttatatcagtgatattcaggtgatcaatggtcaggttgtgtttttttcaaaagataaagatacaaacaatcccggagatggtattttattcgagcaactggcatcaggcccaaaaagtatttttgcaatggtgggtgatatgatgattcgaatgtatcaattactgccagatatcattgatccaacagacttttatggctttgtcattattgatgaaatcgatgttcaccttcatttaaaatggcaaaaagaattgccatctgttctttcaaacgttttcccaaatattcaatttattgtatcaacccatagtggtatcccaatgcaaggggttaatacagatcgctcgattttcttaaaagtgaatagagacgaggaaaatggtattcaaattgaacgtttatttcaagatcaagttaaagacatgaaacattggactccgaatattcttttatcttctccaatgtttgattatgaagattatataaacaaagaaataacagatctgacgttgctgaaaacagaagactcgtataaagaaatgaaagaagatgaagcgcttgaccagtttttaaatcgctttgaaacgaaattatcagaaagcaacaaaaaagaatga

SEQ ID NO: 89509 - DNA, 945 bp, Candidatus Magnetomorum sp. HK-1
atgataagcgttgataaaaattataataaaccaccagatgaattgaaagatattcaaaaaaaaatagaacaatttaatttaactgaatattctttaaatgacactttagattctttttttacaccaaagaataaaacagcaatcaaagaagctttgagtgccatatatcataataaatgtgcgtattgtgaatgcaatccgactgttggctcatatactgaaattgaacattacagacccaaaaaaggcggatattattggctggcttttgaatggagcaatctgttactttcctgtaccaggtgcaataagtccaaaagtaataaatttccgctaaaagatgaaagcaaccgattgaaacaaccaccagatgattctgatcgaaaagctacttcagatatattattgtctgaacaacctttactattaaatcctgaagtgacacataaaaataaaaatgcgcaatacaataatgaaaaaattggccctattgaaaaacatttagaatttaataaaaatggcgaggttaactatcttacagatgaaggaaaagagaccattgaagtattcaagttaaataaaagacctgaactggttattgcacgaagaaaagttataaaaaagtacattaaatgcctcaaaaataatattgaagaatatgctaaaagcaatgattttttcaaatttactgaaaatgttaatcaattgatcgaaaatgtgttgaaagatgctgacaatcctgaaaaagaatatttgcaattacgccggcaaatagttgatcagccagataatttttttaaaaaagcatttgaagaaaaaaaaattgtgcatatttatgatcttatcaaacgaagcattgaagacataaaagcttcaagaaaaaaacatccagctctaccaatcaaacacaacaatagatacgcctcaaaaaaacaaataacctga

SEQ ID NO: 89510 - DNA, 1077 bp, Candidatus Magnetomorum sp. HK-1
atgaaactcagaaaaattcatattgataattataaactatttaacaattttgatttggatttgacacacaatgacaaatcacaaaatcttatcgtgattgcaggaataaatggaagcggcaagaccactttattgaaagaagtgatttatcaaacgcttgtaaataaatccatacacaaaggatgttctattgatattgaaacaaatgataaaaagaatcatatttttgtcattgactcgcaatctttacaattgaattctcaagaacgaataaataatgagaaaaaagcgctattttcacaactggatcatatttactattatgaagccggattatcagtagaaaataataatgtcaaaaatgttattcttaaatatattgattcattaatttatgaaaaagataaaaaaagcagtgaagcatatcaaatagctcaagatgttttagattcaatattcaatggttttgatcttcaaattaaattcaaaggcgttgatagaaatagagaaatcctttttaaaaatgctcaaacagagaatatcaaaattgaggaattgtcaaatggagaacaagaactgattacaaaagcattctctatttatcttgcagaaataaaagacagtatcattttaatagatgaacctgaaagctcacttcatcccatatggcaaagcagaattacgcaactttatcagaaaattgcagatcaatataataatcaggttattctttcaacgcattcaccgcatattgtttcagcagtgcataaagaacaaattcgtgtgttgattaaagaaggcaaacacctgagtgttatcagcaattttaacagatcctatggcgtcaaagttgatcaaatactacttgaaatatttagaaccaatggattgcgtataccagaaatagaaaacaagctgttcaaattacgagaaatggtttctttaaatcaatacgatacagatgactgtaatgcattaaaacaggaattggagaacacgattggttatgatgatactgatttagcattaattcggttagagattgcaaagagaaaaaaaaatgaaaaagatcaataa

SEQ ID NO: 89511 - DNA, 597 bp, Candidatus Magnetomorum sp. HK-1
atgaaaaagatcaataaaatagaacctgacttttatcagaattatatatcagctaataaacctgacacatggaaacaagtgagctttgacatagggttcgatatgagaacgtatatgttaatggaagaacagaattttcaatgtgcatatactgaaattcgacttgaaccggaacaatctcatattgatcactttaagaaaaagagtttatatccaaacttgacctttcattggaacaacttgttaacatcaagtaattatgatttttatggtgcaagatttaaagataagcacattaagaaggagcattatcaaaatattatcaatcctgtagttgaaaatccgcaacaatatttttcttattcttttacaggagagatattagttgatcccaaaaatgaaaaaactaagctgtcaatagaaatgttcaatttaaatgatcgatcactggtggagcaaagaaaagcagttgctgagatagttaaatcaatgtacaatcagtttacagttgaagaactaattgattgtataggtaaatttgaaagttttataagagcattatacattgaatttaagaataatgatgacattgagtaa

SEQ ID NO: 89512 - DNA, 1116 bp, Candidatus Magnetomorum sp. HK-1
atgaattacactattaaaaaggtaaaaataaacaattttcaatgtattaaagatataacaattgataatctaaataaatcaaagtggatattcttactgggagataatagtaatggcaagacagcattccttcaggcacttaccattggcgtatgtggtatcaaaaatgcgggtcatcttcttgaggaacaaaatagttgccagattacagtcacactgtcaattcatggtagaaatcaaaagaatgttattaaacggatcccaaaagagaacacatggtcaagtgttgatagacctgattatttttgttcctatggcccttcacgattgcaaatgcaagatatcaatcttgatcattttttaattgatcctgataggagtttattgaatcaacagggaagtttgttaaacattgaagattggataagacgccagaaattacgtgaggaatctaataccctcgctcgtattcgttataaaaatgtcattaagctgtttgaaagacttttaccaaatgtttcgcaaattgttcttgaagatgatcaaattttttatattgaaaatggatataaagcaacaatacatcaaatcggcagcggcaacaaaaccattctttctatggtgggagatatagttatccgcctgtttgaaatgcagcccaaagaaacagagccccaaaatttgaatggcattgtggtaattgatgaactggatttacaccttcatcctgttaatcaaagatatttacctgaaatattgagcgatctttttccaaatattcagtttatatgtagtacgcatagcccaatcccgcttcttggtgcgccaaaaaattcaatttttttcgtagttgaacgagacagacaaaagtctatcacaacaattcgagattatgaaattgatataagtaaccttcaaccaaatacattattgacgtcaccgctgtttggaatggaatcaataagaagtgtccaaaattccatttttgctgaatttcgtacagaaaatgactacagggaatatctgcacagaaaaaaacgtgatgaatctttaaagcaatatgctcaaaaaggtatacatcttccaaaagagttaatggataaaatttatgattag

SEQ ID NO: 89513 - DNA, 894 bp, Candidatus Magnetomorum sp. HK-1
atgattagagttatcaaaaaaagtacacctccagaaatattacaaacaaaagctgaaaaattgcgaattaaggctttgaaggaatgtaaaaagcataaattttatagccgatattatggacatccttctgtaaaaaagaaacttttggaaatatactgtaataaatgtgcatattgcgaatcttcaattagtgaaggcgctcctttgcaggttgagcattacagacccaaaaagaatcttatggaagatatgaatcatcctggatactattggcttgcttatgagtggacaaacttattactgagctgtccttcatgcaatcgttccaaatcaaatagctttccgatcatgggtgaaagagtaaaatcgccacaaaatgatcacaaagaatggaatattaattcggaaagttttatatctgaaaagcctttactgtttaatcctgaatttgataatcttgaaaaacagttcaagttttatattgatggaagtattgcaggggaagaaaaaaatcgaagaagtgaggaaaccataagaatatgtattttaaatagagaaaatttaagagcagccagaaaagaagaaattgaaacctttatcagtgagttattggacattgagcataaaatttatgttattttgaactatctaagaaataaaaatgacttaacaagggataatttccagattgttatcgaattagaatttaatcctctttttcaaaaactaatgaaagcaatgcagaaagagcataaatattcctgcttatggagatatatatttaacaatttcaaaggatttataatcaaacaattctctaaaaaagaatatcaagatatggtttattatgctttcaatagatatttttcaaataaaaagatagatatggagtaa

SEQ ID NO: 89514 - DNA, 1293 bp, Candidatus Magnetomorum sp. HK-1
atgcgaatcagtcaaataaaattaaaacaaattggtgcttatgaagatctttccattgatttcaaaaccaataaagatcctcaaaaagccgaaatccatatattcagtggtgtcaatggcagtggtaaaagcacaattctgtatgcccttgccgcagggtttgattcaactgaactggaaaaaagatttcgaatttccgcccaaaatgaaaatttacagatacatcataatagtcaatacgacattttttttgaagatcattcgggaagtgtttattcaataagtaatcaaaaagaggtgccaccggaagcatctttttcaaaaagtactcagttggtaaatttaagagaagccatgactgccaaagcaaatgcatttcaaaaatatcgccttgattttgccatatttggatattctggaacccgaacactttattccgcgccaattgcttccattaaagaaatcagcaccaatccactttatcatgcattaaattttggcaagtcggtgaactcagatttaattgtccagtggattgccaatacaaaagccagaatagcttttgccattcaagatggtaacaaagtgcttgcccaaaaatatgaggattcaattaaaagggttgagcaggcaatcagtgatattgttggtcatgatgttcatttttcatttagctatgatccgatgaatgtgaccattaagatcaataatgaaaatcttgagattgacattttacccgatggtttaaaatcaatcatcagttggatcactgacttatttatcagaatggaacgaatcccctggactgatgacaataatatattggataagtgttttattttgctgttagacgaaatcgaaattcatttgcatccctcatggcagcgaaaaattcttccagtagtacaatcattgtttaaaaatgcccagatatttatcgccacccattctccatttgtcatttcttcaataagcgatgcatggatatacaagtttagattaacaaatggaaaatcaagtctttctgaaattgttccatctaaggcggggtttagttatccctctgtgttagatgacgtatttgatgttgcagaatattttgatattgacactgaaaacagttttcaccagttttaccagataaagaatgagatactttcggggaacacagataatattcaaacatttaaagagattgttaagcaactgtctcaaaaaagcattgaacttcaagatattgttggcagagaaatcaggcaactggaaagaataacagggaaagcattcatatga

SEQ ID NO: 89515 - DNA, 594 bp, Candidatus Magnetomorum sp. HK-1
atgatgaaaatagagcgaacaccagtccctgaatgtttacaagaaaattataaacaatgggggcatgagtacgcaacaaaatctcgtaaaaattcaacctatagattccaatggaaacaatggaaaggaaaggctgttgatgttctaataaaaccggacatggtcaggatgacaaagaatcattgttcatattgtgacagttatcctcttggaattgcagcacagcaaaccattgatcatttccggcctaaaaaacaatttccatttttaacctatgtatggcataatttatttcttgcatgcaatgtgtgtcaaaattcaaaacaggatcgttatgataaaaaaatgcttaaacctgatacagtatctttcaagtttgagacgtattttgtcatcaattataaaacaggctgtattgaagtgaatccaggttcaagctcaaaaaatcaggaacgtgcaagactgacgattgagacgtttggcttaaacaaatttggtcggccacatagtcgattgagagaatatcaaaaatatcaggatttatgccaaaaagggtattgtttagacgatttttcatatcgtttttttatgtaa

SEQ ID NO: 89516 - DNA, 1386 bp, Candidatus Magnetomorum sp. HK-1
atgagacttcaatcgatcactattgaaaattttcgatgttttaacaaattgacattggatttgcatcctgaattgactgttctgattgcgccaaatggtgctggcaaaacaactttactggatgcatcacgtattgcagtttggccatttgtaaaagcttttgatttagggaaccaaacaggaaaatctgcgactatacaaatagaggatgtccgaaaaataatgcacgaaaatggtaacatggaacctgttgtcccctcaaaaataatagcaaaaggtcaaaggcaagacaatctcacctttgaaacctgggaacaaaaacgagaaaaactaaaaccgcgtactcaaccaacctatgatacatccgcaaaatcactcatgcaatttggtgaacgtcttcaaaaaaaaatccgcaaagaaaatcagaccactcctgtagatttacctgtcattgcctacttaggaaccggacgtatctggtaccagggacgccattcagcagttgtcgaagataaacctttggatcagagtatatattcaagaacatggggttatcaagattgtctttccatgtcatcaaattacaagcaatttgaaaactggtatgcgtggatttatcgaagctttcgtgagcagcaaattatttgtcttgaaaaaaatagtcctttaaatggtgcatcattaatatttcaagatgccattgatgttatcaaatccgcagttaatggtaccattcaggatgatacaggatggcaggatattgcatacagtgccagtcaacaacagcaaatcgttttaacgcatcccaaacatggagaaatccctttaagtttgctcagcgatggtttgcgaaatactgttgtaatggtagcagaaattgcctttagatgtataaaactgaaccctcattttggcaaagaggctgcacgtaaaacaacaggtattgttatgattgatgaagttgatatgtttcttcatccctcatggcaacaaactattattgaatcattgcgaaaagtgtttccacgtgtacaatttataattacaacacacagtccacaagtgctttcgacgatagagagtgattctattagaatttttaaagattcaaatgtttatcatgcaccaaaaggaacgaaaggtgctgaatcttcacggattttgaaacgtgttttgggtgtagaaggtcgcccccagaatgacaaaaatacacaactgctgaatcgctatttggaactggtctatgcagataaatggcttggtgacgaagctaaagcaatacgtcaacagcttgatgaaatttttgctgatgaagaacctgcgttaacagaagctgatctttacattgagaatcgggagtgggagaaagagattgaaaaaaattaa

SEQ ID NO: 89517 - DNA, 783 bp, Candidatus Magnetomorum sp. HK-1
ttgaaaaaaattaaaaaaacacccgggccaaatcatctaacaaattatgaaaaaaaatatccggtcgctaattggtctgattttaaaaattataatggtggtgaaggttatcaatgcattcgaaatcaaattttaaaagaccagggtggattatgcgcctattgcgaaaccaaaatcatagacttgccacctcacaagcaacgtgttgaacattttcatgcgaaatcagataaagcgttcaaaaacaaaaactgggcattagattggaataatatttttggagtatgcattggcggtgatgattctgacaaaaagctgcatccattacctgaaaatttgagctgtgactctcataagaaccacctattcaacaaaaaacaattaccagaagcttgcgagaagtttctggtaaatcctttaaaaatgattgcaaccccttgcttatttgacttccacaaagcaactggtgaacttcggccaaatatcaatacacaaaaacatgaatcaaaaaaaaacgattatgaaatatcagaagaattactgaaaaaatcaattgatattctcaatttgaactgtgatcgactgaaacaacaacgattgctgattctcaaaaaatataatcagatgattgctaaagccagaaaaaggaatgacaaagaatgtttttctaaaatatcggcactatggtttaaagataaatggcaaagtttttttacaactcgaagacttttgttgggtaagcatgcagaagtctttctttcaaaaattggatatgatggataa

SEQ ID NO: 89518 - DNA, 1251 bp, Burkholderia sp. HB1
atgagaagctcgtttatagaatcgcttcatgtgcgggatttccgacaattcgatgatcttagtgtcgaattcaatagtggcttcaattttattgcggggccgaacggctcaggcaaaacatcgatactggcatgcgtcgcacacgcccttactcatcactcgttagagcactcacgtgcctcggatacgagcgaggtttttatcgatgtaagtcataagggtgacctactgcgagtagggcttggcaaaggctctttcactggccatggctatcgaacgtccagtacgaagttgtgggcggcattacccgaggccgaggggcgaaaaagcgtgctttcgatcgaaacagacaagcatgcgccagatttttctcctcttttactcggcgcccaacgatcattacgttacatccaaactcaaggcatgcaacgcgaaccgctattggtcgaacgcaggaagcaatatcgtaacaactccgttaagcatatttttgaagaatccagttcaaacgtaaaacaatggctgatcaatcgttacttcatagttgataaagactgggcgactaccgaaaagaagaattggcagcattttttaagcgccctccctgcactggccccgttcgacagcaacttcgaatttgtgcgaatcaagtccgacatggaacccgttttctcgatttatgggcgggaatgttacttggaagaactttcttccggatttaaagccgtgttaacgatcgtcgcgcgcataattgaatgggccgaaggaacgggcgagggcgaattggccgaaattgagaaatcggtgggatccgttcttatagacgaaatcgatgtgcatcttcacccggagtggcaattcacattgcgcgacggtatgcgtcaaatgtttcccaacttgcagttcattgtcacgacgcactctcctcatgtgcttgcaagcgcgcgcgccggcgaagtcattgccatgcccgccagcgtacgagggaagtgttcgatagcgcctcagccgcatagctactcaggttggaccacggatcaaattctgactgaggtcatgggggtgaggagtcttgaaaataaacaatatgaactcttggttcatcaagcttttgattgcgtcgaggaaaaggattcagtcggtttgaagtcgatcatcggacggttacgctccatcgctcacccggacgacgcgattgtaaaagtattagacgtacgattggcatccattatcttgactgaaaatgattaa

SEQ ID NO: 89519 - DNA, 750 bp, Burkholderia sp. HB1
atgattaagttgaatcgtccagccgaacccgcgatcttatcggcgaataaatcgaaatggctttcggatttactggcagccgcaggaaagtatggatcatacaaggcaatacctgacgccgaaaaggagaagctggtttgcttctatcgacacgacgatattaagcatgctctcgaggaaagtagtctaggaaaatgcgcattctgcgagggaaagccagcagagtcgggaaatattgaagtcgagcatttcgcgccaaagtcgatccactatcagcgtacttttgactggagcaacttcttgccgtgctgtcgaaagtgtaatggatcgaaggggacgcacgatacggtggcatctcccatagtgaacccttacgaccacgatccgcgcgactatttttatttccaggacatctccctgcggccgatccgtggcgctcattacgaaattgcggcaaagactattgaggtttgtggacttgatgcaactcgtttgatgaggcctcgtgccacattgctaatctcaatacggcaatttctagctgatttaaatgaggcgctgacaaagcttagcaccgccgaatcgccccagagtcggacccgacggatgcgcaaactagccgaagccgtcgatcgcatagagaacgcgatgcttccgtcagaaagtcactccagcttcattcggtcaattgtggagaaagaagacgcctatgacgaagcaaagcgtttgatcgctggccaggagctttaa

SEQ ID NO: 89520 - DNA, 1233 bp, Photobacterium leiognathi subsp. mandapamensis
atggcaaaatacatacataaggtcagtggaataataccgaacacctataaaactatcaatattgaccttaatgggaagaatctcatcattacaggaggtaacggctcaggcaagacctgtttactaaatgaactatataaaaaaatagaccttctaattgtagaaaaactgcaagctgatctgagtacccttaaaaatgagtatgacaatcaactagcatatttatcaactctgcaaaaaggcacaacaaattattaccatgctgttaatcatctagaatatatcaaacaaaaactagatagcatcacaaaagggctagacctcaatattattaataatattgatttttccattaaattagaagacaaaaccgctatattagccttttttacagctcatagaaaaactgagattatatcggcagacactgctaaaggaattgattcagaaaaggaaaaaatcaaacttcagaataacactcaatcacttggcaataatcttgaacaacatttagtaaatcttcgaaatagacgctctttagcaatgacagaagaccaagacgacaaacttgctgacaagatctcaaattggtttaacctttttgaaaatgatctaaaattattactagaagatgaaacagcaaaactcaactttaaatctagcactctaaaatttacaatttcacaagaaaacaaacctgaatatacatttcaatctctttcgtctggttatcaagcaatttttcagatatacgctgatttacttatgcgtacagagtactttgatataactccaaaagaactggttggggtcgtactaatcgacgaaatcgatgcacacttacatgtatctctacaacgccttattcttccttttttaacaacatcttttcctaatgtacaattcattgttactacacactcaccatttgttcttatgtcagcagaagacaccgttatttatgatctttcgaagaatgagcaaattgatgatgatatatctctattttctcatacatcaattatagaaggattacttgacactaaaccttcttcacaaaaacttgataagtacattaatgaacttgcagaaataattaattctgaagacattaattacgcaagacttgaagttttattaaataagcttagagcaggcttcaacacattagacagcaagtctaaatctttctttatgcttggagaaaacgctctcttagacagggagcagtaa

SEQ ID NO: 89521 - DNA, 657 bp, Photobacterium leiognathi subsp. mandapamensis
atgtttacagttatacgatatggagatattcctgcttgtttagaaaagaatatatataattctccagaagtagttgaacgtctcgaaaacatattttatgggaaatgttacctctgcgaacaggcagatcttcaggctcctgagattgagcattttgagccccatgaaggtgacgctaccctaaaatatgattggaataacctttactattcttgtgctagatgtaatagcataaaaagtaatatccatcgaaacctagtagactgttgctcaacagatattgatgtagtccgtgctataaagtgtctcatgcctcgtactcctgatgatgatgtacatgtttcagccgaattagacgaagttcgtgttcataataccgttgcgctattagataaatgttttaatgaggaagggacagctctccgaggaatcactagatccagcctcattgaaaaactgtatgaatactttactaattttttaatgtatagacagactatcatgaacaggcactctacacctgtagccaaacgagatgcaatagaggcattagaagcaatgctgcaagaccaatacgagttctcagcattctggcgttggcatgtactaacagatcgtaaactcaaagataaagttgaaggaataattaatttctaa

SEQ ID NO: 89522 - DNA, 1185 bp, Photobacterium leiognathi subsp. mandapamensis
gtgcaaaattatcgtatatatgttggtattaatggctgtggtaagagctataaattaagagaaatagcagagaaagccttaaattatgggcgaagtgtaattgcggtatcgacttctttaaatgataagtacccgaaaatgaaagccaataagccatatttctatttgggtcatcgacttaattcttctcttgcaaaaaaagcaatcttttcttcacttgaaagacttaatgataaagatgatcctataaagttaaattccatgttaagtattctttcatatataaagatggatgagcgtattggtattaaggttgttggctttaaaagggattttgaggatctgataaataaatttgaatataatagtgataatttttttaagcttcaaaatcagcttgaaaataaagggatatcaattaatgaactactctctttatgttacaactatagaaaaatatatgatgaatcttatcaagaaattaattggattagtagatatagccgatttggagaacgttatctggatagacaatctgatacattatcaggagaaacgctttctgggttagtaaaatatgaaaaagagcttagaaaacttggtgtaattaaagaactaagagtgtttttatctaaaaaggatagcgttgttaagcttgaggatataagttctggtgagttctcacagttatatacttcaatgtttatattagcgtaccttaaagaagactctatcgttttaattgatgaaccagaaaatagtcttcatccagaatggcaacttaactacctaaaaaacctaaaaaatttattcccttatcatagttttgagtgccacatcgcaactcattcaccaatgttgatatctggagcactaaaggaggatgacgtatatgtatataggcatgacggtgagaaatttcaagaagtaaataccaaatcaggaagcatagaggatacatatatagatcaatttggaattgtcacccccgaaagtcactctttatctgagaggtgcgttgatattttaaataaatttagtgatcaggatataaattatgactatgccaaaaataaggtgaaagaaattagagctatgtcttacgatgaaaaacaggttgaatttctagatggtgtattaagactaattgataaaattcaacagaataagaatgaaaaatggtaa

SEQ ID NO: 89523 - DNA, 621 bp, Photobacterium leiognathi subsp. mandapamensis
atggtaaagaaattaaatcttaattgcgatgaaattacttcaattagacgagctgtaaagtctggtcatactgggtggtctaataaagataagtcatttaaacatgtaaaaaagaaaattaagaaaattttaaaaaaacgtactaactatagatgttgctattgtgaaagaaatttaataggagaattcgattatgttctagatatagagcatataataccaaagtcaaagtgtttaaaacatatgtttacgatgaaaaacctttctgtttcatgtaaaagatgtaatatgaaggtaaaaggatgcgatacaagctttttaaattttgatataaatttacttccaaaaaatgtttttaaaagcaaatattataaatttgtccatccaaatctagatgttcgccaagaacatattaaaatggtaacggaagacaaccacaaagttcgattagttcattatttatgtaatcctaatagtgaaaaagcaaagtatacttttgattattttaatcttaatgaatttcaaattaaagaagctaataaatctcagggtataaaaaaaagtcgaataaaagataaatggatcgatgcggagtttcaaaagcttttagataatcgataa

SEQ ID NO: 89524 - DNA, 2328 bp, Pseudomonas fuscovaginae
atgtattgcttcgaccgcagttccgttccgccaccgagcctgttgcaaagtcgggaggccaatgctgacaggcaggcattggccgactactttcttgccgacaggaccaagcgggcgcagagccgggcaccggaaccggttgtcgatctgaatgagaactcagtccgttcggggttggaccggttatttcacggtaaatgtgcgttctgcgaacgggtggttcagtctaaggcaacttatcgatttcgcccgagagcgcaagccagcccactggagcgaacttcaaacgctcacctttattatatctggctgagcagtgcctgggagaatctctacgccatttgcaaggactgcgagcctgtacggccggaccacttcccggttttggggcggcgggtagccttgccttcggcgcaagaagttgatgcctatgcacaggctggtaacggtctgtgggggggctacccactcaaggagcgtcatgtcttgatcgacccttgcgagcgggtcgacctgagccggcatctgtcggtcgatctgtcgggtgaactctacgccttgagcgagcgcgcagctgcaaccatcacacacttcaagctcaatcgtattcagttgctaaagctgcgcaaaagcaagctgaagacttacttcgacgatcttataggcaactggtctttttccttgggagaggacgattcacatcccgtgcttttcgattttgctcgaatggattttggtggctgctggtatttgctctgccgacgcattgtactgacgctttcaaagtccagggtttcagcttcggaactggccccggatcgtatcgaacacacgttgcgggcccttagcgaaagcgctgatgtcgttgagtggtatggagggttggagctcagtctggcagggactgctgtgcgcgattccagacccgttgcaaagagtgagacgttcggggcgcgtgattgcccatcgttggaatcgatccgcttcagcaacttcaagggcatagagcaacttgaattgaggatacccgccgtgccgctcaggcggtcctcgggcacaaatgctgttcggccggccctgctgattctcggtgaaaatgccgctggaaaaagctccatccttgaggccacagctttggtgctcagcagcgatctggcttgtacgaaactgccggtggactacgcctcgttgcctctggatcccgagttactgggcgcggtgcagactccccgttgcagtctggcatcggtggtagcggtgttccagggcggtagtgaacggcacctgacgatcagcgagggcgagttctggcatgaagaccgtggactgtcggttgacggtcagccgctcttgcctcaggtctttgcctatggtgcctttcggcaataccagaagcgggtcagccctcgtagcccaagtaaatcgatcatcaaccttttcgactcgacagctctgctgtccaatccggaaaaatggttgctgagtctcaaggcagatgccttcaacagtgtggttcgaaccttgcgcggcatcctctcgatcgagggctcgttcgagatcatggaacgcgacccgcagaaccagcgctgcctgatcgtcacatcggcaggcgatggccagcccctgtgccgaacgccactgagcctggcttcatcgggttaccgttcagtcctggcaatggcctgtgacatcatccagggcctgatgaatcgacgcctcaatccgcatttcgaaagcctggaaacggcacaggccgtggtactgatcgacgaggtggaagcgcacctgcatccacgctggaaaattcagatcatgcgcgcgttgcgggaggcgttgccgcaggtcactttcattgtcaccactcacgatccgctgtgcctgcgcggcatgcaggatggtgaggtgatcgtcatgcagcgtgtgtccagcgatcaacgcacggatgtccagtggccggtgatggtcgagcaactggttcgcctgccgaatgtcagccaactcacggtcgaacagctgctgacctcggacttcttcagcctggcctccactgaccagcctgagaccgagcgtgaactggccggcctggccgatctgttgaacgcgcgggagcggggcgaacggttgactgtgccgcagcaggacctgctacggcggttggaacgtgatatcagcgacgccttgccggtgggttccagcgaggttcagcggctggtgcaggaggcggtggtcgagtacctggacagccgtagacaggtctcgacacagaagcttgcccaactgcgcagcgccgccaaacagcgcatcctcggcatcctggagggcatctga

SEQ ID NO: 89525 - DNA, 1029 bp, Pseudomonas fuscovaginae
atgcgtgccgtcagccgcgacagtgtccccgtgcccgatgcgatgttgggagatgactcgccagcgaaaaaggagctgcagaaactccaggattacttcatggcgccaacgggggcgttacccgcctttgccgtctacaagtccgacagcgtgaagaaacagctgcatgagctgttccacggtaaatgcgcctactgcgagagcttctactacggcagtgccccggtggatatcgagcactaccgacccaagggccgcgtctacgaggaaccggatcatcccggctactggtggatcgccatggattgggaaaacctgctgcccagctgtattcactgcaaccggcgcagtggccaggtgacgcccacgctctcggccagtctggtcagcctggtcaatgagggacgtgatttcagccgttcacgggtggtccagaccggcaagcaggacagctttccgatcctcggtcagcgggctgcggtgggggcccgggatttttccggcgagcaggcattgctgctggacccgtgccgggatcagccacaggagcacctgcgttttcatgtcgacagcgaaaatctgatcggcctggtcctacccaagcctcatgacagcggcggtctggccctggccggtggtgtggcaggtgtccggccggagctgcgtggggtgatcgagcaggccctggcgggtgggttgagcctgcggggcgcggtgtcgatccatgtctatggcctcaaccgtctcgggctggtgcaggagcgcacgcgggtgctgcgccagttggagtttctggagatgctggcggtggaaatggggctgatggcgcaggaactggagcccgacagtgaggctccggttgtcgagagcgagcaggcgcgagcgcgcaatgaacgcattgccaggcgcctgcgttttctccaggagcagatactcggcgagatcaagaccatggctcggcccgaagcgccttactcggccatggttcgggagtggctggaggggttcagggcgcgtttgagccgctga

SEQ ID NO: 89526 - DNA, 2328 bp, Pseudomonas fuscovaginae
atgtattgcttcgaccgcagttccgttccgccaccgagcctgttgcaaagtcgggaggccaatgctgacaggcaggcgttggccgactactttcttgccgacaggaccaagcgggcgcagagccgggcaccggaaccggttgtcgatctgaatgagaactcagtccgttcggggttggaccggttatttcacggtaaatgtgcgttctgcgaacgggtggttcagtctaaggcaacttatcgatttcgcccgagagcgcaagccagcccactggagcgaacttcaaacgctcacctttattatatctggctgagcagtgcctgggagaatctctacgccatttgcaaggactgcgagcctgtacggccggaccacttcccggttttggggcggcgggtagccttgccttcggcgcaagaagttgatgcctatgcacaggctggtaacggtctgtgggggggctacccactcaaggagcgtcatgtcttgatcgatccttgcgagcgggtcgacctgagccggcatctgtcggtcgatctgtcgggtgaactctacgccttgagcgagcgcgcagctgcaaccatcacacacttcaagctcaatcgtattcagttgctaaagctgcgcaaaagcaagctgaagacttacttcgacgatcttataggcaactggtctttttccttgggagaggacgattcacatcccgtgcttttcgattttgctcggatggattttggtggctgctggtatttgctctgccgacgcattgtactgacgctttcaaagtccagggtttcagcttcggaactggccccggatcgtatcgaacacacgttgcgggcccttagcgaaagcgctgatgtcgttgagtggtatggagggttggagctcagtctggcagggactgctgtgcgcgattccagacccgtcgcaaagagtgagacgttcggggcgcgtgattgcccatcgttggaatcgatccgcttcagcaacttcaagggcatagagcaacttgaattgaggatacccgccgtgccgctcaggcggtcctcgggcacaaatgctgttcggccggccctgctgattctcggtgaaaatgccgctggaaaaagctccatccttgaggccacagctttggtgctcagcagcgatctggcttgtacgaaactgccggtggactacgcctcgttgcctctggatcccgagttactgggcgcggtgcagactccccgttgcagtctggcatcggtggtagcggtgttccagggcggtagtgaacggcacctgacgatcagcgagggcgagttctggcatgaagaccgtggactgtcggttgacggtcagccgctcttgcctcaggtctttgcctatggtgcctttcggcaataccagaagcgggtcagccctcgtagcccaagtaaatcgatcatcaaccttttcgactcgacagctctgctgtccaatccggaaaaatggttgctgagtctcaaggcagatgccttcaacagtgtggttcgaaccttgcgcggcatcctctcgatcgagggctcgttcgagatcatggaacgcgacccgcagaaccagcgctgcctgatcgtcacatcggcaggcgatggccagcccctgtgccgaacgccactgagcctggcttcatcgggttaccgttcagtcctggcaatggcctgtgacatcatccagggcctgatgaatcgacgcctcaatccgcatttcgaaagcctggaaacggcacaggccgtggtactgatcgacgaggtggaagcgcacctgcatccacgctggaaaattcagatcatgcgcgcgttgcgggaggcgttgccgcaggtcactttcattgtcaccactcacgatccgctgtgcctgcgcggcatgcaggatggtgaggtgatcgtcatgcagcgtgtgtccagcgatcaacgcacggatgtccagtggccggtgatggtcgagcaactggttcgcctgccgaatgtcagccaactcacggtcgaacagctgctgacctcggacttcttcagcctggcctccaccgaccagcctgagaccgagcgtgaactggccggcctggccgatctgttgaacgcgcgggagcggggcgaacggttgactgtgccgcagcaggacctgctacggcggttcgaacgtgatatcagcgacgccttgccggtgggttccagcgaggttcagcggctggtgcaggaggcggtggtcgagtacctggacagccgcagacaggtctcgacacagaagcttgcccaactgcgcagcgccgccaaacagcgcatcctcggcatcctggagggcatctga

SEQ ID NO: 89527 - DNA, 1029 bp, Pseudomonas fuscovaginae
atgcgtgccgtcagccgcgacagtgtccccgtgcccgatgcgatgtcgggagatgactcgccagcgaaaaaggagctgcagaaactccaggattacttcatggcgccaacgggggcgttacccgcctttgccgtctacaagtccgacagcgtgaagaaacagctgcatgagctgttccacggtaaatgcgcctactgcgagagcttctactacggcagtgccccggtggatatcgagcactaccgacccaagggccgcgtctacgaggaaccggatcatcccggctactggtggatcgccatggattgggaaaacctgctgcccagctgtattcactgcaaccggcgcagtggccaggtgacgcccacgctctcggccagtctggtcagcctggtcaatgagggacgtgatttcagccgttcacgggtggcccagaccggcaagcaggacagctttccgatcctcggtcagcgggctgcggtgggggcccgggatttttccggcgagcaggcattgctgctggacccgtgccgggatcagccacaggagcacctgcgttttcatgtcgacagcgaaaatctgatcggcctggtcctacccaagcctcatgacagcggcggtctggccctggccggtggtgtggcaggtgtccggccagagttgcgtggggtgatcgagcaggccctggcgggtgggttgagcctgcggggcgcggtgtcgatccatgtctatggcctcaaccgtctcgggctggtgcaggagcgcacgcgggtgctgcgccagttggagtttctggagatgctggcggtggaaatggggctgatggcgcaggaactggagcccgacagtgaggctccggttgtcgagagcgagcaggcgcgagcgcgcaatgaacgcattgccaggcgcctgcgttttctccaggagcagatactcggcgagatcaagaccatggctcggcccgaagcgccttactcggccatggttcgggagtggctggaggggttcagggcgcgtttgagccgctga

SEQ ID NO: 89528 - DNA, 1299 bp, Ideonella sakaiensis
atgtacatcgacaagatcagcctgaccaacctccgcggattcgacgcgctggagttctcgctggtgcggccggatggcacctacccgggctggacggtcttcaccggggacaacggctccggcaagagcacgctgctgaaggcgatcgcggtcgcgttgacgggcaaggacaccgcgcgggccctgcagcccagcttccaccgctggattcgagaagggcagcacgacgcggcgatcgagctcggcatcgcgcggatcgagagcgatgatttcctcacggaaggcgggcgcctgccggagaaggtgttccgggcccgtctggcgctgaagaacggtcagaaggagccgctgctcgaggcggccctgccgagcggcatcacgcggaagaactactcgacgccacagcgcacgatctggtcgcaggagccgaggggatggttctcgtgcgggtatgggcccttccggcgcgtcttcggtgcctcgccggaagccatgcgccagatggtcgccccgtcgacggagcgcttcgtcacgatgttccaggaggccgcttcgctcgcggaagtcgaccagtggctgcgcaacctcagccaccgatcgctcgaggcccgatcgggcgcatccgagcagcgcgacctcatcctggacgtgctccgcgacgagctgatgccgaaccagatcaccatcgaccgcatcgactccgacggcctgtggctgcgcgaccgcaacggcctgcagctgtcctggagcgagatgagcgacggctaccgcgcagcgctggcgctgctggcggacatcctgcgccacctgatcaatgtctacggcatcaccgacctgacgggccgcgatgcgcagggcaagctgttcgtcaagcgcagcggcgtggtgctcatcgacgagatcgacgcccacctgcatccggagtggcagcgggagatcggcttctggctgaagcgccactttccgaacatccagttcatcgtcaccacgcacagccccatcatctgccaggcggccgatcccaatggcctcttcgtcctgccggagcccgggagtgccgaccggccgcatcccttgagcgacgaggagtaccgcaaggtcattgcgtcgcggccggacacgatcctgctgacgtcggccttcggcctccagaacacgcgctcgccccgtgccgtggcggcgcgggcgcagtacgcggaactcaagtcgaaggagcgttccggcgccaggctgagccggagcgagcgcgagcaggtcgagcagcttcagctcttcgcgctggccgacgaggagccgtag

SEQ ID NO: 89529 - DNA, 750 bp, Ideonella sakaiensis
gtgcgccggatccaccgggtgccgctgccggccagggcccacggctacctcgagacgcggcggctggccacggcaggcccgatcgccgtcgatcgcgcctggaagcgtgcgcgacgaacccaggcgctcggcgaggtggttcgcaccttgcggtcgatggccggcccgcttgagcggtgcatgtactgcgtggattcgcacggcagcgacatcgagcacttctggccgaaggcgtcgtatgccgagcgcgcgttcgagtgggccaacctcttgctgtgctgcaccgaatgcggtcggctgaagggagaccgctttccgctgctgccgggcggccaggcggcgctggtcgatccgagcgccgaggatccctgggaccacctggacttcgatccggacacgggcaacctgacggcgcgctacgacgcggcgagtgcggccccttcggcccgcggcgccgccaccgtgaagctgctccagctggatcgccgcgaggccatgacggagggctgtcgccgcacgtatcggcgcctcgcggaccgggtccggcaggcgctggcggccagcgaggtgatcgacgccgagcagctcgcctcggatctgctgcgtctggatgaccatggactgctgggctggtgcttcgggccgatcggctcgacgctggagccattcctcgagctccgacggcgggatcctgaggcggcgcgcctgctgcgcgactcgatcgccggcgccgagaaggccccggcatga

SEQ ID NO: 89530 - DNA, 1377 bp, Pseudomonas syringae pv. maculicola
gtgaggctcgacacactgcgaatgcagaactatcgctgcttcggtgaattcgagatcgatttcgatccgcatctgaccatacttattgcctctaacggaggcggaaaaaccactattcttgacgccgcccgagtggcgctgtggcctttcgtcaagggttttgatcttggtggccagacaggaaaatccgccactatccagattgaagatgtgcgactgacccaattcggcagtggcaatatggagtcgcaggtacccagcgttatccaggcaaagggtgtctggtgggaaaacgccggtgacagcagttggctgcagcagcgcgtcagcttgaaaaaatccactaataccattggcgatgctggatcgaaagcgctgactttgtatggtaagtcgcttcaggacagcgtgcgaagcgatgcacatgtcactctgccaatggtgacttacctgggcacttccaggctatggttcgagggacgcttcagttcggcagcggctcagacaacactcgataaaagcgagtactccagaacgtccgcatacctcaattgcctgtcttattcatccagcttcaagaccttcactgcatggtacatctggatgtaccgaagctaccgtgaagctcagctgatcgctctggagcgcggcgaagaaatgtccgataccgggcagcgctttgagaaaatcatctcggctgtcaaagaagccatcgacaggttgatcaaggctcctacgggctggcacagactggaatacagtgccagtcatcaacaacaactggtcatgcaccatccggatcaggggattttacctgtcgaaatgcttagcgacgggctgcgtaacaccatcgccatggttgcggacctcgcttttcgtgcctgcaaactcaacccgcacctcggcgagctggcacccttgcaaacgccaggtatcgccttgattgatgaagtggatatgttcctgcatcccttctggcaacagacgatagttggttcattacgtgcggcttttcccgccatgcagtttattgtcaccacgcacagtccgcaggtgttgagcacggtccgacgtgaaaacattcgggtaatcggcaaagatgcccaagggcgtttgattgcgtccccaccccttgccatgacctacggtgagccgagcaacagcgtgctgcgaagtgtgatgcaggtcgatccgcagcctccggtggatgaaaagccaggcctgctacaactcacggaatgggtggacaaaggtcgctacgacgaaccacaagcgatcttgctgatgcagcagataacggaggctctaactgaacaacaccctcagttgcagcgcctgcagcgcagtataaagcggcagaaggcattgaagggatga

SEQ ID NO: 89531 - DNA, 570 bp, Pseudomonas syringae pv. maculicola
ttgtgttgctatagcgaaattcgacctgaccgggttggcctgagtttccatatagagcacgtcgaaaacaagagccaacaccctcagcgtacctttgactacaacaaccttgctgcctgtgcgctggacagtcagagtgatctggatgtgttgaagatacaaggcgctgaggtatttggtgggcacgcgtcaggtaagtcgaaaggggtcgacatggctcgcttcgtctcgtgtcacatgcccgactgctcgcgcttcttcgcctatttgtctgacggccgtgtggtgcctgctgacgggttgtcactggatgacgttgaccgagctggatacaccatcgacctgctaaaccttaacagcccttatctccaagacttgcgacaatcctggtgggatgagttggaagcgctttttgaagagcatgttgatcgagagatgagtctgcattgtctggcggggattgatctcatccctgtgggtgcgagtttaagtcagtttttcagtattacccggaatttcttcgggggtattgctgaggaagtgcttgatcaagaggctggtcgctgctaa

SEQ ID NO: 89532 - DNA, 2307 bp, Pseudomonas syringae pv. syringae
atgcagtacatacaaagggatgttccggtacctgcaattttgacaggcagcgcggcaaacgagcacagagagtttttggttcgattcatggcacagagcgaagagcaactgtcgcagaaatatccgcctgcgtcgtctctaaatctttcagatcaaagcatgagtgctgcattaaaaaggctttttataggccgctgcgccttttgcgaagcttgggcagacctgatgccgtatcgttttagaccgaagtctcagtcactgccttacgggcccagcaaatttgcacatttctattacagctggctagatattgcatggcagaatatctatcccatatgccattcatgcatgcctgcagatggagaatacttccccgtgctcggcaagcgcgctccgttacccgatatggttctttaccagcagtacgctcaagaaaataccggcatgtggcctgcttacccgctcagggagaaaccaatactcctcgacccctgttttgatcaggcgctatataaagagctcagcacccgatccgacggtagtctggtggggttatcagagcgaggcagactcacgatcgaacatttcaatcttaataccgctgtgcgcactgctgagcgctttgccagtcatcaagactatttgcggcagttggtgcagtgggttagggaggccaatgcaaaagaatccatcaaaatctttgattttaaacagctggaattcggaggcagttggtatttgctgctgcgccgattggcagtcttcgtgggagccgagacaagtagtcgccctgtattgtcaatggcagggatcgcccgcgtattcgccaagcttcgcaagattgcggacgggcgttcgcgtcttgaacagtgcatccagcaacttgccgataacgagccccaagagttttcgagcgaggacaccatcatgtacctcaagcgcccgagtacagccagtgtcactcgccttcgcttagagaacttcaagtctatcgagaatctagacatcaatctgcaaccccaaactccgactactccgttcgagggcactcggcaatttcctgcacttctcatcattggtgagaactcagcaggcaaaagcactattttggaggcgctcgccctcgggctttcatcaacccaagcgtttgttagcttggggttgaccacgaaaaacttcatcctcgccccggagtttctaggcgccgcacagccacgagtggtttctgaggctctgatcgaaatcgatatctcgaacgggtccaaacgtactttgctcatcgaacaaggcggtatcaatatccctgacgagatgcagcaggaaaatatcccggtattcgcctatggcgcgtttcgccagtatcagcaccagggcccaagctccaaacccaagccggatgcctttgtacacagcctttttgacggccgtatgctgcccaaccccgaacgatggctgctcaagctgagtaatgcccgcttcgcaatggtgatccgagccttgcgtgaaattctgtccatcgacggacgtttcgatgtcatccgtcgagacattgctagcaagcaatgctatgtcgtaacaggtattcgcgacgacggcagccctctgtctcaaagctcgttgaaagttgcttcttccggctttcgctccatcctggccatggcttgcgacgtgatgcgcggtctgatgaaccccagcatctacccggacttcgagagccttcagaccgccagagcggtagtgctcattgacgaggtcgaggcccatctgcacccacgctggaagatgcgcattatgcgtgggctacgggaggcgctacccaatgtcacttttatcgcgacgactcacgacccgttatgcatccggggcatgaacgacggcgaaatcgtggtgctgcgacgggtccaactcagacaaggcaccaccgatgcggggctgcaatcccaggttgaggcgcaaaccgacttgccgccattgtctgagctgaggatcgaacaattactaacctcggatctgttccagctgcactccacagacgatccggaaatggatcagcaattcgcgcatatcgccgatctgctggccatgccgtcggaacaacttgagccggaacaactacggacgctgaaacgattcaacgacgatgtagcatccgcgctgcccgtcggcacgtccgaagcccatcgagtggtgcaggatgccgttgctgaatacctgcaaatccgtgcacggacatctgtgcagcgagtagcggacgccaaggccagtgttaaggccaagatcatccaagcgctgaagggaattctttaa

SEQ ID NO: 89533 - DNA, 930 bp, Pseudomonas syringae pv. syringae
atgcgccgtgtcgaacgcattggaagcgtaccgtctaatctcgaatcggccaacaaaggtggcaaaaccgagcgcgaccgtgcccgcgatcaccagctcgataccaacccgaaaaaagacagttttacctacgtgggatataaacatgacgacgtcaaacgcaaacttgcagcgctgttccacaataaatgcgcctactgcgagactttcttctcggcgtccgccccagtggacgtcgagcactatcgcccaaaaggttcggttgcagatgaccctgcccacccaggctactggtggctagctatgagctgggacaacttgctgcctagttgcatcgactgcaaccgaaagcgcaaacaatacttgcccgatgcatcgaccagtctcaaggcgctttacgacagtagcaccaacgcaggcatgaacttgggcaaaggcggaaaacaggatagttttccgatccgggattccggaaaacggctcgccgccgagagttatgcctacatcgacgaggagccgcttctgctggacccgacacgtgatgatcctcgcgagcacctgcgcttcagcgtcgaccgcacatccccggtaagcttggtcttggcgggtagtgcgcccggacgagcaagcgatcgaggtgcgatgtcgatacagacttacggtctgaatcgcctcgggctggtgcaggatcggacccgattgctgcggcgtctggagtttctaggtgagatgattcttgagttagggattaccgtcgacgagctcaaagcactgcccgcccaagccgctctggacaacgccatcaaacgcttggaggtcatgcaaggccgtatgctggtggaaattaaggcgatggctgcgcccatggaaccgtactcagagatggtaggcgcctggctcaacaattatatagaacagttagaagcttga

SEQ ID NO: 89534 - DNA, 504 bp, Pseudomonas syringae pv. syringae
atgatggcgctcgtcggcgacatcgccagacgcctcgccatgatgaatccggcccttgaaaacccattgcaaggcaatggcattgtcctgattgatgaagtcgatctgcacttgcacccaaaatggcagcgcagtctcatcgcccaactcactacaacgttccccaattgccagtttctcctgaccactcattcgccgttggttatcagcgatagcaaggatgtgctggtgtacgtcatggacgatggcgagttacgcgagcaggacagtctttatggccttgatgccaatcaggttctgtcgagtgtcatggacaccggcattcgcaacgaggcagttcagacctgtctggacgagatgcagcactttttgatcaggggcgagcttgatgaggctcgtactctttacggagtgctggccgaccagttacctgcagatcacattgaactggccagggcttcgttactgattcgcaagctggaaatacgtcgtgagaaagattga

SEQ ID NO: 89535 - DNA, 651 bp, Pseudomonas syringae pv. syringae; identical to SEQ ID NO: 86097

SEQ ID NO: 89536 - DNA, 1011 bp, Pseudomonas syringae pv. syringae
gtgttgactgcccaaggtggcgcgtttgagcatcaggaatggcacgtatcgctagaacgcagcagtcttcagacaaattttagcgcgctgaacagtctcgtattttcggaaaatctgatcagcatcgacggcgctactcacggggatttgcctgtattcgccgtctatcaagccaatcgacgctggctgacgatgagtgtaaccgctgagcatgctgcacagagcaaaccatcaagactggatgcctacacctcttggttcgatgccgcttccaacttgaaaaacttcgagacctggttcatcggcaagacactggagcgctttcaaagactggccagaacgggtttccctggcattctcaccgacgaactcacctggatcaattcagctatccagtgcgcactgccggagtccaagggcatagagtacgacatggaaatgcgggggctgatggtggacattgatgaccgaaaaaccccgttcaacgacctgagcgacgggcaacgcggaatggtcgccctcttcgccgatattgcccgccgtatctgcctgctaaatccgcacatggggaaggatgttctaagcaagacaaacggcatcatcgtgatcgatgaactggacatccaccttcaccccggctggcaacgcaccattgcacccgcgctgaaaaaagcatttcccagcattcagttcatcgctgccagccactcgccacaggtcatcggcagcctgcaaccgggcgaggtcatcctgctgaataaccatgacggctctcacccaagagcaacctacggcctggactccagcagcattctggaagaagtcatgggcgtgcctcagcgtgagcctgaaattgaagagttgctcgatcagctattcagcactctggaaaacaacgagcttgaaaaagccaggtcgcagcttgatgcactgaagaagaaggcgcccgatctaccagagttcgcgggtgccgaggcgctactcaaacgcaaggagatcattggacgatga

SEQ ID NO: 89537 - DNA, 648 bp, Pseudomonas syringae pv. syringae
atgagacgcatcatcaaaggaactgagcctgcgtcattcaccgaatggaaagccagtgcaaacgaagactggacgcccacttatccaaccttgcagaacccgcaaaaacgcgacctgcatgatcgcctgctgcaagagcagaacttctcatgctgctattgcggcagggaaatagaacttgatagcagtcacatcgaacatttcagaccgcaggatcattatctgccattggcactggagttcagcaatcttcatgcgtcctgcctgcgcgagactacaccaggaagcccgttgcactgcggccactacaagggcaactggttcgatgaagacctgcacatctctccgacagaggacgattgcgaacagcgcttccgttacttgctgacagggaaaatccagagcacatcccacaccgaccttcccgccacgacgatgatcgaaaagctcgcactcgatatcgcgtatctgaccaaaagacgtcaggaggccatcacgggtgtgttcgatgaacagttcatatccagcgccagcgatgcggaactcgctaaccttgtagacagcctgcgctcgggcaccgctaatacctctattgctttcggccatgtcgttgcgcgctatgcggagcaattgctgacgcagcggtag

SEQ ID NO: 89538 - DNA, 1008 bp, Pseudomonas savastanoi
ttgactgcccaaggtggcgcgtttgagcgtcaggaatggcacgtatcgctggaacgcagcagtcttcagacaaatttcagcgcgctgaacagtctcgtattttcggaaaatctgattagcatcgatgtaagtacccacggggatttgcctgtattcgccgtctatcaagccaatcgacgctggctgacgatgagtgtaaccgctgagcttgctgcacagagcaaaccatcaagactggatgcatacacctcttggttcgatgccgcctccaatttgaaaaacttcgagacctggttcatcggcaaaacactggagcgctttcaaagactatcccgagcaggttcttccagcgttttcaacgacgaactgacctggataaactcagccatccaatgcgcactacccgacgccaagggaatagagtacgacatggagctacgtgcgttggtagtcgatatgtatgatcgaaaaatcccgttcaacgacctgagcgacggacaacgcggaatggtcgcactcttcgccgatatcgctcgccgtatctgcttgctcaacccgcacatggggaaggatgttctaagcaagacaaacggcatcatcgtcatcgatgagctcgatatccatcttcaccccggctggcaacgcaccattgctccagcactgaaaaaagcatttcccagcatccagttcatcgccgccagccactcgccacaggtcatcggcagcctgcaaccgggcgaggtcatcctgctgaataaccatgacggctctcatccaagagcaacctatggcctggactccagcactattctggaagaagtcatgggcgtactgcagcgcgagcctgaaattgaagaactgctcgacgagctattcagcacactggaaaacgacgagcttgaaaaagccagactgcagcttgatgcgttaaaacagaaagcgcccgatctgcccgagttcgcaggtgccgaagcgttgctcaaacgcaaggagctcattggacgatga

SEQ ID NO: 89539 - DNA, 684 bp, Pseudomonas savastanoi; identical to SEQ ID NO: 86199

SEQ ID NO: 89540 - DNA, 1356 bp, Pseudomonas savastanoi pv. glycinea; identical to SEQ ID NO: 86326

SEQ ID NO: 89541 - DNA, 684 bp, Pseudomonas savastanoi pv. glycinea
ttggcgcgttcacatcgcagcccacctgctaccagcgacacttccacaagccggtggagtagttttggctacaaggctcaggtactgggctgtcttttggaggagcagtacggattatgttgctatagcgaaattcgacctgaccgggttggcctgagtttccatatagagcacgtcgaaaacaagagccaaaaccctcagcgtacttttgactacaacaacctcgctgcctgcgcgctggacagtcagagcgatctggaggtattgaaaatacaaggcgctgaggtatttggtgggcacgcgtcaggtaagtcgaaaggggtcgacatggctcgcttcgtttcgtgccacatgcccgactgttcgcgcttcttcgcctatttgtctgacggccgtgtggtgcctgctgacgggttgtcaccggaggaagttgaccgagctgaatacaccatcggcctgctgaaccttaacagcccttatctccaaggcttgcgacaatcctggtgggatgagctggaagctctttttgaagagcatgttaatcaaaatatgagtctgcattgtctggcggggattgatctcatccctgtgggtgcgaacttaagtcagtttttcagcattacccggaattttttcggaggtatcgctgaagaggtccttgagcaagaggctggtcgctggtaa

SEQ ID NO: 89542 - DNA, 903 bp, Pseudomonas syringae pv. cilantro
gtgctcgccaggaacaacgcaggtgagcagattgactttccggttcttgccttctatcgcgccaatcgtcgttggagcagtgcgcgcatatctgccgagttcgcagcacagcagcggacttcccgttttgacggatatgcaaactggtttgacgccgtagccgatctgcgtgattttgaaagctggttaatcgcaaggacgcttgagcgccttcaggaccgtcttgattcaactccgactgtcgagcgtgaagatgaacttgaatgggtgaatcgagcgatcagacttgccataccggatgcccatgatctccgatatgacttgaggctacaaagcctgctcgtagatatgggggaaggcaacgccgttccgtttcacgaactcagtgatggtcaacgtagtttgattgcgttgattgcagatattgcacgacgcatgtgcgttctaaacccacacataggaaaagacgttctggcgaataccggtggcatcgtgattattgatgagctcgatattcatctgcacccggcctggcaacgcaacattgcgccgacgcttaaaaaagcattccccaaagtgcaattcatcgccacaagccactcgcctcaagttattggcagcctgcaaccgggcgaggtcatcctgctgaagaatggcgacagctctcacccgcgagcaacctatggcctggactccagcaccattttggaggaagtcatgggcgtaccgcagcgcgaacccgaaattgaagtgttgcttgatgagctgttcagcacactggaaaacaatgagcttgaaaaagccaggttgcagcttgatgcgctaaagaaaaaagcccccgatttacccgagttcgcaggtgctgaagcactgctcaagcgcaaggagcttattggacgatga

SEQ ID NO: 89543 - DNA, 645 bp, Pseudomonas syringae pv. cilantro
atgagacgcatcatcaaaggaactgagcctgcgtcatttaccgaatggaaagccagcgcaaatgaagactggatgcccacttacccaaccttgcagaacccacaaaaacgcgaattacataacagcctgctacaagagcagcatttttcttgctgctattgcggcagggaaatagaacttgatagcagccacatcgaacatttcaaaccccaggagcactacctgccactggcgctggagtacagcaatctccatgcgtcctgcctgcgcgagaccaaaccaggaaacccgctgcattgcggacatcacaagagcaactggttcgatgaaacgctgcacatctttccactggcagacgattgcgaacagcgatttcgctatctgctgacaggaaaaattcaaaacactgaatccgcagaccttcccgccgccacgatgatcgagaaactcgcactcgatatcgcctacctgacaagaagacgtcaggaagctatcacaggcatttttgatgaacagttcatattgagcgccagtgaggcggagttgacgcatctggtgcagagtttgcgctcaggagatgccggcaagcaggtggcctttggccacgtcgtggcccgttatgcggagcagtttttgacgccgtaa

SEQ ID NO: 89544 - DNA, 1359 bp, Pseudomonas syringae pv. cilantro
atggaaatcaaaagcttcaggctcatcaatgtggggcgtttcagtgatctggaggtcgcactggcgccgaccgaacggcatgcgtcgagggtaaccgtgctggtggggaataatggcgcggggaaaacgacgctgctcaggtctgtcgccacatcattgagctggctggtggcgagggtcaggacgcctaaaggtgttggtagtcggattgatgaggacacgattcaggccggtgcagtaacgtcctcgattcttattgatgcatacgatgatctgattctgcatcctctggtaagtgggcctgagtaccattggggaattacgaccacaaggaaaggacgtaaccccacctcatctaccgtattgaacgagttaaactggttggcggatggctaccgctcaaagttaacctctaaaatcgatgcgtctcttccgattctggccttctatccagttgaacgctcggtgcttgatgtacagccaaaaattcacggcaaacggacttttgatcaactggacggctacgacaacgccttgggtcgtggggtggattttcgtcggtttttcgaatggttcagggagcgcgaagacagcgaaaatgaaacgggcatctcgacagagctgcttaatgaactgtctcaaaagatcctggtggatacagaactctggaaagtactgaccagagaacatgcctcgtcgcgtgaccgccagctgacggcggtcagaaatgcggtcgcagccttcatgcccggcttcacaaacctgcgcgtcaagcgcaagccgcgcctgcatatggcaatcgataaagacggccagacgctgaacgtgtctcagctgtcccagggcgaaaagtccatgatggcgctcgtcggcgatatcgccagacgcctggccatgatgaatccggccctcgaaaatcccctgcatggcaatggcatcgtgctgatcgatgaagtcgacctgcacttgcatcccaagtggcagcgcagcctgatcgcccaactcaccaccacattcccgaactgccagttcctcctgaccacgcattcgccgctggtcatcagcgacagcaaggatgtgctggtgtatgtcatggacgatggcgaattgcgcgagcaagacagcctttacgggcttgatgccaatcaggtgttgttgagtgtcatggacacagatattcgcaatgctgctgtccagaaacgtctggacagacttcaagaattgctgatggctggcgatctggaggaggttcgctcgctatacaagaagctggccattgacctgccatccgggcacatcgagctggcaaaggcttccttactaatccgcaagctggaattacgccgtgcgaaagattga

SEQ ID NO: 89545 - DNA, 624 bp, Pseudomonas syringae pv. cilantro
gtggtcctggagcagtgggcgcgctcgaacaagggaaagaaatacgaagatctggtcgaccgggacgatatcaaggatgccattcgacatgcctgtgtccgagagcaacatggtttgtgtgcgtactgctgtcgcagaatcacgctcgaaaaaaccagtgctcacaacgagcacgttgaagctcagcgcctggcaccccaccgcacactcgactttaagaatatcgttgccagctgcaatcagccgggtcgatgtggcaaagcgcatggtcaccagttattgcgtttgacgccacttatggtggagtgcgagacggaattgcagttcgagttgtccgggttggtgcgaggcaacaccgaccgagctcaagactgtatcaatgtgcttaatcttggcagtgatcaagcctccaacaagtggttgatcagcgagcgtaaagcaatgatcgataatttgctgtattcacagggcatgaactcttcaggactgggtctggagagcgatgacgtactcgatttgttgcatgatgagttattggttcctgatgaacaacaacagctccaggccttttcccctgttctggtcaatgtgattcgtcggctcaaggctttgcaggcctcctga

SEQ ID NO: 89546 - DNA, 1377 bp, Pseudomonas syringae pv. cilantro
gtgaggctcgacacactgcgaatgcagaactatcgctgcttcggtgaactcgagatcgatttcgatccgcatctgaccgtacttattgcgtccaacggaggcggaaaaaccaccattcttgacgccgcccgagtggcgctgtggcctttcgtcaagggttttgatcttggtggccagacaggaaaatccgccactatccagattgaagatgtgcgactgacccagttcggcagtggcaatatggagtcgcaggtacccagtgttatcgaggcaaaaggagtctggtgggaaaacgccggtgacagtagctggctgcagcagcgcgtcagcttgaaaaagtccactaacaccattggcgatgcgggatcgaaagcgctgactttgtatggtaagtcgcttcaggacagtgtgcgaagcgatgcacgtgtcactctgccaatggtgacctacctgggtacttccaggctatggttcgagggacgcttcagttcggcagcggctcagacaacactcgataaaagcgagtactccagaacgtccgcatacctcaattgcctgtcttattcatctagcttcaagaccttcactgcatggtacatctggatgtaccgtagctaccgtgaagctcagttgatcgctctggagcgcggcgaagaaatgtccgatgccgggcagcgctttgagaaaatcatctcagctgtcaaagaagccatcgacaggttgatcaaggctcctacgggctggcacagactggaatacagtgccagtcatcaacaacaactggtcatgcaccatccggatcaggggattttacctgtcgaaatgcttagcgatgggctgcgtaacacgatcgccatggttgcggacctcgcttttcgtgcctgcagactcaacccgcacctcggcgagctggcacccttgcaaacgccaggtatcgccttgattgatgaagtggatatgttcctgcatcccttctggcaacagacgatagtaggttcattacgtgcggcttttcccgccatgcagtttattgtcaccacacacagtccgcaggtgttgagcacggtccgacgtgaaaacattcgtgtaatcggcaaagatgcccaagggcgtttgattgcgtcccggccccttgccatgacctacggtgagccgagcaacagcgtgctgcgaagcgtgatgcaggtcgatccgcagcctccggtggatgaaaagccaggcctgctacaactcacagaatgggtggacaaaggtcgctacaacgaaccacaggcgatcttgctgatgcagcagataacggaggctctaactgagcaacaccctcagctgcagcgcctgcagcgcagtataaagcggcagaaggcattgaagggatga

SEQ ID NO: 89547 - DNA, 570 bp, Pseudomonas syringae pv. cilantro
ttgtgttgctacagcgaaattcgacctgaccggcttggcctgagtttccatatagaacacgtcgaaaacaagagccaacaccctcagcggacttttgactataacaacctcgctgcctgcgcgctggacagtcagagcgatctggaggtgttgaagatacaaggcgccgaagtatttggtgggcacgcgtcaggtaagtcgaaaggggtcgacatggctcgcttcgtctcgtgtcacatgcccgactgctcgcgcttcttcgcctatttgtctgacggccgtgtggtgcctgctgacgggttgacactggatgaagttgaccgagctgggtacaccatcgacctgctaaaccttaacagcccttatctccaggacttgcggcaatcctggtgggatgagttggaaacactttttgaagaccatgttgatcaagatatgagtctgcattgtctggcggggattgatctcattcctgtgggtgcgagtttaagtcagtttttcagtattacccggaattttttcgggggtattgctgaagaggtccttgctcaagaggccggtcgctgctaa

SEQ ID NO: 89548 - DNA, 1077 bp, Pseudoalteromonas sp. SW0106-04
gtgaatggaagacacattgatcaaaagtacggtatatttcttataactggtgataatggaactgggaagacccgattccttactaaattatcgcaacgtattaaaaaagacctttcgaaacaaatatgtctgtacgataaacttatctgcctttctggaacggtgtatgaaaagtacccaaaaccggataaaaaccctgcatatttttccagcaatagttactattattttggttacaaagccaataataacatgttttcagaaataactcctttcagggccattttgaactccatgttcagtaacgctggattagtggaagaaaggagcggctacgttgctaaacttctcaaagagattgggtttagctctgagataaaattagattttcgatgggctcgaaactctagagaaaatgaaagcttcacgcctttaatactagatttcgacaaggatacaactcgattatatgagcactcagtaaaagagttgatatttcaagagaaggctcacttgaagactatatttttcatcaaaaatggaaatgacataccaatttcaggccttagctcaggtgaaagattattccttattaccattctatctctttgctttactgtgacaaataattcattgactatttttgatgaacctgaaaattcgatgcacccaaagtggcaagaaaaaatcactcgagttttgtgtaatattttccaaagatatgctccgaattcagcactttatattgcgacacactccccattagttttgtctagtgtaccaaatgaattagctcacatatttaataggcgcaccaaagcaccctcagctgaaaatgcaaaatacaatggtaataatgttgacacagtacttaaacaacactttggtttaaagtcagctcgttcactggaatttatcgaagcaatgcaaagctgtttaacagctatgacacaccaacacattgacttcaagaaaaaatttgaaacacttaaagaaatgcaaatttctttagatgagaacgatcctctgtatgatgcatacaacaccataacagcttttgctgaggaaacattatga

SEQ ID NO: 89549 - DNA, 693 bp, Pseudoalteromonas sp. SW0106-04
atgaacctcggcccaagcaaattaagcgtaacctgtcatagaaaaatcattaacagaaagcagaacaaaaagttgatccaagaatatttggctggaaaattaaaatggtctgataaaagtttagctaaattaaagaagtccgttagacaacagctgagggtatcacaacagggaaggtgtattttctgccgtagggtcattaaaggcgaacgaagaaatgttaacgaagacattgagcattttttggataagtcaaaatcatattaccgacggtggacatttagcgctgtaaatttaacactcgcgtgtagagcttgtaacttcgtaaaaagtactaaggatttgggggattcgaaagtacagcgctccaaagggctttattccggagtaggtactttcaaatggattcatccatattttgatagttatcacgataatatagagattaaaaaaggctgggtatacatagtcaaaaaaggaagccctagagcgcatgctgcgacaaccatgattaaacaatgtgaactagataaaatagagaccattgagaaaaatagtgagtgtataaaagccagacaactcaggcttacaatcctagcttcaaaggctctaagtaaaggacaactagcacgatcaaaaaagcttttggatcagcttaagattgaacaaaatttgaactggtttgattactga

SEQ ID NO: 89550 - DNA, 1311 bp, Pseudomonas amygdali pv. lachrymans
gtgaggctcgacacactgcgaatgcagaactatcgctgcttcggtgaattcgagatcgacttcgatccgcatctgaccatacttattgcctccaacggaggcggaaaaaccactattcttgatgccgctcgagttgcgctgtggcctttcgtcaagggttttgatcttggcggtcagacaggaaaatccgccactattcagattgaagatgtgcgactggcccaattcggcagtggcaatatggagtcgcaggtacccagcgttatcgaggcaaagggcgtctggtgggaaagcgccgttgaaagtagctgggtgcagcagcgcgtcagcctgaaaaagtccactaacactattggcgatgctggatcgaaagcactgacttcgtacggtaagtcgcttcaggaccgtgtgcgaagcgatgcacatgtcactctgccaatggtgagttaccttggcacttccaggctatggttcgagggacgcttcagttcggcggcggctcagacaacactcgataaaagtgagtactccagaacgtccgcatacctaaattgcctgtcttattcatccagtttcaagaccttcaccgcatggtacatctggatgtaccgcagctatcgtgaagctcagttgatagctctggagcgcgatgaagaaatgtctgatgccgggcagcgctttgagaaaatcatctcagctgtcaaagaagccatcgacaggttgataaaggctcctacggggtggcacagactggaatacagtgccagtcatcaacagcaactggttatgcatcatccggaccagggggttttacctgtcgaaatgcttagcgatgggctgcgtaacactatcgccatggttgcggacctcgcttttcgtgcctgcaaactcaacccgcacctcggcgagagggcgcccttgcaaacgccaggtatcgccttgattgatgaagtggatatgtttctgcatcccttctggcaacagacgatagtcggttcattacgtgcggcttttcccgccatgcagtttattgtcaccacccacagtccgcaggtgttgagtacagtccgacgcgaaaatattcgggtgatcggtaaagatgcccaagggcgtttgattgcatcccggccccttgccatgacctacggtgaaccgagcaacagcgtgctgcgaagcgtgatgcaggtcgatccgcagcctccggtggatgaaaagccgggcctgctacaactcacggaatgggtggacaaaggtcgctatgacgaaccacaggcgatcttgctgatgcagcagataacggactctcactga

SEQ ID NO: 89551 - DNA, 588 bp, Pseudomonas amygdali pv. lachrymans; identical to SEQ ID NO: 86103

SEQ ID NO: 89552 - DNA, 864 bp, Pseudomonas amygdali pv. lachrymans
ttgcctgtattcgccgtctatcaagccaatcgacgctggctgacgatgagtgtaaccgctgagcttgctgcacagagcaaaccatcaagactggatgcgtacacctcttggttcgatgccgcctccaatttgaaaaacttcgagacctggttcatcggcaaaacactggagcgctttcaaaggctatcccgagcaggttcttccagcgttttcaacgacgaactgacctggataaactcagccatccaatgcgcactacccgacgccaagggaatagagtacgacatggagctacgtgcgttggtagtcgatatggatgaccgaaaaatcccgttcaacgacctgagcgacggacaacgcggaatggtcgcactcttcgccgatatcgctcgccgtatatgcctgctcaacccgcacatggggaaggatgtgctaagcaagacaaacggcatcatcgtcatcgatgaactcgatatccatcttcaccccggctggcaacgcaccattgctccagcactgaaaaaagcatttcccagcatccagttcatcgccgccagccactcgccacaggtcatcggcagcctgcaaccgggcgaggtcatcctgctgaataaccatgacggctctcatccaagagcaacctatggcctggactccagcactattctggaagaagtcatgggcgtaccgcagcgcgagcctgaaattgaagcactgctcgacgagctattcagcacactggaaaacaacgagcttgaaaaagccagactgcagcttgatgcgttaaaacagaaagcgcctgatctgcccgagttcgcaggtgccgaagcgttgctcaaacgcaaggagctcattggacgatga

SEQ ID NO: 89553 - DNA, 684 bp, Pseudomonas amygdali pv. lachrymans; identical to SEQ ID NO: 86101

SEQ ID NO: 89554 - DNA, 2118 bp, Pseudomonas amygdali pv. lachrymans; identical to SEQ ID NO: 86086

SEQ ID NO: 89555 - DNA, 1098 bp, Pseudomonas amygdali pv. lachrymans; identical to SEQ ID NO: 86087

SEQ ID NO: 89556 - DNA, 903 bp, Pseudomonas amygdali pv. lachrymans; identical to SEQ ID NO: 86088

SEQ ID NO: 89557 - DNA, 645 bp, Pseudomonas amygdali pv. lachrymans; identical to SEQ ID NO: 86089

SEQ ID NO: 89558 - DNA, 819 bp, Pseudomonas amygdali pv. lachrymans
atgagtgtaaccgctgagcttgctgcacagagcaaaccatcaagactggatgcgtacacctcttggttcgatgccgcctccaatttgaaaaacttcgagacctggttcatcggcaaaacactggagcgctttcaaaggctatcccgagcaggttcttccagcgttttcaacgacgaactgacctggataaactcagccatccaatgcgcactacccgacgccaagggaatagagtacgacatggagctacgtgcgttggtagtcgatatggatgaccgaaaaatcccgttcaacgacctgagcgacggacaacgcggaatggtcgcactcttcgccgatatcgctcgccgtatatgcctgctcaacccgcacatggggaaggatgtgctaagcaagacaaacggcatcatcgtcatcgatgaactcgatatccatcttcaccccggctggcaacgcaccattgctccagcactgaaaaaagcatttcccagcatccagttcatcgccgccagccactcgccacaggtcatcggcagcctgcaaccgggcgaggtcatcctgctgaataaccatgacggctctcatccaagagcaacctatggcctggactccagcactattctggaagaagtcatgggcgtaccgcagcgcgagcctgaaattgaagcactgctcgacgagctattcagcacactggaaaacaacgagcttgaaaaagccagactgcagcttgatgcgttaaaacagaaagcgcctgatctgcccgagttcgcaggtgccgaagcgttgctcaaacgcaaggagctcattggacgatga

SEQ ID NO: 89559 - DNA, 684 bp, Pseudomonas amygdali pv. lachrymans; identical to SEQ ID NO: 86101

SEQ ID NO: 89560 - DNA, 1425 bp, Pseudomonas amygdali pv. lachrymans
atggctatgctctttgtgtcgcctttttatggtttgcatttagtatgctgtcccaactgcaacggaaggtgttttccatatgcttggccagatgacgaaaccggagaaaatattgtgaggctcgacacactgcgaatgcagaactatcgctgcttcggtgaattcgagatcgacttcgatccgcatctgaccatacttattgcctccaacggaggcggaaaaaccactattcttgatgccgctcgagttgcgctgtggcctttcgtcaagggttttgatcttggcggtcagacaggaaaatccgccactattcagattgaagatgtgcgactggcccaattcggcagtggcaatatggagtcgcaggtacccagcgttatcgaggcaaagggcgtctggtgggaaagcgccgttgaaagtagctgggtgcagcagcgcgtcagcctgaaaaagtccactaacactattggcgatgctggatcgaaagcactgacttcgtacggtaagtcgcttcaggaccgtgtgcgaagcgatgcacatgtcactctgccaatggtgagttaccttggcacttccaggctatggttcgagggacgcttcagttcggcggcggctcagacaacactcgataaaagtgagtactccagaacgtccgcatacctaaattgcctgtcttattcatccagtttcaagaccttcaccgcatggtacatctggatgtaccgcagctatcgtgaagctcagttgatagctctggagcgcgatgaagaaatgtctgatgccgggcagcgctttgagaaaatcatctcagctgtcaaagaagccatcgacaggttgataaaggctcctacggggtggcacagactggaatacagtgccagtcatcaacagcaactggttatgcatcatccggaccagggggttttacctgtcgaaatgcttagcgatgggctgcgtaacactatcgccatggttgcggacctcgcttttcgtgcctgcaaactcaacccgcacctcggcgagagggcgcccttgcaaacgccaggtatcgccttgattgatgaagtggatatgtttctgcatcccttctggcaacagacgatagtcggttcattacgtgcggcttttcccgccatgcagtttattgtcaccacccacagtccgcaggtgttgagtacagtccgacgcgaaaatattcgggtgatcggtaaagatgcccaagggcgtttgattgcatcccggccccttgccatgacctacggtgaaccgagcaacagcgtgctgcgaagcgtgatgcaggtcgatccgcagcctccggtggatgaaaagccgggcctgctacaactcacggaatgggtggacaaaggtcgctatgacgaaccacaggcgatcttgctgatgcagcagataacggactctcactga

SEQ ID NO: 89561 - DNA, 684 bp, Pseudomonas amygdali pv. lachrymans
ttggcgcgttcacatcgcagcccacctgctaccagcgacacttccacaagccggtggagtagttttggctacaaggctcaggtactgggctgtcttttggaggagcagtacggattatgttgctatagcgaaattcgacctgaccgggttggcctgagtttccatatagagcacgtcgaaaacaagagccaaaaccctcagcgtacttttgactacaacaacctcgctgcctgcgcgctggacagtcagagcgatctggaggtattgaaaatacagggcgctgaggtatttggtgggcacgcgtcaggtaagtcgaaaggggtcgacatggctcgcttcgtttcgtgtcacatgcccgactgttcgcgcttcttcgcctatttgtctgacggccgtgtagtgcctgctgacgggttgtcaccggaggaagttgaccgagctgaatacaccatcggcctgctgaaccttaacagcccttatctccaaggcttgcgacaatcctggtgggatgagctggaagctctttttgaagagcatgttaatcaaaatatgagtctgcattgtctggcggggattgatctcatccctgtgggggcgaacttaagtcagtttttcagcattacccggaattttttcggaggtatcgctgaagaggtccttgagcaagaggctggtcgctggtaa

SEQ ID NO: 89562 - DNA, 903 bp, Pseudomonas syringae pv. maculicola; identical to SEQ ID NO: 86088

SEQ ID NO: 89563 - DNA, 645 bp, Pseudomonas syringae pv. maculicola; identical to SEQ ID NO: 85895

SEQ ID NO: 89564 - DNA, 903 bp, Pseudomonas syringae pv. maculicola; identical to SEQ ID NO: 86088

SEQ ID NO: 89565 - DNA, 645 bp, Pseudomonas syringae pv. maculicola; identical to SEQ ID NO: 86089

SEQ ID NO: 89566 - DNA, 1359 bp, Pseudomonas amygdali pv. mellea; identical to SEQ ID NO: 85918

SEQ ID NO: 89567 - DNA, 621 bp, Pseudomonas amygdali pv. mellea; identical to SEQ ID NO: 85919

SEQ ID NO: 89568 - DNA, 1368 bp, Pseudomonas amygdali pv. mellea
gtgaggctcgacacactgcgaatgcagaactatcgctgcttcggtgaattcgagatcgacttcgatccgcatctgaccatacttattgcctccaacggaggcggaaaaaccactattcttgatgccgctcgagttgcgctgtggcctttcgtcaagggttttgatcttggcggtcagacaggaaaatccgccactattcagattgaagatgtgcgactggcccaattcggcagtggcaatatggagtcgcaggtacccagcgttatcgaggcaaagggcgtctggtgggaaagcgccgttgaaagtagctggctgcagcagcgcgtcagcctgaaaaagtccactaacactattggcgatgctggatcgaaagcactgacttcgtacggtaagtcgcttcaggagtgtgtgcgaagcgatgcacatgtcactctgccaatggtgacttaccttggcacttccaggctatggttcgagggacgcttcagttcggcggcggctcagacaacactcgataaaagtgagtactccagaacgtccgcatacctaaattgcctgtcttattcatccagtttcaagaccttcaccgcatggtacatctggatgtaccgcagctatcgtgaagctcagttgatcgctctggagcgcgatgaagaaatgtctgatgccgggcagcgctttgagaaaatcatctcagctgtcaaagaagccatcgacaggttgataaaggctcctacggggtggcacagactggaatacagtgccagtcatcaacagcaactggtcatgcatcatccggaccagggggttttacctgtcgaaatgcttagcgatgggctgcgtaacactatcgccatggttgcggacctcgcttttcgtgcctgcaaactcaacccgcacctcggcgagagggcgcccttgcaaacgccaggtatcgccttgattgatgaagtggatatgtttctgcatcccttctggcaacagacgatagtcggttcattacgtgcggcttttcccgccatgcagtttattgtcaccacgcacagcccgcaggtgttgagtacggtccgacgcgaaaatattcgggtgatcggtaaagatgcccaagggcgtttgattgcatcccggccccttgccatgacctacggtgagccgagcaacagcgtgctgcgaagcgtgatgcaggtcgatccgcagcctccggtggatgaaaagccgggcctgctacaactcacggaatgggtggacaaaggtcgctatgacgaaccacaggcgatcttgctgatgcagcagataacggaggctctcactgaacaacaccctcaactgcagcgcagcataaagcggcagaaggcattgcggggatga

SEQ ID NO: 89569 - DNA, 588 bp, Pseudomonas amygdali pv. mellea
ttggaggagcagtacggattatgttgctatagcgaaattcgacctgaccgggttggcctgagtttccatatagagcacgtcgaaaacaagagccaaaaccctcagcgtacttttgactacaacaacctcgctgcctgcgcgctggacagtcagagcgatctggaggtattgaaaatacaaggcgctgaggtatttggtgggcacgcgtcaggtaagtcgaaaggggtcgacatggctcgcttcgtttcgtgtcacatgcccgactgttcgcgcttcttcgcctatttgtctgacggccgtgtggtgcctgctgacgggttgtcaccggaggaagttgaccgagctgaatacaccatcggcctgctgaaccttaacagcccttatctccaaggcttgcgacaatcctggtgggatgagctggaagctctttttgaagagcatgttaatcaaaatatgagtctgcattgtctggcggggattgatctcatccctgtgggtgcgaacttaagtcagtttttcagcattacccggaattttttcggaggtatcgctgaagaggtccttgagcaagaggctggtcgctggtaa

SEQ ID NO: 89570 - DNA, 819 bp, Pseudomonas amygdali pv. mellea
atgagtgtaaccgctgagcttgctgcacagagcaaaccatcaagactggatgcgtacacctcttggttcgatgccgcctccaatttgaaaaacttcgagacctggttcatcggcaaaacactggagcgctttcaaaggctatcccgagtaggttcttccagcgttttcaacgacgaactgacctggataaactcagccatccaatgcgcactacccgacgccaagggaatagagtacgacatggagctacgtgcgttggtagtcgatatggatgaccgaaaaatcccgttcaacgacctgagcgacggacaacgcggaatggtcgcactcttcgccgatatcgctcgccgtatctgcctgctcaacccgcacatggggaaggatgttctaagcaagacaaacggcatcatcgtcatcgatgaactcgatatccatcttcaccccggctggcaacgcaccattgctccagcactgaaaaaagcatttcccaacatccagttcatcgccgccagccactcgccacaggtcatcggcagcctgcaaccgggcgaggtcatcctgctgaataaccatgacggctctcacccaagagcaacctacggcctggactccagcagtattctggaagaagtcatgggtgtaccgcagcgcgagcctgaaattgaagcactgctcgacgagctattcagcacactggaaaacaacgaacttgaaaaagccagactgcagcttgatgcgttaaagcagaaagcgcccgatctgcccgagttcgcaggtgccgaagcgttgctcaaacgcaaggagctcattggccgatga

SEQ ID NO: 89571 - DNA, 645 bp, Pseudomonas amygdali pv. mellea; identical to SEQ ID NO: 85917

SEQ ID NO: 89572 - DNA, 1008 bp, Pseudomonas amygdali pv. myricae
ttgactgcccaaggtggcgcgtttgagcgtcaggaatggcacgtatcgctggaacgcagcagtcttcagacaaatttcagcgcgctgaacagtctcgtattttcggaaaatctgattagcatcgatgtaagtacccacggggatttgcctgtattcgccgtctatcaagccaatcgacgctggctgacgatgagtgtaaccgctgagcttgctgcacagagcaaaccatcaagactggatgcgtacacctcttggttcgatgccgcctccaatttgaaaaacttcgagacctggttcatcggcaaaacactggagcgctttcaaaggctatcccgagcaggttcttccagcgttttcaacgacgaactgacctggataaactcagccatccaatgcgcactacccgacgccaagggaatagagtacgacatggagctacgtgcgttggtagtcgatatggatgaccgaaaaatcccgttcaacgacctgagcgacggacaacgcggaatggtcgcactcttcgccgatatcgctcgccgtatctgcttgctcaacccgcacatggggaaggatgttctaagcaagacaaacggcatcatcgtcatcgatgaactcgatatccatcttcaccccggctggcaacgcaccattgctccagcactgaaaaaagcatttcccagcatccagttcatcgccgccagccactcgccacaggtcatcggcagcctgcaaccgggcgaggtcatcctgctgaataaccatgacggctctcatccaagagcaacctatggcctggactccagcactattctggaagaagtcatgggcgtaccgcagcgcgagcctgaaattgaagcactgctcgacgagctattcagcacactggaaaacgacgagcttgaaaaagccagactgcagcttgatgcgttaaaacagaaagcgcccgatctgcccgagttcgcaggtgccgaagcgttgctcaaacgcaaggagctcattggacgatga

SEQ ID NO: 89573 - DNA, 684 bp, Pseudomonas amygdali pv. myricae
atgagacgcgttatcaagggaactgagcctgcgtcactcaccgaatggaaagccagcgcacacgaagactggacgcccacctatccaaccctgcagaacccgcaaaaacgcgacttgcataattgcttgctgcaagagcagaacttctcatgctgctattgcggcagggaaatagagcttgatagcagccacatcgaacatttcagaccgcaggatcattatctgccattggcactggaatacagcaatcttcatgcgtcttgcctgcgcgagaccacaccaggaaacccgttgcactgcggccactataaaggcaactggttcgatgaggacctgcacatttccccgacagaggacgattgcgaacagcgcttccgttatctgctcacagggaaaatccaaagcacgtcccacacagatcttcccgccacgacgatgatcgaaaagctcgcactcgatatcgcgtatctgacaaaaagacgccaagaggcaatcacgcgcgtgtttgatgagcaaatcttagccagcatcagcgacacagagttgacacttttggtacaaggcctccgctctggggatgccaacaaacagctcgcctttagccacgttgtcgcccgctatgcggagcagtttctggcgtctttaaaccctcctcccgaaaaaagctcggtcaagaatacgtga

SEQ ID NO: 89574 - DNA, 819 bp, Pseudomonas savastanoi pv. phaseolicola; identical to SEQ ID NO: 89570

SEQ ID NO: 89575 - DNA, 645 bp, Pseudomonas savastanoi pv. phaseolicola; identical to SEQ ID NO: 85917

SEQ ID NO: 89576 - DNA, 1359 bp, Pseudomonas savastanoi pv. phaseolicola; identical to SEQ ID NO: 85918

SEQ ID NO: 89577 - DNA, 621 bp, Pseudomonas savastanoi pv. phaseolicola; identical to SEQ ID NO: 85919

SEQ ID NO: 89578 - DNA, 1347 bp, Pseudomonas savastanoi pv. phaseolicola
atgcagaactatcgctgcttcggtgaattcgagatcgacttcgatccgcatctgaccatacttattgcctccaacggaggcggaaaaaccactattcttgatgccgctcgagttgcgctgtggcctttcgtcaagggttttgatcttggcggtcagacaggaaaatccgccactattcagattgaagatgtgcgactggcccaattcggcagtggcaatatggagtcgcaggtacccagcgttatcgaggcaaagggcgtctggtgggaaagcgccgttgaaagtagctggctgcagcagcgcgtcagcctgaaaaagtccactaacactattggcgatgctggatcgaaagcactgacttcgtacggtaagtcgcttcaggagtgtgtgcgaagcgatgcacatgtcactctgccaatggtgacttaccttggcacttccaggctatggttcgagggacgcttcagttcggcggcggctcagacaacactcgataaaagtgagtactccagaacgtccgcatacctaaattgcctgtcttattcatccagtttcaagaccttcaccgcatggtacatctggatgtaccgcagctatcgtgaagctcagttgatcgctctggagcgcgatgaagaaatgtctgatgccgggcagcgctttgagaaaatcatctcagctgtcaaagaagccatcgacaggttgataaaggctcctacggggtggcacagactggaatacagtgccagtcatcaacagcaactggtcatgcatcatccggaccagggggttttacctgtcgaaatgcttagcgatgggctgcgtaacactatcgccatggttgcggacctcgcttttcgtgcctgcaaactcaacccgcacctcggcgagagggcgcccttgcaaacgccaggtatcgccttgattgatgaagtggatatgtttctgcatcccttctggcaacagacgatagtcggttcattacgtgcggcttttcccgccatgcagtttattgtcaccacgcacagcccgcaggtgttgagtacggtccgacgcgaaaatattcgggtgatcggtaaagatgcccaagggcgtttgattgcatcccggccccttgccatgacctacggtgagccgagcaacagcgtgctgcgaagcgtgatgcaggtcgatccgcagcctccggtggatgaaaagccgggcctgctacaactcacggaatgggtggacaaaggtcgctatgacgaaccacaggcgatcttgctgatgcagcagataacggaggctctcactgaacaacaccctcaactgcagcgcagcataaagcggcagaaggcattgcggggatga

SEQ ID NO: 89579 - DNA, 588 bp, Pseudomonas savastanoi pv. phaseolicola; identical to SEQ ID NO: 89569

SEQ ID NO: 89580 - DNA, 819 bp, Pseudomonas savastanoi pv. phaseolicola; identical to SEQ ID NO: 89570

SEQ ID NO: 89581 - DNA, 645 bp, Pseudomonas savastanoi pv. phaseolicola; identical to SEQ ID NO: 85917

SEQ ID NO: 89582 - DNA, 1368 bp, Pseudomonas savastanoi pv. phaseolicola; identical to SEQ ID NO: 89568

SEQ ID NO: 89583 - DNA, 588 bp, Pseudomonas savastanoi pv. phaseolicola; identical to SEQ ID NO: 89569

SEQ ID NO: 89584 - DNA, 1359 bp, Pseudomonas savastanoi pv. phaseolicola; identical to SEQ ID NO: 85918

SEQ ID NO: 89585 - DNA, 621 bp, Pseudomonas savastanoi pv. phaseolicola; identical to SEQ ID NO: 85919

SEQ ID NO: 89586 - DNA, 954 bp, Pseudomonas savastanoi pv. phaseolicola
ttgactgaaaaaagtgatacgtctcttcctcttctggctttctaccccgtcgagcgctctgtcatcgagataccgctcaaagtccacgccagacatacctttgatcaactcgacggctacgacaacgccttggggcgtggcgtggattttcgccgctttttcgagtggtttcgggagcgcgaagacagcgagaatgaaacgggtatctcgatagagttgctgaatgagctgtctcaaaagatcttgattgatacagaactctggaaagtgctgaccagggagcatgcctcttcacgtgaccgtcagctgactgcggtcagaactgcggttgaggcgttcatgccaggcttcacaaaactgcgtgtcaagcgtaagccgcgcttgcacatggctattgataaagacggcaagacgctaaacgtatcccagctgtcccaaggcgaaaaatcgatgatggcgctcgtcggcgacatcgccagacgcctcgccatgatgaacccggcgctggaaaacccattacatggcaatggcatcgtcctgatcgacgaagttgatctgcacctgcaccccaaatggcaacgcagtctcatcgcccaactcactataacgttccccaattgccagttcctcctgaccacgcattcgccgttggtcatcagcgacagcaaggatgtgctggtgtacgtcatggacgatggcgagttacatgagcaggacagtctttatggccttgatgccaatcaggtgctgtcgagtgtcatggacactgatattcgaaatgaggagattcaaacagttctggataaactgcagcactttttgatgagaggagagctcgatgaagctcggacgctctacgcagggttgactgacgaactacctgcaaatcacatcgaactggcgaaagcttcgctgctgattcgcaagctggaagtgcgccgtgagaaagattga

SEQ ID NO: 89587 - DNA, 621 bp, Pseudomonas savastanoi pv. phaseolicola; identical to SEQ ID NO: 85919

SEQ ID NO: 89588 - DNA, 819 bp, Pseudomonas savastanoi pv. phaseolicola; identical to SEQ ID NO: 89570

SEQ ID NO: 89589 - DNA, 645 bp, Pseudomonas savastanoi pv. phaseolicola; identical to SEQ ID NO: 85917

SEQ ID NO: 89590 - DNA, 1377 bp, Pseudomonas savastanoi pv. phaseolicola
gtgaggctcgacacactgcgaatgcagaactatcgctgcttcggtgaattcgagatcgacttcgatccgcatctgaccatacttattgcctccaacggaggcggaaaaaccactattcttgatgccgctcgagttgcgctgtggcctttcgtcaagggttttgatcttggcggtcagacaggaaaatccgccactattcagattgaagatgtgcgactggcccaattcggcagtggcaatatggagtcgcaggtacccagcgttatcgaggcaaagggcgtctggtgggaaagcgccgttgaaagtagctggctgcagcagcgcgtcagcctgaaaaagtccactaacactattggcgatgctggatcgaaagcactgacttcgtacggtaagtcgcttcaggagtgtgtgcgaagcgatgcacatgtcactctgccaatggtgacttaccttggcacttccaggctatggttcgagggacgcttcagttcggcggcggctcagacaacactcgataaaagtgagtactccagaacgtccgcatacctaaattgcctgtcttattcatccagtttcaagaccttcaccgcatggtacatctggatgtaccgcagctatcgtgaagctcagttgatcgctctggagcgcgatgaagaaatgtctgatgccgggcagcgctttgagaaaatcatctcagctgtcaaagaagccatcgacaggttgataaaggctcctacggggtggcacagactggaatacagtgccagtcatcaacagcaactggtcatgcatcatccggaccagggggttttacctgtcgaaatgcttagcgatgggctgcgtaacactatcgccatggttgcggacctcgcttttcgtgcctgcaaactcaacccgcacctcggcgagagggcgcccttgcaaacgccaggtatcgccttgattgatgaagtggatatgtttctgcatcccttctggcaacagacgatagtcggttcattacgtgcggcttttcccgccatgcagtttattgtcaccacgcacagcccgcaggtgttgagtacggtccgacgcgaaaatattcgggtgatcggtaaagatgcccaagggcgtttgattgcatcccggccccttgccatgacctacggtgagccgagcaacagcgtgctgcgaagcgtgatgcaggtcgatccgcagcctccggtggatgaaaagccgggcctgctacaactcacggaatgggtggacaaaggtcgctatgacgaaccacaggcgatcttgctgatgcagcagataacggaggctctcactgaacaacaccctcaactgcagcgcctgcagcgcagcataaagcggcagaaggcattgcggggatga

SEQ ID NO: 89591 - DNA, 588 bp, Pseudomonas savastanoi pv. phaseolicola
ttggaggagcagtacggattatgttgctatagcgaaattcgacctgaccgggttggcctgagtttccatatagagcacgtcgaaaacaagagccaaaaccctcagcgtacttttgactacaacaacctcgctgcctgcgcgctggacagtcagagcgatctggaggtattgaaaatacaaggcgctgaggtatttggtgggcacgcgtcaggtaagtcgaaaggggtcgacatggctcgcttcgtttcgtgtcacatgcccgactgttcgcgcttcttcgcctatttgtctgacggccgtgtggtgcctgctgacgggttgtcaccggaggaagttgaccgagctgaatacaccatcggcctgctgaaccttaacagcccttatctccaaggcttgcgacaatcctggtgggatgagctggaagctctttttgaagagcatgttaatcaaaatatgagtctgcattgtctggcggggattgatctcatccctgtgggggcgaacttaagtcagtttttcagcattacccggaattttttcggaggtatcgctgaagaggtccttgagcaagaggctggtcgctggtaa

SEQ ID NO: 89592 - DNA, 1359 bp, Pseudomonas savastanoi pv. phaseolicola; identical to SEQ ID NO: 85918

SEQ ID NO: 89593 - DNA, 621 bp, Pseudomonas savastanoi pv. phaseolicola; identical to SEQ ID NO: 85919

SEQ ID NO: 89594 - DNA, 1368 bp, Pseudomonas savastanoi pv. phaseolicola; identical to SEQ ID NO: 89568

SEQ ID NO: 89595 - DNA, 588 bp, Pseudomonas savastanoi pv. phaseolicola; identical to SEQ ID NO: 89569

SEQ ID NO: 89596 - DNA, 819 bp, Pseudomonas savastanoi pv. phaseolicola; identical to SEQ ID NO: 89570

SEQ ID NO: 89597 - DNA, 645 bp, Pseudomonas savastanoi pv. phaseolicola; identical to SEQ ID NO: 85917

SEQ ID NO: 89598 - DNA, 819 bp, Pseudomonas amygdali pv. sesami
atgagtgtaaccgctgagcttgctgcacagagcaaaccatcaagactggatgcgtacacctcttggttcgatgctgcctccaatttgaaaaacttcgagacctggttcatcggcaaaacactggagcgctttcaaaggctatctcgagcaggttcttccagcgttttcaacgacgaactgacctggataaactcagccatccaatgcgcactacccgacgccaagggaatagagtacgacatggagctacgtgcgttggtagtcgatatggatgaccgaaaaatcccgttcaacgacctgagcgacggacaacgcggaatggtcgcactcttcgccgatatcgctcgccgtatctgcttgctcaacccgcacatggggaaggatgtgctaagcaagacaaacggcatcatcgtcatcgatgaactcgatatccatcttcaccccggctggcaacgcaccattgctccagcactgaaaaaagcatttcccagcatccagttcatcgccgccagccactcgccacaggtcatcggcagcctgcaaccgggcgaggtcatcctgctgaataaccatgacggctctcatccaagagcaacctatggcctggattccagcactattctggaagaagtcatggacgtaccgcagcgcgagcctgaaattgaagcgctgctcgacgagctattcagcacactggaaaacaacgaacttgaaaaagccagactgcagcttgatgcgttaaaacagaaagcgcccgatctgcccgagttcgcaggtgccgaagcgttgctcaaacgcaaggagctcattggacgatga

SEQ ID NO: 89599 - DNA, 438 bp, Pseudomonas amygdali pv. sesami
atgagacgcgttatcaaaggagctgagcctgcgtcattcaccgaatggaaagccagcgcaaacgaagactggatgcccacctatccaaccctgcagaacccgcaaaaacgcgacttgcataattgcttgctgcaagagcagaacttctcatgctgctattgcggcagggaaatagagcttgatagcagccacatcgaacatttcagaccgcaggatcattatctgccattggcactggaatacagcaatcttcatgcgtcttgcctgcgcgagaccacaccaggaaacccgttgcactgcggccactataaaggcaactggttcgatgaggacctgcacatttccccgacagaggcgattgcgaacagcgcttccgttatttgctcacagggaaaatccaaagcacgtcccacacagatattcccgccacgacgatga

SEQ ID NO: 89600 - DNA, 1359 bp, Pseudomonas amygdali pv. sesami
atggaaatcaaaagcttcaagcttgttaacgttgggcgtttcagcgatctggaagtcgctctggcgcctaccgaaagacacgcgtcgaaggtgaccgtactggtcggcaataatggggcggggaagactacgctgctcaagtctgtcgctacatcgttgagctggctggtagcgagagtcaggacgccgaaaggtgctggcagtcgtatcgatgaggatatggttcagaacggcaccgctacatcctcgattaccattcggatagaggatgtgttgatttcggatgacgagatcaatccacttgaatctgaatgggcaataaccgctactcggaaaggccgaaacgccacctcatccacagtattaagcgagctcaacagacttgctgatggctatcgctcaaagttgactgaaaaaagtgatacgtctcttcctcttctggctttctaccccgtcgagcgctctgtcatcgagataccgctcaaagtcctcgccagacatacctttgatcaactcgacggctacgacaacgccttggggcgtggcgtggattttcgccgctttttcgagtggtttcgggagcgcgaagacagcgagaatgaaacgggcatctcgacagagttgctgaatgagctgtctcaaaagatcttgattgatacagaactctggaaagtgctgaccagggagcatgcctcttcacgtgaccgccagctgactgcggtcagaactgcggttgaggcgttcatgcctggcttcacaaaactgcgtgtcaagcgtaagccgcgcttgcacatggctattgataaagacggcaagacgctaaacgtatcccagctgtcccaaggcgaaaaatcgatgatggcgctcgtcggcgacatcgccagacgcctcgccatgatgaacccggcgctggaaaacccattacacggcaatggaatcgtcctgatcgacgaagttgatctgcacctgcaccccaaatggcaacgcagtctcatcgcacaactcactacaacgttccccaattgccagttcctcctgaccacgcattcgccgttggtcatcagcgacagcaaggatgtgctggtgtacgtcatggacgatggcgagttacatgagcaggacagtctttatggccttgatgccaatcaggtgctgtcgagtgtcatggacactgatattcgaaatgaggagattcaaacagttctggataaactgcagcactttttgatgagaggagagctcgatgaagctcgtactctctacacagagttggctgacgagttacctgcaaatcacatcgaattggcgaaagcttcgctgctgattcgtaagctggaagtgcgccgtgagaaagattga

SEQ ID NO: 89601 - DNA, 621 bp, Pseudomonas amygdali pv. sesami
gtgctggaaaaatggaagcgcgcgaacaagggaaagaaatacgccgacctggtggggcgtgaagatatcaaggatgccatccgccacgcctgtgtcactgagcagcatggcttgtgcgcctattgctgctgcaggatcaccgcagagaaaggcagtgcctgcaatgaacatgttgaagcgcagcatctagcaccgcatcgcactctggatttcggcaacattgtcgcgagctgcaccaaagcggggcggtgtgacgccgctcatggccatcagactctgccgcttacaccgctgatgatcgaatgtgaaaaagagctgcagtttgagctttccggtcttgtggcaggcaccacgccccgggcgtgcgcaagtatcaacgtgctcaatttaggcgatacccgagagtcaaatcgtgatcttgtagtgaagcgtaaagagatgattgatacgctgttgttttcttacagcatcgaccctgctgaactggctgtggaagccgatgatgttctcgacctgctaaggaacgacctgctggagttagatgctcagcagttgcttcaggctttttctccggttttggtgaatgtgattcttggcattcaaaacgctcgccagccctga

SEQ ID NO: 89602 - DNA, 2301 bp, Pseudomonas amygdali pv. sesami
atgcaacgcattgagcgcccagaccagccgcccaccgtccttatgtctccggaggctcaggcatcgcgaaaggcgatgctcgagttctggcagctgggtcctgaacgtcgggcgcaaaccagcgtgcccgtgatcgggtatagctcagaagagccacagctgcgggatgcactcgccgccatgagtgggcatcggtgcgcgttctgcgaggccagcgatgggctgcaggtctaccggttccgcccggtcggcaacgcgttgccgttggccaagtcaagtgatgcccacttgtactacctgtggctggcggatgcctggcacaacctgctacccatctgcgctggctgtgtgccgattgaaccccattttccggtccgcggagcacgctgcccgctgcctagcgtcgagcaggtgcaaacctacgtcgccagaggcaatgggatatggtcttggggcgcgcccaatgagcgtgcgcaactgctggatcccgcacaggaaccacagtttaccaagcaccttatcccgacgttggacggtgagttgctccccggcacaccccgcggtgaagcgaccatctatacgtttgacctgaataggtccgaacggcgcgaccagcgctaccacacctatgaatcgcgcctggatgatcttcaggcgttcctcgcagcctcaagccaagccggcattgaaccgatcttggatttttccgatctagagttcggaggtacctggtatctgctgttgcgccgcctgcttaaccatgtcccgatgaccggaatcgcccgcaacctctccgccagtcagatagcgcccgccctccaacgactggcgcaatcgaccgacgccgcggcaatcttcgagcaatcgctgctcacgctgcggcgcgaggacataagactccgggcaaacggcaggcaggccatggccccgaacccggctaaagattccgtctgcgcgatccagatcaacaacttcaaagccattgaacagttggagctcaacctcaaggagcactcggcgcgtaccgcagatggcaagatcaagcctgtaccgtctctggtgatactgggggagaatgcgaccggcaagagctccattcttgaggccatcgccttgacgctcgtgccggcggcggtgcgcaatgccctggccgtgccgtggtccgatttggtcatcgatccctcgcagctcgggattgagcggagctatcaagcgggccacgcccaaatccgcatcggtctgaccaatcaacactgggtgacactgagcattgaccaccatacccaccttcacgagagcagcctgggcaaccagcaggtcccggttttcgcttacggtgcatttcgtcgattcacccgcaccagcccgcgcaccaccacccattcgcatgtccgtaatctgttcgacggcaccatgctgcccaatcccgagccgtggctgatcgcgctgcggcaagacaggttcgacatggtgattcgcacgctgcgtgacgtgctcgccgtggagggcgatttcgacgtcatccaacgcaacccgggaagccgcgacttacgggtggtcaccgcagtaacggagttggacggtacgacacggtacaaccgcacgccctttcatgcggtgtcgtctggctaccggtcaatgctggcgatgatctgcgacatcatgaaagggctcatgagccctgccgtttaccctgaattcgaaagcttccagtcggcacgcggggttgtgttgatcgacgaaatcgaggctcacttgcatccgcgctggaaggtccaggtgatgtcgcgcctgcgtgctgccttgcccaatatcacgttcatcgtgaccacccatgatccactgtgcctgcgcggcatggaggacggagaagtggcggtgttgcagcgcattccgacgtcggaaagccaggttgaaagccagttgccgataatcattgagagcatggaagggctgccttcggtggcgaacctgcggctggaacagctgttgacatcggacttcttccagatgctctccaccgatgatgcgcataccgaccgccggctggccatgatcgccgatttggtcggtgctcgtgctcgaggtgaagtactaactgccgaggatgagcgggtgttaaacagctttcgcaacgacatagctagcgcgctaccaatcggttcgagtgaagtccaccagatcatccaagaggccgtagcggaatatctctccaagcgacgtatcgcaagcagccagacactgcgcagattacgtcgagaggcgaaggacgaaatattggctgcgctggagaggttttga

SEQ ID NO: 89603 - DNA, 942 bp, Pseudomonas amygdali pv. sesami
atgcgccgtgttcatcgcgcctccgttgccgcaccggcttcgttgcagccaggcggaggcggtgccgcagagctgatccgtgccaggacgcacatcgcccgcccgattctggcaggtgcaacgaaaaagagcttcgagtacgccgcctacaaaaaggatgatgtgcgtacggccttggaccaattattccacggtaagtgtgcctattgtgagaccttctacgcggcctcggcgccggtggatattgagcactaccgacccaaggggggcgtatcggaagaaccagcccatggcgggtattggtggatcgccatgcaatgggaaaacctgctgccctcttgcatcgactgcaatcggaaacgtggacagagaatcgttgaggcttcgaccagcctcggtgtccttgcttccacggcctcgatcagctggcgccagtcgggtaagcatgacagcttccctctggcccataccggcgtgcgggccacggcggaggcaaccgacttttccagggagcacccactgctcatcaatccttgcgaagaagatcccgccacctatctgatgcacatcatcgatcccgccctgcccaccggtctgctcgtgcccgttggcgatcagcagcagcaagcgcgcggagcagtctcgatacagacctatgggttgaaccgactcaaactctttgaagaccgaaaccggttgctgcggacgctggagtttttgggcgacctggttatcgagctgacagaaacgatcgccgacctggagacgcccgcggtccagcatcggctgatcggtacgccagcgttccgcgtcagtgcacgcctgcgcttgctgcgtgaccgactacttgcagagctcaaggcggccaccgcgccggaggtgccgtatgccactatggccagtgcttggctagagcagtttaagcttcgcttcatccattag

SEQ ID NO: 89604 - DNA, 1377 bp, Pseudomonas syringae pv. maculicola str. M6
gtgaggctcgacacactgcgaatgcagaactatcgctgcttcggtgaattcgagatcgacttcgatccgcatctgactatacttattgcctccaacggcggcggaaaaaccaccattcttgacgccgcccgagtggcgctgtggcctttcgtcaaggggtttgatcttggtggtcaaacaggaaagtccgccactatccagattgaagatgtgcgactggccccattcggcagtggcaatatggagtcgcaggtacccagcgttatcgaagcaaaaggtatctggtgggaaaaagccgatgactgccgttggttgcagcagcgcgtcagcttgaaaaagtccaccaacaccattggcgatgccggatcgaaagcgctgactttgtatggtaagtcgcttcaggacagtgtgcgtagcgatgcacatgtcactctgccaatggtgacttacctgggcacttccaggctatggttcgagggacgcttcagttcggcagcggctcagacaacactcgataaaagtgagtactccagaacgtccgcatacctcaattgcctgtcttattcatccagcttcaagaccttcacagcatggtacatctggatgtaccgcagctaccgtgaagctcagttgatcgctctggagcgcggtgaagaaatgtccgataccgggcagcgctttgagaaaatcatctcggctgtcaaagaagccatcgacaggctgataaaggctcctacgggctggcacagactggaatacagtgccagtcatcaacaacaactggtcatgcaccacccggaccaggggattttacctgtcgaaatgcttagcgatgggctgcgtaacacgatcgccatggttgctgaccttgcttttcgtgcctgcaaactcaacccgcacctcggcgagcgggcacccttgcaaacgccaggtatcgccttgattgatgaagtggatatgttcctgcatcccttctggcaacagacgatagtaggttcattgcgtgcggcctttcccgccatgcagtttattgtcactacgcacagtccgcaggtgttgagtacggtccggcgtgaaaatattcgggtgatcggtaaagatgcccaagggcgtttgattgcatcccggccccttgccatgacctacggtgagccgagcaacagcgtgctgcgaagcgtgatgcaggtcgatccgcagcctccggtggatgaaaagccgggcctgctacaactcacggaatgggtggacaaaggtcgctatgacgaaccacaggcgatcttgctgatgcagcagataacggaggctctaactgaacaacaccctcaactacagcggctgcagcgcagcataaagcggcagaaggcattgaggggatga

SEQ ID NO: 89605 - DNA, 570 bp, Pseudomonas syringae pv. maculicola str. M6
ttgtgttgctacagcgaaattcgacctgaccgggttggtctgagtttccatatagagcacgttgaaaacaagagccaacaccctcagcgtacttttgactacaacaacctcgctgcctgcgcgctggacagtcagagcgatctggacgtgttgaaaatacaaggcgccgaggtatttggtgggcacgcgtcaggtaagtcgaaaggggtcgacatggctcgcttcgtctcgtgtcacatgccagactgctcgcgcttcttcgcctatttgtctgacggccgtgtggtgcctgctgacgggttgtcactggatgaagttgaccgagctgaatacaccatcgacctgctaaaccttaacagcccttatcttcaggacttgcgacaatcctggtgggatgagctggaagcgctttttgaagagcatgttgatcaagatatgagtctgcattgtctagcggggattgatctcatccctgtgggtgcgagcttaagtcagtttttcagcattacccggaattttttcggaggcatcgctgaagaggtccttgatcaagaggctggtcgctggtaa

SEQ ID NO: 89606 - DNA, 1326 bp, Pseudomonas syringae pv. maculicola str. M6
atgaacctgaccaggctttgccttaagaactaccgtcgctttgcagagttcgatatcgaattcgatccccaattgacggtaatttccgcacgcaatgggcaaggcaagacgtcggttcttgaagccattgttgcggctctaggccccttcgtcggctcgttcgatcagggaatgtccaggcacatcgagcgcactgatgcccgttatgcgcgggtaggcgaaggctttgaaagcgagcagcaatttcccgtgatcatcagcgcagaaatgtccaaccctgcgaagcgttggcaacgagcacttaacggtcccaaaagccgtacaaccaccaaagaagccgagccgctggcggcgtggggaaaagaacttcagttactgctgcgcagcgattcggcaatttcactgccggttgtgcgctattacagttcaaggcgcctttgggtcagtcacaaaaacgtctccagcaaagcgatcctgaccgagagtcgcacggcaggctacgaagattgtctgtccgcgttctctacttatgtgcagttacaggagtggatgagaaaggcgaccctagccgtcattcagcaaaaacagcagcccggttacgagcactccaatcttgcgccacgtttgcagggcatcagaaatgcggtgaacgaggtgatggcggaggaaggctggagcgacttccattacagcctgacgtatgaagagttgtccatgtctcatgccgaccactctgcactgccactgggcctgctcagtgacggcgtgcgcgccatgattacgctggtcgctgatctggcattgcgttgctctcgcttgaatggccacctcaaggaacaggcctcactacagacaacaggcatcgtattgattgatgaagtcgatttgcacttgcatccggcctggcaacaacgtgtggttgccagtcttcgtaaagcgttcccgaacatccagttcattgtcagcacgcacagcccgcaggtactctcgacggtaaaacgtgaatgtatacgcatggtatttcaggacgccgatgaaaactggcaagctgcatgcccgccacaggaggtcaaaggcgttgaaagcgccattgcgctcaacgacatcatgggcgtgaaccccattcctccggtagctgaagcattttgggtagccgaatacaccgcaaaaatcgaaaatggctcccatgaagatcacaacggcctggctctgcgcaaaaagcttctcgatttttatggagcacagcatcaggtgattctggacgctgacaggctgatccgttttcagacgttcaaattgcaaaaacactcgaacaccaagggctga

SEQ ID NO: 89607 - DNA, 507 bp, Pseudomonas syringae pv. maculicola str. M6
gtgcgatgtgcttattgcgagggggccatttttcatgaaggccatatcgagcattttcggcgcaagaatccggatcactttccggaactgacatttgcctggagcaacctttttctcgcctgtggcagtacccaacattgcggccaccacaaggatcgacgctcggctcctgcctacgatccagaccttctcatcaaacccgacgaacatgatcctgagcattacctgtatttccattcttctggaaaggtgctcgcccgtaacaacctgagtgatcacgaaaatagctgcgccactgagaccattcgcgtgtttggtctcgacaatccagcgcttgagggcgctcgggcaaacgcagtgcgcagctaccgcaagatgcacgatgcggatctgtcggagatcgcttcgtggtcagacgctgagcgtgacgcgtatttccggggggagatcgaagccacccgctgcctcccctacgctacgacgatcagacacttcttgcagaagtga

SEQ ID NO: 89608 - DNA, 819 bp, Pseudomonas syringae pv. maculicola; identical to SEQ ID NO: 89570

SEQ ID NO: 89609 - DNA, 645 bp, Pseudomonas syringae pv. maculicola; identical to SEQ ID NO: 85917

SEQ ID NO: 89610 - DNA, 1377 bp, Pseudomonas syringae pv. maculicola; identical to SEQ ID NO: 89590

SEQ ID NO: 89611 - DNA, 588 bp, Pseudomonas syringae pv. maculicola; identical to SEQ ID NO: 89569

SEQ ID NO: 89612 - DNA, 1140 bp, Pseudomonas syringae pv. maculicola
atggttcagaacggcaccgctacatcctcgattaccattcggatagaggatgtgttgatttcggatgacgagatcaatccacttgaaactgaatggggaataaccgctactcggaaaggccgaaacgccacctcatccacagtattaagcgagctcaacagacttgctgatggctatcgctcaaagttgactgaaaaaagtgatacgtctcttcctcttctggctttctaccccgtcgagcgctctgtcatcgagataccgctcaaagtccacgccagacatacctttgatcaactcgacggctacgacaacgccttggggcgtggcgtggattttcgccgctttttcgagtggtttcgggagcgcgaagacagcgagaatgaaacgggtatctcgatagagttgctgaatgagctgtctcaaaagatcttgattgatacagaactctggaaagtgctgaccagggagcatgcctcttcacgtgaccgtcagctgactgcggtcagaactgcggttgaggcgttcatgccaggcttcacaaaactgcgtgtcaagcgtaagccgcgcttgcacatggctattgataaagacggcaagacgctaaacgtatcccagctgtcccaaggcgaaaaatcgatgatggcgctcgtcggcgacatcgccagacgcctcgccatgatgaacccggcgctggaaaacccattacatggcaatggcatcgtcctgatcgacgaagttgatctgcacctgcaccccaaatggcaacgcagtctcatcgcccaactcactataacgttccccaattgccagttcctcctgaccacgcattcgccgttggtcatcagcgacagcaaggatgtgctggtgtacgtcatggacgatggcgagttacatgagcaggacagtctttatggccttgatgccaatcaggtgctgtcgagtgtcatggacactgatattcgaaatgaggagattcaaacagttctggataaactgcagcactttttgatgagaggagagctcgatgaagctcggacgctctacgcagggttgactgacgaactacctgcaaatcacatcgaactggcgaaagcttcgctgctgattcgcaagctggaagtgcgccgtgagaaagattga

SEQ ID NO: 89613 - DNA, 621 bp, Pseudomonas syringae pv. maculicola; identical to SEQ ID NO: 85919

SEQ ID NO: 89614 - DNA, 1356 bp, Pseudomonas savastanoi pv. glycinea; identical to SEQ ID NO: 86326

SEQ ID NO: 89615 - DNA, 588 bp, Pseudomonas savastanoi pv. glycinea
ttggaggagcagtacggattatgttgctatagcgaaattcgacctgaccgggttggcctgagtttccatatagagcacgtcgaaaacaagagccaaaaccctcagcgtacttttgactacaacaacctcgctgcctgcgcgctggacagtcagagcgatctggaggtattgaaaatacaaggcgctgaggtatttggtgggcacgcgtcaggtaagtcgaaaggggtcgacatggctcgcttcgtttcgtgccacatgcccgactgttcgcgcttcttcgcctatttgtctgacggccgtgtggtgcctgctgacgggttgtcaccggaggaagttgaccgagctgaatacaccatcggcctgctgaaccttaacagcccttatctccaaggcttgcgacaatcctggtgggatgagctggaagctctttttgaagagcatgttaatcaaaatatgagtctgcattgtctggcggggattgatctcatccctgtgggtgcgaacttaagtcagtttttcagcattacccggaattttttcggaggtatcgctgaagaggtccttgagcaagaggctggtcgctggtaa

SEQ ID NO: 89616 - DNA, 819 bp, Pseudomonas savastanoi pv. glycinea
atgagtgtaaccgctgagcttgctgcacagagcaaaccatcaagactggatgcgtacacctcttggttcgatgccgcctccaatttgaaaaacttcgagacctggttcatcggcaaaacactggagcgctttcaaaggctatcccgagtaggttcttccagcgttttcaacgacgaactgacctggataaactcagccatccaatgcgcactacccgacgccaagggaatagagtacgacatggagctacgtgcgttggtagtcgatatggatgaccgaaaaatcccgttcaacgacctgagcgacggacaacgcggaatggtcgcactcttcgccgatatcgctcgccgtatctgcctgctcaacccgcacatggggaaggatgttctaagcaagacaaacggcatcatcgtcatcgatgaactcgatatccatcttcaccccggctggcaacgcaccattgctccagcactgaaaaaagcatttcccagcatccagttcatcgccgccagccactcgccacaggtcatcggcagcctgcaaccgggcgaggtcatcctgctgaataaccatgacggctctcacccaagagcaacctacggcctggactccagcagtattctggaagaagtcatgggtgtaccgcagcgcgagcctgaaattgaagcactgctcgacgagctattcagcacactggaaaacaacgaacttgaaaaagccagactgcagcttgatgcgttaaagcagaaagcgcccgatctgcccgagttcgcaggtgccgaagcgttgctcaaacgcaaggagctcattggccgatga

SEQ ID NO: 89617 - DNA, 645 bp, Pseudomonas savastanoi pv. glycinea; identical to SEQ ID NO: 86331

SEQ ID NO: 89618 - DNA, 1008 bp, Pseudomonas amygdali pv. morsprunorum
ttgactgcccaaggtggcgcgtttgagcgtcaggaatggcacgtatcgctggaacgcagcagtcttcagacaaatttcagcgcgctgaacagtctcgtattttcggaaaatctgattagcatcgatgtaagtacccacggggatttgcctgtattcgccgtctatcaagccaatcgacgctggctgacgatgagtgtaaccgctgagcttgctgcacagagcaaaccatcaagactggatgcatacacctcttggttcgatgccgcctccaatttgaaaaacttcgagacctggttcatcggcaaaacactggagcgctttcaaagactatcccgagcaggttcttccagcgttttcaacgacgaactgacctggataaactcagccatccaatgcgcactacccgacgccaagggaatagagtacgacatggagctacgtgcgttggtagtcgatatgtatgatcgaaaaatcccgttcaacgacctgagcgacggacaacgcggaatggtcgcactcttcgccgatatcgctcgccgtatctgcttgctcaacccgcacatggggaaggatgttctaagcaagacaaacggcatcatcgtcatcgatgagctcgatatccatcttcaccccggctggcaacgcaccattgctccagcactgaaaaaagcatttcccagcatccagttcatcgccgccagccactcgccacaggtcatcggcagcctgcaaccgggcgaggtcatcctgctgaataaccatgacggctctcatccaagagcaacctatggcctggactccagcactattctggaagaagtcatgggcgtaccgcagcgcgagcctgaaattgaagcactgctcgacgagctattcagcacactggaaaacaacgagcttgaaaaagccagactgcagcttgatgcgttaaaacagaaagcgcccgatctgcccgagttcgcaggtgccgaagcgttgctcaaacgtaaggagctcattggacgatga

SEQ ID NO: 89619 - DNA, 684 bp, Pseudomonas amygdali pv. morsprunorum
atgagacgcgttatcaagggaactgagcctgcgtcactcgccgaatggaaagccagcgcaaacgaagactggacgcccacctatccaaccctgcagaacccgcaaaaacgcgacttgcataattgcttgctgcaagagcagaacttctcatgctgctattgcggcagggaaatagagcttgatagcagccacatcgaacatttcagaccgcaggatcattatctgccattggcactggaatacagcaatcttcatgcgtcttgcctgcgcgagaccacaccaggaaacccgttgcactgcggccactataaaggcaactggttcgatgaggacctgcacatttccccgacagaggacgattgcgaacagcgcttccgttatctgctcacagggaaaatccaaagcacgtcccacacagatcttcccgccacgacgatgatcgaaaagctcgcactcgatatcgcgtatctgacaaaaagacgccaagaggcaatcacgcgcgtgtttgatgagcaaatcttagccagcatcagcgacacagagttgacacttttggtacaaggcctccgctctggggatgccaacaaacagctcgcctttagccacgttgtcgcccgctatgcggagcagtttctggcgtctttaaaccctcctcccgaaaaaagctcggtcaagaatacgtga

SEQ ID NO: 89620 - DNA, 819 bp, Pseudomonas savastanoi pv. glycinea; identical to SEQ ID NO: 89616

SEQ ID NO: 89621 - DNA, 645 bp, Pseudomonas savastanoi pv. glycinea; identical to SEQ ID NO: 86331

SEQ ID NO: 89622 - DNA, 1377 bp, Pseudomonas savastanoi pv. glycinea; identical to SEQ ID NO: 89590

SEQ ID NO: 89623 - DNA, 684 bp, Pseudomonas savastanoi pv. glycinea; identical to SEQ ID NO: 89541

SEQ ID NO: 89624 - DNA, 1356 bp, Pseudomonas savastanoi pv. glycinea; identical to SEQ ID NO: 86326

SEQ ID NO: 89625 - DNA, 588 bp, Pseudomonas savastanoi pv. glycinea; identical to SEQ ID NO: 89615

SEQ ID NO: 89626 - DNA, 819 bp, Pseudomonas savastanoi pv. glycinea; identical to SEQ ID NO: 89616

SEQ ID NO: 89627 - DNA, 645 bp, Pseudomonas savastanoi pv. glycinea; identical to SEQ ID NO: 86331

SEQ ID NO: 89628 - DNA, 2055 bp, Pseudomonas syringae pv. maculicola
gtgagccctatttttcgccctgaatgccctgactatcttcttccatatcttgcaaatggcccgcatgaactggggcagcgttgggaactcgaagggtatgacagcagccgtttggacgatgttacgagaaagttcagacgcagattggtggaggacttagttcaggcttttgggccgatctgctgttattgtgagagctatgctcatcctgggagtggcgtggtagagcgtcaccggcctcgaagaggcgtacgcggagagaatccgtatctgcaccttcattcggattggcgaaacctttattgggcatgcccggtctgcgatcggtataagggaaatcggtttccccagatgggtttgccgctgcccgagcgcccctatttggaaacagttgagttcgaggaacccgggctattggatccttgccgagacaatccagacgagcatctagaattcgatgaaacgggtcaggtgtctgcacttagcgctcgtggtgacatcaccatcaagctcctggatctaaaccggcggcaattgatccagactcgattcgagcaggtacagctactgcagagcacgggcaggatacattcattagacgagcatccagcacacagggcggtatggcgccagcttggagaggcggggagacatcaagcccgcccctatggcttccccggcgaggttccaaggcgccaacagaatttcgatcgctacaaggaagagtcgtctgtagagataatcgacactgaatccaagaaaggcatggggtcttatcttgcgaaggcgcaatacgtgactcggctggagatcaaaaattacggccctatccatcatctcgatcttaatttggaagccccagatgggtcgaatgccccttgttacgccttactgggtgagaacggcgtaggcaaaagcacggtgctcaaagcgttggctcttacgctatcgggtgaggcctactcgaaagcgctccgctgcacgagcaatagattgctggcgatcggagcgcacgaaggttcggtagtcgtcaccttggttgggggtgatcaggtctcaatgcgttttagacgcaacaaaaagattgaattcagcaacgagcactctcgctcactcgtcgtggcgtatggtgccactcggctcttggcgactgcgcgacataaatcaaagcccggaaaggatcacgcgaaaatcgacaacttgttcgaccccttcttaccaatcaacgatcctaccgagtggctaaagcatttaggtcgcgatcgtctggacgaggtcaacgacgtactgcgcaagctgatgcccaaagatcatcaggtgcaagtcatcgtctccgaagatgcgtctatcagtctcaacgcaagtggagtcgaagggcgtcagcttcgtgagctcagcgacggataccagtgcatgatcggcatggcagtagatatcatgcaggtgctctcgcagtcagaagcggcgcttgattcatcagagggcatagtgctgatcgatgaactgggtaaccatttccatcccgcttggcgcctccaatgcttgccagcgctaagagaagccttccctggagctcagatcatctacagcactcacgaccccctctgccttcgtggcttaaaggaaggggaggttgcggtgctgcgccgagacagactcaatcacatctacgcgctggaaaatctgcccagcgttgccaatttcagagttgatcaactcctcacctctgaacacttcggtctacggagtacggtcgatcccgaactcgacaccaagatcgaggcttacgaagagctcttaagcaaacctgacaggtcggacgaggaagaacaatcgctcgcaaacctggttgctgagctcactgacacacgttatctaggtggcagccgccgcgaaaggatggccttgcagatgctcgacacaacaggagctctggacatacctgtagacgctgcggcaaatgtccaacagttcaccgattcgacggtgtcgaagctcaaatttctcatgcaacaagtaacgccattgactggccagccacggggcaagcaatga

SEQ ID NO: 89629 - DNA, 822 bp, Pseudomonas syringae pv. maculicola
atgattaaggtcgatcgcccgagagatagcacaccacctcacctgatactaaaaggtcgtgatgagctgaggaaacacctgacgctcgaacctaagaaacgtgtcttcaaagaatattcatccaagccagtcaggaaaaagctgactgagctttttggtcgcaaatgtatgttttgtgagtcactgttagcaggaacgcagtccggtgacgtagagcattacaggccaaaagggaaggtagttgtttatcccaaaacgacggcagttgcagcacatgtcgtacctgggtatttctggctgggagcgaagtggccaaatctgctactgtcatgttcagactgcaatcgacctagaacacaggatgattttgatggcaatgaacgagtgatcgggaaggccaatttttttcctctggctgatgaaaccaagcgcgcgattgggacgtggcggattcgccaggaggaaccactactactcaatccctgcatcgatgatcctgctgaacaccttgtatttctggaggacggtcgtgtgcaggcgcgattgattgatggtgtgccgagcgctaaaggtgaagcaagcatctactacctaggactggctcgcgcagagctgcttcaaatgcgcgcacggcatggccggatggttcgtgctgcaattcgtcacacgataagtgccttgaaggaaggccgtgatcctggcgccgatttggaagacctcgaagcgttcttgatgcctaaggaaccatacgtcgcgttcagtcgcatgctgatctacaagtacatgagacaacatcttgcagcgctgggtttgtcggtttga

SEQ ID NO: 89630 - DNA, 903 bp, Pseudomonas syringae pv. maculicola
gtgctcgccaggaacaacgcaggtgagcagattgactttccggttcttgccttctatcgcgccaatcgtcgttggagcagtgcgcgcatatctgccgagttcgcagcacagcagcggacttcccgttttgacggatatgcaaactggtttgacgccgtagccgatctgcgtgattttgaaagctggttaatcgcaaggacgcttgagcgccttcaggaccgtcttgattcaactccgactgtcgagcgtgaagatgaacttgaatgggtgaatcgagcgatcagacttgccataccggatgcccatgatctccgatatgacttgaggctacaaagcctgctcgtagatatgggggaaggcaacgccgttccgtttcacgaactcagtgatggtcaacgtagtttgattgcgttgattgcagatattgcacgacgcatgtgcgttctaaacccacacataggaaaagacgttctggcgaataccggtggcatcgtgattattgatgagctcgatattcatctgcacccggcctggcaacgcaacattgcgccgacgcttaaaaaagcattccccaaagtgcaattcatcgccacaagccactcgcctcaagtgattggcagcctgcaaccgggcgaggtcatcctgctgaagaatggcgacagctctcacccgcgagcaacctatggcctggactccagcaccattttggaagaagtcatgggcgtaccgcagcgcgaacccgaaattgaagtgctgcttgatgagctgttcagcacgctggaaaacaatgaacttgaaaaagccaggctgcagcttgatgcactaaagaaaaaagcccccgatctacccgagttcgcaggtgccgaagcactgctcaagcgcaaggagcttattggacgatga

SEQ ID NO: 89631 - DNA, 645 bp, Pseudomonas syringae pv. maculicola
atgagacgcatcatcaagggaactgagcctgcgtcatttaccgaatggaaagccagcgcaaatgaagactggatgcccacttatccaaccttgcagaacccacaaaaacgcgaattgcataacagcctgctacaagagcagcattcttcttgctgctattgcggcagggaaatagaacttgagagcagccacatcgaacatttcaaaccccaggagcactgcctgccactggcgctggagtacagcaatctccatgcgtcctgcctgcgcgagaccaaaccaggaaacccgctgcattgcggacatcacaagagcaactggttcgatgaaacgctgcacatttctccactggcagacgattgcgaacagcgatttcgctatctgctgacaggaaaaattcaaaacactgaatccgcagaccttgccgccgccacgatgatcgagaaactcgcactcgatatcgcctacctgacgagaagacgtcaggaagcgatcacaggcatttttgatgaccagttcatattgagcgccagtgaggcggagttgacgcatctggtgcagagtttgcgctcaggagatgccggcaagcaggtcgcctttggccacgtcgttgcacgctatgcggagcagttgctggcgtcctga

SEQ ID NO: 89632 - DNA, 1359 bp, Pseudomonas syringae pv. maculicola; identical to SEQ ID NO: 86262

SEQ ID NO: 89633 - DNA, 651 bp, Pseudomonas syringae pv. maculicola; identical to SEQ ID NO: 86263

SEQ ID NO: 89634 - DNA, 2349 bp, Pseudomonas syringae pv. maculicola
atgcaacgatttgcccgcaatgaaatacccccacctattttccgcgaaaaaaggttcaagttggctcgaaaggagttgcttgaactcttcacgctcgacacacaggaactctcacaaacccgcattacgggagaagagctgagtctggatctgagccaggtcggccccattcatgacgcgctagggcacctgtttcatggcaaatgtgcattttgcgaaagccaggacctgaccgtcccctaccgatttcgagcggcgtcatctgtaacgtctgccatgggaatggtggactcacacctctactacgtctggctcgcgaatgcctgggaaaacatctatcccatctgcatcaaatgtattccgcgccagcctgcgttctttcctgtcgacggcaaacgtgtgccgattccaagcctggagcaaatacgccggtatgccgcagaggatctcgggtcatggcgcacctccggaccacgtgagtcagccgttttgctcgatccatgcattgacaggaattttgagcgacacctttttccctccgttgatggcgatctgctgccactgagtgaaaggggtgatactaccatcgccaatttccgcttggatcgtctcgacttgaataaggcgcgtgccgccagacttcgcgagtatcgcgaggctctattggcgcccgatcgaaaccgggcgaatttacgctacagtaattttcaaaatttatttgacttccaagaacttgaatttggtggcctgtggtacctgcaatgccggctcattgcgcggtacctatcgcaaaaagttggcatggtaatgccgaccggccgctcccatatagcaaggacactgaaaaccctgctctttatgggggactataagctgtcgcatgaacaattaaagagttggattgaagagaccgatttcggccacctaccgcttgagatcccgcccacggactatggcgttctggagcccgcgccggtcatccaaaaggcagtcgtaccgcggatttatccttctttgcactctttgcagttcgaccacttcaaggtcatcgagcacctcaagctgaaacttgatatacccaccgccgaatcgcagttgaacaacgcagcgttgcaaccggcactgttgatattgggtgaaaacgccactggtaaaagctcgattctcgaagcaattgcgctcgcgctgagtccccgtgaaacacgtagggcattgaacctgacgccaggctcactcgtgctctcccctgcacaactcggttcaaatgacacgcccacgcaattctgggcacgcgtgcgactcgggtttgacgaggggcgtgacaaagtgttgagcattgacaatgccgcctgtaaacaattcggaccacgccttgtgccacctgtgtttgcttatggtgcctttcgccagtaccagaaaaaaacaccgccggtttttgaacccgctcacgggatcatcaacctgttcgaaaccgatcgcctcctcgcaaatccggaacaatggttacttgggctcaaaggcgaagatttcaatgacgtagcacgcgcgttgaaaatcatcatgtccgtggaaggcgacatcaaagtcatcgaaccagcccccgacggcaaatcctgcttgatcgtgacagcgcccgccggcgttgtgaccaagacaccgctcaatgatgtgtcctcaggttaccggaccatcctggcaatggtgtgcgacatcatgcaacggttgatggatcggcgcataaaccccgacttcccgggtcttgagcatgcccaagctgtggtattgatcgacgaagtcgaagcgcacctgcacccacgctggaaaattcagattatgcaggtgttgcgccgggcattgcccaagatcacgtttatcgccaccagccatgatcccctgtgcctgcgcggcatgcaggacggagaaatcgtagtggttcatcgccggtccagggccggcggggccaatacccagtacgcgacgtgtattgagcaactgcatgatctacccgactccacgcagttaacgattgagcagctgttgacatccgactttttcaatctgatgtccaccgaccagccggcaacggaaaaacaattggccaacgttgccgacgtgttgaataagttaaaaagaaaggagacgttgaccgacgaagatgagcaggtcatgcggtatttcgaaaaggagatcaaggaggctctccccattggcaccagcgaagcccagcgcgtcgttcaggaggctgtcgcccagtttcttcaggaacggcgggaaaagccatccatcgagtggggcgcgatacggacggacgccaagaccaaaatattgaacatcctcaggaactcttga

SEQ ID NO: 89635 - DNA, 1098 bp, Pseudomonas syringae pv. maculicola
gtgcgcttcgttgaccgatccttgattaaaaagccccgtgcaatgcggccgagaaagacaaccgtcagtgctgcggatcaggaactcctcgacttgaccgcccattatgaaaaaaagtccgccgcgcttgcagctgcactggcggctgatgatccggttgcggcctcagcctctgtggcggaggagttctcagcgaaaaagcctccgttcacgacccaccggaaagactcggtcaaaacccagctgtacgcaatatttcatggcaaatgcgcgtattgcgaaacattctaccctgccgtagcgccagttgacgtggagcattaccgacccaaagggggcgtgagccaggatgctgatcatccagggtattggtggttggcaatggagtgggaaaatctgctgcctagctgcattcattgcaaccggctaaataaacacgcaacgccgaagctttcgacccagctagttgaactgcgcgctgacggcacaggcttcagtgaccaatacaaggtcaccacgggcaagggcaaccactttccaatactggggccacgcgctacgccagcttcaagggattgttcaaccgaatacccgctgttgctcaacccttgcctggatgacccacaagagcatttggccttccatgtcgaccgcaaaaaactcatcgggctggtgttacccaaaccgcacaacggtgcggggctaccggcgcacgtttccaccacggacctgctgccagcgttcgcagacgaaatcgatcaggcgctaagggacaagctcagcctgcgcggcgccgtgtcgatccacacctatggactgaaccgattgggattggtccaggatcgcacgcgtgtgctgcgccaactcgcatttctggaggagtcggtgaaggatctttgcgccatgatccagagcctggaagcacgcataaacgaccccttcgcggttgaaaacatacgcatcatcaagcgcatggaggcattggtagaacgcacagcgcagcacatggcggatatggccaagcctcaagcgccctactcgaccatggttcgcgagtttttacagggctttgaggcgcgcctggttgccattccctag

SEQ ID NO: 89636 - DNA, 1389 bp, Streptomyces sp. NRRL S-4
atgtacgtcagccgggtttccgtccaggacatcaagtcgttcaacggtccgcgccaggtcgacctgcgcctgacccgcccggacggcacccacgccgggtggacggtcctggcggggcgcaacggtgccgggaagacgaccctgctgcaagcgatcgcgctcgcactcggtgggccgggtgtggcacggagtctgatgcccggcttcgagaactgggtgacggcgggagctgcagaaggccgagttcaggtggaggtctcctacgagaaaccgtatgacttgttcacggacgggcatccaggaagccgcacgttgaccgccggcctcacatgggccattccacctgagcaggtttcggccagtgggctcaggtacagggtgggagttccatcagtagcggagaccggcaaagaaggaagctggaatcacgaggccagaagaggcccctgggaagacaatcccctgggttggttctgtgcgtcctacggcccgtttcgccaactggtagggactgctgacatggatctcctcccccacgcgtttgggccagtggcccgacacgtgcacctgtttcaggagaacgctgggttgaccgatggcatctcgtggctggtcggtctccacctccgggcactcgaaggacggccgggggctgaacagctcaagctggccgcactctcgattcttcgagacgggcttctcccggacggctatcggattgacgatgtcgactccgaagggttgtgggtcgaacgcgaggggattcggtttccgcttcgggagatgagcgacgggttccgcgctggtgcggcactggttgtggacattctccagcagatcgacatggcttacgggcatatcgactggttggcttcggatggggaactgctgttcagccaggtgcccggggttcttctcattgatgagatcgacgctcatctccacgtttcctggcagcgtcgcatcggcccgtggctgacgtcacatttccctaacattcagttcatcgtcactacccacagcccctacatctgtcagtcggccgatcccggcggtttgatcctgctgccaggtgccaacgaggacacagcgccccgaatcgtggcggaagagcagtttgaacgtgtgatctacggcagtggcgatgacgccgtcctctctgaactcttcgggttggacacgccctactccgagcaggccgagcgtaaacggggcgaactggtggccttggaaatggacttgctgcgcggccaggtcgacgcggagacggccgaccggtacagagagctcaagcggctgctcaccagttcaccgacggctcggctggacgagatgtcggcccggctcaaggacctggccgacgacgaaccggaggacccctcacgatga

SEQ ID NO: 89637 - DNA, 744 bp, Streptomyces sp. NRRL S-4
atgatccggctgcaacgcctggatctgccccaggacaccgtgacgcgtatggacgaccacacggaggagatcagggagtccgaggagccgaaggacaaggcgcgctacctgtggacgcacacgacggtgcgccggcatgtccacaccgccctcttcgccgcactgggagagatggccccggggcacgagcgctgcatgtactgcggggacaaccagggctcggacatcgaccactacgagccgttgtcgacggcccccttacggaccttcgagtgggcgaaccacctactggcctgcgccgtctgcaacagccaccacaaacgtcatgtgttcccccgcgacgaggcggggcgcccccttctcatcgacccgacgattcaggagcccttggaccaccttcacctggtcctcggaaccggcctgtacagaggactgaccccgcaaggcgactcaagcatcgacgtgttcgggctcaacgcccgtggggcgctggtgaaggggcgacacgacgcgtacagcacggcagcgctcttcctggggaagtggcgcgcggcggctgacaaggggcagacggacagggcacgcgacacggtccgcatcgcgtgggacagaccgctggccgacgtgctggcgtcgatgtttcaccaggcggttcaccccgccgccgagctgctgttcagcggcgaggacgaggtgctggacctgcttcgtgatccggccctgcgcgccgggtttctcggctga

SEQ ID NO: 89638 - DNA, 1647 bp, Serratia marcescens
atgaaagtcgataaactgcatatacgctcgcgctttaaaaatctcgagaatgtaacggtggactttgatcaagaccatctaatgacggtagttgttggccgcaatggctcaggaaaatccaatgtattagaagccttggtttccatattccgtaatttagatttaggggaagcaccgccgttttcttatgaattggtttatcggctgggtgagccgcataaggtaaaccaacccagtgaccggtggttggagataatcattgatgccgacccaacacgtggcacgctagcgaagcaatatgaagtttgtgttcgagacttattaagtggtgaaatatctacggatatgcccgttgaaaaaaaccaaggaataacgatacctttttctaaggttaaacgtgacaaagaggggagcgcgccctatcttccaaaatatgttttcgcttattattctgggcctagcgataggctggagaggtattttagaaaacatagaacagatttttatagaagcttattaaaaaatgaattagatttaaagggtgatattcgtccacttttctacgccaagcctcatcacagccaatttgtattgttggcatttttcttgtcagaacaagacagcaaagaaaaagcatttttacgtgagcatttaggtatcgaaggtttggatagtattcactttgtgatgcgtcagcctggttgggccaagaagaagggggagttattctggggggctagcggagtggttcgccgttttttagatgagctaattaaatacactttatcaccggtgaaaattacccgacaggaagatacctcattaactggaagcaatattcgtaacgagtttttccatcttttcttacctgatcaatatgctttacgtgatttcgccagggacctcagcgctgacgaactgttcaaaatgcttgagagcacactgttgtctgaaattatttctgaagtcagcattcgggttaaggtatctagcagtgaagagccacttacctttcgtgaactaagtgaaggcgaacaacagttgcttaccgtattgggtttactcaaatttactggtggtaaggattcattatttctactggacgaacccgatacccacctcaatccgtcttgggctgtgaaatacctcaagtttttgcgagagttcgtacctaatcatgaaactagtcatttgctaatggtaacgcatcatccacttgcaatcgcagagctaaaaaaacaacaagtacaggttatgtggcgtgatgatgattataaagtccactcacaagagccctatattgatcctcgtggtgccggatttatggcaactcttactgagattttcggtctcaacactacattagatctagaaacacaaagcttactggatcagagaaacgaacttgcccgcatagaaaatcgttcagaggaagagaacaatcaacttgacctaattaatgactatttgaatagattaggattttcgtttgaaaatagagaccctctatacagcgattttcttttggcttggcaggatttacggtattcggacaaacctctgttaacaccagataaggctgctcaacgtcgcttagcgatgaaaaaagtaattgaagcgatcctaactaagaaggatgaatcatga

SEQ ID NO: 89639 - DNA, 843 bp, Serratia marcescens
atgattttcattagacgtgatgcagctcttattccccagaaggttttggatgttgccctgcgagcacaaagcgctcttgagaaattatcacctgaaaaaagaaaagaattcattaagaaaaagtcacatatttggagagggttttcaaaatatctggcaaaaatgtcttatggaaagtgttggtattcagaggcgaaggatgcaggtgcaaattttgatgtcgatcatttcagacctaaagctgaagcaaaaagaaccgaagagatagttgatttagaaggctatgcatggctggcatttgattgggataattttagactttctgcacaaaattgtaatcgactgaatactgacgactctggggaaactcacggcaaaggtagttggtttccactaattgaaggtagtccaaaagcctcatgggataatcgatgtattgagaatgaaatggtcgttttgttggatccagttattaaagcggatctaacttatatagattttgatgataatggtagatttaaaccaagccaactttgtgttggaatccctgcggtgagagttagacaatctggtattttttatgggcttaatctggaaaagatgcgagaagctcgatttgaggtcatgagggatgcaaaggagttattcgaaattattcagcagtctgctttagaattagagcagtttggcgataatgcaccaatgaaaactatagaacgccaaattgaaaaattacgaatgaagactcgagctgatgcaccatttagtcgtgcagtccgagctcagcttacaaaaattggggcggatgattatttaattgataggagtttggatgcagcatga

SEQ ID NO: 89640 - DNA, 1356 bp, Pseudomonas libanensis
atggaaatcagaaaaattcgactgaataacgtcggtcgttttgccgacttggaagtcgcctttgcgcctaccgaaaagcatgcgtcgaaggtgacggtgtttgtggggaacaatggggcggggaagacgacgattttgaagtcgatagccacgtcgttaagttggctggttggccgcattcgcaccgacaatggcggcggcagtcccatccaagaggatgtggtcactaatggtgagcgattcgcgacaatcgaggctgaagtcagcggtataactcacccgtcagcatcagcctcggcgacctattcatggacacttgctcgcaccttgcggggccataaagcaaaggtaaatagctctcttactaaattaactgagctggctgaactctatcgcgttcatctagggttgattgatggcagcggctcacttcccctagtggccttctaccctgtcgaaagatctgtccttgacgttccactaacaatccgaaaatccgaaaatccattcgatcagtttgatggatacgaaaacgctctaaatggtggcgtagatttcggacggttttttgaatggttccgtgacagagaagatactgagaacgagcagggcatatcctcagccgtaatggaacagctggaaaaaatctccagtacggatgaaaaactggtatctgagctgaaaaatatgcacctagcatcacgtgatcctcagctaaatgccgtgcggaccgccgtcagcaagtttatgcctgactttagcaaccttagagtccagcgaaaacctagattgcatatggctatcgacaagctaggcaatacactcagtgtttctcaactttctcaaggggaaaaatcactgatggcacttgtcggcgacattgctcgccgcttggcactcatgaatccctcattgaagaatccgcttgaaggcactggtgtcatcctaatcgacgaggtcgaccttcatctgcaccctcaatggcaacgccgcctaatccagcaactcactgaaaccttccccaactgccaattcatcctgacgacccattccccattggtgatcagcgataccaagaacgtcctgtgctatgtcctcgacgatggcgaactggaggagcgcaccggcctatacggccttgatgccaatcaggtactgctcagcgtcatggacacagatatacgcaacagtgaagttcagtctcgactggatcgcttgctggagttgctgcaagaaaaaaagctgaaagaagccaatgcactgttcgaagagctgtccactgacctgccccctggccatatcgaactgaccaaagccgcccttctgatccgcaagctggagttgcgcagtgcgtaa

SEQ ID NO: 89641 - DNA, 630 bp, Pseudomonas libanensis
gtgcgtaagatcataaaaggaaatgaaccagcagaattgacgaaatggatgcgcgacaatccgaaaggtcgctactgcgacctaacccacgaagaaagaaacagtattcgccaagcctgtatcgaagagcagcatggtttgtgcgcgtattgctgccatgcaattacccaagagactgcccataacgaacacgttgcggcccgggagacccacccccatcggacgctcgattattcaaatatcgtcgccagctgcaaccgcagcaaacagtgtggcaaagcccatgcacatcagacattgccactgacatccttgatggacgaatgcgaaaccgaactgaagttttatctatcaggccgtgtggagggtttgagccccagggcgatcacgtccatccaagtgctgaaccttggcgactgccgtgaaaacaatcgcacgctgttcagcgccagaaaatccattcttgatacgctgctcttcgactacggaatggaaggcaatgaccttgaagccgaagacggcgagcttctgaagatgctactggaagacttaagactgcccgatgcgcacaatcggctgaagccttttgcccccatcctcgtaaatgtcatccgtcaactaaccaactga

SEQ ID NO: 89642 - DNA, 1245 bp, Nostoc piscinale CENA21
atgttaaaagaacttcacctccagcaagttggccctgctgcccactttaatgtcgcatttgccgataggctcaatatatttacaggtgataatggtttaggtaaaagttttttactagatatcgcttggtgggtgatgactacaaattgggtagaacaaccagcatacccacagcaagttagaggtgaaaatccgcaaattacaggaatagttagcaataaaaaagatataagagaatatcggagttactttgatttctctgaacaaaaatggcgtagtttacaaatgcctcctttattaaaagaggtcgttatttatgtacgggttgatggtagtttttctgtttttgacccagctcgtcaacgcgatattgcttataattttaacccaaatacactctggaatggattaaaatcaaaaaataaagttctttgcaatggtttaattcaagattgggtaacatggcaaaatcaaccaagtaaatatccatttcaactattttctaatgttattaaaaaacttgcacctcacccttcagaatggatagaagtgggagagccaacgcgagtttctattgaagatgtgcgcgatattcctacagttaacctaccttacgggaatgttcctgtcactcaaacatcagccggaatgaagcgtattttgggactagcttatttactagtgtggacttggtacgaacataaaaaagctgctgaattacggcaacaaaagccagtaaatcagatagttttactaattgatgaaattgaatctcatttacatcctcgttggcagagagtgattttaccagctattttagctgtagtgaaagaattacaacccaggatgaagatccaggctttagtaactactcattctccacttgttcttgcttccttagagccaaattttaatgagcaagaagatcaactatttttatttaaattacaagatagagaagttagccttgatgaagtaccttggtcaaaacaaggggatacagttggatggttaacctcagaaatttttggtctcaaacaagcccgttccaaagaagcagaaatcgcaattgaagcagcagaggcttggatgcgtaatgatgatatgaatgcgtttccagaacacttgagaagaccaacacaaatccatcaggaacttcaaagagttttaccaggacatgacccattttggccccgttggatagttacaacggagaaaagaaattttgggttatcagaggtataa

SEQ ID NO: 89643 - DNA, 588 bp, Nostoc piscinale CENA21
atgatgccatttaatcctcctccagaaccgcctgattttgatgaaaaagtacgacaaccgggaaatgcttggttgcaaaaaaatcctgatcccaaaaaaggaacaagagattattggtcgcccttcaaaagttatttagccgatggatttaataatctgtgtggctatagcgtcatgtacgaaccagttgggacagtagatcattatcgcagccgggaaaattatcgctatttagcttacgaatggagcaatttacgctttgcttccgcttggataaatagtagtaaagggacgcttgacgaccaagtgcttgatccttttgatttgggagaagattggtttgaaattttacttccttccctacaattagtattaacagataaagttcctccgcaacaacttcaaagggcagaatttactttggaaaggttgcggttacgggatgatgaaagagtcctgcgccaacgtcaacaatggtatcaactttatttggatggtgatttgactctacaaggattagagaaaaaagcccctttgatagctcgcgcggtaaagaaacagcagcaggctatttctcaacaagggtaa

SEQ ID NO: 89644 - DNA, 1251 bp, Mesorhizobium plurifarium
atgatattttctgggctgacattaaatggatggcgccaatttgaggagattgatatctctttccatcctaagctaacagtcataactggtgcgaacggtgctggaaagagtacactgctaagtctgatatcccaacattatgactggagccagccgctactttccacgccaacctacagtaaagatggattaattagatacgtttctggtttgtttccttgggtgaataaaagtgataattcaagtagtaaaactgttggtaaatttttttactcaaatggagcaaagtccgaaatagtggttccatcagtaaactctataatgtacaatgtgacgatcaatcctcaacctccagtcctcggtcttcacataggatcccatcggcctgcccctacttatcagcaggttggcaacatacctacgaatgcgatcggagcggctcaagcatataacacatatcatagtgaaattgttcagcgtcagcaaaactcttatagccaatttggaccaatctacagaatgaaggaggccatcatatcgatggctacatttggacctggtaatcgatacgtccaaaggaacgaaaatgttgccaagctgcttgagagcttcaaggaggttctaagcaaaactctccctccgtcgattggatttagagacatcagtgtacgaattccagatgtaataattgtcaccgatactggagattttgttatcgacgcggcctcgggcggcttgatgtcgttaatagatttgtcctggcagatttttttatatgcatacgacaaaaatcagttcgtgataactatcgacgagcctgaaaaccatcttcatccatcaatgcaacgagcgctgttaaatcgactgattcttgcttttcccaacgctcaatttatagttgctacacatagtccgtttattgtttcttcggtaaaggattccgctgtctatgtattggggtacaaaggttctcaatcgcatagcgatcaaagtattaaaacaacagtttcttccttgaggttagatagcgccaacaaagctggaactgctagcgaaattcttcgtgatgtgctaggagttcctgtaacgttacccgagtgggccgagaatgatttgcgtacgatagcggaccaatttcagattgaaaatttgaactccgaaaatatcgttcttctgcggcagcaattagtcgcggcggggctgggggaatactatccggaggcattgcgacagatcgcggggactccatga

SEQ ID NO: 89645 - DNA, 672 bp, Mesorhizobium plurifarium
atgatccacctgacaaaagtcgcaaagccacagattcttgaagacaatgaggtcgcgtggacggcagcaatagtggacaagcttgtggccggcgaggttccgacgaatgcagaaaaaactcgatatcgaaaccctcatattaaggccgctttagttacagaaacgcatggaaaatgcgcatattgtgaaagtaagcttcttcatatacatcacggcgatgtcgagcacatttatccaaagtctctcgatcccgaaaaaacatttgtttggaataatctcacgttagcttgtgaaatttgcaatcaaaataaatctaacaaggatccatttttggagcatattatcgatccttatattgtcgaaccgtctgatcacttaatctttagcggccccctagtttttccgcgcggtactgcggcgggaactagcactcgatctctgcttgatctcaatcggggcgaattgtcggaacgcagaaaagatcatctcgaaaagataatgggaatcattgatactatatctcgtgcagaccttccgatcgctacgcgacgtgcgatttttgcggatctgcgtgatcatgaggcccatccatctgcgcagtacgcagcgatggtgcaaactgtgattgggcagattgcgccttcccttcccatagatataacagctaactag

SEQ ID NO: 89646 - DNA, 1722 bp, Achromobacter sp. 2789STDY5608606; identical to SEQ ID NO: 89026

SEQ ID NO: 89647 - DNA, 813 bp, Achromobacter sp. 2789STDY5608606; identical to SEQ ID NO: 86709

SEQ ID NO: 89648 - DNA, 1428 bp, Achromobacter sp. 2789STDY5663443
atgcaagttcatcaggtaatcagccagaggctatacgtcactctcgggcgcaagctctcagacagtggcaactacgtcgatgtcattactgggccaaacgggtgcggaaaaacggagctgctggaggtactcttgcagtacgcaaaatcgccttaccagagccggcctaaccggtcgaacctatggccggtggtccacgctaccggcatgcccggcaaggttgttgtacagacattcagtcctttttcacgcttcgaggcgcccaaggctgacgccacctcgctcacagaaaggtacaccgaagatgatgttgagcaaagcaaatatgtttgcgctggtcttcaccggtcctctcgaagcgtcggtgccactctgtcgcgcaaggttttggaagaggcactcataaggctgagcgaaaacccagaaacggccgaaattctcttatccgtgctgtacgagctgggctttcagacccaattccgtctcgggtacaagctgaaaattgggttcaagcacgcgtttgagaaaaatgaccccgctcgttttatcgagtcgcacctgcaagacatgcagaccaaaggcaggctccgccccagcgaaacacggattcttcgcgaactgaactcaggcaaaggtgaagagtttcttggcgtactgcgccattccatcgatgtcgttcgggaacaccacgaccaacgcgctaagagctacgtccttcctatctcacttcagaatgtgagacgggactttcatgtcatccagacctttgtgctcctgcgtcggctggacctcctgaacctgacgtcgtgtgaacttcgcggcaacgaggttgagtcgatagacgttgccaagaccagctccggtcagcaacaaatgctctgtgccatctttggcctcgcgacctccataactcccgactgtctcgtcttgctggacgagcccgaactgagccttcacccggagtggcagctgaagtacgtggacgcactcttcagaatcgcgcggtcggtgcataacgctcacatcgtcgttgcgacccattcaccgctggtggtccaacaagccgtactccatggcgcagacgtggttcagatgggggacgatgggacacgctactccgctcacccactgcccatgttttcggacacgcccttgtcgattgaacaggctctcgttgacgtattccaaacccccattgtcggcagcgcccacgtctcaaacgagatcttccaggccgttgttataggagaaacaggtgaccggcttgaaaaatctgaggccctcgccaagcttgaccaactcggcaagatatatcgggacgagaaggacgggacgacagctcagttggtcagagatgcgatacggttgataaacacgcccgataccccaccgcctcctagcgtcgacgtgcgtcagcgtcttgggtga

SEQ ID NO: 89649 - DNA, 831 bp, Achromobacter sp. 2789STDY5663443
atgactttcagagataaagcagacccgctgactcagttgaccacgctcaacgccgtggaacacggcacgctgaagaccgatggcgcacaaagtcaccacctgtggtcggatacccagtatcagcaccgacaactcgtcgacaagttcagggcagaagtcaaagaccactacttttggcaccagggctaccggtgctgctactgcagtacggaactccagccgaatgcccgtgtctacgacgccgagcacatcttggacaaatctggttttccagagttcatgttccacccggagaacatcgcggtagcttgcgtgatatgcaacacgcacaagtctgcgaagtcagtgctgtccgatgacacagtgcggcctctgaccatccccgcactttctaccgactacaaaatcctccacccacatttcgacgagtgggaccaccatctgagttttgacgagttaggtcggatagtaccggtacctggcagcacgaaaggcccagaaaccatctcgatatgcgcgatggacggtattaatctactgcggctgtcacggaagtttgctccggcgtcccgtaagggagtctacaagctgatgtgcaaggtagtcacctacgtaagtccttcgaaaatcgaagacacgttcgccctcatgcagaagttggcggaccaatcgcccgacgctcttgccgttgttgcaactctgagagaccgagtcgctcagatgcaggcccagcgagccgcggaggctaccgcggctcaggccgcgcttctggccccccggcctaccctcgctctacccgccccggataaccctctagcgggcgggttgtaa

SEQ ID NO: 89650 - DNA, 807 bp, Citromicrobium sp. JL477
atggccgttcgcgcaatgcgggatgtgttcagcatcgatggcgagttcgatgtgctcgagcgccgggacgaccgcgtattcgtggtccagaagctcggcgaaggtgaagccggaccgctccagcacacgccgctgacgatcgtttcttcgggatttcgggccgtgctcgccatgttgtgcgatatcatgcaggggttgatggacaagcgtgtgaacccggagttcagaacgctggagaccgcgcggggcatcgtcctgatcgacgagatcgaggcgcatctgcacccccgttggaaaatggcgatcatgaccggcctgcggcgcgcgctaccgcaggtcaccttcatcgccacatcgcacgatcccttgtgcctgcgcggcatgaagcctggagaagtgctggtcctcgaacggattccgggtgctcaggccgacaccgagcttccggtgttcacccaatcgctggtcgatcttcccgacaatagtcactggaccatcgaacaactgctcaccgccgacttcttccagctgcgaagcaccgaaaacgccgatgcagaacgccgtctcgcgcgcatgcaggacaagctcgccctcggagtgacaccggctgaagatccggaattgcaggcctacctcaatgagatcagcggcgcgctcccgatcggcgacagcgaggtccaccggctggtgcaggaagctgtcgccatgttcctcgccgagcagcgcaccgcaacgcgcgagcgattgaagggcctgaaagaggagacccgccaagctatcgtcgaagcgctgcggagcgccacatga

SEQ ID NO: 89651 - DNA, 963 bp, Citromicrobium sp. JL477
atgaggccggtgccgcgacccgccgatgtgcccgaaattctcacgaccaagggtgccgaggaacggaagaaggccgtgcgatacttcgggccgccgagggcgtccgcgaaggccttcccgtttgcgatctacaagcacaaggaagtaaaaaacgagctggaacggctgtttcgcggaaagtgcgcctactgcgagactttctatgcgagcgcccagtcgatggacgtcgagcattaccggccaaagggtgcggtggagggcgacgacgcgcatccaggttactggtggatcgcgatggcatgggacaatctcctgccgagctgcatcgactgcaatcgcaagcgctatcagatcacgccaaggggagatgtcagccaggtccggctgcacgaagccacgctcggtttctccaggtcctcgacggtaggcaccggcaagaaagacagcttcccgctcgctgcaggcggggttcgcgcgacccgggccgacgattccctgtctgccgaaaagccgctgctgctgaacccgtgcgaggaagatccgggggagcatctggaatacctgttcgaccccgccaaccctgtctccttcgtggttgcgcgcaagctggtggggggcgacccggacttcgccggtgaccactccctcagcctcaaaggcgcgacttcgatccacgtctacgggctcaaccgtatcggcctggtccaggcccgcaccgaagttcttcgacggctcgagtttctcggcgccttgatgatcgacctgaaggcgctggcgcaggacctcgcgggtgcgccgcccgatgagacggttcgtcgggcggaacgggccgtctccggatttgccgaccgcttgctggtcgagatgagagcgatggccgatccggcacggccctattcggcgatggtcgcggcctggctggaccacttcgcgtccagagtggcggatcccgacgctgcgtag

SEQ ID NO: 89652 - DNA, 1953 bp, Vibrio splendidus
atgatcccaatatccttatttgatttaggctctgaagacgtaaataaacacgagtacctcaagcaattattatcttttccaactggctatgatccgtatcaatataatgtaaagcgtgacccatattatagtgaagcgttaaaaagaattactgatagctctcgtgtgaaattatccggtaacattgaacactgtttttattgtggaacccaaacggataatattgtgccagctttctttcatgatgggtctggcattaacttgtggatctatactgattggaaatgttccgctttaatatgccatacatgccacgagaactatggttctagtaatgtaagatataaaaatagagtgcgaaaaataaacagaggcaatagccgtagtttattacatttcgaaccggaaatcgttttacctacaatcgaaccagtacacttgcattttaactaccttgatgatgggcgtttagtgcctttatcacaaagagcgaaagcaacaattgaaaggttatcgttaaatcgaaaagaactggtaagtcgtagattgtgtgccattgaaaactacagaacaaactatgattcttttgaatatagttcccttgaatctcccattgatagcttgtttattgcgagtgttgaagttgatgatgatggttctttttctgactatctattaaaaagagttcagcgtgattctattttttatgatgacttattcaatgacattacaccaattccactaaggtcggaatcatttaaacctatagagatatataaaagggatttttttagmtatacattttcaggtatttcttcaataaaatttgatggtattcgaggttttgatattaatcagaaattagaatttaatgggaaaaatagcttaataattcttggtgaaaatggtgtgggtaaatcaactctattggaattattaaaaagagcacttaagccaagatacaaaaaacaccttgatgacctatgtaattcgattgatactttgcctacgtacgaaatcgagtataccgatgaaaactatcattatatttatggctcagataagaaatcaaaaggattacgcgataaatgcaatttgatacatgtttctgaaaataggagtcattccaaaaccccaaatctgttagcacaatgggtctggagtcagcataaaaatgatcaacttatacattgggttgcgcgtaagcttaaaacgttgctagatttacctcaagactattatttttgtaccatagatggaaaagtatattgggaaacagagagtaatgatacaggaagagtttatataactgacttgagtagtggttacaactccttgctaactatattctatatggttatgtctggaataaccgaaaaagaagtaattaatgatttgaacctaattgagaagcgcttaagtagtactttggttctcgtagatgaagtggaattacatttacacccacgtttcaagaaaaaagtagtatctaatttaaaagaaacctttcctgaggtaatatttgtatttacaacacatgaccctttggtgataaaatcagcaaataataatgaacatgtcattgttctagagaaaaataataacgtcaacaaaagtaatgtaaaaactagaataatagataccttaccagaccatacacatcttactacagaacaaatactatcaagtcctatctttggacttggtactatgtgtggagatgattcgattcaaaaacaagtcgacaactattatgtcgctctacgaaataatgacattcatattatcaatgaacacaggaaaatattaggaaaaacaggtttctttggtagtacatttagagagttgttagctttatctgccgtcgatgcatacatatcaaaaggagtcattcccaaaaccgatgatatagaaaagatattagaaaaggctgaaaatcatgagaaagattag

SEQ ID NO: 89653 - DNA, 1101 bp, Vibrio splendidus
atgagaaagattaggtatatttcacctgttccagcaaacatggacccaaacaccaccgtgtatcagtcaattcttaccaataacaggcaaaagttcaatctttctcgggggaatactataaatttcgattttagtggttatgataacgagaataacaaaacgagaatcagagcactagcaagtcaatgttgtgcatattgtggtgtgcgagttaatagctcaaacacagttgaagttgagcattttaggcctaaaaatgaacttaagtgtcgagataatgagtttatcttgcatcataaatctggacatcgcagtcataaaacgactagaaaggcatcagattttggatattaccagttaggaaatcactatgaaaacatgctcccagcttgtggaggatgcaatcgaggggctggtaatggcggtatttatgttggaaataaacatgttactgacattccctatggaaagaaaaataatttcccagttagatttaagaagttagatgggatttataaagaataccgaaaaggcacgcgagcaatagagtctatacaaggagaggtaccactattattcaatccttataaagacaacccgaataaactctttgattataaaaatccgaatagcgtcggagagtgctttattgtaaaaattcgacctggaaaaaacctatgtaaaaatgaaaagttaaaagctacgattagcatcaacttgttaggcctaaacagggtttacttgtgtggagaaaggtatagaatttcttcttccattaaagatatagctagaaatttggttgcagatagaaagtcaaataattaccgattaaactcatgggctggatatgcagcaaattatagcagttattatagtagagaaacatcaacaatgcttggtttctcatttaaatttggctataaattaggctttgaattacataagagaatcaaagaaaacttcatggttgaatcaaatggtattttaactgatacgtgtaactttatgagagttgtagaacaactcagtttattctctgaacgatattatgacccaaatattgataatgatgaaattaatgatttaattggatttggataa

SEQ ID NO: 89654 - DNA, 807 bp, Citromicrobium sp. JL1351; identical to SEQ ID NO: 89650

SEQ ID NO: 89655 - DNA, 963 bp, Citromicrobium sp. JL1351; identical to SEQ ID NO: 89651

SEQ ID NO: 89656 - DNA, 807 bp, Citromicrobium sp. JL31; identical to SEQ ID NO: 89650

SEQ ID NO: 89657 - DNA, 963 bp, Citromicrobium sp. JL31; identical to SEQ ID NO: 89651

SEQ ID NO: 89658 - DNA, 2295 bp, Citromicrobium sp. WPS32
atgcgatatgtcgaacgcgaccggatagagccgcccgccgtgttcgggagcgatgatgcgcggatcagccgccaacgtgtgctcgatcttttcatgagcggcccggaaaccctgctgcaaacccgttccgaccgtagccgatcaatcgccgatcatcccgaggtgcgccgcgcgctcgcagacctgttcaaccattcctgcgccttttgcgagaccctcatcgatgatcccaaggtgttccggtttcggcctgcagagggtgcgcaccccgtcaccgaccgcgacctcgcacacctctattatgcctggctcgccgatgcctggcagaacctgtatccgatttgctgggagtgcatgccagaggatccgttctatttcccggtcgccgaccgtcgacgaagcccgatcccaaaccccgggcagcttagcgaatatatcgaccgcggcgatggtcgctggccgttctatcctctcgacgagaaaacgatcttcctggacccctgcaacgaccgggatctctggcgacatctccgtttctggagcgatggaagcatcggcgcgtacagcaacagtcgccgaggacgcgccacaatcagacagtttcggctcgatcgtcgatctctgagagaagagcgggtcgtcatgttcgagcggtatttcgctcagttgtgggaaggcctggaaaccgaggactatgacgatggcagctctctgtttccccacaggggcccgtttagcggcggttggcgcatataccttcgcgatctcctcgcgcgcgcgctcaatcgacgcgcgagcgaggatgtcgaacggcaactgctcgttctgcgcgaacatcgcgattggagggatcgcctggagcgcgcccgtgaagccctcttcgcaccgccggagccagaagaggcgtggaacagcgagcggctctaccacgaaccttctgctccccgagagcctcggcggatcgtcatccgcaatttcaaatcgctggagaatatcgaggttcgtcttccagctccctcgaccagcggcgaacctaatgctgccgcgctcctgatcctgggggagaatgcggccggcaagagcacgatactcgaagccatcgcgatcgcgctgatggatacggaaacacgtcacatgctggacctgaaagccgggcaactcgtgctcaatccccggtatctcggcgcgcgcggagcgcacagccccgagcaggccgaggttgaactacactatgcggaaggcgaaaagcagcatctgtcgatcgcgcccagcacgttagcgagcagtgatcatttcatcgaacaggactttcgcacccaaggcaagccgaactccatcccgctgttcgcctatggcgccttccggcaatatctggacgcccaacggcgctacaccaagcacaagcatgtccgcagcatgttccagaccgatcagctgctctccaatccggagcgctggctgctcggcctgaagagagccgagttcaacatggccgttcgcgcaatgcgggatgtgttcagcatcgatggcgagttcgatgtgctcgagcgccgggacgaccgcgtattcgtggtccagaagctcggcgaaggtgaagccggaccgctccagcacacgccgctgacgatcgtttcttcgggatttcgggccgtgctcgccatgttgtgcgatatcatgcaggggttgatggacaagcgtgtgaacccggagttcagcacgctcgagaccgcgcggggcatcgtcctgatcgacgagatcgaggcgcatctgcacccccgttggaaaatggcgatcatgaccggcctgcggcgcgcgctaccgcaggtcaccttcatcgccacatcgcacgatcccttgtgcctgcgcggcatgaagcctggagaggtgctggtcctcgaacggattccgggcgctcaggccgacaccgagcttccggtgttcacccaatcgctggtcgatcttcccgacaatagtcactggaccatcgaacaactgctcaccgccgacttcttccagctgcgaagcaccgaaaacgccgatgccgaacgccgtctcgcgcgcatgcaggacaagcttgccctcggagtgacaccggctgaagatccggaattgcaggcctacctcaatgagatcagcggcgcgctcccgatcggcgacagcgaggtccaccggctggtgcaggaagccgtcgccatattcctcgccgagcagcgcaccgcaacgcgcgagcgattgaagggcctgaaagaggagacccgccaagccatcgtcgaagcgctgcggagcgccacatga

SEQ ID NO: 89659 - DNA, 963 bp, Citromicrobium sp. WPS32
atgaggccggtgccgcgacccgccgatgtgcccgaaattctcacgaccaagggtgccgaggaacggaagaaggccgtgcgatacttcgggccgccgagggcgtccgcgaaggccttcccgtttgcgatctacaagcacaaggaagtaaaaaacgagctggaacggctgtttcgcggaaagtgcgcctactgcgagactttctatgcgagcgcccagtcgatggacgtcgagcattaccggcccaagggtgcggtggagggcgacgacgcgcatccaggttactggtggatcgcgatggcatgggacaatctcctgccgagctgcatcgactgcaatcgcaagcgctaccagatcacgccaaggggagatgtcagccaggtccggctgcacgaagccacgctcggtttctccaggtcatcgacggtcggcaccggcaagaaagacagcttcccgctcgctgcaggcggggttcgcgcgacccgggccgatgatcccctgtctgccgagaagccgctgctgctgaacccgtgcgaggaagatccgggggagcatctggaatacctgttcgaccccgccaaccctgtctccttcgtggtcgcgcgcaagctggtggggggcgacccggacttcgccggtgaccactccctcagcctcaaaggcgcgacttcgatccacgtctacgggctcaaccgtatcggcctggtccaggcccgcaccgaagttcttcgacggctcgagtttctcggcgccttgatgatcgacctgaaggcgctggcgcaggacctcgcgggtgcgccgcccgatgagacggttcgtcgggcggaacgggccgtctccggatttgccgaccgcttgctggtcgagatgagagcgatggccgatccggcacggccctattcggcgatggtcgcggcctggctggaccacttcgcgtccagagtggcggatcccgacggtgcgtag

SEQ ID NO: 89660 - DNA, 807 bp, Citromicrobium sp. JL2201; identical to SEQ ID NO: 89650

SEQ ID NO: 89661 - DNA, 963 bp, Citromicrobium sp. JL2201; identical to SEQ ID NO: 89651

SEQ ID NO: 89662 - DNA, 807 bp, Citromicrobium sp. RCC1878
atggccgttcgcgcaatgcgggatgtgttcagcatcgatggcgagttcgatgtgctcgaacgccgggacgaccgcgtattcgtggtccagaagctcggcgacggtgaagccggaccgctccagcacacgccgctgacgatcgtttcttcgggatttcgggccgtgctcgccatgttgtgcgacatcatgcaggggttgatggacaagcgtgtgaacccggagttcagcacgctcgagaccgcgcggggcatcgtcctgatcgacgagatcgaggcgcatctgcacccccgttggaaaatggcgatcatgaccggcctgcggcgcgcgctaccgcaggtcaccttcatcgccacatcgcacgatcccttgtgcctgcgcggcatgaagcctggagaagtgctggtcctcgaacggattccgggtgctcaggccgacaccgagcttccggtgttcacccaatcgctggtcgatcttcccgacaatagtcactggaccatcgaacaattgctcaccgccgacttcttccagctgcgaagcaccgaaaacgccgatgccgaacgccgtctcgcgcgcatgcaggacaagcttgccctcggagtgacaccggctgaagatccggaattgcaggcctacctcaatgagatcagcggcgcgctcccgatcggcgacagcgaggtccaccggctggtgcaggaagccgtcgccatgttcctcgccgagcagcgcaccgcaacgcgcgagcgattgaagggcctgaaagaagagacccgccaagccatcgtcgaagcgctgcggagcgccacatga

SEQ ID NO: 89663 - DNA, 963 bp, Citromicrobium sp. RCC1878
atgaggccggtgccgcgacccgccgatgtgcccgaaattctcaagaccaagggtgccgaggaacggaagaaggccgtgcgatacttcgggccgccgagggcgtccgcaaaggccttcccgtttgcgatctacaagcacaaggaagtaaaaaacgagctggaacggctgtttcgcggaaagtgcgcctactgcgaaactttctatgcgagcgcccagtcgatggacgtcgagcattaccggcccaagggtgcggtggagggcgacgacgcgcatccaggttactggtggatcgcgatggcatgggacaatctcctgccgagctgcatcgactgcaatcgcaagcgctaccagatcacgccaaggggagatgtcagccaggtccggctgcacgaaaacacgctcggtttctccagatcatcgacggtaggcaccggcaagaaagacagcttcccgctcgctgcaggcggggttcgcgcgacccgtgccgatgatcccctgtctgccgaaaagccgctgctgctgaacccgtgcgaggaagatccgcgggagcatctggaatacctgttcgaccctgccaaccctgtctccttcgtggtcgcgcgcaagctggtggggggcgacccggacttcgccggtgaccactccctcagcctcaaaggcgcgacttcgatccacgtctacgggctcaaccgtatcggcctcgtccaggcccgcaccgaagttcttcgacggctcgagtttctcggcgccttgatgatcgacctgaaggcgctggcgcaggacctcgcgggtgcgccgcccgatgagatggttcgtcgggcggaacgggccgtctccggatttgccgaccgcttgctggtcgagatgagagcgatggccgatccggcacggccctattcggcgatggtcgcggcctggctggaccacttcgcgtccagagtggcggatcccgacggtgcgtag

SEQ ID NO: 89664 - DNA, 807 bp, Citromicrobium sp. RCC1885; identical to SEQ ID NO: 89662

SEQ ID NO: 89665 - DNA, 963 bp, Citromicrobium sp. RCC1885; identical to SEQ ID NO: 89663

SEQ ID NO: 89666 - DNA, 1458 bp, Pseudomonas sp. In5
atgggcacccaggaaaacatgacgagtgccggaaaaaattcgctgcggctttcccagttgcgactgcgtgatttccgctgctttgaatcgatcgatatcgacttccacccgcagttgaccgtattggttgcggccaatggtacgggtaaaacgtccattctcgacgccatcgccatcgcctttggtccttatataggggcatttgacgaggcggtgggcaagcattttgagcctagtgatattcgccagtttcgtgccagacaaaccactacaaacgaaatggaatacgcccctcaaggggctaggctcgaggctacgggattcgttcccggcagtctgctcgatcggctgtccgatgatctactgcccactatttggcgccgtcacctttccagcgcgaccaagaccaagacatcggtcaaagacgccaaggaattggttgcctatggcaagcgcatgcaagaagcttcgcgcacgcccgacactgaggtcgttctgccactgatcgcgtactacggcactggacgtctgtggcagcaaaaaaaactgacagatgcgaagaacatccaacgcacctcaagaaccgtcggctacaccgactgcctcgatccggcatccagctataaatcgttcgtgcaatggtttcgctactggagcctgaatgccaaagaagcccaactcaaggcgcttgaagcaggggtcagcattgccaaaaccgaattcgacacctacatccagtcagttagtcgagccgtgaacgtgtgcattcaaccggcaggctggagcggtatcgagtactccttcacccgcgacacgctggttgcccgacatgagcaattaggcgaactaccagtcgagtggctcagcgacggtattcgcaacatgataggcatggtggccgatatcgcatttcgcgcaaccaaactcaacggccaccttggtgcgcaagcggcgcaaaagacaccaggcctgctgcttatcgacgaagtcgacatgcacctgcatccggaatggcaacaagtagtgctgctcaacctggcccaggcgttcccggccatgcagcttatcgtgacaacccacagtcctcaggtgttgagtacggtctcatcggacagtgtgcgaatcctgcgcagcgaaatcgttcccgagaccaccagccgggtcaccaccgtcagcgagccacaatggcaaacccgcggcgtcgccagctccgacctgttggcccgtatcatgggcgtcgatccggtacctcatgtgcctgaggcaatctgggtttctgattaccaggcactgattcaacagaaccttcatgagcagcctgagggacgtatattgagagacaggctggaagcccatttcggggctgaacatccagttgtgcacgaacttgatcgactggttcgtttacagggaatcaagcagcgcctgccccgcgaacttggcaacagggagcgttga

SEQ ID NO: 89667 - DNA, 639 bp, Pseudomonas sp. In5
gtgcggcgtctgaatagacaagacgaacctccggcgggcctgagacgttaccggcatggccgggatgcctggagtgctgtaacacccgaagagcgcatggctatctggctgtcgctggacttaatgcaagggcctcgatgtgcttactgcgatgggccaatgggtgatggaaatcgtcatatcgaacatttccgccagcgcgggagatacccccaaggtacgtttgattggagcaatctgtttggctcctgcaaccgtgccggaacttgcggaatggccaaggaccagtgtggagcttattccccagaaacgctgatcaagcctgatatcgaagatcctgacgtattcttgcttttcacgcccggcggcaccgtgcggccacgtgcggggctgacggcaaacaaccatcttcgtgccacagaaaccatccgcattcttgtgttggacggtgccttaaatcagattcgtcgcgcgcagctctgcggctatattcagaccatggagatttttgcagactacgccgaagcttatcccgacgatgatagttgggttgaggagttggagcgggaggtacgcgacaccgcgcatttgccgtacgcgacggcgatcaggcatgtgctgactcgtcagagcgagtga

SEQ ID NO: 89668 - DNA, 1410 bp, Escherichia coli
atgaaaattgaacaagttagcttaaaaaacttccgatgttttgagcagctagatgtgactttccacccgcagttgacggtgttaaccgcccccaatggtgcgggcaaaacgacgatccttgatgcagttcgcattgcgttatggccctttgtcaaaggctttgatctggggagccaaacaggcaagtcagccaccattcagattgaagatgtgcgtcttgaacgccgcgagcaagagatggaaccgatattaccctgccagattacagttcaggccacaggtatccccattcgtgaaaaacagccacatctgtacgaatggcaacaggtccgcgagcaagtcaagccacgaactcaaagcaaaggtgataggtcgacacaagttctgacccggctcgccaagaactaccagtctgtcatctacaagggacagcaagccgaagcagatactatcgagttacccttgattgtctatttaggtactggccgtctatggtatcaggggcgctatacctcagaagcggaggataaaaagctcgatgccagcgtattctctcgtctttggggttatcaaaactgcctgacggcgacctcgagctataagcagtttgaatcctggtatggctgggtatttcgcagctatcgcgagctgcaaattggtcagctagaaaatcagatcaagccccaggatcagagctcgttggcctactttgccgctgccattgaggttgtgcagcgtgccatcaacactctcacgagctcgctgaccggttggcacgacctgcaataccgggccagcatggggcagcaactggtgatggaacactatcagcatggctatatgccgctcgcgatgctcagtgatggtctgcgcaacatggtggccactgtgtcggatatcgcttttcgctgtatcaagctgaatccacatctgaaggacgaagctgcacagaaaactgcaggcatcgtgctgattgacgaagtggatatgttcctacatccggcatggcagcagcaagtacttggggcgctacaagaggcgtttcccttgctgcaatttattgtcaccacccatagtccgcaggtcctcaccactgtagccaaagagaatattcgtcaacttggctctgatgagcacggcacctatgccagaatgccgccttttagcccgctggcccatgagaacagtgatgcactggccaaggttatggaaactcatagccagccaagcctgccgctgcaagagaccattagtgaatacgaattactggttagatcaggggaggaaacatctgaacgcgcaacaacgctgttggcaacccttgagcaggcgggatatcagtttcatgagagtgatctggccacttggcgattcttggcacggcgtaagctggcagcaaaagggtcataa

SEQ ID NO: 89669 - DNA, 594 bp, Escherichia coli; identical to SEQ ID NO: 86647

SEQ ID NO: 89670 - DNA, 1410 bp, Escherichia coli; identical to SEQ ID NO: 89668

SEQ ID NO: 89671 - DNA, 594 bp, Escherichia coli; identical to SEQ ID NO: 86647

SEQ ID NO: 89672 - DNA, 2292 bp, Escherichia coli; identical to SEQ ID NO: 86352

SEQ ID NO: 89673 - DNA, 927 bp, Escherichia coli; identical to SEQ ID NO: 86353

SEQ ID NO: 89674 - DNA, 1287 bp, Phormidesmis priestleyi Ana
atgcacatccaaacgctcaccctcaaccactaccgaggcgcaaagtcgctcacccttgccctccacccccggctaaacgtattcgtgggcaccaacggcgcaggcaaatccaccgtcctcgacgccgccaccatcctgctctcctgggtcgtgaaccgcatccgcacccccggcgcatccggacgccccctctcagaagacgacatcaccaacgactacccctccgcctccatcgccctagaagccgctcacgacagcgaaaccattacttggagacttgccaaaggccgcagaggccaacgcgccctagaaaaccccactcacctgagcgagctaaatagctatgtaaagcaagtgcaggcgcaaattaccactgaagctgccagcattccactattcgtttactaccccgttaaccgagccgttctcgacatccccttgcgaattcgcggccagcatagctttgaactgctcaccgcctacgacaactccctcacgaccggagccaacttccgcaccttctttgaatggttccgagaacgcgaagacctagaaaacgagctaaaagcacgaagtcagcagccgctatccttatttgaagaaccgcagcccatcccccaagttcctgacccacagctcgaagccgtccgcagtgccatccatcaatttctgccagaattccaaaacctcaccgttcgccgcaaccccctccgcatggaaattcaaaagggcaagcagcttctgacggtcaatcagctttctgacggggaaaagtgcctaattgctctggtcagcgacctggctagaagaatggcaattgctaaccccgccgccgccaatccgctcgcaggcaaaggcatcgtcctcatcgacgaaatcgacctacacctccaccccaaatggcaaaggatcattgtgcctaagctgctcgaagtctttccccactgtcagttcatcatctccacgcactccccccatgtgctcacccatgtccagcccgaaaatatattccttctccagtggcaagacggcaacatcaccgcccaaaaaccctcagaatcctacggcaaaaacgtagaccgcatcttagaagacctcatgggcttagaaaccactcggcctactgctatcagctcagaactacacagcctgtatgaaatgatcgagcaaggtcacctagaagccgcccgagcggaaattgccagtataaagcgggacattggggaagaccctgacctaacaaaagctgaagttctaatcagacgcaaggagctgattggtcgatga

SEQ ID NO: 89675 - DNA, 618 bp, Phormidesmis priestleyi Ana
atgaagcatattcaaaagcaggcggcgcctcaggcttttatagattggaaatctcggcctagaacctacgaccgcttcaaaaaaacagccccgatcaagcaggtcgttaaggccgctctcatgcaagagcagggctatctctgctgctactgcgaacgccgcctcaccgacagtgactcccatattgagcacttcaaaccgcagaaagaccccaccgtagaccctttggacttcaataatttgctgtgctcttgccagaaggatctagatcagggcgaacctcgtcattgtggcaattcaaaaggcagctacgatgctaacctgctagtctcaccccttgatagcacctgcgaagctcgatttatgttcaccgctgatggctatgttcaaaccgcaatagaaactgacgcgatcgctcaaacaacgattgatgtattgcagttggatattcctaagctaagagctttaaggagtagtgcgatcgctccctttctaactcccgacttatctgacgatgaactgcggcagtttgtcaaaggctacttagcaaaagacgcatccggtcagcacagcgaattttggactacgattcgagcgctgtttggaggcttggtatga

SEQ ID NO: 89676 - DNA, 1377 bp, Phormidium sp. OSCR
atggaaattaaatcaattgccctaagaaattttgcactctttaaacatctggagttgtctttagcgccaacaccgcaaaaccccagtaacatcactgtctttgtcggcaacaatggaactgggaaaacgtctatcttgaaagcactaaccgtctcactgagttggtttattgcccgtctaagtacagaaaaaggacatggcagccatatcgcagaaactgatatcctgaatggcacgaatagcgccaccattgacgtaaaaatttgtgattccttgcaagcatcagcctaccctgatgataccgcaacagacaatgacttccactggaggatagccaaagccagaaaaggacgtaaggctgaatcgaccagtcaactgacagattgcacctgcttagccagctattaccgcaatgccttaagccaaaatgatcaggtaagcctacccctaattgtcttctatcctgttgagcgagttgtccttgatattccgctaaaaattagaactaaacacacatttttacaactagatggttacgataactctctcagtcagggagttgactttcgtcgcttttttgagtggtttcgtgagcgagaagatgccgaaaatgaatccggtatctctgaagatgtactacatcaactaaagccactcgctgaaactaatcaagatgtatggcagttgttaaatgaactcaaggcttcaactaaagaccgtcaattaaccgcagttcgtacagcgattcgccgcttcatgccccatctggataacctaagagttcgtcgtcaaccccgcctgtatatggcagttgataaaaatggcgagacgttgaacgtggctcaactgtctcaaggcgaaaaatcgttaatggcgttagtcggagatattgctcgccgtctagcgatgctgaatcctgccttagagaacccgttgacaggtgatggtattgtcttgattgatgaagtcgatttacatttacatccctcttggcaacgtagcttgtgcgatcgcctccttgaaacctttcccaattgtcaattcatcctaaccactcattcccccttggtaatcagtgattgtaaaaatatcttggtttatactttaacaaatggtgaaattcaagagttgccatcccaatatgggcaagatgttaatacggttttattggatgttatggataccagcattcgcgacccagaatttgacgcgaaactcagcgatctactagatgcgatccaagactctaatctaagccaagcccatcaattactcacagaattaactgccgagccaaccaatcaaaataatcttgaactggttaaggcaagactattgcttcgtaaacaagaattacgtcatgcgagccattcataa

SEQ ID NO: 89677 - DNA, 630 bp, Phormidium sp. OSCR
atgcgagccattcataaaggggctgaaccgactagcctagcaaactggaaacgcaaacatcctcaagactcttatatggatttagatccagaaattcgtcaagcgattcgagagcaagccttaaaagagcaatactatctttgtgcctattgttgccagcgaatccgagatgtttatacttgtcacaatgagcatatagaagctcaaaaaatcaatcctaaacgcacccttgactttgccaacattgtcgccagttgcaacacatctaatcaatgtggtgacgctcataagtcccaccacctcccgttaacccctctcatgtcagaatgtgaaacagagcttcgatttaaactgagtggacgagtcgagggattaagtgagcgagcaaccacagcaattcaagtgttaaatttaggagatcacgagagacataacaaagcccttattggaaaacggaaacaattgtctgatgtattgttgtggacaaacggcgtaaaccccgatgaaggacttgaggatgaagaactcttgggaatgctaattagtgaccttggacaacctcaagatgggatactggaaccctttgctccagttgtaatcaacattttgcgaagttggcttcaatcctaa

SEQ ID NO: 89678 - DNA, 1281 bp, Phormidium sp. OSCR
atgtacatccaacggctctctctcacccattaccgtggtgctgcttcgttatcgttgaatctccatgagaggctgaatgtcttagtgggggtgaatggtgcggggaaatctacggttctcgatgcgatcgccattctcttatcttggatggtgagccggatgcgacagtctggaacttcggggcgatcgctgtctgaagccgagattatgaatggaaagtcttgggcttcgctagagatcgtttgtgcggatgaacatcaatctttgtcttggagattgtctaagagtcgtcgcggatatggtaatccgcctcaaccgagtgagttacagcaactgagtcactatacaaaaacgcttcaaggtcaaatttctcaggctgactctggggtgaatcttcccctgtttgtctattatccggttcatcgagctgttttagatattcctctgcgtattcgtagcagtcatcggtttgatttactgagtgcgtatgatcaggctctgacgacgggggcaaattttagaacattttttgagtggtttcgagaacgggaagatttggagaatgagattttagtccaacagctcccgttatttagagaagaggatcaggaggctcaccgagatcgtcaactcgaggcggttcgcagtgcaatcagtcagcttttaccggaatttcagaacttaacggttcgtcgcagtcctctgcgcatggaagttgaaaagaatggtgagattctcactgtgaaccaactttccgatggggaaaagtgtctgattgctatggttggtgatttagcacgtcggatggcgatcgccaatcccaatcgcgctaatcctttacagggtaagggggttattttaattgatgaattggatttgcatttacatccaaaatggcaacgaatgattgctcctaagttacaaaaagtttttccgaattgtcagtttattgtttcgactcattcgcctcatgttctgactcatgttgaagctgaaactgttatgctacttaaccggaatcatgagggacttcaagtccaaaatccctcagaatcttatgggaaaccggttgatcgaattttagaagatatcatggagttagagacaacacgaccgacggcggtgagtcaaacacttcatgagatttatgaaatgatcagccttgatcaatgtgagacagcacatcaaaagattcaggatatacgacagctaattggcgatgacccagagttaacaaaagctgagattttaattcaacgtaaaaagcttatcggaaaatga

SEQ ID NO: 89679 - DNA, 633 bp, Phormidium sp. OSCR
atgaagtacattcagaaaaaaggagaaccacctgagttaactaattggaaacaacaggcgaacgcggattggactccctcttatcaagaactcagaggttctttaaaacaatctgttaaaaaagcactcatggttgagcaaggctatttgtgttgttactgtgagcaagcacttgatgctgttaactctcatattgaacattttagacctcaatctgatcctaccgtggattcccttgatttttataatcttctctgctcttgtcaaaaccaaatttgtaaaggtgagccacgtcattgtggaaatcttaaaggagattggtttgatgaggttttgcttctgtctcctctggagaaaaactcagaagctcgttttaagttcacagcagatggtcatatccagccacaggataatcaagatacagcagctcgtgtgactattgaaaaattagggctaaatatccctaaacttcgagcggctagaaaattagttattgagccttttttagatgaagtattatctattgaagagctacatttttttgttgaaaacttcttaaaagagagagaagatggtcatctaaatcctttctggacaaccataaactctctctttggagacctcagttattaa

SEQ ID NO: 89680 - DNA, 2130 bp, Bacteroides thetaiotaomicron
atgataaaaatagaaaaaggaaaagcaccggagtttttatcctcagagaaagttgaaattgcccgtgaaagaatgagaacattctatgcctcaaatcgggaacaaaaaagatatctatttccttttaataaggaaatagatataaaattaaaagaagatttacacaaaatattttatggaaaatgcggttactgtgaaacaataattgaatctccagaaaaaggtgtaattgatagatatagaccacataatggagtaagagataaagatggatacaatcaagatctgtattggtggcttacttttgaatgggacaatttaatttatagttgcaaggagtgcaatcaatataaagcaaattatttccctattcagggtgtccgagcattaaaagtaaaagataatttggatcaagaaaagagacttctcttaaacccatgtgtggatgatcctcaagagcatttctattataatcatgatggccatatccaaataaaaacacgtgaaggggagcaaaccgtagatctattaagacttaatgatagaaccgacttaatagaaggaagaaagaaagcgagaaaagagataataactattttagaaaaaataaataaaaatggagtacggtctattgataaaaatgagataagttatctacaacggatacttgagtatgacaatgattctactgcttttttcggatataaaaaatgggtactattgaatgaattaggagataatcttcttttagatttagagtttaatatcaaaaatcatgatagggaatggcttaacgatagaaatcaaaataataaaatactaataaagaatgaagacaagagatatttggcgaatgactatttccccatcgaatacattcatatcaaaaatttcaagtctattgaaaatttgaaaattgagtttaaggaagatgaattaaataataaatcatggttaattcttcttggtgaaaatggagtaggaaaaagttctatattacaagcaatagccgttggcttaaatgcaaatgcaaaaatcataacttccactcttattaaaagtcttataaagaaacgaaagcaaaaagcagagattgagataaaagagagaaatagcagtaatataattcgcactatacttacaagaaaagataatacaattaagcaagaaggttcttttaattcttatttaatgggatatggttcactaaggctttctgttgaagaagtcgattctgaatctataaaaatacaagatacaaataatgttagttatgaaaatctatttcagcctataaaaccgcttaatgatattactaaatggttaaaatcaatctatcggaaagatccagtgttttttgaaagagtagcatattcaataaagcaactactaccacatgatttttcatgcaatgaattgactataaaagataataacataatgtttaaaaaatcagaagaactgttttctgaactaagtgatggttttaaaagcacgattatccttgcagttgatataatgatgaagttatctgatgcacagtctgatatggataaaatgacaggtattattttaatagatgaactcggaaaccaactacatcctagatggcaaatgtccatagtcaagcaattacgtacagtatttcccaatattaattttattatatcaactcatcatcctctttgcctgagaggtgctaaaagggatgaaatccttcttcttaagaatattgaaggtgaagttataggaataagacaattacctgatccatcgactttacgcgtggatcaaattttagcttctgagttttttggcttaagcagcttggttgatcctgagacagaagcttattttaatagatactacgaattattggctaaagatgaaaaagcttctgtggaagatcaagaagaaattactcgcttaagagataaacttagagataaacagcaattagggatatctttgcgggaagagttgatgtattccgttatcgataaattgctagctaaagaaattgcatataataaaaatcctttagatagagaaaatttgaagagagaagttataaatcgagtgaaagatatctggacgaatttaaaccttgattattatgataacgattaa

SEQ ID NO: 89681 - DNA, 948 bp, Bacteroides thetaiotaomicron
atgataacgattaatagaatagattgtccagatatccttaaacaaggtaaaaatcctaaaagtaaaggtgaacttgaaacgatagacgctttaaaattctttagtgatcaaaataatcatacatctacttacaggaaaactgggactacaacggtcggatataaaatatattcggacgatagtgtgaggaaggttctacttaatatgtttaatgggaaatgtgcatattgcgaaagtaaaataaccagtatatataatggtgatatagaacatttcagacctaaaggagaaataaaagaggcaactccgacaaaacctggatattattggctggcagcagaatgggaaaacttattatttgcttgccctttttgcaatcaaacaaatacccatacgataattgctaatggaatattgaaagaaactgtcttaggtaaattgcatcaattcccacttgtttctgaacaatatcgattaaaatacactcatggacaaatttatttttctgacaggaatgcttatcaacaagcttttgacttagaagaaacagagagattgttgcttaatccttgtaaagatctaaatatagaaaattattttaaatatgaggatagcggtgttattattgtcaatagtgatttaacagagcagagaaatatacttagagcagagaaatccattcaagtatatgcattaaataggttagctcttgttcaagctcgcagagaaaaaattattcaaataaaagctcaaataaaacgaaccgaagagtctattattaattataataggtatgcaaagcaatctgatgaagagaaaatttggtttgaaggtattatgagaaaagagataaaaattctcaagagatataagaacataaatcaagaatactcagggctagcaaaatatataattagaaaatactttgaagaaatatattttatatga

SEQ ID NO: 89682 - DNA, 1410 bp, Citrobacter freundii; identical to SEQ ID NO: 86646

SEQ ID NO: 89683 - DNA, 594 bp, Citrobacter freundii; identical to SEQ ID NO: 86647

SEQ ID NO: 89684 - DNA, 1239 bp, Enterobacter cloacae subsp. cloacae
atgcctttagaacgactacatgtgaaaagtttgaaaaaatttcctgaagttaacgtccggtttaatagtaggtttaacttcattacaggtcctaatggttgcggtaaaacctccttgcttgcagctattgctcactgccttgaatggaatggagaatactccaggcatcaggacgagagcgagtactggatagatattagtgagaaagatataaaatatagatttggcttaggccctgggtgtataggaactaaaagatatagacaagaccaacttatgacttgggtatcaccaccagaagaaaaggggcgttatacatttttagcctatcaaacaaaggacaatttggtattacctccacttgtcattggtgcacagaggaaaataaattataaatctgtgtctggagtcactagagagagtgacagtcagcaaagtagaagtatctattgtaataatgcacttagatttctatataataatgattcgcgagatgttaaacaatggttgattaatcgttatttcattatagataaatcatgggccattgaagaaaaattgaattgggagcatttgctatgctctttaccagccattgggccattcgatagcgattttcggtatattgatacagaacgtgatcttgaacctgtattctcaatttacggaaaaaaatgttttttagaagagctttcatcaggctttcaagctgttctatatattataattgctgtgtttgaatggatagaagcatgtttacctgtaggagaaagagatgtaagaaaagcatgcggaactgtgttgatagatgaactagataaccatcttcatcctgagtggcagttcacagtgaggcagggtcttgcaaaaattttccctgaaattcagtttattataactacgcattcgccccatcttttggcttcagctaaagaaaatgaaataatattacttccttcctcatatccggaagaaaaatatgactttgagccttctgataaggcatattctggttggagtacagatctaatccttactgaattgatgggagtggtaagtctcgataacaaggactacgaggtcctcgttacggcatgttacgacaatataaaaaataatgatcttgataaacttaaaattaactatgctcatctcgagtcaatatgtcatccggacgatgaaatattgattatactgaaaactcgcatcgcagggatggaggctaaagttgatgattaa

SEQ ID NO: 89685 - DNA, 759 bp, Enterobacter cloacae subsp. cloacae
atgattaaattgacccggccacctgagccaaagatcttatgcgacaatagcgcagtttggactcgtgacatcatgaatctagtagccaaatatggttcttataaagaaattccttcttcagaaaaagaggcagcattaaagttttatcgtcatgatgatataaggaatgctctgaaagaaagttcattccgtaaatgtgcattttgcgaaggaaagccagaggaaactggttttgctgaggtcgagcatttctatccaaaatcaatatatactgaaaaagcttttgaatgggcgaatctcttgtattgttgtaaggcatgcaataacaagaagctcgaccatgatacacatttattaccaataataaatccttatgaattggacccacgtgaatgttttacctatacagatataatgatcgaagccaaacctggagccaatcaggatattgctgaaagaacaattaaagtgtgcggccttgcagagaaaaggcttttttctcccagaagtgcgattttggcaagttttcgcattttcgaagctgacattcatgacgctttggcagaatttcaacaggcacgcactttacccaataagaagaagcgggcatcaatgataagcaacgctctttctacgattgaagaattggtgctacccaacgcgaaattctcaaattactgtacatatctgctttccagctcagatgtttatcaacaagccaaaaaaacgctcgaagaattcacccaccaaaacttgtga

SEQ ID NO: 89686 - DNA, 1659 bp, Enterobacter cloacae subsp. cloacae
atggaaaaaataattagaacgcttaagagcaaggctcaaaaaaatgatattttagccaactatacattatatgataaatatctagaaggagaagacacaaaatctaatatcaatattgccatgcaatatttaaataaatgctatgaactattagaaatgcgtgaggaagtccatgagaagcctttatcgcgattaaaaattgagaagttgatccttaaagactttagaaaatttagagagctggaagttacattccatgataaaataaccgttattatcggtgataatggctccgggaaaacgactattacggatgctttggcaaaattgctaagttggttaagcgcgagaattgaaactgccaaaaaaggcgcaaaaacactaactccatccgaaataaatataaacagcgaagatttctcagaaataatatctcaccttagcttctataataaaaatatatttagctcaagcttgtcaagaccaacacttggattcaaaggaagaaaagtaagtgatttagaggattttaataacatctctgaactatatagagtggttaatgcatcatcaaaagaaaattataaccgcgaacttaatcttcccctcttttgctattactcagttgatagagcatcttcctactcaacgtttaatagtaatagtaattctcaggagcctcagtcacgatttaaggcatataacggtgcgctcgatggtcctggtcgtttcaacgaattttttgattggtttctttttattaataattatcttggctcgtcagttgttaatactcccgaagaactatccttaataaaagaaatcgaagcttttgaagaattgaaacttgacgtaaacagtcctcttttttcgatttataaagaaaaaaagaaatcttttgaaaaaataaaaaaaagtaaagataacgaactaaataaacacgttatgttacaaaatgatgttgttaaaaaagcaataatctcatcagtgactagcgtaagtgatatattcacagacagcagtacaggtaaacatgaattaaagataataaatgatggtgtgcttataaatattaatcaagcatctcaaggccaaaaaacattaatagcaatgatcgcagacttatcacgtcgattagttttgttaaaccccaaccttaaaaatcctttatacggtcagggtattgtgataattgatgagatagagctacatcttcatcctcagtggcaacagtctattgtacattcattgacatcaacatttcctaatattcaattcataataactacccatagccctcaaattctttcaactgtagataaagattgcattaggaaaattaaagaaacaactgaaggtaattatgaggtctatactcctaaattccaaactaaaggagtccaaagcacaaagatccttgagtatattatggaaacaaattctattcccgacctcgaggaagctcgcagagtggatcttttttcctcattattacagcaaggtaaaaaggaaaaggcactggaagtattggagatattgaaagaacatttttcagaatttgagggacaagaacatcccgttattcaaaaatgcattaatcagttaaaaatttatgatatgaaacatcgcattttaggcaataaggataacgataaatga

SEQ ID NO: 89687 - DNA, 672 bp, Enterobacter cloacae subsp. cloacae; identical to SEQ ID NO: 88685

SEQ ID NO: 89688 - DNA, 1368 bp, Pseudomonas fluorescens
atggaaatcaccagaatcaagctcacggatgtcggtcgctttaccgatctcgaaatctcgttagcccccacaccaaatcacccctccaacataacggttctggtaggaaacaatggtgcagggaaaaccacactattgaagtcactggccacctccctaagttggttggtcgcgagaattcgtaccgagaagggcaatggcaatcatcttgctgaagacgacgttcgaaatggtgcaatagctgcactaattttgattggcgttatagacgagtcgctgacacgctcacatccggccgacgcttgctctgaagacacagtgttcacgtggggtattgcccgaggcagacaaggacggaaggcgcatatccatagctcattaggaggtgttagtcgcttggcggatcactaccgcaaccaactgaccgcagacgacaaagcctcactcccactaatcgcctactacccagtcgaacgctcggttctggaaatcccactaaaaatccgaaccaaacatacctttgatcagctcgacggctacgacaacgcattgaatcgcggcgtcgacttccgccgtttcttcgaatggttccgtgaacgcgaagacagcgaaaatgaaactggcgtgtccgacacagctttggcagagatttccacaaagttcggcaaagacagtgatatctggaaaaccctttcccagttgaaggcctcgtcccgcgaccgccaattgactgccgtccgctccgctatcgccgcattcatgcccggcttcagcaacttgcgtgtgcagcgcaaaccccgcctgcacatggcgatagacaagggtggcgtgacgcttaacgtctcccagctttcgcaaggcgaaaagtcgatgatggcgttggtcggcgacatcgctcgccggttggcgatgatgaatcaatctttggacaacccgttggagggtgacggcatcatcctgatcgacgaagtcgatttgcacctgcaccctaaatggcagcgcagtttgattcgacagttgagcgagactttcccaaattgccagtttgtactgacaacccactcgccattggtcatcagcgacgcgaaagacgtgctttgctacgtgctcaatgacggggaattgcaagagcacaatggcctgtatggattggatgccaaccaggtgcttctggaagtcatggacaccgatgtgcgtaacagcgacgtgcaaaaacgcctgaatcaattgctcaagcatttgcaagatggcgatctggacggtgcgaaaaaactgttttccgatctttcacttgagctgccagagggacatctggaactggcgaaagcggccttgttgatccgtaagttggagctacgtcgtgcgtaa

SEQ ID NO: 89689 - DNA, 636 bp, Pseudomonas fluorescens
gtgcgtaagatcgacaaaggcatggagccacactcgttgactcgctttaaacactcgaacaacacgttgcgttaccgggatttaccgccggaagaaagtcggtccattcgatcatcctgcatttcggagcagtacggtttatgcgcctactgctgtcattccatcacggttgataatgctcataatgagcatcttgaagctcaggatcatgcaccgaatcgaacgttggacttttccaatatcgtcgccagttgccatcgcctacaccaatgcggtcacggccggggaacacgacccttaccgcttacgccgttgatggccgaatgcgaaacagagctgaagttctatttttccggactggttgagggacaaaccgagcgagcccggctttcaattgaggcgttgaacctgggtcataccgaggaaagtaatcgaggcctgatcggcgcgcgcaagcaattggtcgatacactgatgtttgaactgggcatgcaacccgctgacttgcaatttgaagacgaggaactactggtactgcttctggacgccctgaagactccgagcccggcacaatgtcttcagccgttttcacccgtgctggtcaatatcatccatcaatttctggctcaaccttga

SEQ ID NO: 89690 - DNA, 1623 bp, Vibrio cholerae O1 str. KW3; identical to SEQ ID NO: 85886

SEQ ID NO: 89691 - DNA, 618 bp, Vibrio cholerae O1 str. KW3; identical to SEQ ID NO: 85887

SEQ ID NO: 89692 - DNA, 1476 bp, Bacteroides cellulosilyticus
atgggaaaaagaatgtctattccaattttggcttatatttgcgaagagaatataaggaaatgtattatgtcaacagaaaaacaacctgtttatattcgttctttgacactgaataattataagtgttttaaaggcgaaaataaattctttttttgtaagaatgatggtgggaagaagttatctcaatgtacagtaatattaggggataatggtactggaaaaaccaatttattgaaggccattgccaatttagagcctgtattagatgatgttaagaatgtagattcttcagcagaaaaagtagaacgcttatatcttgacatagctgttctgttaggggatagaatgctttctcctgatttaagcaagaagcctatgtataagcctagagttgttgagagatatgattgtgaaattcaatatgatattgaatgtgattttttgaaaattaaaaagcgccaagataatatcaataaatctacttttgaagaaataattagatataccacgcgatttccgatgcctggtaactctcagcttcatgaatcaatttccccgactaaatatggatatacccaaaaaacaaattatgttgatccaacagaagatataagcagggtaaggattgatgcttatgggactaataggcactcaaaattcggctctaaaagattagaaaatctcttgaatagcgaatctttattttatgatgacaatagactgattgatattgaatcgtggatattacaattagatactgcaaaacatcataagcgacctggtgcaagtgcgagatatttgaaagtacgtaatttaattcgtcattcatctcttttcccaaatgtaaaggatatcgaaataggttttgatgataatgagaatagttttgtatattttgtaacagaagatggaagatatagattgagtgatttggggtatggatatcagtgtacattttcttggatttttgatttttgtaagaaattgtttgatagatatcccaattccaaaaatccttttcacgaacctgctattcttttagtagatgaaatagatatgcatcttcatccgacatggcagaggagtattttatctgaactttgtaagatgtttccaatgacacaatttattgtaactacacatagccctttattggttcaatctattgagaaaataaatctctatgccttagttaaagataatgatacaataaaaatttcacattatccagagacttcttttcaaggttggacggttgaagagatacttcgtgaaattatgaatttaggcgatgaggttcgttcagataaatatatggtgttgataaatcaattacaagatgctttgcaaaaaggagatgcaagacaagcaaaaaatatttttagtgaattaagtaatatattgcatcctagtagcattgatagagaattaattcctttgcaaattgaaggtattcgcgacaacgaacatgattaa

SEQ ID NO: 89693 - DNA, 720 bp, Bacteroides cellulosilyticus
atgattaaactaatcctatctaataaacctagagagctgacacctcaaatggagtcagcgcttattgaacaatttgaaaatgacaagacagatcctgtttggcagaaaaagttcattaaagatgctgtatttgaaattgcttatggaaaatgtgcttattctgaagtgcggctgaaagaagaagggaaggatatgcagatcgatcatttttatcctaaagtaccatattctaaaaaagtcgttgagtgggggaacttattaccatctttgaatcattgcaatagacacaaaagcaatatagaccccaatactgttgaaatagttaatccattatttgataatcctaaggaatatttgtattttcaaaatggtttcttatgctataaaaatgtcaaagggagtaacacaataaatatacttgacttaaacaatcaagtatatctaaatagtccaagagttcgcttgttagctgaaattggtaaaacattgaaagatatagaaccatggaaagatctcgatattgcttattttttgcagagagtcaaagatgtaatgcatagaggttcaaggaaaatggcttattcggcagcagtatctacatttattttgaaacaccatctttacgaacaatataaatctttcttgacgggtaagctaatgtgggatagcgaatttatatcattagagaaagaactggaattctgctccttgcctaaataa

SEQ ID NO: 89694 - DNA, 1239 bp, Yersinia enterocolitica; identical to SEQ ID NO: 86452

SEQ ID NO: 89695 - DNA, 657 bp, Yersinia enterocolitica; identical to SEQ ID NO: 88989

SEQ ID NO: 89696 - DNA, 1227 bp, Yersinia frederiksenii
atgctttgtagcatttccaagataaatattctgatcccatattcaagaaaaaaagctgatattcagttggatggaatgagtctaattattacaggaggtaatggttgtggcaaaacaagttttataacagctatttataactacctaaaaaaaggaatagatgaccctcaaaataataataggcagtatttaacacaacaaattgattatcttgaatctcaattaaagagcattggtagagatggtggaaattataatttcttcagtagccagtcagaaagccataaaaaacgattaaaagaactcaatgattttaatatagaaataaaatctatagataacaaagatattcgttctttgctgagatttcactcagctacacgacaatctgcaatatcatctccaaatcaagcccccaaacactcagtgcttattgaggaaaataagcattttgctaatgacatagatggcagccaattctttgaaagttatttgttgagtttgaaaaaaaatcaaagttatgcaatagcatttgataaaaatgaaacggaagcaaatcgtattgaagaatggtttgataaaatacagacagacttacggtcattattcgaggattcaaatttaattttggaatttgatacaaaagatgaaaagttttatctacaccaagaggggaaagatagatatacattccaaacactttcagcagggtattcctcaatcttaagtatttatacagatttaattatgagggttgaaatgtggggggtttcacctgataatatacaaggaataatattcattgatgaaattgatgctcacttacatgtatcattacaaaaacaaatattgagatttttcatcaaatcatttcctaaaattcaatttattgttactacgcattctccttttgttgtcacctcagtttcaaatactattatttatgatcttacaaaaaatgaacaaataatagatgtatcctcttattcatatggtgtcgttatggaggagatttttggtgtaataccagaatcacatgtattgatggacaaaattactcatatagaaaacctaacaaataatataacacctgaaaatattgatgaattggaagcaatgatatcatctttggcatccgatcaagaaaatatgagcaacgacacccaagcatttcttgatgctgcacggttaaaattaataaaaacaaaaaaaacaatcgaaaaatag

SEQ ID NO: 89697 - DNA, 654 bp, Yersinia frederiksenii
atgtttaatgtgataaggtcaatgccagcacctgaatcgctgcagagcaagaaaaaatatgataatgaagatgttcatattgcactacaagattgttttcatgaaaaatgttatttatgcgaaacaaaaaaacctttagatattaacattgagcattttcaaccacacaaaggcgatgaaaataaaaaattctcttgggaaaatttatacttagtgtgttcccgttgcaacaatatcaagctagcaaaatatgataaccttcttgattgttgttcaataagcgtttgggatagagtaaagctaactcccgggttctctccaaaagctaaagagtttattatcacaccacagttttgtgatggaaaaacacttgaaacagcccaattactagatgaaatctacaataatgataatacaatgaataaaagactgacagcccgctctctacgagcacaagttgtccagacaacacacaaacttacacggcatatgattgcatattataatgaagattcaacagatgaagaaaaacaagtagccattagtaaaatgaaaataatgataaaaaaatcttatccttattctgcattttgtcgttggatgataaaagatgatgaggaattagataaattattatctaatcttatgaactaa

SEQ ID NO: 89698 - DNA, 1419 bp, Yersinia intermedia; identical to SEQ ID NO: 89010

SEQ ID NO: 89699 - DNA, 591 bp, Yersinia intermedia; identical to SEQ ID NO: 89021

SEQ ID NO: 89700 - DNA, 1749 bp, Yersinia pseudotuberculosis; identical to SEQ ID NO: 89024

SEQ ID NO: 89701 - DNA, 807 bp, Yersinia pseudotuberculosis; identical to SEQ ID NO: 89025

SEQ ID NO: 89702 - DNA, 1419 bp, Yersinia intermedia; identical to SEQ ID NO: 89010

SEQ ID NO: 89703 - DNA, 591 bp, Yersinia intermedia; identical to SEQ ID NO: 89011

SEQ ID NO: 89704 - DNA, 1239 bp, Yersinia enterocolitica; identical to SEQ ID NO: 86452

SEQ ID NO: 89705 - DNA, 657 bp, Yersinia enterocolitica; identical to SEQ ID NO: 86453

SEQ ID NO: 89706 - DNA, 756 bp, Yersinia enterocolitica; identical to SEQ ID NO: 87092

SEQ ID NO: 89707 - DNA, 657 bp, Yersinia enterocolitica; identical to SEQ ID NO: 86453

SEQ ID NO: 89708 - DNA, 1242 bp, Clostridium sordellii; identical to SEQ ID NO: 88668

SEQ ID NO: 89709 - DNA, 768 bp, Clostridium sordellii; identical to SEQ ID NO: 87319

SEQ ID NO: 89710 - DNA, 1242 bp, Clostridium sordellii; identical to SEQ ID NO: 88668

SEQ ID NO: 89711 - DNA, 768 bp, Clostridium sordellii; identical to SEQ ID NO: 87319

SEQ ID NO: 89712 - DNA, 1242 bp, Clostridium sordellii; identical to SEQ ID NO: 88668

SEQ ID NO: 89713 - DNA, 768 bp, Clostridium sordellii; identical to SEQ ID NO: 87319

SEQ ID NO: 89714 - DNA, 1242 bp, Clostridium sordellii; identical to SEQ ID NO: 88668

SEQ ID NO: 89715 - DNA, 768 bp, Clostridium sordellii; identical to SEQ ID NO: 87319

SEQ ID NO: 89716 - DNA, 1272 bp, Ketogulonicigenium vulgare; identical to SEQ ID NO: 86444

SEQ ID NO: 89717 - DNA, 687 bp, Ketogulonicigenium vulgare; identical to SEQ ID NO: 86445

SEQ ID NO: 89718 - DNA, 1584 bp, Pseudomonas amygdali
ttgttgaaggggccgggcttttatttttccgggggttgcgtcttggcaagcgcaggctggatggaagcggggttgccaccaggtacgaaactcatggctacgctctttgtgtcgcctttttatggtttgcatttagtatgctgtcccaactgcaacggaaggtgttttccatatgcttggccagatgacgaaaccggagaaaatattgtgaggctcgacacactgcgaatgcagaactatcgctgcttcggtgaattcgagatcgacttcgatccgcatctgaccatacttattgcctccaacggaggcggaaaaaccactattcttgatgccgctcgagttgcgctgtggcctttcgtcaagggttttgatcttggcggtcagacaggaaaatccgccactattcagattgaagatgtgcgactggcccaattcggcagtggcaatatggagtcgcaggtacccagcgttatcgaggcaaagggcgtctggtgggaaagcgccgttgaaagtagctgggtgcagcagcgcgtcagcctgaaaaagtccactaacactattggcgatgctggatcgaaagcactgacttcgtacggtaagtcgcttcaggaccgtgtgcgaagcgatgcacatgtcactctgccaatggtgagttaccttggcacttccaggctatggttcgagggacgcttcagttcggcggcggctcagacaacactcgataaaagtgagtactccagaacgtccgcatacctaaattgcctgtcttattcatccagtttcaagaccttcaccgcatggtacatctggatgtaccgcagctatcgtgaagctcagttgatagctctggagcgcgatgaagaaatgtctgatgccgggcagcgctttgagaaaatcatctcagctgtcaaagaagccatcgacaggttgataaaggctcctacggggtggcacagactggaatacagtgccagtcatcaacagcaactggttatgcatcatccggaccagggggttttacctgtcgaaatgcttagcgatgggctgcgtaacactatcgccatggttgcggacctcgcttttcgtgcctgcaaactcaacccgcacctcggcgagagggcgcccttgcaaacgccaggtatcgccttgattgatgaagtggatatgtttctgcatcccttctggcaacagacgatagtcggttcattacgtgcggcttttcccgccatgcagtttattgtcaccacccacagtccgcaggtgttgagtacagtccgacgcgaaaatattcgggtgatcggtaaagatgcccaagggcgtttgattgcatcccggccccttgccatgacctacggtgaaccgagcaacagcgtgctgcgaagcgtgatgcaggtcgatccgcagcctccggtggatgaaaagccgggcctgctacaactcacggaatgggtggacaaaggtcgctatgacgaaccacaggcgatcttgctgatgcagcagataacggaggctctcactgaacaacaccctcaactgcagcgcctgcagcgcagcataaagcggcagaaggcattgaggggatga

SEQ ID NO: 89719 - DNA, 723 bp, Pseudomonas amygdali
atgaggtcagtgcacaagcggggaggaggaccttatcagttggcgcgttcacatcgcagcccacctgctaccagcgacacttccacaagccggtggagtagttttggctacaaggctcaggtactgggctgtcttttggaggagcagtacggattatgttgctatagcgaaattcgacctgaccgggttggcctgagtttccatatagagcacgtcgaaaacaagagccaaaaccctcagcgtacttttgactacaacaacctcgctgcctgcgcgctggacagtcagagcgatctggaggtattgaaaatacagggcgctgaggtatttggtgggcacgcgtcaggtaagtcgaaaggggtcgacatggctcgcttcgtttcgtgtcacatgcccgactgttcgcgcttcttcgcctatttgtctgacggccgtgtagtgcctgctgacgggttgtcaccggaggaagttgaccgagctgaatacaccatcggcctgctgaaccttaacagcccttatctccaaggcttgcgacaatcctggtgggatgagctggaagctctttttgaagagcatgttaatcaaaatatgagtctgcattgtctggcggggattgatctcatccctgtgggggcgaacttaagtcagtttttcagcattacccggaattttttcggaggtatcgctgaagaggtccttgagcaagaggctggtcgctggtaa

SEQ ID NO: 89720 - DNA, 1359 bp, Pseudomonas amygdali
atggaaatcaaaagcttcaggctcgttaatgtggggcgtttcagcgatcttgaagtcgctttggcgcctaccgaaagacatgcgtcgaaggtgaccgtgctggtcggcaataatggagcggggaagactacgctgctcaagtctgtcgctacatcgttgagctggctggtagcgagagtcaggacgccgaaaggtgctggcagtcgtatcgatgagggtatggttcagaacggcaccgctacatcctcgattaccattcggatagaggatgtgttgatttcggatgacgagatcaatccacttgaatctgaatgggcaataaccgctactcggaaaggccgaaacgccacctcatccacagtattaagcgagctcaacagacttgctgatggctatcgctcaaagttgactgaaaaaagtgatacgtctcttcctcttctggctttctaccccgtcgagcgctctgtcatcgagataccgctcaaagtccacgccaggcatacctttgatcaactcgacggctacgacaacgccttggggcgtggcgtggattttcgccgctttttcgagtggtttcgggagcgcgaagacagcgagaatgaaacgggtatctcgacagagttgctgaatgagctgtctcaaaagatcttgattgatacagaactctggaaagtgctgaccaaggagcatgcctcttcacgtgaccgccagctgactgcggtcagaactgcggttgaggcgttcatgcctggcttcacaaaactgcgtgtcaagcgtaagccgcgcttgcacatggctattgataaagaaggcaagacgctaaacgtatcccagctgtcccaaggcgaaaaatcgatgatggcgctcgtcggcgacatcgccagacgcctcgccatgatgaacccggcgctggaaaacccattgcacggcaatggaatcgtcctgatcgacgaagttgatctgcacctgcaccccaaatggcaacgcagtctcatcgcccaactcactacaacgttccccaattgccagttcctcctgaccacccattcgccgttggtcatcagcgacagcaaggatgtgctggtgtacgtcatggacgatggcgagttacgtgagcaggacagtctttatggtcttgatgccaatcaggtgctgtcgagtgtcatggacactgatattcgaaatgaggagattcaaacagttctggataaactgcagcactttttgatgagaggagagctcgatgaagctcgtactctctacacagagttggctgacgagttacctgcaaatcacatcgaactggcgaaagcttcgctgctgattcgtaagctggaagtgcgccgtgagaaagattga

SEQ ID NO: 89721 - DNA, 651 bp, Pseudomonas amygdali
gtgagaaagattgaaaagggaagtctcgcggtgctggaaaaatggaagcgcgcgaacaagggaaagaaatacgccgacctggtggggcatgaagatataaaggatgccattcgccacgcctgtgtcactgagcagcatggcttgtgcgcctattgctgctgcaggatcaccgcagagaaaggcagtgcctgcaatgaacatgttgaagcgcagcatctagcaccgcatcgcactttggatttcggcaatattgtcgcgagctgcaccaaagcggggcggtgtgacgccgctcatggccatcagactctgccgcttacaccgctgatgatcgaatgtgaaaaagagctgcagtttgagctttccggtcttgtggcaggcaccacgccccgggcgtgcgcaagtatcaacgtgctcaatttaggcgatacccgagagtcaaatcgtgatcttgtagtgaagcgtaaagagatgattgatacgctgttgttttcttacagcatcgaccctgctgaactggctgtggaagccgatgatgttctcgacctgctaagaaacgatctgctggaggcaaatgctcagcagttgcttcagcccttttctccggttttggtgaatgtaattatcggcatccaacgcgctcgtcagcgttga

SEQ ID NO: 89722 - DNA, 1266 bp, Pseudomonas amygdali
atgcgcctcgaccacctccatctgcagaattttcgttgctacgaagatgctcattttgatttccagccggggttcaatctggtggtgggggttaatggcagtgggaagacgtcgctgttgctgggggtggcgggatgcttcgggaatttacttggaagcattggcgtccatcagccatcgatagctgagtccgatgttcggttcgcgttagtaaagttcgaagacaggattcgtttcgaacgcagctatcctcttgtactgactgcccaaggtggcgcgtttgagcgtcaggaatggcacgtatcgctagaacgcagcagtcttcagacaaatttcagcgcgctgaacagtctcgcgttttcggaaaatctaattagcatcgatgtaagtacccacggggatttgcctgtattcgccgtctatcaagccaatcgacgctggctgacgatgagtgtaaccgctgagcttgctgcacagagcaaaccatcaagactggatgcttacacctcttggttcgatgccgcctccaatttgaaaaactttgagacctggttcatcggcaaaacactggagcgctttcaaaggctatcccgagcaggttcttccagcgttttcaacgacgaactgacctggataaactcagccatccaatgcgcactacccgacgccaagggaatagagtacgacatggagctacgtgcgttggtagtcgatatggatgaccgaaaaatcccgttcaacgacctgagcgacggacaacgcggaatggtcgcactcttcgccgatatcgctcgccgtatatgcctgctcaacccgcacatggggaaggatgtgctaagcaagacaaacggcatcatcgtgatcgacgaactagacatccatctgcaccccggctggcaacgcactattgctccagcactgaaaaaagcatttcccagcatccagttcatcgctgccagccactcaccacaggtcatcggcagcctgcagccgggcgaggtcatcctgctgaataaccatgacggctctcatccaagagcaacctatggcctggactccagcactattctggaagaagtcatgggcgtaccgcagcgcgagcccgaaattgaagcgctgctcgacgagctattcagcacactggaaaacaacgaacttgaaaaagccagactgcagcttgatgcgttaaaacagaaagcgcccgatctgcccgagttcgcaggtgccgaagcgttgctcaaacgcaaggagctcattggacgatga

SEQ ID NO: 89723 - DNA, 684 bp, Pseudomonas amygdali
atgagacgcgttatcaagggaactgagcctgcgtcattcaccgaatggaaagccagcgcaaacgaagactggacgcccacctatgcaaccttgcagaacccgcaaaggcgcgatctgcataacagtctgctacaggagcagaactttttatgctgctattgcggcgcagatacagatcttgataacagccacatcgaacatttccgaccgcaggagcgttatcagccgctggcacttgaatacagcaacctccatgcgtcctgcctgcgtggaacaaataaaggtactctgttgcactgcggccatcgtaagaggagctggttcgatgagcagttgcatatatctccactggaagacgattgcgaacagcgctttcgctatctgccgaatggaaaaatccagagtaaccatccagcagacgctcctgccgcaacgatgattgagaaactcgcactcgatattgcctatctgacaaaaagacgccaagaggcaatcacgcgtgcgtttgatgagcaaatcttagccagcatcagtgatacagagctgacccttttggtgcaaggcctgcgctctggggatgccaacaaacagctcgcctttggccacgttgttgcccgctatgcggagcagtttctggcgtctttaaaccctcctcccgaaaaaagcccggtcgggaatacgtga

SEQ ID NO: 89724 - DNA, 1524 bp, Pseudomonas syringae pv. atrofaciens
atgtggctacgctgggggcttggtcaacaggtagactatggctttaggcgccggtctggagatctcatgggcacgcaggacaatatggcgagtgccggaataaattcgcttcggctttcgcggttgcggctacgtgatttccgcagcttcgaaacaattgatatagacttccatccgcgcttgaccgttctggttgctgccaacggaacaggcaagacgtccatcctagacgccatcgctgttgcctttggcccctacgtaggggcgttcgacgaggcggtgggcaaacatctggaacctagcgatatccgccaatttcgtgctaggcgaaccactacaaacgaaatggaatacgcacctcaaggtgctcggatcgaggcgacaggggtcattcctggcagcttgccggatcagttgtccgatgatctgttgcccaccatttggcgtcgtcatttatcaagcacgaccaagactaaaacctcgatcaaagacgccaaggagttggtgaactatggcaagcgcatgcaggaagcggcgcgtacaccggacaccgaggtcgttctgccactcattgcgtactacggcacagggcggctgtggcagcagaagaaactgacagacgcaaagaacattcaacgcacttccagaaccgtgggctataccgactgcctggatccagcctctagctataaatcgtttgtgcagtggtttcgctactggagcctgaatgccaaagaagcccaactcaaagcgcttgaagccggggtcagcattgccaaaactgaattcgacgactacatccagtcagttagtcgcgcagtgaatgcttgtatccagccagcaggctggagcggcattcaatactctttcactcgtgacacattggtcgcccgccatgagcagttcggggagttgccggtcgagtggcttagcgacggcattcgcaatatgattggtatggttgccgatatcgcgttccgtgcgaccaagctcaacggacatctcggcgcgcaggcagctcaagaaactcccggcgtgttgcttatagacgaagtcgacatgcatctgcatccggaatggcaacaagtggtgctgctcaatctgaccgaagcatttccggccatgcagcttatcgttaccacccacagtcctcaggtgttgagcacagtatcctcgaacagcgttcgaatcttgcgcaccgaaatcgatccggagacctctagtcgaattaccagcgtcagcgagccgcagtggcagactcggggcgttgccagctccgacctgctcgctcgtatcatgggtgtggacccagttcctaacgtgcctgaagcatcatgggtttccgactatcaggcactgattcaacagaacctccacgagcaacccgaaggagtcgagttgagaacaaagctagaatctcatttcggtgctgaccacccaattattcgcgaatgtgagcgacaaatacgcttgcaggccattaagcaacgtcttccacgcgatctcggcaaccgggagtattga

SEQ ID NO: 89725 - DNA, 645 bp, Pseudomonas syringae pv. atrofaciens
atgcgtcgtctatgtcgacaggatgaacctccttctgggctaaggcgttaccgacacggcaaagataagtggactcgtacatgcccgacacaagaggaacgcgacggtatctgggcatctttagagctcatgcaaggtccacgatgtgcttactgtgaaggaccgattgccccacaaaaccgtcatatcgagcactttcgccaacgggatcggtatccgcaaggtacttatgactggaacaatctgttcggatcttgcgagcgcgtcagcacctgtggaaaggccaaggaccgatgcggaatctacccaccggaagtactgattaaaccagacatagaagacccggatgcttttctggtgttcacgcccggcggaacggtggaaccacgggcaggcttgagcgcaggcgatcatcttcgcgcatgcgaaacaatccgtattctcgggctgggaggcgcgctgaacgaaattcggcgtgcggaacttagcggctatctccagaccttggaatattttgttgaaatcgccgaagcgtttcctgaagacgaggaatggatacaggagttgcaacaagaagtgagcaacgccgcgcagttgccgtacgcgactgcaatcagacatgtccttactcgacagagtgagtaa

SEQ ID NO: 89726 - DNA, 1326 bp, Pseudomonas cannabina
atgaacctgaccagactttgccttaagaactatcgccgctttgccgagttcgatatcgaattcgatccgcaattgacgataatttccgcgcgcaatggccaaggtaagacgtcggttctggaagccattgttgcggctctgggccccttcgtcggctcgttcgatcagggagtgtccaggcatatcgagcgtactgatgctcggtatgcgcgggtaggtgaagggtttgaaagcgagcagcaatttccagtggtcatcagtgcagaaatgtccaaccctgcaaagcgttggcagcgagcgcttaatggtccgaaaagccgcactaccaccaaagaagccgatccactggctgcctggggaaaagaactccagtccatgctgcgtagcgattcggcgatttcgctgcccgttgtgcgctattacagctccaggcgcctctgggtcagtcataaaaacgtgtccagcaaagcagtcctgactgagagccgtactgccggttacgaagattgcctgtccgcgttctctacttatgcgcagttacaggaatggatgagaaaggcaacgctggccgtcattcaacaaaagcagcaggccggttacgagcattccaaccttgaaccacgtttgcagggcatcagaaatgcagtaaatgaggtgatggcagacgaaggctggagtgacttccactacagtctgacgtttgaagagttgtccatgtctcaccctgatcacgcggccctgccacttggccttctcagtgacggtgtgcgcgccatgattacgctcgttgctgatctggcgttgcgttgttcccgcctgaatggccatttcaaggaattggcgtcactgcagacaacgggcgtcgtattgatcgatgaagtcgacttgcatttgcatccagcctggcagcaacgtgtaattggcagtcttcgcaaagcgttcccgaagatccagttcattgtaagcacacaaagtccgcaggtactttcgacggtaaagcgcgaatgcatacgcatggtgtttcaggacgccaacgaaaactggcaagctgcatacccgccgcaggaagtcaaaggcgttgaaagtgccgtagcgctcaatgacatcatgggtgtaaaccccattccgccagtcgatgaagcatgctgggtcgccgaatacatggcaaagatcgagagcggtacccatgaagatcgcgacggcctggcattgcgcaaaaagctgctcgatttctatggagcgcagcatcaggtgcttctggacgccgacaggctggtccgctttcaggcgtttaaattgcaaaaacactctaacagcaagggctga

SEQ ID NO: 89727 - DNA, 681 bp, Pseudomonas cannabina
gtgctcaaactggatcgagcgtctgtagatgccccgccctgcctcgccgactacgatcatctgacccacacatggtcagattttcgcggaacctgcaaaaaacagctgcgctttgcgctcgtgcagctgcaaggcatcttgggtgttacgacagaagacgcagctgagtacggcgtccggtgcgcttattgtgagagggccatttttcatgacggacatatcgagcattttcgacgaaagaatcctgcgcactacccagaactgacatttgcctggagtaacctttttcttgcatgtggcagtccgcaacattgcggccatcacaaggatcgacgctcggctcctgcctatgaccccggccttctcatcaaacctgacgaacatgatccagagcattacctgcattttcattcttccgggaaggtactcgcccgtaacaacctgaatgatcacgagaatagctgcgcgacggagaccattcgcgtgtttagtctggaccatccagcgcttgaaggtgcccgtgcgaacgcagtgcgcagctaccgcaacctgcacgatgcggatctatatgagatagcttcatggtcagacgctgaccgtaacgattattttcgtcaggagattgaagccacccgctggcttccctacgctacgacgatcagacacttcttgcagaagtga

SEQ ID NO: 89728 - DNA, 1359 bp, Pseudomonas syringae pv. coriandricola; identical to SEQ ID NO: 89544

SEQ ID NO: 89729 - DNA, 651 bp, Pseudomonas syringae pv. coriandricola
gtgcgaaagattgagaagggaattctcgtggtcctggagcagtgggcgcgctcgaacaagggaaagaaatacgaagatctggtcgaccgggacgatatcaaggatgccattcgacatgcctgtgtccgagagcaacatggtttgtgtgcgtactgctgtcgcagaatcacgctcgaaaaaaccagtgctcacaacgagcacgttgaagctcagcgcctggcaccccaccgcacactcgactttaagaatatcgttgccagctgcaatcagccgggtcgatgtggcaaagcgcatggtcaccagttattgcgtttgacgccacttatggtggagtgcgagacggaattgcagttcgagttgtccgggttggtgcgaggcaacaccgaccgagctcaagactgtatcaatgtgcttaatcttggcagtgatcaagcctccaacaagtggttgatcagcgagcgtaaagcaatgatcgataatttgctgtattcacagggcatgaactcttcaggactgggtctggagagcgatgacgtactcgatttgttgcatgatgagttattggttcctgatgaacaacaacagctccaggccttttcccctgttctggtcaatgtgattcgtcggctcaaggctttgcaggcctcctga

SEQ ID NO: 89730 - DNA, 1377 bp, Pseudomonas syringae pv. coriandricola; identical to SEQ ID NO: 89546

SEQ ID NO: 89731 - DNA, 723 bp, Pseudomonas syringae pv. coriandricola
atgaggtcagtacacaagcggggaagcggaccttatcagttggcccgttcacattgcagcccgcctactaccagcgacacctctacaagccggtggagtagttttggctacaaggctcaggtactgggctgtcttttggaggagcagtacggattgtgttgctacagcgaaattcgacctgaccggcttggcctgagtttccatatagaacacgtcgaaaacaagagccaacaccctcagcggacttttgactataacaacctcgctgcctgcgcgctggacagtcagagcgatctggaggtgttgaagatacaaggcgccgaagtatttggtgggcacgcgtcaggtaagtcgaaaggggtcgacatggctcgcttcgtctcgtgtcacatgcccgactgctcgcgcttcttcgcctatttgtctgacggccgtgtggtgcctgctgacgggttgacactggatgaagttgaccgagctgggtacaccatcgacctgctaaaccttaacagcccttatctccaggacttgcggcaatcctggtgggatgagttggaaacactttttgaagaccatgttgatcaagatatgagtctgcattgtctggcggggattgatctcattcctgtgggtgcgagtttaagtcagtttttcagtattacccggaattttttcgggggtattgctgaagaggtccttgctcaagaggccggtcgctgctaa

SEQ ID NO: 89732 - DNA, 1320 bp, Pseudomonas syringae pv. coriandricola
gtgagccaaggtacactggcgcatccgccagttctggtaaaggaaaccgacatgcgcctcgaccacctccacctgcagaattttcgttgttacgaagatgctcattttgacttccagccgggtttcaatctggtggtgggggtcaatgggagtgggaagacgtcgctgttgctgggggtggcgggatgcctgattccttatggcaatgcaatggggcaaggccaggaaattctgagcaaggaagacgttcgtttcgttatagacaggcatgaaggacgcagtcgatttgagagaaagtttcccgtattcataagagcggatggcgatatttttgatctgccaaattggcgggcagtccgtctgctcgagccctgggaaggaggagtagatccctcatcactctctcacttgagtgctgtgctcgccaggaacaacgcaggtgagcagattgactttccggttcttgccttctatcgcgccaatcgtcgttggagcagtgcgcgcatatctgccgagttcgcagcacagcagcggacttcccgttttgacggatatgcaaactggtttgacgccgtagccgatctgcgtgattttgaaagctggttaatcgcaaggacgcttgagcgccttcaggaccgtcttgattcaactccgactgtcgagcgtgaagatgaacttgaatgggtgaatcgagcgatcagacttgccataccggatgcccatgatctccgatatgacttgaggctacaaagcctgctcgtagatatgggggaaggcaacgccgttccgtttcacgaactcagtgatggtcaacgtagtttgattgcgttgattgcagatattgcacgacgcatgtgcgttctaaacccacacataggaaaagacgttctggcgaataccggtggcatcgtgattattgatgagctcgatattcatctgcacccggcctggcaacgcaacattgcgccgacgcttaaaaaagcattccccaaagtgcaattcatcgccacaagccactcgcctcaagttattggcagcctgcaaccgggcgaggtcatcctgctgaagaatggcgacagctctcacccgcgagcaacctatggcctggactccagcaccattttggaggaagtcatgggcgtaccgcagcgcgaacccgaaattgaagtgttgcttgatgagctgttcagcacactggaaaacaatgagcttgaaaaagccaggttgcagcttgatgcgctaaagaaaaaagcccccgatttacccgagttcgcaggtgctgaagcactgctcaagcgcaaggagcttattggacgatga

SEQ ID NO: 89733 - DNA, 645 bp, Pseudomonas syringae pv. coriandricola; identical to SEQ ID NO: 89543

SEQ ID NO: 89734 - DNA, 1332 bp, Pseudomonas syringae pv. coryli
atggcgcatagggttagccaaggtacactggcgcatccgccagttctggtaaaggaaaccgacatgcgcctcgaccgcctccacctgcagaattttcgttgctacgaagatgctcatttcgacttccagcctgggttcaatctggtggtgggggttaatggcagtgggaagacttcgttgttgcaaggggtagcggcatgtctcgtaccgtatggcaacgccatgggccagaaagataagtacctgagtgacgaagatatacgtttcgttatcgacaggtatgagggaaggattcgattcgaaagacaattcggcgtgttcataaaagccgaaggcaatatgttcggtcttccacattgggggaccatcagcctgaacgcgtcttgggacccggctgccgatcctgcggtgggcctccatctggacgatgtcttagccaagaaccaagccggcgagcgcgtcgactttcctgtgcttgctttttatcgcgccaatcgtcgctggagcagcgcacgtatatcagctgaattcgccgcgcagcagagagcttcccgtattgacggttatgcaaactggtccgacgcagtaaccgatctacgcgactttgaaagctggttgattgcgcggacgcttgagcggcttcaggatcgtctggactcaagccccaataccgagcctgaagacgaacttgaatgggtaaaccgagcgataagacttgctctgccagacgcccacaacctccggtatgacttgaggctgcaaagccttcttgtggatatggggcgcgacaacgcgattccgtttcacgaactgagtgatggtcaacgcagcctgattgcattaattgcagatattgcaaggcgcatgtgcgttcttaacccacacatggggaaggatgttctgaccaatactggcggcatcgtgattatcgatgagctggacatacaccttcacccggcctggcagcgaaccatcgcaccgacacttaaaaaagccttcccgaaagtacaattcatcgccacaagccactcgccgcaggtcataggcagcttacagccgggcgaggtcatcctgctgaataaccatgacggctctcacccaagagcaacctacggcctggactccagcagcattctggaagaagtcatgggcgtgcctcagcgtgagcctgaaattgaagagttgctcgatcagctattcagcactctggaaaacaacgagcttgaaaaagccaggtcgcagcttgatgcactgaagaagaaggcgcccgatctaccagagttcgcgggtgccgaggcgctactcaaacgcaaggagatcattggacgatga

SEQ ID NO: 89735 - DNA, 648 bp, Pseudomonas syringae pv. coryli
atgagacgcatcatcaaaggaactgagcctgcgtcattcaccgaatggaaagccagcgcaaacgaagactggacgcccacctatccaaccttgcagaacccgcaaaaacgcgacctgcatgatcgcctgctgcaagagcagaacttctcatgctgctattgcggcagggaaatagaacttgatagcagccacatcgaacatttcagaccgcaggatcattatctgccattggcactggagttcagcaatcttcatgcgtcctgcctgcgcgagaccacaccaggaagcccgttgcactgcggccactacaaaggcaactggttcgatgaggacctgcacatctctccgacagagtacgattgcgaacagcgcttccgttatctgctgacagggaaaatccagagcacgtcccacaccgaccttcccgccacgacgatgatcgaaaagctcgcactcgatatcgcgtatctgaccaaaagacgtcaggaggcaatcacgggtgtgttcgatgagcaattcatatccagcgccagtgatgcggaactcgcgaaccttgtagacagcctgcgctcgggcaccgctaatacctctattgctttcggccatgtcgttgcgcgctatgcggagcaattgctgacgcagcggtag

SEQ ID NO: 89736 - DNA, 1266 bp, Pseudomonas syringae pv. castaneae
atgcgcctcgaccacctccatctgcagaattttcgttgttacgaagatgctcattttgatttccagccggggttcaatctggtggtgggggttaatggcagtgggaagacgtcgctgttgctgggtgtcgcgggatgcttcgggaatttacttggaagcattggcgtccatcagccatcgatagctgagtccgatgttcggttcgcgttagtaaagttcgaagacaggattcgtttcgaacgcagctatcctcttgtattgactgcccaaggtggcgcgtttgagcgtcaggaatggcacgtatcgctggaacgcagcagtcttcagacaaatttcagcgcgctgaacagtctcgtattttcggaaaatctgattagcatcgatgtaagtacccacggggacttgcctgtattcgccgtctatcaagccaatcgacgctggctgacgatgagtgtaaccgctgagcttgctgcacagagcaaaccatcaagactggatgcgtacacctcttggttcgatgccgcctccaatttgaaaaacttcgagacctggttcatcggcaaaacactggagcgctttcaaaggctatcccgagcaggttcttccagcgttttcaacgacgaactgacctggataaactcagccatccaatgcgcactacccgacgccaagggaatagagtacgacatggagctacgtgcgttggtagtcgatatggatgaccgaaaaatcccgttcaacgacctgagcgacggacaacgcggaatggtcgcactcttcgccgatatcgctcgccgtatctgcttgctcaacccgcacatggggaaggatgttctaagcaagacaaacggcatcatcgtcatcgatgaactcgatatccatcttcaccccggctggcaacgcaccattgctccagcactgaaaaaagcatttcccagcatccagttcatcgccgccagccactcgccacaggtcatcggcagcctgcaaccgggcgaggtcatcctgctgaataaccatgacggctctcatccaagagcaatctatggcctggactccagcactattctggaagaagtcatgggcgtaccgcagcgcgagcctgaaattgaagcactgctcgacgagctattcagcacactggaaaacgacgagcttgaaaaagccagactgcagcttgatgcgttaaaacagaaagcgcccgatctgcccgagttcgcaggtgccgaagcgttgctcaaacgcaaggagctcattggacgatga

SEQ ID NO: 89737 - DNA, 684 bp, Pseudomonas syringae pv. castaneae
atgagacgcgttatcaagggaactgagcctgcgtcactcaccgaatggaaagccagcgcaaacgaagactggacgcccacctatccaaccctgcagaacccgcaaaaacgcgacttgcataattgcttgctgcaagagcagaacttctcatgctgctattgcggcagggaaatagagcttgatagcagccacatcgaacatttcagaccgcaggatcattatctgccattggcactggaatacagcaatcttcatgcgtcttgcctgcgcgagaccacaccaggaaacccgttgcactgcggccactataaaggcaactggttcgatgaggacctgcacatttccccgacagaggacgattgcgaacagcgcttccgttatctgctcacagggaaaatccaaagcacgtcccacacagatcttcccgccacgacgatgatcgaaaagctcgcactcgatatcgcgtatctgacaaaaagacgccaagaggcaatcacgcgcgtgtttgatgagcaaatcttagccagcatcagcgacacagagttgacacttttggtacaaggcctccgctctggggatgccaacaaacagctcgcctttagccacgttgtcgcccgctatgcggagcagtttctggcgtctttaaaccctcctcccgaaaaaagctcggtcaagaatacgtga

SEQ ID NO: 89738 - DNA, 1581 bp, Pseudomonas savastanoi pv. glycinea
ttgaaggggccgggcttttatttttccgggggttacgtcttggcaagcgcaggctggatggaagcggggttgccaccaggtacgaaactcatggctacgctctttgtgtcgcctttttatggtttgcatttagtatgctctcccaactgcaacgggaggtgttttccatatgcttggccagatgacgaaaccggagaaaatattgtgaggctcgacacactgcgaatgcagaactatcgctgcttcggtgaattcgagatcgacttcgatccgcatctgaccatacttattgcctccaacggaggcggaaaaaccactattcttgatgccgctcgagttgcgctgtggcctttcgtcaagggttttgatcttggcggtcagacaggaaaatccgccactattcagattgaagatgtgcgactggcccaattcggcagtggcaatatggagtcgcaggtacccagcgttatcgaggcaaagggcgtctggtgggaaagcgccgttgaaagtagctggctgcagcagcgcgtcagcctgaaaaagtccactaacactattggcgatgctggatcgaaagcactgacttcgtacggtaagtcgcttcaggagtgtgtgcgaagcgatgcacatgtcactctgccaatggtgacttaccttggcacttccaggctatggttcgagggacgcttcagttcggcggcggctcagacaacactcgataaaagtgagtactccagaacgtccgcatacctaaattgcctgtcttattcatccagtttcaagaccttcaccgcatggtacatctggatgtaccgcagctatcgtgaagctcagttgatcgctctggagcgcgatgaagaaatgtctgatgccgggcagcgctttgagaaaatcatctcagctgtcaaagaagccatcgacaggttgataaaggctcctacggggtggcacagactggaatacagtgccagtcatcaacagcaactggtcatgcatcatccggaccagggggttttacctgtcgaaatgcttagcgatgggctgcgtaacactatcgccatggttgcggacctcgcttttcgtgcctgcaaactcaacccgcacctcggcgagagggcgcccttgcaaacgccaggtatcgccttgattgatgaagtggatatgtttctgcatcccttctggcaacagacgatagtcggttcattacgtgcggcttttcccgccatgcagtttattgtcaccacgcacagcccgcaggtgttgagtacggtccgacgcgaaaatattcgggtgatcggtaaagatgcccaagggcgtttgattgcatcccggccccttgccatgacctacggtgagccgagcaacagcgtgctgcgaagcgtgatgcaggtcgatccgcagcctccggtggatgaaaagccgggcctgctacaactcacggaatgggtggacaaaggtcgctatgacgaaccacaggcgatcttgctgatgcagcagataacggaggctctcactgaacaacaccctcaactgcagcgcctgcagcgcagcataaagcggcagaaggcattgcggggatga

SEQ ID NO: 89739 - DNA, 723 bp, Pseudomonas savastanoi pv. glycinea; identical to SEQ ID NO: 86327

SEQ ID NO: 89740 - DNA, 1266 bp, Pseudomonas amygdali pv. hibisci
atgcgcctcgaccacctccatctgcagaattttcgttgttacgaagatgctcattttgatttccagccggggttcaatctggtggtgggggttaatggcagtgggaagacttcgctgttgctgggtgtcgcgggatgcttcgggaatttacttggaagcattggcgtccatcagccatcgatagctgagtccgatgttcggttcgcgttagtaaagttcgaagacaggattcgtttcgaacgcagctatcctcttgtattgactgcccaaggtggcgcgtttgagcgtcaggaatggcacgtatcgctagaacgcagcagtcttcagacaaatttcagcgcgctgaacagtctcgtattttcggaaaatctgattagcatcgatgtaagtgcccacggggatttgcctgtattcgccgtctatcaagccaatcgacgctggctgacgatgagtgtaaccgctgagcttgctgcacagagcaaaccatcaagactggatgcgtacacctcttggttcgatgccgcctccaatttgaaaaacttcgagacctggttcatcggcaaaacactggagcgctttcaaaggctatcccgagcaggttcttccagcgttttcaacgacgaactgacctggataaactcagccatccaatgcgcactacccgacgccaagggaatagagtacgacatggagctacgtgcgttggtagtcgatatggatgaccgaaaaatcccgttcaacgacctgagcgacggacaacgcggaatggtcgcactcttcgccgatatcgctcgccgtatatgcctgctcaacccgcacatggggaaggatgtgctaagcaagacaaacggcatcatcgtcatcgatgaactcgatatccatcttcaccccggctggcaacgcaccattgctccagcactgaaaaaagcatttcccagcatccagttcatcgccgccagccactcgccacaggtcatcggcagcctgcaaccgggcgaggtcatcctgctgaataaccatgacggctctcatccaagagcaacctatggcctggactccagcactattctggaagaagtcatgggcgtaccgcagcgcgagcctgaaattgaagcactgctcgacgagctattcagcacactggaaaacaacgagcttgaaaaagccagactgcagcttgatgcgttaaaacagaaagcgcctgatctgcccgagttcgcaggtgccgaagcgttgctcaaacgcaaggagctcattggacgatga

SEQ ID NO: 89741 - DNA, 684 bp, Pseudomonas amygdali pv. hibisci
atgagacgcgttatcaagggaacagagcctgcgtcactcaccgaatggaaagccagcgcaaacgaagactggacgcccagctatccaaccttgcagaacccgcaaaaacgcgacttgcataattgcttactgcaagagcagaacttctcatgctgctattgcggcagggaaatagagcttgatagcagccacatcgaacatttcagaccgcaggatcattatctgccattggcactggaatacagcaatcttcatgcgtcttgcctgcgcgagaccacaccaggaaacccgttgcactgcggccactataaaggcaactggttcgatgaggacctgcacatttccccgacagaggacgattgcgagcagcgcttccgttatctgctcacagggaaaatccaaagcacgtcccacacagatcttcccgccacgacgatgatcgaaaagctcgcactcgatatcgcgtatctgacaaaaagacgccaagaggcaatcacgcgcgtgtttgatgagcaaatcttagccagcatcagcgacacagagttgacacttttggtacaaggcctccgctctggggatgccaacaaacagctcgcctttagccacgttgtcgcccgctatgcggagcagtttctggcgtctttaaaccctcctcccgaaaaaagctcggtcgggaatacgtga

SEQ ID NO: 89742 - DNA, 1266 bp, Pseudomonas amygdali pv. eriobotryae
atgcgcctcgaccacctccatctgcagaattttcgttgttacgaagatgctcattttgatttccagccggggttcaatctggtggtgggggttaatggcagtgggaagacgtcgctgttgctgggtgtcgcgggatgcttcgggaatttacttggaagcattggcgtccatcagccatcgatagctgagtccgatgttcggttcgcgttagtaaagttcgaagacaggattcgtttcgaacgcagctatcctcttgtattgactgcccaaggtggcgcgtttgagcgtcaggaatggcacgtatcgctggaacgcagcagtcttcagacaaatttcagcgcgctgaacagtctcgtattttcggaaaatctgattagcatcgatgtaagtacccacggggacttgcctgtattcgccgtctatcaagccaatcgacgctggctgacgatgagtgtaaccgctgagcttgctgcacagagcaaaccatcaagactggatgcatacacctcttggttcgatgccgcctccaatttgaaaaacttcgagacctggttcatcggcaaaacactggagcgctttcaaaggctatcccgagcaggttcttccagcgttttcaacgacgaactgacctggataaactcagccatccaatgcgcactacccgacgccaagggaatagagtacgacatggagctacgtgcgttggtagtcgatatggatgaccgaaaaatcccgttcaacgacctgagcgacggacaacgcggaatggtcgcactcttcgccgatatcgctcgccgtatctgcttgctcaacccgcacatggggaaggatgttctaagcaagacaaacggcatcatcgtcatcgatgaactcgatatccatcttcaccccggctggcaacgcaccattgctccagcactgaaaaaagcatttcccagcatccagttcatcgccgccagccactcgccacaggtcatcggcagcctgcaaccgggcgaggtcatcctgctgaataaccatgacggctctcatccaagagcaacctatggcctggactccagcactattctggaagaagtcatgggcgtaccgcagcgcgagcctgaaattgaagcactgctcgacgagctattcagcacactggaaaacgacgagcttgaaaaagccagactgcagcttgatgcgttaaaacagaaagcgcccgatctgcccgagttcgcaggtgccgaagcgttgctcaaacgcaaggagctcattggacgatga

SEQ ID NO: 89743 - DNA, 684 bp, Pseudomonas amygdali pv. eriobotryae
atgagacgcgttatcaagggaactgagcctgcgtcactcaccgaatggaaagccagtgcaaacgaagactggacgcccacctatccaaccctgcagaacccgcaaaaacgcgacttgcataattgcttgctgcaagagcagaacttctcatgctgctattgcggcagggaaatagagcttgatagcagccacatcgaacatttcagaccgcaggatcattatctgccattggcactggaatacagcaatcttcatgcgtcttgcctgcgcgagaccacaccaggaaacccgttgcactgcggccactataaaggcaactggttcgatgaggacctgcacatttccccgacagaggacgattgcgaacagcgcttccgttatctgctcacagggaaaatccaaagcacgtcccacacagatcttcccgccacgacgatgatcgaaaagctcgcactcgatatcgcgtatctgacaaaaagacgccaagagacaatcacgcgcgtgtttgatgagcaaatcttagccagcatcagcgacacagagttgacacttttggtacaaggcctccgctctggggatgccaacaaacagctcgcctttagccacgttgtcgcccgctatgcggagcagtttctggcgtctttaaaccctcctcccgaaaaaagctcggtcaagaatacgtga

SEQ ID NO: 89744 - DNA, 1359 bp, Pseudomonas amygdali pv. lachrymans; identical to SEQ ID NO: 86098

SEQ ID NO: 89745 - DNA, 651 bp, Pseudomonas amygdali pv. lachrymans; identical to SEQ ID NO: 86163

SEQ ID NO: 89746 - DNA, 1266 bp, Pseudomonas amygdali pv. lachrymans; identical to SEQ ID NO: 86100

SEQ ID NO: 89747 - DNA, 684 bp, Pseudomonas amygdali pv. lachrymans; identical to SEQ ID NO: 86101

SEQ ID NO: 89748 - DNA, 1524 bp, Pseudomonas syringae pv. lapsa
atgtggctacgctgggggcttggtcaacaggtagactatggctttaggcgccggtctggagatctcatgggcacgcaggacaatatggcgagtgccggaataaattcgcttcggctttcgcggttgcggctacgtgatttccgcagcttcgaaacaattgatatagactttcatccgcgcttgaccgttctggttgctgccaacggaacaggcaagacgtccatcctagacgccatcgctgttgccttcggcccctacgtaggggcgttcgacgaggcggtgggcaaacatctggaacctagcgatatccgccaatttcgtgctaggcgaaccactacaaacgaaatggaatacgcacctcaaggtgctcggatcgaggcgacaggggtcattcctggcagcttgccggatcagttgtccgatgatctgttgcccaccatttggcgtcgtcatttatcaagcacgaccaagactaaaacctcgatcaaagacgccaaggagttggtgaactatggcaagcgcatgcaggaagcggcgcgtacaccggacaccgaggtcgttctgccactcattgcgtactacggcacagggcggctgtggcagcagaagaaactgacagacgcaaagaacattcaacgcacttccagaaccgtgggctataccgactgcctggatccagcctctagctataaatcgtttgtgcagtggtttcgctactggagcctgaatgccaaagaagcccaactcaaagcgcttgaagccggggtcagcattgccaaaactgaattcgacgactacatccagtcagttagtcgcgcagtgaatgcttgtatccagccagcaggctggagcggcattcaatactctttcactcgtgacacattggtcgcccgccatgagcagtttggggagttgcccgtcgagtggcttagcgacggcattcgcaatatgattggtatggttgccgatatcgcgttccgtgcgaccaagctcaacgggcatctcggcgcgcaggcagctcaagaaactcccggcgtgttgctgatagacgaagtcgacatgcatctgcatccggaatggcaacaagtggtgctgctcaatctgaccgaagcatttccggccatgcagcttatcgttaccacccacagtcctcaggtgttgagcacagtatcctcgaacagcgttcgaatcttgcgcaccgaaatcgatccggagacctctagtcgaattaccagcgtcagcgagccgcagtggcagactcggggcgttgccagctccgacctgctcgctcgtatcatgggtgtggacccagttcctaacgtgcctgaagcatcatgggtttccgactatcaggcactgattcaacagaacctccacgagcaacccgaaggagtcgagttgagaacaaagctagaatctcatttcggtgctgaccacccaattattcgcgaatgtgagcgacaaatacgcttgcaggccattaagcaacgtcttccacgcgatctcggcaaccgggagtattga

SEQ ID NO: 89749 - DNA, 645 bp, Pseudomonas syringae pv. lapsa; identical to SEQ ID NO: 89725

SEQ ID NO: 89750 - DNA, 1266 bp, Pseudomonas meliae
atgcgcctcgaccacctccatctgcagaattttcgttgttacgaagatgctcattttgatttccagccggggttcaatttggtggtgggggttaatggcagtgggaagacgtcgctgttgctgggtgtcgcgggatgcttcgggaatttacttggaagcattggcgtccatcagccatcgatagctgagtccgatgttcggttcgcgttagtaaagttcgaagacaggattcgtttcgaacgcagctatcctcttgtattgactgcccaaggtggcgcgtttgagcgtcaggaatggcacgtatcgctggaacgcagcagtcttcagacaaatttcagcgcgctaaacagtctcgtattttcggaaaatctgattagcatcgatgtaagtacccacggggatttgcctgtattcgccgtctatcaagccaatcgacgctggctgacgatgagtgtaaccgctgagcttgctgcacagagcaaaccatcaagactggatgcatacacctcttggttcgatgccgcctccaatttgaaaaacttcgagacctggttcatcggcaaaacactggagcgctttcaaagactatcccgagcaggttcttccagcgttttcaacgacgaactgacctggataaactcagccatccaatgcgcactacccgacgccaagggaatagagtacgacatggagctacgtgcgttggtagtcgatatgtatgatcgaaaaatcccgttcaacgacctgagcgacggacaacgcggaatggtcgcactcttcgccgatatcgctcgccgtatctgcttgctcaacccgcacatggggaaggatgttctaagcaagacaaacggcatcatcgtcatcgatgagctcgatatccatcttcaccccggctggcaacgcaccattgctccagcactgaaaaaagcatttcccagcatccagttcatcgctgccagccactcgccacaggtcatcggcagcctgcaaccgggcgaggtcatcctgctgaataaccatgacggctctcatccaagagcaacctatggcctggactccagcactattctggaagaagtcatgggcgtaccgcagcgcgagcctgaaattgaagcactgctcgacgagctattcagcacactggaaaacaacgagcttgaaaaagccagactgcagcttgatgcgttaaaacagaaagcgcccgatctgcccgagttcgcaggtgccgaagcgttgctcaaacgtaaggagctcattggacgatga

SEQ ID NO: 89751 - DNA, 633 bp, Pseudomonas meliae
atgagacgcgttatcaagggaactgagcctgcgtcactcgccgaatggaaagccagcgcaaacgaagactggacgcccacctatccaaccctgcagaacccgcaaaaacgcgacttgcataattgcttgctgcaagagcagaacttctcatgctgctattgcggcagggaaatagagcttgatagcagccacatcgaacatttcagaccgcaggatcattatctgccattggcactggaatacagcaatcttcatgcgtcttgcctgcgcgagaccacaccaggaaacccgttgcactgcggccactataaaggcaactggttcgatgaggacctgcacatttccccgacagaggacgattgcgaacagcgcttctgttatctgctcacagggaaaatccaaagcacgtcccacacagatcttcccgccacgacgatgatcgaaaagctcgcactcgatatcgcgtatctgacaaaaagacgccaagaggcaatcacgcgcgtgtttgatgagcaaatcttagccagcatcagcgacacagagttgacacttttggttctggggatgccaacaaacagctcgcctttagccacgttgtcgcccgctatgcggagcagtttctggcgtctttaa

SEQ ID NO: 89752 - DNA, 1524 bp, Pseudomonas amygdali pv. mori
atggaagcggggttgccaccaggtacgaaactcatggctacgctctttgtgtcgcctttttatggtttgcatttagtatgctgtcccaactgcaacggaaggtgttttccatatgcttggccagatgacgaaaccggagaaaatattgtgaggctcgacacactgcgaatgcagaactatcgctgcttcggtgaattcgagatcgacttcgatccgcatctgaccatacttattgcctccaacggaggcggaaaaaccactattcttgatgccgctcgagttgcgctgtggcctttcgtcaagggttttgatcttggcggtcagacaggaaagtccgccactattcagattgaagatgtgcgactggcccaattcggcagtggcaatatggagtcgcaggtacccagcgttatcgaggcaaagggcgtctggtgggaaagcgccgttgaaagtagctgggtgcagcagcgcgtcagcctgaaaaagtccactaacactattggcgatgctggatcgaaagcactgacttcgtacggtaagtcgcttcaggaccgtgtgcgaagcgatgcacatgtcactctgccaatggtgagttaccttggcacttccaggctatggttcgagggacgcttcagttcggcggcggctcagacaacactcgataaaagtgagtactccagaacgtccgcatacctaaattgcctgtcttattcatccagtttcaagaccttcaccgcatggtacatctggatgtaccgcagctatcgtgaagctcagttgatagctctggagcgcgatgaagaaatgtctgatgccgggcagcgctttgagaaaatcatctcagctgtcaaagaagccatcgacaggttgataaaggctcctacggggtggcacagactggaatacagtgccagtcatcaacagcaactggttatgcatcatccggaccagggggttttacctgtcgaaatgcttagcgatgggctgcgtaacactatcgccatggttgcggacctcgcttttcgtgcctgcaaactcaacccgcacctcggcgagagggcgcccttgcaaacgccaggtatcgccttgattgatgaagtggatatgtttctgcatcccttctggcaacagacgatagtcggttcattacgtgcggcttttcccgccatgcagtttattgtcaccacccacagtccgcaggtgttgagtacagtccgacgcgaaaatattcgggtgatcggtaaagatgcccaagggcgtttgattgcatcccggccccttgccatgacctacggtgaaccgagcaacagcgtgctgcgaagcgtgatgcaggtcgatccgcagcctccggtggatgaaaagccgggcctgctacaactcacggaatgggtggacaaaggtcgctatgacgaaccacaggcgatcttgctgatgcagcagataacggaggctctcactgaacaacaccctcaactgcagcgcctgcagcgcagcataaagcggcagaaggcattgaggggatga

SEQ ID NO: 89753 - DNA, 723 bp, Pseudomonas amygdali pv. mori
atgaggtcagtgcacaagcggggaggaggaccttatcagttggcgcgttcacatcgcagcccacctgctaccagcgacacttccacaagccggtggagtagttttggctacaaggctcaggtactgggctgtcttttggaggagcagtacggattatgttgttatagcgaaattcgacctgaccgggttggcctgagtttccatatagagcacgtcgaaaacaagagccaaaaccctcagcgtacttttgactacaacaacctcgctgcctgcgcgctggacagtcagagcgatctggaggtattgaaaatacagggcgctgaggtatttggtgggcacgcgtcaggtaagtcgaaaggggtcgacatggctcgcttcgtttcgtgtcacatgcccgactgttcgcgcttcttcgcctatttgtctgacggccgtgtagtgcctgctgacgggttgtcaccggaggaagttgaccgagctgaatacaccatcggcctgctgaaccttaacagcccttatctccaaggcttgcgacaatcctggtgggatgagctggaagctctttttgaagagcatgttaatcaaaatatgagtctgcattgtctggcggggattgatctcatccctgtgggggcgaacttaagtcagtttttcagcattacccggaattttttcggaggtatcgctgaagaggtccttgagcaagaggctggtcgctggtaa

SEQ ID NO: 89754 - DNA, 1266 bp, Pseudomonas savastanoi pv. nerii
atgcgcctcgaccacctccatctgcagaattttcgttgttacgaagatgctcattttgatttccagccggggttcaatttggtggtgggggttaatggcagtgggaagacgtcgctgttgctgggtgtcgcgggatgcttcgggaatttacttggaagcattggcgtccatcagccatcgatagctgagtccgatgttcggttcgcgttagtaaagttcgaagacaggattcgtttcgaacgcagctatcctcttgtattgactgcccaaggtggcgcgtttgagcgtcaggaatggcacgtatcgctggaacgcagcagtcttcagacaaatttcagcgcgctgaacagtctcgtattttcggaaaatctgattagcatcgatgtaagtacccacggggatttgcctgtattcgccgtctatcaagccaatcgacgctggctgacgatgagtgtaaccgctgagcttgctgcacagagcaaaccatcaagactggatgcatacacctcttggttcgatgccgcctccaatttgaaaaacttcgagacctggttcatcggcaaaacactggagcgctttcaaagactatcccgagcaggttcttccagcgttttcaacgacgaactgacctggataaactcagccatccaatgcgcactacccgacgccaagggaatagagtacgacatggagctacgtgcgttggtagtcgatatgtatgatcgaaaaatcccgttcaacgacctgagcgacggacaacgcggaatggtcgcactcttcgccgatatcgctcgccgtatctgcttgctcaacccgcacatggggaaggatgttctaagcaagacaaacggcatcatcgtcatcgatgagctcgatatccatcttcaccccggctggcaacgcaccattgctccagcactgaaaaaagcatttcccagcatccagttcatcgccgccagccactcgccacaggtcatcggcagcctgcaaccgggcgaggtcatcctgctgaataaccatgacggctctcatccaagagcaacctatggcctggactccagcactattctggaagaagtcatgggcgtactgcagcgcgagcctgaaattgaagaactgctcgacgagctattcagcacactggaaaacgacgagcttgaaaaagccagactgcagcttgatgcgttaaaacagaaagcgcccgatctgcccgagttcgcaggtgccgaagcgttgctcaaacgcaaggagctcattggacgatga

SEQ ID NO: 89755 - DNA, 684 bp, Pseudomonas savastanoi pv. nerii; identical to SEQ ID NO: 86199

SEQ ID NO: 89756 - DNA, 1326 bp, Pseudomonas syringae pv. philadelphi
atgaacctgaccaggctttgccttaagaactaccgtcgctttgcagagttcgatatcgaattcgatccccaattgacggtaatttccgcacgcaatgggcaaggcaagacgtcggttcttgaagccattgttgcggctctaggccccttcgtcggctcgttcgatcagggaatgtccaggcacatcgagcgcactgatgcccgttatgcgcgggtaggcgaaggctttgaaagcgagcagcaatttcccgtgatcatcagcgcagaaatgtccaaccctgcgaagcgttggcaacgagcacttaacggtcccaaaagccgtacaaccaccaaagaagccgagccgctggcggcgtggggaaaagaacttcagttactgctgcgcagcgattcggcaatttcactgccggttgtgcgctattacagttcaaggcgcctttgggtcagtcacaaaaacgtctccagcaaagcgatcctgaccgagagtcgcacggcaggctacgaagattgtctgtccgcgttctctacttatgtgcagttacaggagtggatgaggaaggcgaccctagccgtcattcagcaaaaacagcagcccggttacgagcactccaatcttgcgccacgtttgcagggcatcagaaatgcggtgaacgaggtgatggcggaggaaggctggagcgacttccattacagcctgacgtatgaagagttgtccatgtctcatgccgaccactctgcactgccactgggcctgctcagtgacggcgtgcgcgccatgattacgctggtcgctgatctggcattgcgttgctctcgcttgaatggccacctcaaggaacaggcctcactacagacaacaggcatcgtattgattgatgaagtcgatttgcacttgcatccggcctggcaacaacgtgtggttgccagtcttcgtaaagcgttcccgaacatccagttcattgtcagcacgcacagcccgcaggtactctcgacggtaaaacgtgaatgtatacgcatggtatttcaggacgccgatgaaaactggcaagctgcatgcccgccacaggaggtcaaaggcgttgaaagcgccattgcgctcaacgacatcatgggcgtgaaccccattcctccggtagctgaagcactttgggtagccgaatacaccgcaaaaatcgaaaatggctcccatgaagatcacaacggcctggctctgcgcaaaaagcttctcgatttttatggagcacagcatcaggtgattctggacgctgacaggctgatccgttttcagacgttcaaattgcaaaaacactcgaacaccaagggctga

SEQ ID NO: 89757 - DNA, 681 bp, Pseudomonas syringae pv. philadelphi
gtgctcaaactggatcgcacctctgtggatgctcctccctgcctcgccgactacaatcatccgacccatgagtggtcagactttcgcgggacctgcaagaaacagctgcgctttgcgctcgtacagctacagggtatcgacggtgtcactacagaagacgccgccgggtacggcgtgcgatgtgcttattgcgagggggccatttttcatgaaggccatatcgagcattttcggcgcaagaatccggatcactttccggaactgacatttgcctggagcaacctttttctcgcctgtggcagtacccaacattgcggccaccacaaggatcgacgctcggctcctgcctacgacccagaccttctcatcaaacccgacgaacatgatcctgagcattacctgtatttccattcttctggaaaggtgctcgcccgtaacaacctgagtgatcacgaaaatagctgcgccactgagaccattcgcgtgtttggtctcgacaatccagcgcttgagggcgctcgggcaaacgcagtgcgcagctaccgcaagatgcacgatgcggatctgtcggagatcgcttcgtggtcagacgctgagcgtgacgcgtatttccggggggagatcgaagccacccgctgcctcccctacgctacgacgatcagacacttcttgcagaagtga

SEQ ID NO: 89758 - DNA, 1368 bp, Pseudomonas savastanoi pv. phaseolicola; identical to SEQ ID NO: 89568

SEQ ID NO: 89759 - DNA, 723 bp, Pseudomonas savastanoi pv. phaseolicola; identical to SEQ ID NO: 85915

SEQ ID NO: 89760 - DNA, 1317 bp, Pseudomonas savastanoi pv. phaseolicola
gtgagccaaggtacactggcgcatccgccagttctggtaaaggaaaccgacatgcgcctcgaccacctccatctgcagaattttcgttgttacgaagatgctcattttgatttccagccggggttcaatctggtggtgggggttaatggcagtgggaagacgtcgctgttgctgggtgtcgcgggatgcgtcgggaatttacttggaagcattggcgtccatcagccatcgatagctgagtccgatgttcggttcgcgttagtaaagttcgaagacaggattcgtttcgaacgcagctatcctcttgtattgactgcccaaggtggcgcgtttgagcgtcaggaatggcacgtatcgctagaacgcagcagtcttcagacaaatttcagcgcgctgaacagtctcgtattttcggaaaatctgattagcatcgatgtaagtacccacggggatttgcctgtattcgccgtctatcaagctaatcgacgctggctgacgatgagtgtaaccgctgagcttgctgcacagagcaaaccatcaagactggatgcgtacacctcttggttcgatgccgcctccaatttgaaaaacttcgagacctggttcatcggcaaaacactggagcgctttcaaaggctatcccgagtaggttcttccagcgttttcaacgacgaactgacctggataaactcagccatccaatgcgcactacccgacgccaagggaatagagtacgacatggagctacgtgcgttggtagtcgatatggatgaccgaaaaatcccgttcaacgacctgagcgacggacaacgcggaatggtcgcactcttcgccgatatcgctcgccgtatctgcctgctcaacccgcacatggggaaggatgttctaagcaagacaaacggcatcatcgtcatcgatgaactcgatatccatcttcaccccggctggcaacgcaccattgctccagcactgaaaaaagcatttcccaacatccagttcatcgccgccagccactcgccacaggtcatcggcagcctgcaaccgggcgaggtcatcctgctgaataaccatgacggctctcacccaagagcaacctacggcctggactccagcagtattctggaagaagtcatgggtgtaccgcagcgcgagcctgaaattgaagcactgctcgacgagctattcagcacactggaaaacaacgaacttgaaaaagccagactgcagcttgatgcgttaaagcagaaagcgcccgatctgcccgagttcgcaggtgccgaagcgttgctcaaacgcaaggagctcattggccgatga

SEQ ID NO: 89761 - DNA, 645 bp, Pseudomonas savastanoi pv. phaseolicola; identical to SEQ ID NO: 85917

SEQ ID NO: 89762 - DNA, 1392 bp, Pseudomonas savastanoi pv. phaseolicola
ttgtgttctggatcaatcccctcagggaccttcatggaaatcaaaagcttcaggctcgttaatgtggggcgtttcagcgatcttgaagtcgctctggcgcctaccgaaagacatgcgtcgaaggtgaccgtactggtcggcaataatggggcggggaagactacgctgctcaagtctgtcgctacatcgttgagctggctggtagcgagagtcaggacgccgaaaggtgctggcagtcgtatcgatgagggtatggttcagaacggcaccgctacatcctcgattaccattcggatagaggatgtgttgatttcggatgacgagatcaatccacttgaaactgaatggggaataaccgctactcggaaaggccgaaacgccacctcatccacagtattaagcgagctcaacagacttgctgatggctatcgctcaaagttgactgaaaaaagtgatacgtctcttcctcttctggctttctaccccgtcgagcgctctgtcatcgagataccgctcaaagtccacgccagacatacctttgatcaactcgacggctacgacaacgccttggggcgtggcgtggattttcgccgctttttcgagtggtttcgggagcgcgaagacagcgagaatgaaacgggtatctcgatagagttgctgaatgagctgtctcaaaagatcttgattgatacagaactctggaaagtgctgaccagggagcatgcctcttcacgtgaccgtcagctgactgcggtcagaactgcggttgaggcgttcatgccaggcttcacaaaactgcgtgtcaagcgtaagccgcgcttgcacatggctattgataaagacggcaagacgctaaacgtatcccagctgtcccaaggcgaaaaatcgatgatggcgctcgtcggcgacatcgccagacgcctcgccatgatgaacccggcgctggaaaacccattacatggcaatggcatcgtcctgatcgacgaagttgatctgcacctgcaccccaaatggcaacgcagtctcatcgcccaactcactataacgttccccaattgccagttcctcctgaccacgcattcgccgttggtcatcagcgacagcaaggatgtgctggtgtacgtcatggacgatggcgagttacatgagcaggacagtctttatggccttgatgccaatcaggtgctgtcgagtgtcatggacactgatattcgaaatgaggagattcaaacagttctggataaactgcagcactttttgatgagaggagagctcgatgaagctcggacgctctacgcagggttgactgacgaactacctgcaaatcacatcgaactggcgaaagcttcgctgctgattcgcaagctggaagtgcgccgtgagaaagattga

SEQ ID NO: 89763 - DNA, 621 bp, Pseudomonas savastanoi pv. phaseolicola; identical to SEQ ID NO: 85919

SEQ ID NO: 89764 - DNA, 1140 bp, Pseudomonas syringae pv. aceris
gtggcgggatgcttcgggaatctacttggaagcattggcgtccatcaaccatcgatagccgagtccgatgttcggttcgagttagtaaagttcgaagacaggattcgttttgagcgcagctatcctcttgtgttgactgcccaaggtggcgcgtttgagcatcaggaatggcacgtatcgctagaacgcagcagtcttcagacaaattttagcgcgctgaacagtctcgtattttcggaaaatctgatcagcatcgacggcgctactcacggggatttgcctgtattcgccgtctatcaagccaatcgacgctggctgacgatgagtgtaaccgctgagcatgctgcacagagcaaaccatcaagactggatgcctacacctcttggttcgatgccgcttccaacttgaaaaacttcgagacctggttcatcggcaagacactggagcgctttcaaagactggccagaacgggtttccctggcattctcaccgacgaactcacctggatcaattcagctatccagtgcgcactgccggagtccaagggcatagagtacgacatggaaatgcgggggctgatggtggacattgatgaccgaaaaaccccgttcaacgacctgagcgacgggcaacgcggaatggtcgccctcttcgccgatattgcccgccgtatctgcctgctaaatccgcacatggggaaggatgttctaagcaagacaaacggcatcatcgtgatcgatgaactggacatccaccttcaccccggctggcaacgcaccattgcacccgcgctgaaaaaagcatttcccagcattcagttcatcgctgccagccactcgccacaggtcatcggcagcctgcaaccgggcgaggtcatcctgctgaataaccatgacggctctcacccaagagcaacctacggcctggactccagcagcattctggaagaagtcatgggcgtgcctcagcgtgagcctgaaattgaagagttgctcgatcagctattcagcactctggaaaacaatgagcttgaaaaagccaggtcgcagcttgatgcactgaagaagaaggcgcccgatctaccagagttcgcgggtgccgaggcgctactcaaacgcaaggagatcattggacgatga

SEQ ID NO: 89765 - DNA, 648 bp, Pseudomonas syringae pv. aceris; identical to SEQ ID NO: 86095

SEQ ID NO: 89766 - DNA, 1383 bp, Pseudomonas syringae pv. aceris
ttgtgttctggaccaatcccctcagggaccttcatggaaatcaaaagcttcaagctcgttaacgtggggcgtttcagcgatctggaagtcgctctggcgcctaccgaaaatcatgcgtcgaaggtgacggtgctggtcggaaacaatggtgcggggaagacgacgttgctggaatccctgagcactctgctcacttggttgatcgcaagaattcgatctgaaaggggagcaggaaaaaaggttgctttagaaagaataaaaaataacgccgacttctcagaagtcagcatactgctttccgagtctttcccgtttgcagaccgcgcgcagtttgggtggcaactttcctcagtccgtcctgggcgtaaagtggaatcgagaacgaacttgattcatctggcacttctagctgacggttaccgaacactgctcacagacagtggtgcgacttctttgccattgatcgcctactatcctgccgaacgttcagtcgttgatattccgcttgaggcgccttttcgtcctccttacagacaactcgacggatatgaagacgcgcttagtcgaggtgtggattttcgacagttcttcgagtggtttcgagatagagaggatcgagagaacgagaatggcgtatcatctgacacactgatgcgtgctcagcaaaaacatggaccagacagcatagagtacgaagttctactcaggttgaacgagtcttctcgtgatcgagaactgacagctgttcgatcagccatctatgctttcatgcctgcttttgcgaatttgcgagttcgccgtcagcctcaggctcacatgacgatagataaacatggtgagacattgaatgtcttacagctgtcccaaggcgaaaaatccatgatggcgctcgtcggcgacatcgccagacgcctcgccatgatgaatccggcccttgaaaacccattgcaaggcaatggcattgtcctgattgatgaagtcgatctgcacttgcacccaaaatggcagcgcagtctcatcgcccaactcactacaacgttccccaattgccagtttctcctgaccactcattcgccgttggttatcagcgatagcaaggatgtgctggtgtacgtcatggacgatggcgagttacgcgagcaggacagtctttatggccttgatgccaatcaggttctgtcgagtgtcatggacaccggcattcgcaacgaggcagttcagacctgtctggacgagatgcagcactttttgatcaggggcgagcttgatgaggctcgtactctttacggagtgctggccgaccagttacctgcagatcacattgaactggccagggcttcgttactgattcgcaagctggaaatacgtcgtgagaaagattga

SEQ ID NO: 89767 - DNA, 651 bp, Pseudomonas syringae pv. aceris; identical to SEQ ID NO: 86097

SEQ ID NO: 89768 - DNA, 429 bp, Pseudomonas syringae pv. broussonetiae
ttgcagcgcctccctaagtggcaacgtcgcattgttccagcattggaggatctgttccccaactgccagttcatcgccaccactcactcgccgtttgtgattcaggcggccggtcgccagcggataacctttattgagccgcattcatcagcgaggctcttggacgggggtaatagcctcgaagatatcgcagaagatattcaaggtatttcccaacctcaacgtagtgtgcgagctgagatattaggtactgctgcgaaacggtacttcacactcctagagctgaaagcggttgacgcgcagcaggtggccccagccgagttgcgcgacgctgaaaaatcataccgggatgcgagcgaaccatttacatcagaccccgctgtacacgccttgcttaaagtactgatgatggagggcaacgagcaatga

SEQ ID NO: 89769 - DNA, 687 bp, Pseudomonas syringae pv. broussonetiae
atgaggcctgttacaagggggggggcaccgaatgtttatgcgaagtatcaggatgcaattggcgatctagaagattgctttggtcggtattgtagttactgcgaacgtcgttttcctgcgctattagctgtagagcatgtttctccgaagagttccgacgctgcgcgtgccaccgattggaccaattttcttattggatgcgttaactgcaactcaacgaaggggcatacgccgacaaacgatcaagactttttgtggccggacaaagacaacaccctaacggccattgaatacagagaaggtgggctagttcaacctgcgtcagggctcgatccgatgattgtgccaaaggcggctgctcttatagacttggtaggattggatcgccatcctggccagcctgcggagaaacagcccaccgaccgagataagcgttatctagatcgggaagagaattggaagcttgcccaagacatgcgcgtcaggctaaagcgtaatgataatgaggactatcgggaagcactggtcaacctggctaagacatctggttttttcagtatctggattgccgcctttgacgatgacccagacatgcgtcgtcgactggttgagactcatgtcgggaccgcgagagaatgtttcgaaactgactggactctcaaagccagagttggcggccatatctag

SEQ ID NO: 89770 - DNA, 1359 bp, Pseudomonas syringae pv. broussonetiae
atggaaatcaaaagcttcaagcttgttaacgttgggcgtttcagcgatctggaagtcgctctggcgcctaccgaaagacacgagtcgaaggtgaccgtactggtcggcaataatggggcggggaagactacgctgctcaagtctgtcgctacatcgttgagctggctggtagcgagagtcaggacgccgaaaggtgctggcagtcgtatcgatgaggatatggttcagaacggcaccgctacatcctcgattaccattcggatagaggatgtgttgatttcggatgacgagatcaatccacttgaatctgaatgggcaataaccgctactcggaaaggccgaaacgccacctcatccacagtattaagcgagctcaacagacttgctgatggctatcgctcaaagttgactgaaaaaagtgatacgtctcttcctcttctggctttctaccccgtcgagcgctctgtcatcgagataccgctcaaagtcctcgccagacatacctttgatcaactcgacggctacgacaacgccttggggcgtggcgtggattttcgccgctttttcgagtggtttcgggagcgcgaagacagcgagaatgaaacgggtatctcgacagagttgctgaatgagctgtctcaaaagatcttgattgatacagaactctggaaagtgctgaccagggagcatgcctcttcacgtgaccgccagctgactgcggtcagaactgcggttgaggcgttcatgccaggcttaacaaaactgcgtgtcaggcgtaagccgcgcttgcacatggctattgataaagaaggcaagacgctaaacgtatcccagctgtcccaaggcgaaaagtcgatgatggcgctcgtcggcgacatcgccagacgcctcgccatgatgaacccggcgctggaaaacccattgcacggcaatggaatcgtcctgatcgacgaagttgatctgcacctgcaccccaaatggcaacgcagtctcatcgcccaactcactacaacgttccccaattgccagttcctcctgaccacccattcgccgttggtcatcagcgacagcaaggatgtgctggtgtacgtcatggacgatggcgagttacgtgagcaggacagtctttatggtcttgatgccaatcaggtgctgtcgagtgtcatggacactgatattcgaaatgaggagattcaaacagctctggataaactgcagcactttttgatgagaggagagctcgatgaagctcgtactctctacacagagttggctgacgagttacctgcaaatcacatcgaattggcgaaagcttcgctgctgattcgtaagctggaagtgcgccgtgagaaagattga

SEQ ID NO: 89771 - DNA, 651 bp, Pseudomonas syringae pv. broussonetiae
gtgagaaagattgaaaagggaagtctcgcggtgctggaaaaatggaagcgcgcgaacaagggaaagaaatacggcgaccttgtggggcatgaagatatcaaggatgccattcgccacgcctgtgtcactgagcagcatggcttgtgcgcctattgctgctgcaggatcaccgcagagaaaggcagtgcctgcaatgaacatgttgaagcgcagcatctagcaccgcatcgcactctggatttcggcaacattgtcgcgagctgcaccaaagcggggcggtgtgacgccgctcatggccatcagactctgccgcttacaccgctgatgatcgaatgtgaaaaagagctgcagtttgagctttccggtcttgtggcaggcaccacgccccgggcgtgcgcaagtatcaacgtgctcaatttaggcgatacccatgaatcgaaccggggtcttgtgggagagcgcaagcagatgattgatgcgctgctgttttcttgcagcattgaccctgctgagctgtttactgaggaggatgaggttctcgatctgctaagaaacgacctgctggaggtaaatgctcagcagttgcttcagcccttttctcctgttttggtgaatgtaattatcggcatccagcgtgctcgacagcgttga

SEQ ID NO: 89772 - DNA, 1281 bp, Pseudomonas caricapapayae
ttggtaaaggaaaccgacatgcgcctcgaccacctccatctgcagaatttccgttgctacgaagatgctcatttcgacttccagcccggtttcaatctggtggtgggggtcaatggcagtgggaagacgtcgttgttgcaaggggtggcttgttgtttcgggaaattcctcgcgaacatgggggcgggtaactcactcatcacggaatcagatgccaggttcaacttggtaaaatctgaaaacagtgttcactttgaacgtatcttccccctcaagttggctgcccgaggtgatgcgttcgggttccaggattggtacgtctcgctcaagcgcgatggcagtaaccataattccagcaaccttgaaagcgttatatctccagagaacccacacgtgtcggaatctcttgaaatcgacatgcctgtatttgcggtttaccgagccagtcgaggctggctgaccatgaatatagctgccgagcatgcagcacagagcaaactgtcaagactggaagcctataccaactggttcgatgcagcctccaacttgaagaactttgagacctggttcatcggcaagacactggagcgctttcaaagaatatccagatatggcttatcgggcgttttcactgatgaactcacctggatcaattcagctatccagtgcgcattgccggagtccaaggggattgagtacgacatggaaatgcgggggctgatggtggacatgaatgaccaaaaagtcccgctcaacgacctgagcgacggacaacgcggaatggtcgcactcttcgccgatattgctcgccgtatctgcctgcttaacccgcacatggggaaggacgttctaagcaagacaaacggcatcatcgtgatcgatgaactagacatccacctgcaccccggctggcaacgcaccattgctccggcactgaaaaaagcatttcccaacgtccagttcatcgccgccagccactcgccacaggtcatcggcagcctgcagccgggcgaggtcatcctgctgaataaccatgacggctctcacccaagagccacctacggcctggactccagcagcattctggaagaagtcatgggcgtgcctcagcgcgagcctgaaattgaagaattgctcgatcagctattcagcactctagaaaacaacgagcttgaaaaagccaggtcgcagcttgatgcactgaagaaaaaagcgcccgacctgccagagttcgcgggtgccgaggcgctgctcaaacgcaaggagatcattggccgatga

SEQ ID NO: 89773 - DNA, 642 bp, Pseudomonas caricapapayae
atgagacgcgttatcaagggaactgagcctgtatcgttcacggaatggaaagccagcgcaaacgaagactggacgcccacctatccaaccttgcaaaacccgcaaaaacgcgacctgcataatcgcttgctgcaagagcagaacttttcatgctgctattgcggcagggaaatagaacttgatagcagccacatcgaacatttcagaccgcaggagcattacctgccactggcactggaatacagcaatcttcatgcgtcctgtctgcgcgagaccgcaccaggaaacccgttgcactgcggccactacaaaggcagctggttcgatgaggacctgcacatttctcccacagaggacgattgcgaacagcgcttccgttacttgctgacaggcaaaatccagagcacttcccacacagaccttcccgccacgacgatgatcgaaaagctcgcactcgatatcgcgtatctgactaaaaggcgccaggaggccatcacgggtgtgtttgacgaacaattcctatccagcgccagtggtgcagagctgaatcacctcagggacagactgcgctcgcaagctgacaacaatccgatcagctttggccatgtgattgcacgttatgcggaacaactactggcatag

SEQ ID NO: 89774 - DNA, 1338 bp, Pseudomonas congelans
atgccttttgtacacaaattgagctttagtgattggagtggcagattaaaagaggtggttttttcgtcgcctcaagattctttaaaggagaaaggatttcacacaactataattaccgggcaaaatggatctcataagagtactatattaaaagagcttgtttcagcgattgtattaattgatggggaagctaaaattcaatatggtgcgcactctaatttctctccccatgtgatttgtgtctcgggttctgtcgcggaccggtttccactcaaggaaaagcctggtggagggagtaccgagtttgatgtgccggattatgtgtatttagggcagcgagttggtccaaatctactcagtaaaaaaagacctttagaaactcttctgatttctgcacttgataatagaaaaggagatagatataaatggggctttttcaggaaggctcatcagtttgccggaataaagatgtcagtaaagtttgagctagctatagagcgcgctttttcagaagatagttttcacttaagggatgcgatagttgaaagaactattgggagaggcagtgagcgtggcgcgcctatgcgtcgtttatctccaagcacagctaagtggctgttgaatgaattttcggatagggatttcgaggattttgaaaggtttcttgataatgggcgaaaaagagtaacggttttactcagcgacaatggtgctatctgtgagtcgattcctattgcaatgctccgattagggctgcttgctgatgtagttggcctcaaggatgtgttggttagatcaagtataaataattcagagttctctatatatgaattgagctctggagaataccatatgtactccagtattcttggagtgggatttggcgtagaggactcttctatagtattaatagatgagcccgaaaatagtttgcatccgcaatggcaacaagattttatgagtgctgtttttgatataggatcgcaggggttggcgctggggcatattataatatgtacacattccccattaatagtaggtgcagcgccagaaggcgctacaataattgatttgaaaaatgaagttgcgccttcagagtcctccacttttggcggatcttcagatgaaatattattgtcgcagtttggtttagcgtctagtcgtaaccgtgtcgttgttgacatcatacagcgcgctgtttcccttgttgaacggggggattttggtggcgaggagtttgatttaatgaagccagtattagcttcgttgagagagaaaatgaggcctcatgatcctattatgcaaatattagatgcactgttagaggaagctgaataa

SEQ ID NO: 89775 - DNA, 723 bp, Pseudomonas congelans
atgaatattggttacgatagaattgcgccttcacctagctatcccatagggactacgaagttggattatctaggctttgagtggggtgatcagcataatattattaaggactttaaaagtgagctgaaaaaaagtttgagagaggcgcagagaggtagatgcgcttattgtcgaagaactctgtatgatgatatttcaactcatatggagcattttgtagagaaaagacagtacgttagctatacgtttgagattctaaatatttcgctctcttgcggcacctgcaatactcaaaaaaatgcttaccatagctccttcaatagcatgcttaagaaaagagctgaacgtcacaaaaaagctcctattactcgttgccctactttatcacgcgaaattgccagtggtaatccttttccaaataccgctgatcagtatcgatgggtacacccccatttcgatctctattcagaaaatattacaatcgacaaaggatggatatttgtaggctcaagtatcaagggggctcgtactatttcaggtcttaagctaaatgcgttggcggcgattgaaaagagagctcttgacgagcgtttaagtatgagaggaggtttgctttcaacactggtttgcgcactttcggaaatgagtcatcatcgtgctgacgaaattgccggcgtggttgttaaagtattacgtcgtcgacgtgcctctgttttacgttag

SEQ ID NO: 89776 - DNA, 1263 bp, Pseudomonas syringae pv. cunninghamiae
atgcgcctcgaccatctccacctgcagaattttcgttgctacgaagatgctcattttgatttccagccggggttcaatctggtggtgggggttaatggcagtgggaagacgtcgttgttgcagggggtggcttgttgtttcgggaaattcctcgcgaacatgggatctggtaactcacttataactgagttagatgccagattcactttagtaagatctgaaaacagtgttcactttgaacgtgtcttccccctcaagttgactgcccgaggtgacgcgttcgggtttctagattggcacgtctcgctgaaacgggatggcagcaacgataattccagcaaccttgagagcgttacatctccacagaacccacacctctcggaatcttttgaaatcgatatgcctgtatttgcggtctatcgagccaaccgaggctggctgaccatgaatatagccgctgaacaggcggcacagagcaaaccatcaaggctggaagcctatacgaactggttcgatgcagcctccaatttgaagaactttgagacctggttcatcggcaagacactggagcgctttcaaagaatatctagacatggcttctcagacgttttcactgatgaactcacctttattaattcagccattcagtgcgcgctgccagagtccaaagggattgagtacgatatggagatgcgggggctgatggtcgatatggatgaccgaaaaatcccgttcaacgacctgagcgacggacaacgcggaatggtcgcactcttcgccgatatcgctcgccgtatctgcctgctcaacccgcacatgggtaaggatgttctaagcaagacaaacggcatcatcgtcatcgatgaactcgatatccatctgcaccccggctggcaacgcaccattgctccagcgctgaaaaaagcatttcccagcatccagttcatcgccgccagccactcgccacaggtcatcggcagcctgcagccgggcgaggtcatcctgctgaataaccatgacggctctcatccaagagcaacctatggcctggattccagcactattctggaagaagtcatggacgtaccgcagcgcgagcctgaaattgaagcactgctcgacgagctattcagcacactggaaaacaacgaacttgaaaaagccagactgcagcttgatgcgttaaaacagaaagcgcccgatctgcccgagttcgcaggtgccgaagcgttgctcaaacgcaaggagctcattggccgatga

SEQ ID NO: 89777 - DNA, 642 bp, Pseudomonas syringae pv. cunninghamiae
atgagacgcgttatcaaaggagctgagcctgcgtcattcaccgaatggaaagccagcgcaaacgaagactggacgcccacctatccaaccctgcagaacccgcaaaaacgcgacttgcataattgcttgctgcaagagcagaacttctcatgctgctattgcggcagggaaatagagcttgatagcagccacatcgaacatttcagaccgcaggatcattatctgccattgacactggaatacagcaatcttcatgcgtcttgcctgcgcgagaccacaccaggaaacccgttgcactgcggccactataaaggcaactggttcgatgaggacctgcacatttccccgacagaggacgattgcgaacagcgcttccgttatctgctcacagggaaaatccaaagcacgtcccacacagatcttcccgccacgacgatgatcgaaaagctcgcactcgatatcgcgtatctgactaaaagacgtcaggaggccataacgggtgtgttcgatgaacaattcttatccagcgccagcgatgctgagcttaggcaccttctggaaagcctgcgatcgcaagctgccaacaatccgatcagctttggtcatgtgattgcacgttatgcggaacaattactggcgtag

SEQ ID NO: 89778 - DNA, 1377 bp, Pseudomonas syringae pv. maculicola; identical to SEQ ID NO: 89604

SEQ ID NO: 89779 - DNA, 723 bp, Pseudomonas syringae pv. maculicola
atgaggtcagtacacaagcggggaggcggaccttatcagttgacccgttcacattgcagcccgcccactaccagcgacacctccacaagccggtggagtagttttggctacaaggctcaggtactgggctgtcttttggaggaacagtacggattgtgttgctacagcgaaattcgacctgaccgggttggtctgagtttccatatagagcacgttgaaaacaagagccaacaccctcagcgtacttttgactacaacaacctcgctgcctgcgcgctggacagtcagagcgatctggacgtgttgaaaatacaaggcgccgaggtatttggtgggcacgcgtcaggtaagtcgaaaggggtcgacatggctcgcttcgtctcgtgtcacatgccagactgctcgcgcttcttcgcctatttgtctgacggccgtgtggtgcctgctgacgggttgtcactggatgaagttgaccgagctgaatacaccatcgacctgctaaaccttaacagcccttatcttcaggacttgcgacaatcctggtgggatgagctggaagcgctttttgaagagcatgttgatcaagatatgagtctgcattgtctagcggggattgatctcatccctgtgggtgcgagcttaagtcagtttttcagcattacccggaattttttcggaggcatcgctgaagaggtccttgatcaagaggctggtcgctggtaa

SEQ ID NO: 89780 - DNA, 1326 bp, Pseudomonas syringae pv. maculicola; identical to SEQ ID NO: 89606

SEQ ID NO: 89781 - DNA, 681 bp, Pseudomonas syringae pv. maculicola
gtgctcaaactggatcgcacctctgtggatgctcctccctgcctcgccgactacaatcatccgacccatgagtggtcagactttcgcgggacctgcaagaaacagctgcgctttgcgctcgtacagctacagggtatcgacggtgtcactacagaagacgccgccgggtacggcgtgcgatgtgcttattgcgagggggccatttttcatgaaggccatatcgagcattttcggcgcaagaatccggatcactttccggaactgacatttgcctggagcaacctttttctcgcctgtggcagtacccaacattgcggccaccacaaggatcgacgctcggctcctgcctacgatccagaccttctcatcaaacccgacgaacatgatcctgagcattacctgtatttccattcttctggaaaggtgctcgcccgtaacaacctgagtgatcacgaaaatagctgcgccactgagaccattcgcgtgtttggtctcgacaatccagcgcttgagggcgctcgggcaaacgcagtgcgcagctaccgcaagatgcacgatgcggatctgtcggagatcgcttcgtggtcagacgctgagcgtgacgcgtatttccggggggagatcgaagccacccgctgcctcccctacgctacgacgatcagacacttcttgcagaagtga

SEQ ID NO: 89782 - DNA, 1359 bp, Pseudomonas amygdali pv. mellea; identical to SEQ ID NO: 89720

SEQ ID NO: 89783 - DNA, 651 bp, Pseudomonas amygdali pv. mellea; identical to SEQ ID NO: 89721

SEQ ID NO: 89784 - DNA, 1266 bp, Pseudomonas amygdali pv. mellea; identical to SEQ ID NO: 89722

SEQ ID NO: 89785 - DNA, 684 bp, Pseudomonas amygdali pv. mellea; identical to SEQ ID NO: 89723

SEQ ID NO: 89786 - DNA, 1377 bp, Pseudomonas amygdali pv. mellea
gtgaggctcgacacactgcgaatgcagaactatcgctgcttcggtgaattcgagatcgacttcgatccgcatctgaccatacttattgcctccaacggaggcggaaaaaccactattcttgatgccgctcgagttgcgctgtggcctttcgtcaagggttttgatcttggcggtcagacaggaaaatccgccactattcagattgaagatgtgcgactggcccaattcggcagtggcaatatggagtcgcaggtacccagcgttatcgaggcaaagggcgtctggtgggaaagcgccgttgaaagtagctgggtgcagcagcgcgtcagcctgaaaaagtccactaacactattggcgatgctggatcgaaagcactgacttcgtacggtaagtcgcttcaggaccgtgtgcgaagcgatgcacatgtcactctgccaatggtgagttaccttggcacttccaggctatggttcgagggacgcttcagttcggcggcggctcagacaacactcgataaaagtgagtactccagaacgtccgcatacctaaattgcctgtcttattcatccagtttcaagaccttcaccgcatggtacatctggatgtaccgcagctatcgtgaagctcagttgatagctctggagcgcgatgaagaaatgtctgatgccgggcagcgctttgagaaaatcatctcagctgtcaaagaagccatcgacaggttgataaaggctcctacggggtggcacagactggaatacagtgccagtcatcaacagcaactggttatgcatcatccggaccagggggttttacctgtcgaaatgcttagcgatgggctgcgtaacactatcgccatggttgcggacctcgcttttcgtgcctgcaaactcaacccgcacctcggcgagagggcgcccttgcaaacgccaggtatcgccttgattgatgaagtggatatgtttctgcatcccttctggcaacagacgatagtcggttcattacgtgcggcttttcccgccatgcagtttattgtcaccacccacagtccgcaggtgttgagtacagtccgacgcgaaaatattcgggtgatcggtaaagatgcccaagggcgtttgattgcatcccggccccttgccatgacctacggtgaaccgagcaacagcgtgctgcgaagcgtgatgcaggtcgatccgcagcctccggtggatgaaaagccgggcctgctacaactcacggaatgggtggacaaaggtcgctatgacgaaccacaggcgatcttgctgatgcagcagataacggaggctctcactgaacaacaccctcaactgcagcgcctgcagcgcagcataaagcggcagaaggcattgaggggatga

SEQ ID NO: 89787 - DNA, 723 bp, Pseudomonas amygdali pv. mellea; identical to SEQ ID NO: 89719

SEQ ID NO: 89788 - DNA, 1266 bp, Pseudomonas syringae pv. solidagae
atgcgcctcgaccgcctccacctgcagaattttcgttgctacgaagatgctcatttcgacttccagcctgggttcaatctggtggtgggggttaatggcagtgggaagacgtcgttattgctgggggtggcgggatgcttcgggaatctacttggaagcattggcgtccatcaaccatcgatagccgagtccgatgttcggttcgagttagtaaagttcgaagacaggattcgttttgagcgcagctatcctcttgtgttgactgcccaaggtggcgcgtttgagcatcaggaatggcacgtatcgctagaacgcagcagtcttcagacaaattttagcgcgctgaacagtctcgtattttcggaaaatctgatcagcatcgacggcgctactcacggggatttgcctgtattcgccgtctatcaagccaatcgacgctggctgacgatgagtgtaaccgctgagcatgctgcacagagcaaaccatcaagactggatgcctacacctcttggttcgatgccgcttccaacttgaaaaacttcgagacctggttcatcggcaagacactggagcgctttcaaagactggccagaacgggtttccctggcattctcaccgacgaactcacctggatcaattcagctatccagtgcgcactgccggagtccaagggcatagagtacgacatggaaatgcgggggctgatggtggacattgatgaccgaaaaaccccgttcaacgacctgagcgacgggcaacgcggaatggtcgccctcttcgccgatattgcccgccgtatctgcctgctaaatccgcacatggggaaggatgttctaagcaagacaaacggcatcatcgtgatcgatgaactggacatccaccttcaccccggctggcaacgcaccattgcacccgcgctgaaaaaagcatttcccagcattcagttcatcgctgccagccactcgccacaggtcatcggcagcctgcaaccgggcgaggtcatcctgctgaataaccatgacggctctcacccaagagcaacctacggcctggactccagcagcattctggaagaagtcatgggcgtgcctcagcgtgagcctgaaattgaagagttgctcgatcagctattcagcactctggaaaacaacgagcttgaaaaagccaggtcgcagcttgatgcactgaagaagaaggcgcccgatctaccagagttcgcgggtgccgaggcgctactcaaacgcaaggagatcattggacgatga

SEQ ID NO: 89789 - DNA, 648 bp, Pseudomonas syringae pv. solidagae; identical to SEQ ID NO: 85921

SEQ ID NO: 89790 - DNA, 615 bp, Pseudomonas syringae pv. solidagae
atgcctgcttttgcgaatttgcgagttcgccgtcagcctcaggctcacatgacgatagataaacatggtgagacattgaatgtcttacagctgtcccaaggcgaaaaatccatgatggcgctcgtcggcgacatcgccagacgcctcgccatgatgaatccggcccttgaaaacccattgcaaggcaatggcattgtcctgattgatgaagtcgatctgcacttgcacccaaaatggcagcgcagtctcatcgcccaactcactacaacgttccccaattgccagtttctcctgaccactcattcgccgttggttatcagcgatagcaaggatgtgctggtgtacgtcatggacgatggcgagttacgcgagcaggacagtctttatggccttgatgccaatcaggttctgtcgagtgtcatggacaccggcattcgcaacgaggcagttcagacctgtctggacgagatgcagcactttttgatcaggggcgagcttgatgaggctcgtactctttacggagtgctggccgaccagttacctgcagatcacattgaactggccagggcttcgttactgattcgcaagctggaaatacgtcgtgagaaagattga

SEQ ID NO: 89791 - DNA, 324 bp, Pseudomonas syringae pv. solidagae
gtgagaaagattgaaaagggaaccctcgcggtgctggagaaatggaagcgcgcgaacaagggaaagaaatacgcggacctcgtggggcatgacgatctcaaggatgccattcgtcatacctgtgttatcgagcagcatggtttgtgcgcctattgctgctgcagaatcaccgtcgagaagggcagtgcctgcaatgaacatatcgaagcacagcatcttgcccgcaccgcacgctggacttcaacaatattgttgcgagttgcaccaaggccggacggtgtgacgatgcccatggtcgtcagcctctaccgcttacaccgttga

SEQ ID NO: 89792 - DNA, 1326 bp, Pseudomonas syringae pv. solidagae
atgaatctgaccaagctttgccttaagaactatcgtcgctttgccgagtttgatatcgaattcgatccgcaattgacggtaatttccgcacgcaatgggcagggcaagacgtcggttcttgaagccattgttgctgctctgggtcccttcgttggttcctttgatcagggagtgtccaagcatatcgagcgcactgacgcccgttatgcgcgggtcggcgaaggttttgaaagcgagcagcaatttccagtggtcatcaatgcagaaatgtccaaccctgcaaagcgttggcaacgagcgcttaacggtcccaagagccgaactaccaccaaacaagccgagccgctggcggcatgggggaaagaacttcagtcaatgctgcgcagcgattcggcaacttcactgcctgttgtgcgctattacagttcgaggcgactctgggtcagtcataaaaacgtgtccagcaaagcgatcctgaccgagagtcgcactgccggttacgaagattgcctatccgcgttctctacttatgtgcagttacaggaatggatgaggaaggccaccctggccgtcattcaacaaaaacagcagcccggttacgagcattccaatcttgagcctcgcttgcagggcattagagacgcagtgaacgaggtgatggctgaagaaggctggagcgacttccattacagtctgacgtttgaagagttgtccatgtttcataccgatcactctgcactgccactgagtctgctcagtgatggtgtacgcgccatgattacgctggttgctgatctggcgctgcgttgttctcgcctgaatggccacctcaaagagcaggcctctctgcagacaacgggcattgtattgatcgatgaagtcgatttgcacttgcatccggcctggcagcaacgcgtgattgccagccttcgcaaggcctttccgaatatccagttcattgtaagcacgcatagcccgcaggtgctttcgacggtaaagcgcgaatgcatacgcatggtgtttcaggacgccaatgaaaactggcaagctacctgtcctccacaggaagtcaaaggtgttgaaagcgccgtagccctcaacgacatcatgggtgtaaaccccattccgcctgtgaatgaagcacactgggtagccgactatgcggcaaaaatcgaaaacggtacgcatgacgaccacgacggtctgacattacgacaaaagctgctcgacttttatggagcacagcatcaggtaattctggatgctgacaggctgatccgctttcaggcgttcaagttgcaaaaacactcgaacaccgagggttga

SEQ ID NO: 89793 - DNA, 681 bp, Pseudomonas syringae pv. solidagae
gtgctcaaattggatcgtgcctctgtagacgcccctctctgcctcgccgactacgttcatccaacacaccaatggtcagacttccacgggacctgcaagaaacagctgcgctttgcgctcgtccagctacaaggcatccacggtgtaactaccgaggacgcaggagagtacggcgcgcgatgcgcttactgcgagggggccatttttcgggaaggccatattgagcattttcggcgaaaaaatccgagacactacccggaactgacattcgagtggagtaacctttttcttgcctgtggaggtacgcaacattgcggccatcacaaggatcgacgctcggctcctccctatgaccccgacctcctcatcaaacctgacgaacatgatccagagcattacctgtatttccattcatctggaaaagtactcgcccgcaacaacctgagtcatcacgagaatagctgcgccacagagaccattcgcgtgtttggtctagacaatccggcgcttgagggcgctcgggcaaatgcagtgcgggcttaccgcaagctgcgcgaagaggatctttgcgagatcgcatcgtggtcagacgctgaccgtaccgcatatttccggcaggagatcgaggccactcgctggcatccctacgctacgacgatcaaacatttcttgcagaagtga

SEQ ID NO: 89794 - DNA, 1326 bp, Pseudomonas syringae pv. syringae
atgaatctgaccaagctttgccttaagaactatcgtcgctttgccgagtttgatatcgaattcgatccgcaattgacggtaatttccgcacgcaacgggcagggcaagacgtcggttcttgaagccattgttgccgctctgggccccttcgttggttcatttgatcagggagtgtccaagcatatcgagcgcactgacgcccgttatgcgcgggtaggggaaggttttgaaagcgagcagcaatttccagtgatcatcaatgcagaaatgtccaaccctgcgaagcgttggcaacgagcgcttaacggtcccaagagccgaactaccaccaaacaagccgagccgctagcggcatgggggaaagaacttcagtcaatgctgcgcagcgattcggcgacttcattgcctgttgtgcgctattacagttcgaggcgactctgggtcagtcataaaaatgtgtccagcaaagcgatcctgaccgagagtcgcactgccggttacgaagattgcctgtccgcgttctctacttatgtgcagttacaggagtggatgagaaaggcgaccctggccgtcattcaacaaaaacagcagcccggctacgagcattccaatcttgagcctcgcttgcagggcattagagacgcagtgaacgaggtgatggctgaagaaggctggagcgacttccattacagtctgacgtttgaagagctgtccatgtttcatgccgatcactctgcactgccactgagtctgctgagtgatggtgtgcgcgccatgattacgctggttgctgatctggcgctgcgttgttctcgcctgaatggccacctcaaagagcaggcctctctgcagacaacgggcattgtattgatcgatgaagtcgatttgcacttgcatccggcctggcaacaacgtgtggttgccagccttcgcaaagcgttcccgaaaatccagttcattgtaagcacgcacagcccgcaggtactttcgacggtaaagcgcgaatgcatacgtatggtatttcaggacgcaaatgaaaactggcaagctgcgtgccctccgcaggaagtcaaaggcgttgaaagcgctgttgcgctcaacgacatcatgggtgtgaatcccattccgcctgtagatgaagcactttgggtgtccgaatacaccgcagaaatcgagagcggtacgcatgaggatcgcaacggcctggctctgcgcaaaaaactgctcgatttttatggagcacagcatcaagtgattctggacgctgacaggctgatccgctttcaggcgttcaaattgcaaaaacactcgaacaccgagggctga

SEQ ID NO: 89795 - DNA, 681 bp, Pseudomonas syringae pv. syringae
gtgctcaaactggatcgtgcctctgtagacgcccctccctgcctcgccgactatgatcatccgactcacacatggtcagattttcgcggaacctgcaagaaacagctgcgcgttgcgctggtgcagctacaaggcatcccgggtattaccacagaagaagccaccgagtatggcgtccgatgcgcatattgcgagacgcgtattcttcacgaagggcatattgaacattttcgacgcaagaaccgggatcactatcctgaattgacgttcgactggagcaatctgtttctggcatgtggtagcacgacgcattgtggacaccacaaagaccggcggacgacattgccatacgacccgaatgtgcttatcaaacctgatgagcacgaatctgagtattacctttacttccactcctctggcaaagtgcacgcccgcaatcacttgaatgccgaagagaatcaccgtgccacggagaccattcgcgtgttcggcctgcatgaaccggcgcttgagggcgccagggccaacgccgtgcgcagctaccgcaagatgcacgatgcagatctgtgcgagatagcttcgtggtcggacgctgaccgtggcgagtatttccggcaagagattgaagccacccgctggcttccttacgctacgacgatccgacacttcttacagaagtga

SEQ ID NO: 89796 - DNA, 1266 bp, Pseudomonas amygdali pv. tabaci; identical to SEQ ID NO: 86100

SEQ ID NO: 89797 - DNA, 684 bp, Pseudomonas amygdali pv. tabaci; identical to SEQ ID NO: 86101

SEQ ID NO: 89798 - DNA, 1392 bp, Pseudomonas amygdali pv. tabaci
gtgtgttctggatcaatcccctcagagaccttcatggaaatcaaaagcttcaggctcgttaatgtggggcgtttcagcgatcttgaagtcgctctggcgcctaccgaaagatatgcgtcgaaggtgaccgtgctggtcggcaataatggagcggggaagactacgctgctcaagtctgtcgctacatcgttgagctggttggtggcgagagtcaggacgccgaaaggtgctggcagtcgtatcgatgagggtatggttcagaacggcaccgctacctcctcgattaccattcggatagaggatgtgttgatttcggatgacgagatcaatccacttgaatctgaatgggcaattaccgctactcggaaaggccgaaacgccacctcatccacagtattaagcgagctcaacagacttgctgatggctatcgctcaaagttgactgaaaaaagtgatacgtctcttcctcttctggctttctaccccgtcgagcgctctgtcatcgagataccgctcaaagtccacgccagacatacctttgatcaactcgacggctacgacaacgccttggggcgtggcgtggattttcgccgctttttcgagtggtttcgggagcgcgaagacagcgagaatgaaacgggtatctcgacagagttgctgaatgagctgtctcaaaagatcttgattgatacagaactctggaaagtgctgaccagggagcatgcctcttcacgtgaccgccagctgactgcggtcagaactgcggttgaggcgttcatgccaggtttcacaaaactgcgtgtcaagcgtaagccgcgcttgcacatggctattgataaagaaggcaagacgctaaacgtatcccagctgtcccaaggcgaaaaatcgatgatggcgctcgtcggcgacatcgccagacgcctcgccatgatgaacccggcgctggaaaacccattacacggcaatggcatcgtcctgatcgacgaagttgatctgcacctgcaccccaaatggcaacgcagtctcatcgcacaactcactacaacgttccccaattgccagttcctcctgaccacgcattcgccgttggtcatcagcgacagcaaggatgtgctggtgtacgtcatggacaatggcgagttacatgagcaggacagtctttatggccttgatgccaatcaggtgctgtcgagtgtcatggacactgatattcgaaatgaggagattcaaacagttctggataaactgcagcactttttgatgagaggagagctcgatgaggctcggacgctctacgcagggttgactgacgaactacctgcaaatcacatcgaactagcgaaagcttcgctgctgattcgtaagctggaagtgcgccgtgagaaagattga

SEQ ID NO: 89799 - DNA, 651 bp, Pseudomonas amygdali pv. tabaci; identical to SEQ ID NO: 86163

SEQ ID NO: 89800 - DNA, 1332 bp, Pseudomonas syringae pv. tomato
atggcgcatcgggtgagccaaggtacactggcgcatccgcccgctctggtaaaggaaaccgacatgcgcctcgaccacctccgcctgcagaattttcgttgttacgaagatgctcattttgacttccagccgggtttcaatctggtggtgggggttaatgggagtgggaagacgtcgctgctgttgggggtggcggaatgcctgattccttatggcaatgcaatggggcaaggccaggaaattctgagcaaggaagacgttcgtttcgttatagacaggcatgaaggacgcagtcgatttgagagaaagtttcccgtattcataagagcggatggcgatatttttgatctgccaaattggcgggcagtccgtctgctcgagccctgggaaggaggagtagatccctcatcactctctcacttgagtgctgtgctcgccaggaacaacgcaggtgagcagattgactttccggttcttgccttctatcgcgccaatcgtcgttggagcagtgcgcgcatatctgccgagttcgcagcacagcagcggacttcccgttttgacggatatgcaaactggtttgacgccgtagccgatctgcgtgattttgaaagctggttaatcgcaaggacgcttgagcgccttcaggaccgtcttgattcaactccgactgtcgagcgtgaagatgaacttgaatgggtgaatcgagcgatcagacttgccataccggatgcccatgatctccgatatgacttgaggctacaaagcctgctcgtagatatgggggaaggcaacgccgttccgtttcacgaactcagtgatggtcaacgtagtttgattgcgttgattgcagatattgcacgacgcatgtgcgttctaaacccacacataggaaaagacgttctggcgaataccggtggcatcgtgattattgatgagctcgatattcatctgcacccggcctggcaacgcaacattgcgccgacgcttaaaaaagcattccccaaagtgcaattcatcgccacaagccactcgcctcaagtgattggcagcctgcaaccgggcgaggtcatcctgctgaagaatggcgacagctctcacccgcgagcaacctatggcctggactccagcaccattttggaagaagtcatgggcgtaccgcagcgcgaacccgaaattgaagtgttgcttgatgagctgttcagcacgctggaaaacaatgaacttgaaaaagccaggctgcagcttgacgcgctaaagaaaaaagcccccgatctacccgagttcgcaggtgccgaagcactgctcaagcgcaaggagcttattggacgatga

SEQ ID NO: 89801 - DNA, 645 bp, Pseudomonas syringae pv. tomato; identical to SEQ ID NO: 85895

SEQ ID NO: 89802 - DNA, 1329 bp, Pseudomonas amygdali pv. ulmi
atggcggatagagtgagccaaggtacactggcgcatccgccagttctggtaaaggaaaccgacatgcgcctcgaccacctccatctgcagaattttcgttgttacgaagatgctcattttgatttccagccggggttcaatctggtggtgggggttaatggcagtgggaagacgtcgctgttgctgggtgtcgcgggatgcttcgggaatttacttggaagcattggcgtccatcagccatcgatagctgagtccgatgttcggttcgcgttagtaaagttcgaagacaggattcgtttcgaacgcagctatcctcttgtattgactgcccaaggtggcgcgtttgagcgtcaggaatggcacgtatcgctagaacgcagcagtcttcagacaaatttcagcgcgctgaacagtctcgtattttcggaaaatctgattagcatcgatgtaagtacccacggggacttgcctgtattcgccgtctatcaagccaatcgacgctggctgacgatgagtgtaaccgctgagcttgctgcacagagcaaaccatcaagactggatgcgtacacctcttggttcgatgccgcctccaatttgaaaaacttcgagacctggttcatcggcaaaacactggagcgctttcaaaggctatcccgagcaggttcttccagcgttttcaacgacgaactgacctggataaactcagccatccaatgcgcactacccgacgccaagggaatagattacgacatggagctacgtgcgttggtagtcgatatggatgaccgaaaaatcccgttcaacgacctgagcgacggacaacgcggaatggtcgcactcttcgccgatatcgctcgccgtatctgcttgctcaacccgcacatggggaaggatgttctaagcaagacaaacggcatcatcgtcatcgatgaactcgatatccatcttcaccccggctggcaacgcaccattgctccagcactgaaaaaagcatttcccagcatccagttcatcgccgccagccactcgccacaggtcatcggcagcctgcaaccgggcgaggtcatcctgctgaataaccatgacggctctcacccaagagcaacctatggcctggactccagcactattctggaagaagtcatgggcgtaccgcagcgcgagcctgaaattgaagcactgctcgacgagctattcagcacactggaaaacaacgagcgcgaaaaagccagactgcagcttgatgcgttaaaacagaaagcgcccgatctgcccgagttcgcaggtgccgaagcgttgctcaaacgcaaggagctcattggacgatga

SEQ ID NO: 89803 - DNA, 684 bp, Pseudomonas amygdali pv. ulmi
atgagacgcgttatcaagggaactgagcctgcgtcactcaccgaatggaaagccagcgcaaacgaagactggacgcccacctatccaaccttgcagaacccgcaaaaacgcgacttgcataattgcttgctgcaagagcagaacttctcatgctgctattgcggcagggaaatagagcttgatagcagccacatcgaacatttcagaccgcaggatcattatctgccattggcactggaatacagcaatcttcatgcgtcttgcctgcgcgagaccacaccaggaaacccgttgcactgcggtcactataaaggcaactggttcgatgaggacctgcacatttccccgacagaggacgattgcgaacagcgcttccgttatctgctcacagggaaaatccaaagcacgtcccacacagatcttcccgccacgacgatgatcgaaaagctcgcactcgatatcgcgtatctgacaaaaagacgccaagaggcaatcacgcgcgtgtttgatgagcaaatcttagccagcatcagcgacacagagttgacacttttggtacaaggcctctgctctggggatgccaacaaacagctcgcctttagccacgttgtcgcccgctatgcggagcagtttctggcgtctttaaaccctcctcccgaaaaaagctcggtcaagaatacgtga

SEQ ID NO: 89804 - DNA, 1269 bp, Pseudomonas syringae pv. viburni
atgcgcctcgaccacctccacctgcagaattttcgttgttacgaagatgctcatttcgacttccagccgggtttcaatctggtggtgggggttaatgggagtgggaagacgtcgttgttgttgggggtggcgggatgcctgattccttatggcaatgcaatggggcaaggccaggaaattctgagcaaggaagacgttcgtttcgttatagacaggcatgaaggacgcagtcgatttgagagaaagtttcccgtattcataagagcgaatggcgatatttttgatctgccaaattggcgggcagtccgtctgctcgagccctgggaaggaggagtagatccctcatcactctctcacttgagtgctgtgctcgccaggaacaacgcaggtgagcagattgactttccggttcttgccttctatcgcgccaatcgtcgttggagcagtgcgcgcatatctgccgagttcgcagcacagcagcggacttcccgttttgacggatatgcaaactggtttgacgccgtagccgatctgcgtgattttgaaagctggttaatcgcaaggacgcttgagcgccttcaggaccgtcttgattcaactccgactgtcgagcgtgaagatgaacttgaatgggtgaatcgagcgatcagacttgccataccggatgcccatgatctccgatatgacttgaggctacaaagcctgctcgtagatatgggggaaggcaacgccgttccgtttcacgaactcagtgatggtcaacgtagtttgattgcgttgattgcagatattgcacgacgcatgtgcgttctaaacccacacataggaaaagacgttctggcgaataccggtggcatcgtgattattgatgagctcgatattcatctgcaccccgcctggcaacgcaacattgcgccgacgcttaaaaaagcattccccaaagtgcaattcatcgccacaagccactcgcctcaagtgattggcagcctgcaaccgggcgaggtcatcctgctgaataaccatgacggctctcacccgcgagcaacctacggcctggactccagcagcattctggaagaggtcatgggtgtatcgcagcgtgagcccgaaattgaagcgttgctcgacgagctgttcagcacactggaaaacaatgaacttgaaaaagccagactgcagcttgatgcgctaaagaaaaaagcccccgatctacccgagttcgcaggtgccgaagcgttgctcaagcgcaaggagctcattggccgatga

SEQ ID NO: 89805 - DNA, 645 bp, Pseudomonas syringae pv. viburni
atgaaacgcatcatcaaaggaactgagcctgcgtcattcatcgaatggaaagccagcgcaaatgaagactggatgcccacttatccaaccttacagaatccacaaaaacgcgaattacataactgtctgctacaagagcagcagttttcttgctgctattgcggcagggaaatagagctggatagcagccacatcgaacatttcagaccgcaggagcactacctgccactggctcttgagtacagcaatctccatgcgtcctgcctgcgcgagaccaaaccgggaaacccgctgcattgcggacatcacaagagcaactggttcgatgagacgctgcacatctctccactggcagacgattgcgaaccgcgatttcgctacctgctgaatgggaaaattcagagcaaccctccagaagatcttcctgccacgacgatgatcgagaaactcgcactcgatattgcctacctgacaagaaggcgtcaggaagccatcactggcatttttgatgaacagttcatattgagcgcaagtgaagcggagttgacgcatcttgtgcagagtttgcgctcaggagatgccggcaagcaggtcgcctttggccacgtcgttgcacgctatgcggagcagttgcgagcgtcctga

SEQ ID NO: 89806 - DNA, 1359 bp, Pseudomonas syringae pv. viburni
atggaaatcaaaagcttcaggcttatcaatgtgggacgtttcagcgatcttgaagtcgctctggcgccgaccgaaaggcatgcgtcgaaagtgacggtgctggttggcaacaatggggcgggcaagaccacgttgctcaagtctgtcgctacagcattgagctggctggtggcgagggtcaggacgcctaaaggtgttggtagtcggattgatgaggacacgattcaggccggtgcagtaacgtcctcgattcttattgatgcatacgatgatctgattctgcatcctctggtaagtgggcctgagtaccattggggaattacgaccacaaggaaaggacgtaaccccacctcatctaccgtattgaacgagttaaactggttggcggatggctaccgctcaaagttaacctctaaaagcgatgcctctcttccgattctggccttctatccagttgaacgctcggtgcttgatgtacagccaaaaatttacggcaaacggacttttgatcaactggacggctacgacaacgccttgggtcgtggcgtggattttcgccgctttttcgagtggttcagggagcgcgaagacagcgagaatgaaacgggtatctcgacagagctgctgattgaactgtctcaaaaaatcctggttgatacagaactttggaaagtattgaccagagagcacgcctcatcgcgtgaccgtcagctgaccgcggtcagaacggcggttgaagcgttcatgccaggcttcacaaaactgcgcgtcaagcgcaagccgcgcctgcacatggcgatcgataaagatggcaagacgctgaacgtgtcccagctgtcgcaaggcgaaaaatccatgatggcgctcgtcggtgacatcgccagacgcctcgccatgatgaacccggcgcttgaaaacccattgcacggcaatggcatcgttctgatcgacgaagttgatctgcacctgcaccctaaatggcaacgcagcctgatcgcccagctcactacgacgttccccaattgccagtttctcctgaccacgcattcgccgctggtcatcagcgacagcaaggatgtgctggtgtatgtcatggacgatgggcagttgcgtgagcaggatggtcttaatgggctcgatgccaatcaggtgttgttgagcgtcatggacaccgatattcgaactgaggcggttcaaacagctctggatgaactgcagcactttttgatcaggggggagcttgatgaggctcgaactatttatggagtgctggctggcgagttatctgcagatcacatcgaactggccaaggcttcgctactgattcgcaagctggaattacgtcgtgcgaaagattga

SEQ ID NO: 89807 - DNA, 642 bp, Pseudomonas syringae pv. viburni
gtgcgaaagattgagaagggaagtctcgcagtgctggaaaaatggaagcgcgcgaacaagggaaagaaatacgcagacctcgtggggcgtgaagatatcaaggatgccattcgtcaagcctgtgtcactgagcagcatggcttgtgcgccgattgctgctgcagaatcacgctcaaaaaaaccagtgctcacaacgagcacgttgaagctcagcgcctggcaccccggcgcacactcgactttcagaatatcgttgccagctgcaaccagccgggtcaatgtggcaaagcgcatggtcaccagttattgcgtttgacgccacttatggccgagtgtgaggcggaattgcagttcgagttgtccgggctggttggaggcaagactgaacgagcccaggactgtataaaagtgctcaatctgggcggcgaccaagcagctaaccggggcttgatcggcgagcgcaaggcaatgatcaacactctgttgtgtccgcatggcatggacgcgtcagggatgagtctcgagggcgatgacctgctcgaacttttacatgacgagctgctgctcgttgatgaatctcaacaactccaagccttttcccccgttctggtcaatgtgattcgtcggctcaaggcttggtag

SEQ ID NO: 89808 - DNA, 1269 bp, Pseudomonas syringae pv. theae; identical to SEQ ID NO: 87160

SEQ ID NO: 89809 - DNA, 645 bp, Pseudomonas syringae pv. theae; identical to SEQ ID NO: 87161

SEQ ID NO: 89810 - DNA, 1359 bp, Pseudomonas amygdali pv. sesami; identical to SEQ ID NO: 89600

SEQ ID NO: 89811 - DNA, 651 bp, Pseudomonas amygdali pv. sesami
gtgagaaagattgaaaagggaagtctcgcggtgctggaaaaatggaagcgcgcgaacaagggaaagaaatacgccgacctggtggggcgtgaagatatcaaggatgccatccgccacgcctgtgtcactgagcagcatggcttgtgcgcctattgctgctgcaggatcaccgcagagaaaggcagtgcctgcaatgaacatgttgaagcgcagcatctagcaccgcatcgcactctggatttcggcaacattgtcgcgagctgcaccaaagcggggcggtgtgacgccgctcatggccatcagactctgccgcttacaccgctgatgatcgaatgtgaaaaagagctgcagtttgagctttccggtcttgtggcaggcaccacgccccgggcgtgcgcaagtatcaacgtgctcaatttaggcgatacccgagagtcaaatcgtgatcttgtagtgaagcgtaaagagatgattgatacgctgttgttttcttacagcatcgaccctgctgaactggctgtggaagccgatgatgttctcgacctgctaaggaacgacctgctggagttagatgctcagcagttgcttcaggctttttctccggttttggtgaatgtgattcttggcattcaaaacgctcgccagccctga

SEQ ID NO: 89812 - DNA, 1266 bp, Pseudomonas savastanoi pv. savastanoi; identical to SEQ ID NO: 89754

SEQ ID NO: 89813 - DNA, 684 bp, Pseudomonas savastanoi pv. savastanoi; identical to SEQ ID NO: 86199

SEQ ID NO: 89814 - DNA, 2313 bp, Pseudomonas syringae pv. tagetis
atggaatacgacgaaggccgagaacttaccagactgattgccgaggagatgatcgctgtagccagtggcttcccaagcattcctttagaaatgattaccctcctcgccggcttccatttgatcaatgggctcacgctagaaggcaggtaccgccgggtatttgacgaagcgtattcggaggtcgctgatcaatgcttgaaagattacgacgataccgatataagcgctgtcttcaacgccaagttggaagaacttcatgacgaactcgccttgccgctggatcgagagatcagggtaaaaacggctacatacctgattgatcgttacatcatggacaattaccaaataccttatgaccacccagcagtcgtaggtgcattggtcggaagtatccacctgagcttgcgttcgccagtgatcgagttcgcaccgatcacaggagagctgtcgatggctatggacaagactcagaccgccgtcacgatgctgtatccgtcctccagagcgttaaaagccttgattacgctcaagctcattatcaacaaagtctttactacctttgtgcatgggcagattccggacgtactcgctggttcgcagcccagttatttgtttgattcggtgtcgcatatcagttttgtgacagccaccggcatgaccagcatgtcatcatttgcgagcaaatattctcaacctgctcgattcatggtcattattccctcggccagagctcagcttggcagcctgcttaaagagttgtcacccgccctgcaggaaggcttacggttggatactgccatctgttttagcatcagtgaaggccggggcgccaagagcgatcagatcctgctcgtattcagtcaggggattcacctgatgcataagccttatctctatattgacgtgtcctcggcaaacaaatcgcttgagcagctggatctccaagagcgagcgattcttgccggccaaatcttcaatattcatgagtcacgtgaggggcatgatcatcggaagaaccttccaccgaaggtctcaaccatcattaatgcgcaatttggggatggataccgaaacgttaagacgttgtgtatcgaggatgaagccctaccttggaaacctctgaaaatatactcacccaggaatttcatacgcgccaatagcactgaaggcaccacgtttaatgctactgcaaaccctcaatccattctgaaattgctgaacgatgcttttgagcctgtgtgtatttatatcattggtaataatggtgcaggcaaaacgcggctgctgtgtgatctcatagagcgagtacgtggtatggatcgcagggcggtcggaatttctacaggtgtccatgatcggttcccgttcgggcgttcaggtcaagtcggtcacttcgaataccaaggtgctcgcagcacggctgagacgatttcaccttccaaactgaggaaaaccgttaccgcccgtgcagcgcaagtcctgggtgaccagcgtatgctcgaagccctcaaggaatgccagcagtgcttggggtttgccacgcgattctacttcatgctcaagcctgaaatggcgcttcacaatgaccctcgggatatacggctgatcagaatgtcggacaacgccgctgacaaccacgtgccagagcccttgtcccactatgagtttggcgttgtacgccctggcaatgaggaacacagagagcgcatcgtctcatattcctccttgagttctggtgagcagaacatcaaccagatgctgctcagtatcatcacgacggctgaacgcaataccgttttccttgtggacgagccggagatcagcctgcacctgaagtggcagcaaacgttacctcgggtcttccatcttctttctcagcggtttggctgttcattcgtcgtggccacgcatgctcccacgctgatcagcaatgctaacgacttgggcagccacagcttcatgttggatctgggcaagctcccggaactgagtgcgaaacagcgctattccgtcgagtcgattattttgggtggctttggcacttacaccccccataatcgtgcagttcatgaggcctgtgcacgcatcgtggcgaagaccatggaagcgcaaggtaaccgtcaagctgaagcattctcccctttggaggaacttgacgacatgcttgaaaaaatgagggtcagccaaggtgcgtataccccgccaggcctgcaagaggacatcgacctcatcaacaaagcctctacggctgtccaactgctactcaaagaccaaggcttggtagatagcgccagcagcaaggcaggcaagtaa

SEQ ID NO: 89815 - DNA, 882 bp, Pseudomonas syringae pv. tagetis
atgactgaatatttcgtcctggacgaggcagaccttttgcctcggtatgaggagtacaaatcgctctgccacactgaagagcggtttcataaggtcatcatgttcaacctcctgcgctaccacgccacaacacttcgccgcttcgcgaaaaggctcggcggcgagacagtcgaagctcgcaacctgtggaatgagttctcaaaccctgcaaagaaaaaaagtgatgcacagaacgttgctaccccagcgaaggccgctgcggctggaaaacctgccgtgaagcctaagcgcaaacggggcaaagctaaaccgttgatcagcgatatcaagggcgcgttcagaagctatatcgagaagcagcagcataatcgctgctgctattgccgccgctggctgtgcaacagcggatattccaaacccatcgagcacattctgcctcgcaagacgtatgagcagtattcattccacttctggaatctgtccgtcgcctgcgtcgattgtaacgggctcaagaacgagacggactgggcaagcccggacaagcatggcgcaaaagattatcctttacccagcgcgttcactgagatgttccacccacggtttcaccgcttcgacgaacatgtacgctttatacgtgtgcagactaacgaccacaccatcacgctttacaggggtattacccctcaggggaagaagctgtgcgatgacttgctcaccaccatcgccggcaaggaagtgctcgtcaatgctaacgcggcgcttaaaagctccatggagacgatcgaacgattcgatgtgaaagaaggcagtgatctggaatcagcgcttaaaagtctcgtgggtgcgctgtctgagcgatcgatcgacctgctgaaacactga

SEQ ID NO: 89816 - DNA, 2214 bp, Pseudomonas syringae pv. aptata
ttgcgcgttttgattaagctaaaaaaactgtcgaatcctaagcccgttgaaatctctacaaaaaacaccctgtatgtccgggagatggctaagcttagggcctacttcaagcttaacccaaccgaacgggcacgcacccggccgccgttcgacaaggatgtacttgacgcgcagtctgtcctccaggaactcaagcggatccagcacagcaagtgtgcctattgtgaaactattctcgaacacaacccgagtcggttcgtgtcccactatcgaccgttgagcaacgcgtttgatcctcatcaggacgcagagcatctagagtgttatgcatggttcgcctacgaatggcggaacctgatgcttatctgcaaggactgcgataaccataaactcaattttttcccgatagcaggcagaaccgctattgcactttcgtcctggagagcggcccagctccgggaaatgccgctcctgctcaacccattcgaggacaatccttcggatcacctcatgttcgatacggatggtgtcgcttgctctacctctgccgccggaaaagagactatcaacattctcaacctcaatcggccagcgctttgcataaaacgtaaggagcagatcggtgcggggctaaaaatcattctgggcaacagcaacgagcatgcactaagagaggcgctacgagaatacaccgatcatgaggtactccacggtggggccgttaggaactgcctggggcatgtctgccggatcctgcaaacccagatccgccatggcagatactctgctcacaccgatctgatcaaaaagatcattcgactcaggaatgagttttcggtccatgattgggaagaggctatttcacggtgcaagagcaatgatctggcgttcgttatccagaacaacgaactgggcgagctacaacctcggcggtatgcctacatcaaccgtattgagatcggccgtttcaagggggtcgaacacttcacgttggatctcgacgcaggaccaactggccagagtcgtagcgaaacgtcctgcacaatgctgttgggagaaaacgccactggaaaaagctcgatcctgcaagctattgcgctggcgctaatgcccagtggagagcgccagcgcctacgtctcgaccaaaagagcattattccctatggcatcgacgacaccttcatgccccctcttcaaccagcagttacattgcgcttcagcaatggtgaggcagtagccatcagcatgaacctgcaaacgggccgcctgaaatccgtcggttccccacataacgtggtcttcggttatggttcccgaagatacttcgtactagggaagtccacgaaagcacagacctgccctaacaggacgctgttcaaccaggcagccaatctgccggacccgactaactggttgctgaatctcaaggaggagaaaaaattcgacgctgtggcacgtgcactggcttctctgctttccctgcgcgccggtgagttcgtgggccgggacgaccattcgatcttcatccagcgccacacttcgcctctgcccattgaacatcttagtgatggctataagtctttgttcgccatggccgttgacatcatgcgagaaatgctcaaacactgggatagcttggagttcgcgcaaggcatcgtgctgatcgatgaaatcgaaaaccacttgcacccacgctggaagatgcgcgtgatgagagcgctgcgcgactcgttcccgcgcgtacagtttattacgtctactcacgatccattgtgcttgcggggaatgctcgaaggcgaggtgcaagtgctatatcgagatcgcgttggacacctgcaacgcgttgagcaattacccaacgtggcaaatttacgtatcgagcagatcctgacgtctgactacttcgggctagccaccaccgaagacccgctgcgtcagcatgcactggaacagctcgccaaatatgccgcgcacggagacagcgacctcacgcaaacggagcggaggcaccgcgacgacctgctggaaaactacggcagcctccccatgatcggcgataccctcgaccgacagatcatcgctcaagcgctgacccgtcacatccgtgatgcggacatcgccactcccttcgagcatgctagcgcaagggaagcatctgtgcgggcaattatagaggtactagaacgcaacaggaaaaagtatggtacccgttaa

SEQ ID NO: 89817 - DNA, 912 bp, Pseudomonas syringae pv. aptata
atggtacccgttaaccgcagcctggtcgaaaaaccggcatccctaaccgcgccgaatggcgcgggccaccgtgagcatttgcgcgcagatatccactaccagaacccgcacactactgcatatggtttctctcattacaaagagcccgatgtggtcatggcgttgaacacgctgtttcacaataaatgcgcctactgcgagggcaaaataactaacactggccccatcgacgttgaacacttccgccccaagggccgagtagcgggcgtgctcaaccatcccggatattggtggctagccactgaatggaccaacttgctcgcctcctgcatcgattgtaaccgcagccgaaaccagacgctgctgggcagcgaagatgaccagcaactgacccagggcgaaagactaagtggtaagcacgatcacttcccagtgtccgggccccgggccacttgcgccaccgacgaccacgcgctggaggccccgttgctaatagacccaaccagcgtggacccccgcgagcatatctactggaaggtcatggtcgaccagccgctggctgtcgccgtctcgcaaaacggccaggcaagcatcgaccttcttggccttaatcgctcgaaactcgcggaagcaagaagagaactgcaacttaagctggacgaagagtttctatgtttgaaggcaaccatcagcaaaattgcagacgaaccaactaacgagggagtcaggggctggatgcccgtgctgcaaatgctcatcgataaattcttcaggcacaccgaagcgaacaatgagtactcggcgttcgcccggcacatcgtcgaatccaggtacgacaaggtatcgaaaatgatggacgcgttgttggctagagttgctgcggacagccctgtggaatcagcagctcgctga

SEQ ID NO: 89818 - DNA, 1938 bp, Pseudomonas syringae pv. aptata
ttggttcaattcaatagtgcggaatttgcagggatcagcatcatgacgccagagttaaaagctcgtcagcaaatcgaccctaagcttgaaaaggccggttgggttatccaagacatgaaagagctcaacctgtccgcaggtgttggcgtagccgtgcgtgaatgcccgacagatacggggccggctgattacatgttgttcgtgaaccgcgttgctgtgggtgtcatcgaggccaaaaaagatagcgctggcgaaaaccttaccgtcaccgaaatccagactgagcgctacgccacctccagtctcaaatggcgtaaagacgatacgccgctgcgctttctgttcgaggctaccggccagattatccgctttaccgacaacgccgacccggtgccgcgctcgcgagaaatattcaacttcttcaagcctgaagcgcttgcgacctggttggctcaaccggaaacactgcgccgccgcctggctgaacaaatgcccgcactgccagaactcaacctgcgcgactgccagatcagcgctgttacaggattggagcaatcgctggcactgaacaagcctcgcgccttggtgcacatggcaaccggagcgggcaaaaccttcactgccatcacctctgtctaccgtcttctcaagttcggcggtgccaagcgcatcctgtttctggtcgatatgtatgaggtgttttccccttacctggaaagctatgacagcaagctgcgaaacggcatagacccaggcctgaaacggcttttctatgccatgccggtgcacagtcagttcgtgttgctggcttttatgattcaacagtccgacgtggtgcgggcttttctcgatgaccatcttgggattgatccggacgacggtattgaatcggtgctgttcgtactgcgacaaccaccttggaagtctaaagcgccggatggcgatccacggttttggaatgcacggggcgtggtgcgcgacttcctatcgcgtttgcacgacatagccctggcacccatcgaaattagtcgacaggtttccacatcaatctggaacaagacaaagttacagttcaagtacctgtacgtgaaagatattgctgcgctgcgccgcttggtgggcaaccaggcacctgcgcagttcttccgtgacctagagagcacctacgtctccgagttgatcgaagaggtgcgcatccgtatacgcctcaagaagaacgacggtagcgtgacgttccgcgaattgagtgaaggtgagcagcagttgctcaccgttttgggcctactacgttttaccgccgaggatgaaagcctgttcctgctggatgagccagacacgcatttgaatccgcgctggagcgtagattacatctcgtacttgaaacaattcattgccaacggaacaaagcaagaagaaaccagccacatcctgctcaccactcacaacccgttagctgttgccgaactggatcgcgaacaggtgcagattttgaggatgagcaagcaggaaggacaacgccagattctggcctgctatccggaggtggcaccgcgcggtatgggttatgcggccatcgtcaccagcgacatgtttggaatcgcctcatcgatggatgcctccacccagcttcagcttgaaaagcaacgggcattaggagcaaaacccgatttgtccgtcaccgaacaaggggcgctggacgagataaatgatgacctcaaccggctcggcttcagattttttcatcccgatgacgagttttcacgttatctgcgcttgcgaaatgaagcgcttaaagcgcgttttggggtaatcgatccactggatttggcggaaaaagccgtcactatgacccgtcaagagcgtgaagacctggctacagacctgattacgaagctcgtggaagatgagaatgaagaattgggcgggcctagccgatga

SEQ ID NO: 89819 - DNA, 804 bp, Pseudomonas syringae pv. aptata; identical to SEQ ID NO: 86093

SEQ ID NO: 89820 - DNA, 1392 bp, Pseudomonas syringae pv. alisalensis
ttgtgttctggatcaatcccctcagggaccttcatggaaatcaaaagcttcaggctcgtcaatgtagggcgtttcagcgatctggaagttgctctggctccgaccgaaaggtatgcgtcgaaagtgacggtgctggttggcaacaatggggcgggcaagactacgttgctcaagtctgtcgctacatcgttgagctggttggtggccagggtcaggacgccgaaaggtgcaggcaatcggattgatgaaggtatggttcagaacggtgccgctacgtcctcgattaccatcagggtggaggatgtgttgatttcggatgacgaggtcaatccacttgaatctgagtgggaaataaccactactcgcaaaggccggaacgccacctcatcgacagtactgagcgagctcaccagactcgcggacggctatcgctcaaagttgacttcaaaaagcgactcgtctcttccgcttctggctttctaccccgttgagcgcgctgtcattgagataccgctcaaagtcctcgccagacacacctttgatcaactggacggctacgacaacgccttgggtcgtggggtggattttcgtcggtttttcgagtggttcagggagcgggaagacagcgaaaatgaaacgggcatctcgacagagctgcttaatgaactgtctaaaaagattttggtggatacagaactctggaaagtactgaccagagaacatgcctcgtcgcgtgaccgtcagctgaccgcggtcagaacggcggttgaagcgttcatgccgggcttcacaaaactgcgcgtcaagcgcaagccgcgcctgcatatggcaatcgataaagacggccagacgctgaacgtgtctcagctgtcccagggcgaaaagtccatgatggcgctggtcggcgatattgccagacgcctcgccatgatgaacccggcccttgaaaatcctctgcatggaaatggcattgtgctgatcgatgaagttgatctgcatttgcatcccaagtggcagcgcagcctgatcgcccaactcaccaccacattcccgaactgccagtttctcctgaccacgcattcgccgctggtcatcagcgacagcaaggatgtgttggtatatgtcatggatgatggcgaattgcgcgagcaagacagcctttacgggcttgatgccaatcaggtgctgttgagtgtcatggacacagatattcgcaatgctgctgtccagaaacgtctggacagacttcaagaattgctgatggctggcgatctggaggaggttcgctcgctatacaaaaagctggctattgacctgccatccgggcacatcgagctggcaaaggcttccttactaatccgcaagctggaattacgccgtgcgaaagattga

SEQ ID NO: 89821 - DNA, 651 bp, Pseudomonas syringae pv. alisalensis; identical to SEQ ID NO: 86079

SEQ ID NO: 89822 - DNA, 1524 bp, Pseudomonas syringae pv. alisalensis
atggaagcggggtggccgccaggcacgaaactcatggctacgctctttgtgtcgcctttttatggtttgcatttagtatgctgtcccaaccgcaatggaaggtgttttccatatgcttggccagatgacgaaaccggagaaaatactgtgaggctcgacacactgcgaatgcagaactatcgctgcttcggtgaattcgagatcgatttcgatccgcatctgaccatacttattgcctctaacggaggcggaaaaaccactattcttgacgccgcccgagtggcgctgtggcctttcgtcaagggttttgatcttggtggccagacaggaaaatccgccactatccagattgaagatgtgcgactgacccaattcggcagtggcaatatggagtcgcaggtacccagcgttatccaggcaaagggtgtctggtgggaaaacgccggtgacagcagttggctgcagcagcgcgtcagcttgaaaaaatccactaataccattggcgatgctggatcgaaagcgctgactttgtatggtaagtcgcttcaggacagcgtgcgaagcgatgcacatgtcactctgccaatggtgacttacctgggcacttccaggctatggttcgagggacgcttcagttcggcagcggctcagacaacactcgataaaagcgagtactccagaacgtccgcatacctcaattgcctgtcttattcatccagcttcaagaccttcactgcatggtacatctggatgtaccgaagctaccgtgaagctcagctgatcgctctggagcgcggcgaagaaatgtccgataccgggcagcgctttgagaaaatcatctcggctgtcaaagaagccatcgacaggttgatcaaggctcctacgggctggcacagactggaatacagtgccagtcatcaacaacaactggtcatgcaccatccggatcaggggattttacctgtcgaaatgcttagcgacgggctgcgtaacaccatcgccatggttgcggacctcgcttttcgtgcctgcaaactcaacccgcacctcggcgagctggcacccttgcaaacgccaggtatcgccttgattgatgaagtggatatgttcctgcatcccttctggcaacagacgatagttggttcattacgtgcggcttttcccgccatgcagtttattgtcaccacgcacagtccgcaggtgttgagcacggtccgacgtgaaaacattcgggtaatcggcaaagatgcccaagggcgtttgattgcgtccccaccccttgccatgacctacggtgagccgagcaacagcgtgctgcgaagtgtgatgcaggtcgatccgcagcctccggtggatgaaaagccaggcctgctacaactcacggaatgggtggacaaaggtcgctacgacgaaccacaagcgatcttgctgatgcagcagataacggaggctctaactgaacaacaccctcagttgcagcgcctgcagcgcagtataaagcggcagaaggcattgaagggatga

SEQ ID NO: 89823 - DNA, 723 bp, Pseudomonas syringae pv. alisalensis
atgaggtcagtacgcaaacggggaagcggaccttatcagttggcccgttcacattgcagcccgcccactaccagtgacacctccacaagccggtggagtagttttggctacaaggctcaggtgctgggctgtcttttggaggaacagtacgggttgtgttgctatagcgaaattcgacctgaccgggttggcctgagtttccatatagagcacgtcgaaaacaagagccaacaccctcagcgtacctttgactacaacaaccttgctgcctgtgcgctggacagtcagagtgatctggatgtgttgaagatacaaggcgctgaggtatttggtgggcacgcgtcaggtaagtcgaaaggggtcgacatggctcgcttcgtctcgtgtcacatgcccgactgctcgcgcttcttcgcctatttgtctgacggccgtgtggtgcctgctgacgggttgtcactggatgacgttgaccgagctggatacaccatcgacctgctaaaccttaacagcccttatctccaagacttgcgacaatcctggtgggatgagttggaagcgctttttgaagagcatgttgatcgagagatgagtctgcattgtctggcggggattgatctcatccctgtgggtgcgagtttaagtcagtttttcagtattacccggaatttcttcgggggtattgctgaggaagtgcttgatcaagaggctggtcgctgctaa

SEQ ID NO: 89824 - DNA, 1356 bp, Pseudomonas syringae pv. alisalensis
gtgcgaacgtcgttcagccagaagagacctatgaacctgaccagactttgccttaagaactatcgccgctttgccgagttcgatatcgaattcgatccgcaattgacgataatttccgcgcgcaatggccaaggtaagacgtcggttctggaagccattgttgcggctctgggtcccttcgtcggctcgttcgatcagggagtgtccaggcatatcgagcgtactgatgctcggtatgcgcgagtaggtgaagggtttgaaagcgagcagcaatttccagtggtcatcagtgcagaaatgtccaaccctgcaatgcgttggcagcgagcgcttaatggtccgaaaagccgcactaccaccaaagaagccgagccactggctgcctggggaaaagaactccagtccatgctgcgtagcgattcggcgatttcgctgcccgttgtgcgctattacagctccaggcgcctctgggtcagtcataaaaacgtgtccagcaaagcagtcctgactgagagccgtactgccggttacgaagattgcctgtccgcgttctctacttatgcgcagttacaggaatggatgagaaaggcaacgctagccgtcattcaacaaaagcagcaggccggttacgagcattccaaccttgaaccacgtttgcagggcatcagaaatgcagtaaatgaggtgatggcagacgaaggctggagtgacttccactacagtctgacgtttgaagagttgtcaatgtctcaccctgatcacgcggccctgccacttggcctgctcagtgacggtgtgcgcgccatgattacgctcgttgctgatctggcgttgcgttgttcccgcctgaatggccatttcaaggaattggcgtcactgcagacaacgggcgtcgtattgatcgatgaagtcgacttgcatttgcatccagcctggcagcaacgtgtaattggcagtcttcgcaaagcgttcccgaagatccagttcattgtaagcacacacagtccgcaggtactttcgacggtaaagcgcgaatgcatacgcatggtgtttcaggacgccaacgaaaactggcaagctgcatacccgccgcaggaagtcaaaggcgttgaaagtgccgtagcgctcaatgacatcatgggtgtaaaccccattccgccagtcgatgaagcatgctgggtcgccgaatacatggcaaagatcgagagcggtacccatgaagatcgcgacggcctggcattgcgcaaaaagctgctcgatttctatggagcgcagcatcaggtgcttctggacgccgacaggctggtccgctttcaggcgttcaaattgcaaaaacactctaacagcaagggctga

SEQ ID NO: 89825 - DNA, 681 bp, Pseudomonas syringae pv. alisalensis
gtgctcaaactggatcgagcgtctgtagatgccccgccctgcctcgccgactacgatcatctgacccacacatggtcagattttcgcggaacctgcaaaaaacagctgcgctttgcgctcgtgcagctacaaggcatcctgggtgttacgacagaagacgcagctgagtacggcgtccggtgcgcttattgtgagggggccatttttcatgacggacatatcgagcattttcgacgaaagaatcctgcgcactacccagaactgacatttgcctggagtaacctttttcttgcatgtggcagtccgcaacattgcggccatcacaaggatcgacgctcggctcctgcctatgaccccgggcttctcatcaaacctgacgaacatgatccagagcattacctgcattttcattcttccgggaaggtactcgcccgtaacaacctgaatgatcacgagaatagctgcgcgacggagaccattcgcgtgtttggtctggaccatccagcgcttgaaggtgcccgtgcgaacgcagtgcgcagctaccgcaacctgcacgatgcggatctatatgagatagcttcatggtcagaagctgaccgtaacgattattttcgtcaggagattgaagctacccgctggcttccctacgctacgacgatcagacacttcttgcagaagtga

SEQ ID NO: 89826 - DNA, 1326 bp, Pseudomonas syringae pv. antirrhini
atgaacctgaccaggctttgccttaagaactaccgtcgctttgcagagttcgatatcgaattcgatccccaattgacggtaatttccgcacgcaatgggcaaggcaagacgtcggttcttgaagccattgttgcggctctaggccccttcgtcggctcgttcgatcagggaatgtccaggcacatcgagcgcactgatgcccgttatgcgcgggtaggcgaaggctttgaaagcgagcagcaatttcccgtgatcatcagcgcagaaatgtccaaccctgcgaaacgttggcaacgagcacttaacggtcccaaaagccgtacaaccaccaaagaagccgagccgctggcggcgtggggaaaagaacttcagttactgctgcgcagcgattcggcaatttcactgccggttgtgcgctattacagttcaaggcgcctttgggtcagtcacaaaaacgtctccagcaaagcgatcctgaccgagagtcgcacggcaggctacgaagattgtctgtccgcgttctctacttatgtgcagttacaggagtggatgaggaaggcgaccctagccgtcattcagcaaaaacagcagcccggttacgagcactccaatcttgcgccacgtttgcagggcatcagaaatgcggtgaacgaggtgatggcggaggaaggctggagcgacttccattacagcctgacgtatgaagagttgtccatgtctcatgccgaccactctgcactgccactgggcctgctcagtgacggcgtgcgcgccatgattacgctggtcgctgatctggcattgcgttgctctcgcttgaatggccacctcaaggaacaggcctcactacagacaacaggcatcgtattgattgatgaagtcgatttgcacttgcatccggcctggcaacaacgtgtggttgccagtcttcgtaaagcgttcccgaacatccagttcattgtcagcacgcacagcccgcaggtactctcgacggtaaaacgtgaatgtatacgcatggtatttcaggacgccgatgaaaactggcaagctgcatgcccgccacaggaggtcaaaggcgttgaaagcgccattgcgctcaacgacatcatgggcgtgaaccccattcctccggtagctgaagcactttgggtagccgaatacaccgcaaaaatcgaaaatggctcccatgaagatcacaacggcctggctctgcgcaaaaagcttctcgatttttatggagcacagcatcaggtgattctggacgctgacaggctgatccgttttcagacgttcaaattgcaaaaacactcgaacaccaagggctga

SEQ ID NO: 89827 - DNA, 681 bp, Pseudomonas syringae pv. antirrhini
gtgctcaaactggatcgcacctctgtggatgctcctccctgcctcgccgactacaatcatccgacccatgagtggtcagactttcgcgggacctgcaagaaacagctgcgctttgcgctcgtacagctacagggtatcgacggtgtcactacagaagacgccgccgggtacggcgtgcgatgtgcttattgcgagggggccatttttcatgaaggccatatcgagcattttcggcgcaagaatccggatcactttccggaactgacatttgcctggagcaacctttttctcgcctgtggcagtacccaacattgcggccaccacaaggatcgacgctcggctcctgcctacgacccagaccttctcatcaaacccgacgaacatgatcctgagcattacctgtatttccattcttctggaaaggtgctcgcccgtaacaacctgagtgatcacgaaaatagctgcgccaccgagaccattcgcgtgtttggtctcgacaatccagcgcttgagggcgctcgggcaaacgcagtgcgcagctaccgcaagatgcacgatgcggatctgtctgagatcgcttcgtggtcagacgctgagcgtgacgcgtatttccggggggagatcgaagccacccgctgcctcccctacgctacgacgatcagacacttcttgcagaagtga

SEQ ID NO: 89828 - DNA, 1326 bp, Pseudomonas syringae pv. berberidis; identical to SEQ ID NO: 89756

SEQ ID NO: 89829 - DNA, 681 bp, Pseudomonas syringae pv. berberidis; identical to SEQ ID NO: 89757

SEQ ID NO: 89830 - DNA, 1131 bp, Pseudoalteromonas sp. P1-13-1a
atgataagaaaggagcacctagcagatttagagcctagccatgtagcagtgattattggcgaaaatggttctggcaagagtacgttgttaagccaattgtcgaggaaatacctcgaacaagggcgtaaagtcatagcaattgccaattctattcacgataagttcaatagccgaagtcgtaactttagcttactggcgtatcgaagtggaagaaagatatcgcagcgtactattaaaaaagcattattaaacttaggcaatgaagacttagttaaaaccaatagaattgggcaaatacttgaatatgtaggttaccaaaatgagattggattcaaggttaatttcttaagagtagtaaagcagtatgaaattgaagaggttgaatttttacctcctaatgagttgcaggatattgtaactttaatcaataagctttatgaaaattctagtaacgaaattcactggattcgattagatgaatttcgctacgacaagatgaatagctctacaataacaaggcttttgaagcatgaaaaactgcttaaaaagcttaattttatctccacagtcgaggttttcttaagaaaaaattgggagccaatcaacctatcagaagcaagctctggtgagttgtcattcatcacttcattggtatttatttcaacaatgataagtgaagactcggtaatcttgattgatgaaccagagaatagtctgcaccctaggtggcaaagagagtatatagcaaagctaatggatatattctatctccatcaaccgacagttgtttgcgcaactcattctccaattgtggtttcaggtgctgaagtaagtgaagaaagtctttccatcttcaaatcgcaaaacaatcaattggaaaagttgcctcaaaattcgaataaccttgaacaattactttgggaaatgtttggcattgctactccagaaaatagatacctttcaaatctaatcactaatactcttaatgagctagcggaaaaccaaattgatttggcacaagcgcaaaggttgttcaaactgctagagaatgaagtttatgatccaaaacaaaaagatgtgttggcttctgtcagaaaacttgctgataaaatagagcaaaggaaggtttag

SEQ ID NO: 89831 - DNA, 624 bp, Pseudoalteromonas sp. P1-13-1a
atgcgaccttatgtattaactatagatgatcaccaaagcatcataaccgcaattcaggaaggtggtaatatttggtcttcaggtcacttaaatgaatttaagaggaacctaaaagacttttacaggaatgaacaaaagcagcagtgctgctattgtaagagagtcaccgttggtgagtttaggatggttttagatatcgaacatatactcccaaaaggaacccctgcttatagaagatatatgttcgagccaaaaaatcttagcattgcttgtaaaagatgtaatatggaaataaaaaaacaagatacttcttttatcagtaataccgcaaattttgctcctgacttttctgactcaaataactaccttttcatccaccctcatactgataattattgggatcatatccattattctatggtagttgaaaatgactatatgttaattcaatatactgtggagagtcccaatggtaaggggcaatacacttatgattactttaaacttaatgatctagaagttgacgcaattaacaatgcacagggtatcgaaagccagcctatatctgaagagatagatgaagacatagcattggaaattcaacagtctttaatggctctctaa

SEQ ID NO: 89832 - DNA, 1113 bp, Vibrio cholerae
atgcaaaatattaatatatatgtaggtgaaaatggtgcaggtaagagtcgtaaacttgcagaaatcgcacaagaagcaatttctgcagggcgagcagtgattgctattgcaacatctttgaatgacaaataccctaaacgacgcgctgataaaccctattactatatgggtcctagattaggtcgttcattagcaaagcaagctatcaagtcatcaatagcaaaattaaatgataaaaatgggcttttacgattaaatactctacttagcattctagagtatacaaatcttaaaccacaaattggattgaaagttaaaggttttgatgagaactttgacgatagcatagatagtatagaatttgaaaatgttagagagaaagaacttgtaacaactctatgttatcagattcgacaattttacgatgagtctcgtgaagaagtacaatggattagcaactacagtcgttttgaatatggcctatctggtgaagttctctcagatttaatcaaacacgaaaagttgctaatacattacaagttattacgttcgacagagttatatatacacaatcaagagctaattcttcctattgagaagatgagttctggacaattatctttaatatctacaacattttttattgctgcacatttagaggataatactatcattttgattgatgagcctgaaaatagtctgcatcctgattggcagcgtcaatatataggaaatcttaaaaatctatttccatatcaagactttgagtgtcatatcgcaactcattcaccaatgcttattgctggtgcggttgatgaaaagtccgttgaagtatttcgtcatgatggtaataagtttaagcaaataatatcagatacaaaaaatattgaagatgcatacttagatcagttcggtattgtaacaccagagaacaatgctttatctgagcgatgcatagatataattaacaatgtggattttggtgttatatctaaaagcgaagcttttaaaaaaattgaagagtacaagagaaaatcctatgacataaaacagcaagagttcttagatggagtttatgtaataattaaagagttagaggtgcatagtggctaa

SEQ ID NO: 89833 - DNA, 606 bp, Vibrio cholerae
gtggctaagctaacttttacagctaatgaaataaagaaaatgcaagctgcatcggctaaaggttataatggctggaatgataaaaaacttgatggaataaaacgtaaaattaaggatcataaaaggatagatacttgcgatttatgttgctattgccaacgtgatattacagcagaatttaacatgtcactggacatcgaacatatcatacctaagagtgcacgtgtaaagcatatgtttacgatgaagaacctaagtgtatcttgtaaaaagtgtaatatgaaaattaagaatgaggatctaagttttctggttgatgatatagtgaatttgcctagtaatatattcaaaagtcgttattacaagttcatacatccaaatctagataatgtgtttagacatttacagagaaactgtattcaacaagggcgtgttcgtctagttaagtaccatttccctactaatagtgataaaggtaagtacacctacgaatatttcaaattgaaagagtttgaaatggaaaaagctaaccaagctcaaggtcggcgaaaaaataaaattaataatcagaagatagaagaagcattcagaaagctcactcagtaa

SEQ ID NO: 89834 - DNA, 1113 bp, Vibrio cholerae; identical to SEQ ID NO: 89832

SEQ ID NO: 89835 - DNA, 606 bp, Vibrio cholerae; identical to SEQ ID NO: 89833

SEQ ID NO: 89836 - DNA, 1113 bp, Vibrio cholerae; identical to SEQ ID NO: 89832

SEQ ID NO: 89837 - DNA, 606 bp, Vibrio cholerae; identical to SEQ ID NO: 89833

SEQ ID NO: 89838 - DNA, 1113 bp, Vibrio cholerae; identical to SEQ ID NO: 89832

SEQ ID NO: 89839 - DNA, 606 bp, Vibrio cholerae; identical to SEQ ID NO: 89833

SEQ ID NO: 89840 - DNA, 1626 bp, Vibrio metoecus
atgcaacttcgatatttagccattccgcagtttcgtaacttgcgcaatctagaagtgagttttgccagcgagcttgagtcggtttctagcacaccaggtaatacgccagcaaaacgcattcgtagccatgcgctgattggccagaatggcaccggaaaatccaatttaattgaagcgctgattaccctgtttcgcgatgtggatctcgaccgcgaagcggcctttgactacacattggaatacgaaattcgcggccacatcgtgcgtattcaggccgatactgccaaacaaaaacgcccctatgtctgggtggatggtaaaagtgaatcccaaggatttcttgtaaaacatgcgagggaatatttaccgtcacatgtttttgcttattactcgggcaagaatgaacgtatagagacgctatttcgaacccaccaagagcgctataagcaattactgcggcaagatgatgatgacttaatgcgcaggctcttttactgtcgtggtggtcatagccaattggtgttgttagcttgtttgttatccgatgatccggtattcaagaagttactaagcaatttgaatatcgaagccatagagtccgcgctgttcgttctgaagaagccatattcagcgcgcgatctggatgagaaagacattgagctaggtgattcacgtttttggtttagacgtggaacagtcgtgaatggatttctcgacaagctgtggcagatcgcctgggcgcccgttcaggaaacgcgactggctgccattgattttcgccgtcgccctgaaaagcaagagctgctttatttgtttgttcctgacaataaaaggctcaaaaaattaggtgaggaagtcgggacgcctgagcgctttttccgctatgcagaagcagcctatatcggtgacttgctggaggaggtgcgcattacggttaaaaaatcgaagggacacggaggcgatgttgagttcaaacagctctccgaaggcgagctgcaaatgctcactgtattgggcttaatgcgcatcacccgcgaagatcattgtttgtttttgttagatgagcccgacacgcatttaaaccccatctggaaactgcgctatttcgacgatattgaaggcgtgttgagctccgaaaaagattcactggtacaaggcgaatcgcaaattctgattaccacccacgacccgatgatggtgggcagtcttaagcgtgagcaggtacatattttgcgcaagcacggtgatcgttcagtcattgaatcacccgatgaacacccgcaaggtatgggggttacaggcttgctgaaaagcgagttgtttggcttgtcatctacattggatattgagaccgaacgccgcttattccgacgtaatgagctttttgtaaaagcggaacgaactccagaagaagatgccgaactttctcgactttcgactgaattggcagatcttggcttttcaaccgctgatttccgtgatccagattacgccttgtttgttcggaaaatggcacagcatcgtaaattccgtaaaccagttttaacaccagaagaacaagctgaacaagaccgcatcgccgatgaaattattagcgaaattttacgagaggaagctagggaatga

SEQ ID NO: 89841 - DNA, 858 bp, Vibrio metoecus
atgatttttatagacttggagaacaaacttccgactgatcacgatattccaaactgggttccgtggactccagaaaaatggaatgcttggcttgctaaatctaatcagcttgttggcaagcttgctacgcttgaagccgcaggcaaacgagacgaacgtaatgctctgattgatgcaaatagtgctcactggggcgaactcaaacaatggctattagccttgtctggcggtaagtgctggttctcagatgttcgggaactatattcccattatgatgtggagcacttcagacctaaaaaggaagctaaagcaatcgacggcagcgagcgcgatggttattggtggcttgctttcgattacatgaattttcgggcctgcggtaatgtgggtaatcggaaaaaaggtggttggtttcctttacagcaaggatccctatgttccacttatgcagctccatgcgaagagtctgaagctcgttatttactcgatccgattgatgatgatgatgtttcattgattgcgtttgatgaggaaggcaaagtggtaccggtgccgagcgcttcagattgggaaaagcagcgagttgaagagactgtcaagaggttgaaacttaatgaacatgtgcctctggcagaagagcgtcgtaaagtttggcagagagtcgacgccttgatcaaggaatttcataaagcaaaatcacgctgttccgctgggaataacccggcagcaaaggcaaagctcatcgaggttcgtgcgcgtatgcgtgaaatgactagccctgccgctgagctgtcgtcagttgcccgttggtgcttgttgcttcgcaatgatcctcagctgtccagattggtggggtga

SEQ ID NO: 89842 - DNA, 1113 bp, Vibrio cholerae; identical to SEQ ID NO: 89832

SEQ ID NO: 89843 - DNA, 606 bp, Vibrio cholerae; identical to SEQ ID NO: 89833

SEQ ID NO: 89844 - DNA, 1113 bp, Vibrio cholerae; identical to SEQ ID NO: 89832

SEQ ID NO: 89845 - DNA, 606 bp, Vibrio cholerae; identical to SEQ ID NO: 89833

SEQ ID NO: 89846 - DNA, 1176 bp, Vibrio cholerae O16 str. 877-163
atgaaagttaaatcaatagaaattaacggtattggtgggatagaaaatatcaatattgaatttaacgatcacatgaattttatttgtggtcctaatggtataggtaaaacaacattactggaatgtgttgctcattcattttccgtaaacagtacaaatatacttaaaagaaatgtatctatggaaagcggtagctttaaatcaactattgatattgaaggaacagatcaacagtcaaatgtggtaattgctgactttgatccaggaaaagaatcatatattaatggattgcaccaacacgctcctaagcttctttccttaaaggtttctagaacatttcaataccagcctttagcagctgtcagcaaggatattgataaaaactccaacacttcttaccaagaagctaaatctggtgtgaatattaatgaagtcaagaattggtttgttaatagatatttatactcagctcatgaaggcgctttaactgaacagcaactaaataaccttgaactagccaagagaagcttctcactccttaatgaaagtttttcttttagcaaagttttagctgcatctaacgagatcatggttaacactcctaatggcgatatttattatgagtatttatcgtcaggttttaaatcttgtctttcgattattttcgggataataaaagatattgaatttaggtttaaaaatccttgtatcaacgcgttagattttgacggcgtaattttaattgatgaattagagttacatttacatcctgaatggcaagcgaaaatcgcaaagattctggttcaagttttccctaaggcacaatttataacagctacgcacagccctcatattttgcagggtgccaatcctaatgaaattattgcgttagcgagtgaaaacggtaaagtttaccgtagaaatttagatgggggaaaatatggataccaaggttggactgtagaagaaattttggtggatgttatgggtatgtcagatacaagaactgatacttactaccaagaattaaataaatttgaaactgcgataaataaagacgactttttatcagcggaagcggcttttattgaattggataatttgctgcatccgaacaatcatatgagaaagcttttaaaattagagttggcatcagtgaaaggttgtgctgaatga

SEQ ID NO: 89847 - DNA, 744 bp, Vibrio cholerae O16 str. 877-163
atgataaaattaactagagtaggtaaacctgcctttttatctgatgaaaaagtgttggagctaacaaacaagtttaaatctacaaaattatccgtttggaataatgatcatataaaggaaccgttgctaaaatcaagtaacggaaaatgtgcatattgtgagtgcccattaacatctgaaagcaactatatggaagttgagcactttgaagataaaatgcataacgaggataaagtcgtcttttgggaaaacttattgccgtcctgcaaaaaatgtaatgggtctaaaggtactcacaatgtgactcaagaaccaattataaatccatatgtagatgagcctaaagatcatttagctttgcgtttatatagattcagaggaaagactgctaaaggcactacaacaattgaagtagtaaacttgaaccattcttcaaggctagtattaagccgctttgaaattggagaaaaaattgatcagttagttgatactgcatgggagcgctatagtaacttcattgaaaaaagagatactcgtagtagaaataagttaataaatattgtcgaaggcttacttgaagagtgccaacctgaatcagattattctgcatctacggctacaaacttactttcggattctaagtttacagagctagtttcactaatgagagccgaagaagcatggactgaagagcttgaagctttaataaataacgctttgggattagtactagattgcgcttaa

SEQ ID NO: 89848 - DNA, 1149 bp, Acidovorax sp. SD340
atgtccactacctggggtgacctccaatgggactactggcgtccctctggcggtggcaaaggcaagaagcctgccgagacatggggcgagacggcgctcaaagagcatctgcacgccatcacggccagctacaagacggacgcaccggcactcacacccgtctttgcctactatggtgcgagccgaggtcatatcgaggttcctgaacgcctgcgttccgcgaagcacaattacgagcaccccacggccgcactggtggattgcttcaacccacggagcgatttccgggagatgcttgcgtggtttgatcaggaagaatccgccgagcttcggaaaaacaagggtgtcaccagtgaggactacacccccttggagtcgttggaagcgttgcgggccactgttgtttccctgctaggggaagcctaccggaacccacatttcaacgcacggcataagttcatgttggagcgttccagcgatggtgccgagctgctggtgaaccaactcagccagggctaccaaagcatgctggcactggcgatggactttgcgcgacggcttgccattgccaacccccatcttgaatatggcaatcagtttgcaagccagcaattgctcatgcaggtggtttccgtattggaggggcaagaccctggcatcttcgagcccttccagcatgctttggccatgagtgctcccgccatcatgctggtggacgaaatcgacctgcaccttcaccctacctggcaacagcgcgtgttgggcgatttgatgcgtacctttccgttgacgcagttcatcgtcaccacgcacagcccacaggtgctgaccaccgtaccgcgtgaaaacatccgcgttcttgatcaggacgaaaacgggctcatgcgcgtgcgcacaccggatttcagtccgctggcccatgaatcgggtgacgccttggccaaaatcatgggcacccatcgggagccacccttgccgttgcaagaggaaattcggcgctacgagcaattggtgcgtgttggccaagagcagaccgaagagggccaaaccctccgagcggcgttggacgcagcgggctaccaattccatgaaagcgacctcaccacctggcgctttctagctgcacgaaaagcaggcggagcgaattga

SEQ ID NO: 89849 - DNA, 591 bp, Acidovorax sp. SD340
atggtggagctgcaacaccgcgcaattcccacgcctgcgcttactgcttttgtcgccgcccacccaggcgctgctgtcgccgacttcgacagtgaggcattcgccccagtcaagcgcgcagtcaaagccgatctgaatcaggatcaggatggcctgtgtgtttattgcgaaagcccgttggaaccaacaggcgggcaggttgaacacatcaagcccaaagcggggggcaatggccacccgcacctgtgtttcgcttacaccaactacgcccacagttgcatcaacccaaagacctgcggccaaagaaagggcaatggtctgctccccatcgagcctggccctggctgtaatacccagtggaccctgtccactgacggcactatcgagcccattgtcggcctgacccgaaagcaactgcatcccgttcgtcaaacgcgggatatgctgggcctgaacgccgactccaatctcgtcgatgaacgccaacgctggcttcgcaatgccctggttgtgttgcagcaggcgcccggcgacatccatacctttttgcaatccgcaccgtaccgccacatgctggccacagtggtgtaa

SEQ ID NO: 89850 - DNA, 1602 bp, Pedobacter sp. PACM 27299
atgaaagtaaaaaagctttggatatccaagtataaaaatgttgaagatatcagattgagctttaatacggagctaaccagcttgttagtgggtaaaaatggattaggtaagtctaatcttattgaagctttaactatcattttttcaaatttagatctaattgaaaatgtagatgaaattaagttgttctcatccaggtattttgattttgacgtcgaatacacatgctatgacaatttgatgagaataaggataaatgatggccatttatcaataggattaaaaaataaatgtatgaaggatgccgatccttttgaacggatcgagtttaatgattttaagaaaaataggaataataagtatttacctaaatatataattgggtattattctggagagaataagcggcttaaggacattaattcgcagcatgaaaatatacagaagaatgcattaagaaattggcatagaggtaaagaaaaggaacaagtcgatgatctaaggaaattgttttttaccgaaaaccaccatggacaattgttgcttttaacattggcgatatatagatatcatgaggatttttctgtgcatatagggaagttatttaatgaatatctagaaattgatcatttaattgacttcgaaatagtctttaataatccagattggaagtataataatattgatgggattgataaaagtgctgaatatttactcgcaaatattggggctaagaagcctgtccactatcctttttggaatctaaaaggtaaaattgatttactcttaacaacattctataattatcaaatagatcatgggtctgagccactaatttacccgagtgaaggtgtctcaaaaaaatatattaaagaatatattgaattttctagaatagaattagaaccatttagcaatattgtttttgagaattttaagcatccaattgatttctttaatgcgctagaatctactgaggttgttggaatttttaatagaataggagttaatgtaaagaaagtaaacttagattttgcaataggatttgaacagttaagtgaaggtgagcagcaattaataacagttttgggcttattacttataacaggaaaagatgattgtctgtttttgctagatgaacctgatactcacttaaatcctaattggcagagaaattatatccgtctattggaagaatttaatttaaacgacgataactctcatgtttttgtggctacacatagtccattgcttgttcaagccgtagagggtaaatatgatattttactctaccacttgaatgaaaatggcaaaattcaaattgataatgaccccaatattattaaaaattggagaattgatcaagttttagcaagtaagtattttgacttggtaagtactagaccccttgtgttagatgatttaatgaaaaaacgactggatatgataagaagcggcataataagtgaagaagataagtttctcttgaataaatataaaaatgaaattggttacctgcctacaggagaaactattgaagaactagagtcaatgatttatattaaaaaaatggctgacacccttaagaatgataaaaattag

SEQ ID NO: 89851 - DNA, 789 bp, Pedobacter sp. PACM 27299
atgataaaaattagtaaagctggttttgaaattccaaaagttctagtagaggatggtttacttttgagagatgaatatgtattaatgtataccaattctccagggggatttcatcttgatgatgataaaattagaacaaagttttctttttgctctaaaatatatggccatgaagatgtaaaggatttgttaaagcatgttcaaaatgataagtgctgcttttgtgaggcaaaaatctcacacattgcttatggtgatgttgaacattttcgaccaaaggctgcatataagaacggtgaaaactctgattatgtgtatcctgggtattattggctttgctatgactggggaaatctttatttttcatgtcaaatttgtaatcagagatttaaggggaattattttcctatctcagattctggtattagagcatgttcaattgttcgtgatatttcctttgaagacccattatttttagatccaggtggtacagatgatccagaacatcatatttattttgatggtgcaattccgggatcaaatacagtaaaagggaaaacaacaattaaatatcttgggttggatcgagaagagctcaacgaagatagattaacatcattggaaagattacgatgcttagagcgtattgtgtggcttactgcagattctatgaatgctgtagtagcaagaagagcatttttagaccaattggaaacttgtgtttctaattggtcagaatacagcagtatgtttaagagtaatttctcaaagtacttaaaggaaatttaa

SEQ ID NO: 89852 - DNA, 1182 bp, Escherichia coli; identical to SEQ ID NO: 89470

SEQ ID NO: 89853 - DNA, 747 bp, Escherichia coli; identical to SEQ ID NO: 89471

SEQ ID NO: 89854 - DNA, 1257 bp, Lachnospiraceae bacterium TF01-11
atgcgactaaaacagattaaattaacaaattttagagctattgatgatgcaattattgaatttgacggtaaaagtacggttatttttggaattaacggaacagggaaatcaagtattcttcgttctgttaatttattgtttgcaaatattataaatcaggttgtaaacagaaaagaattaaaacaaaactatgctattcaattagaagatattatgtatggaaaaagtggaacaagcatacacgcaacgattgaatttgaaggtacggagtttgaatattcaaaaaatatggtgcgaagtagcggaagaaaaacacataacaaaaaagcattaaatgaaattgttgagatattccatgaaaagtatattagtgatgaaaaacagaatgatattcctatttttgcaaattatggtacaaaccggcttgtgttggatataccattgcgcatcagaacacaccatacttttgatatatattctgcatttgaaaaagcgattgagaataaaatagattttagaactttttttgagtggtatagaaatcaggaagattatgaaaatgagcaaaaagtcgagacaggggatttagaacggaaagataaagccttgcaggcggtaagaaaagctattttgtcaatgttagacggctgctccaatcttcgtgttgtaagaaaacctcgtttggaaatgaaaataaacaaggcaaatatcagcttgaatgtttctcaaatgtctgatggggaaaaatgcacattagctttgtttggtgatttagccagaaggcttaccttagcaaatccaaataaagaaaatccattgcttggagaaggaatcgttctgattgatgaagttgaactgcatatgcacccgtcatggcagagaaaagtgttatctgtattaagagatacatttccaaatatccaatttattattaccacacattcacctatcgtattgagtgaagctgatgagaattataatttgttttttattgataatagtgatggtaagatcaatattcaaaaaaataaacagttaaatgggtatgatgcaaatgctgttttggaacagtttatggatacaagttctattaatgaaaaaataaaaagttttatagactcgatatatgatgatataaacagtagattatttgagcaggcagaagtgaaaataaatgcacttgctgaaattacaagtgagaaccatccggatgttattacggcaaggatggaattaaagaggagaagatatatatga

SEQ ID NO: 89855 - DNA, 570 bp, Lachnospiraceae bacterium TF01-11
atgatatatattgaaaagtctgaagaaccagagtttttgagtgagtttaaacgaaaaaatcccgataagacttatgattcggaagaatttgcacattacagaggaattcttacagatgtacttataaaagagcaaaaaggaatctgtgcatattgttgtggcagaataaaaaaggaaaatgttcataatgagcatatagaaccaagaaatccggggaaatatgtgagtaaacgctcattagattattcaaatcttgtggcaagttgtaatacaataagaacctgcggaagaaaaaaggaaaacaaatatgattcggataaatttgtgtctccattagaacaggagtgtgagaaaaagtttatatattatggaaatggaacaatagtaggggatgaatacacaataaaccttttaaatttaaatgactatgaattgcgtgaagcacgcagggcggtatatcagcagttgcagcatcttgacaaagaaacgataaaactggtgtatatgaatgaacaggacgaggagtaccagccttattataatgtgattaagtggtatgtgaatgggtga

SEQ ID NO: 89856 - DNA, 1266 bp, Lachnospiraceae bacterium TF01-11
atgaacttatctaatgttaaaataaaaaattttcgtaatattgaagaactggacattaaatttaaacccggatttaacttgattaaggggaaaaatggaaaaggaaaaacatctgttttagaggcgatagctgtcggtcttggaggttttataggtggaatagcagatgtttccacaaggcatttcaatattgatgaggtaagaactgaatatttaaagataggtgacggttcttacagcaaaaaatatcatgtacctacggaagttacgatagaagcacagttatacggtgaaaaatatcagtggacgagaggaaagagcagtattaaggcatcgagaagtacaacacagccaagagacatatgccgtaaagcggaagaaatggctgaggatgataatgtagaacttcctattcttgcgtatataggggcgggcagagtatggaatcagatgagacagaaatgggagaatccatttagaaaacattatttcagaacagtgggatatacagatgcacttattgaggcatctaatgaaaaattgttgatgagctggtgtgtcaagatggagcaaatatcatggcaaaaagagaaaaaaatagcagagtacgaagctgttaaagccgcagtagctaaatttatggattttatggaggaaaaagaggggcatattgtattttatgataaacaggaagaacagatgatgtataagtcggatgaactgatacagccgatagaacatctcagtgcaggttatcagtctttaatttggacagtatttgatattgcatatagaatggcagtactaaatccatcaaagcttgacaagattgcagaaacagcaggcgttgttctgattgatgaaattgatatgcatttacatcccagatggcaatggaatgttgttggggcattgatcagcacatttccaaatgttcaatttattgcggcaactcatgcaccaatattatttgcatcacacaaaaatatatggattatagatgtggatgaggaggaagtaaggtattcagagtcgcattatggtatggatgttaatacttctatgcagtattatcagaatacaagggaaatcccggaaaaagtaagacaaaaagttgaattatttaatgaaaaaatggatgatgaaaaatatgaagaagctgaagttattttaaaacaacttgaaatagaaacagctccggctcatccgttgttagtagaactgcgtacaagatttgaatttgaaagtacagattgggagaagtaa

SEQ ID NO: 89857 - DNA, 651 bp, Lachnospiraceae bacterium TF01-11
atgatatatataaagaaagggaaagaacctgcatccttaactaaatataaaaaacaaaaatttgcttattatgatgggtataaagaaaaagatgatttacgaaaaatgcttttaaaagagcaggggtatctgtgtgcttattgtatgaggagaattgatatagagcacatgaaaatagaacattggtttcctgaaaatgagctgagtgatatagaaagattagactatagaaatatgcttggatcatgtgaagggcatattgatggaacaaacggaaaaaaagatgatacatgtgattcgcataaatcaggggataaaataacagtaaatccattggatagaagtacattgtgttctataaagtataattctgatggagaaatttattcagataatgagattattgagaaagacattgatgttgtattgaatctgaattctgaaaagcacctgcttaagctaaatagaaaaagtatgctaaagcaggttagagaagaattgtgtaaaatgcaaaaaagaggaatatggggcagaagtgtgttggaaaaagtaaaaaacaaatacataaatgcagatgaaaacggttataaaaaagaatatgcgggtgttgcaatatggtatatagataaaaaattaaatagtactacataa

SEQ ID NO: 89858 - DNA, 1284 bp, Acinetobacter baumannii; identical to SEQ ID NO: 86768

SEQ ID NO: 89859 - DNA, 669 bp, Acinetobacter baumannii; identical to SEQ ID NO: 86769

SEQ ID NO: 89860 - DNA, 1545 bp, Acinetobacter baumannii; identical to SEQ ID NO: 87768

SEQ ID NO: 89861 - DNA, 642 bp, Acinetobacter baumannii; identical to SEQ ID NO: 87761

SEQ ID NO: 89862 - DNA, 1366 bp, Acinetobacter baumannii
tatggaaattagtaattataaaattattacaaatttaaaaataaattttgataaagagttaactattattattgggaacaatggagttggaaaaaccagtattttaaatgctatcagaaaacacatcatgtggatagcagccagcattcgtaaagataatgcatctggtggaacaatatcgccagacgaaatcaataataaatcaagtgataataataatggggcatatattgattgtgcttttaatataggaagtaaaaatactgttagaggtagaattgcccgagtaaaagatacttcaacaattccattaaaaagtgaattaactaattatagagagatagggcaaaaaattagagatttaaatgaatatagagatactaatttccctctcttcgcattttatggtattgatagattatcatcaaaaaaaaatctaagttcagatttagtatttaataaagttgatgggtatgaagaatcattaaataaggttagtaactttaatattttcttagaatggttaattcagattttaaaaatgtcagaaggtattctttctgagcagcaggaatacctattacatgatcttaaggcattagagctaggaggagctaacaatagttctagtcctttacaccctatgtatctcaaattaaaaaaatcttttgaagatcaaacttcacagcaatttaaccataacacaaataaattattagaaattataaactcagtatatcgtcaaatttatcaagattttattcgattagagttagtaaataatgatgatggaaaagataaagttagaatggttctaaaagatgatagtttatttttacatcaattatcagatggtcaaagagtatttcttggaatgataggagatatagctcgtagattaatattgttaaatgatagctccgataaccctttaatggggcaaggtattataattattgatgaagtcgagctgcatttacatcctaaatggcaacaaaaaataattggggtgttaagaaaatgttttcctaatattcaatttatagtttctacacattctcctcaaattcttggtgaagtagaaagtaaacatttaagaattcttactcttcaagacactagagaaattaaagttactattcccgaacagtcatatgggttaacctcaagtgaaatagtagaggagttaatggggggtaacggtcgtaatcaagatattaaaaagaagatagatcacatatttaagcttattgatcaagaaaatcttgtagaagctgagaataaaatagaagagcttcaatcagaattaaatggtgaaattccagaactaatagaagctaaaagcttaattcttatgatgaaataa

SEQ ID NO: 89863 - DNA, 642 bp, Acinetobacter baumannii; identical to SEQ ID NO: 87761

SEQ ID NO: 89864 - DNA, 1308 bp, Acinetobacter baumannii
ttaactattattattgggaacaatggagttggaaaaaccagtattttaaatgctatcagaaaacacatcatgtggatagcagccagcattcgtaaagataatgcatctggtggaacaatatcgccagacgaaatcaataataaatcaagtgataataataatggggcatatattgattgtgcttttaatataggaagtaaaaatactgttagaggtagaattgcccgagtaaaagatacttcaacaattccattaaaaagtgaattaactaattatagagagatagggcaaaaaattagagatttaaatgaatatagagatactaatttccctctcttcgcattttatggtattgatagattatcatcaaaaaaaaatctaagttcagatttagtatttaataaagttgatgggtatgaagaatcattaaataaggttagtaactttaatattttcttagaatggttaattcagattttaaaaatgtcagaaggtattctttctgagcagcaggaatacctattacatgatcttaaggcattagagctaggaggagctaacaatagttctagtcctttacaccctatgtatctcaaattaaaaaaatcttttgaagatcaaacttcacagcaatttaaccataacacaaataaattattagaaattataaactcagtatatcgtcaaatttatcaagattttattcgattagagttagtaaataatgatgatggaaaagataaagttagaatggttctaaaagatgatagtttatttttacatcaattatcagatggtcaaagagtatttcttggaatgataggagatatagctcgtagattaatattgttaaatgatagctccgataaccctttaatggggcaaggtattataattattgatgaagtcgagctgcatttacatcctaaatggcaacaaaaaataattggggtgttaagaaaatgttttcctaatattcaatttatagtttctacacattctcctcaaattcttggtgaagtagaaagtaaacatttaagaattcttactcttcaagacactagagaaattaaagttactattcccgaacagtcatatgggttaacctcaagtgaaatagtagaggagttaatggggggtaacggtcgtaatcaagatattaaaaagaagatagatcacatatttaagcttattgatcaagaaaatcttgtagaagctgagaataaaatagaagagcttcaatcagaattaaatggtgaaattccagaactaatagaagctaaaagcttaattcttatgatgaaataa

SEQ ID NO: 89865 - DNA, 642 bp, Acinetobacter baumannii; identical to SEQ ID NO: 87761

SEQ ID NO: 89866 - DNA, 1545 bp, Acinetobacter baumannii; identical to SEQ ID NO: 87768

SEQ ID NO: 89867 - DNA, 642 bp, Acinetobacter baumannii; identical to SEQ ID NO: 87761

SEQ ID NO: 89868 - DNA, 1524 bp, Acinetobacter baumannii; identical to SEQ ID NO: 87038

SEQ ID NO: 89869 - DNA, 672 bp, Acinetobacter baumannii; identical to SEQ ID NO: 86803

SEQ ID NO: 89870 - DNA, 1305 bp, Acinetobacter baumannii
actattattattgggaacaatggagttggaaaaaccagtattttaaatgctatcagaaaacacatcatgtggatagcagccagcattcgtaaagataatgcatctggtggaacaatatcgccagacgaaatcaataataaatcaagtgataataataatggggcatatattgattgtgcttttaatataggaagtaaaaatactgttagaggtagaattgcccgagtaaaagatacttcaacaattccattaaaaagtgaattaactaattatagagagatagggcaaaaaattagagatttaaatgaatatagagatactaatttccctctcttcgcattttatggtattgatagattatcatcaaaaaaaaatctaagttcagatttagtatttaataaagttgatgggtatgaagaatcattaaataaggttagtaactttaatattttcttagaatggttaattcagattttaaaaatgtcagaaggtattctttctgagcagcaggaatacctattacatgatcttaaggcattagagctaggaggagctaacaatagttctagtcctttacaccctatgtatctcaaattaaaaaaatcttttgaagatcaaacttcacagcaatttaaccataacacaaataaattattagaaattataaactcagtatatcgtcaaatttatcaagattttattcgattagagttagtaaataatgatgatggaaaagataaagttagaatggttctaaaagatgatagtttatttttacatcaattatcagatggtcaaagagtatttcttggaatgataggagatatagctcgtagattaatattgttaaatgatagctccgataaccctttaatggggcaaggtattataattattgatgaagtcgagctgcatttacatcctaaatggcaacaaaaaataattggggtgttaagaaaatgttttcctaatattcaatttatagtttctacacattctcctcaaattcttggtgaagtagaaagtaaacatttaagaattcttactcttcaagacactagagaaattaaagttactattcccgaacagtcatatgggttaacctcaagtgaaatagtagaggagttaatggggggtaacggtcgtaatcaagatattaaaaagaagatagatcacatatttaagcttattgatcaagaaaatcttgtagaagctgagaataaaatagaagagcttcaatcagaattaaatggtgaaattccagaactaatagaagctaaaagcttaattcttatgatgaaataa

SEQ ID NO: 89871 - DNA, 454 bp, Acinetobacter baumannii
atgttaaatattactagacttcatgagccatccagtttaactatttatcgctatcaacctgatgctaaatatgatggccctttattcacaacagttaaaagcgatatacgggaagcattagtaatttcacaagggtacctttgtgcatattgtatgcaacgtatatataatgatcgttcaacaactaaaatagaacattggcaatgtcaggatacttactctcaacgtcaacttgattttactaatatgtttgcagtatgtctgggaacaactcaagatcaattgcattgcgactcatctaagggcaataaacaaataacgattgatccagctagcaggagtcaactcgttgaatcttatattagatatactaattccggcgaaatatatgttcaaaataatgaattattaaataaagagttaaatataattttaaatttaaatcatagtcgta

SEQ ID NO: 89872 - DNA, 1284 bp, Acinetobacter baumannii; identical to SEQ ID NO: 86768

SEQ ID NO: 89873 - DNA, 669 bp, Acinetobacter baumannii; identical to SEQ ID NO: 86769

SEQ ID NO: 89874 - DNA, 1566 bp, Acinetobacter baumannii
atgagaatttttaatgctaagttaaataataaaaattttaattttttaaaagaaaaagacttaattgataataataataaatatacgattattttaggtgagaatggaactggaaaaagtgaactgcttcgtcagataattaataatttactaagaataaaaatattaaatatctcgccagaacataatgaacttggtaaattttcttacagagatttattggatagttatttatccaataaatataaaagcaatttagtagaaaaatctataagtacatctttaaatttatatttacatgatgatgcagatatttatttaagttatgaaaaatctaatagtcaaagaaaaattaaaaattttaaaggagaagaaattagtatctcagatgggcagtttcgacataaaacaagattagatagtcatggttttattttattagatactattttagcaataaatattattgccatatcagaaagtattcatataaaatttcctataattcaagatgatagctctttaagctattactatcctggatatttaaaagaaagtgattctgactattttttttcaaatataaatacaaataaaaatataaatcaaaaagaaaagtccataattttatcaatattattagctagtcttcgatctgaaaatattgacttaaaatcaatatttgatctccttaaatttgattttaaaataaaaatagacgtcaattctcaaacagatatcgatgtgaaattgaaaagactacatgactttagatttaatagcataggtattgagaagatctctaattttaatgatataaatgaggctgtaaattggtattcaaatactaaatctaatataaatgaagatatttttaaaaaaaatattcaagaaaactacacattctttttagatttacttaaagataatgaaagtataaattatctttatcatcttatttcatataatttaatagatgtttctaatatttacttttataaaagtagtgaagatctgatagaaataccaatacaagatatgagctctggtcagttatgccttataagcagcttttcctctattgcagcacatataagaaatggaagtctaatttttatagacgaaccagaaattagtttacatccattatgggcatctcaatatattgaattactacaaaataaattttctagttttcagagatgtcactttttgatagcaacccattcaccgcatatagtttctaatttacctgacgacaatgcttatgtaataactataaaaaatgatggaacttctaaatgtatagaatctaatgtttttaatttcaagtcagttgattttcagttagctgaaatctttgatttccctggaaatagaaatgagtatttaattagagttatcatggtcattttaactaaaattagcgagaacgaatcattaaatgttgatgatcttaagactatcgatcacttaaaacaatttattcctaaattaaaacctaatgatcctgttaagcatttaatcaatcagatatcagtattgacctctaatgaacaaagttaa

SEQ ID NO: 89875 - DNA, 645 bp, Acinetobacter baumannii; identical to SEQ ID NO: 86687

SEQ ID NO: 89876 - DNA, 1325 bp, Acinetobacter baumannii
taaattttgataaagagttaactattattattgggaacaatggagttggaaaaaccagtattttaaatgctatcagaaaacacatcatgtggatagcagccagcattcgtaaagataatgcatctggtggaacaatatcgccagacgaaatcaataataaatcaagtgataataataatggggcatatattgattgtgcttttaatataggaagtaaaaatactgttagaggtagaattgcccgagtaaaagatacttcaacaattccattaaaaagtgaattaactaattatagagagatagggcaaaaaattagagatttaaatgaatatagagatactaatttccctctcttcgcattttatggtattgatagattatcatcaaaaaaaaatctaagttcagatttagtatttaataaagttgatgggtatgaagaatcattaaataaggttagtaactttaatattttcttagaatggttaattcagattttaaaaatgtcagaaggtattctttctgagcagcaggaatacctattacatgatcttaaggcattagagctaggaggagctaacaatagttctagtcctttacaccctatgtatctcaaattaaaaaaatcttttgaagatcaaacttcacagcaatttaaccataacacaaataaattattagaaattataaactcagtatatcgtcaaatttatcaagattttattcgattagagttagtaaataatgatgatggaaaagataaagttagaatggttctaaaagatgatagtttatttttacatcaattatcagatggtcaaagagtatttcttggaatgataggagatatagctcgtagattaatattgttaaatgatagctccgataaccctttaatggggcaaggtattataattattgatgaagtcgagctgcatttacatcctaaatggcaacaaaaaataattggggtgttaagaaaatgttttcctaatattcaatttatagtttctacacattctcctcaaattcttggtgaagtagaaagtaaacatttaagaattcttactcttcaagacactagagaaattaaagttactattcccgaacagtcatatgggttaacctcaagtgaaatagtagaggagttaatggggggtaacggtcgtaatcaagatattaaaaagaagatagatcacatatttaagcttattgatcaagaaaatcttgtagaagctgagaataaaatagaagagcttcaatcagaattaaatggtgaaattccagaactaatagaagctaaaagcttaattcttatgatgaaataa

SEQ ID NO: 89877 - DNA, 642 bp, Acinetobacter baumannii; identical to SEQ ID NO: 87761

SEQ ID NO: 89878 - DNA, 1310 bp, Acinetobacter baumannii
agttaactattattattgggaacaatggagttggaaaaaccagtattttaaatgctatcagaaaacacatcatgtggatagcagccagcattcgtaaagataatgcatctggtggaacaatatcgccagacgaaatcaataataaatcaagtgataataataatggggcatatattgattgtgcttttaatataggaagtaaaaatactgttagaggtagaattgcccgagtaaaagatacttcaacaattccattaaaaagtgaattaactaattatagagagatagggcaaaaaattagagatttaaatgaatatagagatactaatttccctctcttcgcattttatggtattgatagattatcatcaaaaaaaaatctaagttcagatttagtatttaataaagttgatgggtatgaagaatcattaaataaggttagtaactttaatattttcttagaatggttaattcagattttaaaaatgtcagaaggtattctttctgagcagcaggaatacctattacatgatcttaaggcattagagctaggaggagctaacaatagttctagtcctttacaccctatgtatctcaaattaaaaaaatcttttgaagatcaaacttcacagcaatttaaccataacacaaataaattattagaaattataaactcagtatatcgtcaaatttatcaagattttattcgattagagttagtaaataatgatgatggaaaagataaagttagaatggttctaaaagatgatagtttatttttacatcaattatcagatggtcaaagagtatttcttggaatgataggagatatagctcgtagattaatattgttaaatgatagctccgataaccctttaatggggcaaggtattataattattgatgaagtcgagctgcatttacatcctaaatggcaacaaaaaataattggggtgttaagaaaatgttttcctaatattcaatttatagtttctacacattctcctcaaattcttggtgaagtagaaagtaaacatttaagaattcttactcttcaagacactagagaaattaaagttactattcccgaacagtcatatgggttaacctcaagtgaaatagtagaggagttaatggggggtaacggtcgtaatcaagatattaaaaagaagatagatcacatatttaagcttattgatcaagaaaatcttgtagaagctgagaataaaatagaagagcttcaatcagaattaaatggtgaaattccagaactaatagaagctaaaagcttaattcttatgatgaaataa

SEQ ID NO: 89879 - DNA, 642 bp, Acinetobacter baumannii; identical to SEQ ID NO: 87761

SEQ ID NO: 89880 - DNA, 1545 bp, Acinetobacter baumannii; identical to SEQ ID NO: 87768

SEQ ID NO: 89881 - DNA, 642 bp, Acinetobacter baumannii; identical to SEQ ID NO: 87761

SEQ ID NO: 89882 - DNA, 1310 bp, Acinetobacter baumannii
agacagctattattattgggaacaatggagttggaaaaaccagtattttaaatgctatcagaaaacacatcatgtggatagcagccagcattcgtaaagataatgcatctggtggaacaatatcgccagacgaaatcaataataaatcaagtgataataataatggggcatatattgattgtgcttttaatataggaagtaaaaatactgttagaggtagaattgcccgagtaaaagatacttcaacaattccattaaaaagtgaattaactaattatagagagatagggcaaaaaattagagatttaaatgaatatagagatactaatttccctctcttcgcattttatggtattgatagattatcatcaaaaaaaaatctaagttcagatttagtatttaataaagttgatgggtatgaagaatcattaaataaggttagtaactttaatattttcttagaatggttaattcagattttaaaaatgtcagaaggtattctttctgagcagcaggaatacctattacatgatcttaaggcattagagctaggaggagctaacaatagttctagtcctttacaccctatgtatctcaaattaaaaaaatcttttgaagatcaaacttcacagcaatttaaccataacacaaataaattattagaaattataaactcagtatatcgtcaaatttatcaagattttattcgattagagttagtaaataatgatgatggaaaagataaagttagaatggttctaaaagatgatagtttatttttacatcaattatcagatggtcaaagagtatttcttggaatgataggagatatagctcgtagattaatattgttaaatgatagctccgataaccctttaatggggcaaggtattataattattgatgaagtcgagctgcatttacatcctaaatggcaacaaaaaataattggggtgttaagaaaatgttttcctaatattcaatttatagtttctacacattctcctcaaattcttggtgaagtagaaagtaaacatttaagaattcttactcttcaagacactagagaaattaaagttactattcccgaacagtcatatgggttaacctcaagtgaaatagtagaggagttaatggggggtaacggtcgtaatcaagatattaaaaagaagatagatcacatatttaagcttattgatcaagaaaatcttgtagaagctgagaataaaatagaagagcttcaatcagaattaaatggtgaaattccagaactaatagaagctaaaagcttaattcttatgatgaaataa

SEQ ID NO: 89883 - DNA, 642 bp, Acinetobacter baumannii; identical to SEQ ID NO: 87761

SEQ ID NO: 89884 - DNA, 1545 bp, Acinetobacter baumannii; identical to SEQ ID NO: 87768

SEQ ID NO: 89885 - DNA, 642 bp, Acinetobacter baumannii; identical to SEQ ID NO: 87761

SEQ ID NO: 89886 - DNA, 1545 bp, Acinetobacter baumannii; identical to SEQ ID NO: 87768

SEQ ID NO: 89887 - DNA, 642 bp, Acinetobacter baumannii; identical to SEQ ID NO: 87761

SEQ ID NO: 89888 - DNA, 1331 bp, Acinetobacter baumannii
taaaaataaattttgataaagagttaactattattattgggaacaatggagttggaaaaaccagtattttaaatgctatcagaaaacacatcatgtggatagcagccagcattcgtaaagataatgcatctggtggaacaatatcgccagacgaaatcaataataaatcaagtgataataataatggggcatatattgattgtgcttttaatataggaagtaaaaatactgttagaggtagaattgcccgagtaaaagatacttcaacaattccattaaaaagtgaattaactaattatagagagatagggcaaaaaattagagatttaaatgaatatagagatactaatttccctctcttcgcattttatggtattgatagattatcatcaaaaaaaaatctaagttcagatttagtatttaataaagttgatgggtatgaagaatcattaaataaggttagtaactttaatattttcttagaatggttaattcagattttaaaaatgtcagaaggtattctttctgagcagcaggaatacctattacatgatcttaaggcattagagctaggaggagctaacaatagttctagtcctttacaccctatgtatctcaaattaaaaaaatcttttgaagatcaaacttcacagcaatttaaccataacacaaataaattattagaaattataaactcagtatatcgtcaaatttatcaagattttattcgattagagttagtaaataatgatgatggaaaagataaagttagaatggttctaaaagatgatagtttatttttacatcaattatcagatggtcaaagagtatttcttggaatgataggagatatagctcgtagattaatattgttaaatgatagctccgataaccctttaatggggcaaggtattataattattgatgaagtcgagctgcatttacatcctaaatggcaacaaaaaataattggggtgttaagaaaatgttttcctaatattcaatttatagtttctacacattctcctcaaattcttggtgaagtagaaagtaaacatttaagaattcttactcttcaagacactagagaaattaaagttactattcccgaacagtcatatgggttaacctcaagtgaaatagtagaggagttaatggggggtaacggtcgtaatcaagatattaaaaagaagatagatcacatatttaagcttattgatcaagaaaatcttgtagaagctgagaataaaatagaagagcttcaatcagaattaaatggtgaaattccagaactaatagaagctaaaagcttaattcttatgatgaaataa

SEQ ID NO: 89889 - DNA, 642 bp, Acinetobacter baumannii; identical to SEQ ID NO: 87761

SEQ ID NO: 89890 - DNA, 1365 bp, Acinetobacter baumannii; identical to SEQ ID NO: 87770

SEQ ID NO: 89891 - DNA, 642 bp, Acinetobacter baumannii; identical to SEQ ID NO: 87761

SEQ ID NO: 89892 - DNA, 1545 bp, Acinetobacter baumannii; identical to SEQ ID NO: 87768

SEQ ID NO: 89893 - DNA, 642 bp, Acinetobacter baumannii; identical to SEQ ID NO: 87761

SEQ ID NO: 89894 - DNA, 1345 bp, Acinetobacter baumannii
aattattacaaatttaaaaataaattttgataaagagttaactattattattgggaacaatggagttggaaaaaccagtattttaaatgctatcagaaaacacatcatgtggatagcagccagcattcgtaaagataatgcatctggtggaacaatatcgccagacgaaatcaataataaatcaagtgataataataatggggcatatattgattgtgcttttaatataggaagtaaaaatactgttagaggtagaattgcccgagtaaaagatacttcaacaattccattaaaaagtgaattaactaattatagagagatagggcaaaaaattagagatttaaatgaatatagagatactaatttccctctcttcgcattttatggtattgatagattatcatcaaaaaaaaatctaagttcagatttagtatttaataaagttgatgggtatgaagaatcattaaataaggttagtaactttaatattttcttagaatggttaattcagattttaaaaatgtcagaaggtattctttctgagcagcaggaatacctattacatgatcttaaggcattagagctaggaggagctaacaatagttctagtcctttacaccctatgtatctcaaattaaaaaaatcttttgaagatcaaacttcacagcaatttaaccataacacaaataaattattagaaattataaactcagtatatcgtcaaatttatcaagattttattcgattagagttagtaaataatgatgatggaaaagataaagttagaatggttctaaaagatgatagtttatttttacatcaattatcagatggtcaaagagtatttcttggaatgataggagatatagctcgtagattaatattgttaaatgatagctccgataaccctttaatggggcaaggtattataattattgatgaagtcgagctgcatttacatcctaaatggcaacaaaaaataattggggtgttaagaaaatgttttcctaatattcaatttatagtttctacacattctcctcaaattcttggtgaagtagaaagtaaacatttaagaattcttactcttcaagacactagagaaattaaagttactattcccgaacagtcatatgggttaacctcaagtgaaatagtagaggagttaatggggggtaacggtcgtaatcaagatattaaaaagaagatagatcacatatttaagcttattgatcaagaaaatcttgtagaagctgagaataaaatagaagagcttcaatcagaattaaatggtgaaattccagaactaatagaagctaaaagcttaattcttatgatgaaataa

SEQ ID NO: 89895 - DNA, 642 bp, Acinetobacter baumannii; identical to SEQ ID NO: 87761

SEQ ID NO: 89896 - DNA, 1343 bp, Acinetobacter baumannii
ttattacaaatttaaaaataaattttgataaagagttaactattattattgggaacaatggagttggaaaaaccagtattttaaatgctatcagaaaacacatcatgtggatagcagccagcattcgtaaagataatgcatctggtggaacaatatcgccagacgaaatcaataataaatcaagtgataataataatggggcatatattgattgtgcttttaatataggaagtaaaaatactgttagaggtagaattgcccgagtaaaagatacttcaacaattccattaaaaagtgaattaactaattatagagagatagggcaaaaaattagagatttaaatgaatatagagatactaatttccctctcttcgcattttatggtattgatagattatcatcaaaaaaaaatctaagttcagatttagtatttaataaagttgatgggtatgaagaatcattaaataaggttagtaactttaatattttcttagaatggttaattcagattttaaaaatgtcagaaggtattctttctgagcagcaggaatacctattacatgatcttaaggcattagagctaggaggagctaacaatagttctagtcctttacaccctatgtatctcaaattaaaaaaatcttttgaagatcaaacttcacagcaatttaaccataacacaaataaattattagaaattataaactcagtatatcgtcaaatttatcaagattttattcgattagagttagtaaataatgatgatggaaaagataaagttagaatggttctaaaagatgatagtttatttttacatcaattatcagatggtcaaagagtatttcttggaatgataggagatatagctcgtagattaatattgttaaatgatagctccgataaccctttaatggggcaaggtattataattattgatgaagtcgagctgcatttacatcctaaatggcaacaaaaaataattggggtgttaagaaaatgttttcctaatattcaatttatagtttctacacattctcctcaaattcttggtgaagtagaaagtaaacatttaagaattcttactcttcaagacactagagaaattaaagttactattcccgaacagtcatatgggttaacctcaagtgaaatagtagaggagttaatggggggtaacggtcgtaatcaagatattaaaaagaagatagatcacatatttaagcttattgatcaagaaaatcttgtagaagctgagaataaaatagaagagcttcaatcagaattaaatggtgaaattccagaactaatagaagctaaaagcttaattcttatgatgaaataa

SEQ ID NO: 89897 - DNA, 642 bp, Acinetobacter baumannii; identical to SEQ ID NO: 87761

SEQ ID NO: 89898 - DNA, 1236 bp, Acinetobacter baumannii
atagatattgattttcatccaaatgttacaattattacaggggcaaatggttcaggcaaatcaacaatattaaaattactttctaaacactttggatggtatcaaccatttttaggcacccctattttatcgaaagaacaaggagtgttctattataagacggtatttcgaccattaaataaagaatatcaaacatctcactatggtcataatatccatatattaggcaatattttttattctaatgatgcttcttctgacatttttattcatgaacaaatatacagcgatgctcaatttgacttgcaatttggggggaacatccctgtagttaagggggtccatatcagttcccatcgacctattcctaaatatgaaagattgcaaaatattcccactaatcctatggatgcgtcgcaggcttttaatagttactttcaagaaactgttaacttatttaataataattatacacagcacaccccaatttatagaatgaaagaagcaattgtttcaatggctgcatttggtccaggaaatcaatttgtacagaaaaatgaaaagattgaaaagcaattttccgactttaaagatattctaaagcagatattacctgctgatcttggttttaaagacttaagtgtacggataccagacctagtattggaaacggaaacaggagattttctattagatgcctcttctggaggaattatgtctattattgatctagcatggcagatttttctttattctcatgacaaagatgaatttgtcgtcactattgatgaaccagaaaatcatttacatccgtctatgcaacgttctctattgaatgattttgttaaagcatttcctaaagctcaatttattgtggtaacacatagcccgtttattgtttcttcaattcgtgaatctaacgtatatgctttaaaacatgaaaaaaataatgtaagcgatcaacaaagtggatgggcaaaaaaagttgtttcttataagttagatctgaatcaaaaagcagctactgcaagtgaaattttgcgtgatgttttaggtgtacccgtaacattgcctaaatgggctgatgatgagttacaaaaaatctgttcgacctttacagtccaagatattacaacagacggtttatctagattgagagctgagttaaataatgctggtttaggagagttctatccagaagcattaagtaatatcgtaggagagagtgggttatga

SEQ ID NO: 89899 - DNA, 669 bp, Acinetobacter baumannii; identical to SEQ ID NO: 86769

SEQ ID NO: 89900 - DNA, 1388 bp, Acinetobacter baumannii
aaaaagatttatttttatccaatatggaaattagtaattataaaattattacaaatttaaaaataaattttgataaagagttaactattattattgggaacaatggagttggaaaaaccagtattttaaatgctatcagaaaacacatcatgtggatagcagccagcattcgtaaagataatgcatctggtggaacaatatcgccagacgaaatcaataataaatcaagtgataataataatggggcatatattgattgtgcttttaatataggaagtaaaaatactgttagaggtagaattgcccgagtaaaagatacttcaacaattccattaaaaagtgaattaactaattatagagagatagggcaaaaaattagagatttaaatgaatatagagatactaatttccctctcttcgcattttatggtattgatagattatcatcaaaaaaaaatctaagttcagatttagtatttaataaagttgatgggtatgaagaatcattaaataaggttagtaactttaatattttcttagaatggttaattcagattttaaaaatgtcagaaggtattctttctgagcagcaggaatacctattacatgatcttaaggcattagagctaggaggagctaacaatagttctagtcctttacaccctatgtatctcaaattaaaaaaatcttttgaagatcaaacttcacagcaatttaaccataacacaaataaattattagaaattataaactcagtatatcgtcaaatttatcaagattttattcgattagagttagtaaataatgatgatggaaaagataaagttagaatggttctaaaagatgatagtttatttttacatcaattatcagatggtcaaagagtatttcttggaatgataggagatatagctcgtagattaatattgttaaatgatagctccgataaccctttaatggggcaaggtattataattattgatgaagtcgagctgcatttacatcctaaatggcaacaaaaaataattggggtgttaagaaaatgttttcctaatattcaatttatagtttctacacattctcctcaaattcttggtgaagtagaaagtaaacatttaagaattcttactcttcaagacactagagaaattaaagttactattcccgaacagtcatatgggttaacctcaagtgaaatagtagaggagttaatggggggtaacggtcgtaatcaagatattaaaaagaagatagatcacatatttaagcttattgatcaagaaaatcttgtagaagctgagaataaaatagaagagcttcaatcagaattaaatggtgaaattccagaactaatagaagctaaaagcttaattcttatgatgaaataa

SEQ ID NO: 89901 - DNA, 642 bp, Acinetobacter baumannii; identical to SEQ ID NO: 87761

SEQ ID NO: 89902 - DNA, 1304 bp, Acinetobacter baumannii
ctattattattgggaacaatggagttggaaaaaccagtattttaaatgctatcagaaaacacatcatgtggatagcagccagcattcgtaaagataatgcatctggtggaacaatatcgccagacgaaatcaataataaatcaagtgataataataatggggcatatattgattgtgcttttaatataggaagtaaaaatactgttagaggtagaattgcccgagtaaaagatacttcaacaattccattaaaaagtgaattaactaattatagagagatagggcaaaaaattagagatttaaatgaatatagagatactaatttccctctcttcgcattttatggtattgatagattatcatcaaaaaaaaatctaagttcagatttagtatttaataaagttgatgggtatgaagaatcattaaataaggttagtaactttaatattttcttagaatggttaattcagattttaaaaatgtcagaaggtattctttctgagcagcaggaatacctattacatgatcttaaggcattagagctaggaggagctaacaatagttctagtcctttacaccctatgtatctcaaattaaaaaaatcttttgaagatcaaacttcacagcaatttaaccataacacaaataaattattagaaattataaactcagtatatcgtcaaatttatcaagattttattcgattagagttagtaaataatgatgatggaaaagataaagttagaatggttctaaaagatgatagtttatttttacatcaattatcagatggtcaaagagtatttcttggaatgataggagatatagctcgtagattaatattgttaaatgatagctccgataaccctttaatggggcaaggtattataattattgatgaagtcgagctgcatttacatcctaaatggcaacaaaaaataattggggtgttaagaaaatgttttcctaatattcaatttatagtttctacacattctcctcaaattcttggtgaagtagaaagtaaacatttaagaattcttactcttcaagacactagagaaattaaagttactattcccgaacagtcatatgggttaacctcaagtgaaatagtagaggagttaatggggggtaacggtcgtaatcaagatattaaaaagaagatagatcacatatttaagcttattgatcaagaaaatcttgtagaagctgagaataaaatagaagagcttcaatcagaattaaatggtgaaattccagaactaatagaagctaaaagcttaattcttatgatgaaataa

SEQ ID NO: 89903 - DNA, 642 bp, Acinetobacter baumannii; identical to SEQ ID NO: 87761

SEQ ID NO: 89904 - DNA, 537 bp, Acinetobacter baumannii
atttctttaagaagagcaagctctggtgaacaatgcatgcttgcacttatgctaggtattgcagggcatattactaatgactcattaatttttattgatgaacctgaaattagtttacaccctaaatggcaggaggaatttatgcctctattaattaagatatttagtaattatagtaattgtcattttttaatagcaacacattcccctcaaattatttcacaattggaagatgacaactgctttatcacctctctaacagaaaacataatttatcatgctaaagattttagaaatatgtcctcagattttcaattagcagaactttttggggcaccgggtaccaagaatgaatatataacaagattagctttttcattactttcaaaattaaaatctaataaaaaagtaaacaatcaactagcagaagatttatttaaactccgttcatttatgaatatcttacctgcagatgatccgacaaaagaactaattcaaactgtaaatgaggtatatgaattttatgcctctcattaa

SEQ ID NO: 89905 - DNA, 663 bp, Acinetobacter baumannii
atgaattttatgcctctcattaatgaaccctatatatttgatccagaattaaagaaaaaacttaaatctaaagtgacagatcctaattttaatcacgaaaattggggtgatgaagagttctcagatttacgttctttaattcgggctcattatagaactaaacaaggcgctttatgtgcttattgtaaggcaaggatttctttagtttcagcaagtaatgctcatatcgaacatatcgttcctaaagcgatacatcttgaatatatttttgaacctaaaaatttatgtgtcatctgcgctgattgtaataccattaagagaaatcaagaaactataaatgatataaaaaatcccttagttaatattatttctagatacccacgatcatctaatgcttttaaaattatccacccacattttgatgattatgatctacatattgctataaaagggaaaatatatatagatttaactccaaaaggtaattttacaattggggcatgcaaactgaatagatattttcaaaagtttggcatagaccaagattttattgatgactcagtattaattgaaatttttcaaaaatttatggactcagacaatactgctgaaaaagcttatttaattaatgaacttaagacaattctcatatgtaatttttag

SEQ ID NO: 89906 - DNA, 1290 bp, Acinetobacter baumannii
atgaagcttaactcaatcaagataagtgaatggcaacaatttttgaaagtggaaattgatttccataaaaatgttacaattctaactggtgctaatggttcagggaaaacaactatacttaaatttatatctaatcattatggttggagcaatattattttagcgacacctattttagaaaaacagcaaggggcctatgtttataaatctaactttaagccaataaaaaatgaaactggtgaaaaaataacatatgatgatgatgcaatattaggcgaaataacatattccaacaatcgaactggatatattctactaccttcgcaacaacaaaataatcagggtccaattcaattcttcaatatttttaatcggcaaaatattgatggtttacatgttaattcccatagaccaccacccaagtattctaaaatggaatcaattcctgtagatccaatgaatgcagaacaggcattcaatatttatgatattcaaaacaaaaggatatacttatcagaatacactgataaaacaccattattaaaaatgaaagaagcattaatttcaatggccgcatttggccaaggtaataattttattgaaaataataaaaatattgaatcgctatttatcaattttaataacattttaaagcaggtattgccagaagatctaggttttcaggatataataataagaattcctaatgtattactaaaaacagaaactggagagttcctgttagacgcttgttctggcggtattctttcaattatagagatggcatggcaaatttttttatattctcaagacaaaaatgaatttgtagttaccttagatgaacctgaaaaccacttacacccttcaatgcagcgaacattattgaatgattttacagcagcatttccaaatgcccaattcattgtagcaacacatagtccatttatagtttcatcagtgaaagattccaatgtctatgcattaaaatatagtgatttaggaaatgaatcttcgttagaaagtggtaaacgaaaagtaaaagcatataagctagatttgactcaaaaagcggctaccgcacaagatatccttcatgaagttttaggcgtacctgttacattacctaaatgggctgatgctgaattgcaaaggatttgctcacaatttggttcaacagatattacaactgaaggtctggaacgtttaaagcaacaattgaaaattgctggtttagaggaattttatcctgatgcaataaaaagcattgtggagaacaccttcaatgattaa

SEQ ID NO: 89907 - DNA, 645 bp, Acinetobacter baumannii
atgattaaattaactaagctaccagaacccccaatattaaaaaataatgcagaaaagtggactgcacaacatctaaaaaacatttccgaaggtaaagagtcgactaattatctaaagacaagatatagccataaagatataaaagaagtaattcttagagaaacctcggaaaaatgtgcgtattgtgaaagtaaatttagacatgttcatcatggtgatattgaacacatttctccaaagactttagatgaatccaaaagatttgaatgggaaaatttaactctggcttgtgagatttgtaatcaaaataaatccaccacacctatagagcttatggttgatccttacaaaatggatccgtcagaacacttacattttgcaggaactattattttagaaaaaacagataatgggtactttgcaaagcaaatattagacttaaatagatcagaattacttgaaaatcgtaaagtaagacttgaaactgtctgctcagctttaagaagtctttttaatagagatattcccttagataaaaggcaaatcttactggatgcattaaagaagcagcaatgtagtaagtctagtgaatattcagcaatgttcattgaatatattaaatcaattgaagcagcgatggagtaa

SEQ ID NO: 89908 - DNA, 1331 bp, Acinetobacter baumannii; identical to SEQ ID NO: 89888

SEQ ID NO: 89909 - DNA, 452 bp, Acinetobacter baumannii
atgttaaatattactagacttcatgagccatccagtttaactatttatcgctatcaacctgatgctaaatatgatggccctttattcacaacagttaaaagcgatatacgggaagcattagtaatttcacaagggtacctttgtgcatattgtatgcaacgtatatataatgatcgttcaacaactaaaatagaacattggcaatgtcaggatacttactctcaacgtcaacttgattttactaatatgtttgcagtatgtctgggaacaactcaagatcaattgcattgcgactcatctaagggcaataaacaaataacgattgatccagctagcaggagtcaactcgttgaatcttatattagatatactaattccggcgaaatatatgttcaaaataatgaattattaaataaagagttaaatataattttaaatttaaatcatagtcg

SEQ ID NO: 89910 - DNA, 1316 bp, Acinetobacter baumannii
ataaagagttaactattattattgggaacaatggagttggaaaaaccagtattttaaatgctatcagaaaacacatcatgtggatagcagccagcattcgtaaagataatgcatctggtggaacaatatcgccagacgaaatcaataataaatcaagtgataataataatggggcatatattgattgtgcttttaatataggaagtaaaaatactgttagaggtagaattgcccgagtaaaagatacttcaacaattccattaaaaagtgaattaactaattatagagagatagggcaaaaaattagagatttaaatgaatatagagatactaatttccctctcttcgcattttatggtattgatagattatcatcaaaaaaaaatctaagttcagatttagtatttaataaagttgatgggtatgaagaatcattaaataaggttagtaactttaatattttcttagaatggttaattcagattttaaaaatgtcagaaggtattctttctgagcagcaggaatacctattacatgatcttaaggcattagagctaggaggagctaacaatagttctagtcctttacaccctatgtatctcaaattaaaaaaatcttttgaagatcaaacttcacagcaatttaaccataacacaaataaattattagaaattataaactcagtatatcgtcaaatttatcaagattttattcgattagagttagtaaataatgatgatggaaaagataaagttagaatggttctaaaagatgatagtttatttttacatcaattatcagatggtcaaagagtatttcttggaatgataggagatatagctcgtagattaatattgttaaatgatagctccgataaccctttaatggggcaaggtattataattattgatgaagtcgagctgcatttacatcctaaatggcaacaaaaaataattggggtgttaagaaaatgttttcctaatattcaatttatagtttctacacattctcctcaaattcttggtgaagtagaaagtaaacatttaagaattcttactcttcaagacactagagaaattaaagttactattcccgaacagtcatatgggttaacctcaagtgaaatagtagaggagttaatggggggtaacggtcgtaatcaagatattaaaaagaagatagatcacatatttaagcttattgatcaagaaaatcttgtagaagctgagaataaaatagaagagcttcaatcagaattaaatggtgaaattccagaactaatagaagctaaaagcttaattcttatgatgaaataa

SEQ ID NO: 89911 - DNA, 642 bp, Acinetobacter baumannii; identical to SEQ ID NO: 87761

SEQ ID NO: 89912 - DNA, 1375 bp, Acinetobacter baumannii
tttatccaatatggaaattagtaattataaaattattacaaatttaaaaataaattttgataaagagttaactattattattgggaacaatggagttggaaaaaccagtattttaaatgctatcagaaaacacatcatgtggatagcagccagcattcgtaaagataatgcatctggtggaacaatatcgccagacgaaatcaataataaatcaagtgataataataatggggcatatattgattgtgcttttaatataggaagtaaaaatactgttagaggtagaattgcccgagtaaaagatacttcaacaattccattaaaaagtgaattaactaattatagagagatagggcaaaaaattagagatttaaatgaatatagagatactaatttccctctcttcgcattttatggtattgatagattatcatcaaaaaaaaatctaagttcagatttagtatttaataaagttgatgggtatgaagaatcattaaataaggttagtaactttaatattttcttagaatggttaattcagattttaaaaatgtcagaaggtattctttctgagcagcaggaatacctattacatgatcttaaggcattagagctaggaggagctaacaatagttctagtcctttacaccctatgtatctcaaattaaaaaaatcttttgaagatcaaacttcacagcaatttaaccataacacaaataaattattagaaattataaactcagtatatcgtcaaatttatcaagattttattcgattagagttagtaaataatgatgatggaaaagataaagttagaatggttctaaaagatgatagtttatttttacatcaattatcagatggtcaaagagtatttcttggaatgataggagatatagctcgtagattaatattgttaaatgatagctccgataaccctttaatggggcaaggtattataattattgatgaagtcgagctgcatttacatcctaaatggcaacaaaaaataattggggtgttaagaaaatgttttcctaatattcaatttatagtttctacacattctcctcaaattcttggtgaagtagaaagtaaacatttaagaattcttactcttcaagacactagagaaattaaagttactattcccgaacagtcatatgggttaacctcaagtgaaatagtagaggagttaatggggggtaacggtcgtaatcaagatattaaaaagaagatagatcacatatttaagcttattgatcaagaaaatcttgtagaagctgagaataaaatagaagagcttcaatcagaattaaatggtgaaattccagaactaatagaagctaaaagcttaattcttatgatgaaataa

SEQ ID NO: 89913 - DNA, 642 bp, Acinetobacter baumannii; identical to SEQ ID NO: 87761

SEQ ID NO: 89914 - DNA, 1358 bp, Acinetobacter baumannii
ttagtaattataaaattattacaaatttaaaaataaattttgataaagagttaactattattattgggaacaatggagttggaaaaaccagtattttaaatgctatcagaaaacacatcatgtggatagcagccagcattcgtaaagataatgcatctggtggaacaatatcgccagacgaaatcaataataaatcaagtgataataataatggggcatatattgattgtgcttttaatataggaagtaaaaatactgttagaggtagaattgcccgagtaaaagatacttcaacaattccattaaaaagtgaattaactaattatagagagatagggcaaaaaattagagatttaaatgaatatagagatactaatttccctctcttcgcattttatggtattgatagattatcatcaaaaaaaaatctaagttcagatttagtatttaataaagttgatgggtatgaagaatcattaaataaggttagtaactttaatattttcttagaatggttaattcagattttaaaaatgtcagaaggtattctttctgagcagcaggaatacctattacatgatcttaaggcattagagctaggaggagctaacaatagttctagtcctttacaccctatgtatctcaaattaaaaaaatcttttgaagatcaaacttcacagcaatttaaccataacacaaataaattattagaaattataaactcagtatatcgtcaaatttatcaagattttattcgattagagttagtaaataatgatgatggaaaagataaagttagaatggttctaaaagatgatagtttatttttacatcaattatcagatggtcaaagagtatttcttggaatgataggagatatagctcgtagattaatattgttaaatgatagctccgataaccctttaatggggcaaggtattataattattgatgaagtcgagctgcatttacatcctaaatggcaacaaaaaataattggggtgttaagaaaatgttttcctaatattcaatttatagtttctacacattctcctcaaattcttggtgaagtagaaagtaaacatttaagaattcttactcttcaagacactagagaaattaaagttactattcccgaacagtcatatgggttaacctcaagtgaaatagtagaggagttaatggggggtaacggtcgtaatcaagatattaaaaagaagatagatcacatatttaagcttattgatcaagaaaatcttgtagaagctgagaataaaatagaagagcttcaatcagaattaaatggtgaaattccagaactaatagaagctaaaagcttaattcttatgatgaaataa

SEQ ID NO: 89915 - DNA, 642 bp, Acinetobacter baumannii; identical to SEQ ID NO: 87761

SEQ ID NO: 89916 - DNA, 1350 bp, Acinetobacter baumannii
tataaaattattacaaatttaaaaataaattttgataaagagttaactattattattgggaacaatggagttggaaaaaccagtattttaaatgctatcagaaaacacatcatgtggatagcagccagcattcgtaaagataatgcatctggtggaacaatatcgccagacgaaatcaataataaatcaagtgataataataatggggcatatattgattgtgcttttaatataggaagtaaaaatactgttagaggtagaattgcccgagtaaaagatacttcaacaattccattaaaaagtgaattaactaattatagagagatagggcaaaaaattagagatttaaatgaatatagagatactaatttccctctcttcgcattttatggtattgatagattatcatcaaaaaaaaatctaagttcagatttagtatttaataaagttgatgggtatgaagaatcattaaataaggttagtaactttaatattttcttagaatggttaattcagattttaaaaatgtcagaaggtattctttctgagcagcaggaatacctattacatgatcttaaggcattagagctaggaggagctaacaatagttctagtcctttacaccctatgtatctcaaattaaaaaaatcttttgaagatcaaacttcacagcaatttaaccataacacaaataaattattagaaattataaactcagtatatcgtcaaatttatcaagattttattcgattagagttagtaaataatgatgatggaaaagataaagttagaatggttctaaaagatgatagtttatttttacatcaattatcagatggtcaaagagtatttcttggaatgataggagatatagctcgtagattaatattgttaaatgatagctccgataaccctttaatggggcaaggtattataattattgatgaagtcgagctgcatttacatcctaaatggcaacaaaaaataattggggtgttaagaaaatgttttcctaatattcaatttatagtttctacacattctcctcaaattcttggtgaagtagaaagtaaacatttaagaattcttactcttcaagacactagagaaattaaagttactattcccgaacagtcatatgggttaacctcaagtgaaatagtagaggagttaatggggggtaacggtcgtaatcaagatattaaaaagaagatagatcacatatttaagcttattgatcaagaaaatcttgtagaagctgagaataaaatagaagagcttcaatcagaattaaatggtgaaattccagaactaatagaagctaaaagcttaattcttatgatgaaataa

SEQ ID NO: 89917 - DNA, 642 bp, Acinetobacter baumannii; identical to SEQ ID NO: 87761

SEQ ID NO: 89918 - DNA, 1317 bp, Serratia marcescens; identical to SEQ ID NO: 88300

SEQ ID NO: 89919 - DNA, 738 bp, Serratia marcescens
atgcgtccggtaagaaaaggagtttcgcccaatgataacattgattttgatgattacaaaaaagcttttcctcacctggtcgggcgtatcggcagttattgcagttactgtgaacgccgtatcgctaccaatttagcggttgaacatattcagccaaaagatggtcaatatggacatccggggctgacaggcagatggagtaatttcttgctggcctgcgtaaattgtaattctaccaaaggtgccaaggaggtcattctcgcaaacttgttgctaccggactgggataatacgttcttcgcgtatgtctattctgctgatggtaaggtggctcctgcaacgcaactttccccagaacaacaggtgatggcccaaaaaacattgtcccttactgggttggataagaagatcagccagatccttgatgagaatggcaaggctgttgctctagaccgggaaagccagcgcatgcaggtatggggacaggcgcaaactgcgttggcagatgttaactctgccccagataatgagcgtttgaagcactggatcattgaagccgccaaggcgacgggtttctttagcatttgggttaccgtatttgctggcaaccctgatatgtgtctgcgttttatcgcggcgtttgagggaacggctgaaagtgggtgctttgacgctgcaggcatccctgtcgtgccgtcacagaaccctgacggatggcagagtggcgctaaagcgtga

SEQ ID NO: 89920 - DNA, 1131 bp, Vibrio furnissii
atgatacatatatatgttggtgaaaacggctctggtaaaagtaagaaactaggcgagatcgcaactaacctaattgccaaaggagaaacagtcattgcaatctcgacagctccaaacgataaatttcctagaaggactcctcacaagccatatcactatatgggctctagattaggccgcttcgttgctagagaggctataaagagcgcaatatcttatagctacggacatgaagataagttgttctcatccatatttaacatcttaaactatgctggtttttcacagaaatttgggctaacgataaatggtcttcgtgaaaatattgagagtgagttaatgaatcatttacttgactcagactctgaatcaggggtttatgaaaactatgatgtaatatctaatagttttagatacataagaagcaccttaaagcccgaccacactttttgggtagaccaagaaacacctctttccaaaacttcggggggagaggctttggtaaatcttgtaaaacacgaaaagctgtgtaaaaaaattaaactatttaggtcaattgatatagttgttcaaaaaaaggacatcgttttcccattgatacaagcaagttctggagaactatccttaatatctacagcagtgtttattgcgtctaatcttcatgactctaacgccagatataacatattgattgacgagcctgaaaacagcctacaccccgagtggcaacaaaaatatataaccaacctccaaaatctatttccttattataagaccaacttctacattgcgactcactcacctttactagtcgcgggtgggcttaccgaaaaaaatgtttcagtttacagggcatcacaagaccagtttattgaagctccagcgcaagtaaaaaatatagaagatgcactaattgaccagtttggtatcgtcacgccagaaagcaacgcattgtcagaaaggtgtattgaactcattcacaaagtagagattgggcagctaaccaaagaagacgcaactgaaagtcttgactccttctaccagcaatcctacgacaccaagcaacgagagtttctaatcggtgtgagaaacattatcttagagttggagatggtaaatgccaaagattag

SEQ ID NO: 89921 - DNA, 600 bp, Vibrio furnissii
atgccaaagattagcttcaccaacgctgaaattagtctcatgaaatcagcaacacagctgggccataccgagtggtcaaataaaaatcttgcagctattaaagccaagataaagcatcaaaagaaacagcaaactctacaactttgctgctattgccaaagagacataaattcggagtttaattttgtattagatattgaacacataattcctaagtcatcaagacttaggcatatgtttactatgaaaaatctcagcgtatcatgtaaacgctgcaatatgtcaatcaaaggtgctaagacagacttccttagtattccaatagcatcacttccaagaagagccttcaaaagtagatactatcgatttattcatccaaacttagattttcctttcaagcacctagttcggacacatctacaacaagggcctattcgtctaatcaagtaccatcggtattctgataaaggagagtacacttatagctatttccgattacatgagtttgaggttgagtcagcgaatctggctcaaggaagacgaaaagtaaggaaagtgagcgcagagtcgttgtccaaatttgcgaaacttcagcaataa

SEQ ID NO: 89922 - DNA, 1233 bp, Vibrio furnissii
atgaatagatacgtcgagaagatctatggtgtagtaccaaacaccaataaagaaatcgacattaagcttaatggacgtaacctcatcatcactggcggcaacggttctggtaagacttgcttgttgcgtgagtttgatcgtaaaacagatttactgattgctcaaaagaaaatggcagatcgaaaaaccattgaaaagaacattaagcattacgaagaatctttgaaaactcgtcaaaaaggaacatctcaatatcagagagatcaaaaaaaccgcgataactatcagaagcaaatagatgacatcgattctggattaaatattgccttcacagactatctcagcttttcttctaaccttgatgatcgtaaagctgtactatgtttatttgaagcacagcggaaatccgagatttcttccgcaaatacagctaaggggcttgaaacagagaaagctcaaatacgaaaaaatgacaaaaatcagcgacttggtaataacctcgaacaacaccttgttaacctacgtaaccgtcgttctttggctattacagaagataaaaatcatagtctagctgataaaatcgaccattggtttacagaatttgaggaagaccttagacaattattggaagataataccgctaaattgaagttcaactcggatacactgaaattcaccatttctcaaggcagcaaacctgaatatacttttcagtcgctctcctctggctaccaagcgatcttcgatatttatgcagacctgttgatgcgtaccgagtacttcgatataacaccaaaagagttaacaggtatagccttcattgatgagattgacgcgcatctgcatgtctctttgcaacgcttgatctttccattctttactaagtcttttccgaatattcagtttatcgttacaacacactctccgttcgttttgatgtctgccaaagatacaatcatcttcgacctaaccaaaaacgaacagattgacgaagacatttctctatattcacacactgcggtgattcaagggcttttaggtacgaaaacaacctccgctcgccttgaagagtacgttaacgagattgctactatcgttaacacggataacattaattatgaacgcctagaagtacttgtacgcaaactgcgaagcgttgaaaacactctagacagccaatctaaagcattctacctcatgggagaaaatgcactcttggataaggagcagtaa

SEQ ID NO: 89923 - DNA, 657 bp, Vibrio furnissii
gtgttcaaggtagaaagaactggtgacgctcctatatgccttgcaagcaatgagtataacacgcccgaagttgttgaacgcctctatgatatatttcatggtaagtgttatctgtgtgaacaagccgatttggatgcacctgaggtcgaacacttcgagccgcatatgggcgacgatacgttaaagtacgattgggaaaacttgtattactcgtgcgctcgttgcaacagtataaaaggcacgcgacaccgaaacttaattgattgctgctcaagtgaaatcaatgttgtgcgggctattaaacgtaaaccgcctacaatgcccgatagtaacatggaaattactgccgttattgaagatccacgagttcacaatacggttgaactactagataggtgctttaacgaagacaatacagctctgcgtggtattactcgtgctaatctttctgaaaatctctttaagcactacaccaaacttctaagccacagacttgtcatcgtcaacagggaatcaacagaccgagatattcaagatgcggtggaacgtattgaaattatgcttcgagatacttatgagttctcggctttctggcgatggtgtgtaatggaagaccgtcaattgcgagaaaagctggaacatgcactacatttttaa

SEQ ID NO: 89924 - DNA, 1119 bp, Vibrio furnissii
atgttattaggtaatatacctccaggtaaggtggctatcattattggagaaaatggttcaggcaaaagcacccgtcttaaccatttgtctaaggagtatctttctcaaggtcgagaagtgattgctattgcaaactcaatccacgataagtttagaagcaggagcaaaaggtttaatctattaggtcatcgtagtggtagaaaggtatcgttgaaaacaatcaaaagagctttcctgaacataagcaatgaagatcttttaaaaacgaggagaatagggcaaatattagattatgtgggatatgactcagaaattggatttcgttttgaatttataaaagatataaggaagtatgagctagaggagtatgaattttcgaataatgacgaaaagtatgaaatttcaacacttttaaataagctatattacaatgaattatcgggaatacattgggttaacttagataacttctctttcgataagataaatagttcaacagtcacaagactattacgatttgagaaaactctcaaaaagttaggtgcgatcaatgaagtagatattcttcttaaaaagaatggtcatgctatagatttgatggatgcgagttccggtgagttgtcttttattacatctctgatgtttatttctacaaccattacaaaatgtcccgttattttaattgatgagccagaaaatagtttacaccctaagtggcaaagagaatatattactaagataatggatatcttctattaccatgagcctacgataatatgtgctacacactcaccaattatcgtttccggcgccgagtctagtgaggattcctctcttcacgtttacaagtctgatagtgaaggaattgaaaggttaactattgaatccggaaacctagagcaaatgttatgggaattttttggtgttgcaactcctgaaaataggtttttttcacaacttgtaatgtcgaagttaaatgcattggctgaaaaccgaatttcaattatagaagttgaaaggttcttaggggagctcaaagatgcagtttatgatgggaaacagaaaaatattcttacgactgctctccatctagctaacaaaattgagagtaggaagtaa

SEQ ID NO: 89925 - DNA, 624 bp, Vibrio furnissii
atgcaaccatatgttttgacccgtgaagatgtaaataatattggagctgcaattaaggaaggtggaaatatttggagctccgaacatattgcagattttaaacaaaacttaaaaagtcactatcgaacagcacaaaatgagcaatgtagctactgtaagcgagtaattcgtggcgagtttaaaatggttttggacattgaacatattctgcctaaaggagagagagcgtttaaaaagtttatgtttgaccctaagaatctatgtgtttcatgtaaacgatgtaacatggagattaaaggatctgatacgtcctttattgttgatggaacgtcatttgaggatgagttctacgcatcagataaatatttgtttcttcatcctcattctgataattactgggattctataaattactctgttgctattgaaaatgatattcaactaatacagtacacggtggttaatgattgtcccaaaggtctttatacttacaattactttaaacttgagcagttagaaatcgacattgtggatgaagctcaaggcgttgagacggagagtatatcacctgcaatagatgaagatttagctttggagatccaggagttgtttcaagatccttga

SEQ ID NO: 89926 - DNA, 1629 bp, Escherichia coli
atggaacagaacttaccgagtagaataactaaattaattaaaaaatcggaaagcggcgattttgcttcttcgtatcagctttataaagtatttggctcgaaagagtacggagttgagccagatgaaaaaatgtctgattacttcaaagaattatcagctaaacagttagaaggtggtcaactgagagttgctgatattcatttggaaaactacaaagggtttgagtccctaataatggatttttccatgaaaaaaaactctacaattttagtaggaaataatggctgtgggaagtcgacgattctcgatgcaatccagaaggggttaacacatctatcctcgagattatctactcgctcgcataatggcgatggtatcgaaaaacatgagttaagaaaaggacaaaactatgcatcgatcgctataaattacgactatatgggaatacgttttcctatgatcatagctacaactgaacctggttatgaggatagagtaaaaagtaactatagcggtattaatgagttaggaagcattttcaaaacagcccattcaatcaatccaaatgtttcatttcctttaattgcaatgtatacagttgaaagggctaatgacgtttctactagagatattgagaattcagaagaaattaaagaagctcaaatctgggataaattcaaagcatataataagagcctgacaggaaaggctgatttcaaattattcttcagatggtttaaagaactaatagaaatcgaaaactctgataacgctgatataacagcattaagagcagagattcgtgctaaagaaaaagacttagacaatccattgctaaaagctcttctggcagagaataaaaattctgagactactaaaaaattgttagaagatcatcagaactctctgaaagttttaaaagagaaattaaatagctattattcagtcaatagtaaaacattacacactgttgaagatgcaatgtattctttccttcctggttttagcaaccttaaacttcaaagggcgcctcttgatctgatagtggataagaataatgtttccttaagtgttctgcaattatctcaaggtgaaaaaaccattttagcattaattgcagatattgctcgtagattgacattgttaaaccctaatagtgttaaccctttggacggtactggaattgtattaatcgatgaaatagacctccatttacatccatcatggcagcaaaatattattcctcgtcttgagaaaacgtttaagaatattcaatttatagtcacgactcatagtccacaagtttgtcatactattgatagtcagaatatatggttgttaaagaatggccaaaagtttaaagcaccgaaaggagttagaggagcaatatcttcttgggtactggagaacttgttcgaagttgctcaaaggccgccagaggataagtacacaaaactcttacaggaatataaaaatttagtattttcagaaaaatatgctagtgaagatgcaagaaagctaggtgctactttatcccaacatttcggaccggatgatgaaaccttagttgagttaaagcttgaaattgaaaaaagaatttgggaggatgattttgaaaaggatcaataa

SEQ ID NO: 89927 - DNA, 783 bp, Escherichia coli
atgattttgaaaaggatcaataaaactgctgaagatcaattcttaattaattttaaagctcaaaatccaaatgggacttgggatgaatttaggaatcatgaacaaggtattttatataagaggttaaagcaacatatttgcaatgatcaaatgtacctttgtgcgtattgtgagatagatttagatcgagaaaatgaacatgaaataaaagtagagcatttcaaatctaaatctggttcgctccctggtggaagtaactggcatttagagtggtctaatctcttagctgtatgcctaggaggtacaaatacaggtgatgatttcgaattaccagctaatctaagttgtgattcatataagtcacattatgaagacaaaaataaaatcaatgataaagactggacaggcaaaatcctgttacctttaacgcttccggatgcacacaatttttttactttcgagaaagttacaggtaagttgctacctaatgaatcatactgtaatactattagcatagatggtaaacctgctgcagaaacactaagtattgtaactaaaacaatagaagttctaaatttaaactgcagcaggctaaataatgccagaagaaaactgctgtttcactttaataattgcgcacgtgaaagaaacttgagaaagctccataatctattattacaatggaatcaaggtgagcctaaatttttccaaacgacacgagatataataattcgtgatgatagaatctgccaagggttactgaacggaacgataagatattaa

SEQ ID NO: 89928 - DNA, 1305 bp, Chryseobacterium aquaticum
atgataatcagaaagatagatttaattaattttcgaaacttcgaaaattcaacctttcatttctcaacccagttcaccgttgttattggagagaacgggaaggggaaatcttccatactacaggggctgcgagtagctgctggcacttttcttatggggatcgatgaagcggaacgttatcatatacaaaaggaagatgtaagaagaattgatctggaaaatagatttgttccgcagagaggttgcagcgtgaaggcttatggtactatcaatgatgaaaatattgaatggaaacgttcaaagacagcaagtcggacagattacagaaatgcctatgatctaattaacattgcagaagtgttaaatcatcaagtgaatgttgaacttaatgaaaacattgatctgcctgtgattaatttttttagtacatcacgtttatgggttgaaccgaaacaaacggttaaattaaagaaaaaaggttctaagttgagagatggttatgctcgttgtattgacagtcgaacagataaaacctccccgatggaatggatcaagtctgcttattggaaaaggctaaagggtaaaacagaaagtgttttgttagatgccgtatttgaggctattgatacctgtattcccaattggtcaccacaggagtgggatgaagactctgatgatcttggtggaattttaaaggatgaagatggcaaagaatcattcattcccttgttctatttgagtgatggacttaggacgatggctgctatggtcgctgaaatcgcttaccgctgtgtcgttttaaattcccattatggacgggatgcagtgaaaaagtcaaaaggaattgttttaattgatgaaatagatatgcatctccatcccaagtggcaacagggtgttgttaatgatcttaaaactgcatttccaaatattcagtttattgcaacaacatattctccatttatcgtacaatcacttaaagtggaagaactgatcaatctggatgcagtggtggaagaagatcctgataagatgagtattgaggaagtaacatcccacattatgaaggttgaaccaagaagtcttgattttcaaaaaacttttgataaaacaacttattatcttgagttgttgaatgacattaccttcggtgataatttcggaacaaaaagagaaaagtccggggagcttgataaaatagaaaaggaggctgagatcaatgatccagcagcagcagcatttttaaggatgacgagactggccactttaggtccggatagaaaatctaaaaaagaagaagagtaa

SEQ ID NO: 89929 - DNA, 702 bp, Chryseobacterium aquaticum
atgcgtcctgtagaaagaggtcctgtaccgttggaggctgacggaagcaataaagtttttacatcatatggtaacgcacgtcgtgatctgattgacaggatggggcagtactgtgcctattgcaatcaaaaactaccttcttcacttgcagtggagcatgtacagccaaaaagtttgaatcctactttagagttggagtggagtaattttttattgggctgtacgaattgcaactctactaaaggtgcacaaccagttaatttaccggattatttatggcctgatgttcataatacgcatatggcgtttagctatactcctgacgggaagattgatgtaaatccagcattatcggatgctctaaaagtaaaggcgcaaaagatgcttgatctggttgggcttcaaaactatcctgacaatgcaactgccagcgaccgtagatggcttaaccgtaaggaggcttttgttaaggcaaatctagcattacttttatatcaatccgcatcagcaaaaggagctgcagaagaatgtgaaaaattactaggattctgggcatgtgacaatggtttcttttccatatggatgcaggtatttaatgcttatcccactgtgaaacgacagatcgtcttgtcatttaaaggaaccgcagacacttgttttgatacagatgtcaatccattacaacggactgctgaattatag

SEQ ID NO: 89930 - DNA, 900 bp, Chryseobacterium aquaticum
atctggagtaatagtacaggttggttttcttgtgcttttggaccattcagacgtttcactggtggtgaaaaagaatggatgaaagtgtattactccgatcctagagctgcagcccatttatcagtctttggtgaggatgtagcattaactgaggcattagactggttaatagatttacatatcaaaaatttagaaagtaattcgcttaaaagtgatactgcttttattttggatgccttaaaatcttttctaaatgaaggaggactacttcctcataactcgagattagattctataagcagtgaaggtgttttttttattgatggtaatgggagcaaaattgacgttactcagatgagtgacggataccggtcaattttaagtttaacatttgaattaattagacagcttgtaagatcttatggatctaaaaaagtatttcgaaattttaaccaaaatcaatatttcatcgatatgcctggagtggttttgattgatgaaatagatgcccacttacatcctacttggcaagctaaaattggtcaatggtttacaaaagtatttccaaagatccagtttattgttactacacatagccctctgatatgtagagctgctgaaactggtactatatggcgattgagagcgcctggaactgatcaagaatctgcagaagtattaggaattgatagagaacgattactttttggtgatttgcttgatgcttatggtacagaattatttggtaataacgtaacacagtcggaaagtggtcaagaactttctgccgagttagcaagtttgactttaaaatcttttaaaggaataataaattctgatgagaatttaagactaagcaaactaaaatcaatgatgccaagtaatgatacaactaattga

SEQ ID NO: 89931 - DNA, 813 bp, Chryseobacterium aquaticum
atgatacaactaattgattctggtttagaagattttgcaatcagtaagttggcagattatcagaaattaattgacgataaaccaacttatcctgagcgtgtagttgaggcgaagaaaaaattcaagtcttctaacacaacgaaaaacagagcatttatagaggttaagaagaagcttagtttaatgtgctgtgggcctgatcgatgtaattattgtgaagacagtaaagcagatgaggttgaacatatttacccaaaagattggtatccagaaaaatgttttgtctggatgaattattgttatgcttgtggtacttgtaatggtcctaaaaataacaaatttgctgttttaaagagaatagacggaacagtggtggagctgatcagagataaagattctgatattatagaacctgaagaaggtgaaacggttctgataaatccacgtctcgaaaatccgcttgattacttatttctggatatcagtaatacttttttcttcacgtcaatggatgatgatactgcaagtgaagcaagtatcagagcagagtatacaataaaaattttaggattaaattctagatcatatcttgtaaaggcaagaaagcttgcattttctaatttcgaaagtcgtctttctgattatattactaagagaaatgcaggagcaaatcaaaatcaattaaataatatgattgaaaatatcaaaggtgaacatcatcagacagtatggagtgaaatgaagcgtcagaaagatattatacctgttttgcaaaatttattcatggatgctccagaagcattattatggtag

SEQ ID NO: 89932 - DNA, 1155 bp, Acinetobacter baumannii; identical to SEQ ID NO: 88058

SEQ ID NO: 89933 - DNA, 741 bp, Acinetobacter baumannii; identical to SEQ ID NO: 88059

SEQ ID NO: 89934 - DNA, 1545 bp, Acinetobacter baumannii; identical to SEQ ID NO: 87768

SEQ ID NO: 89935 - DNA, 642 bp, Acinetobacter baumannii; identical to SEQ ID NO: 87761

SEQ ID NO: 89936 - DNA, 1227 bp, Pseudomonas sp. Leaf15
atggcgctgggtgttcagaaaaaaattgagggcaagcgctttttgtatctcgggcaaagagcaaccaatggcatggcgggcattagccaaagtcagcgtacgctgatggccgctctgtttttaaattctgatccgagcgggaatggaaagcacctgttcgagagtgttttcaatagtattgggtttagagcggaattaggtatttctttaaggttggggaaaaccttattatcgcattataaaacctggctgagtgctagggtgcatgttcagcacatggcgaaagatgtgattgaggactatgccaaaaagatcgtgtcggactatcttgagagtgcgcccatcgaagagcatgcgccaaggataagggcagtattaatgcgtattgcccattttgattttcggattaatggtattttcaagttgttaaggtggtttaacagcgaaagtgagcgcccagcgttacggtttgaagacggtgttattggctttgtaacgaacccttggcacgactgggggctggatgagttagaaacgtttatacgtatgggtttgatcgaaattgataaggttacgttcttaaaatgtaatgttagttccgactcgtcatcccccagcaatacggtcactggtgacgacattcaattgtccggtgaagatttgagctccggacagtggggatggattgcggggtttgcagggttgtgtgcccacatcgataaaaacagccttgtgctggtggatgaaccagaaaacagcctgcatccgatatggcagcagaagtatgttccagttttaaatagtattcttcgcgagttcccgggttcgcaggctatcgtggtgacacattcacctatgattgcgtcgggtgtcgacccgcaatggggtggggttgaagccctgattgatcatggcgtcaatgagaaaggtcagcaggtagtcaggtcggaaccggccggcagtacattcgggtggagagcttcggatgtgtacgaggaggcttttgggttgacgtcttcgcgtgcgccttcgtttacgcgcatggccgacattgcgctcgcgctgattcggagcaggaaaattatcggaaatgatgagtatgacgtctttaaacgagaacttactctggatttaaattcgttaccgcttgcagacccgctcagaaatgttctggcaagtatcatcaaagaccttgagtcgcgttttatggctcgggagaataattga

SEQ ID NO: 89937 - DNA, 870 bp, Pseudomonas sp. Leaf15
atgtttgaaacgatttcgcccgacgacttggacgaggcactgctcaaggcggtgcgaaggcaccagggaaaggcgtggtcgtcaaacgccgatgttgtaagttttcgcacgcgtttgctggaattacaaaacttccgttgtgcttattgtcagggcttgattgatcttgatgaagtcggtcatcgagagcttgatcatatattccccaagtctgcaaccgaaaactgctctgaggtcaaagggcaaagcaatgaatttgaggagcggcaacacacgtttgggtatccgcagtttacctatgagcctttgaatattattgtggcgtgcaagatttgtaactcgtacaaaaaaaactttgatccgttactcaatcgaactgtccagttggtgggcgatgactatcccgcagccaattctatattgtggttttatccttatgtgcatcactactcacagcatatcgagcgcagtgataactggacctacactcagctgagtacccagggagaagtcgtcatcaaggtctgtaagctcgatcaggcaagtgtgcttgcatcgcgtttttcggcgcgggcccttataagggcgaagcagtctgagaaccttagaagcgcggcgatggtgatggctgctgatatcaatgatgggctgatcagccgcaatcatgcgattgacgcgctggtactggctctggaggtgaaccaggaagtcgcggtcgagattgtgcagttgtggctggattatgtaaccggcggcagtgttgacgcgattgcaaagtttgaagagttgctgatgtcggtggtgggcgaagagtcattcgacatcgatcgagcgcaggcgtcgatcgagaacagtttagaggccttgtaa

SEQ ID NO: 89938 - DNA, 1764 bp, Chryseobacterium sp. Leaf201
atgttggatctcgtagaagtacacgaagaattatatttatatctgcttgaacaaaggaaaagaaattctgaactaaaatttacttttagaaaaagtaatcatgcaaatagattggaagaaggatattggttttacggaaatgaaaactatttagcaatatcattttgggaagggatggattggaaaaatagaactccgaatatatgtttcataattgatagcaaggggaaatgtacgttggaaattaatgtttcagattctattcttaaaaaagaatttattgaaagatattttttagaaagaacactaaatttagaaaaaattggtagaaaatatgtcatcacatatgatggtggtttttctgaatatagtaatcgcctatatgatatgaacgattacaagtctgtttttgatttttttctacacacagataaagaaaatattgatgacattattaggagtaattctgatttttttgcaacgatggaatcaagtgaaaatgaaatttcatttataagttcggaagaatttctaaaaagacataataaaattaggcagtatagaaaacgcaagcaagagattgataatgaagatgaatttcttatcaaagaggataagccttggaaattattttcagttaatataagagattatggattaataaatgacttatcgattgaaataaaaaacaaaaaaaatcagtggatatttttaacaggtgaaaatggatctggtaaaacgaaccttttacgagcaatggcaacaacattgggaaatagaatgttgtcaaaaaatgaacttgaagaaaatcctaattttaaagttattgcgaacttcatttataaaaataaattacaagaatacaatagaattggaaatggtgaagtaaaaggtaaaagaaaaccatacattcaaggattggcaatgtatggtccatataggcttgacatggtggtagataaaatgaataaggctaaatttaaaaaagaattaaataaagaggagtctttcaaatctttatttaaggtaggaactccactattaagtattgataaacaatttgaattttggaggtctggatcaaagcgggaaaagaatctttttcaaaaaagagaatattatattaagtctttaatcattgatgttgttagtaatttagttgatatcagatttaccattgaaaataataaaaaaattacaaagtacatttttactaatgatcagaatcaagaatattctttagtctgggaaaaattatccagtggtacaaaaagtactattgcaatgcttggtgatattctgatccgtcttttcaatcaacaatccgatattcttgatccggcagaattacgaggaattgttattatagatgaaattgatgtacaccttcatcctaaagcacaaaaagatctagtagtaaacctctcaagaacatttcctaatattcaatttattgtttcttcccatagtccaataccttttattggtgcacccgaagagagcgtatttattacggttgaaagagatcagaataacaatattaaagcgacaatattagatatagatatttcaaatttattacctaacacaattttaagttcacctatttttggcttcgattccataattaatgtacaacatcatccaaatgagaatttagtaacagagaacaattatcaagaagccgcattttataaaattttgaatagaaaaataacggaacgtacaatacaattaggaatagatgatgattcggataactaa

SEQ ID NO: 89939 - DNA, 912 bp, Chryseobacterium sp. Leaf201
atgatgattcggataactaaaaaagattacaatgatgttcccgaacctttgacaagaccaggaacatatagacaaattgagcgtgcagttgcagcaacggatggtaataagtacaatactaattattataaagatgaaattgtagttaataagcttaaggcattttctgtgcataaagataatcttgatcagcatgataaaccaaaatgctattattgtgaatcatatgttgatcatgtagcaactttacaggttgaacattttagaccaaaggctaaagtcgatgaaattgataataatagtttatcccattcgggatattattggttgggtttggagtggagtaaccttttgttatcttgtccaagttgtaatggtaaaaatgcaaaaggcaacagatttcctctacttgatttcaacaacagaaccagagcaataaacccaataagaaatccgccactttcatttgacagagcacattgtattgctaatcaatctcctttattagatgaagaaccactattaataaatccggagtatgaggatccaactccttatttaacttttaataacgtaggacaaatatatggtgttggtgaaaaaggagaaaagacagtggagatcttgaaattgtgtagagattctttgctagcagcccgtcagacaaaattaaatgatattattaagaatatcgacctagcctgcgcagcaagagaaatgagtagaattaattatgatggttttaaagtttggctagaagcagagtgtactaaagttttagaattagataatgttacaaatgagtactgtctttggggtagatatattatcgcaaattttgaaagttgtgttgtttctaggatacccatatataaagatgaattacgagatgctttccaacaagttaaataa

SEQ ID NO: 89940 - DNA, 1371 bp, Sphingobium sp. Leaf26
atgagcgtgccaatcgatcaaccagactcgctccatttccttgctttggagctggagaacgtacgggctttcgcgggaaggcagcgactcgacttggcggacgagtccggcaagcccaaccgctggtgtctgatcttgggcgagaacggcgttggcaagacgacgctactccaggcgcttgcggtgctacgcccggttccagcgatggcgtcgggtcatgggggtgaaggtacagacgacggagtaccgacaatgtcggagccagaactcgccggcaggcagaacgccgaggtggagcgcttcgtgcgacgttacgcttccggcgcagccatggccgccacactccaagaccctgctggcaagagtttcgccatgtctgtacggatgagcattgaggctggggtcttaaaggatttttctttcccaaaggcgcgttacgcgcttcactccgaaggccccctcgtgctcagctacggagcggcgcggcacatcggccacggaaacaaaggaaccgtgtcggaacgcgagatgtcttcagcactcttcgccgatgccgtagatctctatgacgcggaggagttgctcgaggagttggagcacgcggccgcgaagggtccgagtgagctccgcacgcgcgatagggcaaggctccgggcggtctacaaggcgatcgccagccttctcgaaggcttaaagccgagcgacatcgagttccggggacctcgcgtgccgggtcgtacgcctgcgcagtgcggagtgcatgtcaaaacaccgtcgggtgtcgtgccgctcgcggacttgagccttggataccaagcgatgttcgcctggacggtcgacttggcctaccgcctgctggaggcctaccctgccagcacggcccccatgaaggaggcggccatcgtgcttgtggatgagatcgatctccatcttcatcccagatggcagcgggatctcaggcgtcacatgctccagcacttccccaagattcagttcattgccacaacgcatagcccgataacggctcaggacgcgattgcggagggggggacggtagcagtggttcgctggtgtgatggtgccgccgaggtactcaacaatccccttccgcgggagcagtggcggatcgatcagctggttacgagcgaactcttcggcttcagtgcccctcgtcctcgcggtgcggaggcaaagctcgaacgacgggtggaaatcatccgcaagaagcgcatgacaagacgtgaaaaggaggagctcgcggaacttgacgagttcgtggctggactgccgacggagcgcagcgcgggcgaagcgaatttcgagcgccttatgatggattatgcccgcgacttccccgggggggccgcttga

SEQ ID NO: 89941 - DNA, 771 bp, Sphingobium sp. Leaf26
ttgatccgggtagagaagggagcgccgccgcgcaatctggcgaagcgtgcttctgccgggcatgcgatacacgcggcgcagtatctggccgacggggccgactatcggagcggaaagaagtcgttcaagcctgacagcactatatacggcgcgaaggcagtgaagacgaagttgaggcaagcacatagcggcaagtgtgtgtattgcgaagagaagttggacaagagaaccacacatggtcatgtcgaacatttcagacccatcgccttctcaaaggcgagcgccgggacggtggagattcggcccggatactactggctagcctacgcatgggagaacttcctgtggagctgccactattgtaactcgactcggaagggtaatctcttcccgctagcggacgagatggtgcgggcgcgccttccaagtgacgatcttgcgctggaggaaccaatgctggttaagcccgacaaggaggatccgtccctccatatcggttggtataaagaggtaccgatgggcctcaccgagagaggtcgcatcactatcgaggtgctcggtctggatcttccggtgcacgagactcgactcagccactatagacgcctggagcaggcgcatgcgatcgtgtccgatctgacgggtagccctgatgcgaacgcccataggcatgtcgtgagctttcgggcgttcctcctaggctgctgcacggcggaccaaccgttcagcgcgatggcgacggccttcctccgagacaacccgctgccctga

SEQ ID NO: 89942 - DNA, 660 bp, Sphingobium sp. Leaf26
atgcatgctctgctgacgttcgagcgcttcctgcgtaaggatcgtgtccttcgcggcatcgatattcatctcgaacgccgcttcgacgaccgcgaaatcgaactgcatcaggcaagctcgggtgaattgtcgctgatgtcgtcgatgatattcctggttgccagcatcagggataatgctgtcgttatcatcgacgagccggaaaacagcctgcatcccaactggcagcgagaatatatcgataccgtcctcacgacattgcgatatcatgatgttgtcatcgtcgttgctacccatgcgccgcttatcgtcaccggcgcaatcgcccagaattcgggaataatttcggtattccaggttgaagacgggcgccccaaatatctcaagctcgacgatgcggccggcggtggcagcatcgaggaaatgctctggaaagccttcgatgtcgtcacgccagccagccatttcgtgagcgaggaactggtgggagccgtctcgaagttcgaggcgggcaatgcgaccaaggcagacgtccttgatctcatcgatcggatgaagagcgccagcttcgaccgcaagcaagaagcttttctggaggctgtttcgcagcttgtggacgatctcgacaagaagctttcagctgcggctggcatatcctga

SEQ ID NO: 89943 - DNA, 648 bp, Sphingobium sp. Leaf26
atgaccgacgcctatttgccacccttaagcgattttgcgttcagcgccgaagaggaagctgcaatcgtagctgccatgctagaggatagcccttgggacaaggtgcctgcagcccataaggacgccatcaagagcgccaagcagcgcattcagacctatcatctcacacgacataaccaccagtgctgctactgccgcacgatcctgcacggtggcggctatttcatgatcgaccgggagcatgtccttcccaagagcatatatagacccttcacctttgcgccgtggaacctctcggtgtcgtgcaagcgctgcaacatgcagttcaagaaggactgcgtggcgttcgtcatcgatgcagacggcgctgggcctgacgataccggcgccaactatcgcctcgttcaccccaatttcgacgcttgggatcaccacctgctcagaaccgcggttcaggcgggtgggaatgttctggtgaagttcaccgttctgaccggcagcgccaagggcgcctatcatcacgaatatttcgcgttgaaagagcttgagatagacactttcgaccaagcgcagggcatggaggcgatcgctgggtcgatcgccgatcagattcgcaaactggcgcgacagcatggacaggcaaattga

SEQ ID NO: 89944 - DNA, 1251 bp, Pseudorhodoferax sp. Leaf265
atgatcgttacgcgcctcaagctcgcgaacgtgcgcgccgtcgaagcggccgagttctcgttcaagccgggcttcaacctgatcatcggcgtcaatggcgtgggtaagacatccgcgctcgagtcgcttgcggtgagcctcgcggccatctcccggcacatcaacagcctgaaggggccgctgcacggcttcaccagctccgatatccgcgcgcgcaccgatgcgctcaccgtcgagtcggaggtgagcattgccgaccagcgttactcctatgtaatccatcagccgcgcgaggaatccgtggcgcaagccggcaaagaaggaatgccgcgggagcagactgtcgcgacaccggcgaaatcggccttcgttggagacaagccacctgccgcagacggcaagaaggtcttgcgcccgctcgccgtgctgttctcaacccggcgcgcggtcccctcagatcgagcgccgacccagtcggccgcgaaggggggccatgccgccgcgttcgccgaggctttctcggctagggagctgcgccttggcgagttcgcggcgtggatgcgcgcgcaggcggtgctcgctgcggagatgccgagctcagcccgcgtgctgggcgcgttcgagaaagccgtgcagcggtttctccccggctacgcgaacctgcgagtcagcgacgaggcgacgccgcgcctcctcatcgagcggcggggcgtcgagatccccgtgcgtcagctctcggacggcgaacgtggctcgctcgcgctcgtcctcgatctcacgcgtcgccttgcgcaggtcaaccccggccttgacgatcccgccgccaagggaccaggcgtcgtgctcatcgacgagatcgacctacaccttcatccgcagtggcagcgggagatcgtgcgcaagctgcccgacgctttccccaggcttcagttcatcgcgacgacccactcgccgcaggtgattggtgaggtcgagcccgaccgcatacaagtcatgggacgtggtcccgtgttctcgccgacgcactcattcggcgtggactcgagccgcgtgctcgaggagatcatggacgcgcccccgcgctcgcccgaggtgcaggagctgctcgacaggctatcgaggagcgtcgcagacaacaagctggaagaggcatccaccctggtcggccacctcgcgaccaaactcggagaggacgacgctgaggtcgttcacgctcgcacgctccttgattttctcggaggcgatgcatga

SEQ ID NO: 89945 - DNA, 654 bp, Pseudorhodoferax sp. Leaf265
atgagggcgatcacgaaaggccaggagccgcgcagtctcgtcgagcaccgcgcgaatgcccactgcaactacgcgaactacgctgacaaggacggcctgcgcgccgcgctcgtccgcgaccagcgtggactgtgctgttactgcatgacccgggtcgaggcgaccggcacgggcatgaaaatcgagcattggcgttgccaagcccacaacgctgacctcgagctgacatactcgaacctcctcgcggcttgcctgggcgggcacggccagccggaggcgctccagcactgcgacacccgcaaaggcgagcaggacttgaagttcagtccagccaacggtgcgcaccgcatcgaacagcgcatccgctttgagatggatgggaccatcgcgtcgagtgacaccgagttcgacgctcagctcaacaacgtcctaaacctgaacctgccaatgctcaagaaccgacggaagggtgtcctcacggccatcctcgactggtggaagagcgaaaagacgcggctcagggggccgctgccgaccgagcaactcgcacgcgagcgcgctcgacgcgcgggtgacggagccggccatcttatgcccttcgatcccgtggtcatctggtggctcgaccagcgcctcgctcggagctcgacatga

SEQ ID NO: 89946 - DNA, 1365 bp, Pseudorhodoferax sp. Leaf274
atgctcaaggaactgcatcttgtgaaggtggggccgtgcgaggaaatgaagatcgtcttcaaacgccggttgaacctgctgacgggcgacaacggcctgggcaagagttttctgctcgacatcgcctggtgggcgatgacccggcattggccgcgcacgctgaacaaggcgctggtcagcggttacgtggcccggccggactcgtcgaaggaaggcagcatcgagttcgtcgtcgaaggcatgtccaacaagggcgtgcgctacaagagccagttctcggcgcgcgatgaggagtggaccggcaaggtcggccggccctacaacccggggctggtgctgtatgccatggcagacggcggctttgccgtgtgggatccggcgcgcaactactggaagacggtcggcggtcaggatgtgccgggccgcgtgcctgcgtatgtcttcagcgcacgcgatgtgtgggatgggctcaaggacgaggggggcgggctgccgtcttgcaacggcttgctcagtgactgggctggctggcagaaggaaggcggtgcggcgttccgccgactgtgcctggtgctggccaggctgtccgaatccgagaccgagccgctggtaccagggcccctgacgcgcgtgagcaaggacgatgcgcgcgacattccgacgctacagacggcctatggcaaggcagtgccggtgttgcatgcgtcgtccggcgtgcgtcgcatcatcgctcttgcctatctgctggtctggagctggcaggaacaccaggctgccagtgcgttgaatgaggaagacacggcgccgcaggtggtgtttctgatcgatgagatcgaagcccacctgcacccgcgctggcagcgcatgatcgtgtcggcgctgttggacgtcacgcgcgaactggcaggcgaggcgcaggtgcaactgatcgttgcaacccactcgccgatggtcatggcgtcggccgagccgcgcttcgaatccaaggtggatgcatggttcgatctggatctggtggccgccggcgcatcgcgtccggctggcgtgcaattggtgcagcggccgttcgagcggctcggtgacgtatcgcgctggctggtgagccaggcgttcgacctgggcagcgcccgctcgcgcgaggccgaagtgctcattgcgcaggccgaggcgctggcgcaggaccctggcgcaacggcgtccgatggcgagaagctcacacgcgaactggagaacgtgctgggcgacatcgacccgttctggtcgcgttggcgcatcgccggcgcgcagcggggctggtgggatctgcccagccccttcgcgactacggccccggtgcgccgcaaccgcaagggcaaggcgccatga

SEQ ID NO: 89947 - DNA, 630 bp, Pseudorhodoferax sp. Leaf274
ttggggccacccgcgggattcgccacccgcgtggtcaagccagccaagcgttgggcggacaagaacaagctggtctggtcggcgccgccgcccgccgggtggtcaggaaggctgaaggactattggcgcaactgtctggatgatctgcacgatggctacggcgccacctgtgcgtacttggccgtctacacccaccgctcgctgcaggacacctccgtcgaccatttcgagccaaagtcgaaggcgccgctgtgcaagtcctacgactggagcaactttcgcctggcctgccgtccgatgaacaccaacaaggacgaattccaggacgtactggaccccttcctgctgccccctgagttgttcatcctgaatttgttgagtgggcgggtgcagatcaatcaccgcgtcgcgcccgtgggcacgccgctgcacaagcaggcgcagcacaccatcggccgtgaccggctgaagctcaatgccgggccgttccgggacctgcggctgcgcttcatcgacgagtattttgccaaccgccagcgtcccggcccccgggcgctgcaggaggcgcgggacctgctgcgcctgcaatcgcccttcatctggcatgaggtgacccggcagggcctgtag

SEQ ID NO: 89948 - DNA, 2115 bp, Pedobacter sp. Leaf41
atgattaggatagaaaaacaaaatgctcctaaatatttaagctcatcgatcgttgatttagctattgagaaaatggaggagttttttgcctctaaaaacagaagccaaaaaagatatgattggccttttaacaaagaaatagataatgagcttaaaaaaaatttacatgttgtatttcatggaaaatgtggttactgtgaaaccaaaattgaatcccctgaaataggaactgtagataggtataggcccaataatggagtaagggataaaaatgaatatcaccaagatttgtattggtggttaacgtttgactgggaaaatcttgtttattgctgtaaagaatgtaatcaatataaagcaagctatttcccaataaaaggcataagagcaacagacgaaaaatcagatttagcgactgaaaaaagaatgcttctgaatccctaccaagatattccaaatcagcattttctttataacgtgtctggcgaaattatcccaataactgaaaacggtctacaaacaatcgaactacttcgactaaacagatctgatttaatccgtttaaggctcgaagcaaaaagagaaactgaacatattatatataacatactagaagaagttaatgaaaataacagaaccttattagaggaacttaaaagaatttattatgaagagagtccagatgttggctttagctcctataaaaaatgggttatcgaaaatgaagctgatacagattcacgtgttgctaggcttttagattttgaaatttataatgagcctggatttagagatgttgacgaagccaaaaggttcataagtggaaagttgtataaaaacattattcgtaatgactattttcctattgaatatatccaaataagaaattttaaatcgatagacgagttaagagttgattttaaagaagatgattctgaaaaaaaatcttggctaattctattaggagaaaatggcgtaggtaaaagctctattcttcaagcgatttctattggcttgaaagtagataagaaagttattaatgaagacataattcgttctttaatcaagaaaaggaaacaaactgctgaaattataattaaagagagaaatagcaaaaatatcatctatacgaagctaacacgtaaaactgggactattgagcaggatggtgattttaactcctatttaatcggttacggctcacttaggctttcaatagaggaaaccgaaatcatttcagaaaaagacacctcaaaagttagttatgaaaatctatttagacctactaaagccttaaataatgtaaccaaatggcttaaatctatacacaaaaacgatattacttattttaatagcatcgcttattccataaaacaattattacccgatgataaatcagataccgaacttgctataaagaatggtgaaatagttcttggtgattccgaaaagttattttcagaattaagcgatggttacaaaagcaccatcactttggcaatcgacattatgatgaagctttctgatgtacaatctgatatggaaaaaatggcgggcattgtattaattgatgaactaggaaatcaattgcaccctagatggcaaatgaagattgtaagccagttgagacatgtgtttcccaatattaactttatcatttctacacaccatccactttgtttaaggggtgcagaaaaaaaagaaattttgttgcttaggaatttagatgatcaagttgtaattactacggagttacccgaccctgcgtccttaagagttgaccaaatcttagcttctgaattttttggtttgaatagtcttattgatcccgagatagaagctaagtttaatagatactacacacttttggctaaaaacaaaggcattagtctaaatgaaatcagagaaattgatgaattgaaagactttcttaggaataaaaaacaattaggagcttcgttgagagaagaattaatgtacacagtcatagatagattattagcagaaaaggtagtattcaataaaaacacttttagccgagatagtttaaaagaggaagctgtgaaaagagtaaaagaagtatggaaaaatctaaatcttaatacagatgattaa

SEQ ID NO: 89949 - DNA, 957 bp, Pedobacter sp. Leaf41
atgattaatgttaaaaggtcagattgcccagacatacttaaaataagttcaactcctcaaagttctggtgaatgggaaacaagagacgcaatcgaatattatcgggatattgctaatcatccagaaaaatacaaaaaaactggagcaaatggagcaagaattcaacaagcgtattcaatttattcagataaaagtgtaaggaggatacttttaaatatgtttaatggaaagtgcgcttattgtgaaagtaaaataacagcaatttataatggagatatagagcatttcaggcccaagggaaaaattcagaatgccaatccttccagaccaggttatttttggctagcttctgaatgggaaaatttattgttcgcgtgtcctttctgtaatcaaacaaatacccatgaattcagacatggaaataatattgaagaagcagttttcggcaaacttgatcagtttccattagaaacagaaatacatcgtttaaaatatactcatggaattatatattttacagatagcttaacatacaaccaagcctttgatttagaagaatctgtaaggctcttgcttaatccttgcaaggatgataatattgaaaaatatttcaaatttaatgatgatggtgctattatttcaaatgacggactgaccacttttgagggaaagaaagcgcaaatatcaatcctcacatacgcattacacaggcttcctcttacaatagctcgtgaagagaaaattattcaaataaaggctcaaatccggagagtcgaaatcgctgtaataaattataataaatattttgataaatcagatgaagagaaggtttggtttgaaggaataatgagggatgaaatggcgatattgaaaaaatttaaagacgctgatcaagaatactctggcttggctaggtatattataaataaatactttgctcacccaaatttatcatga

SEQ ID NO: 89950 - DNA, 1656 bp, Erwinia sp. Leaf53
atgacaaaacagatcgagcgtaatgctaggggggggaacctgctctcagcattcgaactgtttcggcaagcaagcaacgacagtatgccagagcatcacgataacgccgaagagtggttcgaactttgctggaaatatctacaaaatgggggggatactcgggatggggtatatcgtcctgaaaataatttttgcctgcgctcaatgatattaacggattttaggcgtttctcacacctgcctgtaagatttgaagaagatttgacaatcattatcggcagcaacggacagggcaagtccagtattctctctgcgattgctaaaacactgagctggtttacagcaagtattcttaaagaagatggcagtgggcagagactgaatgaattctcggacatcaggaacggttctgaaaatcaatttaccgacatcagtagtcatttttcttttggtaagggtctgaaaaacattcagctcaggctatcaagatctgtgccaggtgcggcccagaaacgagacagtgaaatcaaatcagcaaaagaaatcgcagatatctggcgggtggtcaataacaaattcaccattaatttacctgtatttgcattttatggtgtagagagatcatattcctttactaaaagcagaacgaaatttgagaaacgggaagacaggtttgacgcatatactcacgcactgaccggtgctggcaggttcgatcatttttctgaatggtttatctctctgcataagataagtggagcacagaaaattgcagatctccaccagttacaggagcaggttagttatctagagaaagcggtaattacggggatcagcgcagtaaaaccgttgctacaggaggcgcaagaaaagcttaaagctgcgcttactgaatatgaagcaaagggttcaaatgacacgctgtcagcggaaataaagatgggcatcgtatccgatgccatcacttctatagtacccagtattagcaggatttgggtagatacttcgacaggttcggatatcatcagggtcatcaatgatcagcttaatgttactgtagaccagctatccgatggtcagagggtattcctcggcctgatagcggacctgacacgacgcattatcatgctaaatccattactgagcaatccgttggcaggccaggggattgttctgatagatgaaattgagctgcatcttcatcctaaatggcagcaggaagtcattcccaacttaagatctgtgttccccaacatccagtttattatatccacacacagccctattgttttatcaacagcggacagacgttgcgtacgagaatttacaacaaatctggctggtgaagaccaaattcttgacatgccttctattcagacaaaaggtagtgaaaattcagaaattcttgaacaggttatgaatgtattttcatctccacaaaacatcgctgaaacacatttactgagtgaatttgaagcatcgttaactgctgatgaagataacctaagccaggattctcaggatctttataataaaatccagtctcattttggtctgcaaagctcccagaaacataaggcagatagtttgatgcgcctgaataaattaaaaaataaaatcaggagatcaaaatctgaggggaaaaatcaaggatga

SEQ ID NO: 89951 - DNA, 636 bp, Erwinia sp. Leaf53
atgaaagcgctagttcgccccttgcccggaccacagcatctcaatgacttcactggagggttacatcattggaactgtgctaccaaatctgaaatatggccatttttagaagaaatgcaggggagtttctgtgcctattgcgaatgctttcttgacaaaaggcatattgagcacttcagaactcgaaattcgcatcctgatcttacttttgactggagtaatttatttggttcatgttgcggtaagttacgttgtgggacgttcaaagaaaacggagcaggaacctataatccagatcacatcattaagccagacatcgataaccctgatgactatcttttattccttacaacagggaaagtgatacccgctaaaggtcttcatggtcagaaactgataaaagcacaagagacaatccgtgttttcaacctcaatggtgactctgctttgtttggccgtagaagtactgcgctgaaattagagttaaaaaatattctggcgttgaatgacgaggagaatcatattcccgagacggaatttctggaactactgcagtcagaaattgaagatgttgagcagagagaatttagcaccgcattgcgacacggctggcgttttaatgatgcttatgaataa

SEQ ID NO: 89952 - DNA, 1530 bp, Acidovorax sp. Leaf78
atggcctatgcaggagcgatgcggcaagtggcgttccggtccagcaagcgtctagccaaggagattggggacatgtcttggctcggagctggctggtatggatcgctggcggctgcgcagcgaaccgaccatgccagtgatgagcccgagaccatccgtgaacatgtcgaggagtaccggcttgacagcgccgaggggcgtcggcggtacaagcttcgacgccgcctcttgcaatcgatcgagatcacgaacctccggggaattagaagtctatctctctcggtgagttctggaaccgatagcgtcactccgtggctgactctcctcggtgagaacggggtcgggaaaagcacggtgctccaagcgacggcaattgctcttgccggtccacgctactttcaaaggctgcatgaggcgaagctcatagacgtcaaagctctcattcggcatcgatgcctgactggggaagtctcggtccgaatgtcaggcttcgacgcgccctatcgagtgcggttcaccaagacgcgtgttgagttcttcggtccgctcggtgagcgctcccacctctcaatcagttcacgcgcggcaaacattgttggcaaggtctatgaagcgccaacggttgttttgggctatggggcgattcgactacctgcacggactgtgggcagcgggacatatggaacgtcctatgcccgtattgagaacctattcagctatgaggccacccttgtggacccgagacgaagtctccagagaatgtctaagcagcggttcgagcacgctgccaaggtgatcagagagcttctttctttgcgacgaggggcatctctgcttgtgaagaaggaggatgtggtcattcgggagcatggcactgatacctccttggcgcacctgagcgatgggtaccaaggggtgattagcttagttgtggatgtgctcgaagcgatctacaaagtatggccgaatgtggcggatgccgaaggagtcgtgctgattgacgagatcggcacccatctacatccgggctggaagatgcgaatcgttgaaggcttgaagtcgggattgccgggaattcagttcatcacttcgactcatgatccgctttgcttgcgtggtctaaacgatggtgaagtggcggtgcttcgcagagatgcagaaggtcagattgccgccctgaggaaactcccgtcgcccgccggatatcgtgttgaccaattgctgacgtccgacttcttcggcctacgttcaaccgttgatcctctgatggagcaagctttcgagcggtactacgaattgcttgctctggcaaagcccaatgcgagagaacgggttgaactcgcagaggttaaggcgactctagatgccaatcgccatttgggggaaacgccgcgcgatcggatgatgtatgcagcgattgatcgtctgatcgctttggaagaagctaactcgcctatcgacagtccccaacttacgaatcaggcaatcgcggagatctcgcaacgctggaatctccagttccagagatga

SEQ ID NO: 89953 - DNA, 1020 bp, Acidovorax sp. Leaf78
atgattcacatcaagcggacttccagcacggcaaaggtgctgacggacaagcgtcttaaatcgaccaggcggcctggccttacccgagcagatttagagtgcgagaaggccatcgagtactacacggtcacactccctgctgagcaggctaaagtgaaggcgaagaatgcgcaagctgcattaaatgggggcgcacttctcgacagcccgaagataaaattcccgttctctgtttacggcgacgaacatgtcgtgaaggagttgatgacgctctttcacaagaaatgtgcatactgtgagagtcattttcgtcatgtgaccccagcggacatagagcattttcgcccgaagggtgcagtgatcatcaatggcagcctagaacaccctgggtactactggttgggtgcggattgggacaatctattcctgtcctgccctaggtgcaatcgcaaggatcaacttgatgtgcccggcgtccaatcgacggtttcagggggcaagggaaatcattttccgttgttggatgagtcgaagcgcgttcgaaagcacggcctatcgctcgcggacgaggaggctgtacggcttttgctaaatccatgtatcgatgacccggaggcggtgctgcggtacgaggatgatggctcgatcttgccgaagcgccgcctccgtaaacttaatcggaggcgtgccgatacttcgatctcggtttacggtctatggcagggagagctgcgagacaagcgcaaagagctacttgatcagctgaagttggagctcatcacgatcgagcgcttcttgcgaatgattgatcgaatgaaatctgccggtgaatctcctgcagacattcagacagagcaagatgtccttgatatgcacatgggagtactcaagggaatgttcgagcctggagcggagtatctcgggatgcttcgatatcaactcagacaagaacttgagccaggaagagctggcgaccggctggtgcgcgtagggttggacctgacaaagttgcttgtttaa

SEQ ID NO: 89954 - DNA, 1455 bp, Acinetobacter sp. Leaf130
atgaaatatatccaagaaattagcgcagagctagaatttatacaacatcctatcaacattaatttaaatgggcggaatttaatattaactggaaaaaatggagtaggtaaaactagattcttaaatcaattaaacaatacaatattaaataaacttattcatgaaatcccccatatctccgaacatcattacacgcaaaaagttaatattataaatattttaaaattagaattatctcatttaattaatgatattgaatatacaaactatacgaataataaattagatcacttaaatctcctaatctcactagagcaattattaggacaaacagattgttataatcctcatgaaacaacaatatttataaagaaagcgacagaattaaaggatataattttaaaatataaagatttctcacaaaagaaagatcctaatcttttatatacacattcagaaatatatcatattgatcatctttttaatgaaataagctctaattataatcaaggaaatattaatttagttgtgactggtatagggaacttaaaccagagtattcaagcctcaaaggttacatttaacttctttcaggcacacagacaatctcaaattacatctactacaaatactgctgacttaaatcaatatattaatacagcaagacatgaatactcatcaaaattaggtcagcatttagaacaatatttattaaatattagaattgagaaatctttagcactttcagaagaaaatgaccaaaaacatgctgaacaaattgatgcttggtttaaaaaatttgatgaagatctaaaatttttatttgaagatgaatctacagagttaaaatttgaatacaaagaaaggaagtttagtcttaaacaatatcatcgtgagtttactttccaatcattatcatctggattcacagcaatatttgatatttacagtgatttattaatgaggtctagacttttaaatattttgcctaatgaactaaatggtgtagttctaattgatgaaatagatgcccacttacatatctctcttcaaaagaagattctcccatttttaacaaaatcctttcctgaagttcaatttattgtaagtacacactctccttttgtaattacctctacaaataatgatactgttgtttatgacatatcaactggtgagttttttgaagaagatttaagtcgttattcttatgaatctgtaatcaaaggtttgttccatgtaaacccgatgagttctgaaacaaaagaatctattgacaccctaaaacatcttttaaatgaaaaaccaactaagtatgacaatataagatctactgtaaaagacctaattgaattagaaagaaatgatctattagataaaaagttaaaaaatctttatttacaagccatcaatctacttgctgatcataatcagttggaggatttagatgtttaa

SEQ ID NO: 89955 - DNA, 690 bp, Acinetobacter sp. Leaf130
atgtttaaagtatccaaatctcctaggccgatggactggactactaaagactacaaagatcctgctgttgttagactattaaaaaaagatttttatgcgaaatgttatatctgtgaacaaaagcattttccaaacctgaatgtcgaacactttattccacatttagatgatgaaacacttaagcttgattggagtaacctctattacgcttgttctcgttgtaattcgattaaaaacaagtattacgacaacatgcttgattgttgcaatcaagatcatttagttgaagaatggattaaagtctattacagaatgcctgatgaagacattgaggtagttaatacttgtcctagtaatcatacatatcatgagaaagctgagacttctaaagaccttattactagatgttttaataacgctaatagcggtatccaagaagtaagtaaagaagacctcagagaaaaaataatcgaagttcacagtgaatttttagacttaagacgagaattttttaaaaatttagataattggcttgaagaagaaaaaattattgaagctaaaaaaataagacaccgtttgaagtcgcattatccattttctgcaatcttacgtggacatatggaaaaagattcaaaatggagacgtgtactagaagaaattgaaaaactcgaacttcagcaatccacttaa

SEQ ID NO: 89956 - DNA, 1233 bp, Pseudomonas sp. Leaf129
atgctcgactttctctcctttcaaggcgtcggcccctctgcagctctgggcccgatcggactggcgccacggctgaacttcatcaccggcgacaacggtctgggcaagagcttcgtgctcgatacggcatggtgggtgctgacccgcacctgggccgcaggcaagccgatcaaggcgcgcgagtcgtcggcgctgccggtcatcgattatcgtttcaccggcgcagaccgcagcgccgggcaatgggcctggcagcgagaccgctggacaccggtaggcgacgccacgccgaaccgttcgctggtggtgtatgcccatgccaatggcaccttcagcgcttgggatccggtgcgcaacgcgggtgagctggcggcctatcacttcgatgaaaaccagctgtggcacggtacgtcgatggcggggcaggggcgcttgtgcaacggcttgatcaacgactgggtacgctggcagcgtacttacggctgcaaggcgttcgccgctttgaagcaggtcctgcgcgcactgtcgccgtcgcgtgaggagttgctgctgcccggtcggccgtgccacatcggcctgctcgatgaaaccgaatacccgaccctgcagcggccccagggacgggtgcccttgcctgaaacttccagtgcgatccgccgcgtggtggccctggcctacatgctggtctggacctgggaagggcaccgccgcgcctgtcgcctggccggagtacggccgagcgatgagctggtgtttctggtggatgaggtcgagtgccatctgcatgcgcagtggcagcgccgtatcgtccctgcgctgatggacgtagtcggcgcgctgactcgccagcgcctggcggtgcagatgatcgtggccacccattcgccgctggtgctggcctccatggagacccagttcgtcgaggcgcgcgatgcgctgttcaccttgagcgtggaggaaggccaggtgcagttgcaccagcaaacctgggcggctcagggcgatgcggtgaactggctggtgtcccagagcttcggtctgcgccaggcccgctcggtggaagcggaagcggcgatcggcgccgccgaggcctggatgcgcggcgagcgatcgggcttgcccgaggggctggacagtgaagcagctatcgagtcgcagctgctgcgagccttgcctgccggggatcacttctggccggtctgggtcgttgccaaaggaggggtgcaggcatga

SEQ ID NO: 89957 - DNA, 627 bp, Pseudomonas sp. Leaf129
atgatcgaactcgttcatccactgcccgagccccacggcttcgacgagcgctgccgccagcgcggcaacgcctggttgcaggacaatcctgacgttggcaggccgcgggactactggtcgccgttccgtccgcaactgggcgagggctttgccaaccgctgtgccttcggcgccatgtacattcccagcggcaccgtggagcatttcatcagctgtgatgaggaccgcggcatggcctacgagtggagcaactaccgctatgtcgatgcctggatgaacagtgccaagggcagcaagaaagccgaggactttctcgatccgttcgaggtgcgcgaggggtggttcgaggtgttgctgccgtcgctacaactggtgctgaccgacaaagtgccggaagcggtgagggcgcgggccgagtacaccctcaagcacctgccattgcgcgatgacgagcgcgtgatgcgcgtgcggcggcagtggttgcgcttgttcaaggagggcaagatcgggctcgaagggctgcgcgagatggcgccgctgattgccgcggcggtggagcggcaggaagtgcgtggtgcagctttcgcggccgatgaccgctcctacggtgcaacccaaactccgtag

SEQ ID NO: 89958 - DNA, 2604 bp, Massilia sp. Leaf139
atgaagcaaatcgtgcgctcatcagatgataaaatccagcaacattctttgatgagcgaacgcagcatggaagattatcgcgagagcaccatcgtgatcacgaggctctgggaagacttgttcaaagtcgctccgtcgtccgcgcagcccaccgagacgtatgagcacgggctgcttctgctttttctggtgtcggcacaaggcgcccatcacgctcgcactgcggatcggctcagtgtcgcaatcaccgggcaaccatctgatcaattgtccgcacaaataatggggcagccctacataatgcattggctcgagggggcgaccgatcggccctacccggagaggattgctctcgttttcgacgctgtcatggacgcgttgcgatcgttcggctacgtagggcctcagcagcatatatttaatgtgcaagccgactggccacgacgacaattcgacttggttgtgaattgggcccgcgagcacggcatgcagcgcgtcctagacgccttcgaccatggccagcgcgagcgcatcggcaaccagcgcgatgtcggccgcgaggacttcgccgcatacttggccctcagttgcaccatcgagccggatgccaccgtcgcggatctcggcagtccgaccgcttgcttgccgcggctggctattgccgcaggcatggcacggccggagtgcatcatttcccaggccgtgaccgatcgtttcacggccatgcgcctttgcatgcaaggaatctatttccattacgtcgacctgaagggagtaggatcggatgaccccgcgctgccgattttcgcggacttcctgcttctggatcccactccagcgagcggcagcacgacccctgcgcaaccaccgggcaacaatgccgaactcgccatgtcggccattcgcctcgcacagcaactgcccaggctgcgggatcgctttggcctggcgctggtcgtcgtcccgcacctggcctgcacgacaacgcattggcaaaggcatgtgcgtgaggaactcctggccgccgagatggtagccgccgttgtcgacctgcccgctagcgccttgacgggacggcgaagattttcggcatggctgatcacggggcggcgtgccgtcgtgcctgctcacaggcgtaaggtgctgttcatcgacgctgaaccactcggccgcctcacgcccgcccgcgatgtccagctgagcgccgatttcatgggcgccctaatcgcgccccttttccaggccgatggacaccgtaatcggttgttggaacgcctcgaacacgccgaaccgctgctggccaacatttttaagcgcgaattcgatcacaccgcctacgaagcgcccggcctgtcgcgctcggtgtcctatgaggcgatacacgagcgggacgccatcctggcggcgaaaccgtatctgacgcccgtggccggtgacctctgggaacgcgggattgaccgacgccagctggacgccttgctggagacggcacacggagtcggacagcggatctacatcattggcaacaacggcgaaggcaaaagcctactgctgcgcgatatcgctgtcgaaagcgcttcccggcggcggcccacggtggtcatcgccttcaatgccagcgaccgttttctccggaagctggcgcccgaggcgcaagcgttctatcgctacatgggcgcacgcaccaataccaccggtatcaataccctgcaagctgcagtcgacattggcgcgctgatgctccggatccacgcggatccgcagatgctggaggtcttgcaccgcgtacttgacctggtcggcttcgcctccgaattgttcatgattccgcgggaattgaaggcaaatggtgggcagcagcgtggcttgatcagcggcatcgtgcggcttgcatcccaggatgccagcgaccgccaattaatagacacgctgcaagcgtcccccctgctggcaaagaaatacaagctcggcctgcggcgcgcacaccaccgcgacactatcctgcctttcgatgaattgagttcgggcgaacaccagatcatcatgctagcggcaaagatgatctcagaagccaagcgtaatgtgctattcctggtcgacgagccggaaatcagcttgcacgtcgggtggcagcgcatcgtgcccaaactgttcgagacggtagcccgggagttcggggccgatgtcctggtggcgacgcattcacccgttctcgttgccggtgcggacggcgatggcgaccactgtttcacagtccgcgaccgggcactcaacgcgctcccacgccaggacaggaattccgtcgaaacggcgctgttcgaaggattccgaacctacaccagcaataaccgcgaggttcacgagcgctgcgccgccctggtagcgcaatttatcgaggaggcgaatggcgacgatgacccacgccaaagtgcccagcccatcctggacaagctcgacgacatgaaacaagtcatcgatcatcaacgccgcttcttggcgcgcgaagaaatgagctttgacgtaaacctgatcgagcaagccaagtcagctgtcagggaaatggccgcgctcgccgtggaagattccggggaggaggatgaatga

SEQ ID NO: 89959 - DNA, 774 bp, Massilia sp. Leaf139
atgaagctgatgcaccggcccggggccgagatcgacggggatcagcagcgtttcctgtcgcagccgcacaagacgaagcggctgtgggccgaagcgaagacattgtggctagccgagcaggcttgcgccgagaccagccgcctggatcgttggttcgccttgaccgattacaagaagagcttcaaaggtgaaaaaccacgcgaattcggcaaggaagtcattgccgctctacgcttgcacctggtggggctgcagaagggccgctgttgctattgccgccgctggctgcaaaacgtcgcgcacgcgcgtccggtggaacatgtcttgtcgcgcaaggactatccgcaattttcgatgcagtatcgaaacctggtcgtgtgttgcagggactgtaaccagaagaagtcggacgctaactggtgcgatttgccccacaccgcaagacattaccccaaggtgatcgacgattacttccatccccgcctgcacgtctacgacacccacatccgctatgtcaggatcgaaaccaacgatacggtcgtcgccctctaccacggcttgacggatcagggacgccatctgtgccgtgagcacttgaagacgatcgcccaggtcgacggcctggtgagcaacaacaagcgcgtctctaaggcattcgcgcgtctccaggccgccagcgacgtacgcgatccgagcaaggttcgggagcttgatgccttcattaatgaactgcatgtggcgatgcaccgcgtcgccggtaccaggcggccgtag

SEQ ID NO: 89960 - DNA, 1407 bp, Pedobacter sp. Leaf176
atgaagataaccccgttttacatcaatctacttgaactaaaaggaataaaaacctattcaagagaaacatctctctcattttgcaaggaggatggaaccatttccaagtggacactaatacttggagataatggtgtaggaaaatcaaccttgctacagtgcatcgcatggatgaaacccctattgccgtataacatgactgaggtaggtgaaacatttgtggcatctccactgataaatgatgaggaaaatgaagtgctggaaaagttggtcagtagaaaaaatgaaggagaaggtaccttggagataagagggcattttgtcgctaatagcatccttggacaaaaagcaaaaaccggaacaaccgacaactgtgagacgggaataaagatcggcgtcaatgaacaccgtaaattagatcttgtcgagccaagtttcctagcagaaaataaaaatgtgttttatgatgatgaagttcttgtgtttggctacggtgcttcaaggactatcggcaagcaaaatcttagcaacccgaggctttttgataccataccccaatttatcaacgagcgtaccgaactttacgatcctgaggaaatcttgcatagcatcagatatgcttcattggcatctaagaagaaaggagatagattaaaatacgctaaactattggatgatatcaaagaaataattgtttcaactttacccgatttcgaggagattgataaattcgagattttgcctccacgtgtactattgtcagatcccgaagggggaataatcgttacaaccaagtatggaaaaaaaattccttttgctgacctaagccttggataccgtaccattatgtcagtaatcatcgatctttcatggagacttttcaataaatatcaggcacaatcttcgaagcctttgaacgaacctgcgattgtgcttattgatgaaattgatcttcacctacatccaatctggcaaggcgagattatgcctaaattctcacatcattttcccaacatacaatttattgccaccgcacatagccctctaatgctacagactgctttagagtataactatgctgttgtcaggtttaatgattccgaagatgcagtagagatcttaaaccagccggatggtgttgatggctggcgcgttgaccaaatcttgaccagtgagcttttcggactggagagcgcccgcggcatacaatatgataagctaataaaagacagaaaaattcttttgcagaagaaaaaattgacagacgctgatagccgttaccttgaagatattgaaaaaaagctaaaaaaagttcctgtgggggaaaatccagatgaaataaaaaaacgagactatatctcggaactatacaacaaaatacagaacggagaaatcaaatttgaataa

SEQ ID NO: 89961 - DNA, 768 bp, Pedobacter sp. Leaf176
atgattaagattaacagacctctcgcaatccctttaagactttctgttgagggggcagccgctgatcttcagaaccgaaacgactacgatgcaagcccaggaagctacacttctctaattatcgagtttgaaattctgaacaaaatatacggccatgtatctgtaaaaagcgctctccgtgcagctcagttcaacaaatgctgtttctgtgaaaaagatcaggtcgaagaagacggaacagtcgaacactttaggccaaaaatgggcttcagggaaaaacggaaggaggcattggtcaaaccaggttattattggctgggatatacctggacaaatctgcttttctgttgcagcaaatgcaatggagcacgatacaaaggaaacctgttccctttacgcgctggctccgcgcgagcaaggacacacaatgatgacctaagccttgaagacccttatttaattgatcccgcaagcatagacccacgggcgcacatttattttgatgacgaaatggttaaatacagaactgactatgggcaagagacgatccacatccttggcttggatagaactacacttaacgattttcgcaaagcactgatccaggacctgaaatcaagaataataaccattaaagcccatagattttgcacgccagctcaagtagcagaagcaaagcagtttctacgggacgcacaattgccaagcgcaaagttttctgctgccgcaattgattttatcgctaaagcaggtgttgcgttagattga

SEQ ID NO: 89962 - DNA, 1563 bp, Dyadobacter sp. Leaf189
atgaatgctaaaagtcacccgattcaagttgttaacgaatggcatagaattgcggaaagtatcaaacagcaaattaatgattcggcaataaaattcgagatcaaggctcacaagcactttgggctgaaaataacatacaaggaatttagaaagatttacttcgaaatttctgattatgaggtagttcaaggcttcatgaataagatgaaggtcctatatgttgtggaacaggtacccgaggacaagttcactcctattgatcaatctttacaagaggcccggaatttacatgattatgaagttacaagcgctttcaaggaatggatagatcttataaagtccttcattcgcctggattccatagatttcactagcctgtttttcttagaagatgatgaactgtttctccagaacgagcctaataggtatttcgaagaaaacaatatactcgaccattgtctaaaaagcctgtctgtctctaacttccaggggatcaaacgagctacaattgaaaatttgcccgtagatacgcattgggtctttttggttggcgaaaacggcttcggaaaaagcacggtcttgcaatccatccttttagggctgcatggttcaaaggacggaccttacgattttgaccaggaagagaattcgcgaataagagttgaatacaagagccatgaagacaaccttatcaatgactttcgaaccaacccttctccgttgactcatattgcagcttatggccccgtaagattaaatatgcaatcaaacagttcaatcagcgagatatcggaaaaacaaggaacactgtacagtttattcagaaccgacggcgatttacttaatgttgaatttgagttggttaaatgggcattgaagggtgataaaaggttccagctggttcgcactgccttttgcagacttgtcccttatttagctgacattcagctaaacaaagacacagatcgaattgagtacatagagaaagatgtattcaatgaaaacgctagatatgaaccgcttacttttgaaaaaatagcttccggatttcgaagcatcgtaggtatagctggcgatatgattatcaggttgtcaaatactcaaaaagatatacttgacccttctgatctaactgggattgttataatcgacgaacttgatctacattggcaccccaaattgcagaaacagattccagagctttttagtgaagtttttccaaaaattcaattcattgtttctactcatagcccaattccattgctaggcgcacctaaaaattcgactatcctcaaagtcacacgaactaaagaagagggaataacaatacagaaagtagatgtagatctcaaaacattgactccaaatctacttttaacctcaggtatatttgacatggataatattttttcgtctcaaatagaggagcttacagaggtacgcactgaggacacatttgaagaaatggagaaaaatgaggctattgatgaatttttaaaggagtttgaaagcagcaatgaacagttcccagacgaattatttgaaccaaagaccaatggatag

SEQ ID NO: 89963 - DNA, 861 bp, Dyadobacter sp. Leaf189
atgatcagtatagaaaaagattttaagaatcctccgcaaagcctagctacctctttaaccagaacatcccatatacttgacgctctatcaagaaagaacaaacatccttttaactcaaagctctacagggacttaactatctcatcgctgattgagttgtaccattcgaaatgtggttattgtgaaaccgatacatctgcaggagctccgatgcaagtggagcattatcggccaaaagcgaaggttctggaagatataaagcaccagggatattattggcttgcttatgaatggagtaacctaattcttagctgcagcaagtgcaataataagaagcgcaacagatttcctatatcaggacagagaataagtacaccaggcattttaaacatgggcatgcctagtgaagaatttgtgttagcaaactcgaagaattttctagcagagaatcctcagttattgcatcccgaaattgacaaagtcgaagatcaattcttattcaaccacaatggagaaatcgtcgggctcaatgagagagctcaacaaacaattatagtgtgtgatttgaacagagatgagctaattttcaagcgctactcacttttgcaagaatacagaacagacattaaagaaatcctatccgaatatctcttaaaacacattacactggatcaatgtcgttattcacttaaaggcatatttaggaggttagcacaactgcaacttgtcagcaagcagtattctcgtttcggctatttcatgttctataagtttgatgtttatattgcaaactcctttgaggataaacagaaacatgccgtaaagaagttgtttgaactgtttaaagccgggtctttataa

SEQ ID NO: 89964 - DNA, 1254 bp, Bradyrhizobium sp. Leaf396
ttgtacgcgaaatcgctgcatatctacggatttaagtgcttcggcaaagccgaacttgcgctgcagtatcccggacgcaagactggcaccgtctcggagaccgagaacatcaatctcatcctcggcgacaatggcggcggaaagtcctccgtcttgcgcgcgctcgccatcgccgttcttgcccccgcactgctagattcgggcttcgtgccatataggttggtccgacgttccaagtcaggttcggagccggtgacacatgcgctcctcaaggtcgcagcggtgcctgaaaaggaggagctaaagcccggcgtttcggtcagaaaaaatcttgagatgctcgcccggatcgaaacgcgacccagcggtagccttgaccgccttcatctggagcgaacgccggcttccccgatcgccgacgtaatcgacgatgatctatctcccgcattcttcgtcgccggctacggtgcgacgcgcagggtggagaccgccgacttctcgtccggaagcgaacgccgacgacgcggtctccggtaccggagaattgcggggctcttcgaggatcatgtcgccttgcggccgctgcagaactggttgccgaagcttcgttccaagaacccaaaactgcatgacgaggcgatcgccaaaatcgacggcattcttccggattccatccgcttccgtggcgccttcgacgagcaagaggagcagtacctgttcgacttcgagggcgtgccgatgcccttctcgtctctttccgacggctataaggcattcgttggttgggtgggtgatttggtgggacacttgacggatgtcgctggtcagaaacagatcgatgaagtcaagggtatcgtgctcgtcgacgagatcgatcttcacctgcaccctgcttggcaacgtactgtagtacccaccctggagagggcctttcccagcctgcagttcgtgcttacctcgcacagcccgttgatcgcgagctcggtgaggaaggagaacgtgtttgtgacggatacagccgaggacgggacctcgaccataaagcaactggaggaaaaggtttacgggcgcagcgccgaagaccttcttctgtcctcgtacttcggcttgcagacgacgcgtccagatgcgttcgtcgatgagtccaaggccttattcaaccgcgccgcggaaggggactccgctgcggccctgacgtttctggagaagcttgccggctcccctcctgcgaaggcggcgcgcggccggaaatga

SEQ ID NO: 89965 - DNA, 864 bp, Bradyrhizobium sp. Leaf396
atggaggccgcgatcgaagcgctcgacgataagtggctgtcgaaggccgcgaagcgcactgagaaattcagagccattgggacgttccaggagaagtcgtcgatctggtccgacataaagcccattttgatcgacgtacagcgcgacaagtgcgcttactgcgaacgcaagttcgagggggtcatgtatggaaagatcgagtacgacgtcgagcatttccgtccgaagagttccgttcccgtctggcctgattgccgcaaacacccgtcactcagctattcgttcacgactggagaggaattccaaacgggatactggtggctcgcctatgacatcgggaattacgcggccgcgtgcaaggtttgcaacacgatcttcaaacttaacttttttccgatcgcaggtcaccgatgcgagaacgcggacgatccgttagctcttgcggcagaagagcagtatctttgcaatccaatcggggacgacgatgccgaccccgaaactctggtatcgttcgtcgcgaccaccgcggtccctgcagtacgacgcgggcctcgcaatcggcgaggccgtgtgatcatcgatttctttggtcttaatcttcgcgaaatactgcatcgggagcgcgcgcagacaatcgcgctgttcggcagcgccctcgaagcgaaagcgcgaggcgccgcaactgctgaagacgacgcgatcatcggtcgcatcggggatccagctatcccgcacgcctcgtgccttcgctcttttcaccgattgtggacgaaagacagggccttgggccgcagaacgtacgacctttgcagatcatatgccgtgagcaacgcaggaacagctccgccggatattcgtcgctag

SEQ ID NO: 89966 - DNA, 1632 bp, Aureimonas sp. Leaf454
atgctggacgagctgcggtcggcaatcacgtccgtagccgacctctctctcgaccatcttttagatcgcgaacgccccttcgccggagcgcgcctcagtctgaccaaacggcttttcgacggaatggaaatcggtgggagaatatttgagggttcaacgacctccctgccacggcagctcgcgcgtgcgttatcccgcctcgacttgagggaccagaagcgcctcttcctgcgcatcgatcaactcgtcagcgaggatggggcgctgcgctatgaccgtgaaccgaacccggctgcaggcttggcagcgcccagtccgcccggcgttcgtctccggcgagagcggcagccagtcggcgggatttcttgggtagacctgatcgagttcaagggtatcgagcggctgcacatcgaagtaccacgagagcgcaagcggtccaggggagctccttgtctgatgctgctaggcgagaactcggtaggcaaatcgagcgttctgcaagggattgctctggcggtcatcggcgacggggaggtgaggcggctcagactggatccgaccaacctgtttcgagcaggcggaggcgagcgctgggatcagctcacgccgaacgacgcatacgtggaagtgagtttcaggctgcacggcgatagcgccaacttccacttggatgccactagccgaagggtggtcggcttcgatccttcgtctgcgctcgtgcttggttacgggccacgtcgctacttcgatccgcgtaagtcggagcgacccaacaccgatcatgcccgtgttcgcaccctgttcgactcaacggcggcgctgcctttcccgggaacgtggcttaacgaactcgacgattggcgcttcaacgaggtagccaaagtgctgcgggtggtactcgccctgagcgactccgacgaattggtccgcgacatcgatggccgaatatgcgtctcgcttgctggcaattccattcccgtcgagcgcctaagcgagggctatcgatccatctttgccctggtcgcggacatcgtccgcgaactcacccgtgaatttcggcatctggaagaggcagaggcgatcgttctcatagatgagatcgaaacccacctccatcctcgctggaagatgcgggtgatgtcagccctgaggcaggccttccctcgggttcagttcattgtcactacgcacgacccgctttgtcttcgtggcatggacgacggagaggtggttgtcctacagcgcgatgaccggggccgtatcgtcactctcaaggacctacccagcatcaagggcatgagggcggatcagcttctcacgtcagattacttcggtctttccagcacgattgatccggaaacggagctggatgtggctcgctttgtaagccggcttggcgacttgcctgccgaacgcgctgatgaggcgaacgaggtaatccagcagcttgtgctcggcgacacagcactagaacaggttgtgcaggaggcgttggtgcgttttctagctgaacgtgaacggccgagcggggccttgcgcccagatgttcgggctgaagcagtgcaggcgataatcgctgcgttggaggacggcgacgtggcggaacgttccggtcgggcccctggcacatga

SEQ ID NO: 89967 - DNA, 912 bp, Aureimonas sp. Leaf454
atgatcttcgtcgaaaggaagggagaggaacccgtctcgctcgggtcgcttgctactctcgcgcaggctcaggcggcggaacagtattatgcgacttggagcataggcgatcccggcttcgacaactttacccgataccgtgagtacgacatccaacaagcgctgcggaaactcttccatggcaaatgcgcttactgcgagaaactgatcgaaaaaggcatcgccgaggttgagcactacaggccgaaggctggggtcaagggtagcacacattccggctactggtggctcgcatacaagtggacgaacctgctgccgacatgcccaggttgcaatcagggtttgaagcaacacgtcataacggttgagatgaccgtggccgaggtcgaggcgatgcaggcaacgccaccgcagaaacttttagggaaggcaacgcagtttccggtgggggccacgcgcctcgtggcacaggacgacaaccatgacgccgagcagccgcatctgatcgaccccacccgtacggatcccacatgcgaactgctttggcggcacgaggcagattatagcgtcgtggaggctgcacttggcgcaaccggaccaagcgtactggggatggctacgattcattgcgtagctctaaaccgcagcgaccttgtgcagagccgaaccgcgatactcaatcggctgaaggcccaccgaacccgcatcttaggcgatctggagaaagaggcggtcgagatcgatgacccagggctgctctctcttcatctccgcgccgcgcttcgacgggtcgatgacatgaagcttgcctgcgcgccggagcagcctttctcagccatggcaagcgcgttcgtcgacgatttcaggaccgagcttcggcaatgggcgtccgaaaaagcggcaggtgggtaa

SEQ ID NO: 89968 - DNA, 1437 bp, Rhizobacter sp. Root29
atgcggcttgacactctgcggttgaaaaactttcgctgcttcgaggaccgcgagtttcgtctgcacccgcagttcaatctggtcatcggcgagaacggtgcggggaagacgtcgttcatggaagcggcggccatcgcgatgggctcctggttgctcggcttcggcggacacgattcgcgcaacatccgggagcgcgatgttcgcgtcctgagagaggtggtcgcctcgcgctaccgtgaattgccgcagtatccggtgcgggtcgacgccagtggagtcgtgcagattgcggtcatcaaccgtcaggaagacggtagcgtgaggtacccgccgtccggcgaagcgaacaagcccaatccgtgggagcgttccgtcgagtggagccgttccctcgagcggccccgcgggcgcaccacgcgcacggggtcggccgacctgaaaaaggtggcggagaccttggcgcaggccgtcatggcgcagacgccgcgcgtgcttccgttgatccgctacttcggcgcaggccggctgtgggagacagttcgcgattcggaccacaaggccttgagcaagcatcgcggaaaacagcccgcagagctgtctggggatgccgacgacttggacaggttgctggcggagtcgatgcgtcttgccgagcccttctatggctaccgcatgtcggtggacaagcgttgcaatccggacgacctgatccgatggatgggcgtcgaacgccgtaccgagatcgatcgcggtgaagcgtccgtggcgcttgcgctggtctatcgaacgatcgagaaaatgctgccggaggccgagtccgtgcgcttcgaggtggcatcgaacacgttgatgttcaatcatcgcaatgggtcgaagaactcgttcgacgagctgagcgacggctatcgcaacgtgctggccatcgttgccgatctggcgatcaaggcggtcatgttgaatccgcaactggccgaccatgcgttggactacacgcccggcatcgtcctgatcgacgaactcgacctgcatcttcatccgatctggcagcgacggatcatcgaggatctgcggcggaccttcccgatgctgcaattcatctgcacgacgcactcgccgttcctgatccaatctctgaggacgggagaagagcttctggtgctcgatgggcaatcggccgcgcaactggacaacatgtcggtcgaagacattgcccgcggcatcatgaatgtcgagaatccgcagaccagcaaccgctatggcgagatgaaaggcgtggccaggaactatcttgaagcgctcgaagaagccgcgcgctcgcccgaagacaagctggaagctttcaaagaccgactgtcccagggaattggaccctatgcggacaacccggcttttcaggcgttcctggaaatgaagcgtgctgccaagctggggggctaa

SEQ ID NO: 89969 - DNA, 738 bp, Rhizobacter sp. Root29
atgaggacgatttgccgtggcccgtcgccgcagcctgtcgacttcgacgactatgcgaaggcacagccgattcttctctcccgtcttggtgcctattgcagctactgtgagcggcgcattcccacgtcactggctgtcgagcacatccagccgaagggtctggctgcgtatgctcatctggcaggtgcctggatcaacttcctgctggcctgtgtgaactgcaactcgacgaagaaggacaaggatgtcgtgttggccgatgtccttctgccggatcgtgatcacaccttcgcggccttcgaatacgtgaaggacggtcgcgtgcgaccttcacccgcagtgactgccgctggtctggaggacatggcgcgcagaaccttggcattgacaggactcgaaaggcgcatatcagaggtgttcgaccagaacggcaagttggtggcgattgaccgtgtttcgcagcgcatggaggtttgggcgatcgctctggaggcgaaggctgacgttgacgccgaccctggaaatgccgccgtgaagagaggggccgtgcgcactgcaaaaggctatggattcttcagcatctggatggccgtcttcagtggaaacgtcgacatgtgcaatcttctgatcgaggcctttcccgggacgcgtgacagcagatgttttgatccggtgacggcaactgttgtctgtccagcttcaaatccagatggcctggttgacggagccaagttctga

SEQ ID NO: 89970 - DNA, 1092 bp, Kitasatospora sp. Root107
atgtacgtctccaggctcgaagtggagaacctgcgcggcttccggggtgtcaggaacgtcgatctcgacctcaccaggccggacggctcgcacgccggctggacggtgctggccgggccgaacggtgcgggcaagaccaccctgctggcggccctcgcggccgccctgggtgaggagaccgacccggcgggctggttggcgccgggcgaggacgagggcggcatccggctggacggcgcgcactggcgggtcagccggacggaggacggcatcaccgcccggcgcaacggcgtgctcggcttctgggccggttaccccgctcggcgtgaactcaccgagggcatcggctggttggccggccagcaactgcaggccctggagcgtcagcccggcgcggtcgagctggtggccggggtccgtgcgctgctcgacgacgggctgctgccctccgggtaccggatcggccggatcgacagcgacgggctccaggtcgactgcggcgggacggagcacccgctcggcggcggcctggcggcggccgtcggtctggtgctcgacctgctggcccggatccaccaggcgcacccggagcaggagttggtgatcgacggcacgccgccgacggtgccggtgcccggcgtggtgctgatcgacgaggtcgaggcgcacctccacctggactggcagcagcgcctgggggagtggctggtcggacacttccccggcctccagttcatcgtcagcacccacagcccgtacgtctgccagtcggccgacccgggcgggctggtccgactgcccggccccggcgaggagtcggcgccgtacgtgctggacgaggacctgcatcagcggatcgtctacggcagcggggacgacaccgcgctgaccgaactgttcgggctgccgagcgtctactccccgcaggccgaggccgagcggcggctgctgatcgcgctggagcgcaagctgtacgcggggcacgcctccagcgccgaggtggccgagtaccgggagctgggggcccggctgaacgcctcgctggcggcccgggtggacgaggccagggacaggctgggcggtgcccgatga

SEQ ID NO: 89971 - DNA, 552 bp, Kitasatospora sp. Root107
atgacccccggcctgctgcgctgcatgtactgcggcgacaacctgggcaccgacatcgaccacttcgagccgatcgcccgggccccgctgcgcaccttcgactggcacaaccacctgctggcctgcgcctactgcaactccaaccagaagcgcgaccgcttcccgaccgacccggccagcggtaccccgctgctgatagacccggccaccgaggacccggccgaccacctgctgctctacctggagtccggcgcctaccagggcctgaccgccaagggccacgcgaccatcgacgtcttcgccctcaactcccgcgccgagctggtccggggccgccgcctggccttcaccgtggtcaaggccctgctccgggactggcacacccgcaccaccgccggcgaccacgccaccgccgccgagatcgccgacgccctcgacctgctctggcaggccgacgtggtccgcgcggtctaccgcctgaccgacaaccgcccactggccgaggtcgtcctcgggcccgaggccttcacggctctgactgcgctcacctga

SEQ ID NO: 89972 - DNA, 1368 bp, Pseudomonas sp. Root329
atggaaatcaacagattcaaggtcacggatgtcggtcggttcaccgaactggacattcagttggcccccacggacaaacacccctcaaacgtgacggttctggtggggaataacggcgccgggaaaaccacccttttaaagtcactggccatctcgttgagctggttggttgccagaattcgcaccgagaaaggcaatggcaattaccttgcggaagaggacattcgaaacggcgcttcgtctgcattaattttaattggcgtagtagacgagtcacatgcacgctcaagtcgtcccgatgctaatcctcaagatgctctgttcacgtggggcattgcccgcggcaggcaagggcgaaaggctcaaattcatagctccttaggcggtgtcagtctccttgcggatcactatcgcaacgaactaaccgcagatgataaagcttcgcttccgctgattgcctactatccggttgaacggtcagttctggaaatcccgctaaagatccgaaccaaacattcctttgaccaactagacggctacgacaactcactaaatcgtggcgtggatttccgacgcttttttgaatggtttcgcgaacgcgaagacagcgaaaatgaaaccggcgtgtccgacattgcgttggccgagatttccaaaaagttcggtaacgacagtgacatttggaaaaccctttcccagttgaaggcctcatcccgagatcgtcagttgacggcagttcggtctgccattgcagcgttcatgccaggcttcagcaacctgagagtgcagcgcaagccgcgcctgcacatggcgatagacaaagacggtgtgacgctcaacgtctcccagctctcgcagggtgaaaagtcgatgatggcgctagtcggcgacatcgctcgccgattggcgatgatgaatcagtcattggacaatccgttagaaggtgacggcatcatactgatcgacgaagtcgatctgcacctgcaccccaaatggcagcgcagtttgattcggcagttgagcgagacctttccaaattgccagtttgtactgacaacccattcgccactggtcataagtgacgcaaaagatgtgttgtgctacgtgctggatgacggagagctacaggaacgcaatggcctttatggactggatgccaatcaggttctactggaagtcatggacaccgatattcgcaacagcgaagtgcagcagcgcttgaatcgactgttggagcgtttgcaggacggtgatctggacgacgcaaagaaccttttttccgagctttcacttgaattgccagaaggtcatctagagctggcgaaggccgcattgttgatccgaaagctggagttgcgccgtgcgtaa

SEQ ID NO: 89973 - DNA, 636 bp, Pseudomonas sp. Root329
gtgcgtaagattaacaaggaagttgagccacaagcgctgactcgctggaagcgctcgaacaacgcgttacgttacaaggacttaccacgagaagagagccggtccatccgtttatcgtgtatctcggaacagtacgggttatgtgcctattgctgtcagtcgatcacgattgatgacgcccataacgaacatcttgaagctcaggatcgtgcaccgaatcgaactttagattttttcaacattgtcgccagttgccagcgcccccatcaatgcggtcatggtcgaggtacacgaccgttgccactcacgccgttgatggccgaatgcgaaaccgaactgaagttctacttgtccggcctggtaacgggacaaaccgagcgggccagggtcgctattgaggccttgaatctgggtcatacagaggaaagtaatcgaggcctagtcggcgcacgcaaacagatggtcgatgcgctgatctatagccagagcgtgcctcccgaagatttgcagtatgaagatgaagagttcctggatttacttctggaagatctgaaaataccggatgcagcgcaatgtcttcagcctttttcacccgtgctgatcaatgtaatccgccactttctggctcaaccttga

SEQ ID NO: 89974 - DNA, 1263 bp, Pseudomonas sp. Root401
atgcttgattatctgcacatgaaaaacgtggggcctgctcctgagctcgaagttaactgggcgccacgaatcaatctgatcacgggtgacaatggactggggaaaagctttttgctggacctggcctggtgggcgctgacgcgcacctgggccaatacgccagcgcttcctgtaaaccccggcaagtcctcaatcaaatatgttgtaaaaggtaaatccggcgtcgcccagcctgtcgtatcgacctataaacgcgaagacagctcctggcccttgaagcaaagccgtcccaccatgcccggcatcgtggtttacgtacgcatcgacggcggcttttccgtctgggatccggcccgcaattactggcgctccgataaggatcgccccgccgcatatcacttctctgccgacgccgtatgggatggccttgatgtcaacggacaaagagtctgtgaaggcttggagcgcgactgggtcaactggcaaaacggccgcaaaccccaattcaaagcgttggaaaacgccttgcgcgacctctcccccgccactgaaccgctatgcgtcggggcgcccagacgcgtctacctgggcgagggtcgagaacgaccgacactcaccatcggcaatcagaacgtgcctgtcacgctggcctcggcaggcgtaagacgaatattgggcctggcttactttcttgtgtgggcctggtatgaacaccaggcagctgccgagctgctcgacaaaaaacccgagcgccggtttgtcatcctgttcgacgagcccgagactcatttacatccaaggtggcaacgcacgctgatgcccagcctcttgcaagctatcaagaccttgcgcgggagccacggcgccgagcccccccaactcctggttgctacgcactcgccgcttgtcgccgcctcccttgagccgatattcgatgaagaacaggacgatcagattcagttgtcgattcaggaccataaggtcacgctgacacaaggacactgggcggcccagggtgatgccagcagttggttggtctctgacacgttcggactggaacaggcgcgctcgctggaggcagaaaaagccatcgaggccgccgaagcgttcatgcgtggcgagaaacaactgcctgaaggactcaagacccgtgcatccatccacaggtcgctacaaaaactgcttcctgcccacgatgaattctggccacgctggctgatcgagagcggcctcctgacgctcaatggcgagggtaatcaatga

SEQ ID NO: 89975 - DNA, 570 bp, Pseudomonas sp. Root401
atgatcccggtgacccggccaaaggaacccgccgactttgataagaaggtcagaacaccggggacacaatggctcaaggataatcccggcgctcctcgcccctcaccgctctggaacaaatgctcgcaagcgctggccgatcattacgccaacctatgtgcctatgcggccatgcttgaccctaccggcggaacggttgaccactacctcagctacaagaacttcccaggcctgacctatgaatggagcaattaccgcttcgcctccggtactttgaattccagcaagaaaaccgctgatgacacggtgcttgacccctatgacgtgggcccaggctggttcgaaatcattttgccgtcgcttcagatgcgcaccacagaagcgatacctgcggcttatcgtgaaaaagccgagtacacactcaagcgacttaaattgcgtgacggtgagcgcgtcattcgctggcgccagagttggtacaacatgtacaaacaaaaaaaactgacccttgaagggctccgtgaagttgcgccgttgattgcagatgccgttgaaaaagcggccctgtga

SEQ ID NO: 89976 - DNA, 2199 bp, Acidovorax sp. Root402
atgattaagctccctcaaactagacctccagaattttttctgtcgcaggaagcgctattgttgcgacaggaagcggaggcctttttcttgagaacgtcctcgtcgcgagcacaggtgcgctttgatttccaacgcattggtactcgcatttatccgcatgtgcggcgaggtttcaaagatcagctgcctgcgaaatgcgcctactgcgagacacctatcgagaatcccgatatcgaagcgtttcggccaaagcagcgtgcgaccaacttggatgggcaggttgacgacggccactactggtggctgatgttcgagtggagcaactacctaccagcctgtcgccaatgcaataccttaaaagggcagcgttttcccgtgagagggccgagggcccaggtgggcgcagtaggcccatcgttggaggcggagaagcgactgttgctggacccccgaatcgatgatcctgcacgcgtgctgctctttttggacgatggccgcgtcacaagcgaggacgagcgagggcgggtaagcattgacgttctgggactcaaccgagagtcgctggtcaaagcccgtgagaatgacttgcacgtcctactgtcgctcatggctaagagcaagcctagtgagcggcatttggtgggccttgttggactactggcgaagatgacggagcccgaccagtcctttgcagccatgaggcgacagtacgtgaaggcatgggccgttgaaatatccaaagcgagtccaaagctgcaccgactgacaaagagatttctcgatttcgagactgcccttgtatccggtctgaactcgcgcaagaaagagatcaaggatgcttcggtgggactgacaacccgcactgtcagttccgagtcctactctatcgcagccgagaatgtgtcggatgactactaccgccaagcgaggttcatagagcgtttcgagttgcgcaatatcagggcattcgaaaatctcgcgctccgcgcctctattggcagcggcaaacctggcgagtggctcgttctgctcggtgaaaacggctgcggcaagagcacagtacttcaggcccttgcatgcgcactcgttggtcaggctggcgtcgaaagcacaggtatcaaggcaaccgacctcctacgtcgtggatgtagccgtggacaagtgacggtacacgtaacagggatgtcaaagcccattgtgatgacgctcattcggcgaggcaatcgaatcaaggtggatccacctgagcccaagctgatggtgctcgggtacggcgcgacccgcttgctgaagcaagataaagatggcgctcccagtagttccaggttcaggatcaacaacctcttcgacccatactctcgcctgagtgatggacggccatggctctacgaagccaagaagactgagttcgatagatttgtacgctctttgtcagcactcttgccacgggcagacggcgcgaagttcactcgcagaggtgaccgaatatttgtcgaaacgcctggagtcaaagacacactggataccctcagcagcggctatcaagcggtacttgcactcgcgctggacatcatgagcgtgatgcggctgggttggcaggacatggcttcggccgaaggcatcgtgctaatcgacgaagtggacgctcatctccacccaagatggaagatgcggattgtccagcgccttggggaggtatttcctcgcatgcagtttatcgtcaccagtcacgagccactgaccttacgtgggctagatcgcgaagaggtcgctgtgcttaaacgaactctggatggcaaagtagtcgccataacagcggacagtgcagacttcccgtctccgcagttgatgagggtcgatcagctactaacctctgaattgttcggcttgaactccaccgaagatttagcgatagacacgcttttcgaggagtactacgttttgctcgctcagcgctcgagaacagcagcgcaggacgccagattgaatgagctgcgcatgcaacttgatgacggtacgcgccttggattgactccaagagagcggctggtctttgaagctgcagacgccgtgattgctcaaagtaaggccaactttgaagcattgtcggaggcaacccaagcagccgcgcgggagcatttgaagtccttgtgggcggaagttcggaatgaaccgcctgtggctgggagcggaacgtga

SEQ ID NO: 89977 - DNA, 831 bp, Acidovorax sp. Root402
gtgatacacgtagatcgagttcctactcccgcaagccttgacggcatcgacgcgaagggtgtgaaagagacgaaggatgccatcctagcggtgaagaacggcatccagttcgagttcaaagcctacaaggaagacgacgtcgtcgcggcactgcgcgcgatgtttaacaagaagtgcgcctattgcgaattcaactacgccgccggaggccccgaggacattgaacacttccgtccgaagggcggtgtcattgtcaatggaaagcttgcgcagccggggtactactggctagctgccgcatggagcaacttgctgccgtcttgcagcgactgtaatcgcaaaagaaccaaagagttcgtcgacagagcaacaggcgtatcgggcaaggcgaacctatttccgattgctgaagagtcccgacgctggcgcagtcacaggtcaaaaaatcgggaggagccattgcttctgaatccctgcgacgacgatcccgagcagcaccttgaattcctcgacaaggggttggtgcggcctgcgctggacgcagttggaactccaagtcgtaagggagaagcatcgatcgaggtctatggactcgcgcggaaggacttggtcgagcagcgggaaaagaagcaaacgcgagtgcgagcggctctccagcaagcgagtgagattgccgcgaaagctcaggccactgccgacccggcgatgcgttcctttctggacaagcaggtgagaactctgatgcaagaggctcaaagccacctcgacaagacagagccctacctggctgctgtccgagcagtatttcgggagttcggactgcacccctga

SEQ ID NO: 89978 - DNA, 1599 bp, Pelomonas sp. Root405
atgtatctcgttgatctagagctgacgaacgtccgagcgatccggcacatgtcggtggactttcgcagcaccaagccaaatgagaagacccggcggtggaccgtcctgctgggtgagaacgggtgcggaaagagcacggtcctcaaatccatcgcgctcctgctcgccggctctgaggccttaccagacctcctcggcgcacctgaccagtggatccacaacgacgcaaaacaggccaccatcagcgcgaccatctgcacggcagaaggtgaagagcgcacgctcaccctgagcctcaatcgtggggatgggcgcgatacggtcatcaagaggaactccaacggcctacggcaactagacgcggccctgcgcaaggcggaccgcaactacttcatcgctggctacggcgcattccgccggcctccggacactacccgtcggagcagcattggcagcagcctcgaacaaggcagggctgctcagctcgggagcatgttctcgttggggcatgaactggtcagcctggaacagtgggccatggacctcgactacgtcgtaggtactgagggcagcagcatcatcacggaagcgctcggcaagcttttgccgggtatgcacttcaagggaatcgacaagcgcaagagagccgtcgtgatgggtacggccgatggcgacgtaccgctagggcagctctcggagggctatcaagcgatggctgcttgggccggagacctgttgttccggatgacagagaccttcaaggaccggaaggaccctcttgcggcccgcggcgtcatgctcatcgacgagatggatatgcaccttcaccccgtgtggaagcgcaatctcgtcgacttcctcgacaacgcatttcccaaccttcagatcatcgcgaccacgcactctcccctgtccattcagcagtgcggggaaggtgaactcttcgtggtgcgacgtgagaccgccggcccaacgctcgtgcccttcgctggcgatccaagccgactgcggttgtcagagctgttcctgtcaccgctcatcgggctgcagacgcttgactcgccgaaggtcgcggctttacgggaggaagcccgcagcatcgagctcaagcccggctccaagtccgcgctagaagtcgccaagctccgctccatccaagagcagcttgaaggtactacgcccatgaccacagaagaggctccagcgttcgccaagctgatcgagtatcagaagtcccaaccgaacctggacgctgcagcccgaatgatggaggctgaggagcttttcggaaccgcacgggtgaccgttgagcccgtggcgcctgccgtaaaaagcagccgaacagttcgcaaatccgcggtaccgccctcttccgctcgtcctcgaagcgtcagcggggccaaagcgacatcgtcatcgagtagtccggctgtgaagaaggctgcggcgcccaaaaagccccccgccaagaaaccagttgcaccgaagccgctaccgaagaagcctgctgcggaggttattcctccgagggttgctccagcaaagcctcgcgctgtcgtgaggcctgcggctaagcctgctgcgaagggcaagccgtga

SEQ ID NO: 89979 - DNA, 831 bp, Pelomonas sp. Root405
gtgatccatctcaagcgcgctcgagacctggcaagcctaaacactggcttcacgggcgagggcctcttcaccaagctgatcgcactcactgaggcgcgcctggctaatccggccaagattgactgggagggcatccttggcgactggaagaagatgaagcccttcttgcagcgggacagttccgaaaagtgcgcttactgcgaagctccaacgtcggatgtcgcctatggggatgtggagcatttccgccccaaatccgtctactggtggctcgcggtatgcgtcgacaactacgttttctcgtgccagctgtgcaatcaaaaatataagggcgaccgcttccccatcgcgggcgcacagctgacaggccccaagcttccggccacacttcccaagaccaaagctgccctcaagcgcctgatggctacactctgccctgacccagcgacggcggatgaggcaaccctccttgccgactggttggccgaagatcctgacctgccccatccgtacctcgaggacccggagccgttgttcgcttgggcggcagtcgaaacgaacgaagaggtacgggtcatgccgcccgacaacgcctcgcctcgcgcaaagcgcgctgtcaaggctgcggtggactatctaggactgaaccgagagacgctggctcgtcagcggtacatcgtctatcggtcgctggtgtcagctgtgcgcacctggaagctgggcgatgcgccgagcttggatcagatcaagtacatgtgccagcccaagcacccgtttgctggcatgtgtcgctactacgcccatctcgccggcgcgcccatcacgcgctga

SEQ ID NO: 89980 - DNA, 1242 bp, Acinetobacter sp. Root1280
gtgtctcaaaattatatttcaaaattccaagcggaaaactttagacagttttcaaaaatttctatgaaattcaatgataaattcaatttcataacagggcctaacggttgtggtaagagcagcattttagttgggatacatcattgcttagattatagttggcaatcttcaagattaaatcaagatagttcattttatattaaagtatttaaaaatgatcgattttattatctaggcttaggaaaaaatacttttcagaatacaaatagctatcggagaataagtttatatacttataatttgccctcagttgaaggagaaacaagttacacagcatacactccaagtaacattacacctgaaaataaaattttcccactattcattggcactaaaagaagtattgattatatagaagtcgatggaattaaaagagaagaaactaatgttgagtctttaaggcaacagtattctagcagaggaatcgaatccaatatttcagatgtaaaacaatggcttataaatagatactttatcatcggaaaagattgggcttgggaagaaaaagaaaattggaatttacttttagagaacttaccaaaaatcgcaccatttggtagtaattttaaatttgtgaaaattgagagagatttagagccaatatttaccctatataatcaagagtgttatttagaggaattatctgctggttttcaagcaatattttcaattattggaaatattattgaatggattgaaaaaacaaatgttgaaggtgctaaaaatattcagcatgcttatggtactgtcataattgatgaattggacttacatttgcatcctgaatggcagtttaacatacgtgatggtttagtagctctattccctaaccttcagtttatcgttacaactcattctcctcatttattggcttcagcaaaagcaggtgaagttattatcatggatcgaaaaactggagtaacggaatatttctttggaccaagtgctaaaacatattctggttggagtactgaccaaattttagaagatgtaatgggggttaaaagtcttgtaaataaagactatgaacgattaattgcagatgcgttagaagcttataataaaaaagataaacaagagcttagaggtttaatggaatctcttgcaactattactcattctgatgacacaattttacaagttttaaaaatgaagatggcatcgttggagttgaaccaatga

SEQ ID NO: 89981 - DNA, 750 bp, Acinetobacter sp. Root1280
atgataaagctttcccgaattgaaaaagtgccgcaaatattagttgataatcaaaaaaaatggactgataacttactagcccttgttactgaacatgggagttataaagatattccaaaacctactaaagacgcagcgttggtacattaccgtcatcaagatataaaagatattttatttagtactacttcaaataaatgtgcattctgtgaatcttttcccgcagatagtggcaatattgaggtcgaacattttaatccaaagtcgttatatcctcaccaagcgtttgagtggactaattttttaccaagttgtagaaaatgtaatggtgctaaagatgatcatgacacgttgagtgagccaatcataaatccttatgatgacaaccctgaggattatttagaaattgatgatattgaattaaaaggtaaaaatgagaagggaaataaaactattgaagtatgtggtttaagcggaatgcgaatctggcgaccttttgcagatttgctggttcaatttaagacatacgaatcaaatgttaaaacagcaatacaggactacaatgaagctaagactcaacccaacaaaaaaagaaaaattcagttactacaaaactcaattgatattatgaatgatcttagacgtccaaattctcagtactcgtttttttgcaaccaaatgataagtaaaagcgaaatctttgctcaagctgagtccctattgaaagaacatgatgcttctcaagtttag

SEQ ID NO: 89982 - DNA, 1368 bp, Pseudomonas sp. Leaf434
ttgcaagttttcagcctaagccttaccgatgtcggccggttcgccgatctgacgatctacttggcaccgacctccaagaatccatccaatgtgacagtgttggtggggaacaacggggctggcaaaaccacggttttgaaatcgcttgcgacatccttgagctggctggtcgccaggatccgttccgaaaaaggtgtcggaagtcccataactgatgatgttattcgtaacaatagttctattgcgatgattaacgtcgctgtgatcgacacatgcaatgcgcagtccgaaacacttgaggaatgggcaaaagaaattttgtttagctggacagttgcccgcggcaaaagaggacgaaagtctgcgtctcatagcgtgttggcggacgctaccttagtagccgatcactatcgcactcaacttttaggcgacgacagcgcttccctaccactgattgcctactacccagttgaacgctccgttcttgaaataccgctaaaaattcgcaccaaacattcctttgaccaactcgatggttacgataactcactcaatagaggcgttgattttcgccgttttttcgaatggtttcgccagcgcgaagacagtgagaacgagacaggtatttcagataccgcactgaccgaaatttctgaaatattcggttcaaacagtgacgtatggaagactcttgccgagttaagggcatccaccagagatcgccaactaatagcggtacgctcagccataagcgcatttatgccaggctttagcaatctgcgcgtcaaacgcaaaccacgactacacatggcaatagataaggacggcgtcactctaaacgtcgcccaactctctcaaggtgagaaatcgataatggcactcgtcggcgatattgctcgtcgtttggcgatgatgaatcaatcgatggaaaacccactgcacggtgacggcatcgtgctcatcgacgaggtcgatttgcacctgcatccgaagtggcaacgcagcctgatccgtcagttgagcgaaacgttcccgaactgccagttcgtactaactacccactcccccctcgtcatcagcgatgctaaggaggtgctggtttacgtactcaatgacggcgaactccacgaacacaacggcctttacggactcgacgccaatcagatactgctggaagtcatggacaccgacatccgcaacagcgacgtgcagaagcgcctgaatcagctgttgaaggaagtacaggatggaaatctggataaagccaaattgctgttcgctgagctttcctcagagctccccgaaggtcatatcgaactagcgaaagccgctctactgatccgcaagctggagttgcgtcgtgcgtaa

SEQ ID NO: 89983 - DNA, 630 bp, Pseudomonas sp. Leaf434
gtgcgtaagataatcaaaggagctgagccggactcatttgcgaaatggaagctgaaaaacaagaccgccacctaccctgaccttccgcacgaagaacgtcaaaccgtcagggccgcttgcgtcaccgagcagttcggactttgcgcttattgctgtcagtccatcacggtcgatggttcccacaatgagcatgttgaagctcagaatcgcgtccacaaccgcacattggatttcaccaacatcgtagccagttgcgagaatcgccctcattgcgggcacggtcgaggaacgcagccgttggggctgactcctttcatggatgagtgtgaaaccgaactcaagttttacctttcaggcttggtcgcgggaaaaactgcacgcgcaaaagatgccatagaaacgttgaatctgggccacaccgaagagagcaatcgcgctcttatcggcagaagaagaaccttggttgaagcgctgatttataaggttggggtccaacccggcgaattgccggagattgaggataaggaaatactcgacctgctcctggatgatttacttctgccgaaagcgcaaaagctcgaacccttctcgcccgtgctagtaaacatcattcgccagatgccagcgtaa

SEQ ID NO: 89984 - DNA, 1269 bp, Streptomyces sp. Root369
gtgctcgcggggcgcaacgggtcggggaagacgacgctgctgcggtcgatcgcgatcgggctcgcgggaccgaagcgggccgggcagctcgacggggacctggagaaccagttgtcctctggagcgtcccggggggagctggctgtcgacgtcctgcccgaccccggcgtggacacgggcgcacgcgagccggacgagatcactgccgtggcgcgctgggagccggagtgggagtcggaacccggtcagggcgagccaccggtcgaagtcgtgttccagcaggaccgggagagaagcgcccgcagcgtcctcgactatctgtggtcgtcgactccgcccccgggctggttccatgccgcgtacggacccttccgccggctcaccggcaccggtctgtacgagcggacgccacaggtaccagaccgtactgccgccttgcgcaccctgttcgaggaacagtccgcgctgaccgaggccttcgactggctgctgtcgctccacctgcgggcgctggagaacaaacctggtgccgccgcactcaagtacggggtcatcgacttcctcaacgacgggctactgcccgatccgtaccacatcgagggtgtggactccgacggaatgtggctacggcccctggttggtgaggacagtaccgaggggcccctgatcgagctgcgccgcatgagcgacgggcaacggaccgtggtggccctggttctggacatcgtgcgccagatgcacgccgcctacggggaacttacgttccgcaccgagcaccaacgcacctacctgccgcaccccggcatcgtcctcatcgacgaggtggacgctcacctgcatccctcgtggcagcaacgcatcggggactggctcaagtcccgttttcccgcagtgcagttcatcgtcactacacatagcccatacgtctgtcaggcttctgatccaggcggcctgatccgcgtacctggaccaaccgacaacgcttcccctgggccggtttccgaggagctgcggcaacgcattgtgtacggcaccggtgacgatgccgtcctctccgaactgttcggcctcgacaccccctactccgagcaagcccgcgctcttcggcaggagttggtggaactggaggcgcgggtagtcaccggagaggcgacagacgatgaggaggcccggcacgcggccctgagagctcggctgagcagttccccccggacgcgcgccgtcgagttgcaggcccgcctgaagcgcctcggagtcctcgacgaatga

SEQ ID NO: 89985 - DNA, 579 bp, Streptomyces sp. Root369
atggctcacggaaaccgctgctgcatgtactgcggcgatgatctgagcacggacatcgaccacttcgagccgatcgccgaaaacccactgcggaccttcgactggctcaaccatctgctggcttgctcagagtgcaacagcacccacaagaaggacaggtttccacgccatcccgaaaccggcgcacccctgttgatcgatccgacggccgaggatcccttcgaccacctatacctgggcctcgacacgggcttgtacctcggacgaacggagaaaggccggcagaccgagcgggtgtgcggactcaaccgggacgaccttcccgaggcccggtgcatcgcgcgggacggggttgtgatgtgtgtagacggctggctgtccggcagagagcaaggaaacgagcggaagatggccgtcgccgtacggaccatccggaaccagcccttcgccgacgtcgcccagttcatgctgcgacaggccatgctgccaagagcgtccgccgctttcaccttcgacctcggcgaggagactctccaccatctgcgcgacccggaactacgggccgcactgctggtctga

SEQ ID NO: 89986 - DNA, 1437 bp, Rhizobacter sp. Root1238; identical to SEQ ID NO: 89968

SEQ ID NO: 89987 - DNA, 738 bp, Rhizobacter sp. Root1238; identical to SEQ ID NO: 89969

SEQ ID NO: 89988 - DNA, 1356 bp, Pseudomonas sp. Root569; identical to SEQ ID NO: 89640

SEQ ID NO: 89989 - DNA, 630 bp, Pseudomonas sp. Root569; identical to SEQ ID NO: 89641

SEQ ID NO: 89990 - DNA, 1104 bp, Pseudomonas sp. Root569
gtgatcgataagtttccttatcgtcaagatagcatcgacgaagatcaattctattattacctaggagtcagacaagcgaccaatctgaccacgacgggatcgaccgatagagcggtggctgagtcggtgatacgaatgcttgccgatagcacgcgcctggaagcatttgggtcatggattgatatggtcttcggcaatggcagggaaatcgcatttgggttcaacagacgtaagcttcaggaaatacgaaaattcctcaaaatcgctaacaagttcgaatatatacaagagcggctagagcggcgcatgggctctagaagggctgacatgatcagcggtgaggagctgctagctatgacaggccatattgaggagctgttcactctactggaaaataatcttcaaactcaactctactctaaagtcgagagagccacattgagactggccacacttcaagagcaggacaaatctaatctgagtagacttgtgattggttttttagctgcgagtcgcgctggtatttctgtgtggccaagccttttgtttgagggaagatcgtggttgggctttgaggagttgagttcagggcagcaaaatttactgtcagtcggcgcgaaagtcattgcctacgcgacccctggctgcctagtggtgattgatgagcctgaggttagcctcaatgtaatttggcaacagcgttacgtggaattattacaaaagtctttagcaggggccactgggagccacgtaatcatcgcgacccattcgcctcatatgctgtcaagcgtagcgcatggacttgccagtattgtcacgctggggcgcaagtcggatcagatagtcgctgaggttcaagatggcgtattcgagggttggggttccgaatccgtcttgtataacgtattgcaaataccgtctgcgtcaaactaccacctgacgagagaactgagcgccgtgcttaagcacatccaagacgggggaaaagacagagattttctcaacggcttcatgaccaagatatctcgcattaactacaaaggcattgagccgctggcgctagtagttaaggaagtccaaacttacatggagcgtctgaattga

SEQ ID NO: 89991 - DNA, 627 bp, Pseudomonas sp. Root569
ttgaaaaggttcatagtcccctcgtatggatggaagctagtcaaagaattaaagcattatgcaattacaaccaaggccaaagatccctggagccatggaaaacaggcaactaagaatttcaaacaagaaatgacgagactcatgcttatcgaacagaagaggcgctgcgcttactgtggctgccgactgttcgaaaagcgccctcaccgagatcatatagccccgaaggaatcgtatagagagtggatgttttggcctaccaatttagttttatcatgctatacgtgcaacaccgaccttaagaaaactttcgacccaatattggtcaaaggaagcacctatcgacggtcagaattctcattcgtacatccttactttgatgacctcgacgaccacatcacctatacatcggaggatgttaaagttttaatccaagagcgtaacggctcgactaaaggcaaaaagaccatcgatgtatttgagctctccagcacggagcgttccaaacagcgagctaaagactatctccatgacgaggacgcggcagacttgtatggctaccatcgtgcgttgctggaaaacgcgagagctgccattgagacgcggctgttgaagatgaatgactag

SEQ ID NO: 89992 - DNA, 1599 bp, Pelomonas sp. Root662; identical to SEQ ID NO: 89978

SEQ ID NO: 89993 - DNA, 831 bp, Pelomonas sp. Root662; identical to SEQ ID NO: 89979

SEQ ID NO: 89994 - DNA, 2172 bp, Altererythrobacter sp. Root672
atgagacgagttgtccatggcaccgtgcggacccctgaaattctccagagcgattccgcggtccaggctaggaccgagatcgccgagttcctgagccgcccgaccgaagagctcgcctcccgccgcgcgcccatcaatgagaaactgtttcggaacgacgaggtgagccaggcgctgcaagtgctcttttacggcaaatgcgcctattgcgaagacatgaagccgcaagaggtcgatgtcgagcagcatcgaccgccagccaatgcggcaagcgcgcgcaagagtttcccgcatcactacagctggctagcctacgaatgggagaatctcctgctcgtctgccgcaaatgccaagagcgcaagcgctcgctcttccccttgcgcggtggtcgcgcgccgctcctcgcggcacttgatcaggtgcgcgcgcaggaatcccccgaactactcgatcccggttacgatcgacccgagcgccatctcgatttcacgctggatggaagatgccatccccgtaccaagcggggggccgctacgattgcgatactggagctcaaccgacctgacctcctctcatcgcgtggagcggtatttggccacttcgccgtacgggtccgcgccgcgaactcgccggacactatcctctcgttgatgctggatgcgggcgggtcccacgaccctttcgcaggagccatgctgatccttcgcaaccactatgccacggcggttgccgaacggatcgaccatttcaccttcccgtttgacgacacgcgcggcgtgctggcgcgccttcatcaaaaggctgacctcaagaccttgcaggccgcgtttgacgaactcgcctcgccacgggagttcggcgtcaccccgcccagcaaagcagtggcgcagagcccgggctggcaaggattcagccccccgatccgcagcgtcacgatcaacaacttcagggccatagaggagctgacgttcgagatgccgccgcgacggcccgacagcagcgcggcagcatgcctcatgcttcttggcgagaacgccaccggcaagagcacgatcctcgaagccgtcaccctggcgctcgtcggcgccgagatcgcaaacaccctgggcctgaagccgaaagattatattcgccgcctcgatccccgccattccgggcgcgatcttaaaccggcgagggtgcacatcgaattctacgagggaccagacgccgaactgatagtgccgatcaacggcgaggccttcgagggaacgccagcccccagcgccaacgtcctcgcctacggctcgcgccgtttcttcctcaagggccgaaggcggcgggcccacagcggtggtatccgcgggctcttcgacccaatgtgggttctgccgcatccggacctgtggttgcgcactctcgagccggtgtatcaatttggcgaagtggcgcgcgcactgcgcgaggttctcgccttgcccgatgaggcagagctgcttctcgacgaggagactggagttaccatcaagaccggcgatttggaggtgtcgatcgagcagcatagcgacggttatcgctcactcttcgccactgccgtcgacatcatgcacggaatgatgggagcggcggccgatctctcagaagcgcgcggggtggtgatgatcgacgagatcgaaacccacctccatccgcgctggaaaatgcgggtgatgagcgcgctgcgaaaggcgcttcctcaggtccagtttctggtgaccacgcacgatccgctgtgcctgcgcggcatggaaaatggcgaagtacaagtcatgatccgcgacgacgaacagcaaatcgaacgtcttgaggaactccccgacgtgcgcgggctgcgagccgaacaactgctgacatcggatttcttcggcctggccagcacggctgatcccgaagtcgaattggcgcttgctcagcaagctgaccgcaccagcgctgaaggcccgccgccgtcggcggtctccccgctcgacaagctgacgggcgcagcgtcgcttggcgacacaccgcaagaacagctcgcggctgaagcaatggacagttacctcaagtcgcgagaaggcggcaacaacgaccagcgcaaggaggcgcggcgcgaggcggtctcggcgctgaaagcaatcctggaggctcgcccggcgagcgatcccgcatga

SEQ ID NO: 89995 - DNA, 900 bp, Altererythrobacter sp. Root672
atgatctttgtcgatcgcgcaaccgtggcggtcccaccgtcgctgatcgctgcgatgacaagtgccaacggcgagctggccctcgcgcgggcccactatccaccccccccggacaagccgaagaagccctacaagttcaccgcgtataagggccacgacgtaaaaatcgcgatcgagacgctcttcaagaacaagtgcgcctattgcgagacgcatcatggcgccagtggcccagtcgatatcgagcattttcgtccgaaggcggcggtgctcgatgataaagctcaccaaggctattggtggcttgcgatggattggaacaatcttctctacagctgtatcgactgcaatcggatgcgcggccaagtgatcgtgacaccaggcatgacccacgaggaagccgagaaggagcggcagaaggtaaggcgcaccaacgccggcaagaaggacgcctttccagtccggggcgcgcggctccagccggagcagatcacttttgcaacagaggacgcaactctgatcaaccccaccgaggtcgacccagtgaatcacgtgacctttgcccccgacgcgtatggccgttgccttgctgtcgcgacgggcaccgccgcggctcccgatattcttggccagacctcaatcaacgtgtttggcctcaaccggtcggcgctcgtcgatgcccgctcgatgctctggaagaagctgcgcgtccaaagtgagttcatcaaggaggacctcgacgactatgcagaggcgacgacatcccaggccaaagcgaaagcgcttgatcgggcgagacgccgctggctggaaatcgaaagctgggctcaaccggaccaggcctattcgagcatggtgtctatatttcttgcgcagctgaaggtggacctaaactggtaa

SEQ ID NO: 89996 - DNA, 2292 bp, Devosia sp. Root685
atgttctttttcgacaatgctcgccggggcaccacgttcccgcgctcgctcgaccaggacgccttgcgtgaaccactggaccagatccgaagatacttcgagctcgacgacaagcgtcgtagccagacggatgtccctacggtctggaagcgtccgttcgatgaagacgttcttcaggcactgacgaacctttcccatgggaagtgcgcattttgcgagcaacaagggttggttctccaaccctataggtttcgcccccctgcctatgcagagccaagaacacagtccgatgacaaggacagctacctgtggctggcgttcagctgggagaacttgttccccatctgccaagactgtcgtcaatcgacgaaatcgatgttcccggtggagggaattgttcgggaagccaagccttctccgatgctcctcgacccgcgcgctcgcctgaagttcaacgagcggccgatccttctcagtcccggagaacgctcggtaagctcgagtgccttcggaattcgacttgatggaatacttgtcggtaaagggccccggagtcgggaaaccgtcgaacgtttcgatctcaaccgccgccagctggtagaacggcgagcaatcgcacttcaggctgaacttgaccgtatatcgatgggaagtcccacccaacccttgcgcgacgccgaattcggcggctccatctttctgcttcagaagcggttggccgatgcaatgggacgcccccctgtaccagcggcaagaattggcagggtatggagggaggcggctcagggcccgcggttccgagagcaattcgccgaagcagtcgaacggttgaaaacgcaggatgccggcatcgaggtcgcgcctgccgaacgcgtgaaggcaccgagaaccgaatccccgctcaaccgcgttcgaatacgcaacttcaaatcgctggagttcatcgagttcgacatgccgaaggcgacgccggttgcgacaaccacagactacacggaaatggcaaagacgccctgcctactcattctgggcgaaaactccactggcaaaagcagtatcctcgaggcgatcgcgttggcctcgatagaagaggcaacgagacgcgcgctcatccccgccccaaggaagctgacccttaatccggactacatgggagcgcaggggaggcgacacgagccaagggaaagcaacgtcatccttgatctggacgacggtcgactcgaaatctccatcgaaggcaattccttcatcgaccttggctcacgggcccgcccccaggttttcgcctatggcgcgcatcgcctctacggtgacaagaaacggtcggacgaattgcgccatgtagacacgctgttcaagaacgaccgggcggtgtcaaaccccgagccttggctcgttgaactccacaggcgagacccgaaggatctcgacgaagtggcaagcgccttgagacacatcatccagatcgaaggagaattccgggatatcgaggttgccaaggaaggtggaaaatcacgctgctacatcaacataaaccggacccgtgcggacggtacgacatacgtcctgcgacagcgccttgacgctgcttcctccggatatcgagccgtccttgccctggtctgcgacatcttccagggtctgatggaaagccagcagagaagcggaggtaagaccacccgcgcccgcgctgcccgcgaaagcgccgccatcgttctcgtcgacgaaatcgaggcccatctccatccgcgctggaaactccagatcatcgctggccttcgggccgcccttccgcaggtgacattcatcatcacctctcatgatccgctctgcgtgcgtggcatgggcaaaggcgaagtgatgatgctcaatcgctaccagaacgcggcgcccgatcaggatcgcaccatgccggaggtcgtggaacggatcacggaattcgacgacatcgagaatttcactatagagcagctgctgacctcggagctcttccagctctattcgaccgacgaccggcgaacggaggagacattcgcaagggtggcgaaactgcttgccgaaaagcgagacgaacgcgaattgagccccgcggaacgtgcagacctcgaacgctttcgatcgcagatcgcggatgccttgccatatggacgcaacgaggtgacgcaactcgttcaggaagcggtcgccgaatacctggcgaaccgtcgggccatggattccgcaagcgcgaacttggcccgaacccgggcgaaggcggaagtcgcggacttccttcgggagatcctggagtga

SEQ ID NO: 89997 - DNA, 1053 bp, Devosia sp. Root685
gtgatcaaggccaatcgtagcactgtgaagacgccacccaatctccacaagggccgtccctcggacggcaagaccgaactacagctcgtgaccgaacacatggcaggaccggatgctgccacggcctacgacttcacgagatacaaggaggcaactgtaaaggacgctctcgagcaacttttccacggcaagtgcgcctattgcgagagcttttacgcaggcgtccatccagtcgacgtcgaacactaccggccgaagggagaggtcgatggcgtcgctgggcaccgtggatattggtggcttgccatgaactgggaaaatctgctgcccagctgcatcgactgcaaccgccgaagaaaccagaaggcgccaaagccgagcaaggacgggcgccccaccctcctcgaaaccggcgatttcgatcggtccaagagcatcctgatggggaagcaaagcattttccccctggccggaagccatcgcgcggccggccctggggacgacgtcaatgctgaagaccgcctgcttctggatccaacccgtgatgacccagacgaccatctcgtctttcatgtcgaccgcgaccacctgattagcattgtttatcccaaatcgctcgacatcggtggagtggcgcccttgcccgaccccattgccgaccacgaaagcctcgtatccaaagcggcggcttcacacgttagcgccaagggaatggtttccgtccaggtctacgggctgaaccgcttggggctggttcaggcccgaaccagggtcatgcgcgacctggaattcctgctggccctctcgatcaacctcttggaggcggcgatagagctcgaagtccggaatgaccggcgtagggcagagcgcccgaccgcttcaccggatctagcctcgcgacttgcttccgacattgcgatcgatgagcggatcgcaacgaagctccgcaggtatgccaacgagacacgggaaaagatccgggaacttacggaaccgcgtgctccatactccaggctggcacgcgcttgggtggaaaggtacttggcgccctga

SEQ ID NO: 89998 - DNA, 2184 bp, Paenibacillus sp. Soil724D2
ttgatctcgattaaaagaattccagaaccgaacatattttattctcaggaattcatagtagaaaaagacttaatgcataacttttttcaagaggaaaccttggaacagttcaagcccaattataaactgtacaagataatagctaagcagctagcaaaggcttttcataataaatgcgcgttctgtgaattaaaactagacaatccttcggtgtggcatgttgagagatttagaccaagcattaatgctatgaacttgaaaggtcaaattagtagcacccattattggtggttaagatatgattggaacaacctatatttaatatgtaaggaatgtaatattaacaaagggaaccttttccctgttaaggggaagagagcacaaaggttccagcctcttgaatctgaagtacggttattgcttgacccatgtgttgacaaccctgaagaatttttactttgtgattacaattccggacttttattcagtgatacagatataggtagaattaccattgatgtatttaacttaaacaggaaaacattaaaggataaaagaaaacaagaaatagataatttgattaaactttggaattcactcacgaaaaatactcgtttaaaaagaaatcaacatttaagtaatgaggacattctattttaccaaaaggtagaggaatatttgttatccatattcaataatgataaagatgaatttttgttaataaagcggcttttcatccttacaaaactatctgagaatccagaagtacttctaacatttaactatggaattaaatggcaagaaatcattaataaacgtaaaagtatatctcatgagagcataaaaaagaaactaaatacatatgtagattatgttttaaagacggaagattatgacctgctcaaaaaaacaaagctagagaattattttactaaaagacttataatacaaaaaattgaaatttgcaattttaaaaatataggaaacctaatcattaattttcccaatcaaaatgatgagaatgcgccgtggttaatgatattaggagaaaatagcacaggtaagacatccattctcaaagctattgctttaacattaatggggagtattaatagagctaggctaggtctagatgcaaagaaatatttgaaaaagggcactaaacgtggatttgtaaaactttatttgaacaatcgtaaagccccaattgaactattttttgacgaaacttcaagcttatttaaaggtaacattgaggaacctcctgtgcttcttctaggttatggttctactagattatttacagaggaagacgaagatatttcatatagcggagaccttgcccggtgtgagaacttgtttaatcctagagttccactaataaactcagagaagtttctgttaagtttgaaaaatgaaagatttaaagatgcagttgctgctataaaaaggttatttacattaacagatacatatcgaatttataagagaaaaaaaagtaaccaagaggctatttatactacgatgtttggatcgggagtaccacttaatgagatgagtgacggttatagaacaatcaccgcattagcatgcgacataatgatgattctacaaaaaatttggaaagatagtacgtatgctcagggaatagtattgattgatgagatagactcgcatttgcatccaaggtggaaaatgcaaatcgtacagcgtctaagatcagttttccctcgactccaatttatcgtgacaagccatgagccacttactttaagaggtttaaaagaagatgagataatggtgcttagacgaaacataaaagggaatatttattcactcgctgatctgccgtaccctgaaggtttgagggttgaccaattactaacttcagattactttggtctgaacaataccattgaccctgaaatcgaaatagtcttcaacagatattatcaactcctatcaaaagatcatttgagtgagaatgagaaaactgaacttgagggaaatagagagctattaaataatttgaaacttttaggcgagaatcaacgtgagcaactagtgttcgaagcaatagataaatttatatctaagaacaaagaaattatcaaagaaggtgaagcagagaatctaaaacaagaaacattatctcgaatcgttcaaatttgggaagaaatttga

SEQ ID NO: 89999 - DNA, 882 bp, Paenibacillus sp. Soil724D2
atgatttttattgataaatcaagaattaatgctccgaagtgtttgactaaaccgaactcaataggagttaaagaacgcgaagattttataagattctattcagatgaaaataatcatcagaaaacgtataaagactataaagcctatcagcatgaagaaattaaagacgcttttaataaattgtttcataagaagtgtgcgtattgcgagagtaattatgctaaagttcagcctgtggatgtagaacattacaggcctaaaggtggcgttgttattgatggtattttagtgaaaccaggctattattggctagcttcagactgggaaaatctcctgccatcttgtatcgattgtaatagacatagaacgcacaaggttgatgacgacgatgaagagtttctgttgggtaaagctaacctctttccaattgcaaatgaatcagctagagcaaagaaagttggatatgaaccatatgaaattaggttattactaaatccatgtattgattcaccagaagagcacttgacgttccttgaggatggtattattttaggtaaaagcttcatgggaatggtttcaattgaaacatatgggctgagaagaaaagatttaactgatgcaagggaagcacatgcaaagaatataaataaagcaatttccgatgttaaatttgggttatcttttatggataaacttattaatactcctggggcagaagcgctagtaaacatttatgaagagaagcttaagattgatttaaatgcattaaaaagctttttggatgaaaagcaagaatatgtagcactagcaaggcaaatgattgatccatttattgaggcctatcgagccaggttaagaactccaattaattcagtttcgtga

SEQ ID NO: 90000 - DNA, 1437 bp, Rhizobacter sp. Root16D2; identical to SEQ ID NO: 89968

SEQ ID NO: 90001 - DNA, 738 bp, Rhizobacter sp. Root16D2; identical to SEQ ID NO: 89969

SEQ ID NO: 90002 - DNA, 1266 bp, Rhizobium sp. Root73
atgtacctggagagaatagagcttcgcaacttcagaggcatcacccgattgcaggtcgattttgatcgccggctcaccgtgatcgttggtgcaaatggtgtggggaagacgtcgatactcgatgcggttgcgattggtctttctcaatatattgcgagacttagcaagacggcgatgagcgcgagacgcatcaccgacgacgatgttaagatagatagcactggaacgaggatccagattctcgcagaggatggctcgcagaagtatcgctggacgatggtgaagcaggaccaacgtgaaaaacttctgcggccagtatcaagcgactatcgcggcgtttccgacttggtaaaacgaattgcggaaagggcagaaggatcttcgactttcctggcaggggaagctccggtcatattttataaccagcgtcgtgccattattgagatcccgcagcgaaagcgcggaaagattagtcatgaggttgccgacgcgtttgcggagagcctagacgtcggtcgtattgattttcgaaagctcacctactggtttcaggagcgcgaaactgaagagttgcgcaaacagcgtcgccagaaaagctatctcgaccctcagttggaagcggttcgaaaggccatttcatcagctacgggcttgaaagatccctattatcgtatcgaggctccccggggtttgactttcaccaagggaaggaccgagcttcacgccaaccagctctcgacaggtgagaggatttacatggctctcgccggggacctagctcggcggcttgccatcatcaatccgaatattaagaacccgctcctgggaaaaggaattgttctaatcgacgaagtggagttgcacttgcaccctgcttggcagaggcggatcatttcgtggctgaccaatacctttgcaaatgttcagttcatcattacgacccattctccgcaggtgctcggagaggtgcaatcagaggtcatcagggtgctgaatgttcgccgcaatgaagttaagctcgactatatccgagcgtcactcgggcgggacagcaattaccttctcgcggccgctttcggtgcggacgagcggtcgcctgtcgccaaaggccgtattgatcgcatcgacaaggcactcgctgacggccgcttggaggatgtggcggaagaaatccgtcaacttcgacacgaggtagaaggagccgatccgcaaatcgatattgctgaggcaaggctggcccgtcgtacgaggacggcttcagaatga

SEQ ID NO: 90003 - DNA, 678 bp, Rhizobium sp. Root73
atgaagcattcaaacaagatgttgccgccgccggagttcgtcgcgtggcttggtaaagagtgcgctgattggaagccaacctataagggcctgtcgggaactccgatgactgccgtccgagaaagcctgcttgccgagcaagggcatgtctgttgctactgtggacgcccgttgaaagacggtgatggtcatatagatcatttctggccgcaagcacatttcgacggtgtaagcggaccagatttcaccctgaactataacaattttttccgcagttgtggcccaccgggcaatcatggagttcctaagcagcgaccatcgacctgcggcgattcgaaaaagaactggtacgacaacgttgcaagcattctcccttcggatccagggtgtgaggagcgtttcacattcggacagtcggggaagatcggggcggcaagatccgacgaccaggcggctttgaatatgatcggcgcgctgtcactagacgatgatgcactggatttggagcgagccgcaattatcgccgaggtcgaggaagtactggcagcgggccgtacggcccacgaagaattacttcgtgtcagggcccgcacagacggaaagttgcccgggttcggacatgtagtggcccgttatctggagcttgaattcgggattcaaccgaagagctacagatag

SEQ ID NO: 90004 - DNA, 1605 bp, Flavobacterium sp. Root935
atgaaagttaaatcagtgtgggtttcagaatataaaaacttaaaaaaaattgatctgaaattcaattcaaatcttattactcttttggttggaaaaaatggcatgggcaaatcaaacctaatagaaattttaggattattattcaaaaattttgatttactaaacacagaagaagaatttgtttattgggaatatggaactgaacgaaaaagatttcaatatattattaattacgaatgctatgataatgatattttaattgaatgtaatgaaactaatttcatattaaaaataaagccagtaggttcttcagaagaagttccatttgaaatacttccttttaaagaattcattactaatcgaaaaataaaatatattccaaaatatattattggttattattcaggagaaaataaaagaattggaagtatattaaaagaacacgaacatcagcaaaaagatattttaaaaaattttcatcgtataaaaaaagaagaaccggattctggattaagaagaatattttttacagaaaaccatcatagtcaattgtttttattaactcttattttatttagaaagcatcttgacttcacagataaaattgaagatttatttacaaattacttagatatagaaagtattgaaaattttagtattcttttcaataatccagcatgggattactctaatatagatggaaaagataaaggaatggattttttgatttctaacattggagataaagaagaaatcaaaaaccccttttggaatcttaaaggtaaaatagataaattattaactcgtctctataatcatcagattgataatagctcagaaccaatttactatgataatgaaggagaagatcatagaaaatttgtgaaagaatttttgctctttaataaaataaaatttgacatatttatagaagaagtggttaagtattatgaacacccaattgatttttttgatgcacttgaatcagcaactattatagatgttcttaaatcaataacttttaaggttaaaaaaaataatattgaagatctcatcgaatttgaccaattaagtgagggagaacaacaattattaactgttttggggcttttattagttgctggaacagatgaatgtttatttcttcttgacgaaccagatacacatctaaatcctgattggcaaagagattatattgaacttttaaaaaaatttaatacaaatggttatgcaagtcacatttttgtagcaacacacagccctttgattgttcagagttcaattgattctgaaattcttcttcatcgaaaagaaggtaatcaagttgtaattgatactgaaagtcatgaaataaaaaattggcgaattgatcaagtattacagagtgaatattttggactatctaatgtccgtccaacaagcttagatggtttcatgaaaattcgagaagaaatcctttcaaaagaaatagttactaaagaagatattgaatacttaaaaaaaattgataaagaagaaggattattgccaagtggagaaacattgaatgattttaaaacaatccgtttattgagagatatggtttcaaaaatacctaaagaatga

SEQ ID NO: 90005 - DNA, 777 bp, Flavobacterium sp. Root935
atgagaaaaataaatagagataatttaccaccagttgatatatacgaaataggaattaataaaggggtttctcgatggagagtagctgaagccaatgtaattaaagcatataaaagtaatcctttaatttttaataatggagaatatgtatttcctacacatccatcatatactaaatggaaaaatgaattaataaataatcagggagaaaagtgttgcttttgcgaaaaagctattaaaaatggtgtcatagaacatttcagacctaaaaaaggatggcagcaaaatcctggtgatccaattagtcgacctggttattattggcttgcgtatcgatggagaaatttattattatcatgcactgattgcaatgaatcaggccaaaaaggaaatttatttccaataaatggtattagagcttttagccctacatgtagtattaatgctgaaaactgtaatcttattaacccttacgaagaagatccgtcaacatttatttcctattataaatctgatcccatatcattacattcaagaggacgtgaaactattgaagttcttaaattaggtacaagagcagatataaaacaaaaccgaaaggatatttttgatatatatgatttgtcttttcaaatatcaaaactacctcatgctatgggttcaataacaaaaaaaatgattgatgaagcaaatgatcgtgttagaattaaagttaagaaaaaagaacctttttcaggaatgattttagagaatctaaaaaacggcacactagtttag

SEQ ID NO: 90006 - DNA, 1092 bp, Kitasatospora sp. Root187; identical to SEQ ID NO: 89970

SEQ ID NO: 90007 - DNA, 552 bp, Kitasatospora sp. Root187; identical to SEQ ID NO: 89971

SEQ ID NO: 90008 - DNA, 2259 bp, Bacillus sp. Soil745
atggggtttgaaccaaatatacaaatcggaaaaagtatcaccaacaaagaattaatgaacattttcaggtgtggtggtcaaggtgggatgagacgttctattaaaaccaatactttagtattaatatctgactttacatctgatatttataaaaatgcgtgtaagaaaaacgatatttggcattttgtgggtatggggactgatggagatcaaactttagaatatcgacaaaatgcgactttgtataaatcaaatgaaaataaagttgatctacacttgtttaagaaggtaaaaaaagatgagtatcaatacataaatagggttttattagctggggagcctgaatgtgaaaaggaggatatgaacgataataatagtaggacaattctagtattccctttacttgaaattgggagtatggaggacattactaattttttattggattttccaaaaaatgaattgataaataaaaaaatagttgattctccacgtgacatgctcacatcaaacagtgtataccctcttattgagttaatgaaagaaaataatgtggatacattaataagccaaggaggttggttcttaagtaataaaggatacttccacaattgctacgcgacaaaaaagatggggaagataaatgatcttttagagagtaattacattaaattatccgatgtttttaaaagacaaaataaatttataaatccctattttaaagattcttcagtttataatgctaaaaaaagtattattccctttatggatttgcaggtagaaaaaacaagtcaaataagaataaaatatttaaaaattaaagataagcagttgaatcaaactattaaatttggaacttatgaaaatattagaaacaatgataatttttatacttctcttttaattggtccaaacggtactggaaagagtctacttctttcttttgtacaaaaaatctttacggatctataccgtttaaatgtttctaaaaccccaaacttagtaaaaaatatagattatcatttagaatatattttaggagataacacatatcaggttaaacaggaaaaagggaagattgtttttctccgaaataattcgtcaataagtttaaaagaaatgacacttccaaaaaaggtaattagctgtgcatttacgttacaagaccgtttttcaattcttaacaatcaagatcagcaaattatagatcaatatgaatacttaggtataaaaaatcatataaaaagaggatacatagaaggtttatctagcatagtggcgtctaacattatgatagcttcacttaaggacagacagtttttatataacttagagaatataacgacttttttagggtttgaacctgaattgcaaattaattttaaattagaaagcggagtatcaatagaagatacactaaccgagacagtcctagttaaaaaacaacaaggtctttccaaaaaactaagagattcagtatctgtaaaagatgtacttgattttgttagtagaattaaaattgaaagtaactctcttactatagatgaagcactattttatttaggtaaggatagcttaagcattaactttaatattaataatgctgaaaaatatgagactttatatgaagactttcaatttgtgtggcatttgatagaccttaaactttttggatctccatcaatattgttgaaaaaacacagtggttggctgcccttggaaaaagcgagttctggagaatttcaatatctgtctactatgattaatatattatctaagatcgagccaaattctataataattatggatgaaccagaaacaagtctacatccaacttggcaatatcgttatatgtctcaattacaaagtatttttaaggattttccaacctgccactttattatagctactcattcccattttatggtatctgatttaaaacaagattattcttcaattgttactctaactagggatgaagaggacaaagaagtaaaagttaactttttaggtgaaatgacttttggtagatcagttgaggatatactttatgatgtatttgatcttcctacgactagaaatcattatttggctaatgatttagatgatattttattagcaattagtttagataaaattgatgaaaaaataaaaaagaaagttgggaaaataaaaacagtacaaaagtatttgaaaaaatctgatcctcttagagagttaattgataagattagtaagaaggttgataagaatgtataa

SEQ ID NO: 90009 - DNA, 1338 bp, Bacillus sp. Soil745
atgtataagcaacctattaaatataaattatcagattacaaaaatattatcctaagtaaacacgattgggaacatgaccgatcttcaaatttaagaaggaaaataagaaatcatctcaatagtgaatttgaggggaagtgtttttactgtcaaactaagcttgatcaggggaatgcagcttttgaaatcgatcatattgttcacaaaagtaaatatatatggtttacatatagaccagaaaatttaactttgtcttgtcgcttatgtaacacttcaaaaagtaaaaaagaaactctgaattcaaccttacaaacaacaaaatttaaatttatagactatccacagaattcatgtgattttagtataatacatgcctatattgataattatgacgatcatattaaattggaagaagacttgttttataaggcaaaagatataaagggggcaaaaacaattgaaatttgttcacttcacagattaaagctagcggaagataaagctaaagcactgttaattaaaaaacaagaacgaaaacaggcaagtattggtttaagacagagtttttctaaatcctttgacagcggtacaaaagagcaaattgaaaatataataaatgaaacgcttaaaacactatctgacgaaactgattacttaacgaggctaattagtgtaacaaacaatactgaaatatcagatttaggaaaaatacttgaaaagttagaagttaatcttattaatcaaagagatatcaatcgtttaaattatctacttaaatattttgatctattgaaggtgcatattgatcttttatatgctattgaagatagtaaaagtataaagaaaagcattattaattatttaagagatacaggagtaacaggttatgatttaagtacgccctttctgtttaccagagatactttccaaacgattaaactagcttcgaataatgatttaaaaatagatagacgagtaagaaccaaattcatagatttaattaatatagcaccagactctgaaattgatttttgcaggttagattatttttttaagcatgctcctatacttctaaatattagtagaactattaaaaagattttaagtaacaactcttttatgttatcttacggcgaattaagtcctactttaataactgaaacaaaaaatgatttacatttgttagggaataaggtttctcacaatccacagttacattctttatcaaaacttgacataattcataagaatattcataaatacgatgttgactcaattaataacctttatattgtattaaataagtctgttaagttattagattcttgtaagccttaa

SEQ ID NO: 90010 - DNA, 1290 bp, Acinetobacter pittii
gtgatttttaataatattctaaaggaggatgttggtggtcttatattaactgatagtgatgtaaacaataaagttgaaataaatagggaagtaggtgtaaatgattattgtgagttctcttgcaatctaaaatatggtagagaatcaagaattgaaggttctttagtaggaaagttaaagggttcaacgagtaaaaaaagaaataaatatgatgattataaattatatggcacaatatggagagagataaatggggttcaagaagttaatttacctctattctcattctatggcgtcaatagattaactttagataaaaagaaagcctatgataaaaattttaaatttatagataaattcgatgcttataataaaaatttaaatagcagctctagttttaatgattttatattatggttgattagaaatattaaacagataagaggatataatgataacagaaatttatataaacaaattatgctgttaaaagagatgtctttggaaaaagatgatcctttatttcaaattttaattgaaaaagaaaaggaatataataatttttttgctacggattataaaagagaaaactcatattttaacataactataatagaagatgtttttaaaaggatttatcaagattttgttaaaattgaacttgatatgagtacaggtaaagatgaaatttttctcgaatttattaattataaggtcaatattaatcaattatctgatggacaacgtgtttatttaggattgctaggtgatattgcttataaaatgattttgctcaatccaaagctaccagatcctttaaaaggtcatggtatcattttaattgacgagatagaactgcatttacatccgaagtggcagcaacaatctgttctcttacttcaggaaatatttcctaatatacaatttattataactacccatagcccacatgtactatcaacagtagataaatcctctattagaattttaacagaagaaggtttgcgttcagtaccttatcaacctaagggaatcatgagttcatttgtccttgagatgcttatggatactaatgcagttccagatattaaagaagcacaagatcttgaattaataaatattatgattgaaaataatgaatatacgactgataaatttatttttttaatgaagcagttggtgaatcatttcggggaaaatcatccagaaattatcaaaattaattcaagaatcaaatttaaagaattgaaaaataatataaaaattaagatggaactaaataaaaaatga

SEQ ID NO: 90011 - DNA, 636 bp, Acinetobacter pittii
atgagatatttgatcagaaatgatgaaccgttatgtttagcatcaatgcagagtaaatattcgagttggtctgaagtattgccttctgaaaaatcagaattatggatttctttagaacagatgcagcaacagttctgtgcattttgcgaaagagaaatggaggatgacaaaaaacatattgagcattttatcgctagaagtagaaataacagtcttacttttatttggtctaatttatttggttcttgtgattctactgaaaattgcggccgttataaagattcaaaggttaaagattataatgagaataatttaataaaacctgatcaagatgatcccttatctttctttatcttcttggaagatggactgattgctgcaaaaaaggggctgtctcaaattgatgaactaaaagcaaacgaaactataagagtatttgggctcaactctaccctattaaaagcatctcggcgtattattttcatgggctataaagatattgcaaaagcttattacgaattattaaatgaatttgactctaatgatactgagacaatagctgagattattgatgagtataaacaaaatttagaaggacaaccttttttttcagcattatttcaactaatattttaa

SEQ ID NO: 90012 - DNA, 1284 bp, Acinetobacter baumannii
atgaaatttaagaaaattctgcttaacgattggcggcaatttcaaaatatagatattgattttcatccaaatgttacaattattacaggggcaaatggttcaggcaaatcaacaatattaaaattactttctaaacactttggatggtatcaaccatttttaggcacccctattttatcgaaagaacaaggagtgttctattataagacggtatttcgaccattaaataaagaatatcaaacatctcactatggtcataatatccatatattaggcaatattttttattctaatgatgcttcttctgacatttttattcatgaacaaatatacagcgatgctcaatttgacttgcaatttggggggaacatccctgtagttaagggggtccatatcagttcccatcgacctattcctaaatatgaaagattgcaaaatattcccactaatcctatggatgcgtcgcaggcttttaatagttactttcaagaaactgttaacttatttaataataattatacacagcacaccccaatttatagaatgaaagaagcaattgtttcaatggctgcatttggtccaggaaatcaatttgtacagaaaaatgaaaagattgaaaagcaattttccgactttaaagatattctaaagcagatattacctgctgatcttggttttaaagacttaagtgtacggataccagacctagtattggaaacggaaacaggagattttctattagatgcctcttctggaggaattatgtctattattgatctagcatggcagatttttctttattctcatgacaaagatgaatttgtcgtcactattgatgaaccagaaaatcatttacatccgtctatgcaacgttctctattgaatgattttgttaaagcatttcctaaagctcaatttattgtggtaacacatagcccgtttattgtttcttcaattcgtgaatctaacgtatatgctttaaaacatgaaaaaaataatgtaagcgatcaacaaagtggatgggcaaaaaaagttgtttcttataagttagatctgaatcaaaaagcagctactgcaagtgaaattttgcgtgatgttttaggtgtacccgtaacattgcctaaatgggctgatgatgagttacaaaaaatctgttcgacctttacagtccaagatattacaacagacggtttatctagattgagagctgagttaaataatgctggtttaggagagttctatccagaagcattaagtaatatcttaggagagagtgggttatga

SEQ ID NO: 90013 - DNA, 669 bp, Acinetobacter baumannii; identical to SEQ ID NO: 86769

SEQ ID NO: 90014 - DNA, 1440 bp, Acinetobacter pittii; identical to SEQ ID NO: 86188

SEQ ID NO: 90015 - DNA, 672 bp, Acinetobacter pittii; identical to SEQ ID NO: 86189

SEQ ID NO: 90016 - DNA, 1587 bp, Acinetobacter pittii
atgagtaaagattcaactagatatttagtaggtaatgctaaaaatggacatataccttctatttttactttatctggaattggtgatgaaaataatcaatataaatactttaatgaaattattgaagtccttgataatacaacagactatagagtttatttgaatgatataaatatatttaattatagaaaaattaatgatctatatatggattttcacgataaattaaccgtgattattggtgaaaatggggtcggtaaaacttcaatactggagggaatatttaggaatttaagtgtgatttttaataatattctaaaggaggatgttggtggtcttatattaactgatagtgatgtaaacaataaagttgaaataaatagggaagtaggtgtaaatgattattgtgagttctcttgcaatctaaaatatggtagagaatcaagaattgaaggttctttagtaggaaagttaaagggttcaacgagtaaaaaaagaaataaatatgatgattataaattatatggcacaatatggagagagataaatggggttcaagaagttaatttacctctattctcattctatggcgtcaatagattaactttagataaaaagaaagcctatgataaaaattttaaatttatagataaattcgatgcttataataaaaatttaaatagcagctctagttttaatgattttatattatggttgattagaaatattaaacagataagaggatataatgataacagaaatttatataaacaaattatgctgttaaaagagatgtctttggaaaaagatgatcctttatttcaaattttaattgaaaaagaaaaggaatataataatttttttgctacggattataaaagagaaaactcatattttaacataactataatagaagatgtttttaaaaggatttatcaagattttgttaaaattgaacttgatatgagtacaggtaaagatgaaatttttctcgaatttattaattataaggtcaatattaatcaattatctgatggacaacgtgtttatttaggattgctaggtgatattgcttataaaatgattttgctcaatccaaagctaccagatcctttaaaaggtcatggtatcattttaattgacgagatagaactgcatttacatccgaagtggcagcaacaatctgttctcttacttcaggaaatatttcctaatatacaatttattataactacccatagcccacatgtactatcaacagtagataaatcctctattagaattttaacagaagaaggtttgcgttcagtaccttatcaacctaagggaatcatgagttcatttgtccttgagatgcttatggatactaatgcagttccagatattaaagaagcacaagatcttgaattaataaatattatgattgaaaataatgaatatacgactgataaatttattcttttaatgaagcagttggtgaatcatttcggggaaaatcatccagaaattatcaaaattaattcaagaatcaaatttaaagaattgaaaaataatataaaaattaagatggaactaaataaaaaatga

SEQ ID NO: 90017 - DNA, 636 bp, Acinetobacter pittii; identical to SEQ ID NO: 90011

SEQ ID NO: 90018 - DNA, 1545 bp, Acinetobacter baumannii; identical to SEQ ID NO: 87768

SEQ ID NO: 90019 - DNA, 642 bp, Acinetobacter baumannii; identical to SEQ ID NO: 87761

SEQ ID NO: 90020 - DNA, 1080 bp, Acinetobacter pittii
atgcattggaatagtaacatttatgaaaaaaaatatatttatagaggtggaaaaataaaagtaaacagccaaaaagattatttaaaaaataaatttgatcaacttggtgcctctttaataaatttttttctacggtccgatcgaacaaaagataaaatttctattttacttgaagcgatgaacttggatgagaaaataaatatgtatttttcttttccttggcctttttcaccatctgaaatcataaacactccaaacccaaaatctatttcagattcactaagttctattcgtttttttaaagataaaggtgagagagtaactctttcacaagatgaagaaaaagcacttactgaaaatcttaaacttgttctaaatcattatcaatttaaagaacatcatagaagagaaaactttgagctagaattgaacctattaaaccgaagtaaagatgaaaatattgagcttctgaatagtttatcttcattagcaaactatgatctaattgaactaatagatataaaatttagtaaaaataataagagtttttatttaacagattcaagttctggagaactatctttaatattcaatttactatcaattgctggtgaaatagaaaataattcattaatactaattgatgaaccagaaattagtttacatcctgaatggcaaagtaactttcttcccctactcagcaaaatgtttagtaattaccaaggttgtcactttattattgccacgcattctcctcaaatactttcatcaactaatgataaaaatgtttacattatcaacttagaatatagcaataagttaataagaagtgaagaaatctctaaaatgtctgctgactatcagctcgcatatgttttcaaagaacctggctataaaaatgaatatttaacacgtattgctttaactactttcaccaatgttaataagaaaaaaatcttcagtgaagatgatataaattctttagaattacttctggaaaatatgagtcatttagataaaagtgatcctcttcatcaattaattttatctttaaaggaaatgagggatttatatgtctga

SEQ ID NO: 90021 - DNA, 672 bp, Acinetobacter pittii; identical to SEQ ID NO: 86809

SEQ ID NO: 90022 - DNA, 1440 bp, Acinetobacter pittii; identical to SEQ ID NO: 86806

SEQ ID NO: 90023 - DNA, 672 bp, Acinetobacter pittii; identical to SEQ ID NO: 86189

SEQ ID NO: 90024 - DNA, 1545 bp, Acinetobacter baumannii; identical to SEQ ID NO: 87768

SEQ ID NO: 90025 - DNA, 642 bp, Acinetobacter baumannii; identical to SEQ ID NO: 87761

SEQ ID NO: 90026 - DNA, 1344 bp, Acinetobacter baumannii; identical to SEQ ID NO: 87936

SEQ ID NO: 90027 - DNA, 852 bp, Acinetobacter baumannii; identical to SEQ ID NO: 87937

SEQ ID NO: 90028 - DNA, 1545 bp, Acinetobacter baumannii; identical to SEQ ID NO: 87768

SEQ ID NO: 90029 - DNA, 642 bp, Acinetobacter baumannii; identical to SEQ ID NO: 87761

SEQ ID NO: 90030 - DNA, 1360 bp, Acinetobacter baumannii
aattagtaattataaaattattacaaatttaaaaataaattttgataaagagttaactattattattgggaacaatggagttggaaaaaccagtattttaaatgctatcagaaaacacatcatgtggatagcagccagcattcgtaaagataatgcatctggtggaacaatatcgccagacgaaatcaataataaatcaagtgataataataatggggcatatattgattgtgcttttaatataggaagtaaaaatactgttagaggtagaattgcccgagtaaaagatacttcaacaattccattaaaaagtgaattaactaattatagagagatagggcaaaaaattagagatttaaatgaatatagagatactaatttccctctcttcgcattttatggtattgatagattatcatcaaaaaaaaatctaagttcagatttagtatttaataaagttgatgggtatgaagaatcattaaataaggttagtaactttaatattttcttagaatggttaattcagattttaaaaatgtcagaaggtattctttctgagcagcaggaatacctattacatgatcttaaggcattagagctaggaggagctaacaatagttctagtcctttacaccctatgtatctcaaattaaaaaaatcttttgaagatcaaacttcacagcaatttaaccataacacaaataaattattagaaattataaactcagtatatcgtcaaatttatcaagattttattcgattagagttagtaaataatgatgatggaaaagataaagttagaatggttctaaaagatgatagtttatttttacatcaattatcagatggtcaaagagtatttcttggaatgataggagatatagctcgtagattaatattgttaaatgatagctccgataaccctttaatggggcaaggtattataattattgatgaagtcgagctgcatttacatcctaaatggcaacaaaaaataattggggtgttaagaaaatgttttcctaatattcaatttatagtttctacacattctcctcaaattcttggtgaagtagaaagtaaacatttaagaattcttactcttcaagacactagagaaattaaagttactattcccgaacagtcatatgggttaacctcaagtgaaatagtagaggagttaatggggggtaacggtcgtaatcaagatattaaaaagaagatagatcacatatttaagcttattgatcaagaaaatcttgtagaagctgagaataaaatagaagagcttcaatcagaattaaatggtgaaattccagaactaatagaagctaaaagcttaattcttatgatgaaataa

SEQ ID NO: 90031 - DNA, 642 bp, Acinetobacter baumannii; identical to SEQ ID NO: 87761

SEQ ID NO: 90032 - DNA, 1284 bp, Acinetobacter baumannii; identical to SEQ ID NO: 86768

SEQ ID NO: 90033 - DNA, 624 bp, Acinetobacter baumannii
atgataaaaataattaaaaaacagaaacctgctgtgttaattaaaaatgccagtaaatggaagtcacaattacttgatgatattaaagcagaaaaaaaatcaacaaagtacctcttaacaagatatagtcatcctgagattaaagagacattaatcgaagagacacatggtaaatgtgcttattgtgaaagtaagcttttgcatattcatcatggtgatattgaacatatttttcctaaagcactagatcaatccaagcgttatgaatggaataatttaactctttcatgtgaaatatgtaatcagaataaatctaatcatgatcctaatttgaatcatattttaaatccgtatattgataatcctgagagtagccttattttttttggtaccttcgcgcatggtatggataacaaaggtgaagcgacaagatttttattagagctaaatagaacagctttggtagagaggcggcaagaacgtctagataaaattagactgatagtgaaggagttaaataacacaggtttaccaatagtcgctagaaaagctatttatcaggacttaattgagaacgagggagcctgtaaattattttgtgtaagttccattttttataaatga

SEQ ID NO: 90034 - DNA, 1440 bp, Acinetobacter pittii; identical to SEQ ID NO: 86188

SEQ ID NO: 90035 - DNA, 672 bp, Acinetobacter pittii; identical to SEQ ID NO: 86189

SEQ ID NO: 90036 - DNA, 1545 bp, Acinetobacter baumannii; identical to SEQ ID NO: 87768

SEQ ID NO: 90037 - DNA, 642 bp, Acinetobacter baumannii; identical to SEQ ID NO: 87761

SEQ ID NO: 90038 - DNA, 1290 bp, Acinetobacter pittii; identical to SEQ ID NO: 90010

SEQ ID NO: 90039 - DNA, 636 bp, Acinetobacter pittii; identical to SEQ ID NO: 90011

SEQ ID NO: 90040 - DNA, 1545 bp, Acinetobacter baumannii; identical to SEQ ID NO: 87768

SEQ ID NO: 90041 - DNA, 642 bp, Acinetobacter baumannii; identical to SEQ ID NO: 87761

SEQ ID NO: 90042 - DNA, 1314 bp, Bordetella sp. N
atgaagctggaatccctatccctcgcacactgcggcggcttcgagcagctcgacatcgccttcgagccggatgtgacgctgatcgcgggcgtcaacggcgtaggaaagtccaccgtgctgcatgcgctggcggtgctgctgtcaagggcaatgccggagttcacgccctcgcgttcggcgccgctgtacttcaccgatgacgacatccaccgtgacaagggctcgctggaggtgtccgcacgcatccagatcgacggccagatcatcaatgccggcgtgcagcgcttgcgcgcggcggacgataagggcgaccgcttcatgctgctgcggcaggcgaaagctgccaccgacgacaccgatttcgcccacgcgttgagcacccgcacgctgaccggtgagctggaggccggcatcaaggaaacccgcgccgcgctagcgatcctgaagaattcttcccatccgccattggcggtgtatttctcgcccaagcgccagttgcccggccagccacgcagcctgccggaggcaaagcccttcgacccgtccatcgcctatagccgcgccctgcacgaccgcgaagtagagctgcgcgagttcatgcactggttccgtacccaggagaagctgggcgcggccgatgagccgcgccggttcaaggtgctggacgcattgcgcgccgtggtggttgaactcctgcccgagttcggcaacctgcgcatccaggaacaaccgcgacttggcttcgtggtggacaaacgcgggcagcccttctatctgcaccagctttccgatggcgaacgcggcctgctggccctggtgttcgatctcacccgacgcctggccatcgccaacccagagagtgacaaccccatcgccgagggcgtggggctggtgttcatcgacgagatcgagctgcacctgcatcccaagtggcagcgcgatgtcctgcagcgcctgcgagacatatttaaggcctgccagttcgtggtgactacccattcgcccctggtgctgggcgaggtgccggcgcgctgcgtgcgcttcctcgaattcgtgaacggcaaagtgggcgtaaccgtgcccgccgaggcctatggcatggacgccaatcgcatcctgcaggagttcatgggcgccccggtgcgaaaccggcaggtggacggcgagctgaaggcgcttttcgaactgatcgaccaggagtgtttcaacgcggcgcgtgccgccattgcggccctcgaacgcaagctgggcgaggacgagcccgagctgacccgggccagttcgctgatccgctttctggagggcgccgagtag

SEQ ID NO: 90043 - DNA, 630 bp, Bordetella sp. N
atgcggaccatccagaaggggccggagcccgcgaccttgacccagcatcgccagcagccgcatgccgactacgacaattacgccgacaaggcgactttgcggcaggcgctggtggccgagcagcgtggcctgtgctgctactgccagtcgcgcatccgggccacgcccaagggcatgaagatcgagcactggcaatgtcaggccagctaccctgggcggcagctcgattttggcaatctgcacggcgcctgtctgggtgggcacggccgtcccgaacgcgagcagcattgcgatacgcgcaagggcaatgacggcctttgcttcagcgtgtgcgacccgccgcaccccatcgagcacaagattcgctttttaggcgatggcaccatcaaggcagacgatgccgccatcgaagaagccctcaacgcggtgctcaacctgaacctgccgcgcctggtgagcaatcgcaaggcggtgctcgcagcgtttcagcagcgcttgcaggacggccgccgcgttgatccggcgcgtgagctactcaagtgggatggcagcgaacccggcgacctgcccgagttcgcacaggtggtcgtctattggctaagaaagaaacaagcgagggccgccgtatga

SEQ ID NO: 90044 - DNA, 1545 bp, Acinetobacter baumannii; identical to SEQ ID NO: 87768

SEQ ID NO: 90045 - DNA, 642 bp, Acinetobacter baumannii; identical to SEQ ID NO: 87761

SEQ ID NO: 90046 - DNA, 1545 bp, Acinetobacter baumannii; identical to SEQ ID NO: 87768

SEQ ID NO: 90047 - DNA, 642 bp, Acinetobacter baumannii; identical to SEQ ID NO: 87761

SEQ ID NO: 90048 - DNA, 1242 bp, Fusobacterium nucleatum subsp. polymorphum; identical to SEQ ID NO: 87858

SEQ ID NO: 90049 - DNA, 585 bp, Fusobacterium nucleatum subsp. polymorphum; identical to SEQ ID NO: 87859

SEQ ID NO: 90050 - DNA, 1356 bp, Pseudomonas veronii
gtgcagaattaccgctgctttggagagttcgagatcgacttcgaccctcatctgaccatattgattgcttccaacggaggcggtaaaaccaccattctggatgctgcgcgagttgctctatggccttttgtaaagggttttgacctcggtagccagaccggaaaatccgcgacaattcaaatcgacgacgtgcgccttgcacaccttgccagcggcaacatggagcctcaaattgccagcgtcatcgaggcctggggtccgtggggaccagacgaacttgaaaacaattggttgcagcagcgcacaagcttgaagaagtcgaccaatacccttggcgacacaggctcgaaagcactgactggatacagcaagtctcttcaggaaaaagtacgtcgcgatgagcccgtcgtgttgccgctgataacttacttagggacgtcccgactctggttcgagggccgtttcacctccgcagcggctcaaactactctcgacaaaactgagtactctagaacctcaggctatctgaattgcctctcctactcttcgagcttcaaaactttcacagcatggtatggctggatctatcgcagctatcgggaagcacaggtgatcgccctcgagcgcaacgcagagctgtccgacctaggcattcgcttcggacagatcatcaggtccgtaaaagaagccattgaccgattgatacaaggcccgaccggctggcacagcctggaatacagtgagagccatcaacagcaactgatcatgcatcacccggaacaaggcatattacctgtagagatgctgagcgatggactgcgcaacgccattgccatggttgctgaccttgcctttcgggcctgcaagctcaatccgcacttaggggaccaggccccctcacaaacgcccggtatcgccttgatcgacgaagtggatatgtttctccaccctcactggcaacagacaatcctagggtcattacgagccgctttcccagccatgcaattcattgtgaccactcatagcccacaagtattgagtactgtgcggcgcgaaaacattcgagtgattggcaaggatgtgcatggcaacttgatcgcctctcctccactggcaatgacctacggtgaacccagcagcagtgttttacatagcgtcatgcaggtagatccgcagccacccgttattgaaaagcccgagttgttgcaactcaccgaatgggtggacaaggggcgctatgacgagcaacccgcagttgaattgatggaacggctgacagcagcactgagtgaacagcatccccaactgcaacgcctacagcgcagcatcaagcggcagcgggcgcttaaaagatga

SEQ ID NO: 90051 - DNA, 573 bp, Pseudomonas veronii
ctgtgttgctacagtgagattcgacccgatctgatcggactagggttgcatatagagcacgtcgaaaacaaaagtcagaatccccaacgcacattcgattacagcaacctggccgcctcatccttggatagcgagaccgatctgcacacgttcaaaggccaggcgtcagaggtatttggcggacatgcgcttggaaaatcgagcgcagtcgatatcaatcgctttgtgtcctgtcatcaatccgattgcagccgcttcttcgcgtacctgtccgatgggcgcatagtggccgctgacggactgtccgcacaagagaaggaccgagccaaatacaccattgacctgctcaatctgaatagcccctttcttcaggagttgcggtatcagtggtggagcgaattggaagcgcttttcaacgaacatattgatcaggatatgagcctgcactgccttgcaggcattgaccttgcaccgagaggaacacaactgagcccgttcttcagcatcacacgaaacttttttggcaacattgctgaagaggtgctggaacaggaagctcctgatttgaagtaa

SEQ ID NO: 90052 - DNA, 1311 bp, Pseudomonas veronii
gtggccctctatctctctcaccttcagttcagcaatatccggggtttcaaaaatttctccttgtcgttcgatgctggaaagaagcaccggcaatggaccatcttgataggcgataacggtcacggtaagaccaccatactgcgcgctattgccctagggctgggcgacgaggtgacttctagcgaactgttagcgctcctacccggccaattcatccgaatgaataaaagagggacctatacctcgtcgagcgagattattgtcactttgcgggacagcgaatcgaagcagctcatcaccatcaccacggagttgaaattagacgagcacggtggtgtccgcatcagtaaaaatgtaaacgagtctgcattcaaatggagcgatatatttgtctgcggttacggctccaatcgaggaattggtggccgaatgcacagtcaatatgccttacgaaactctctgctaacactgttcaatgacagggcgggactcttggagccggagtcaatactccgggattttgcactcatggctgcccagcgaaaaaggggaacagatgatccaatgaaagagatgaagagctatctctggaaattgtgggggctcaacccgaatcacgccttggacatatccgcggagcaggtagtcatacacggcccttggggcggaatgccatttcatgctctgggcgatggttataggggtaccggtagttggctattagacctcatgggaaactgcgtcaaagctggccgctggaattctccacaaaaactggccggcattgtgctgctcgacgagatggacgaacacctgcatcccaaatggcaacgaacactggttcccacattgcggcgccttttgcccaatattcagttcatcaccactacccattccccattggcaatcgtcaatacacgacccggtgagctgtttgcgactcggctgcacaatgcagtagcggaactaattcctgactcgttaccgtcgcctgacggtcgtggcgccaatgagcttcttctcggcgaatggtttggattaacgtcgacactagatagcgctagcgagaaactgctaaagcgctatcgtgatgctttccaaaacggagatcagaaactactagaggagctggaacccaaggttcgccagcgcataaagtcgttcctcccatctcaattggacaataaagcgcaagaagatttggataaacgacagcgctcccaggtcgattcactgactccagagcaagaaaaaaagctggttgcacaggctgcgcgcaagcgactcgatacgctgagaaaatcgaaatga

SEQ ID NO: 90053 - DNA, 360 bp, Pseudomonas veronii
ttgctcatcaaccctttcgtcgtagaccctgaacctcattttcagtttgatgcagtaacagggcaaattcgaggattgaccccacgaggtgtggctacaatcgacgtttgcgggctggaccgccgctcgctcgagatacagcgggcgaccaaaggggccaaactgaacaaacgatatcgcgaatatcttggggccttggatcagggcaacgttcttgcgcaaaacaacgcaatgagagccttgatagatgaatgccgcagcaaagaaccatttgctgcagtcgcgcgatacttcgtcaagcaacacctaaagataagctattacgatttattggaaatgaagcgaaagcgactgatctaa

SEQ ID NO: 90054 - DNA, 1269 bp, Pseudomonas sp. DSM 28142
atgcgcctggaccagcttcatattcagaattttcgttgttacgaggatgccacttttgactttcagccgggatttaacctggtggtgggagttaatgggagtggaaaaacttcattattgcaggcagttgcgtctagcctctataacttttccacagcaatgggaaatagagacgctcaaattactgatcaagatgttcgatttaccatccagcagtacgatgatcgctacagattcgagcatttataccctttaaaacttaatgccaaaggctcagctttcggccttgacaattgggaaatatttaaagagcgaaaagaccaagggcaatcttacaatcacgtagtccatacaactgtatctacgcagctcgacaatttagactccaaaggtcaaatggaccttcccataatagctttttatcgtgccaaccgccgttgggcttctccgaatgtgaccgctgagttcgcggccacacaaaagtcatcacgtctggatgcctacgcaaactggtccgatgccgcaataaatcttacaaattttgaaagttggtttattggaaaaacgctggagcgcctacaacggatgtcgcgatcagaagctaaaaactctttcgacgatgagttgctctgggtcaatctggcacttaaatccgtattacccgattcaaaaggtatcgaatacgacctcggactgcgcactctgctagttcaactaaatcaaaacaaaaccctgccattttcaagtttgagtgatgggcagcgtggtttattttctttgatcgccgacattgcacgccgaatgtgtcttattaacccccacatgggtagcaaagtcttagagaagactaacggcatcatcgtaattgacgaattggacattcatttacacccaggttggcagcgcagtatcgtttcgacgttaaaaaaagcttttccaaagatacagttcatagctgcaagtcactctccacagataatcggtggtttgatgccaaatgaaatcatgcttctgaacgacggagatgcttcacacccacgcgtatcctacggactagattccagccgagtgctcgaggagatcatgggcgtatccgagcgcgagccagaagtggaaacgctcctcagcgaactattcagcaccattgaagacaacaacctggtagaagccaaagcccagctcaaagcgctcaggaaagttgcgcccgatcttcctgagttcgcaggagcacaagcgttgatccgtcgcaaggagatcctcggaaaatga

SEQ ID NO: 90055 - DNA, 645 bp, Pseudomonas sp. DSM 28142
atgaaacaaatattcaaaggatccgagccagcgtcatttacccaatggaaggcgtcaaccaacgaagagtgggagcctacctattccactcttcagaaccctcagaaacgcgacctgcacaatagcctactactggagcaaggttatttctgttgctactgtggccgagacattgatgcgacatccagtcatatcgagcactttcgaccacaagaaacttttgacgacctcgctctggcataccaaaaccttcatgcttcttgtatcagggaaaccaaacccggcgccccattacactgtgggcacgcgaaagaaaactggttcgacgaagccgaacatatttctcccttagaggaaaattgtgaacagcgctttcgatatcttctgacaggacaaatacaggcggcgagcacctctgattcagcagcgactaaaatgatcgaagttctcgccctagatatcgcctatttaaacaacagacgccaagatgcaattgaacgcgtctttgacccctcattcattgaggcagccaatgtagaagacttcaagactctcatggcggttttgcgttatacacccttaggtgaacaacaagcattcgaccatgtaatagctcggtttgcagaacaattaatagacacatga

SEQ ID NO: 90056 - DNA, 1287 bp, Bradyrhizobium pachyrhizi
atggcagacaatcaattccgacaccttgaaattggcttgtggcgtcagttcgattcagtctcgatcgatttccatcctcggctaaccgtcattacgggcgccaatggagctggaaagagtaccctgcttagtttgttggcccagcatttcggttggtcgcgccattatctcggtgtgccaaaagcgacgagcgatggcacgctgtcgttcatttcagggctggtgaccgatcttctcaagcggtttgtttttcgtactcaacaacccaattcgattggatacatcgactacacagacacgactcgttgcacgctgatcgtgaatgacaacaacagcgtacaatacgcgatcgcatttatgggccaacaggccgttcagggtcttctaatcgattcccatcgaccgaactcgatatatagtcaggtcggaagtgtacccctacaaccaatgaccgcggcacaatcgtacaacaactacaacaacgagatgcatgctaggtaccaagggggccatacaggccaatcgcccatttaccgcatgaaggaatccatcatatcgatggccattttcggagagggtaacagaacactcggtggctccaacaagggactgttggacactttcaatggcttcaacgaagtgctccgcaatcttttgccaccaagtctaggcttcgaacgaatttccgttcgatcgcccgaagtcgttttggttacgcgatctggcgaattcatgctcgatgcatcgtcgggtggcatcatgaccctgatcgatgttgcttggcgcattttcatgttctcaagagataaatccgagttcgtcgtgctcatggatgaaccagagaatcatctacatccatcaatgcagcgcactttgatgcgacgtttgataaacgccttccccaaagctcagttcatcatagcgacccatagtccgttcatggtgtcgtcagtgcgagactcgaatgtgtatgtgctcaggtatcgccaagacgcgacgtcagcgaacatttcctcagatgttggtctggctgcaaaccgaaaggtttttagcgagccgctgcccttaacgaacaaggcggcgagtgccggagacgtcttgcgagaagtactgggcgtcccagcgaccatgcctgaatgggtagaagaagatctagacgacgtaattaatcgctaccgaaaccaaaagctcacgtctgaactactcgattcgttccgaactgagctgactaggcttggtttcgacgagtactaccctgaagcattagcgaacctcgcccgccaataa

SEQ ID NO: 90057 - DNA, 654 bp, Bradyrhizobium pachyrhizi
atgatccgattgcacaaggggccagaaccccaggttttgatcgataatgcagccgcttgggaacaagttctccgcgaccatgagtcgaacaacaccgaaccgacaaaaacggagctcaatcgttatgggcatcctgaaatcaaaaccgcgctcatgcgcgagacgcacgaaaagtgtgcctattgcgagagcatattccgccacgtctatcccggcgacgttgagcacataattccaaagcggaacggtatcgagtatcggttccagtggagtaaccttacgatcgcctgttcgacgtgcaacacgaacaaaggcgtaaaggaagggctcgttgatccctatgtcgacgatccagagggggcgtttcaaatcgctggtccggctatgttggctgaacctaccgatggcaaggcgcatgccactgaggtcgcactccaactcaatcggagtgctctggtcgagcggcgagccaagaggctcagtggccttcacttgatgctgagggttgctcttcagcagacagaccagaattatcggcagatactgtttgacgaactccgcagggaagctgcggagtccgccgaatttgctgccatgtcgcggtggtacgtcaacgacttgatacagaaggggatactacccccgtccaactaa

SEQ ID NO: 90058 - DNA, 1176 bp, Bradyrhizobium pachyrhizi
atgctcctcggcgagaactcggtcggcaaatccagcatcctgcagggcatcgcactcgggctgatcggcgaacgcgaggcaagacgcctcaagattgatccatcggacttgctccacgctgaccacgacggtcgctgggaccagctcacgcccgacgacgcgagcgttcgcatcgacttccgcttgtctggccgctcgaccgagttcgtcctcaattccatgacgaggagggtgcacggagaccggcggcctgtagggctcgtgctcggttacggtccccaccgctactttgatccacgcaggtcggaccgaccggacgccgactacgctagagttcgtacgttattccatccgacagcggcgctcccatatccatcaacttggctgaacgcactggattctcacaaatttaacgaggtggcgaaagttctgcgggtggttttggcgctcaacgatgccgacgaagttgttcgcgacgtagacggccgcatctgcgtcgcattggacggtgccccagtgcccgtcgagcgcctgagcgagggttatcgttcgatcttcgcgatgatcgtggacatcgcgcgcgagttgatgcgtgacttccgctatctggaagatgcagaggccattgttctaatcgatgagatcgatacacacctccacccacgctggaaaatgcgtgtgatgggcgcgctgcgccgggcgctcccccgcgtacagtttgtcgtgaccacacacgatcccttgtgcctgcgaggcatggaggatggcgaggtgatcgtgctccaacgcgatgaggccggccagattatttctctgccagacctaccaagcatcaagggtatgcgggcggaccaactcttgacttcggactttttcggcctctcgagcacagtcgaccccgagactgagttggacgtcgcacgctttgtcgaagctgtgggcgacctacccgccgcgcgcgtcgaggaggccaatcgcctggttcgacagcttgttttgggcgacgacgcgcttgagcaggtcgtgcaggaagcgttggcgcagtttctctctgagcgggagcgtccaacaggggcgctgaggacggatgtccgagcgcaagctgtccaaacgatcctcgacgcactgcgatcggacggcgcgcgcggcactgacgcggagacgctcggctcatga

SEQ ID NO: 90059 - DNA, 960 bp, Bradyrhizobium pachyrhizi
atgatcttcgtggaacgtggagacaacgaaccgccctcgctatcgtcttatgcgacgatcgcacaagcccgagcggcttccgagtactaccatcactgggttacgggcgatccgggctttggcgcattcacccgctaccgggaatatgatgttcagcaggcgcttcgtgtcttattccatggcaagtgcgcatattgcgagaaactcattgaaaaaggcagcgccgaagtcgagcactatcgcccgaagggggcagtcgaaggttgcgatcacccgggatactggtggctcgcactcaagtggtcgaatctgctgccaacctgtccgggctgtaacaaggcgctgaaacaccacgtggtgacggctgacatgacggttgccgaagttgagacaattcaggccaccgagccgcgcacccttttgggtaaggcgacacagttccctgtaggtgcgccgaggctcgttgctgtttgcgacgatcatttcgctgagcagccgcatttgatcgatccgaccaggactgaccccgcgtctgagttgctctggcgccatcatgcggactacagcgtcgttgaagcagcgcctcgcgctggtggacggagtattctgggctccgagacgattcgctgcgtggccttaaatcggctggacttggtccaaagccggacggctgttctaaacaggctcaaagcaaaccgaacaaagatcatagaagaccttgagagtgatgtggcggtcacgctcgacccagcgctgatcgcgctccatcttaaatcagccctgcgcaggatcggggacatgaaacggagctgtgcaccggagcagccgttttcggcgatggcgcgcgcattcgtcgacgccttcgaggcggagctcgaagcctggatgcaggccaggcttgcccgaggggtgagcggagcggatcacgagcagaagtgcgaggcagggcctcgcggatga

SEQ ID NO: 90060 - DNA, 807 bp, Roseovarius atlanticus
atggtggtacgcgccctacgtgaggtctttaacatcgagggctcgtttgaagtcctggaacgcgacggtgacaggatctacgtggtggtcagtcccgaaaataccacggacggcccattgcttcgcaccccgattgaacttgtatcctccggctttcgcgcggtcttggccatgctttgcgacatcatgcagggccttatggacaagcgtgtcaatcatggtttcacctcgctcgagaatgccacggcgcttgtgcttatcgacgaggtggaggcacatttgcacccgcgctggaaaatgtcgatcatgaccgggttgcgaaaagcgctgccgggggtgacctttatcgctacgtcgcacgatcctttgtgtctgcgcggcatgaagaagggtgaagtaatggtcctcgagaggatctcgggcgatcaggcaagcaccagtctgccagtcttcacccacagcctcgtcgatctgcccgacaacgacaactggacaatagagcagcttctcacagcggacttctttcagatgcgatcgaccgagagccttgaggcggagcggcgagcagcgcggatggaggaccgcttggcgcaaggagcaaaccctgcagaagaccccgagcttcgggattacttggcggagctctcggccgacctgcctatcggccacaccgaagtgcacaggcttgtgcagcaggcaatagccgatttcctgcgcgaacgtcggcaagcaagcgacgaaaagctacgtggtctcagggagcaaacccgacgatctatcctcaacgcgctcaggagcgtgggatga

SEQ ID NO: 90061 - DNA, 948 bp, Roseovarius atlanticus
atgagacgggtcgaacgcagtgaggcaattccggaggacctcaatgagaaaggggcggcggaacttgagaaagccatccagcacttcgaaagcaaccctcccaatccggatagtttttcgttccagcgttacaaactgaagtcggtgaaagacgcgcttgaacggattttccacggcaagtgcgcctattgcgaaacgttctacgccagtacgcagccactcgatgtcgagcatttccgtccaaaaggtgcggttgccggagaaaccgggcaccgtggctattggtggcttgcggcggactgggacaatcttctgcccagctgcatcgattgcaataggaagcggaatcagatcacacctaagggcgagacgtcgcaagttcggctactcgaggacaccgtcggcttctctgccgccgtcactgtcggatctgggaagaaggacagctttccaatagcgccaaccggtgcacgtgccaggagccgcaccgatccaatcgccgcggagaagccgctattgctcaatccgtgcgaggacgatcctgagcagcacctgacgtacttctttgatagagagcacccggtttccttcgttctcgcaaaacatctcgccggggatccggatttttcgggcgacgacgggttaagcctgaagggcgctacgtcagtacatgtctacggactgaaccggcttaggctggtgcaagcgcggacccggcttctgcggcggctcgagtttctggccgatctggcgatagacctcaaacagctggcggaaaacctgaaacagaaggcggacccggaggtcgttcgcgctggtcaacaggtggacgcattcggcgaccgaacactggcggagcttgtcggcatgtgcgctgaagaccagccgtactcggcgatggctaaggcatggatgcgcgattttcaaaaccgcctcgaagcggcatag

SEQ ID NO: 90062 - DNA, 2184 bp, Lysobacter antibioticus
gtgaaaaggctggcgacgccgccgtcgttgcgccggccggaattgctcgactgggcccgcgaaatcaccgcgttctacagtcgcccggccgaggagcgccagcgccagcgcgcgccgttcgagcgctacgagccgttgttcctgggcgaggacgtgtacgcggctctggacgcgcagttcaagagcaaatgcgcgtactgcgaatccggcctgcagatgcacgaaagccgcatcgatccgttccgcccgatcctggccgcggccgatccacgcacgcgcgaggaaagccccgaccactacggttggctggcgttcgaatggcgcaacctgatgtatgcctgcaacgaatgcgtctcggccaagcgcaatctgttcccggtcgacacgccgcgcgccttgccgatgacggcgtggcggcagacggtcgcgagcgagaacgcattgctgatcgatccctgccgcgacgaccccgcgcggcatctggcattcctgcccgatggcggcttagtcggcaagaccgacaagggcgcggcgagcatcgaggtgttgaacctcaaccgtccgcgcctggtggaggcgcgacgccaatggatcttcgacctgctgagcactgtccatcaggcgatcgatccggaggccgaaccggtcacgatcggattgatcgacgagttggacaacctccggcacagcggcgcgatccgttccgcgctcgacgcggtggccaaggaaaccgcgcgccgggccgggctcaagcccatcgtcggcttccgcccctcgcgcgacattccgcgcctggccggacaccatgaggtctgggaccgggtcgcctacgaatatctgtcgggcgcggacaaaacgccgatctccgaatctctgcggagcgcggtgggcgagtactacgaactcaggcccaggctggacccgtcccacgtcgaacgcgtgcgcatcttcaacttcaagggcatcgacaccctggagctggagttcgcccatgcccaggcctccgacagcaatgcctccggggtgatgctgctcggcgagaacgccgccggtaaaagcacggtgttgcaggcgctggcgctggccttgatggacgagcgcctgcgcaagggcagccgggtcgagggtgccgatttcctgccgcgccagcgcgaatcctgggaggtgctgaccgaccggccctatgtcgaggtgctgctgtcgtccggcgacacccgccgcatcgagatcgattcgctcggccgcatcgagacctacagcgacgcggtgccgtcgatggtgctggcctatggcgcgcggcgcttcttccgctcgcacgagcgcatccacaagaacgcggtcaaccgcagtctgttcgaccccttcgccaaactggaagatccctcgccgtggctggtcgaggcgagccggcagcatttcaacgcggtggcccgggcgatgcgcgaggtgctctccttgcacgaggacgacgacatcttccgcggccccggcggccacgtgatggtgcgggcccatggccgcgtgaccccggtcgagcgcatgagcgacggttatcgctccctgttcgcgatggccgtggacatcatgcggcgcatggtcgacgcctggggcaacctggaatacgcgcagggcatcgtcctgatcgacgagatcgacgtgcacctgcacccgcgctggaagatcgaggtgatgtcggcgctgcggcgagcgatgccgaaggtgcaattcatcgtcaccgcccacgacgcgctgtgcctgcgcggcatgcgcgacggcgaggtgcacgtgctgtaccgcgaccagcacgaccgcatccggccgcgcgaagacttgccgaacatcgagctgttgcgcagcgaccagttgctgacctcggacttcttcggcctggccagcaccgcgcggccgcagaccgatgcggccctgcatcgctatgcctatctgctcggcaagcccgcgctcgatgccggcgagcagcgcgaacgcggcgcgctggcggcgcaactcgcgggcctgccgctaggcgacacgcccgtcgagcaactcgtcggcgaggccacccagcgttatctcaacgatcgccgccgtcgcggcggtgccgagcgtgcggcgatgcgcgaggacgcgctcgaggaaatcgtggccctgttgagcgcgggcgccgcagcgggagcccacgaatga

SEQ ID NO: 90063 - DNA, 918 bp, Lysobacter antibioticus
gtggatcgcaagtcggtgcgggcgccggcttcgctggtcgacccggacggcgccggccggcgcgaactggagaaagcctcgaagcattacctggacccgaaggccgagactttcgccttcaaggcctataagcggcccgacgtcaaagaggcgctgcgcgagctgttcaagaagaagtgcgcgtactgcgaatccttgcacgaggcgacttcgtcggcggacatcgagcattaccgtcccaaggccggcgttgacggcgaacccggccatcgcggctattggtggctcgcggccgactgggacaatctgctgcgcagttgcatcggctgcaatcgcgtcgaaggccaccggatcgccgaagccggcatgaccgctgcgcaactggccgcgcaaaaagtgcagagcgtgggcaagggcaacgcgttcccggtgtcggcggttcgggcgttcaagccgggcgacgactgcgaccgcgaagaccctttgctgatcgacccgacccggcgcgatcccggcccgcatctggcctggcataccgacaccgatctgtcgctgctgagcccgagcttccacggcgccgtcgccgatgcctacggcgaacacacgatccgcatcatggcgctcaatcgacaggccctggtcgaggcgcgcacccgccatctgcagcgcttgaacgatctgtcgttcgacatcgccgaagccctggacgaggccgcggtcgcggcacccgcgcagcgcgcccgtcccctgcagcgggccgcgcgcaaacgcgcgcaactgctggcgatggccggcgcggacgaagagttcacggcgatgacgcgggccttcgtcatcgtggccgaaggcgagctgctcgcgcgttatcgcgagttactcgaaagtaaggccgagcaggccgacgcggtcggcgcttaa

SEQ ID NO: 90064 - DNA, 1377 bp, Salmonella enterica subsp. enterica serovar Infantis
ctgcttaactttcgttgcttcagacagctcgatattacttttgatgagcacattacgattctggttgcaccgaatggcgcgggcaagacgacagtgctggatgcgatacgcctggcgctgtttccctttattcgtggttttgatgccagcctctacgtaaaagataaatcgctggcgatccgtacagaagatgtacgtctggttttccgccccgaagcgctgaacatggaaatgtcgtctccggccatgattacggctaccggggaatgggaaagtggaaaaacggcaacctggatgctcgacaagcgaggagaacagccgccgcatgaagataagacagcggcgcagcttacccgttggggtgaacaacttcagacgctggtgcgtgaagagcataatttgcagcaggttgagcttcccctaatgctttatctggggactgctcgcttgtggtatcaggaacgttatgaggcacagcctactgaacagcgtctggataacagcgccttttcacgtttgtctggttatgacgattgcctttctgccacatcaaattataagcaatttgaacaatggtatagctggttatggcttagctaccgtgaacatcaaatcacacaacttgaatcaccttcagcaaagttaaaagaaggtgttcgtgttcagcggatgaaagaagctattcaagccatccagcaagccattaactgtctgacgcaggaagtgactggctggcacgatctggaatacagctccagccataaccagcaattggtgatgaaccatccacagcacggtaagattcccttatcccagctcagcgacggcctgcgtaatgcggttgcgatggtagcggatatcgcgtttcgctgtgtcaaactcaacccccatttacgcgatgaagccgccttaaaaacacaggggattgtgctgatcgatgaagtcgatatgttcctacacccagcctggcagcagcaaattatccagtctttgcgcagcgcatttccactaatccagtttattgtcactacccatagcccgcaggttatcagcacggtaaaacgtgaatccattcgtctgcttgagcaggatgagaatggcaacgggaaagcgttgatgccgctcggagcgacctacggcgagccgagtaacgacgtgctacaaagtgtgatgggtgtcgatccgcaacctccggttaaggagaaggctgacctacaaaagctgacggcttgggtagatcaagggaagtacgacgagccagaagcacagcaactgatggctgcattacaggcggcgctgggtgatcaacatccacaactccaacgcttacagcgcagcattgcccggcagaacatgctgaaagggaaagcgcaatga

SEQ ID NO: 90065 - DNA, 597 bp, Salmonella enterica subsp. enterica serovar Infantis; identical to SEQ ID NO: 88973

SEQ ID NO: 90066 - DNA, 2184 bp, Lysobacter antibioticus
gtgaaaaggctggcgacgccgccgtcgttgcgccggccggaattgctcgactgggcccgcgaaatcaccgcgttctacagtcgcccggccgaggagcgccagcgccagcgcgcgccgttcgagcgctacgagccgttgttcctgggcgaggacgtgtacgcggctctggacgcgcagttcaagagcaaatgcgcgtactgcgaatccggcctgcagatgcacgaaagccgcatcgatccgttccgcccgatcctggccgcggccgatccgcgcacgcgcgaggaaagccccgaccactacggttggctggcgttcgaatggcgcaacctgatgtatgcctgcaacgaatgcgtctcggccaagcgcaatctgttcccggtcgacacgccgcgcgccttgccgatgacggcgtggcggcagacggtcgcgagcgagaacgcattgctgatcgatccctgccgcgacgaccccgcgcggcatctggcattcctgcccgatggccgcttagtcggcaagaccgacaagggcgcggcgagcatcgaggtgttgaacctcaaccgtccacgcctggtggagacgcgacggcaatggatcttcgacctgctgagcacggtccatcaggcgatcgatccggaggccgaaccggtcacgatcggattgatcgacgagttggacaacctccgacacagcggcgcgatccgttccgcgctcgacgcggtggccaaggaaaccgcgcgccgggtcgggctcaagcccatcgtcggcttccgcccctcgcgcgacattccgcgcctggccggacaccatgaggtctgggaccgggtcgcctacgaatatctgtcgggcgcggacaaaacgccaatctccgaatctctgcggagcgcggtgggcgagtactacgaactcaggcccaggctggacccgtcccacgtcgaacgcgtgcgcatcttcaacttcaagggcatcgacaccctggagctggagttcgcccatgcccaggcctccgacagcaatgcctccggggtgatgctgctcggcgagaacgccgccggtaaaagcacggtgttgcaggcgctggcgctggccttgatggatgagcgcctgcgcaagggcagccgggtcgagggtgccgatttcctgccgcgccagcgcgaatcctgggaggtgctgaccgaccggccctatgtcgaggtgctgctgtcgtccggcgacacccgccgcatcgagatcgattcgctcggccgcatcgagacctacagcgacgcggtgccgtcgatggtgctggcctatggcgcgcggcgcttcttccgctcgcacgagcggatccacaagaacgcggtcaaccgcagtctgttcgaccccttcgccaaactggaagatccctcgccgtggctggtcgaggcgagccagcagcatttcaatgcggtggcccgggcgatgcgcgaggtgctctccttgcacgaggacgacgacatcttccgaggccccggcggccacgtgatggtgcgggcccatggccgcgtgactccggtcgagcgcatgagcgacggttatcgctccctgttcgcgatggccgtggacatcatgcggcgcatggtcgacgcctggggcaacctggaatacgcgcagggcatcgtcctgatcgacgagatcgacgtgcacctgcacccgcgctggaagatcgaggtgatgtcggcgctgcggcgagcgatgccgaaggtgcaattcatcgtcaccgcccacgacgcgctgtgcctgcgcggcatgcgcgacggcgaggtgcacgtgctgtaccgcgaccagcacgatcgcatccgcccgcgcgaagacctgccgaacatcgagctgttgcgcagcgaccagttgctgacctcggacttcttcggcctggccagcaccgcgcggccgcagaccgatgcggccctgcatcgctatgcctatctgctcggcaagcccgcgctcgatgccggcgagcagcgcgaacgcggcgcgctggcggcgcaactcgcgggcctgccgctcggcgacacgcccgtcgagcaactcgtcggcgaggccacccagcgttatctcaacgaccgccgccgtcgcggcggtgccgagcgtgcggcgatgcgcgaggacgcgctcgaggaaatcgtggccctgttgagcgcgggcgccgcagcgggagcccacgaatga

SEQ ID NO: 90067 - DNA, 918 bp, Lysobacter antibioticus
gtggatcgcaagtcggtgccggcgccggcttcgctggtcgacccggacggcgccggccggcgcgaactggagaaagcctcggagcattaccaggacccgaaggccgagaccttcgccttcaaggcctataagcggcccgacgtcaaagaggcgctgcgcgagctgttcaagaagaagtgcgcgtactgcgaatccttgcacgaggcgacttcgtcggcggacatcgagcattaccgtcccaaggccggcgtcgacggcgaacccggccatcgcggctattggtggctcgcggccgactgggacaatctgctgcgcagttgcatcggctgcaatcgcgtcgaaggccatcgggtcgccgaagccggcatgaccgctgcgcaactggctgcgcaaaaagtgcagagcgtgggcaagggcaacgcgtttccggtccaggcgaagcgcgcgttccagcctggcgacgactgcaacggcgaagaccccttgctgatcgatccgacccggcgcgatcccgcgccgcacctggcctggcatacccgcaacgacctgtccttgctgagcccgagtttccatggcgcggtcgccgatgcttacggcgaacatacgatccggatcatggcgctcaatcgacaggccctggtcgaagcgcgcacccgccatctgcagcgcttgaacgatctgtcgttcgacatcgccgaagccctggacgaggccgcggtcgcggcacccgcgcagcgcgcccgtcctctgcagcgggtcgcgcgcaaacgcgcgcaactgctggcgatggccggcgcggacgaagagttcacggcgatgacgcgggccttcgtcgtcgcggtcgaaggcgagctgctcgcgcgttatcgcgagttactcgaaagtaaggccgagcaggccgacgcggtcggcgcttaa

SEQ ID NO: 90068 - DNA, 2172 bp, Lysobacter gummosus
atgaggaaagtcaaacgcatcgcgacgccgcgttcgctcaggcgccgggagttgctggactgggcgcacgagatgaccggcttctatgcgcggccggcgaaagtgcgggcggggatgaggccgccgttcgagcgctacgacaagttgtttctcggcgaggatgtggtcgcggcgctgggcctgcagttcagcgacaagtgcgcgtattgcgaaatcctgctcgagccggggcaggcattgatcgatccgttccgaccgaccatgtcggcgtcggaccccgccaccggcgagcaaagcgccgatcactacgcatggctggcgtacgagtggcgcaatctggtcttggcgtgccgcgaatgcgtttcggccaagcgcaatcatttccccttgcgttcgccgcgcgcccggccgatgacggcgtggcgggaaaccgtcgcgctcgaaaaaaacctgttgatcgatccctgccgggatgaacctggccgccacctgcatttcctgggcaacggccggctggcttcgaaggacgacaagggcgcggcgacgatcgagctgctcggcttgaatcgcgactctttggtcgaggcgcgacggcaaaggatagatcatgcgctgaactgggtttcttcccagctttatcatgaagttctggaagattttcccgatggcagcgcgccgcattggggcgccgcgctgtcggccctggattcggtgttctccgcgacgatgcggcggataggtaggcgaccgggggcggggccgcgctcggtcgatcatctcggtcaattgttgggacacgccgaggcgtggaacgccgcggtcgcggagtatctgagcgatgtcatggatgcgaaccgcccgagtccgcccctgcctaccgctccagctggaagaccgagcagctggtggccgccggcaccggtctacgtcgaatcgatcgtggtgaacgacttcaaggccatcgacgatctgcgcctggaattcccgtcgctgggatcggctcggggcgaggccgccagcgtgatgctcctgggcgaaaacgccgcaggtaaaagcagcgtgatgcaggcgctggcgttggcgctgatggatgagtatcagcgcaaggccagccgcgcgcagggcatcgagtttcttccgcgcgatcgcgagaactggggcgtgttgccggtgttgccccgggtcgaggtgatcctgtcttccggcgaacggcgctgcgttcatgtcgatgcgctcgggcgctatcgcgacgaaattaatggtcgcgtgccgatggtgctgggttacggcgcccgccgcttcttcaaggcgcatcaggccaagaccgccggcccggcgcgcagcttgttcgaccctttcgctgtgctggaagacccgtccggatggctcagggaaagcaccgcggtgtacttcgagccggtcgcccgcgccatgcgcgagatcctcgccctgcacggcgacgaccgcgtgttccgggccgacgacggccatgtgatggttcaggcccacggccgggtcacgccggtggagcgcatgagcgacggttaccgcgccttgttcgcgatggcggtggacatcatgcggcgcatggtcgaggtctggggcaaccttgagtacgcgcagggcatcgtcttgatcgacgagatcgacgtgcacctgcacccgcgctggaagatcgaagtgatctcggcgctgcgccgggcgatgccgaaggtgcaattcgtggtcaccgctcacgacgccctatgcctgcgcggcatgcgcgacggcgaggtacacgtcctgtaccgcgacgaacacgaccgcatccgcctgcgcgaggatctgcccaacatcgagctgatgcgcaccgatcagttgctgacctcggacttgttcggcctgctcagcaccgcccggcccgaggtcgatgcgcatctgcatcgttacgcctatctgctcggcaagccggaactcgacgccggcgaacagcgcgagcgcgagttgctggccgggcatgtgtcggcgttgccgctgggtgacacgccgacagagcaactgatcggcgaggccaccgagcgctatctgcgcgggcgccgcagcaaacccgtcgccgaacgcgccagcatgcgcgaggacgcattgcgcgaaatcgtcgccttgctcgaagccggcgcggagcgggaggcatga

SEQ ID NO: 90069 - DNA, 912 bp, Lysobacter gummosus
atgagatacgtcgatcgcggccgcatcgcgccgccggcctcgttgagcgatcccgacggcgccggcgcgcgcgaacgcgccaatgccgaggctcactaccgcgatccgcgggccggtgcgtacaagttcaaggcctacaagggcgatgacgtcaagctggcgttgcggaccttgttcgacggcaaatgcgcgtactgcgagtcgcgccacgaatcgacgtcgccggccgacatcgagcactaccggcccaaggcgggcgtggtcggcgaggccggtcatcgcggttattggtggctggcggccgactggaccaatctgctgcgcagctgcatcagctgcaatcgcgtggaaggccaccggatcgcggcggtcggcatgagcgccgcgcagatcgccgcgcaggccacgcgcaacgccggcaagggcaatctgtttccgatcgccgccgcgcgcgcgttccagcccggcgacgactgcgacggcgaagatccgttgctgatcgatccgacccggcgcgatccggccgcgcatttgcgctggcacgtggccgaggatttgtcgctgttggcgccgcgcttcgacgatagcggcgcggatgcctacggcgagcgtactgtcgagatcatggccttgaaccggcaagcgctggtggaagcgcgcagccggcatctgcagcggctcaacgagtcgctgctggacttggaagaagcgctggacgaagcggcgcaggccgatccggccgacatcgccggaccgctgcggcgcgcggccaggaagctggcgagtctgcatgccgcgaccgcgccggatcaggaattttccgcgatggcgcgagcgttcgtcgaggatgcgcagcagcggttgcttgcgcggtatcgcgagttgatcggggcgatcggcgccgcggtgtag

SEQ ID NO: 90070 - DNA, 1563 bp, bacterium L21-Spi-D4
atgcaactaaaaagcttatacataaaagactataaaattttaaaggattttactattgaatttccttacgattttaaaaggtttatttcggtgtttataggagctaatggttcaggtaagtccactatacttgaagcaattgctcaaatttttagcgatactattttaaaccaaactgctaaatttggttttgagcttaaatattccgtaaaacttgaagaaattattgagaaaacaagcactacttccgaatttaacactgcttacataattgtaaccctgcatgccgaaaagggtgaaaaaattaaagcctctgttaatagtggcatggatgatacagatttcagcgacaaagtaattgattcaagaaaaatggttgtctttggtcaagggaaagaaaaatcagtacaatcttatttgcccgacaatattattatttactattcggggttatctgaaataatggaagatttgtgtaagccacatgaagaaaaactttcgaaagcataccgcaaagggaacaccgatattgacagggatttcttttattataaacctgagcatttcggaattatcctattaagtcttttatcttatgaatatggcgatattccagagtttttgcaaaacaaagctaagatacatggaatgcaaagtgttcagatacgacttaaaagaccaagctggcataaagcctctatcgaaaaattttggggagccgaaggcgaggtaaggaagtttttagattatttaaacgaaaactcagcaacatctgatgatttaaccaaacctgtaagttcaaacctcaaaggaaatattgtaattgaagcatggcaggacgaagcattgataattacaattattggtttagaaagattatatgagattcgtgaacatttaattgaagaaagaaaactttttgaaattctaaacatcatgcttgaagatggtatgttagaggatatttctttctctcttttaaaagaggataaaggaaattataaaagttttaatgttttgagcgaaggagaacaacaagccatagtaataaaaggaatgacagaattattgtcaggtaaaaatacgcttttcctttttgatgaacctgatacttatttgcatccaagttggcaacgccaatttattggagaaattgaaaaagaaatcgaaagttttagtaaaatagaaagaagcactgggcaatcaatattcccggaaaacacatttttaattgcaacccattccccacaattattgagtaatgcaaaaactgaattaaattttgtaaaaataattgaaaacggcgttttggttgaaaaaacacctaagttttatggtcgtgaaataagttcaattttatataacctgatgggagttgaggaacgcaatgaaaccattaaaaaagacataagtaagttgtttaccctaattgaagatgaggaaaaagaagaagcggaaaaggagttgactcgtttaactgaaattttaggcgaaactgaccctgatattaaaaatgctgaaattcaattaaattatttgaaagaagatgaagcaaataattaa

SEQ ID NO: 90071 - DNA, 675 bp, bacterium L21-Spi-D4
atgaagcaaataattaagaataatgagcctcgctctttgattcagcatagagcacaaagaggcaattacgacaatctcaataaagatgaactgcgcacttccctgataacagagcaaggtcatatttgctgttattgtatgtgtcggataccccacaaactaaaacctgaggaaatagaaaagaattatcctgacagcaaaattgaacatgtaaaatgccagtcaaaaaatagacctttagaattaacttatcagaatttactattgtcttgcaatggtaaacatggatatccaagacaaatgcaaacttgtgatagccataaaggtgaaaacgatttatcatttaatcctgctgaaacacaaagaaatattgaaaatttcattaagtattctgccaatggagaaattttttctgatgatgaaacaataaatcaagaactaaatgaagtattaaacttgaataccaaggatttaaaagatattcgagaacttttttataaagatattcaaacacggataattcgtgaaggaaaaaaaagaaaaggtaaagacattcaaaaaaggttttatgaatctgaaaaggagcaactgttaacattgaaagatgggaaatttgaaccgtattgcatgattggtatttatttgataaacaaaaaactaagcaagtataattag

SEQ ID NO: 90072 - DNA, 1284 bp, Acinetobacter baumannii
atgaaatttaagaaaattctacttaacgattggcggcaatttcaaaatatagatattgattttcatccaaatgttacaattattacaggggcaaatggttcaggcaaatcaacaatattaaaattactttctaaacactttggatggtatcaaccatttttaggcacccctattttatcgaaagaacaaggagtgttctattataagacggtatttcgaccattaaataaagaatatcaaacatctcactatggtcataatatccatatattaggcaatattttttattctaatgatgcttcttctgacatttttattcatgaacaaatatacagcgatgctcaatttgacttgcaatttggggggaacatccctgtagttaagggggtccatatcagttcccatcgacctattcctaaatatgaaagattgcaaaatattcccactaatcctatggatgcgtcgcaggcttttaatagttactttcaagaaactgttaacttatttaataataattatacacagcacaccccaatttatagaatgaaagaagcaattgtttcaatggctgcatttggtccaggaaatcaatttgtacagaaaaatgaaaagattgaaaagcaattttccgactttaaagatattctaaagcagatattacctgctgatcttggttttaaagacttaagtgtacggataccagacctagtattggaaacggaaacaggagattttctattagatgcctcttctggaggaattatgtctattattgatctagcatggcagatttttctttattctcatgacaaagatgaatttgtcgtcactattgatgaaccagaaaatcatttacatccgtctatgcaacgttctctattgaatgattttgttaaagcatttcctaaagctcaatttattgtggtaacacatagcccgtttattgtttcttcaattcgtgaatctaacgtatatgctttaaaacatgaaaaaaataatgtaagcgatcaacaaagtggatgggcaaaaaaagttgtttcttataagttagatctgaatcaaaaagcagctactgcaagtgaaattttgcgtgatgttttaggtgtacccgtaaccttgcctaaatgggctgatgatgagttacaaaaaatctgttcgacctttacagtccaagatattacaacagacggtttatctagattgagagctgagttaaataatgccggtttaggagagttctatccagaagcattaagtaatatcgtaggagagagtgggttatga

SEQ ID NO: 90073 - DNA, 669 bp, Acinetobacter baumannii; identical to SEQ ID NO: 86769

SEQ ID NO: 90074 - DNA, 711 bp, Pseudomonas sp. TTU2014-080ASC
attgacgcttctgaggaggctctcgacttcagtcgtgcgagggagtttggatctgtcctgaggctcgaatccaagctgcgcgcatgtaatattctccgtggcatcggcgtgtatctccagcggatggatagcggcgatatcgttgagatgcatcacgcgagctcggggcagctagcactgatctcctcgcttctgttcctaattacgaacgcgggcgaatctccgatcgtcatcattgatgagcctgagaacagcctgcatccgaactggcagcgtgaatacatcgatcatgttctgactgccctgcgctactacagtcctaccgtgattgtggctacccatgctccgttggtggtcacaggtgcgttggcagatagctcggctctcgtatcagtttacgagatccgccatgggcgccctcaacgtttaccgatcgatggcaccagtagttcgcagagcagtattgaagagatactctggcgcgcctttgacgtcgtgactccagcgaaccatttcgtcagtgagcgacttgtcgacgaagtgtctcgcttcgagaagggagaaataagaaaagaggaggtcttgacgcttattgggcggatggagggaggaagcttcgatgaccgtcagcggagctttttcaccgcggtcaaagggctgttggataaggtcgagaagaaccagagcacgagggggcgcagtgatcgatag

SEQ ID NO: 90075 - DNA, 657 bp, Pseudomonas sp. TTU2014-080ASC
gtgatcgatagatatttaccggctctcgacgagtttgcactcaccgttgacgagcagaacgctgtggcagccgctctaacgactctagatccctggggatggtctccgggaggcgcacagtccaaagcaattgctagtgtcaaggcaaagatccttagctatcacctccagcgtcatggccataagtgctgctactgccgagtcaacctttacggcgggggcgccttcatgaccgatagggagcatgttcttcccaaatcgattgctggatacagaccatggtcctacacgatgtggaacttggggattgcctgtaaacggtgcaacatggagtacaaggggagcaacaccgactttgttgtagacccggacgacgaagcgcagcttatggaaagcgagggttatcgcttcatccatcccaatttcgatctctatcgtgaacacatgtcgcgttcatcgcaggaggcaaacgagtctgtgatcgtcaagtacacgatcgtgcccggaagcctgaaaggggagtacacctacaattacttcaacctacgggggttagaggtcaacagctttgatcgggctcaggggttgcaggcgtcggagagtctgggcgaggccgctgtagagacgcggtcgcttgcagagttttttggacagtga

SEQ ID NO: 90076 - DNA, 1644 bp, Streptomyces hygroscopicus subsp. limoneus
atgcagttgctgcagctgaggctgcccgactaccgcggcctgcgggacttcaccctcgacctggagagcgccgtcgaccaggggcaggccatcgccgtactgatcggccccaacggaggcggaaagtcccggatccttcacgcgcttgcggaactcttcggggctctctaccgctgcgccctcggccattcgggccgtacggacttcggatacgaggtgcactaccgactccgcgacaggaccgtcgagatcgtgcagccgtccgccgaggcggatccggtcatgtgggttacggacgccgccgggtcgcgcgacgagacaccgcgtcacgcttggctccgccaccttcccgaccacgtcttcgggtatcaggtgcacggccgggtgccatggggctccgagttcgagcgccacgtgcacttcgccgaggcggagctggcgaggtggcgggagcagtggacggagtcctggtttgcctggcaggaccggccagagaacgaggagggggtgtggtcggaacagctggagctgccgatcacgtgcccgctgtacgccccgggattcctgtgcacgcccgactggctccccctggtcctgctctccctggccgcccagtgggcggacgttttcggcgactacctcagggagcaggccagggtggacggggtggtgtccgccacgctgcacctgcgcgccccagcgtcggtaggggaagagctgtcagccctgccgtactgggggctgggcgggccgccgcgcgcactgttcgccgaggcggcagcatcaggccgtttcggaccggtaccggaagcggacccgctgtacagcgcgggcaccccagacgatgggttcgctctcaccatgagcagccccgaggacgtgctcgctttccgtaacctcttcgacagcgacctgtcgatgttcgggctcctgtccacccttcagatggccagctacctgacggtcgacatgcgcgtccgcaaggcggatggcaccgtcgtccgggcggaccagctgagctccggagaacagcagatccttaccgtcctcggtctgctgcggctgcagcgaggccaggagtcgcttttcctcctcgacgaacccgacgcgcacttccaccccgagtggagccgacgctggtattcgtccgtccagagcatgctcggcgatggacagcgctcgcagttcatcgccgccacccacgaaccccttctcgtctcgaacatgctgcggcagcagatccgggtactcgacagggacgccgacggacggaccacggcgctcgtcccggagaccgccccgcgcggccagggggctggcgggctgctcacctcggacctattccgcctccgaagccaactcgatgaacacacccaggacctgatcgacacccagtaccgcctcataccagtggccgaggacgaccccgaggctcgccaggaactccaagaggtcaccgaccagctcgacggactgggcttcgccacatggcgccgcgataaggtgctctcttccttcctggcggaactgcaccgtcggcgcacggaactcgtcgaacgagcccggaacgggactatgacgggcgaggagctagaaacgaccgcacgtgtgctcttcgacgagcgcttctctcggggggtctga

SEQ ID NO: 90077 - DNA, 1179 bp, Streptomyces hygroscopicus subsp. limoneus
gtgcgccacgtggacaacagcggactcaccgcgccgcagaagtgggcagagcgggccgctaaggaactcgcgaggctttataaggaggctaaggacgcggacaaggagctctccttccgcgagatgtggcgggaggacgcgatccgcgaccggctgatcgctctcatcggcgagaaatgctggtactgcgagaccaggttcgtccgctcgccttaccacgtagaccactaccggccgaagtccgtcgtcgtcggtgaggcggagcgccgcgggtactggtggctcgcttacgaccctgccaactatcgtctctcctgccaccactgcaacagcggcggtgcccgctacggcaatcagagcgccggacctggcaaaggagcccgcttccccctgctcgggcaacgcgcatcggagggcgggagcctggatggtgagctaccggttctgctcgatcccgtggtggccgaagatgccgaactcatgggattcgacgggcagggctatgctcggcggcgtcccgagcggccgtattccaaagacgaagtggcacgagacctctgccgggtggacgagaccatacgcatgctcgcgctcaactccgacctactcatcgagagcagatctaccctgatcgccagggtggacggactcgtccagttgtacctcgccagcggcggccacgccggcgcggcgctgtatgcccgcaccgagctcgaccacttgacccggacgaccgccgagtggagcgcggcggccgctgcggctgaacgcctggccgtcctcgcccacgaccactctggaaacgacgcgccccttgagggaggggcgggggacgacgtcgccgaacgcgcgagcgacggaaccgagccccctgcagccacggcgacgggtcatcgcattgatctgcggaccctggtggccgccttaccccccgaggcgttctccgcaggcgggatcgcgctgagaggccgggggaaacggggcccggccagggcgaccctgctggcggacggcagcatcatgtgcttccagcggcccttggccacgcccacgtccgcggcgcggatggcgaccggcgacgatcaggtggatgggtggaccttttggtcgttgacggtggacggcactacccggacgctctccgagctgcgcgacttcctgatcgcccaaaacggctga

SEQ ID NO: 90078 - DNA, 1398 bp, Salmonella enterica subsp. enterica serovar Fresno str. ST224
atgagaatcgacaaactttcgctgcttaactttcgttgcttcagacagctcgatattacttttgatgagcacattacgattctggttgcaccgaatggcgcgggcaagacggcagtgctggatgcgatacgcctggcgctgtttccctttattcgtggttttgatgccagcctctacgtaaaagataaatcgctggcgatccgtacagaagatgtacgtctggttttccgccccgaagcgctgaacatggaaatgtcgtctccggccatgattacggctaccggggaatgggaaagtggaaagacggcaacctggatgctcgacaagcgaggagaacagccgccgcatgaagataagacggcggcgcagcttacccgttggggtgaacaacttcagacgctggtgcgtgaagagcatagtttgcagcaggttgaacttcccctaatgctttatctggggactgctcgcttgtggtatcaggaacgttatgaggcacagcctactgaacagcgtctggataacagcgccttttcacgtttgtctggttatgacgattgcctttctgccacatcaaactataagcaatttgaacaatggtatagctggttatggcttagctaccgtgaacatcaaatcacacaacttgaatcaccttcagcaaagttaaaagaaggtgttcgtgttcagcggatgaaagaagctattcaagccatccagcaagccattaactgtctgacgcaggaagtgactggctggcacgatctggaatacagctccagccataaccagcaattggtgatgaaccatccacagcacggtaagattcccttatcccagctcagcgacggcctacgtaatgcggttgcgatggtagcggatatcgcgtttcgctgtgtcaaactcaacccgcatttacgcgatgaagccgccttaaaaacccagggaattgtgctgatcgatgaagttgatatgttcctgcacccggcctggcagcagcaaattatccagtctttgcgcagcgcatttccactaatccagtttattgtcactacccatagcccgcaggttatcagcacggtaaaacgtgaatccattcgtctgcttgagcaggatgagaatggcaacgggaaagcgttgatgccgctcggagcgacctacggcgagccgagtaacgacgtgctgcaaagtgtgatgggtgtcgatccgcaacctccggttaaggagaaggttgacctacaaaaactgacggcttgggtagatcaagggaagtatgacaatccagaagcacagcaactgatggctgcgttgcaggttgcgttaggtgagaagcatccccagcttcaacgcttacagcgcagtattgcccggcagaacctgctgaaagggaaggcacaatga

SEQ ID NO: 90079 - DNA, 597 bp, Salmonella enterica subsp. enterica serovar Fresno str. ST224
atgacgcttctgctcaatgagcaatatcatctttgctgttacagcgaaatccgtgctgatttgcgtggcctcggctatcacattgaacacgtcgaaaataaaagccagcagccagtacgaaccttcgattatcaaaatctcgctgccagtgcattagattcagagaatggtttgcacctgtttggtatcaacgctttcggcggtcactcaagaggaaaacaagaggccgtggatatggcaaagtttattcattgtcacctccctgactgttctcgttattttgcttacctttctgatggccgaatagtaccggctgatgagctaaatgcccaggaaatggagagggcagagtacaccattgatctactaaatctgaacagcggattccttcaaactgaacgtcgtaatcattgggaagagctggaacagctttttgatgaacatattgaaaaaggctgggatctgcaacaattacttaagcttgagctggttccttcgccagatcataaactgcatgaattcttcagcattacacgccagtttttccagcaagaagctgaacaggtattacagatccacgccccagcattaatttaa

SEQ ID NO: 90080 - DNA, 1182 bp, Salmonella enterica
  subsp. enterica serovar Hvittingfoss str. SA20014981
atgaaaatacaaaaaattgatatcaaagatgttggtggtataaaaagagcaataattaattttgatgcgagcatgaatattatttgcggaccaaatgggataggaaaaaccacaattttagattccgtagcacatagttttattaatacaaacagctatgtccttaaaagacatgctcagtctactgatggtcagataaataccgtattaaatgattgtgacaatattagagaaagtcatatttctcttgaacagttcaatcctaaggattactcatatattagtggcttaagagagttaggaaggaaagtgatttatttgaatatttctagaatgttcaaatatgtatctttatctaatatctctaaagatgaggagagacaagatcatagcatatacacacttttgactgacggaatttcggttgcggatatgaaaaattggttcgcaaaacgctgtctcttctttaatacaccagaagcattaagtgaaaataataaggttaatttggagttggcaaaaaaatgcttttcactgcttaatgctgaatataaattttctcgcgtagatgcgaaaaaatttgatgttttcgtatctactccaaatggagaaatttggtatgaatatttgtcatcaggatttaaatcatgtctgagtattttattcggcataataaaagagattgaactaagaatgcctgatgaggaatgtttagcacagcattttgatggcattgtattgattgatgagctggaaatgcatcttcatcctgaatggcagtccaaaattgtttctgttttgcgagacacatttcctgcaacacaatttatagttactactcatagtcctcacattatacaaaatgcggaacctaatcagataattgcattagggacagatagtaatggatatacatacgtcagagaacttccgagtaatgagtttggttatactggatggacattagatgaggtactcaaagatgtaatgggaatggaagacacaagaagtcagaaattacaaagtatgcttgctgcatttgatcaagctattgatgaggagaataaaattgaagcagagcgtatttataaagaattagatagggcacttcatccagcaaatgtgcttagaaaaatgcttagtattgatctttcctcagtaatcgaggagggcagtaaataa

SEQ ID NO: 90081 - DNA, 747 bp, Salmonella enterica
  subsp. enterica serovar Hvittingfoss str. SA20014981
atgattaagctggaaagaaattttacacctctattcttttctcctcagaatgttagtcgtttaactgaaaaatttaagagcagcggtactcatgtatggcatcatgatgatgtaaaaaattcgttgatggagttaagtgataaaaaatgtgcatactgtgaggttaagcttggtgaaaaaagcacatatcatgaggtggagcattttaaagataagaatgattaccctgatgatgtaatagagtggaataacctattaccttcatgtcgtcattgtaatggttctaaagggacacatgatgttgtccaagaaccaatagttaatccttttgaggaactcccggcagagtttttttatattaaaaatttcagaatgaaagggaggaatgagaaaggtattctgactatagatgttttaaatcttaacgatagagaacatttggttaagccaagatgtgaaacaggagctataattgcggaaaaaatagaggattctttaactttatttgagggatatctttcaaatccaataagcaaaaataaaagaaaattaatcggtactgttagagggatactgaaagaatgtcaaagaagtgccatattttctgcagtatcggctactgtattacatacgagcgaggattatctgactttacggggtaatatgatggcccataagttatgggatgaagatatggagaaccttcacataatgtcaagtaatatacaattaccaacaacagcttaa

SEQ ID NO: 90082 - DNA, 1410 bp, Salmonella enterica
  subsp. enterica serovar Hvittingfoss str. SA20014981
atgagaatcgacaaactttcactgcttaactttcgttgcttcagacggctcgatattacttttgatgagcacattacgattctggttgcaccgaacggcgcgggcaagaccacagtgctggatgcggtacgcctggcgctgtttccctttattcgtggttttgatgccagcctctacgtgaaggataaatcgctggcgatccgtactgaagatgtacgtctggttttccgcgccaaagcgctgaacatggaaatgtcatctccggccatgattacggctaccggggaatgggaaagcggaaaaacggcaacctggatgctcgacaagcgaggagagcagccgccgcatgaagataagatggcggcgcagcttacccgctggggtgaagagcttcagaaactggttcgagatgaggagcataaacagccagttgatcttccgctcatgctttatcttggcacggcaagattatggtatcaggagcgctacgaaccacagatggcagaacaacgcctggataacagcgcattttcacgcctgtccggttacgacgattgcctttctgctacatcgaattataagcagtttgagcagtggtatagctggttgtggcgcagtcaccttgagtttcaatacaaactgattgaggcgggcaggcaaaataaaagtgtggatttggtcgaaggcttgcgcgacgacagtatgagagaagccattcaagctatccagcaggccattaactgtctgacgcaggaagtaactggctggcgcgatctggaatacagctccagccataaccagcaactggttatgagccatccgcaacacggcaagatccccttatcccagctcagcgacggcctgcgtaatgcggttgcgatggtagcggatatcgcgtttcgctgtgtcaaactcaacccgcatttacgcgatgaagccgccttaaaaatccagggaattgtgctgatcgatgaagttgatatgttcctgcacccagcctggcagcagcaaattatccagtctttgcgcagcgcatttccgcagatccagtttattgttacgacccatagcccgcaggtgctcagtacggtaaaacgcgaatccattcgtctgcttgagcaggatgagaatggcaacgggaaagcgttgatgccgctcggagcgacctacggcgagccgagtaacgacgtgctgcaaagtgtgatgggtgtcgatccgcagcctccggttaaggaaaaggccgatctgcaaaagctgacggcatgggtggatcaggggaaatatgacgagccagaaacacagcaactgatggctgcattgcaggtggcgctgggtgatcaacatccgcaactccaacgcttacagcgcagcattgcccggcagaacctgctgaaagggaaggcacaatga

SEQ ID NO: 90083 - DNA, 597 bp, Salmonella enterica; identical to SEQ ID NO: 86457
  subsp. enterica serovar Hvittingfoss str. SA20014981

SEQ ID NO: 90084 - DNA, 1398 bp, Salmonella enterica
  subsp. salamae serovar 56:z10:e,n,x str. 1369-73
atgagaatcgacaaactttcactgcttaactttcgttgcttcaaacagctcgatattacctttgatgagcacattacgattctggtggcaccgaatggcgcgggcaagacgacagtgctggatgcggtacgcctggcgctgtttccctttattcgtggttttgatgccagcctctacgtaaaagataaatcgctggcgatccgtacagaagatgtacgtctggttttccgcactgaagcgctgaacatggaaatgtcatctccggccatgattacggctaccggggaatgggaaagtggaaagacggcaacctggatgctcgacaagcgaggagaacagccgccgcatgaagataagacagcggcgcagcttacccgttggggtgaacaacttcagacgctggtgcgtgaagagcatagtttgcagcaggttgaacttcccctaatgctttatctggggactgctcgcttgtggtatcaggaacgttatgaggcacagcctactgaacagcgtctggataacagcgccttttcacgtttgtctggttatgacgattgcctttctgccacatcaaattataagcaatttgaacaatggtatagctggttatggcttagctaccgtgaacatcaaatcacacaacttgaatcaccttcagcaaagttaaaagaaggtgttcgtgttcagcggatgaaagaagctattcaagccatccagcaagccattaactgtctgacgcaggaagtaactggctggcacgatctggaatacagctccagccataaccagcaattggtgatgaaccatccacagcacggtaagattcccttatcccagcttagcgacggcctgcgtaatacggttgcgatggtggcggatatcgcctttcgctgcgtcaaactcaacccttatttgcgcggcgacgcggcgttaaaaacccaggggattgtgctgatcgatgaagtcgatatgttcctgcacccagcctggcagcagcaaattatccagtctttgcgcagcgcatttccactgatccagtttattgtcactacccatagcccgcaggttatcagcacggtaaaacgtgaatccattcgtctgcttgagcaggatgagaatggcaacgggaaagcgttgatgccgctcggagcgacctacggcgagccgagtaacgacgtgctgcaaagtgtgatgggtgtcgatccacaacctccggtcaaggaaagggatgatctacaaaaactgacggcttgggtagatcaagggaagtatgacaatccagaagcacagcaacttatggctgcgttgcaggttgcgttaggtgagaagcatccccagcttcaacgcttacagcgcagtattgcccggcagaagctgctaaaagggaaagctcaatga

SEQ ID NO: 90085 - DNA, 597 bp, Salmonella enterica
  subsp. salamae serovar 56:z10:e,n,x str. 1369-73
atgatgcttctgctcaatgagcaatatcacctttgctgttacagcgaaatccgcgctgatttgcgtggcctcggctatcacattgaacacgtcgaaaataaaagccagcagccagggcgaaccttcgattatcaaaatctcgccgccagcgcgttagactctgagaatggtttgccccagcttggcatcaacgcgttcggtggtcactcaagaggaaaacaagaggccgtggatatggcaaagtttatccattgccatatgtccgactgttctcgttattttgcttacctttctgatggccgaatagtaccggctgatgagctaaatgcccaggaaatggagagggcacagtacaccattgatctactgaacctgaacagcggattccttcaaacggaacgtcgtaatcattgggaagagctggaacagctttttgatgaacacattgaaaaagactgggatctgcaccaattacttcagcttgatctggtcccttcgtcagatcataaactgcatgaattcttcagcattacacgccagtttttccagcaagaagctgaacaggtattacacatccacgccccagcattaatttaa

SEQ ID NO: 90086 - DNA, 1833 bp, Caulobacter vibrioides
gtgttcgtcgcccccgcggggcgcgaggatctacgcaagcacttcgcacctctgccggacggcattttgatgccgaccgatcaacgaggcgaggcgacggtcagacatttcaacctcaatcgcccccccttggtcgaggcccgccgccgcgccctggacgactatttccgccggctgcttctggctcggcagaggcccgacttcgacaagatcatggactttgcgggcctggatttcggcggcggctggtttcttcacctctatcaactggcgcgcatccttgggcacggcggtggcgatcgtcaggtgctgtcgcgccagcggatagccgcttatttccgcgacagggcgaaacggcgggatttccagcaacgcttgcagaatgctcgtgacgagcttgcccgcgatcccgagcagatccggcgcgccaaactgcggccgtcgctggcgccggccggcacggcgcgaccggtccgcgtggcgttgcgaaacttcaaggcgatcgaggagttgacgctggagcttcccgagacctctggccgaatatcgagcgagggcgagccgctcgcgccgtgtctgatcattcttggcgagaacgctgcggggaagagctcaatccttgaggccgcggcgctggcgatcagcgacgaagaggtcagagccgacgaggcgccgctcgcctcaggcttcatgctggatccaatgctcatgggcgccgaagggcaaagccgcccccgcccaggatcagtgacggtcgactatgacgacggcctgcaaaccaagctcgcgttcgacaacaacggttttcaatcgagttttgcgctggcgaacgttgagccgcgcatcccggtgttcgcctacggcgcctatcgcatgttcctgggccacgacgaggcaagcgcatcgggtgtgatccggtcgctgttcgagcccgactacgtgctggtcaatcccgaggagtggctcgcggaaatccgcgagactccgctatttgaggaagtgatccgagcgcttcgctacatccttggcatcggacaggccttcgacaccatcaaggtcgatgagaagaccaagcgttgcatgctcgtcatcaaggtcgagcggccaggccagacgccaatcttcacgcgcacgccgctggcgacagtgtcatcaggcttccgcgcggtgctgggcatggcctgcgatgtcatgcgcaatttggtcgctcgccaaaaccgtttcagcgccaccttggccaaaagccgtgcggtcgtgctggtggacgagatcgaagcgcatctacatccgcgctggaagctgaagatcatgcagggcctgcgcgacgccctgcccaacgtcaccttcatcgtcacgacccacgatccgctctgccttcgcgggatggacggcggcgaggtcaaggtgctgcttcgagccgccaaggccttctgcgcgcccgacgagccgccaacctttgtcgatcagctcgaggatctgccgccaatcggcgcgcttacggtcgagcagcttctgacgtccgatcttttccagctgttcacgaccgacgccgacacgatcgagaccggtttggccggcgtaggcgatcttcttgcgcgagagcaggcccgacgtcttgagccaggcgatgatgcacgcctgcaaaaggtccgcgaccagatcggcaaggacgtcgccgtgagcctaccgatcggatcgaccgaagttcagcgcctcgtccaggaggcggttgagcagtatctgcgcgagcgcctcaggcggccgggcggcggactcatggctttgcgggaagagacccgcagagccatcgtcgatgccttgaaggcgctctag

SEQ ID NO: 90087 - DNA, 1035 bp, Caulobacter vibrioides
gtgcgtaaggtcgatcgcaaaacggccacgccgccggcaagtctcacgggcgccaaccgcaaaggtcccaacgaactcaagcgggcgcgcgctcacttcgccgcccatccgccgcgcgatgagttcacgttcacggcctacaagggcgacgatgttcgctacacgctggaggcgctgttccacggcaagtgcgcctattgcgaggctcgttatgacatggttggacccgtcgacatcgagcacttccgccccaagaacgccgacccgaaaggaacgcatgacggctattggtggctggcggcagcctggagcaatcttctccccagctgcatcgactgcaatcgcaagcgctggcactggacgccgacgcagttggccagcctgaccgagctgctcaaagagcagaagcagagaccggcggcttacgtcaaaaccggcaaggaaagcagctttcccatcaccgggcccagggtgacggccgagcctccaaccgcgcaggccgaggcgctcctgaccgccgagttggctttgctcctcgacccctgtgtcgacacccccgcagatcatattgtttttcatatcgaccgcgccgatccattgggcgtgatctatccgctcggccaggctggcgcggtgcctcacatcccgccgacggttgatcagttgcccgtggtcgaggcagcggctcgagcggccaatgtcagtccacgcggcgcggtgtcgatccagacctttggcctaaatcgtcttggtctggtgcaggagcgcacgaaggttctgcgccaactggaatttctgggcggaacgatcgaggagctttctctcaccgccgacgagcttgagggtctggttctggccgggcaaaacgccgtggttcgagaccgcgccgtccaacggctcagagcaatcgttcggcgcgttctggctcaaatcagggcgatggcgcagccgcaggcgcccttctcggccatggtcagcgcctggattgacgcctttacttccgccagcagcgcaagcttgccagtcgcccgatag

SEQ ID NO: 90088 - DNA, 1416 bp, Caulobacter vibrioides
gtgtccgatttccgcctgctgtccatggccgtaaaactcaatggtgaggataccgaactgcgcctgtccgacggcgcccgcccctctgcggtgaccgtgatcatcggtcgaaacggggccggcaaatcgaccttgctgcgcgagaccaccaacgccctgcgcgcgctcgcctgggcatcgacgcgatacctgcgcatcaatcggcccaggcttcttcaaggcatgaccgttcgcaccaaggagggctcagccgccctgccgagctgggtcagcaaggccgatgtcatgcacgccgcgacatccaggaacctgcttccggccaacgtcatcgccctgtcattcacacctttcgacaagttcccgctgggcgacgacgtggagcgcatccggcgcatggaacgccttgcgaccccgccgtggaggccgagcgaagacgcctatttcgaaaacgaccccttctacatctatgtcggcccgaagggcgacgctcgaacgagcgcccagtctcgcctcttcgacgtcatcaccaggctggcctggttcggcatggaccccaggatcgcctccagcctggaagcgatcggcttcacacccgagatcaagatcgcctaccgcctgaatcgcagccttctggcgcagctcaggcgcaatcccgatccaaaaatagaatacgacccaacaatagaagacaatagagtatataaattcttcaacagcaacctcagcaataagttcccagaacttcgccacgacgaggtattcgatcatgatgttgccaggcacgaagaagatttaatatctccatcagatatagagcaatttctatccgatcggatattgtctatatcgtccataaatctcacagacatccgaaccgaagagaaacgcaacctcatggaattgagctccggggagctcaacataattaccggattcttgaatcttgcgatgtatataaaagatggatcactggtattgatagacgagccggagaacagcctgcatcccgcatggcagctgcgctacacgtcgatgctccaggccttcatcgagcgccaccccggctgccactacatcatcgcgacccattcccccctgatcctcagcggggcggcccggaacggcgccacaaccatccgcctggacgccaagggggccgagactctcgatgaagaccaggccacagaatcccccgacgccaccctggtgacggcgttcgaggtcgtgaccagccacaacaactatctacgccaactggttctcaaggcgctgaccatggcgcgacaaggcctcctgaacacgcccgaggcgcacgaactgtcgatcgcgctcaagacgctgctcccccagatacccaagaacgacgaaattcgcgacgtcgtcgccgccctgatcgtgcagatggccaagcaatga

SEQ ID NO: 90089 - DNA, 633 bp, Caulobacter vibrioides
atggtcacgcaggaactgcgatgcgcctattgcaacagttttttcgccacgggcgtcaacatgtcgtgggacatcgaccacatcctgtgcagggcgaagtatccggaccttttcctggagcccgacaacttcgttctgtcgtgcaaggaatgcaacggcgccaagtcggacaaggacgtgctgcacacccaccatcctcgccccctcaaacacgtgccccagccgacagacgcctatgacatcccgcacgcgcggaagacctcgtggacgacgcacgtcagccacgtggcctatctcgtctacatgggcaaaagcacacaaggctggaatctgatcgatgtctgcgacctcaatcgcaaggccgagatcgcggctggccagcccgtcggcgctgtcaaggtcgcaatcgaagaaaaactcttcgcctcctgggacatccccctgccgcaagggtcgaccgtcacccaggaagtcgccgcctatgggctcaagcgcgaaaaggaaatcgagctgcaagccgcgccgatcatcgccgagctgaacaagaagacagccgccgccgaggcgaaggcgaggcgcgccacggagaaactcgcgcgggaaacgggcgcccagcctcctccccccacttaa

SEQ ID NO: 90090 - DNA, 1278 bp, Pseudomonas aeruginosa
atgctgaaaagcctgttgcttgaaggcgtaggcccagccaaaacctttggcccggtagactttgctccgcggcttaacttcatcactggtgataacggcttgggcaagagctttttgctggatatcgcctggtggtcgctgactcgcacctgggcgcggggcgtgcctgcggtgccgccgaccagcagcaagaagagcagcattacctacgccttcagtaaatcgacatcaggtgattttgccgagaccagtgtattcaagcgcagtgatcagctatggccaacaaagcaaggccgaccagctattccgggtgtggtgatctacgccggggtcgatggcagcttttccgcttgggaccccgcgcgcaactattggcaaagcgatgatgcggcggagcgccccagggcgttcaacttcaccccggagcaggtgtggaacgggcttgaggggccgaacggcattcgctattgcaacgggctgatccacgactgggtgttgtggcagaagggacgggatgaggctttttcagacctgatcaaggtcttggctgcactgtctccctcgggcgttgaacatcttgaaccgggccagcctgtgcggctggggctagacgttaaggactacccttcgctacgcatgagctatggacaggatgtggcgttggtacatgcgtccgctggtatgcgccgtatcgccgcgttggcctatttgctggtgtggacctggcgcgagcatcgcttcgcctgcgagcagaccgggcgcaggcaagccaaggaaatcgtctttctgatcgatgagatcgaatgccacctgcacccgcagtggcagcgtcgggtggtgccggcattgctgcaggtgatgcaggctctgacaggcaagaaagtgcccgtacagctgattgtggccacccattccccgctggtgctggcatcagttgagccagcgttcgatgaagccaaggatgctgtattcaatattagccttcatgatgggcaagccgaagttagcaaggagccttgggccaagcagggggatgtggtgaattggctggtgtccgactcgtttggcttgcaccaagctcgatctgtcgaggcggagcaagccatcgaggccgctgaagcctggatgcgaggagataaaactgatctgccacaaaatttgcattctcagggcgccatccacaaggaactgatgcgtgtactcccgggacatgacgaattctggccgcgctggctggttgaaactcggcaactaccgcgcagttcgggtgatgcatga

SEQ ID NO: 90091 - DNA, 603 bp, Pseudomonas aeruginosa
atgatcgaaattgatcagacgcttatggctgagcccgctaagttcgatgacaaatgccgcaggaagggggctcagtggctcgcggcgcatcccaaggcgagcaggaagccagggaagacgcggcccaaagacttctggaccccgttcaagcctgcgctggcagatgcgtttcgagaactttgtgcgtatggcgccatgtacgagccagttggcaccgtggatcactttctgccagtcgatgccgatgaggcgttggcctacgaatggagcaactaccgcttcgcatcgggctggatcaacagcagcaagaacaaggctgtcacgatcctcgacccacttgatgtgcgtgaaggctggttcgaggtgctgttgccttcgttgcagctcgttgtagtgcctgagcgggtgcccgaaccaatgcgtgagttggcgatgaagacccttgagcggctgcatctgcagcatgatgagcgcgtactgcgacagcgtcgtggctggtatcgcaaatatcaggagggcaagctgacgctcgaagggctgcgtgaggttgcgcctctgattgcgcgagccgtagagaagcaggaggctgcagttctgccgtga

SEQ ID NO: 90092 - DNA, 789 bp, Pseudomonas aeruginosa
ttgtctattgaaggcgagtttgaggttatagagcgagactttgataatagacggtgcctgattgtaaccgccgctgccggtaattctcgccatctcacccctttgagtctggcgtcttcgggctaccgatcaatgctgtcgatgatctgcgacattcttcagggactgatgagcggtcgtctcaatgtcatcattgaaagcttggagtcagcccaagcggtagtgctcatcgatgagatcgaggcacacctgcaccctcgctggaagattcaaatcatgcacgccctgcgtagggctctacctaaaatcacctttatcgccacgacccacgatccgctctgcttacgcggcatgcacgatggtgaggtagtggtaatgcaacgaatagtcagcgatgcggccagcagcgatttacctgtaatggttgaacgaattacacacctgccaaacgtgagccaacttaccatcgaacaattactgacttcggatttcttcagcttatcgtccactgatcagccagaaaccgagcgtgaactagcgttgttcgcggacttgttggctgcgcgagaagcggggcagcgcttaactgcggctcaggaccgcgcttggaaagcattcgagcgcgacgtccgcgatgccttgccggtagggtctacagaagttcaacgcttggtgcaggaagctatggtggaatatctaaaggaacgcagacaggcctcttctagaacacttggcaatctacgcagcgctgccaagactcgtatcgtcaatatcctcaggacgctttga

SEQ ID NO: 90093 - DNA, 1014 bp, Pseudomonas aeruginosa
atgcgcgcagtaactcgcaaagaggtcaagacgcctgatgcgatgggaggggaggactctcctgctgggcgagagctcaataaactaagagagtatttcgctcagcccgcagggaaggccccagcgttctccgtatacaagtcagacagtgtaaaaaaacagctcgatgcgctgtttcatggcaagtgtgcctactgtgaaagcttttatgcgtcaaccgcaccggttgacgttgaacactatcgccccaagggggccgtctacgaggatgcaaaccatccaggatactggtggttagctatggattgggacaacctgctgccgagctgcatcgattgcaatcgcaaacgcaaacagaaggtccccaaactgtcagctcagttgctgacgctgcaggaagagcagcaaggcttcagccacagcatgctgatatccagcggcaaaaaagacagctttccagtgctcggtactcgcgctatgactgagggcactgccatcactgatgagtacgctcttttgctcgacccatgtcgagacgatccgcaagagcatctgcgctttcacattgaccggagcaatctgattagcctagttgtgcctgtctcacatccaggagcgggactgccggttcaggcaggtacaggagccgatgaagtaacgaggtccgtcattgagcaagccttggaagcgggcctgagcctcaaaggtgcgctatctattcacgtctatggcctcaaccgccttggcttggtacaggcgcgcacgcgcatactgcgacagctggagttccttgagttgctcgccatcgagatcgcttctatggctgacgccctagagcctgatccggcgaatcctaacgaacacactgatcgtgatatgagcatcgtacagcgactgtatttactccaggaccacatcctgcaggagatgaaacgcatggcgaggccggaggcaccttattcagtcatggtgcaaacctggattgagggcttcaaggcgcgcctgctgagctga

SEQ ID NO: 90094 - DNA, 1398 bp, Salmonella enterica subsp. enterica serovar Typhimurium
atgagaatcgacaaactttcactgcttaactttcgttgcttcagacagctcgatattacttttgatgagcacattacgattctggttgcaccgaatggcgcgggcaagacgacagtgctggatgcgatacgcctggcgctgtttccctttattcgtggttttgatgccagcctctacgtaaaagataaatcgctggcgatccgtacagaagatgtacgtctggttttccgccccgaagcgctgaacatggaaatgtcgtctccggccatgattacggctaccggggaatgggaaagtggaaaaacggcaacctggatgctcgacaagcgaggagaacagccgccgcatgaagataagacagcggcgcagcttacccgttggggtgaacaacttcagacgctggtgcgtgaagagcataatttgcagcaggttgagcttcccctaatgctttatctggggactgctcgcttgtggtatcaggaacgttatgaggcacagcctactgaacagcgtctggataacagcgccttttcacgtttgtctggttatgacgattgcctttctgccacatcaaattataagcaatttgaacaatggtatagctggttatggcttagctaccgtgaacatcaaatcacacaacttgaatcaccttcagcaaagttaaaagaaggtgttcgtgttcagcggatgaaagaagctattcaagccatccagcaagccattaactgtctgacgcaggaagtgactggctggcacgatctggaatacagctccagccataaccagcaattggtgatgaaccatccacagcacggtaagattcccttatcccagctcagcgacggcctgcgtaatgcggttgcgatggtagcggatatcgcgtttcgctgtgtcaaactcaacccccatttacgcgatgaagccgccttaaaaacacaggggattgtgctgatcgatgaagtcgatatgttcctgcacccagcctggcagcagcaaattatccagtctttgcgcagcgcatttccactaatccagtttattgtcactacccatagcccgcaggttatcagcacggtaaaacgtgaatccattcgtctgcttgagcaggatgagaatggcaacgggaaagcgttgatgccgctcggagcgacctacggcgagccgagtaacgacgtgctacaaagtgtgatgggtgtcgatccgcaacctccggttaaggagaaggctgacctacaaaagctgacggcttgggtagatcaagggaagtacgacgagccagaagcacagcaactgatggctgcattacaggcggcgctgggtgatcaacatccacaactccaacgcttacagcgcagcattgcccggcagaacatgctgaaagggaaagcgcaatga

SEQ ID NO: 90095 - DNA, 726 bp, Salmonella enterica subsp. enterica serovar Typhimurium
atgaggcatgtgataaaaacccgacgtggaacagatgccttactcactgcacatgagcaaccaccacaaaattcagatcaatcaactcgtcgctggcagcactttggtcgtgagaataaagcagccttaatgactctgcttctcaatgagcaatatcacctttgctgttacagcgaaatccgtgctgatttgcgtggcctcggctatcacattgaacacgtcgaaaataaaagtcagcagccagggcgaaccttcgattatcaaaatctcgccgccagcgcgttagactctgagaatggtttgcacctgtttggtatcaacgctttcggcggtcacgcaagaggaaaacaagaggccgtggatatggcaaagtttattcattgtcacctccctgactgttctcgttattttgcttacctttctgatggccgaatagtaccggctgatgagctaaatgcccaggaaatggagagggcagagtacaccattgatctactaaatctgaacagcggattccttcaaacggaacgtcgtaatcattgggaagagctggaacagctttttgaggaacatattgaaaaaggctgggatctgcaacaattacttcagcttgagctggtcccttcgctagatcataaactgcatgaattcttcagcattacacgccagtttttccagcaagaagctgaacaggtattacagatccacgccccagcattaatttaa

SEQ ID NO: 90096 - DNA, 1242 bp, Fusobacterium nucleatum subsp. polymorphum; identical to SEQ ID NO: 87858

SEQ ID NO: 90097 - DNA, 585 bp, Fusobacterium nucleatum subsp. polymorphum; identical to SEQ ID NO: 87859

SEQ ID NO: 90098 - DNA, 1254 bp, Mastigocoleus testarum BC008
atgaaaatcaaacatattaagatgcactcttttcggggagttagcgatatgacgctagaattccaagagtgcgaacctaacgtgtttattggtattaatggcgttggtaaatctagtattcttgattgcatcgccattcttctctctcggtataccagtccggttcaataccccagcacttcaggtagattattccgagaacaagatatcagagaaggatctcaagaaacatgtaatgaaataacagttatgactacggaaggtgacgtaacttggtcccttggaaaactccaaaaaaaacgtagtaaaaatagtagtaccgatttgacacaattacgtaaattaattgagtctacccaggatagtctgaaggctgacccaaattttaatctaactgttgtagttcattactctgtaaatcgcgctgttgttgatattcctttgagagttaggaaaaagcattctgtagatcgagtaacagcttacgaagaatccctacatggtacgaaaataaactttaataacttctttcagtggttcagaaaatgggaagacttggagaatgaagagagaagagatgatgctaattataccaatcatcaattagaagttgttcgacaggctatttattctctgattccaggattatccgatttgagaatccgtcgttctcctttaaggatgacagtgaagaagcaggagcgagaactcaatgtcagtcaactttccgatggagaaaaatgtctccttgcaatggtgggggatttagcaagacgcttagcgatcgcaaaccccggacttgaagaacctttagaaggcaatggtattattttaattgatgaagttgaactacacttacatccccaatggcaaagggaaattattccggctttaagtaaaacttttcctaattgtcagtttattgttactacccattcaccccaggtaattagccacgttaaacctgagggaattcatattattgaaaatacagcagaaggtatcattgcactgaaaccagaaaactcttttggtagagataccaattgtatcttagaggacttaatggaggttcccgaaagacctcaagaaatcaaaaatagcttgcagcagctattcaaatttattgatgaaggagatttggaaggtgcaaaacaattacgtcgggatttagctctgcagattggagaagatgaaccagaatttgtccgcgctgatgttctaattcgtcgcaaggaaattctcaacaaatga

SEQ ID NO: 90099 - DNA, 645 bp, Mastigocoleus testarum BC008
atgaaatatatccacaagaatccagaaccaggtagtttgactggctacaatgacagactcaggaataaaacgccgaattggaaatcctttaataaatcagtcaaaaccgatgtgtatcatgctctgttaaaggaacaaggtcacatttgttgctactgcgggattcgtatcttcagaaaaaattgtcacattgaacactatcgacccaaaagccaatacaaacatttaaccttcagctataccaatttgatagtttcttgtcagggagaagacgaacaaagaccaaccaaaccagttcattgcggtcataaaaagggtgcttggtttgatgaagatttaatgatttctcccttagatccaaactgtccagattattttaaatacactggttctggggaaattttagctgcggataatcccgataaactagatgctgctgaaactacaatcgcaaaactggctttaaatatcaataaacttacaaagatgcggagaaaggcgattgatgcagcattacaaatagttgaagaattggatgacggagaaatacataccctcgcccaagcctatcaagaaatggattccgagggtcagtatacacctttttgggctgctgttgcttatacatttaagcaatatttttag

SEQ ID NO: 90100 - DNA, 1254 bp, Mastigocoleus testarum BC008; identical to SEQ ID NO: 90098

SEQ ID NO: 90101 - DNA, 645 bp, Mastigocoleus testarum BC008; identical to SEQ ID NO: 90099

SEQ ID NO: 90102 - DNA, 1398 bp, Salmonella enterica subsp. enterica
atgagaatcgacaaactttcactgcttaactttcgttgcttcagacagctcgatattacttttgatgagcacattacgattctggttgcaccgaatggcgcgggcaagacggcagtgctggatgcgatacgcctggcgctgtttccctttattcgtggttttgatgccagcctctacgtaaaagataaatcgctggcgatccgtacagaagatgtacgtctggttttccgccccgaagcgctgaacatggaaatgtcgtctccggccatgattacggctaccggggaatgggaaagtggaaagacggcaacctggatgctcgacaagcgaggagaacagccgccgcatgaagataagacggcggcgcagcttacccgttggggtgaacaacttcagacgctggtgcgtgaagagcatagtttgcagcaggttgaacttcccctaatgctttatctggggactgctcgcttgtggtatcaggaacgttatgaggcacagcctactgaacagcgtctggataacagcgccttttcacgtttgtctggttatgacgattgcctttctgccacatcaaactataagcaatttgaacaatggtatagctggttatggcttagctaccgtgaacatcaaatcacacaacttgaatcaccttcagcaaagttaaaagaaggtgttcgtgttcagcggatgaaagaagctattcaagccatccagcaagccattaactgtctgacgcaggaagtgactggctggcacgatctggaatacagctccagccataaccagcaattggtgatgaaccatccacagcacggtaagattcccttatcccagctcagcgacggcctacgtaatgcggttgcgatggtagcggatatcgcgtttcgctgtgtcaaactcaacccgcatttacgcgatgaagccgccttaaaaacccagggaattgtgctgatcgatgaagttgatatgttcctgcacccggcctggcagcagcaaattatccagtctttgcgcagcgcatttccactaatccagtttattgtcactacccatagcccgcaggttatcagcacggtaaaacgtgaatccattcgtctgcttgagcaggatgagaatggcaacgggaaagcgttgatgccgctcggagcgacctacggcgagccgagtaacgacgtgctgcaaagtgtgatgggtgtcgatccgcaacctccggttaaggagaaggttgacctacaaaaactgacggcttgggtagatcaagggaagtatgacaatccagaagcacagcaactgatggctgcgttgcaggttgcgttaggtgagaagcatccccagcttcaacgcttacagcgcagtattgcccggcagaacctgctgaaagggaaggcacaatga

SEQ ID NO: 90103 - DNA, 597 bp, Salmonella enterica subsp. enterica
atgacgcttctgctcaatgagcaatatcatctttgctgttacagcgaaatccgtgctgatttgcgtggcctcggctatcacattgaacacgtcgaaaataaaagccagcagccagtacgaaccttcgattatcaaaatctcgctgccagtgcattagattcagagaatggtttgcacctgtttggtatcaacgctttcggcggtcactcaagaggaaaacaagaggccgtggatatggcaaagtttattcattgtcacctccctgactgttctcgttattttgcttacctttctgatggccgaatagtaccggctgatgagctaaatgcccaggaaatggagagggcagagtacaccattgatctactaaatctgaacagcggattccttcaaactgaacgtcgtaatcattgggaagagctggaacagctttttgatgaacatattgaaaaaggctgggatctgcaacaattacttcagcttgagctggtcccttcgccagatcataaactgcatgaattcttcagcattacacgccagtttttccagcaagaagctgaacaggtattacagatccacgccccagcattaatttaa

SEQ ID NO: 90104 - DNA, 1563 bp, Bacillus enclensis
atgatattaaaattagagggatatgataatccattcagggtggaagttgaaatagactatataaatagaataattcatgttttagatttatgggatcccaatacgacttccttaattaatggcattgacttaaatgaaaatcaacaaagaattttgaactatatgaatattgataaaataggtcctcctgattattggaaatggtatatatattcacccgggaaaataaatagtgtttataaatttaatgacggtgtgtttctagaagtacataatcacctatttaaagattttttggaaagaataaaaaatgatctttcttcctcaaaatatttcatccagaagttagaaataaataacttccgaaatttcaaaaatttacaaatagatttaggtagtaaaaagaaaaagcatttaatattaactgggaaaaatggaagtgggaaaacatcttttctattagagttgaagaattatttattgtcttttgaggatggcaacttccgtcatcttaaagaatggaaggaaaccatagtaaatttaaaagaaaggataaataactctaatgtagagaattcagaacgagagagaattacaagtaatattaaaagcattaaagaatccatgagaagatatggagaaataaatccaacgttttcagaagtgtacgaattacagtcttcttatgataatggaaacttcatcattgcatactttgattctaaaagaacaacaaatatgatagtgcctgattctataagcaaaattaaattacacttaaaatatcgtgcagatgatcgtccaagtaatattttcatacaatatttagttaatatgaaagcggaacaagcttttgcaaatcaatctaatgataaggctttagtgaaaaaaattgataaatggtttaataatttagaaatagcatttagagagttattcgagagtgaagattttaaacttgagtttgatttcaaagaattaaatttttttattaaagaaaaaaacaaaacaaagtattcttttcagcacctctctgatggttacgcatctgtaattaatattgtatctgatatcttaatgagaatggaaaataagaataatgaaagtggtatttataatcttgaaggaattgtattaatagatgaaatagaaactcatttacatgtaagtctacaaaagaaaatttttccttttttgtgtgccctttttccgagaatacagtttatagtgacgactcattctccttttgtacttagctctgctgagaattccgttgtttatgacttggaacacaaattacgtatcgaagacttatctccctattcttatgaaggcattgttgaagcgtactttggcattgataagtattcagtagcagtaaagaaaaagttagaaagatatagagaattaatagtaggtatcgaaaacattactgaagaagatattgatgaactttttcaactaaaacaatatttaaagagtgtcccggataagttcgctcaagaagtgaaattagagttttataggcttgaacaactaagaaaggagaagatgagatcttga

SEQ ID NO: 90105 - DNA, 708 bp, Bacillus enclensis
ttgatctattttgaaaaatctttgccggctcctccaagtttggaaattgaaaaacacaaaaataatggtacttacctaaaagcagatgtaattagccagttaaaacaagattttaagaataaatgctatatttgtgaaaataaagctttaatctctattaatgttgaacatctagtttctcatagagaagatatagataaaaagttcagttgggagaacttgtttttgtcttgttcccactgcaataatattaaattacatcattatgataatattttaaattgtactatggtagaggatgatatagaaaatagtatcaaattaaaagtagatccttatccaaaatctagtgtagaagtgactgcattaaagaatgatgaaagagttgaaaaaactgtcgagttattaaataaagtttataacggtactactatattaaaaactgaagaagcagaaactatcaaaaaaaatttattaaaagaaattttggctttccagtctctcctgtttgagtatgatgagctagaacatgaccatgaagatgacttagaagaaattaataatataaagaagcaaatttccagacatttaagaaatagttctgcatatacaggttttaagagatggataataaaagcaaacgaatctttaaccatagaatttggctccttgttcctagaacaagaaagtgatacgaaaacaatatga

SEQ ID NO: 90106 - DNA, 1524 bp, Klebsiella pneumoniae; identical to SEQ ID NO: 88916

SEQ ID NO: 90107 - DNA, 675 bp, Klebsiella pneumoniae
atgattaatagacctattgtatacagcgcaacagctcaggaatttgtcgatacattcaatggagacgcctcgcattgggatggtacgtgcgcagtgcgtaaagccttccgaaaagaagttagagattattatcgcgatgaacaagagttcacatgtccttattgtgggagattaagagaagaatttcatggtgggcaatgggatattgatcatattatccccaaatcttcttacccacaatatctctacaccccaagaaatcttgctgttacgtgcaaagactgtaatacgcataaatccaaaaaaaacccactactaattacactcgacagcggagcaccctaccctgagaatactgtgtcttacaaaataatacatccgcattttgactcttacaatgaacatattatgctaagaaaagataaaaaaggtcgatcatatcatgaggtaattacagataaaggccgcgaaactttccttatgtgcaatttgattcggttcagcgaagtgatttgtggcacctctgagtttattcctgagttgggaactgaaattggtatcactaatagctttagtgagtcagttcaagtatggttggcggattatgacgatctaaatcctgtcgatgcggaaatcgccttacaggctctgatgcaaaaaataagcctgcgttga

SEQ ID NO: 90108 - DNA, 1524 bp, Klebsiella pneumoniae; identical to SEQ ID NO: 88916

SEQ ID NO: 90109 - DNA, 675 bp, Klebsiella pneumoniae; identical to SEQ ID NO: 90107

SEQ ID NO: 90110 - DNA, 1524 bp, Klebsiella pneumoniae; identical to SEQ ID NO: 88916

SEQ ID NO: 90111 - DNA, 675 bp, Klebsiella pneumoniae; identical to SEQ ID NO: 90107

SEQ ID NO: 90112 - DNA, 1524 bp, Klebsiella pneumoniae; identical to SEQ ID NO: 88916

SEQ ID NO: 90113 - DNA, 675 bp, Klebsiella pneumoniae; identical to SEQ ID NO: 90107

SEQ ID NO: 90114 - DNA, 1524 bp, Klebsiella pneumoniae; identical to SEQ ID NO: 88916

SEQ ID NO: 90115 - DNA, 675 bp, Klebsiella pneumoniae; identical to SEQ ID NO: 90107

SEQ ID NO: 90116 - DNA, 1398 bp, Salmonella enterica subsp. enterica serovar Senftenberg; identical to SEQ ID NO: 86590

SEQ ID NO: 90117 - DNA, 726 bp, Salmonella enterica subsp. enterica serovar Senftenberg; identical to SEQ ID NO: 86591

SEQ ID NO: 90118 - DNA, 1257 bp, Phaeobacter sp. CECT 5382
atgtatctgaaatcgatacgtctcaagaatatcaagtgtttcaaagatgtggagatcgactttgatctcaaaggtggaaacaaccgaaagtggaccgtcttgcttggtgagaacgggacagggaaatccacaatcctcaagtcgatcgcgcttctgatggccggatctgacgcacttgtcgagttggtacgccagcctgatgacttgcttcgcaaagaagcaaacaaaggttcaattgtaggcaccattgaaaccaaagacggcaaagttagagagctcaaactcgattttgtccgaggaaagggcgtgtccaggtttctcagcggctcacaggaaaccttgcaacccctgaatgaagctctagaacacaccaatcgcagctaccctgtatttgcctacggggccgcgcgtcgccttgggtctgaacaaagcttcagctctagatcaccacagaaacatccacgcgcacgatccatgtcatcgctctttgaccgcaatgcgcaactcaacccattggaacaatgggccatggacctcgactatcgctcgggtggattgcaaatgagcatcgtgcgcaaggttttgagcgactttctaccggaacttacattttctgaaatcgacaaagatgggcgcagccttctctttgaaacagacgatggtttggtgccccttgagcatctcagtgatggttaccaaaatgtggccgcctgggtcggcgatttgctctatcagatcaccgaaattttcgacgactacaagaaccccctccatgccagagggcttctcataatagatgaggtcgatcttcatctacatccaaaatggcaacgaacgcttctcgaatttctggaaaagcaactgcccaatatgcagctgatcgtaacgacgcattccgttgtcaccgcgcagcaaaccccagaaaattctttgttctattgtatccgccgcgacaaatccagacctgaaatcgtcccctttgaaggcgatccgggaaaactgcttctcaaccagctgatcgtaacagaagccttcgggcacatttcagatgaatctgtcgaaattgaatcccatcgtgcccgctatcgcaaacttcacaaaaagaagaagaaaaccaaaaaagacctggcagagatggagcagttaagcgatgtgatcggcgcggtgcctgaagatccatctgaggacattgtgctgagtgacagacagcgcgccctcatgcagaaaatcgttagccgacaggcgacaaagcaatga

SEQ ID NO: 90119 - DNA, 840 bp, Phaeobacter sp. CECT 5382
atgattagcctgcaaagatcacgacaacagggcgatgttattcccagtttcagaggcaataagcccattgaacgcctcgttgaacttatggagacgcgtcgcgccaagctcgttgccggtgaggatccaaagcttaaaatcaactccaaatggtcaaagacaaaaaaacagcttcttgtcgaaacaaacgacaaatgtgcctactgcgagtctcacaccacagccgtcgccttcggcgatgtcgagcattatcgccctaaatccatctattggtggctggcctatgtctacgacaactatctcgcgtcctgttcaatctgcaatcaacagttcaagagcaacgcctttgagttttctggaccaaaaatgcgggggcctgtgatcaggtctaacacaactgatgcccggatcgcctcattggccagaaaatttgcgcctgatccgctggacgctcaagcaatcgcagactttgaggatgcccatcgtctggaagcgccgctcatcccgaacccctatattgatagcccggaagacctcttttcttgggatgtcttgaggggtgcaaaacaggtagaacttatcccaaacccaaaccatcctgatgcggctgatgtcgtcgatgcttgcgaacggctctatggcctcaatcgaccacagctaaagcgccgcagatttaaccaatggcggaactataatttctttttgaaggttatgcttgatcagggagcagatcaggagacacgagatgatgcgaaagcatttatcgatgagtcactactaccaacaagcgaatacgctggcatgatccgatactttgaaaaccagagattgggaaattaa

SEQ ID NO: 90120 - DNA, 1524 bp, Klebsiella pneumoniae; identical to SEQ ID NO: 88916

SEQ ID NO: 90121 - DNA, 675 bp, Klebsiella pneumoniae; identical to SEQ ID NO: 90107

SEQ ID NO: 90122 - DNA, 1524 bp, Klebsiella pneumoniae; identical to SEQ ID NO: 88916

SEQ ID NO: 90123 - DNA, 675 bp, Klebsiella pneumoniae; identical to SEQ ID NO: 90107

SEQ ID NO: 90124 - DNA, 1524 bp, Klebsiella pneumoniae; identical to SEQ ID NO: 88916

SEQ ID NO: 90125 - DNA, 675 bp, Klebsiella pneumoniae; identical to SEQ ID NO: 90107

SEQ ID NO: 90126 - DNA, 1524 bp, Klebsiella pneumoniae; identical to SEQ ID NO: 88916

SEQ ID NO: 90127 - DNA, 675 bp, Klebsiella pneumoniae; identical to SEQ ID NO: 90107

SEQ ID NO: 90128 - DNA, 1524 bp, Klebsiella pneumoniae; identical to SEQ ID NO: 88916

SEQ ID NO: 90129 - DNA, 675 bp, Klebsiella pneumoniae; identical to SEQ ID NO: 90107

SEQ ID NO: 90130 - DNA, 1140 bp, Pediococcus acidilactici
gtgggtaacataaccaatatatcacttcattttaataaaaacgtgaatgtgatttgtggaacaaacggcattggtaaaaccactatacttaaatcaattctcgcattatttgaactaagcgataatagtttaaaaaagaagtacggaacggataggggggctataatcggtaaatcatctgaaggtgtaacaagggaaatggaaattacatcagttttacctgaagaagcaaacaagaattacagaagcaacgaaaactttgatcttaatattacgagtgtatactacgttccagatagcagggatcttcaatataagaatttagaatctttaagaagatacccgtctagagagttaaccacttttaaccgagataattttttaaaaaatgacattgctgataacctaaaaaactggttaataaaccaatttatatctgacgggatgaatggtaaagggactgaattaaaagaaaatgaactttttaatatcagccaaataaaacgcgcattttctgttatagataaaaaaataaagtataaaagaattgatttacataagtatgaaattttattaaacgaccacggtaatgaagtgtttttagagtttgagtcaactgggttcaaaaatgttttatttattattgtcggtattattgctgaaatcgaggagagatttagagatataaggataaacgactttgatggtattattcttatagatgagattgatgcgcatttacaccctacgtggcagagtaaaatcattgatatcttaaaagagatgttccctaaaacacaatttatcataacaacacatagtcctgcagttttacaaagtttaaataaggaagagataattcccttatatttagaagataatgaagttacactaaaagcactaaatttaagtggatatgggttgaagggatggacgcttgaagaaatattaacggacgttatgggcgtcggagaattaaaaaataaaatacttcgagaatctttagatttattcagtagtgctttagaccaaaaagatattgaacaagcaaaagtggcgtatgaaaggctagatcaaatgctgcatcctcaaagtacgcttagacaagttttagatatacaaaaggcggggttattttga

SEQ ID NO: 90131 - DNA, 507 bp, Pediococcus acidilactici
ttgatttttataaaaagaactgcgccacccaaacagttaacagatgaagttgtaaagaaattaacaaatttgtataaagaagaacagagtaatgtttggtcaaaaaaatatataaaagatgcattactaaacatgagtcataataaatgttgttattgtgaagcacctttagatcagcaaggattatatatgcaagtagaacactttcatcccaaatcaagttatcctgaagaggttgtagattgggataatttgttaccagtgtgtccaacttgtaattctaaaaagagagaactggatactgttaaagtttctttcataaatccttctaaagagaatccaaagaacttgtttatactgaataattatagatttgaaccgaaagaggataatgaaaaagccaatagaacaattaaagtgttggggctaaattcaatagataagttaatgatagctcgttttagagtagggagtacattgctggaaagaattaaaaaaattgtgtga

SEQ ID NO: 90132 - DNA, 867 bp, Sinorhizobium sp. GL2
ttggtgcccttcgataccgacgaggacaagtccttcgctgacgctctcgacgatgaccagagcaacgccatcttcgttgcaggatacagtgcaactcgcttcgtcgaacccggcaaattcgttgcttctagtgcgctcaagagccgctcgttaagataccaacgtgtcgcgggcctgttcgaggacaatgttaccctcagccctatgcaaagctggttaccccagttgcatgcccgaagcgccgaggcgcacgccagagcaatcaacctgattaattcggtccttccgtccaacattcgattcagtggcgagcacgatgaccgcgacgaacagtatgtctttgagtttaacgggcttaggacaccatttggatccctgtctgatggatataaggcgttcgtcggctggattggagaccttgtcgggcgccttgccgaggtagcgaagccccgccaaccttttacggacatacccggcctagtgctcgtcgacgaaatcgacttacatttacatccagaatggcagcgaacggttgtcccggagctggctaaggcctttcccaacattcagttcgtactcacctcgcacagtccgctggttgcggcctccctgcgcaaggagaacatcttcgtcaccggcagcagggaagatggcactgcgtctatcgatcagttccaggagaaagtctatggccgcagctccgagcaactactcctttcctcctactttggcctgaccaacactcgtcccgacaccttccaggacgagtcgagagaactgttccagcgggcggcacgaggtgacgccagcgcggccctagactacctaaagaagctgagcgggacagtcccggagactggcgaatga

SEQ ID NO: 90133 - DNA, 861 bp, Sinorhizobium sp. GL2
atgatccgatatgcgtcgacaaaggcttccatagaagccgcaatcgggaatctcaacgccacgtggctggatcgcgccaagcagcggacagcgcatttcgtgaaagcaaatgcatacgtggagggaggggtcggctggtccgagatcaaaccggcctacatggccctacaacataacaagtgcattttctgtgaggcgcccgaatacgcccctgaacgcggcacctacaacttggatgtcgagcacttccgaccgaagaatacagtgcaattgtggcctagagcaggagccgctaggcagtatcagttttcgacgggtggcgcgggaggtgcctattattggctcgccttggacccgactaactatgccgtgtcgtgcaaggagtgcaacagtcgctacaagtcgaacttcttccccgtggcagccgcccgcggcaacacaggcaacagcccccagcagctacagagcgaattgccgtttctatgctaccctttgggcgattgggacgaagacccggaaagcttgatcacgtttgacggcacaatcgctatccccgcgtccgatgatcccctcaagctccgacgagcggaagttatcattgactttttcgagctcaacgaccgtttagccctgcaacgggagcgcgcgcaattcatcatcttgttcggtcggtttctcgaggaagttcttataggtatgggtgggaaccaggcggagttgatcgtggccaaaatggaactgccaagcgcaccgcacgccagttgcctcagaagcttcaagcgggcctggttggcgaacccagtgcgtggcaaaaagatcctcaacgactgcatcgcattgtactttgacagcatcggctag

SEQ ID NO: 90134 - DNA, 1218 bp, Sinorhizobium sp. GW3
atggcgaatttttccagactaacaatcgacaactggcggcaattcgaggccgtcgacatcgatctgagtaggcaggtcacagttctcaccgggcagaatggttgcggcaaaacgaccattctgaaccttttgagccgccatttcgggtggaaccttcagttcgtttcgacgccgttcataggaaaaaagtcggcaaagcggctttggtcggacatctatgacgaccgtagcagcgacttagaaaacttgggtaacacacatgtaaaaattggcaccatccaatacgacaacgacgttacctgcgaattatttacaagcacccttaccagcattcaatacatgccagagtatagttcgatgcaaggcgtcgacggtatgcacatcccctcacaccgaggggtaactacatatactaatgtggccagcattccgacggaaccgatcgattcggcgcagcaatatcaacagtttcaacaactacttacgcaagcttacggcggaggtcggtccgaaaacgctggacgaattcagaagcagtccctgatgtccctcgcattattgggcgaaggaaactcgcacgtaactccaaatccggagatgaaacgcgtttttaagggatttcaagcggtcctgaaagatgttcttccggacaatctcggctttcaaagaatagaaattcgaatgccggaagtggttctcgtcacaaactcggggacattcgcgatagacgcgatgtccggagggataagcgcaatattcagtatcgcttggcaaatatatatgtttggccataataaacagaacttttgcgttacaattgatgaacctgaaaatcatctgcatccgtctatgcaacggaccttcctacccaaactcgctaaagcattcccgaattgcaggatcataactgcgactcatagtccgttcattgtgtcgagctttcctgatgccaatgttattgctctggccagaggcgagggccagaggatcgtttctgaatccctcgatctcaaagatatctcgggaaccccgaacgaggttcttcgcgaaatcctaaatgtcagctcaaacctaccggtttgggtggaaggcgaaattgagaagctgattgaaagagcaagccgcctagcgccagaaaaacgagcaaagcacataatggagaagctgaggaagctcgggatttccgacgcaatagttgagtacaggcgcgaacgctag

SEQ ID NO: 90135 - DNA, 633 bp, Sinorhizobium sp. GW3
atgagaagtattgtcaaggctgaggaaccgcagatcctcctcgaaaacaaggcgtcatggactaccgaatatgtcgccgaccctaagaacaagaccaaaaaatatcggtaccggcatcctgacatcaagtccgcgctcaaggctgaaacatcagacaaatgcgtttattgcgaaagcaaaattgggcacaacacgcccggagacgtagaacacaaggtgccaagctcgctggatcgtacgaggcatttcgagtgggaaaatctgacaattgcctgcacggaatgcaatcggaggaagaacgcctattacgacgtcgtaaagccattcctcgacccttacatcaatggaatcgaggctcgcattatacaccacggtcctattgtgtgctgggcgcctcacgacgctgtggcagaagcaaccgtcaagattctgaatctcaatgacacaacgcgaacacaactcgtcgcccaaaaggtcgagcacattgacgcgctgaacaacgtagtagctcgattaaaggaggccgacccacttatacaggagttgatgaagctaaaaattgaagaaatgaaggcggaaggggcggagtactctgggatggtgcacgcagtctgcgcaacctacggcatttga

SEQ ID NO: 90136 - DNA, 1392 bp, Klebsiella sp. G5
atgctccatcatggagttgctgctgttcggggagaaaccatccaccctgctatgcctgtgaagattgaacagaaaattgatactgaagcaggtacgggcttcgaagcttatcgctcaaagtctcagtacatcagccgcattaagataaagaacttcggcccgatccatattctcgatcttgacttgagcctatccgagtcacctcaggcaccatgctttgcactcttaggggagaacggcgtaggaaagagcaccgttttacgcgctctggcgctggcgttatcagggaaagcatattccaaaagactggggttaaacagcgccaagcttctctctgatggtgcttcggatggagaggttagagtgtccatcgttggcggcgaagatgacatcatcatgaagcttcgacgcaaccgtgctatcgagttcaacaccgatacttcaaggtctttagttttggcttacggcgcaacaaggttactgccaaaaggtaggcacaaagccaaagacggtgaagctcacgcgaaaattgataatttgtttgaccccttcctccctctgagcaaccccgccgagtggctttccacgttagaggaaggaagcttagcagaagtaaataacgtgctcgccagtctgatgcctcaagaccatcaagttacggttattctgactcctgaaactggtgccgtctctctacaagtaggtaacgtgccaggtcgcaaatttgaccatctcagtgatggttatcagtcaatgcttggcatggcggtagacatcatgaaggtgctttatcgctcaggatcaactatggagtccgccgaaggcgtagtgatcattgacgaactgggtaatcacttccatccggcatggcggcttcaatgcctatctgcactgcgcgcagcctttccgcgcgctcaatttatttatagcacccatgacccactatgcttaagagggctttacgcgggtgaagtgactgtattgaagcgagacaggcttgggcatatttatgctttagaggatcttccctccgtatctaggctcagagtcgaacaacttttatcttctgaacattttggcttgcggagtacagctgatccccagatggaagaggatattcatgagtacgaagagctgctcggctcgccagaccgtacagcgaatgaagatgcaagacttgaagagttggtgcaacgtttgaccgatgaccgttatctgggcgcaactcgccgtgaacgtcttgcactacagcttctggatacttcaggcttggaagatgtgccggtacagccaagcatcagcgcacgcgaactatccgaaaaaactgtatctcggttgcgttttatcatgaatcaagtatcacctcgtactgatactcaaggaaatcagtaa

SEQ ID NO: 90137 - DNA, 345 bp, Klebsiella sp. G5
ttgctcaacccctgtattgatgacccagatgaacacttggttttcctcgacgatggcagggttgaaccggcactaataaatgggcaggaaagcaggaaaggaaaagcgagtatccaatatcttggcctggcgagagctgagctgttgcagatgcgcgctcgccatcggcgaaccgtgattgctgcgattcgacatactattgcggccctggaggagggacgtgatccaggaacagatcttgatgacctgctgacgttactttcctccaaagaagcatacgtagcctatacccgaacgttagttcgaactcatatgagtgcttacattgaagccttgggtctataa

SEQ ID NO: 90138 - DNA, 1338 bp, Enterobacter sp. 50588862
atgcgtcagccataccgcattgaaagcgttacgctaaacgatatcggtgtatttgataatactcattttgattttccacagatttctagtgaaagtgaggatgcaactaaagcggagatccatatcttgaccgggccaaacggctgtgggaaaagtactgtgttatatgctctggcagggattttaaaccctgaccatggggattttttagtcagaaaacgatatcaaggtatgagcagtaatgttaattttcatttttgtggattagctggagagtatggtgtcaatttagataagcaagtgaataatttgttagttaagagtgatgcttactattattgcattcccggtgcttcagaaagcttggtgtggcataaccgcccttggctggacatgaaccaaaatgtgactgttaagaagtttgattatgcggccttagcttattcaggtagtcgagctgcgcaatcgggttatgttttctcctcaattcaaaacattacacagtcgccattcgaaaatgctctttcttttgatcaaactgttcgcccccaactgctcgcgcaatggatagccaacaaccgtacccaggcggcgctagccaaagatgatggtgcagaacaagaagctaagcagtttgatcatgcgatagaccaaataacaacgtttgtgaataatatttgtcagcttggtctgacgtttcatcttgaacgtagtccgctggaagttaaagtaggtcttggggggaagcgacttaacctggacatccttccagagggattaaagtcgataattagttggatcgcggatatggcactacgtttggaaagtatcccttggaaagaacagcgcgacatattctctcagcctattattcttttcttggatgaggtggatattcatcttcatccaaagtggcagcgtagaatccttcctgcaatccagaagttgctcccgaatgctcaagtctttgtctcaacacattctccttttgtggttggatcagtggaagatgcctttgtctatcgcttgccagaatcacaaagaaatatccaaaacaatgccacatcaaataaaagcgttaaggctgtgaaatcaggagcaggaaaaagttatcaacttattcttgcagaaatttttgacgtggaagaagaattcgatgtcgaaacagaacgtcaattggtggatttcaaagaggcaattcgtcgacatctgcaaaattcaaaggatgatgcagaagttatgaagttggctgagacattacgtgaaaagagtgaagaactcgctacgctagtgagtatggagctacgccaaatgaatcgtttgttaagtataaaataa

SEQ ID NO: 90139 - DNA, 600 bp, Enterobacter sp. 50588862
atgtacccatttactagaccagaatgtcctgattatctgttagaatgctgggaagaactagggtcaaggtatgaagagtccaaaagaaaggacgctaaatatactttttgttggtatgcggcctttcgttatgaagatacacgaaaactgcttacagccatgactcaagagcattgtgcattttgtgatgggggggatttaggggcgatgagtcgtgaaacccttgagcattttcgaccgaaaagccgtgaggaattttatcgactggcctaccaatgggaaaatttgtacccatgttgcgatcgctgtcaaagtgaaaagcttgaaaagtatgaagatgcattattgattgctgacgtcgcggggtttgttttcaacgattattttatggtcgattatttgacgggggaaattttgccgaattctaaggcgtccgctgctaatcaacatcgcgcagaacgaaccatagagatatatggactaaatgtggatcaacggaaaaccatccgcaaaaaagagcttaaacggtacttgcagcgtgatgagaaaaccgatgtccttgacgattttagttatcgctattttttgatggatgcttga

SEQ ID NO: 90140 - DNA, 1419 bp, Proteus mirabilis
atgcaaatcagcaaactacgtcttgaaaattatggtgtttttactgatgctgaaattatgttggccacaaaaaatggcaaccagaatggttcaaatattacggtatttataggtaataatggttcaggtaaaaccagccttttagatgctattgcaacaggtttaagttggtttgtagcgaagtttgaggatagagaagctcaaggtgaatttgcatgcaaatctaaaattaatatttcatctgattattgcttaatctcttttatcaaacgagaagccatccatccgacacatcaatataatgatgatctctctttagaattaatcactgccttaaaaaattcaaaaaaatatgcattggggtcatatgctatagattctgatatagctaattacgtatataaccattatagaatttcatcaagacaaacaagatatcatcgaaattatccaataacagcgtactatggcgcaactcgccatacctatgacacaataatcaacaatgctattcagcctaatgatagtcataaatttgatatcttagctggctataaagatagttttgatgctaaaacaaattatgctgatttttttacttggtttcgttatcgtgaagatatcgaaaatgaaacagcacctcatacaagtattatgaaattgctagaaaagcatactgatgtaaatagtgaaatttaccaaagtatgttagcagagcaaagaaaactgcaagataaagcattaacagctgtgcgtgaagcaatcaagattttcttatcggatactgattcagttattgaaaatatctatattgaacgaacacctaacctttcaatgaaagtggtaaaaaatggaacgcatttttcaattgaacagctatcctatggcgaaaaatcactttttgccatggtcggtgatatagcacgtcgtttaacgcttttaaacccaacactagataatcctttagaagggaaaggcattattttaattgatgaacccgatgtacatttacacccacaatggcaacgacgcttaattagtttactggataaaacttttcctaactgccaatttatattaacaacacactcaccgctattaatcagtgaccataaagatatcttagtatatagcattgaaaaaggtcaggttaaaaaaataaattcactttacggccaagatatcaatagcgttctgtcagaaattatggatactgactttatcaatcaaaaagttcaaaatcaattaggcgatattcttgatgctattaatgaaggcaatataaagaaagcaaaagattggctaagtaaattagaaaaagagatctccgccaataatattgagttagtgaaagcacgattgttgctaaagaaaaaggaagttcaacttgagaaaaatcagcaaaaaaaagggttatga

SEQ ID NO: 90141 - DNA, 642 bp, Proteus mirabilis
ttgagaaaaatcagcaaaaaaaagggttatgaaccaccaagcttaacccaatggaaaaaacaaaataaaaataaaaaatacattgacttaacacctaatcttcgagctgaaataagagctgaattactaaaagaacaattctatctatgtggtcattgttgccagcagataccgaacattcaagattgccataatgaacatattgagccacagcaaatagcacatcaaagaacactcgattattctaatattattgttagttgtaatagtaaaaaacagtgtggtgattcacataaacattttcttctacccattactccttttgatgatagatgtgaaacagaattgcaattctctattagtggtagagttaaaggcttaacccaacaggctcaagatactattcgaatattaaatttaggtgataacgaaagaacaaataaggtattaatcgaaaaacgtaaaatagctatttctactattttattttcaaatgggataaattcaaatattggattagaggatgatgatttacttaatgatttaattattgaattgtcaaaacctaataatgtaggaaaattagaaagtttttcacctattgttattaatgtattaaaacagtggttatctgatcaataa

SEQ ID NO: 90142 - DNA, 1419 bp, Proteus mirabilis
ataaaaaactttcgttgttttgaacaacttgaagtgacatttcaccctcaaatgactgtacttatcgcgcctaatggtgcaggaaaaacaactatccttgatgctgtgcgtattgcaatgtggccttttgttaaaggttttgatttaggaagccaaacaggcaaagccgcaaccatacagattgatgatgtcaggttaaggcgttttgaccagaatatggagcctgcattacctgccgaaatagaagcattttctaattcagaaacgaatattttacctatctcttggttgcaatctagagataaaattactcctcgtacaacaaccaaaggtgatacctttaccactcaattgactaatattgctaaaaaatatcagagcataatttataagtcttcaaaatcaactaaaatagatagcgactctttttctcaatcggtagaaaacatcaacttacctttaatcgtatatttagggacaggacggctgtggtatcaagggcgatatagttcagaagctcaagatcaaaagctggataacagtgtttattctcgattctggggatatcaaaattgtttaactgcaacatcaaattataagcaatttcaatcttggtatagttgggtatatcgtagtcatcgtgagttacaaattacccaattagaagggcaattaaaaccacaagatgaagaagcgcagagaaatttttctgcagcaattaacgtagtacaaacttctattaataagttaacgcaaaagttaacgggatggcatgacttacaatatagggcaagtatgggacagcaacttgtaatggaacatcctgagcaaggctatattcccctttcattattaagtgatggcttgcgtaatatggtggcaatgatctctgatattgcatttcgctgtattaaattaaacccgcatcttggagagaaagccgctattgaaacatccggtattgtattgattgatgaagttgatatgttccttcaccctacttggcaacaaacggttttatcttctcttatggacgcatttcctaagcttcaatttattgttactactcatagcccacaagttatcagtaccgtacattctgatagtattcgggttattggtgagaattatgaaggtaagcttattgcatcaaaaccgttagctcatacatatggaaatccaagcaatcaagttttagaaagtgttatgctcgtagatcctcaaccaccaattaaagaaaaagagatgcttgaacaattaactgaattagttgatcaaggaaaaggaaatagtgaattagcccaatctttgctgacagagttaacgactcttttaggtgatactcacccacaattacagcgcttacataggagccttaatagacaacaatatttgtctcatttagaggggcgcaaatga

SEQ ID NO: 90143 - DNA, 597 bp, Proteus mirabilis
atcagtcgttggcaatcttttagttataaaaatacagtattacagtcattatgtaggcaacaatccttgctttgttgttatagtgaggttagaggtgatcaacttggtttaaattatcatatcgaacatattgagaataaaagtcaaaatccatctaaaacatttgatgaagctaaccttgcagcaagtgcctttagttctgaagaattatgtcatatacgtaaagaagaaatatttggtggtcatgcggtaaacaaacagcaacatgttgatatgacaaaatttatttcttgctatcaatacggttgtgaaagttattttgcctatttatctgacggtagaattgtgcctaaagacgaattaaatgtaactcaaagagaaagagcaaactatacaattaatttattaaatctaaatagccgttatttaattaatttacgtagacaacgttgggatgagctagaccaattagttcttgagcatataaataataattgggatttagaacagttatgtgatctagagttaaattttttagatagcaatcatggcttatatcccttcttttcattagctcgtcaattttttggtaagtaa

SEQ ID NO: 90144 - DNA, 1422 bp, Pseudoalteromonas translucida KMM 520
atgaaatgtgtagaaatgggatttcgatcacgtaatataggtaatactaaacttttcacaggaattgataatgataaacatgcttttactgtagtcgtaggtgataacggtagtggtaaaacagaattgttattggatatattcagaaagtactactcaaaatatgctgagctatacaaacccaaaacacaaactggtaaagataggctacgctgggctatcaataacaaaaatgaatacgaagctattacaggtttacttggggctaacttaccacgaaagctaatctgtgcatcgacgagtcaatttgaacgttttcaaaatgattttaaggctgatgaatatccgtggttatctaaggtttattcatatattggctctaagccatacatacaagatttgagcccgtcagtccgtatcgcatcaaatgcaataaagcagttactgatacaacaaacctttgatcttcgcaaagttaatgctttaaaagcattcctagatgaatttggatttaatagtgtattaaaaataaagttaactccaactataacagaacaagaccttctcataattgcctccggtgatataaaggatcaaaaaatatctttagatgctcaattaaaacttcaaactgcagcctaccactttgaaaaaagtgagctgttaaatctgctttcaaaaattgaaactatttatacttcacccgaagttttattaagccttagcaatcaatctttaaagttaataccgtccagttcaatttacgatattgaatttgataaaagagagttatctgatttattacgttcaggtttagttgttgtagcagatattgaaacgctcaaagatcaacctttaaaagcaagttacttatcaccaaatgccaaagtaagatctttatcagctcgaagctctggtgagcaatgtcttttcttactatttctaggaattgttgcttcaatcgaagataactcacttgtgttaattgatgagccagaaataagtttgcacccatcatggcaagaacgctttgtagatattttaaatcaatctctgaatacttactctggttgccattttattattgctacgcactcaccacttatagtttcaaatatatcgacaacaaactgtgaaattttaaatattcaaaaaaatattttattagatgcatcagagcattatttacgctcttcagattatcagcttgtaaatgtttttgaatcaccaggccacagcaatgaataccttctgaaaatttctatgcagatttattcaaaagtaaaaacatacaaatcttttgacgaactagatattaaacacctagaaatgctcaatcgtatgaaacaaaaaataagtaaagatgaccctatattggagctcattgactctttgaatgaggtacttaaaatttatggataa

SEQ ID NO: 90145 - DNA, 579 bp, Pseudoalteromonas translucida KMM 520
atggataatgagttacgagcaatagaatttaccaaggagcaaaaagccctaataaaagaagtggtagatactcctgaatttaatcatattgattggtctagtgatagcttagaaaacttaagatcaagcataagaaatgcggcaaactgccaagttgagcacatagctcctaagtctaagtataaaaattttatttttacgcccaagaatctttgtgttgtttgcgttgactgtaataatgccaaacgagatattgatgtagttaaacccttaccattaaaaaaagagagaactaaataccccccatcatctcaattcttaattattcatcctcattttgatacctacgatgaacacttaataaaatttggagagagattttatttctcactaacagaaaaaggaagctgtacttattctgtgtgtaaattaaataaaggattagcagatatgggatattttgattcagaagatattcttagcgacatggaactaatggctcagataatagacgcaaaattcaagaaagatactaaaaagctaattgtattaaaaaagttgctgattgactctatatga

SEQ ID NO: 90146 - DNA, 1266 bp, Enterococcus rotai
ttgaacatagaaaagattgaaattaaaaatttcaaaggtattgaacaattagatattaatttttcaaagagattcaatctcattattggaaacaatggttttggaaaaacatctattttggatgcaatcgcaactgtattaggaggatttgtaagtgggattgacggggtatatggtcgacatataaacaataacgaagttcgtatcgaaacgaaaacacttggcgatgcttcttacaatgtagaatataaagttcctgtagaactcactgcgactgctgattttagaggacatttgtatacttggacgagacgtaaaagtagttataaagcgtctcgttcaacaattgaacctagagatattgcatacctttctagagaattgattaaagatagtacgtccattatgccagtcatcagttatcaaggagcaggtagaatgtggactgaagggcgagaacacaagacgagtaaaaaaaatgatttatctcgttatggtgcttacgtagggagtctgtggccaaaatcaaataccaaaaaatttattaaatggtgtgcaaaaatggaacaaatatcttggagtgaagatcgcagaattatggaatatgaagtggtaaaagatgcggttatgacatttatgagtgaaatgaatgattcgagtgttactaaaattttttatagtaaaaaagaagaagaactagtctatgaagaaaatggaacaagaatttcaatcaatttattaagctctggatatcaggccttgatttggatggcatttgatattgcttatcgaatggccgtgttaaatcctgaactgcgagaaaatattacacaagaaacaaccgggattattttaattgatgaaatagatgtccacttgcacccaagatggcagtggaagataattaatgctttaatgaaaacttttccaaaagtacagtttattgcaacgacgcattctcctattgtacttgcttcaagtagtgaaacaaaagtaatcagaataaacgaaaatcatcaaatatcttatgagaaatcttcatatggtattccaatagaggatgttctaactgcttatcaacaaactgaaaaagtaccaaaagaagttaagaagaacatcgaacttttctcaagtcatttgagcaataaacatattacagaggctgaattagcattgagagagttggagctgttgttaggatcaaacaatcctatagtagtttctgctgagatggaattagaatttgaaaaaatagaattggattga

SEQ ID NO: 90147 - DNA, 651 bp, Enterococcus rotai
atgttgtatattgaaaaaggccgggaacctaatagcttggttggatataaaaaacaaaaagacgcttcatacagaaatttggattcttcagttaaaatagatatcaaaaattctttattaaaagaacaaggatatttatgtgcgtattgtatgtctagaataagtctggatggcacttctggggataagatgactattgaacattttcatccaatatccgattttcccaatttacaattggattataataatttattagctgtttgttctggaggtagcgatagagagaaagataaatctttaacctgtgataagcacaagtgtaacaactatttagtgcatattgatcctcaaaaaagaaataccgtagaaaaaattaagtataaaacggatggaattattttttcagatgatgaagatgttaagacagaactcaatactgttttaaatttgaactgttctgattctatgctagttagctctcgtaataatgtaaaagaagaattaataaaattctttactaaatcgtatccacgtaggtggacaaaaatggatattttaaaaattaaaaatcggttattaacacctgataaaaatgggaagttaacaccgtatattggaattgttctttataagctaaatagaaaataa

SEQ ID NO: 90148 - DNA, 1557 bp, Pandoraea norimbergensis
atgagaattgagtcactcaaaatattgagcccctggaaaaatcttgagggattcgaaatcgattttcatctagagaaggatgtaacggttcttctcggtcgcaatggtgcagccaagagcaatttgctcgaggcaataatcactattttcacgcgcatcgatctcgccgaggtggcggagttctcattcgacattcgctacgagatcaacggtcaaaaggttcaagtcacagctgatgctggacgacagccgttagcgaagttaaacaccgattccattccgttgactcagcttcgatcgaaatggagccccaaatatgtcgtcggatattattccggtgtaagcgatcgatttgaaaaactttttcagcgtcatgatcgtcgcgcattagatgaaacactagttgatactacccaaaaaaatagcgaaaaaccatctacgttagctcttcgtcagtttatctacgcgcgaccagtccacggactattctctctccttgcgttctatttctcggacgacgctcacgtcatggaatttatgcgaagtgtactgcgcatagatagctttgactcggccctcttggtggtcaagaagccggaatgggctagtccgaaggccaaagctgagaatttctgggatgcaaaaggccctgttcgagatctattggagagatttcgtcaatattctctggcaccgtttttcaatactttcagtcgccctgaagggtttcggaagagaagccggcagcatgaacttatgtatctctttctgcccgatgttgatgctctacacaagttagctagcgaatatggtggagatcaacgcgcgctttttcaagcactcgacacaatgagactaagcgacctggtagatgatttccgagtgcgtgtacgcatacaaggggctaccacagcgattcacactagacaattgagcgaaggggagcaacaacttttaactgtattggggttgatgcggtttactcgaaatgacgcgtcgttatatttgctcgacgagccggacactcatttgaatcccgcatggggaatggactatttggaggatctacggaatattggcggactccatagaaatagtcacacgctgattgccagccatcagccgctgttggtcgctggccttctaaaagacgaaatacgagttcttcgacggggagttgatggcagagttgacgtcgtgacgccaacggaaagcccacgtggcaccggggttgctggcgttctgaccagcccattgtacggactcgaaagccagttagaccgcttcagcctatcagtcttgaagcgaatatatgaggtgtcgcttgaaagtaaaagtgatcgcagagcccgctatcttaggcgactgcggcgcctagtgccctcactcgaaattgccgaatcgtcgcccgacccttttcgaaatattgcccgtcaagcgtatcaactctcacttgatcgggcgctgcatacaagtgatttggcaggaaacagagtggaactggttgaacgactcgccagtaatctcttcgagggcgcggctaaggaggaagaatga

SEQ ID NO: 90149 - DNA, 870 bp, Pandoraea norimbergensis
atgatattcattaaccctaagaaaatcgtccccccgcagcattggagaaacgatgccgcggagctctcggcagagttgttgaagcagaatcccaatgacaggatcgagttcattaattcaaagagggaccgcacatggggtcaccctgaattgctcgagactctcagagcggtggtgggaaataagtgttggtattcggaagtaccactagagggcgcggatcctaatgtcgaccatttccggcccaaaggcagcgttcgagaggttgacaacgaactccgaccgactaaaacgacttggtcaggctactggtggtgggcctttgagttgcggaattttcgattgagctctgaacatgcaaatcagcggcgtgtggacagcgaaaccaacggaggaaagtgggactattttccgattgtgggcgagcgagccgctgagcgactcgactatgacctcgtcgaagaggacatactggccctcgatccatgctcggccagcgatgtaagtttgctttggttcgacccagtgggagcgccatcatgctcaacttggaaaaggcgctcaacggacatcgatgagcggcgggtcaaagctactatttggctatatcaccttgacaaatatgagctgaaacgaaagcgtgctgagcacatcaccgacattcaaaccgatctgagaaatgcaaacacagcatataaattgtggaaaaaccacgatgggggcattcgtgccagaaacactttcgaccgtcacgttaacgatattaagaagaagcttgaagatcgggccgagtttgcatccgcaaagcggtgtgctgttcgggcggcaattgccgactatgagtggattgaggcagagcaaataatttaa

SEQ ID NO: 90150 - DNA, 1524 bp, Lacimicrobium alkaliphilum
atgacttttcgaatttccaacttttcagtcgaaggtgaaaaccttacaacaccgaacgtctatttatctaagaaatgtgtgaatcgtgacgataattattttactgtcatcataggaaacaacggtaccggcaagagtcgatatatatccagcctagtggaggctttccgagatgctggtgaaaatagaagaaggatgaaagttgattactgcctgagttacgtcataaataatgaacactttcggatagagaaaaagcatggcaaaaaagctcttgacagaaatacaaaaaaagaacttttcgcgggaaatggcttagacatcccttcgaagattattgctgttacaacaagtttatctgacaagttctcaagcgacaatttcaataggcgcgactacctaaaaaaaagagaatccattgactacaaacgggaatgctatacatatctagggccaagaagtacgcctggacgggcgtcaagtagagctctaatggatagggcaatgacgacactaattgctagtgttggagaacagattcacaacagaagttataggcacatttttgactatttgaaatatgagccaatcgttaagttatcatacgaaattagcaggccaagatactttcaagagcaggatgggatagtgtcaggagctgttttcaaaaggcatcttgaggagttgtctgatcgaaggggtggaatgagagcagatatgttccgaagagaattagagagtcgtcctgaccagtactgggaagatatagccaatgcttataactatattcttggtaaagctagccgtcctgaaaagagattacagttttcgtttgtagttaatttctcggcccaaaatgaaaaacgagaaaacaccgagatagttttgtttcatgaagagctttactcctttttggaagatttgcgaaagtttgatttagttcgaggtccatcgataaatttgtttaaaaaagacggtggcgaatttgacttttcagatgccagctccggtgaagcaagcattttgtcaactcttattgcgttgattcctaatctagataacgattcgctgattgttattgatgagccagaaattagcttacatccttcttggcagtataaatatgtagaactaattgatagattaattagccaaaaaactggctgtcatgtggttatagcaactcactctcatttcttgatttcagatttgccattggggcgatcacatattgttcatttcagagagggaaagaaatcagaaattgatgttgaatatatagaagaggaaaccaatggtttatctgcagaagatgtattgttaaatgtttttgacatgccttcaaccagaaattattacttgtccaagaatatctctgaagctttggagctcgtagcagaagggaaaataaacagtgacagatatcaagagttaataggtgcctttgaaaaatacctacctaatctaaaaaacgtagatcctctaaaagatgtcatcaaagcattgttgaaattgggtatatag

SEQ ID NO: 90151 - DNA, 633 bp, Lacimicrobium alkaliphilum
atgtattcacgaattagtgagccttatgagctttcaagtgatgagacaaagatagtagataggcattttcaatcgcatagtgattgggaaaagtccgcttttgataatatcaagaccaaaattattgattacctaagacctaagcaagacaatagatgttgttattgtaggacagagctagggtttgatattaaggcggttgatatagagcatgttatacctaagtgtcaatattctcaattcactttccacgctaagaatctggctctttcctgccccggttgcaacacatctaaaggcaaaaaaaatgttttagctaagcctatcaaacgatacccacgaagtggaactaatctgatcatcattcacccacactttgacgattacttttcctgcatagctatacatgacgatgtaatatatgaagggttgaatgacaagggttgcgaaactatcaagcaatgcaagatatatcgattgaaagaagtggtaaaaaagaaaaaagcgttgaatgctaatcaaaacccgatacaaaaactagttgaagatattagaaatgcagatgactcagataaagagcgactacttcatgcgttacaaaccctaacaattgcaagcaagggacgctcctga

SEQ ID NO: 90152 - DNA, 879 bp, Pseudomonas fluorescens ICMP 11288
atgaaatcggtgatcaagaagatgatgagagaaggaacgcatcgtctgcatcaaatcgaaaaaatactgctttattgcggttacgcttcgcacataactgtgaccatgagagccggtaagatcgatagcaggctggacgacttttctgacacctcctccattaaaaaactaaccgaaatgatagataattattttaatggagaggatgaaatatccttcaatgtaaacttcggtgaaacctctgatatttcaagtctgtcaaagctagagaatctgttgcatcaggaaaaaccactacgacattacggcatggtaaaggcaattgaaatatcgctttacaagaataatggagagcctgtccccctactaaatgcaagttctggcgaattgagcctgatgacttctctgattttcgtcctaggcgaaatttcgggaacaaacatgattcttattgatgagccagagaacagtttgcatcctaggtggcagcgagaatacacctccatgctatgcagtctaattgaataccatgaagtaaaagtcattatagcgacgcactccccattaatagttacaggcgcacagttagacgagcgagtatcgtcatcaatatatcatccggcaaccggaaatcttgaattttcttcctcaacaaacattgaagaattgttatgggggcagtttgagattatttcgccaaaaagtcgctttttaagcgaaaaactagccgagaagctcgaagagctatccgcacacaaagtttcccttaatcaatcaattgaatttatcgatagcgcaagcaaggcctctttcgatgacggccagcaagacatttttattgcagcaagacaacttgctgacagcatcgcgagagggtga

SEQ ID NO: 90153 - DNA, 918 bp, Pseudomonas fluorescens ICMP 11288
atgcttagtgacccgttaatgcccgcgctctccgactttgtaattacagcggaggagcaactggccattgatcatgctcttaggctgcatgattcatggaacattgaccaaaaagatatggctccggttcgccaggtgctgaagaacctaagagaacgaataaaagaataccatctattaaggcagggctacacgtgctgctattgtagaacaaacctcttcgggggtggagtttttatggtggatagagagcatattatccccaaaagccactgcaaaaaattaacttatgttatggcaaatctttcagtctcttgcaagagatgcaacatggaaattaaaaaagacaaaaccagcctatttgttgatcctggttcgattgagagcacatatctagataaaagcacatatcgcgtaattcatccaaattttgaggtgtacgaagactttataataagaagacaagagcagcatgggaaggcaaagctggtaaaattcatcattgagacgcctggtgataaaaccaattttatgttcaaatttttcaagctgaatgatcttgaagtcaatagtataaatgatgcccagggagttgcaccgctttcacctagtcagcaattgatgcttgatgcgttaaaagcgcagatacaaaatcagcctgcactagcacaggagatactaaaactagtgcttgaggagcaaggtagcaaagcgtccctcccgatgatcgcgaaagctatagacagcacggatccttttaatttttcagtgggctcgctcgctgatgttgagaataaatggcttgactcaaaatgggttccacttccttcaggaggcggcagggctttggctatcgggcacgatgtcgtattggcattaccctccccagattctagcgacaataatggtcaaccctaa

SEQ ID NO: 90154 - DNA, 1119 bp, Pseudomonas syringae ICMP 11293
atggacgttgagaacgataagtttgatcatttatttgctgatatcaagatcgggaaagttaatataattactggcaacaacggaactggaaaatcccgtttttttaaatcggctgctgaaaaagcaattgaaaatacagatttttacaaagaacattttcggcaagtgatttgtctgtcagggacgcatagcgacaaatttcctcgaaagatttggcagctgaataaaagtactagtggtgtttgctatctgggatacaaggtagggaacaatatgatttctgatatagcgccatttcgtgtaatagtgaacgcacttcttggagagaattcgatcgcgcaacaatcatctgatgctattgatttttgccttgctcgtctaaatattgatccggaaataaagcttcacttacgatacggtaaaaatcgcaaagagcggttgatagatgtcgctcccaatgagttatcaatcaatcttaggacactccaacgtgatgaggatacactagccatcgccgcagcgctaaaacagggagacctgtcccttcagacaatctcgattaagcgaggcaataatttctatgcccttgctgaattgagttccggcgagcgcgcttatatgatagcgcttctgggggctctttattgtgctaaaaatggggcgctggtattttttgatgagccggagaattctcttcatccagggtggcaaaagacaatattaagagattttagaagagcgctagatttaaacttcatcagtgccactatgctggttgctactcactctcctttaatcgctagcagtatttctaaccaagaagctttcacttgtgatttcccttctgggcaaacttggcatcagtctgacctgtatggaaaaacatcagataatgcgctaaaggatcagtttagcttgtattcatctcgatcaacagtcgttatcgagctcacgcaaagatgtttaagctatatcaccaagggcgatctcagctcccctgagctctaccaggcaatcgatactcttctgagtttcgagcttattgtagagtcgggcgatcccatgcgtgaagtaatgcacacattagaacacttgagggcgcatcatgagttgccctga

SEQ ID NO: 90155 - DNA, 615 bp, Pseudomonas syringae ICMP 11293
atgaagtgggacgataaatttttaagccccctcaaacttgaaattcggctcgctctgagggctaaccaagctcagtcatgctactactgccgacgcctgatcgtcctagaaaggcgtaatatgtcagaggcgatagagcattaccttgataaatctcaagatcattataggcgctggacttttcatcccttgaatctcgttattgcttgccagccttgtaatttcgtgaagtctacaacggatctaggagacgctagcgtcagggctgcaacgtaccttcagccaaacataggtcaatttcgatggttgcatccttatttcgatagctattcagacaatatcaagatatctcctgggccagtattttctgccattcctgattcaccacgcgaggcgcaggccgtagccatgataaaggatttaaagctagactccattgccaatatggatgatagggttcagtttcttgctgatgagctaaaaaagctcatggctcgttcctttaaggctgttcgcagaggaacaaagtatgggaggcgtgatcgatatcaagcttttttaaatgaattagaatcaaggattgaaaacggtatgctgcagttgcatggtatttga

SEQ ID NO: 90156 - DNA, 1548 bp, Pseudomonas syringae ICMP 11293
atgaggattgataagctttccatcttaagcccttggaaaaacctcaacggcctcagcgttgatttcgatgagcgtcgagatgttgtcgttatcattgggcgcaatggttcggcaaaaagtaacttgcttgaagctattattaccattttccgaaatattgatctcaaggaagtagctcccttctcctattcaattagctatcggattggtgggggggcagtagaggtacttgctgaggtgggttttcaaccaaaggctacggttgatggggcaaaggtttcattagaggcgttgcgcacgctctggactccaagatatgtggttggatattactcgggcgtaagtgaccgatttgaagagctgtttcgaaggcatgatcgtaaagcgctcgacgaaacactcggtgcgactagttttaatctagagcctgaagttttagaatttcgacgctttatctgtgccagacccgttcacggcttatttgcacttctttctttttatttttcaaatgattcagcggtgtttgattttctggaaagtcatccgcgaatcgaaaattttgactctgcgctgctcaccattaggaaaccagagtgggctaagccaaaaaccactgcagatgatttttggggcgcgaaaggtcctgttcgtgatttgcttgagcgcttccgcaagcattcgctcgcgccattctctcgtacaattaccgtccggccagattttagaaagcaagaaaaacgcgatgtcatgtatctatttctacctgatattgatgcattacaaggtttagcaagagagtatggagaagagccaagagcgttgtttcaggcactcgatacaatgaggttgagtgggttgatagaagattttcgtgttcgtgtaaaggtgcgtgggacttcggcaacaatccatacaagacaactcagtgagggtgaacagcaacttcttacggtccttggtttgatgagattcacaaaaaacgaaggttccctttatattctggatgagcctgatactcaccttaatccagcttggggtgtcgagtatctcgagcacttacgaaccatcggtggcattcacagtaatagtcatactgttttggctactcaccaaccgctacttgtggctggtctgcttaaggaagaaattcgcgtcctttcaagaggtgcaaatggacaaatcactgctcaaatgcctgatgaaagcccgcgtggtacgggggtagcaggcgtactaaccagcccgctctatgggttagagagtcagttagatgaattcagtttgcgcgtagtaaaacggatttatgatgtgtcgatgaacgtgtccggtaaatatcggagtaggcatttaagacgtctgagaagcttaattccagcagttgaaacggcggaaaattcgccggatccatacaagaacattgctagagaggcttataggttagcactagacaatgtcgtttcaagtaacgaaagcagtgatagcaaaattgtcgcagtggagcgtctcgcggcaatgctttatcgggatgtgttcaaggaggaaaaatga

SEQ ID NO: 90157 - DNA, 879 bp, Pseudomonas syringae ICMP 11293
atgatttttattgatccccaagctattcggcggcgtctcccagctggctgggataacgaaatttctctcctaaccaaaattctctcttcgaaatctattgaggaacggtcaacttacattggttcctgtcgagagaaaacttggtctcatccaaaaatgctggaggcccttaaggaaattgtcggaaataaatgctggtattctgaggtgccgctcgaaggcgcagacgcgaatgtcgatcattttaggcctaagggacgcgtcaaggaagttgatgaggattttaaacctacaggggtggagcttgacggatattggtggcttgcttttgattggcgtaacttccggctttcctctatgcactcgaaccagagaagggtagatacgtctacggaaggagggaaggcagatttttttcctgtcgtcggttctcgggctccagaaaatactgattatgtcgcgtgtgtagagaatattctcccgttggatccatgtagtttctcggatgtatcactactttggtttgacgcaaatggtgcgccgagctgttctaactggcaccggaaggctacgcctgaagatgttcggagagtgaagactacgatctggctttatcatttggacaaacaggaaattcaaaagcggcggcgagagcacatggagaaaattaggtctgatttagatcatgctaatgccgactatagactttggaaatcgattccgaataacgtggtttctaaagctagtttcgatagaactttagcctccatacgttctcagcttgcggaagatagtgagttttcatccgcgaagaggtgtgcagtgcgtctgtcgtcagccgactttgaatgggttctggaatataatttgtttgcttag

SEQ ID NO: 90158 - DNA, 1266 bp, Pseudomonas syringae pv. syringae PD2774
atgcgcctcgaccgcctccacctgcagaattttcgttgctacgaagatgctcatttcgacttccagcctgggttcaatctggtggtgggggttaatggcagtgggaagacgtcgttattgctgggggtggcgggatgcttcgggaatctacttggaagcattggcgtccatcaaccatcgatagccgagtccgatgttcggttcgagttagtaaagttcgaagacaggattcgttttgagcgcagctatcctcttgtgttgactgcccaaggtggcgcgtttgagcatcaggaatggcacgtatcgctagaacgcagcagtcttcagacaaattttagcgcgctgaacagtctcgtattttcggaaaatctgatcagcatcgacggcgctactcacggggatttgcctgtattcgccgtctatcaagccaatcgacgctggctgacgatgagtgtaaccgctgagcatgctgcacagagcaaaccatcaagactggatgcctacacctcttggttcgatgccgcttccaacttgaaaaacttcgagacctggttcatcggcaagacactggagcgctttcaaagactggccagaacgggtttccctggcattctcaccgacgaactcacctggatcaattcagctatccagtgcgcactgccggagtccaagggcatagagtacgacatggaaatgcgggggctgatggtggacattgatgaccgaaaaaccccgttcaacgacctgagcgacgggcaacgcggaatggtcgccctcttcgccgatattgcccgccgtatctgcctgctaaatccgcacatggggaaggatgttctaagcaagacaaacggcatcatcgtgatcgatgaactggacatccaccttcaccccggctggcaacgcaccattgcacccgcgctgaaaaaagcatttcccagcattcagttcatcgctgccagccactcgccacaggtcatcggcagcctgcaaccgggcgaggtcatcctgctgaataaccatgacggctctcacccaagagcaacctacggcctggactccagcagcattctggaagaagtcatgggcgtgcctcagcgtgagcctgaaattgaagagttgctcgatcagctattcagcactctggaaaacaatgagcttgaaaaagccaggtcgcagcttgatgcactgaagaagaaggcgcccgatctaccagagttcgcgggtgccgaggcgctactcaaacgcaaggagatcattggacgatga

SEQ ID NO: 90159 - DNA, 648 bp, Pseudomonas syringae pv. syringae PD2774; identical to SEQ ID NO: 86095

SEQ ID NO: 90160 - DNA, 1359 bp, Pseudomonas sp. ICMP 3272
atggaaatcaaaagcttcaggctcgttaatgtggggcgtttcagcgatcttgaagtcgctctggcgcctaccgaaagacatgcgtcgaaggtgaccgtgctggttggcaataatggagcggggaagactacgctgctcaagtctgtcgctacatcgttgagctggctggtagcgagagtcaggacgccgaaaggtgctggcagtcgtatcgatgagggtatggttcagaacggtgccgctacatcctcgattaccattcggatagaggatgtgttgatttcggatgacgagatcaatccacttgaaactgaatggggaataaccgctactcggaaaggccgaaacgccacctcatccacagtattaagcgagctcaacagacttgctgatggctatcgctcaaagttgactgaaaaaagtgatacgtctcttcctcttctggctttctaccccgtcgagcgctctgtcattgagataccgctcaaagtccacgccagacatacctttgatcaactcgacggctacgacaacgccttggggcgtggcgtggattttcgccgctttttcgagtggtttcgggagcgcgaagacagcgagaatgaaacgggtatctcgacagagttgctgaatgagctgtctcaaaagatcttgattgatacagaactctggaaagtgctgaccagggagcatgcctcttcacgtgaccgccagctgactgcggtcagaactgcggttgaggcgttcatgccaggcttcacaaaactgcgcgtcaagcgtaagccgcgcttgcacatggctattgataaagacggtaagacgctaaacgtatcccagctgtcccagggcgaaaaatcgatgatggcgctcgtcggcgacatcgccagacgcctagccatgatgaacccggcgctggaaaacccgttacacggcaatggcatcgtcctgatcgacgaagttgatttgcacctgcaccccaaatggcaacgcagtctcatcgcccaactcactacaacgttccccaattgccagttcctcttgaccacgcattcgccgttggtcatcagcgacagcaaggatgtgctggtgtacgtcatggacgatggcgagttacgtgagcaggacagtctttatggtcttgatgccaatcaggtgctgtcgagtgtcatggacactgatattcgaaatgaggagattcaaacagctctggataaactgcagcactttttgatgagaggagagctcgatgaagctcgtactctctacacagggttggctgacgagttacctgcaaatcacatcgaactggcgaaagcttcgctgctgattcgcaagctggaagtgcgccgtgagaaagattga

SEQ ID NO: 90161 - DNA, 651 bp, Pseudomonas sp. ICMP 3272
gtgagaaagattgaaaagggaagtctcgcggtgctggaaaaatggaagcgcgcgaacaagggaaagaaatacgccgacctggtggggcatgaagatatcaaggatgccattcgctacgcctgtgtcactgaacagcatggtttgtgcgcctattgctgctgcaggatcactgccgagaaaggcagtgcctgcaatgaacatgttgaagcgcagcatctagcaccgcgtcgcactctggatttcggcaatattgtcgcgagctgcactaacgccaagcggtgtgacaaggctcatggccgtcagtttttgccgcttacgccgctgatgatcgaatgtgaaaaagagctgcagtttgagctttcgggtctggtggcaggcaccacgcctcgggcgtgcgcaagtatcaacgtgctcaatttaggcgatacccatgagtcgaaccggggtcttgtgggagagcgcaagcagatgattgatgcactgctgttttcttgcagcattgaccctgctgagctgtttattgaggaagatgatgttctcaatctgttaaaaaatgacctgcttgaggtagatgcccagcagtttcttcagcccttttctccggttttggtgaatgtaattatcggcatccaacgcgctcgtcagcgttga

SEQ ID NO: 90162 - DNA, 1266 bp, Pseudomonas sp. ICMP 3272
atgcgcctcgaccatctccacctgcagaattttcgttgctacgaagatgctcattttgatttccagccggggttcaatctggtggtgggggttaatggcagtgggaagacgtcgctgttgctgggggtggcgggatgcttcgggaatttacttggaagcattggcgtccatcagccatcgatagctgagtccgatgttcggttcgcgttagtaaagttcgaagacaggattcgtttcgaacgcagctatcctcttgtactgactgcccaaggtggcgcgtttgagcgtcaggaatggcacgtatcgctagaacgcagcagtcttcagacaaatttcagcgcgctgaacagtctcgcgttttcggaaaatctaattagcatcgatgtaagtacccacggggatttgcctgtattcgccgtctatcaagccaatcgacgctggctgacgatgagtgtaaccgctgagcttgctgcacagagcaaaccatcaagactggatgcttacacctcttggttcgatgccgcctccaatttgaaaaactttgagacctggttcatcggcaaaacactggagcgctttcaaaggctatcccgagcaggttcttccagcgttttcaacgacgaactgacctggataaactcagccatccaatgcgcactacccgacgccaagggaatagagtacgacatggagctacgtgcgttggtagtcgatatggatgaccgaaaaatcccgttcaacgacctgagcgacggacaacgcggaatggtcgcactcttcgccgatatcgctcgccgtatatgcctgctcaacccgcacatggggaaggatgtgctaagcaagacaaacggcatcatcgtgatcgacgaactagacatccatctgcaccccggctggcaacgcactattgctccagcgctgaaaaaagcatttcccagcgtacagttcatcgccgccagccactccccacaggtcatcggcagcctgcaaccgggcgaggtcatcctgctgaataaccatgacggctctcacccaagagcaacctacggcctggactccagcagtattctggaagaagtcatgggggtaccgcagcgcgagcctgaaattgaagcactgctcgacgagctattcagcacactggaaaacaacgaacttgaaaaagccagactgcagcttgatgcgttaaaacagaaagcgcccgatctgcccgagttcgcaggtgccgaagcgttgctcaaacgcaaggagctcattggccgatga

SEQ ID NO: 90163 - DNA, 642 bp, Pseudomonas sp. ICMP 3272
atgagacgcgttatcaagggaactgagcctgcgtcactcaccgaatggaaagccagcgcaaacgaagactggacgcccacctatccaagcctgcagaacccgcaaaaacgcgacttgcataattgcttgctgcaagagcagaacttctcatgctgctattgcggcagggaaatagagcttgatagcagccacatcgaacatttcagaccgcaggatcattatctgccattggcactggaatacagcaatcttcatgcgtcttgcctgcgcgagaccacaccaggaaacccgttgcactgcggccactataaaggcaactggttcgatgaggagctgcacatttccccgacagaggacgattgcgaacagcgcttccgttatctgctcacagggaaaatccaaagcacgtcccacacagatcttcccgccacgacgatgatcgaaaagctggcactcgatatcgcgtatctgactaaaagacgtcaggaggccataacgggtgtgttcgatgaacaattcttatccagcgccagcgatgctgagcttaggcaccttctggaaagcctgcgatcgcaagctgccaacaatccgatcagctttggtcatgtgattgcacgttatgcggaacaattactggcgtag

SEQ ID NO: 90164 - DNA, 1287 bp, Pseudomonas fluorescens
atgctaaagctcctgtctctcaaaggtgtcggccctgctgaaaagtttgggccggttgagtttgcgcctcgtctcaacttcatcacgggtgacaatggcctcggcaaaagctttttgctggatgctgcctggtgggctttgacgcgcacttgggcgcgtggagcagaggcgattcctagagaatcctcccattcagctagtattggttttgcgttcagcaaggtgacggctggagacaaggaaggtgaagttcatttcaaagacggtttttggcgtcagcctaaggcccgcccctctatcccgggaattgttatttatgctggggtggatggcagtttttctgcttgggatcctgcgcgtaactattggacggatcagcaggcgggaactgaagagaaaatccgagcatttaacttttctcccgatgaggtatggaaaggcgcggtatccgaaaagggaacaaatatatgcaatggtttaattcatgattgggttcggtggcagcgaacggcgggagacccttctttcaaagagttaacagtcgcattggatgcattgtcgccatcgggcattgagaagttgtcgcctggcgagccctgccatataggccctctggacgagaccgaatatccaacattgcgcatgtcttatggccttgatgtcccactggttcatgcctctgcgggaatgcgccgcattgctgcgctggcctacatgattgtctggacctggaacggccataagcgcgcctgcaagcagcgaaaagttaaccctgcaaaagaaattattttcctgatcgacgaagtcgaatgccatctgcatcctcaatggcagcgtcggatcgtgcctgctcttttgaaagtggtagaggagatgacacaagaaaaagttgcagtgcaactgatcgtggcgactcattccccgctggtactggcctcggccgagcctgaatttattgaagagaaagatgcagttttcaacattcaccttgaggatggagaagccaaggtcactaaggaggtgtggtccaagcaaggcgatgtcgtgaactggctagtctcggatgtttttggtttgcaacaggctcgttcagttgccgcagaagacgcaatcgaagccgctgaggcgtggatgcgtggtgataaggaacaactgcctgaaaaattgaatacgaagtcagctattcatcaagagttggttcgggttttaccaggtcttgatgatttttggccacggtgggtcgtttctcagggcaaacctgaaaaagcagcgaaaggaaaaaaataa

SEQ ID NO: 90165 - DNA, 603 bp, Pseudomonas fluorescens
atgacgcctgtgtcgaaccctatccctgagccagataagtttgatgaaaagtgtcgaaaaccaggtgatgtttggcttaaggaaaacccggatgccgagagacccagagacttgtggtcacccttcaggcatgcgctggcggatgggtttgatgaccggtgtggttatgccgcgatgtatatccccagtggtactgtcgatcatggtgtcagttacaacgaggatcgcttgcttgcttacgagtggtcgaactatcgatacattgacggatggattaacagctctaaaagcaagcaagtggctgctggattgctggacccatttgaagtgcaggaaggatggttcgaaatcagtctgccatctcttcagttggtgttaacggatgctgttccagccgagttccgagagcgcgcggaaaatacgctcaagaaactccccatcagggatgatgaacggattatgaggcctcgacgcaaatggctgagcctttatgagaagagtggcgatttagaaatgctgcgtgagatggcgcctctcattgcagccgctgtagaaaagaaagaggcccttgaggccgcaaatttgccagttgaggagcgctag

SEQ ID NO: 90166 - DNA, 792 bp, Pseudomonas fluorescens
atggccgtcgatggtgagcatgatgtaattgcgaaatctgcagatcacacacgttgtctgatcgttacgcagcacggcggcgttgaaacaaccacacccctgagccatgcttcgtccggctatcgctctgtgctggcaatggtctgcgacatcatgcgcaggctgatggatcgcagcactaatccccaataccagagcctggaaaacgctcgcgccattgtactgatcgacgaggtggaggcgcacctgcatccgcgctggaaaatccagattatgagtgccttgcgcaaggccttacctaaggtcaccttcattgccacaagccatgatccgctgtgtgtgcgaggcatgcacaacggtgaagttgtcgtgatgcatcgcacggctagcgcgatgaacaaggacggcggcaagcaactcgcacaggtcgagcaattgctggatcttcccgacatcacccagctgactattgaacagcttctgacttcggactttttcagtctggcctctaccgatcagccactgatgaatctgaaactcgcccaactggcagacctgttaagcgcgagcaataataacggtcagttggatcctgaagaaaggcaagtagttgatctcttcaagcaggagatcagtgacgtactaccagtggggtctaccgagggccagcgattggttcaagaggcggttgctgagtttctccagaagcgaatcgcggcgtcgaggaaggacctgcaggaatttgaagctgccgcgaaacgtaagatcctcgctgtgctggagggcttctga

SEQ ID NO: 90167 - DNA, 1095 bp, Pseudomonas fluorescens
atgcgctatgtggatcgttccaagtttgaaactccgcaggtaatgaaggccgtcccaggcctgcgtgcacccgccgacgacgagttggtgaaggtggcggcctacatcaagaaaaaggcaaagctccgggccaaggcagagtcgaaaagagcccaagcgaaggcggatggcaaacgcgctcccaatgtaacagtcacgctggaatcgcctttcaaactatacaagcacgatagcgtcagggcccggctcatcgaaatgttccaccgcaaatgcgcctactgcgaaagcttttactacgcgacctccgcaatggaggtcgagcactaccgacccaaggaggccgtgttcggcgatgcagtgcaccagggttattggtggctgggcgtgagctgggataacctcctgccgagttgtatctactgtaatcagcgcagaacccagatcctccccaaaggtgctatcgggcatgtaggattattggaggatgcagggcgctttacacatgagcgctcggtaacaacgggtaaaggcactcattttcccgtgctgggaccaagggtcacggactctactggcgactattcgaaggagttgccactgttgttgaacccctgcaaggacaatccacaagaccatcttgggtattgcctcgaatccgttaataccattgcactgatgctggcacgaccgggcgtaggggttatcccgcctaacatgggactggacccgaaaactctggaggatttcaaagacgaactggcccgaaccctcaagttcaacctcgacttgagaggctcggtgtcaatactgatctatggcctgaaccgcttgggactggttcaggagaggacccgcgtgctgcgtcagttgatgttccttgagctccaggttgtagagctaaccgagtacatcaacaagttggaactccgtccaccgggttcgaaatacgcggcggaggacaaagtgatagctcaaggcttggaacaactgcgcgaccgcacggtgcaacaaatgaagtccatggctaaaccccaggcgccatattccatgatggtccgggcctacctcgaagacttcgccgcccgcctggcgtaa

SEQ ID NO: 90168 - DNA, 1350 bp, Pseudomonas syringae ICMP 13102; identical to SEQ ID NO: 85922

SEQ ID NO: 90169 - DNA, 651 bp, Pseudomonas syringae ICMP 13102; identical to SEQ ID NO: 86097

SEQ ID NO: 90170 - DNA, 1266 bp, Pseudomonas syringae ICMP 13102; identical to SEQ ID NO: 89788

SEQ ID NO: 90171 - DNA, 648 bp, Pseudomonas syringae ICMP 13102
atgagacgcatcatcaaaggaactgagcctgcgtcattcaccgaatggaaagccagtgcaaacgaagactggacgcccacttatccaaccttgcagaacccgcaaaaacgcgacctgcatgatcgcctgctgcaagagcagaacttctcatgctgctattgcggcagggaaatagaacttgatagcagtcacatcgaacatttcagaccgcaggatcattatctgccattggcactggagttcagcaatcttcatgcgtcctgcctgcgcgagaccacaccaggaagcccgttgcactgcggccactacaagggcaactggttcgatgaagacctgcacatctctccgacagaggacgattgcgaacagcgcttccgttacttgctgacagggaaaatccagagcacatcccacaccgaccttcccgccacgacgatgatcgaaaagctcgcactcgatatcgcgtatctgaccgaaagacgtcaggaggccatcacgggtgtgttcgatgaacagttcatatccagcgccagcgatgcggaactcgctaaccttgtagacagcctgcgctcgggcaccgctaatacctctattgctttcggccatgtcgttgcgcgctatgcggagcaattgctgacgcagcggtag

SEQ ID NO: 90172 - DNA, 705 bp, Pseudomonas syringae ICMP 13102
atggagcaacttgaacgaacaacattcgactaccgacatttcgaactcagctttgacttcaacaatcggcaccttcttgactttgcgacacttcagtccctggcttttttaagaaaactcgggcttttgaaaatcgtcaattgtttcgtcggatcagaacaacatccgggctcggatattgcctactcaagttctggtcagcagcaaatactttgctcactactcagtttagtctcctcgctatccgatggcgcggtggtattaattgacgaacccgaactgagtcttcatcccacttggcagcaactctatttcgacatcctactggcttcgatcgccccgttcaaaaactgccacgtaatcatagcaacgcattcgccactcattgtacaacgtgctcagaacgctggtgcaggcgtgatacgcatggggacgaacgtccgggaggtagatttaaaagatgcaagagcttctgtcgaggatgcgttgctagacattttcgaaactccaatcactgatagtgtagagatggccagtaaaatatttgatgctgtaaccgaagcggaaggcggctctaaagcggagcgagcgttggccttagaaaagctcaaaaggcttcagcacatttattcggacgggcctacgcgaagcgataaagacctggccatgatcaatgatgcttacagaatgctttctgaagattaa

SEQ ID NO: 90173 - DNA, 777 bp, Pseudomonas syringae ICMP 13102
atgaatagagctaagccacctattttcaaaactccaaaatcgttcacagatgatgaacatcaactgctcaagacgaaaggagcagctgacaagaacttttgggaaacgaaagtacctgccgataaagctgtgattactaggttcaagaacgagataaaagaccactactggcacggtcaacttaggcgttgctgctactgcagttcggagctccaaagccacaaggcgacttatgatgccgaacacattatagataaatctggatatcctcaattcatgtttgaatatacaaatctggctgttgcgtgcaaggtatgcaatcgagggaagtgggatgctgagatcactgtgggcccgccgaccacacccgggccgccatcactatcaaatgactatacaattgtgcacccgcacttggatgagtggcatgatcacttagagttcgatcgatggaaccgaattcaagccaaagcaaaaagtccaaaaggaacacacaccattgatgtctgcaaaattcacaatttgaacgctgctcgcttggccgatcgtttcgccacagaccgtaaagaagcagagaattaccttcgtcaaatttacgcagagaaaagcatcactaaaaaggagaccgcacttgccttgctgcgtaggctcgctgaccaatacaacctgcctcaagccaaggcggttgtaggcgctgtggaagaggaagttctgaggattcggcgggaaagagaacagtccgaacttgagctgcacctactaagtcaacctgagtag

SEQ ID NO: 90174 - DNA, 1266 bp, Pseudomonas syringae pv. syringae PD2766
atgcgcctcgaccatctccacctgcagaattttcgttgttacgaagatgctcatttcgacttccagccgggattcaatctggtggtgggggttaatgggagcgggaagacgtcgttgttgctgggggtggcgggatgcttcgggaatttacttgggagcataggcatccatcaaccatcgatagctgagtccgatgttcggttcgcgttagttaagttcgaagacaggattcgttttgagcgcagctatcctcttgtattgactgcccaaggtggtgcgtttgagcgtcaggaatggcaagtatcgctagaacgcaacagtcttcagacaaatttcagcgcactgaacagtctcgtattctcggaaaatctgatcagcatcgatggcactactcatggggatttgcctgtattcgcagtctatcaagccagtcgacgctggctgacgatgaatgtaaccgctgagcttgctgcacagagcaaaccatcaagactggatgcgtacacctcttggttcgatgccgcttccaacttgaaaaactttgagacctggttcattggcaaaacgctggagcgttttcaaaggctatcccgagcaggttcttccagcgttttcaacgacgaactgacctggataaactcagccatccaatgtgcacttcccgacgccaagggaatagagtacgacatggagttacgtgcgttggtagtcgatatgaataaccaacaaatcccattcaacgacctgagcgacgggcaacgcggaatggtcgcgctctttgccgatatcgctcgtcgtatctgcctgctcaatcctcatatgggaaaagacgtactgacgcagacaaacggcatcatcgtgatcgatgaactggacatccatcttcaccccggctggcagcgcaccattgcgccagcgctgaaaaaagcattcccaaaggtccagttcattgcggccagccattcgcctcagatcattggcagcctgcaacccggcgaagtcatcctgctgaataaccatggcagctctcacccaagagcaacttacggcctggactccagcagcatcttggaagaggtcatgggcgtggcacagcgcgagcccgaaattgaagagttgctcgacgagctattcagcacactggaaaacaacgagcttgaaaaggccagactgcaattagacgctttgaagaagaaagcgcccgatctgcccgagttcgcaggcgccgaagcactgctcaagcgcaaggagctcattggccgatga

SEQ ID NO: 90175 - DNA, 642 bp, Pseudomonas syringae pv. syringae PD2766
atgagacgcgtaatcaagggaactgagcctgcgtcattcaccgaatggaaagccagcgcaaacgaagactggacgcctacctacgcaaccttgcagaacccgcaaaaacgcgagctgcataacagcctgctgcaagagcagaacttctcatgttgctattgcggcagggaaatagaactggataacagccatatcgaacatttcaggccacaagagcactatctgcccttggcactggaatacaacaatcttcatgcgtcctgtctgcgagaaacagagccaggcaaccctttgcattgcggccactacaagagcaactggttcgatgagcacctgtacatctccccgacagaggacgattgcgaacagcgctttcgctatctgctgacagggaaaattcaaagcactcacctcacagatcttccggccgctacgatgatcgaaaagctcgcgctcgacatcgcgtatctgaccaaaagacgtcaggaggctatcgcaggcgtctttgatgaacagttcataagcagcgtcagtactgccgagctaacgtacctcatagaaagactgcgctcgggagcagcccatccaatcgcctttggccacgtcgttgcacgctatgcggagcaattgctggcgtcgtaa

SEQ ID NO: 90176 - DNA, 1356 bp, Pseudomonas viridiflava ICMP 13104
atggaaatcaaaagcttcaggctcatcaatgtgggacggttcagcgatctggaagtcgcactcgcgcctaccgaacggcacgcgtcgagagtgacagtgctggtcgggaacaatggggcggggaagaccacactgctcaaatctgtcgctacatcattgagctggctggtggcgagggtccggacgccgaaaggtggtggcggtcggattgatgaggatacgattcataacggtacggtaacttcttcaatttgtattgacgtttacgatgatcagattttcgattctctggtgtgtgggcctgattttcactgggagatcgctggaaccctcaaggggcgtaaagcgacctcgtctactgtgctgggcgagctgagtatgctggcagagggataccgctcagcgttgacggctaagagcgattcatctcttcctcttctggccttttatccagttgagcgctctgtgattgagataccgctcaaggtccacgccaaacacacattcgatcagttggatggctacgataacgcgttgggtcgtggagtggattttcgccgtttttttgagtggttccgagagcgcgaagacagcgagaacgaaacaggtatcccgactgagctactcactaaactgtctcagaagttacttgatacagaactctggaaagtactggtcagggagcatgcttcgtcgcgtgaccgtcagctaaccgctgtcagaaatgcggttgaagcgttcatgccaggcttcacaaaactgcgcgtcaaacgcaaaccgcgcctgcacatggccatcgataaagacggccagacgttgaacgtgtcgcagctgtcccaaggcgagaagtccatgatggcgctcgtcggcgatatcgccagacgcctcgccatgatgaaccctgccctcgaaaatcctctgcatggcaatggcatcgtattgatcgatgaggtcgatttgcacctgcatcccaaatggcagcgcagcctgatcgcccaactcactacaaccttcccgaactgccagtttctgctgaccacgcattcgccactggtcatcagcgatagcaaggatgttctggtgtacgtcatggacgatggcgagctaagcgaacctgacagtctttacgggcttgatgccaatcaggtgctgttgagtgtcatggacacggacatccgtaatgtcgatgtccagaaacgtctggacaggctccaggagctgctgatgcttggtgatctggaggaggttcgctccctttaccaaaagctagccaatgacctgccttctggacacatagagttggccaaggcgtctctgttgatccgcaagctggaattacgtcgtgcgaaagattga

SEQ ID NO: 90177 - DNA, 651 bp, Pseudomonas viridiflava ICMP 13104
gtgcgaaagattgagaagggaagtctcgcagttctggagcagtgggcgcgcgccaacaagggaaagaaatacgcggatctggctaaccgggaagatatcaagaatgccattcgacatgcctgtgtcctagagcagcatgggttatgtgcctattgctgccgcagcatcacctctttgaaagacagtgctcacaatgaacacgtcgaagcgcaacgcctggcacccaatcgcacgctcgattttcagaatattgttgccagctgcaataaacccggtcgatgtggggacgcgcatggtcaccagattctacgcttgacgcctcttatgattgagtgtgaaacggagttgcagtttgagttgtccgggttggtgaaaggtcagaccgaccgagcgcgagactgtataaaagtgcttaacctgggtggtgatcaagcgtccaaccggggccttattgacgagcgtaaggcgatgatcaacgaactgctgttctcacagagcatggattcgtcagggctgggcctggaaagcgacgaggtccttgatttgttgcatgacgagctatcggaccctgatgaacaacagcagcttcaggccttttcccccgttctggtaaacgtgattcgtcgtctcaaggctttgcggacctcctga

SEQ ID NO: 90178 - DNA, 1359 bp, Pseudomonas syringae ICMP 19498; identical to SEQ ID NO: 90160

SEQ ID NO: 90179 - DNA, 651 bp, Pseudomonas syringae ICMP 19498; identical to SEQ ID NO: 90161

SEQ ID NO: 90180 - DNA, 1266 bp, Pseudomonas syringae ICMP 19498; identical to SEQ ID NO: 90162

SEQ ID NO: 90181 - DNA, 642 bp, Pseudomonas syringae ICMP 19498; identical to SEQ ID NO: 90163

SEQ ID NO: 90182 - DNA, 1266 bp, Pseudomonas syringae ICMP 19499
atgcgcctcgaccatctccacctgcagaattttcgttgctacgaagatgctcattttgatttccagccggggttcaatctggtggtgggggttaatggcagtgggaagacgtcgctgttgctgggggtggcgggatgcttcgggaatttacttggaagcattggcgtccatcagccatcgatagctgagtccgatgttcggttcgcgttagtaaagttcgaagacaggattcgtttcgaacgcagctatcctcttgtactgactgcccaaggtggcgcgtttgagcgtcaggaatggcacgtatcgctagaacgcagcagtcttcagacaaatttcagcgcgctgaacagtctcgcgttttcggaaaatctaattagcatcgatgtaagtacccacggggatttgcctgtattcgccgtctatcaagccaatcgacgctggctgacgatgagtgtaaccgctgagcttgctgcacagagcaaaccatcaagactggatgcttacacctcttggttcgatgccgcctccaatttgaaaaactttgagacctggttcatcggcaaaacactggagcgctttcaaaggctatcccgagcaggttcttccagcgttttcaacgacgaactgacctggataaactcagccatccaatgcgcactacccgacgccaagggaatagagtacgacatggagctacgtgcgttggtagtcgatatggatgaccgaaaaatcccgttcaacgacctgagcgacggacaacgcggaatggtcgcactcttcgccgatatcgctcgccgtatatgcctgctcaacccgcacatggggaaggatgtgctaagcaagacaaacggcatcatcgtgatcgacgaactagacatccatctgcaccccggctggcaacgcactattgctccagcgctgaaaaaagcatttcccagcgtacagttcatcgccgccagccactcgccacaggtcatcggcagcctgcaaccgggcgaggtcatcctgctgaataaccatgacggctctcacccaagagcaacctacggcctggactccagcagtattctggaagaagtcatgggtgtaccgcagcgcgagcctgaaattgaagcactgctcgacgagctattcagcacattggaaaacaacgaacttgaaaaagccaggctgcagcttgatgcgttaaaacagaaagcgcccgatctgcccgagttcgcaggtgccgaagcgttgctcaaacgcaaggagctcattggacgatga

SEQ ID NO: 90183 - DNA, 645 bp, Pseudomonas syringae ICMP 19499
atgagacgcgttatcaagggaactgagcctgcgtcactcaccgaatggaaagccagcgcaaacgaagactggacgcccacctatccaaccttgcagaacccgcaaaggcgcgatctgcataacagtctgctacaggagcagaacttcttatgctgctattgcggcgcagagacagatcttgataacagccacatcgaacatttccgaccgcaggagcgttatcagccgctggcacttgaatacagcaacctccatgcgtcctgcctgcgtggaacaaataaaggcactctgttgcactgcggccatcgtaagaggagctggttcgatgagcagttgcatatatctccactggaagacgattgcgaacagcgctttcgctatctgccgaatggaaaaatccagagtaaccatccagcagacgctcctgccgcaacgatgattgagaaactcgcactcgatattgcctatctgacaaaaagacgccaagaggcaatcacgcgtgtgtttgatgagcaaatcttagccagcatcagtgatacagagctgacacttttggtgcaaggcctgcgctctggggatgccaacaaacagctcgcctttggccacgttgttgcccgctatgcggagcaattgctggcatcttga

SEQ ID NO: 90184 - DNA, 1350 bp, Pseudomonas syringae ICMP 19499
atggaaatcaaaagcttcaggctcgttaatgtggggcgtttcagcgatcttgaagtcgctctggcgcctaccgaaagacatgcgtcgaaggtgaccgtgctggtcggcaataatggggcggggaagactacgctgctggaatccctgagcacgctgctcacttggttgatcgcaaggattcgatctgagaggggaacaggaaaaaagattgctttagaaagaataaagaatgacgctgacttttcagaggtcagcttattgctttccgagtctttcccgtttgcagagcgcgcgtcgtttgggtggaaactttcctcagtccgtcctgggcgcaaagtggaatcgagaacgaccttgattcatttggcacttctagctgacggttaccgaacactgctcacagacagtagcgcgacgtctttaccgttgatcgcgtactatcctgccgagcgttcagtcgttgatatcccgcttgatgcgccttttcgtcccccgtacagacaactcgacgggtatgaagacgcgcttagtcgaggcgtggattttcgacagttcttcgaatggtttcgagatagagaggatcgagagaacgagaatggcgtatcaaccgacacgttgatgcgtgctcagcaaaaacatggaccatacagcatagaatatgaggttctgctcagactgaacgagtcatctcgcgatcgagaactgacagctgttcgatcatccatatctgctttcatgcctacttttgcgaatttacgagttcgccgtcagcctcaggctcacatgacggtagataaacatggtgagacgctaaacgtatcccagctgtcccaaggcgaaaaatcgatgatggcgctcgtcggcgacatcgccagacgcctagccatgatgaacccggcgctggaaaacccgttacacggcaatggcatcgtcctgatcgacgaagttgatctgcacttgcatcccaaatggcaacgcagtctcatcgcccaactcactacaacgttccccaattgccagttcctcttgaccacgcattcgccgttggtcatcagcgacagcaaggatgtgctggtgtacgtcatggacgatggcgagttacgtgagcaggacagtctttatggccttgatgccaatcaggtgctgtcgagtgtcatggacactgatattcgaaatgaggagattcaaacagttctggataaactgcagcactttttgatgagaggagagctcgatgaagctcgtactctctacacagagttggctgacgaattacctgcaaatcacatcgaactggcgaaagcttcgctactgattcgcaagctggaagtgcgccgtgagaaagattga

SEQ ID NO: 90185 - DNA, 651 bp, Pseudomonas syringae ICMP 19499
gtgagaaagattgaaaagggaagtctcgcggtgctggaaaaatggaagcgcgcgaacaagggaaagaaatacgccgacctggtggggcatgaagatatcaaggatgccattcgttacgcctgtgtcactgaacagcatggtttgtgcgcctattgctgttgcaggatcaccacagagaaacgcagtgcctgcaatgaacatgttgaagcgcagcatctagcaccgcatcgcactctggatttcggcaacattgtcgcgagctgcaccaaagcggggcggtgtgacgacgctcatggccatcagactctgccgcttacaccgctgatgatcgaatgtgaaaaagagctgcagtttgagctttcgggtctggtggcaggcaccacgcctcgggcgtgcgcaagtatcaaggtgctcaatttaggcgatacccgagagtcaaatcgtgatcttgtagtgaagcgtaaagagatgattgatgcgctgttgttttcttacagaatcgacccttctgaactggctgcggaagccgatgatgttctcgatctgctaagaaacgatctgctggaggtagatgctcagcagtttcttcagcccttttctccggttttggtgaatgtaattatcggtatccaacgcgctcgtcagcgttga

SEQ ID NO: 90186 - DNA, 1227 bp, Pseudomonas sp. ICMP 19500
atgaagcaaataaagaatatcagtgggaatattaagaactccaataaagatataaacattgagctaaatgggaaaaacctgattattgcaggcggcaatggatctggaaaaacctctttagtaaaagacatttacaaaacattgaccgagcacataatcaatagaaaacttcataacatccccaacatcgaaagaaacattattatcttcaccgatgctctaaagagccataacctcactgaagcacaacgcattgactatgaaagaaaccttatcagccagcaaaaggaactggagttggcaaacggtccaattgcagttgaatactttgccccctcagaaatgttaaattcatatctagagaaaaaagcaacatttcgtttttttggagcctaccgaaaggcagagattaatagcgtttcatctgccaccgcttctcaaccggatatagactcagtaaatataaacacaccactgggacggagcctcgaacaacacctcgtaaacttaaaagttagaaccgctcttgccgcacagacaggcgaaattagcccgcggaccatccatgctgaagagtggatagcttcgctctctaaaaacttaaagtatctatttgaagatcagtcaacagagcttgtattttcacccgacaaattaagattctatatatcccaaaacggaaagccaccatacggctttcaagacctatcttcaggctaccttgccatattcgatatttatgcagatttacttatgcatacagaatacaccaacatcccaccttcagaacttacaggaattataatcattgatgaaattgacgcacatcttcatgtctctttgcaacggaaaattttgccattcctcactgactccttcccctcgatacaatatatcgtcaccacgcattcgccttttgtactgacatcagttgataacgcggtaatatttgatgtgtctacctgccaaattttaactgacctctcaatgtattcctacgaatccgttgcagaaggacttctcggcgtcccccctatttcaaaaatatttgaagacaccatcaaaaaactaacaaatattacaagccaagacaatttcgatctaaacaaagctgagcttttattaaagacgatcacaccattcgtagacgtattagatgccgagtctgaaatgttctatcaattagctgcgaacaagattatcaaaatgaaaacggagaacaaataa

SEQ ID NO: 90187 - DNA, 660 bp, Pseudomonas sp. ICMP 19500
atgttcaacgttgagcgccccaacctcatacccccgtccctactagaaagaaagagctggaccggtcacgacgtactacaatcgttacgcgaaatattctacgacaaatgctacatttgcgaaaccaaagagcctttgagtttaaatgttgagcactttgaagcacacctaaatgatgccgaaaaaatgtatgattggagcaatttgtttcttgcatgtgctcgatgcaacaacctaaaacgacacttacacaacaacctcataaactgcaccaactctgaaatcgatgcactacgacttatacggcatgctccaccggtcacgccatttgccaaaaccctaacaattgaaccaacgaacgatcatccgaatactgtagaaactgctacacttattaaaaaagtattcactgatgacaatacaggaaacaaagaaatcgcaggaacatggctgagaaagcgagtttataagcgatactcacatttgctttcccacataaacacatacatcgacgaagacaaacttaaatctgaaaaaacggatgcaattcttcgaatagaaaacctaatgaagaaaaaccaggagtactcggcatttttaaggtgggcaatattagactcaccagagctttttgaaattgttaaagactcgatcgattaa

SEQ ID NO: 90188 - DNA, 1233 bp, Pseudomonas putida
atgctcgactttctctcctttcaaggcgtcggcccctctccagccctgggcccgatcggactggcgccacggctgaacttcatcaccggcgacaacggtctgggcaagagcttcgtgctcgatacggcatggtgggtgctgacccgcacctgggccgcaggcaagccgatcaaggcgcgcgagtcgtcggcgctgccggtcatcgattatcgtttcaccggcgcagaccgcagcgccgggcaatgggcctggcagcgagaccgctgggcgccggtaggcgacgttaccccgagccgttcgctggtggtgtatgcccatgccaacggcaccttcagtgcctgggatccggtgcgtaatgcgggtgagctggcggcctatcacttcgatgaaaaccagctgtggcacggtacgtcgatggcggggcaggggcgcttgtgcaacggcttgatcaacgactgggtacgctggcagcgtacttacggctgcaaggcgttcgccgctttgaagcaggtcctgcgcgcactgtcaccgtcgcgcgaggaactactgctgcccggtcggccgtgccacatcggcctgctcgatgaaaccgaatacccgaccctgcagcggccccagggacgggtgcccttgcctgaaacttccagtgcgatccgccgcgtggtggccctggcctacatgctggtctggacctgggaagggcaccgccgcgcctgtcgcctggccggagtacggccgagcgatgagctggtgtttctggtggatgaggtcgagtgccatctgcatgcgcagtggcagcgtcgcatcgtccctgcgctgatggatgtggtcggcgcgctaactcgccagcgcctggcagtgcagatgatcgtggccacccattcaccgctggtgctggcctccatggagacccagttcgtcgaggcgcgcgatgcgctgttcaccttgagcgtggaggaaggccaggtgcagttgcaccagcaaacctgggcggctcagggcgatgcggtgaactggctggtgtcccagagcttcggtctgcgccaggcccgctcggtggaagcggaagcggccatcggtgccgccgaagcctggatgcgcggcgagcgatccggcttgcccgagaagctggacagcgaggacgcgatccagttgcagctgttgcgaaccttgcccaccggggatcatttctggccagcctggatcgtcgccaagggaggcctgccggcatga

SEQ ID NO: 90189 - DNA, 525 bp, Pseudomonas putida
atgatcgaactcgttcatccactgcccgagccccacggcttcgacgagcgctgccgccagcgcggcaacgcctggttgcaggacaaccctgacgttggcaggccgcgggactactggtcgccgtttcgtccgcagttgggcgaaggctttgccaaccgctgtgccttcggtgccatgtacattcccagcggcaccgtggagcatttcatcagctgtgatgaggaccgcggcatggcctacgagtggagcaactaccgctatgtcgacgcctggatgaacagtgccaagggcagcaagaaagccgaggactttctcgatccgttcgaggtgcgcgagggctggttcgaggtgttgctgccgtcgctgcaactggtgctgaccgacaaagtgcccgaagcggtgagggcgcgggccgagtacaccctcaagcacctgccattgcgcgacgacgagcgcgtgatgcgcgtgcgtcggcagtggttgcgcttgttcgaggagggcaagatcgggctcgaagggctgcgc

SEQ ID NO: 90190 - DNA, 1359 bp, Pseudomonas syringae pv. actinidiae ICMP 19497; identical to SEQ ID NO: 87174

SEQ ID NO: 90191 - DNA, 651 bp, Pseudomonas syringae pv. actinidiae ICMP 19497; identical to SEQ ID NO: 87175

SEQ ID NO: 90192 - DNA, 1272 bp, Pseudomonas marginalis ICMP 9505
atgcgcctggaccagcttcatattcagaattttcgttgctacgaagatgccacttttaactttcagccggggtttaacctggtggtgggggttaatgggagcggcaagacttcgttgttgcaggcggtggcggtttcatttttcgaatttggcaaacttgtacgtgcagaacaaccctgcctgcaaacaaaagatattcggttcgtgatcgacagtgtaaatggccgtacacgactcgaacgcattgaccctgttcgaatagcagcaaaaggcaatattttcaaagcgactgagtggaagctggcgcacgctggagacacagaaccttatctcgtcgactctgaagttgagtctcaaattcaacttataaaaaccagcatcaatcttgctatgaatgtggacctgccggtactggcgttttatcgtgctaatcgccactggaagagtgccaacgtgtctgccgagtttgctgcgcaacaacgcgtatcccgattcgacggctacaacaactggttcgatgccgttaccgacttgaaagactttgaaggttggctgattgggcgaaccctcgaacgcatgcaagaccttttggacacgaaaaccgcgcctgtggaatttgatgacgaacttgcgtgggttaaccaagccatacaattcgcggttccagacgcgcaaggcttgcgttatgacataaggcttcaaagccttctgatcaatctttcaggcaacaacacccttccattctacgaactcagtgatggtcaacgtggaatgattgcgctcttcgccgacattgcccgccgcatgtgcattcttaacccacacctcggtaagaacgtgctgaaagatacctcgggcgttgtggttattgatgaattggatattcacctgcatcccgcttggcagcgcagtatcgttcaagccctgaaggccgcatttcccaatgtgcaattcatcgccgccagccactcaccgcaaatcatcggaagtctgaggcctgaagaggtcatgcttttagaccgcggcgatagctcacacccacgagttacgtacggactcgactccagccgggtactcgaagaagtcatgggtgtatccgaacgagagccggaaatagaaatgctccttagcgaactgttcagcacaatcgaagacaacgaccttcaaaaagccaagactcaacttcagacgctcagaacaaaagcgcccggtcttccggagttcctcagagctgaagcgctcctcaagcgcaaggagatgattggtcgatga

SEQ ID NO: 90193 - DNA, 639 bp, Pseudomonas marginalis ICMP 9505
atgaaacgcgttatcaaaggaactgagcccgtatcatttaccgagtggaaagcattagaaaatgagcagtggacgcccacttatcgcgatcttaagcacccacagaaaaagcaactgcacaccagcctgctcaacgaacaaggttatgcgtgctgttattgcggcgacaaaatcacactggactccagccacatagagcacttccggccccagaaacactttaggcacctgggtctggaatatataaaccttcacgcatcttgccaaggtgagacagaaacgcccaagcccgcccactgcggtcacaacaaaaaaagcgacttctgcgaggacacccacatatctccgctagaggatgactgcgagaatcgattcaaattcaccttgttaggtgagattaaaggcaatgacgactcacctgccgagagcatgatcaatctgcttgcactggatattgagttccttaacagccgccgcaaggagaaactggaaggtattttcgacaacgcctttctggctgatttcacgatggaagagttggagaccatcattcagcgttcgcgtcagcccctcagtagtcaatacgaagcgttcgaccacgtcgttgctcgctatgcagaacaactcctcggacactaa

SEQ ID NO: 90194 - DNA, 2322 bp, Pseudomonas marginalis ICMP 9505
atggaatacgacgaaggccgagaaatcactcggctgatcgctgaagagatgctcagcgtcggaactagcttccccaagatatctccagagagactccgtcttctcgcggcgcttcaccttacaaaaggcctaatcttacagcgccaataccaagatattttcgaggatgcatgctcagttgttatcgaaatgacttcgaaagatttcgacgatactgaaatcagagctgcattcaacgaaaagctgaagcaaatgaaagacctaagctccagccccatggatcgagaggttcgagttaaaacagccacttaccttatcgatctgttcattatggattcgtacaacattccgtacggacatccaatggcggtagccgccttagttgggagcatacattccactctccattcacatgttatcgaaatagctccgaccactgcggaactctccatgggcaaagagcgcatcgacgacagttccttcccgatgattcacccaacctccagagcattgaggagcctcatttctctgaagcttattatcaaccaaatatatccttacttcatcgacggtcgcatccaagctgcaaatttcgacgaccaacccagttttcttttggattcacacgagcaattcaacctttcgacagcgacaggaatgagtgattttggtgaattcgccttgagtcatcacaacgccgctcgttttatgctggtgattccggccagcaacgcaaaacttggcaacctggttcagggcctctcacccgcattaaaaacacggctcaggctggatgcggcgatttgcttcagcatcagtgaggcgcgaggcgccaacaacgacaaagtgcttctaattttcagtcagggtattaacctgatgaagaatccccacgtttatattgatgtatcaatgtcaaacaaatcgctggagcacttggatctgcaagagcgagctattctggcaggacacatcgtaaatattcatgaagcacgtgacctgtacgaaaggtggaaacgtattcctacaaaggtcgcaacgatcctcaatgcccagttttctgatggctatcataatgtcaagacgttatgcattgaggatgaagttgatcatggaaaacttttgaagatctattcacctaaaaatttcatccgcaacaatcgattggaaggtaataccttcaacatcacagcagaccctcaagccattctaagactgctaagcgacccgttagagccggcgtgtgtctacatcatcggtaataatggtgctggaaaaacgcggctgctttgtgagctcattgatcatatcggcgaaatggatcgaagaacggtcggcatctcgactggcgtacacgaccgattcccgctcggacggacaaaacagaccaatcattttgaatacaggggtgttcgtaccagccccgattcaatctcgccgtccaagctaacgaaaaatgtcacctccctagcggcgcgagtgctcgtcgatcaacgcatgctcgaggccttgaaggaatgccagcagtgcttggggttcgcaacgcgcttctatttcatgctcaggcctgagatggcactcgataacgcccctaaagaaattcgactcatgagaatgtcggagaacgctgcagagaacgacgtacctgagcctttgacacattacgagttcggcgtggtgcgcccggcaacggaagaccaaagggagcgcatcgtctcttattcctcactgagttcgggtgagcagaacatcaatcagctgctgctcagcatcattactacagctgagcgaggcacggttttcctggtagacgaaccagagataagtctgcacctgaaatggcagcagacgctgccacgggttttccatctactgtctcagcggttcgagtgttcattcgtcgtggccacgcacgcccctaccctgatcagcaacgccaacgatcggggtagtcacagctttatgctggacttggggaagctgccggagcttagcgcgagagagcgctactcggtcgaatcgatcatcctgggcggttttggcacctataccccgcacaaccgcgcagtgcacgaggcctgtgcgcgtatcgtggcgaagaccatgggatcgaaaggtagccggcaagccgatcagttctctccgttggcagagctcgacgagatgcttaaaaaaatgagtttctcgcagggcgcatacgttccgccaggtcaacaggaagacattgacctcatcaaaaaggccgccactgctgttcagctgctcctccaagaccaaagcgtggtagacgccgccagtgaagtggggggtgtagatgactga

SEQ ID NO: 90195 - DNA, 873 bp, Pseudomonas marginalis ICMP 9505
atgactgattatttcgttctagacgaagccgaactcaggccgaggtacgatgactataaagtcctatgccacgctgaggagcgattccacaaagtcgtcatgtttaatctcctacggtttcacgcgactgcactccagcgtttcgacaggaggcaggccggtgaagcgcttgaggattgcaacctctggaacgaattctcgaatccgaagagcaagaaaaaacctaagacggttgcgacggctgctactggcgagccggcgcccacggtgaaggccaagcgcaaacgaggtaaggctaaaccagtcatcagcgacatcaagggtgcgttcaggagctatatcgagaaaacgcagaaaaatcgatgctgctactgccgacgctggctgtgtaacagcgggtactccaaacccattgagcacatattgcctcgtaaaacctacgagcagtactcgtttcacttctggaacctgtccgtcgcttgcgtggactgcaattctcttaagaaggaggctgattgggcaaccccggacaaacacggctttaaagcttatccgttgccaagcaacttcaccgagatgttccacccgcggttccaccgattcgatgagcacgtgcgcttcatccgcgtgcagaccaatgaccacagcatcactttgtaccgggggatcacgcctcagggacagaagctgtgtgaagatttgctaaccatcatcgcaggtaaggaggttatcgtgaatgctaacgctgcactcaaaagctcgatggaaaccatcgaacgattcgacgtaaaggaaggcagccatctggaatcggcgctcaagagcctggtcggcgccctgtctgagcggtctatcgatctactgaaccgctga

SEQ ID NO: 90196 - DNA, 1269 bp, Pseudomonas syringae ICMP 11292; identical to SEQ ID NO: 85894

SEQ ID NO: 90197 - DNA, 645 bp, Pseudomonas syringae ICMP 11292
atgagacgcatcatcaagggaactgagcctgcgtcatttaccgaatggaaagccagcgcaaatgaagactggatgcccacttatccaaccttacagaacccacaaaaacgcgaattgcataacagcctgctacaagagcagcattcttcttgctgctattgcggcagggaaatagaacttgagagcagccacatcgaacatttcaaaccccaggagcactacctgccactggcgctggagtacagcaatctccatgcgtcctgcctgcgcgagaccaaaccaggaaacccgctgcattgcggacatcacaagagcaactggttcgatgaaacgctgcacatttctccactggcagacgattgcgaacagcgatttcgctatctgctgacaggaaaaattcaaaacactgaatccgcagaccttgccgccgccacgatgatcgagaaactcgcactcgatatcgcctacctgacgagaagacgtcaggaagcgatcacaggcatttttgatgaccagttcatattgagcgccagtgaggcggagttgacgcatctgatgcagagtttgcgctcaggagatgccggcaagcaggtcgcctttggccacgtcgttgcacgctatgcggagcagttgctggcgtcctga

SEQ ID NO: 90198 - DNA, 1245 bp, Sphingopyxis sp. A083
atggcgctacgcgcctatttcgcgaccaatacgctgcaaaatcgccaaggtctcggacggatttctagcatcgagatcgatagcgagggacgacaggtcgaattgaatttcggcgccgatgtgaagcagttcaaagacgaacgggagtcgctacgcggagaaggctgggcaccaagcaagctcatcgccctgtcattcacaccattcgacaagttcccgccgatcgacgacacgctgcccaaacccggatcccgcccccaaacgtcgcgcgcagcgatcgaccccttctatgtctatctcggcttcaagaatgatttcaggacctcgcctcgcgcccgccttctccgcacgatcgaccaactcgccttcgcggagtcgaccgtgcaatccgacgagcgggtcatcgacgctttcgacgctatcggttatagcccggtcatagagctcgaatatgaattcacgccgggatggcgcagcggcagagaccagtcagacttcgacgaacagaggttgaaggaactcgagaatatgctcgagggtcatacccgcccggatggcaagcgacggcgccggatgacctattatatcgacttccgtttcgggcgccgcgatgcctcgattcctatcgacttcgaagaaatccgccgcctcacagacgcaagggttttgcgcctcgcttcggtcaagctccgcacggccgacgataaagaggtcgaattactcgaactctcatcgggtgagctcaatctcttctcgggtttccttggcctcgccgcttttctggaagacgggtgcctcgtgctgatcgacgaacccgagaacagtctccaccccgactggcaaatgcgatacaccgagatgctcgaggcggtgttcagccggcatcgcggctgtcactatatcattgcgacgcactcgcccctggtcgtcagcggcgtcgccggcccacacgcgaagattttgcggctcgatcaggaaccgatcgaactgccgagccgggcgttggccaatgcatcgcccgacgccacgctgctgaacgcattcactgtagtcacctcgggcaacaatttcctgaagcagatcgtgctcgagaccgtcacgctgatcgatacgggcaaacatcgcagtgctcgcgcccgcgaactcgcactcgcgcatgcgagcatctatgacaagattcccgcggacgatccgatccgggatctcgtcgcaggcgtcgtccagaccatcctgcagccgtcatga

SEQ ID NO: 90199 - DNA, 867 bp, Sphingopyxis sp. A083
atgagcaggtttctcgagtgcgagatcgccgagatggccggcgtacgtgcggacgtcggcgaagatgtattcaatcgctggttcgacaagtcggagatcaaggggagattcaagaaggtctgcatggaagagcaaggcttgcgctgctgctactgccgcaagttcgataataccacgaataatctgatatgggatctcgagcatgtgctctgcgagctctactacccgcaattttttgcatccgacgagaatctcgcggtcgcgtgcaagcgctgtaacaatgcaaagagacatgaagatgtgctgcgcccgcaaccccgccccgatccgggcatcgaagaggtcccgcagcagcctgaacgctattcgattccccatccgcgcttcgacgcctggtcggatcatctcggccatgtgaattaccaaatatatagttcggacaccgacaaggggatcgagctcatgcgcgtctgcaagctcaatgggcccgcagtcgacgaggctggtctcgatcatgaaagcgtcgtcgctgccatcaagacgcagtttttccagatcgtcggcaatgcggttagctctccgccgcctgacgaggaaattctggcacgcatggcgtggagtgttcagaatctagaggatgagcgcgccgccatgacgctcgcgggccttgcgccgaaactgcgggcactcgggcgaaaggccgtgcggcgtaacgttgaacagtcgatcgccgaggcgagggcacttgcagactcggccagaaatccgggtggagagaagccctcggaacgaagagccctgtccttggtgagctctgtcatcgggttcggccctccgcaaccccgccttccgggctcatcgccgtga

SEQ ID NO: 90200 - DNA, 1407 bp, Pseudoalteromonas sp. 10-33
atgggatttcgatcacgtaaaataggcaacactaaacttttcgccggcgttaataacgaaaaacatgcatttactgtagtcgtaggtgataacggtagtggtaaaacagagctgttattggatatatttagaaaatattattcaaagtatgctgaactatataaacccaaaacacaaacgggtaaagataggctacgctgggccatcaataacaaaaatgaatataaagcccttacagatatacttggagttgagttaccacgaaaattaatctgtgcatcaacaagtcagtttgagcgctttcaaagtgatttccgagcagatgaatatccgtggttatctgaagtatattcatacataggctctaagccatatatacaagacttaagcccttcagtccgtatcgcatcaaatgcaataaagcagttactcattcaacaaacttttgatctccgtaaagttaatgctttaaaaggattcttagatgaatttggatttagtagtgtattaaaaataaagttaactccaactataacagagcaagacctcctcataatttcctccggagatataaagaatcaaaaaatatctttagaagctcaattaaagcttcaaacagcagcctaccactttgaagaaactgatcttttaaatctgctttcaacactcgaagctatttatacttcacccgaagttttattaagccttagcaatcaatctttaaagttaataccgtcaagttctcagcatgatattgaatttgacaaaagagagttatctgatttactacgttctggtttagctgttgtagcagatatcgaaacactcaaagatcaacctttaagagcaggttacttatcaccaaatgccaaagtaagatctttatcagctcgaagctcaggtgagcaatgtctttttttactatttctaggaattgtcgcttcaattgaagataactctctagtgttaattgatgagccagaaataagtttgcacccttcttggcaagagcggtttgtagatattttaaaccaatccctgaatacttactcgggttgtcattttattattgctacgcattcgccacttatagtttcgaatatatcgacaacaaactgtgaaattttaaatattcaaaaaaatagtttatcagatgcatcagagcattatttgcgctcatcagactatcagcttgtaaatatttttgaatcaccaggtcacagcaatgaatatcttcttaaaatttctatgcatatttattctaaagtaaaaacatacaaattctttgacgaactcgatattaaacaactagaaatgcttaatcgtataaaacaaaaaataagtaatgatgatcctatattggaactcattgactctttaaatgaggtatttaaagtttatggataa

SEQ ID NO: 90201 - DNA, 645 bp, Pseudoalteromonas sp. 10-33
atggataataaattaaaagcaatagaatttactaaggagcaaaaagcactaataaaagaagtggtagaggctacagagtttaatcatattaattggtctaatgatagtttagaaagcttaagatcaagcataagaagctactatcgcaatgctcaaaactctttatgctgctattgtaaaaacccagttagtttaacaagtgctgctaattgccaagttgagcatatagcaccaaaatctcgatataaaaaatttattttcactgctgaaaacctttgtgtcgcatgtgctgactgtaatagtgcaaagcaaagtattgatgtaataaagcctctaccgtccaataaaaaaagaactagatatcctactacatcacagtttttaattgtacatcctcattttgatatttactctgatcacataagaaagttcggagaaagattttattttccacgaacaaaaaaaggtgaaaatacacgcaccatatgcaagttagacaaaggtattgaagccctcggatattttgattcacccgaatctcttgaaaattttgagttaatcgcccaaataatggatgcaacagtaaaaaaagatacaaacaaaaaaaatacattaaaaaaaatactattaaaatctattggataa

SEQ ID NO: 90202 - DNA, 1359 bp, Pseudoalteromonas sp. H103
atgttaagcagcattttcattcaaaactttaaactgttttccgactcaaaattcacattgaatccagaatttaatttgattgttggtgtgaatggttgcggtaaaagctctctgcttaaaggtgtagcaatttccctagctggctgggctcatgcctacattaagagtaatgataacctgaggccaattaaatttgatgaggttagggagatcgaaaataacggacgttttgataaagcacagactacaagaattgaagcgttaggtgagtttcctattattaataggtttaatacttttacttatggaaaagtaaagtggacaagaactcgctttgagggaagtagtgagacatatataagcggaactattcagtaccaaaatagcggtacgaagacctacaatgggaaagagtattcattaaacctttcaacacttggaagtgacgtactcaactacattgaaaaaggaactaattttgatttacctttgattgctttttatgaatgcgatcgtctgtggatctctaaagataaaatagatattgaagattctgcaaagaagcaatactcaaggtttgaaccttatttagattgttttcatactggagcagatgataaatctattgctgtttggttactgaagcttgaattagcagaattacaaaagaaaataaagtcaccaatgaaaatggcgatcgaatatgctgccaaaaaagctttagaaagttgtgtgggatttggatttgattttgatgaatcaagggtaatggttaggtttgaagatggaagctccacaccatttgagcacttgagtgacggacagaggacaatattaggacttttttgcgatatagctagaagagctgcaatattgaaccctcatttagaagaaagtgtctgcgaaaaaacagaaggagttgtactaattgatgagcttgatttacacctccatccaaaatggcaaagacgtgtaattgaagatttgagaactgtattccccaaaattcaatttatttgcacaacacactccccatttctaattcaatctctcagatcaagcgatgaactaatcatgttagatggtgagcctttgattgagtattcgaataaaggaattgaagaaattgctaaaaacatgggagtaaataggcctgatgtctctgttcaatatgagttactaaaagaagttgcgcatagctttttagaaacgttagataatgatcggctttcaccatcggagtttcatcaaaaatatcaaactcaattagctgagttaattaaaccttactctgataacccagcttatcaagcttttctagaacgtaaatatacagctagaactggttttgaattatga

SEQ ID NO: 90203 - DNA, 750 bp, Pseudoalteromonas sp. H103
atgagaccagtaaaaaagggggcaacaccagttgctgcatttaataggtatgaagacgcttttgactaccttttagatagagtgggaatcggcgaatggagtggcattaaaattgggcaatactgcagctattgtgaaaggtgtattcaaactaatttagctgttgaacatattgagcctaaaagcggcgactttgcaaaacccgaattacaaaaagagtggagtaatttcttactagcctgtgtgaattgcaattctacgaagggagctaaagaggtcgatttaggatctatttttctccccgatagagataataccttcagagctattcaatataagcaagatggaactatcgaaccaaaagatggattaagcgagcatgataggcaactggcaataaatacaattaatctattagggctaaataatagtattaactctgatttgagtggtgttgctaaagatcgtagggtccaaagactaaatgtatggatgattgcacttaatgcatatgaagattttcaaaactgtgttgacaaaaaaacgctacaaagaactattgttcgagaaatgctatcaaatggtttctttagtatttggatgaaagtttttgaagaagagataaatataaaaaaattatttatagaatcagtaaaaggaactaaagatagtggatgctttgatgagtttggtgcaagtaattcacaacatccaaatggagataatctagaatcaggtggtaaaatttag

SEQ ID NO: 90204 - DNA, 1635 bp, Pseudoalteromonas sp. H105
atgaatgactctcggctaaaagctaaaatttctagatatgagaatggagacatttcggctgcttttgacttgtttaaaaaaaattacgaagatggtcaactagaaacttcgctaaaatatatggatttttgtttaagtgaaaccttaagtattgataaaaattttaagcctaaaaataagatttttttaaaagatcttcatttagttaatttccgtcaatttaaaaatttaaaaattaattttgaaagtgacttaacagtaatcataggtccgaatggttctggaaaaacaagtattttagatgctttaactaaaacaatatcatttataaacgctaggtttttaagacaaggaagaagtggaaaaccactaactcgaagtgacgtgagagttaattgtaattcttgcgctgaagtaattacttctttagagttgggtccaaacacacattattcatgtaatttagtaaggccgtcagatggtattagttcacctaaaagtagtcaattagatagttatcatgaattttcatcactttatagagttactaacgatgtacagaaaaatctaagagatgaagaaattaacttcccattatttgcttcatactcggttttaagaacttataataagaaagatgtactgtcttatgatttagaaatgcttccaaaaatttccgcagagaatagactagatgcaatcgatccgtctgcaatcgatggtacatcaaatttagacacatttttagaatggtatgttgctttaacttttatggctgaagaatcggctgaagaaaataaaatacaatctttagaagaccaatatcgctccttaaaagaaatagttacttccgattcacatccattaaagtcattattagatgacactcaattcaaattacaagagcttaagagtaaaaaaactgttgtaaaaaataataactactctaaatcaaaattaattattgataatgccttaattaaaggtgtgcctggtataactagtattaaggttgatacatcgacagggcgggctgaagtacaagctactatagataacaattcgatagtaattaaaaatctatctcaagggcagcaagtaattattggaattctagcagatgtttctagaaggttaattatgcttaatccaactctggataaccctctgcatggacaaggggtgattttaatagatgaaattgaaatgcatttgcaccctaagtggcaactttttttacttgaaagcttacaaaataccttcccaaatctgcagcttattttgacaacccatagtccacaaatactctcaactactaaaaaggataaaattagagttataggggttaatgttgacaatgaattaatcgcagtttcaccagttaatgagactcttgctcatcctagtacagatattctagagtctgtaatgaaagtttctagcattccagagctacctattacatctgaattaaataaatatcgtgctctaatagagcaaggtgatatagagtctgaggatatacttactgaaattgagaggtataaatcattactggataaagagataggtaatcagcaccctgaaatgattaagcttgatatggtattacggcgaaggaaaatactagggtga

SEQ ID NO: 90205 - DNA, 717 bp, Pseudoalteromonas sp. H105
gtgaaatatataataaaacaacctggccacagacttttagaacttaaaaatgtcaatccacctacttgtgcacgaacagccacaacagcttggaagaattttaaagggaaaagtgaaactgctcaatattgttttagagaacaaaaaggtttatgtgggtatagcgaagttcaacttgtctatagtacacccatactagatgatattacttttaatgatctaggagtagacttaggttatcacattgaacatatagttcctaaaagcactcagccagataaaacatttgatcatctaaatcttattttaagttccatatgttctgaatccctaaagtctttagacagacgagatgtatttggaggtcatgctaaacaaagctggtattgccctaatggttttatacatcctttacttgaagagtgtataaagtactttcatcacgaaatgagtggtagggttattccaaaagcaaatttagagagaagggaaaaagctaaagcaagattaactatatataggctcaacttaaacgcatctattttagttaattggagaagaaactggttagaacaattaacaaaaattatcgatagtttacttgataaccctgatgctttaaaagcatttgctgagttagagttaaccccagttaatgatatcttgaggccgttttactcagcacaaaagcaagtatttggaaggttaaatgtttaa

SEQ ID NO: 90206 - DNA, 1767 bp, Pseudoalteromonas sp. XI10
atgcagttacgttatttagccattcctcattttcgcaacttacgagatgtagaaatgaactttgccattgaattatcacatagttcaagtaccggcaaatctgaagagtctaagcgtattcgaagccatgccttaattggacagaacggtacaggtaaatctaatttaattgaagcattaatcacgctttttcgtgacatagatctcgaccgtgaggctgcatttgattacacaatagaatatgaaattcgtggacacatagtacgcgttgaagccgatacatctaggcaaaaaagaccatttgtttgggtcgatggtgatcgtgtgagccaagagtatttgacgaaaaacgattcacctggaaagcaagaacgcgattatcgacgaggtcctcgcctacttcctagtcacattttcgcctattactctggtcgcaatgaacgtattgaagctttatttcaagaacatcaacgccgcttcaatcagcgtatggagattaatacccgtatcgtaattcctgaagaggcatttatccatggtgatccagatgatatagcacgccttatagagtctaaacgggttgaaagtcgcttaaatgacgatcgcctcagacgtttattttactgtcgtggcggccatagccaattggttttattggcctgcttactatctgatgatcctgttttcaaaaaagttttggataacttacatattgaatccttagagtcagcgcttttcgttctcaaagagcctcaccgtttgcgtgaaaaacgccgaaatgggaaattcgatgaaaatgaactcaatgaaggcgatcctcgcttctggtatgcccgaggtaatgtggtcagtgaattccttgataaactctggcaggtttcatgggctccaattgaacaagaagcaactaagcaaattgattttcgtggtcgtacagaaaagcaaaaacaactctatttatttgtacctgacaaacacaaactaaaggaactaggtgagttggttggcagcccagatagctttttccgttacgccgaaggtgcttacattggcgatttgattgatgaagtaagaattaccgtaaagaaacgcgatgaacacggtggaaaagtgagttttacacaactgtcagagggtgaacttcagatgctgacagtgcttggccttatgcgtataaccagagaagaccaatgtttatttttgcttgatgaaccagatacgcatttaaatccaatttggaaacttcgttacttcgacgacattgagggtgtgctaactactgagaaagactctaagtcacaaagtgaatcgcagattctcatcaccactcacgatcctatgatggttggttcacttaagaaagagcaagttcatataatcaaaaataatggcgataaaactcttgttgagcaaccggatgaacaccctcagggaatgggagtaacaggcttactaaaaagcgagctatttggtttaacctcaacgctagatgtcgaaacagagcgaaggttataccgccggaatgagctattcgccaaagaaaataaaacctctgaagaaaacgacgaactggccaggctaagtcaagaactcgctgatttaggtttctcaatggccgaattcaaagatcctgtttatgcaatgtttgttaggaagatggcacaacatcgcaaattcaataaaccatcccttactgcggatgagataaaagagcaggatgaaattgtcgatagtatcattgacgacattttgaacggggaagagtga

SEQ ID NO: 90207 - DNA, 870 bp, Pseudoalteromonas sp. XI10
atgcgttacataaatatgaatggccttactccggttaatactcctgcaaaccctgattttcctgactggattccttggacggaacaacaatggcaagagtggcttagtcgatctcgtcaatacaatagacggctcaccgaacttcataatgctggagatttcgaaaccaggaacgactatattaacgcccgctcaactcattggggcagactcaaggaatggcttaaagttttatcttatgggaaatgctggttctctgaagttagagacctctattctcactatgacgttgaacactttcgcccgaaagccaagtctaaatctacagacggtacagaaagagatgcttattggtggctggcttttgattacacaaattatcgcctttgtggaaatgtaggtaatcgtaaaaaaggaaactggtttcctctaagagtaggttctttaatttcttccttccaaactcaaaatgaagagtcagaggaaccatatttgttagacccagccgacgctgatgacgtctcgttaatatcctttgatgaagaaggaaaagcagttccgtcacctggcgctactgaatgggaaactatgagagtagaggaaactatcaagcgccttaaacttaacgagcataacgaccttgcagaagcaagaaggaaagtttggctggatgtgtcaacagaaatagacgaatacctaaagcacaaagcaagatgcaataatggtggtaatcccgttgccagagaaaaagtcagagcgcattgtgtaaatatcagaaatatgactttacccaacgctgaactatcatcagtagcaaggtggtgtgtcatgtttcgcaatgacccgcagctttcaaggctggtagcctaa

SEQ ID NO: 90208 - DNA, 1320 bp, Vibrio vulnificus
atgacgcaaaatttctttatcaacacccttcagctgcaaaactaccgatgttttgaaaaaatagaactcggctttaagccaggtataaatgtaatattaggcaacaatggcgccggtaaaacttctatattaggagctatgtcgatcgcgttaggaacttggtttagaggcatgcctaacgttgatggcagaactatacaaaatgaagagctaaggctagttcgcaaaaaaaaaggtgacttagttgtatttgatttagctggcgagtgtagtgttaaagctgagggctgtattaatggtgaatcaatagagtggaaacgaactcgatttgtgggggggacaacccataaagacgcgaaagatatgatatcggaagcaaacaaagtcaacttaaaagtagctaaaggtgatgacactatattacccgttattgcctattacggcactggtcgactgtggggagaacgcagactcggtgttgtaaaaaagtcgaaagttgaagatgtagcagaaaaaacaggacgataccttggctacctcaatgccttagacccggcttccaatgaaaaactactaaaaaaatgggtaagtcagctagcaaaagcctctttccatgaaggcatagtttatgactcgcttacatcagtttatcaagtaataacaaactgtgtagaaggtgcaaaacgaacattttgggatccacgagaatcggacatcattatcgagttcatggatggtactcaagtgcccttctatttaatgagtgacggtcaacgaaatatctgtgcaactgtaggcgatatcgctatgcgatgcatacaattaaatcctcatttgaaagaaaaagcaccatcacaaacccctggggtcgtgctaattgatgaagtagaccttcacttacaccctctatggcaaagagtaatactctcaagcctggagaagaatttccctcacattcagtttattgtaacaacacactctccattcattgttcaatcattaagaaatagtcaagtattagtagttgacggttctaaaatagaactcataagtttacctgaaagtatgagtttagaggatactgctgaacatattcttaaggtagagaatgcagtcaaaagtgattcattcaataacaccgtagatttaggcaaacaaatgtttgctctccaagagcaaaaatctacgttggataaaagctctgacgagtatttagagatagataataaaattagagaactccgggaaaagctagctcagaactcaccgtactactctagtaaccctttaattacagcttatttaatggggttaaaatga

SEQ ID NO: 90209 - DNA, 651 bp, Vibrio vulnificus
atgagaccggttgaacgtagtgcatggcctaaagatgaggatgggaatgagcttaggtttaaaacctataagtcatttttcaaatacttagaaaaagccttcgataattgttgtagttattgtgaacatgtcggaaaactagatgttgagcacgtagtacctaaaagtcacgattcaacactagaagttgaatggtcaaatttattgctaggatgctctagctgtaacagggactttaagaaaaacaataatagctctagggacgattatttgtggccagatgaagtagacacttttcttgcttttgactacctaaacacagggcatgtaaaagtcaaaacggattttcctcaagcaagagaagctcaagctattttagatctttgcggtttagctcctgaacctaaaaatgaaataaaggaaccaaatgactacttgtggaaactccgtgcagatatttggacggttgctgaaaatgaactcaaaaaatataacgaaggtaggtcaactatagaagacattgcctttattgccaaaccaatggggcattggtccatttgggttacagtattccagtcccatcgtgaagtagtcgaagcgatttctgaaaaatatagaggtactcactcaaactatttacctcaacgttag

SEQ ID NO: 90210 - DNA, 1572 bp, Vibrio harveyi
atgaaagttgataaattacatattcgatcacgattcaagaacttagaaaacgtgcaggttaatttcgatgaagataatctgatgaccgttgtcgttggccttaatgggtctggaaaatctaatgtattggaagccttggtcgcaatttttcgtaatcttgatttgggcgaagctccaccattttcttacgagttgaagtatcaaatcggtgaagaaaagtgggctaattggtatgaaataaaagttgatgctaatcctgaacggggaacactctctaaacaatatcaggtttacgttaagaatttaaacagcaaagagaataaattccaacttgttcctttctcaaaagtgcgccgagataagaagacgaaacgagctgaatatttgccaaatttcttgtttgcctactattctggcccgtctgatcgcttggaaaaatacttccgaaagcatagggatgattactatcgagaactgttatataacaagatagatttaaaggcggatataaggccactgttttacgcaaaacccttacatagccagtttgtgctaatggctttttttctcagccctgactttaaaaaagaacggaaatttttaaaagaacagttggggattgaaagtcttgactcaattcattttgttttgcgtcgaccttcttgggagaaagataaagatgatgctttttggggggctgatggagttgtaagagatttcattgaactacttttcccacatgcactagcaccggtaaaagttacgcgtaatgaggatataagtcttacgggtaaaaatcggaaaaatgactttattcatgtttttctaccatcagtagagtgtttgtatgacttaacaaaagacttaggtaataatcctgctagtgttttcttcaagatgctagaaagtacggttctttccgaaattatctctgaagtgcatgtgagggtaaaagtaacatactctgaacagcccataactttccaagaacttagcgaaggtgagcaacagttattgacagtattgggtttattaaagttcactggcggaaaagattcattgtttttattggatgagccagatacccaccttaacccttcttgggcagtgaagtacctcaagttcttaagagattttgtacctaaccatgaaaccagccatttactaatggtgacacatcacccactggcaattgctgagctgcaaaaagagcaggtccaggtgatgtggcgggatgatgagtatctggttcacgcaaaagaacctgaagaaaatcctagagggatggggataaatttgattttgcgtagcgatatgtttggtttgaaaactacactggatgacgatactaataaaaagctaaagacacgcaatgcactagccgcaaaagataaactatcagaagaaaaaatcatgcgtgaagagggaagagatcctgagacagaggaagaatatctaaagcgtttaaatgtcgagctggatgccttagggtttaatctcgcaagtgatgatccagattacttggactttcttcgagaaagatatagccaaaaatcggagagggacatttaa

SEQ ID NO: 90211 - DNA, 810 bp, Vibrio harveyi
atgcgctgggtttgtaaggatgatattgaagagtgcttatcccaggcttggcgagagaaagcagctcaagcgagagctgatttaattgcagctcctgacgctcaagcacgcaagcaagtactaagacgggtcgcatcttccaatgtatggcgtgagttctatgatttgctccccgataatcttaagaaaaagtgctggtattgtgaggcagatgatattcggtctgatatgcctgttgatcattttagaccaaagaacaaagttgaagaggaatgcgagcatgatggttattggtggcttgcatttgactgggaaaactatcgttgtgcttgtactttttgcaatagccgaagaaacttcgaggagacacaaggaggtaaagcttgccgctttccattagagaatccagaaagcagggcttttacacctcaagatgttgagtgtcttagagccgaactgcctgattttctagatccatttaatccagatgatgaaaaattactctggttcgataatgatggtcttccagaaccaaagcctggagccgatgaaaatcaggtacgtaaagtcggaaactcaattgatatatttcatcttcacgaaacccgtattgtccgtgctagaaataaaattcgtattgaaatagataagcatgtaaagaaaattagggataatgatggtgcattggatgctaaaaggactttaaagcgtatggtgagagatacggaaaagttatctcgtgctgcagttgtgtatcttcgagctcacagggatcttcctgaagtaaaagaaattttacgcttagactaa

SEQ ID NO: 90212 - DNA, 1629 bp, Vibrio albensis; identical to SEQ ID NO: 86274

SEQ ID NO: 90213 - DNA, 774 bp, Vibrio albensis; identical to SEQ ID NO: 86275

SEQ ID NO: 90214 - DNA, 1377 bp, Escherichia fergusonii
ctgcttaactttcgttgcttcaaacagctcgatatcacttttgatgagcacattacgattctggttgcaccgaatggcgcgggcaagacgacagtgctggatgcggtacgcctggcgctgttcccctttattcgtggttttgatgccagcctctacgtgaaagataaatcactagcgatccgtaccgaagacttacgtctgatttaccgccaggaggcactgaacatggaaatgtcgtctccagccaagattacagctaccggagaatgggcaagcggaaaaacggcaacctggatgctcgataaacgaggagaacagccgccacatgaagataagatggcggcgcagcttacccgctggggtgagcaactccagaaacgagtacgtgaagagcatagcttgcaacaagttgaacttcccctaatgctttatttggggactgctcgcttatggtatcaagaacgttatgaaaaacagcctactgagcagcgcctggataatagtgccttttcacgtttgtccggctatgacgattgcctctcagccacatctaactataaacagtttgagcagtggtatagctggctatggcttagctaccgtgaacatcaaatcacacaacttgaatcaccttcagcaaagttaaaagaaggtgttcgtgttcaacggatgaaagaagccattcaggctatccagcaggccattaactgtctgacccagcaggtgacaggctggcacgatctggaatacagcgccagccataaccagcaactggtaatgagccatccgcaatacggcaagatccccttatcccagctcagcgatggcttgcgaaatgccgtcgcaatggtggcagatatcgcatttcgctgtgtcaaactcaatcctcatttacaaaatgatgcagccttaaaaacgcagggaattgtgctgatcgatgaagttgatatgttcctgcaccctgcctggcagcagcaaattatccagtctttacgcagcgcatttccgcagatccagtttattgttacgacccatagcccgcaggtgctcagtacggtaaaacgcgagtccattcgtctgcttgagcaggatgagaatggcaacgggaaagcgttgatgccgctcggagcaacctacggcgagccgagtaacgacgtgctgcaaagtgtaatgggcgtcgatccacagcctgcggtgaaggagaaggcagacctgcaaaaactgacaggatgggtggatcaggggaaatacgacgagccgaaaacgcagcaactgatggtcgcattggaagttgcgttgggtgagaagcatccacagcttcaacgcttacagcgcagtattgcccggcagagactgctgaaagggaaagcgcaatga

SEQ ID NO: 90215 - DNA, 606 bp, Escherichia fergusonii; identical to SEQ ID NO: 88315

SEQ ID NO: 90216 - DNA, 1380 bp, Enterobacter hormaechei subsp. oharae; identical to SEQ ID NO: 87572

SEQ ID NO: 90217 - DNA, 636 bp, Enterobacter hormaechei subsp. oharae; identical to SEQ ID NO: 87573

SEQ ID NO: 90218 - DNA, 1380 bp, Enterobacter hormaechei subsp. steigerwaltii; identical to SEQ ID NO: 87572

SEQ ID NO: 90219 - DNA, 636 bp, Enterobacter hormaechei subsp. steigerwaltii; identical to SEQ ID NO: 87573

SEQ ID NO: 90220 - DNA, 1176 bp, Enterobacter hormaechei subsp. steigerwaltii; identical to SEQ ID NO: 88678

SEQ ID NO: 90221 - DNA, 633 bp, Enterobacter hormaechei subsp. steigerwaltii
atgggtaatatttcatttgttattgaagagcaacatttaatggatcatgctgtcgcgcagggccatcagttctggagtgatagctctctcgaagctatcaaaagaaaaattaaagattatttgcgtgagaaccaaaaacactgctgttgttattgctctagaaatatagatgatgaatttaatatggttcttgatatagaacatattattccgaaatcaaaaatagtgtcggaaatgtttcaaatgaataatctggctgtgtcttgcaaaagatgtaatatgagaattaaaggagaggatatatcatttattgatgctgattttcaaagtttcaaagaggcaggtgattactatcaatcaaacagctataaatttatccaccctaaccttgatacttgggatggaaatcttaattacattgtagctcaagttaataggcgaaaagttgtttattatcaagtcgttgacgatagtcctaaaggtacgtatgcaaagaaatactttgaattggataaaatacaggcaaatacttttgatgaagcgcaggaagcgactgctagaaaagaaccaaatgatcctgaaatagcgaaagaattttcaaaattagtaactacaatgctaggtcaagaataa

SEQ ID NO: 90222 - DNA, 1605 bp, Enterobacter kobei
atgaaagtcgacaaactgcatattcgctcacgctttaaaaatcttgaaaacgtgaaagtggactttgacgaaaaccacctgatgaccgttatcgtaggccgtaatggttccggtaagtccaatgttctagaagccttggttgctatatttcgcaatcttgatttaggtgaagcaccaacattttcttatgagttggactatcaactaggtgaggaagccggggttaagtggtatgacgtcaaggttgatgcagatccagaccgcggaacgctagcaaagcaataccaagtttatgtcaaagataaacacgatagcaaagcggatttcaagcttacacccttctccaaagtgaaacgcgataagaaaaccaaacaagcagagtttcttcctaactttctattcgcctattattccggaccatcggatagattagaaaaatactttcgaaagcatcgtgatgattattatcgaaacctactctacaacaagcttgacttgaaagcagatattcgttctctattttatgccaaaccctatcacagtcagtttgtgctcttggcatttttcctgtcagatgaaaatagtcctcagcgcaagtttattaaggagcatttgggtattgagggattggacagtattcattttgtgatgcgccaacctgagtgggctaagctgaagggggaattattctggggagcacaaggtgtagttcgtcgctttttggatgaattgatacagcacacattgtcaccgataaaagtaactcgtcaagaagatacgtcgttaacgggtagttatattcgaaatgagttctttcatctatttttacctgacgtaaacgcactacatgaatttgctagagatctcagtgctgacgaactgtttaaaatgcttgaaagcactctgctgtcagaaattatctctgaggttagcatacgggtgaaagtaaccagcagcagggagcctctcactttccgtgaacttagcgaaggtgaacaacagctattaaccgtattgggcttactctggttcaccggtggtaaagattccttatttttactcgacgaacctgatacccaccttaatccgtcatgggccgttaaataccttaaattcctgcgtgaattcgtacccaatcatgaaaccagccatttactaatggtcacacaccatcctttagctattgccgagctgaagaaacaacaagtacaagtcatgtggcgtgacgatgaaaataatgttcactcacaagagccttatatagatcctcgtggcgctggctttatggccacacttactgagatttttggtctaaatacaacactggatctggaaacccaaaagttattggacgataggaacgaactagcccatatcgaaaatcgaacagaagatcagaacaaccagcttgaccttcttaatgatgagttaaacagactaggattttcacttgaaaacagggacccgttatacagcgagtttcttttagcatggcaagacctaagatacagcgataaaccaccactaacaccggataaagcggctcagagacgagctgctatgaaaaatgtaattgaggcgcttaaagctaagaagggttgctaa

SEQ ID NO: 90223 - DNA, 843 bp, Enterobacter kobei
atgatttacatcaaacgagacgccacgctaattcctgcaaaggtacttgccgttgcccaacgcgcgcaagatgctctggaacagcttcccgctgagcagaggaaaggtttcatcaagaaaaagtctcatatatggagaggcttttctaaatacctagcccaaatgtcttatgggaagtgctggtattcagaagctaaagatgcaggtgcaaatttcgatgtagatcatttccgacctaaggctgaagcaaagaggacagaagatttggtcgatgcggatggttatgcgtggctcgcatttgattgggaaaacttcaggctttctgctcagaattgtaaccgtttaaacacagatgaatcaggtaacacggtaggaaaaggcagttggttcccgctgctagatggtagccctaaagcctgctgggataatcgctgtattaacgatgaaaaagtcactttgctagaccctgtagttaaagctgacctcacctatatagactacgacgacagcggtagatttacttcaagtaagctctgcgttggtaaggcagcattaagggttaggcaatctggcattatttatggcctcaatttggagaaaatgcgtgaagcacgatttcaggttatgagggaggctaaagaactccttgaaactattcaccaatgtgccgaagacttagaccctctgggcaatgaagcccccatgagaactattgaacgacaaatagaacaactccaatccagaacccgggccgatgcaccatttagccgtgcagtaagaacacaactgataaaactcggtgcagaggattacttaattgatcgaagtttggatgcagcctag

SEQ ID NO: 90224 - DNA, 1176 bp, Enterobacter hormaechei subsp. steigerwaltii; identical to SEQ ID NO: 88678

SEQ ID NO: 90225 - DNA, 633 bp, Enterobacter hormaechei subsp. steigerwaltii; identical to SEQ ID NO: 90221

SEQ ID NO: 90226 - DNA, 1398 bp, Salmonella enterica; identical to SEQ ID NO: 86240

SEQ ID NO: 90227 - DNA, 597 bp, Salmonella enterica; identical to SEQ ID NO: 88973

SEQ ID NO: 90228 - DNA, 1398 bp, Salmonella enterica; identical to SEQ ID NO: 87632

SEQ ID NO: 90229 - DNA, 597 bp, Salmonella enterica; identical to SEQ ID NO: 87633

SEQ ID NO: 90230 - DNA, 1380 bp, Enterobacter hormaechei subsp. steigerwaltii; identical to SEQ ID NO: 87572

SEQ ID NO: 90231 - DNA, 636 bp, Enterobacter hormaechei subsp. steigerwaltii; identical to SEQ ID NO: 87573

SEQ ID NO: 90232 - DNA, 1269 bp, Sphingomonas sanguinis
atggccccgcagcgcctgggtcaggggagaaacatggtcacgcttcgggatcttgagttactcgaacgagggcgtgacgagtccgttgcgctgctcgtcggtcctaatggctcggggaagagtacgttcctacgtggtctagcggagactcacaaacaccagaacgttatcgtcgtctcgaataccccgcacgaccggttcgcgcgcatgcgcggcatccggcggatatcggcgggccggtccgatcacaccccacccaacatcgtgaagcgggccgtctcccgatcgctcgacgaagacgactcaaggtttcaccaggtaagcgcgattatgtcctattgcggatacgagccgcggttcggcttcgcgatcgagcccggcaagcgctacggctcgacgatcgacgatctccggatggcggcgttcgcagcgcgcgcaccgggtcccggcggcggcgttcaggacacgatagatgacgtcgatcgcaacggcgaactcgatcgcgccttagagttcctgcgacgtcatgcctcgcgcgagcctgtgtggattgaggccggccggtccgattaccggttcagcctgtcccgcgactttgtatcggtcctgcgatgcgaggtcgagctgaggcggcataaggtaatcggccgccttgacgtcctgctggaacgtgaggggccgaggcggggggggatcgagatgcacctggcgagttcgggtcagctagcgttgatctcgtcgctgctgttcctgatcaccgaggcgggaccgaacccgatcgtcctgatcgatgagccggagaacagcctgcatccggcttggcagcgcgagtacgttgataagctgctcgcggcgatggcctaccgcgatgcgacgatcatcatcgcaacgcacgcaccgttggtggtgacgggcgcaatgaacgacggctccgcgcccgtggcagtcttccgcgtcagcggcggccagccgcagcgcctacagatcgacgcaaccgtttctcgcagcggaatcgaggagatcctttgggaggcgttcggcgtcgtgacgcccgcaaatcactttgtcagcgaggaaatcgttaagtccatagatcgcttcgagaagagcgagatcgggaaggaggaggtcttgacgttggtggacaacttggacgagcgcagcttcgacccgcgtcagaagcgcttcttcgttgcggtgcgagggctcgtcgacaaggtcgagcgggcgaaggacggcatcgacgaagagggcgaggacgttggttga

SEQ ID NO: 90233 - DNA, 657 bp, Sphingomonas sanguinis
ttggttgatccttatctgccggcgctcgagacgtttatcttcaacgccgaggagcaggcagcgatcggatccgccctagagaccgacaagccgtgggattggaagccagggggcgacgtcgaagcgtccctcgtgtctgtcaaatcaaagatccgcgacctgcacctcgcacggcataaccaccgctgttgctactgccgcttcccgctccacggcggcggtcacttcgtcatcgaccgggagcacgtcttgcccaagtcggtcgaggctttccggcacttatctttcaccgtttggaaccttggggcatcgtgcaagcgctgcaacatgcagtataagggcgctgacgtcgacttcgtaatcgactcaggctgcgccgatgccctccagcaaagcgcaaactaccggctgatccaccccaacttcgactcattcaaggaccacatctcgtttcggctggaagcggacgacgacgtgacgctcattaagtacacaaagcgtccggggagcgataaggccgtatacacctacaactactttggtttgagggcgcgcgaggtcagcgcggcggacgaggctcagggattagacgtgcctcaacagcttggggaatgggcgaccaaggcacaagagatggcccgagaatacgggcagtga

SEQ ID NO: 90234 - DNA, 2271 bp, Sphingomonas sanguinis
atgtcacgcgcagcgcaatcgggtcgggaacgaatgcgcgaattcttttcgcttccggcaaagcgacgcgcgcagacaccggttccgccgccgggcctgcgcagcgacgatagcgatcttgtcaccgcgctggctcgaatgtcgtacggccgctgcgctttctgcgaggctgaggacgagctagttgcccatcgtttgcggcccgccggaaacgcgttgccgcaacgcgaggacagccggaacacgagccatctctattatttgtggctcggcgatgcttggcagaatttctttccgatctgccgcggctgcataccaaaagagccacaatttcctgttgcgggggagcgcgccaagcttcctcaaggcccccagcttaacaattatctggaacgcggcggtggtgtgtggccgtcctacccgccgaaggaggagccgctgctgctcgatccggtcagcgacacgggcttcgagcgacatctcatccccaagctgaacggcgaaatcgtcggggaatcgcggcggggcgagctcacgacggtcatctatgagctaaaccgcgacgatcgaaagggccagcgctaccaaacctatgccgcgcggatcgaccggctcctgtcaatggtccgcaatgagccagaggaaacgcagggcaatgactggcagcacctgttcgatttccagaggatggaattcggcggcagctggttcctgatgctgcggcgtatcgcgcgctgggtcggcggatcgaggggcgtgaaatggcgcacgtcgcgtgcccatattcggaccttcttcttgaagctgtctgcgacgggtgatgcgcccgatcgcgtgcgcgacgcgcttgccgcgatcgcgcgtgaggatgaaggcttgcgcgcgggtcggtggcggctagctgcgatctattcgctgcggacgcccatcgccgcagtggagatctccaattttaaagcgatcgagaggctccaactccgattcaccgcaccgccaccacccgatctcgatatgccgggaccaacggcgccatcactcgtcattctcggcgagaacgccaccggcaagagctcaattctcgaagccattgctcttgcgctgaccagcgggccggcgcgcaccgcgctcgaattgccttggtcgcagcttgtgctcgatgcctcgcaaatggggggagaccgtaagacgagtcctaagcgcgcggatatcaaggtcaccctggtcaacaaccagtctatcagtctgacaatcgatcagggctcgccgattgtgagaagcgagttcggcaatcaacaggttccggtattcgcctatggcgcgttccgccgatatcttatccagtcacgccgttccgcgcctcacaagcacatccgtaacctgttcgacgggagcacgctgtccaaccccgagccatggctcaaaagcctgcccgcggacactttcaatctggtgatccggacgctccacgacttgctgtcgatcgagggcgcattcgatgtgatccagaaagtcggcagccagctgcggatggtcacctcgatcaccgatcccgacggccaggtgcgctacaacaaggcaccgctgcaatcggtatcgtcgggctaccgctcaatgctggccatggtgtgcgacatcatgcgtggtctgctggacccgcaagtctatgagaagttcgagagcttcgagaccgcgcagggcatcgtgctcatcgatgagatcgaggcccatctgcatccacgctggaaagtccaggtgatgaccagcctgcgcaaagccttgccgggaatgactttcatcgtcaccacgcacgatccgctgtgcctgcgcggcatgagcaacggggaagtctgcgtcctccagcgcgtggcgtcgaatgacagcgaccaggcaagcaatctgccgatcctcgttgaacagatggcgggcctgccggaagtcgccaacatgcgcatcgagcagctgctgacctcggatttcttccagctactgtcgagcgatgacgcaagttccgatcgccggctcgcgcacatcgccgagttgatccgaagcagggaagacaagagcctgcaaggcacggatgccgtggtcctccagaaattcgaagaggacatcgcaatggcgctgccggtgggctccagcgaagtccatcaactcgtgcaaggcgcggtagcagagtatctgcagaagcgccgtgatgcgagcagcaagacattggcaaaattgcgagacgacgcgaaggccgagatcctgcgcgcgctcgagacgctctga

SEQ ID NO: 90235 - DNA, 933 bp, Sphingomonas sanguinis
gtgcgcaaggtcgcacgcgatgcggtgcatgcccctaagtccctcctgccaggggaggcgggaccgaaggaattgcttgccgccgtggagcatcgcggcaaaccacaaccgaaaaaggcgttcgaatataaggcatataagcgtgctgatgtccggcttgcgcttgaacagctcttccacggcaaatgcgcttactgcgaaacatcctactccgcgaccgcgccagtcgatatcgaacattatcgcccgaagggcgcggttgcggaggatccggcgcatggcggctattggtgggtcgccatggactgggacaatctcctacccagttgcatcgactgtaaccggaagcgcgggcagcggatcttcgaggtctcgaccaacctcgaagagcttgcgcgcacctccaaaccggtcagcggtcaagctggcaaaaaggatagttttccactcgccggctcgggtgcgcgggcagtctacaacgcaatggacttcagcgacgaacatgcccttctgctgaacccgtgtcgcgacgacccggccagtagcctagcctatagctttgatcccaaataccccgccgggttaatacttcctgctggcgaccagcctcacgccgagcgcggcgctgtgtcgatccaggtctacggtctcaaccgccagaagctggtcgaggatcgcacgcggttgttgcgccgtcttgaatatctcggggacatggtgatcgatctggcctcgtcgatccaggaactggaagaccccgcagtcgcagcgacgctcgccggaacacccgccgcgggtgtcgccgcccgcctaagacttctccgggatcgcaccctcgccgagatcaaggccacgaccgccgatgacgcgccatattcgtccatggcgagagcctggttcggccggttcaagacgcagttcttgacggcgtga

SEQ ID NO: 90236 - DNA, 825 bp, Pseudomonas psychrotolerans
atggtcgcccgcgctctgcagcatctattcatggtcgaaggagagcttaatgtcatcctccctgatcgggcgaactcgcgatgcatggtggtaacccaagtgggttcgggtgatgagacccatgagatccatacgccgctgtcagtagtgtcgtctggatttcgatccgtcctagcaatggtctgtgacatcttcgagggtttgctaaaggagaaagtggtcagagaacgtggcttcgcggccgcggaagccataatccttatcgacgaaatcgaggctcatctccatcctcgctggaagatgcagatcatgacggcattccgacgggtctttcagagcgcgactatcctcgccacaactcacgacccgctatgtctgcgcggcatgcatgatcgagaggttcttgttctcagccgcgtccgacgcgaaactgtggcggatgggcaggtccccgttgtagtcgaaacgctttacgaattgcctaacgttgagaacctcactatcgagcagttgttgacatctgacttcttcgcaatgttttccacggattcaccggacgccgaacgcaagctagccgatttaggagcccttctggcaaaacgcgcgggcggtgggcaattaaacgctacggagcagactgttatcggccaactggagcgcgaggtgattgacgcgctacccttgggatcttcagaagtgcagcgtctggttcaggaagcggtagcggagtatttagaaaggcggcgtagcgtatctgcgacgaagttggcgagactacaaagggatgcgcgacaacgcattattgctgcactcgagggcttctga

SEQ ID NO: 90237 - DNA, 1002 bp, Pseudomonas psychrotolerans
atgcgggcagtcgaccggggcaataaacctcctccagccgcattgagcgtaccctcgggcacgccgaagctgagcgagcttgaagccgctagatcgcacatgaatgaagtattggcgcctggcgtcaaacgatctacgtttacgttcagtaagtataagtcggacgaagtaaaacgtcggcttgaggagctcttccacggaaagtgcgcctactgcgagtcattttatgcgtcgcaggcgccggtagatgtggagcactaccggcccaagggcgcagtagagggcgaaccgagccaccctggttattggtggctcgggatggagtggacgaatctgcttcctagctgcatcgactgcaatcgccgtcgcaagcagcgtgcgccgttaggtacgagcaatctaagcctgctctacaaggcaacgcaatcgggcaagaaagatagctttcccattaagggcaggcgcgccagggaagaagggcatcatttagatgctgaagaggccttcctactcgatccaacccgagacgaccctagcgagcacctcgtttattggcttgggaatgacaaggccggcggcttggtgctaccacgcagagtggatatcgcggtaccgatggattttaggctggcggcagtcggtgagccgtctgatgtcgctgccaatgcggggaccgatgacctaagcgttcggggcgcggtgtcgatccaggtttacggcctcaatcgtttacgactagtccaagagcgcgcacgacttttacaacgcttgcgtttcttggaatccatgtctgtagagcttggtaacatcgtgcaagatcttgaagccgctaggctgcaggctatacccgctgtgactaaggcaattcgcagccttaaattacttcaaggaaagattctgtccgagatgactggtttagctgcgccggaaatgcccttttcgacgcttgccgccgcctatctcaccgacttcaagaagcggattattacttctggagcttaa

SEQ ID NO: 90238 - DNA, 1398 bp, Salmonella enterica subsp. enterica serovar Senftenberg; identical to SEQ ID NO: 86590

SEQ ID NO: 90239 - DNA, 597 bp, Salmonella enterica subsp. enterica serovar Senftenberg; identical to SEQ ID NO: 87603

SEQ ID NO: 90240 - DNA, 1398 bp, Salmonella enterica subsp. enterica serovar Mbandaka; identical to SEQ ID NO: 87652

SEQ ID NO: 90241 - DNA, 597 bp, Salmonella enterica subsp. enterica serovar Mbandaka; identical to SEQ ID NO: 87653

SEQ ID NO: 90242 - DNA, 1398 bp, Salmonella enterica subsp. enterica serovar Senftenberg; identical to SEQ ID NO: 86590

SEQ ID NO: 90243 - DNA, 597 bp, Salmonella enterica subsp. enterica serovar Senftenberg; identical to SEQ ID NO: 87603

SEQ ID NO: 90244 - DNA, 1398 bp, Salmonella enterica subsp. enterica serovar Senftenberg; identical to SEQ ID NO: 86590

SEQ ID NO: 90245 - DNA, 597 bp, Salmonella enterica subsp. enterica serovar Senftenberg; identical to SEQ ID NO: 87603

SEQ ID NO: 90246 - DNA, 1233 bp, Salmonella enterica subsp. enterica serovar Javiana; identical to SEQ ID NO: 86616

SEQ ID NO: 90247 - DNA, 675 bp, Salmonella enterica subsp. enterica serovar Javiana; identical to SEQ ID NO: 86617

SEQ ID NO: 90248 - DNA, 1398 bp, Salmonella enterica subsp. enterica serovar Senftenberg; identical to SEQ ID NO: 86590

SEQ ID NO: 90249 - DNA, 597 bp, Salmonella enterica subsp. enterica serovar Senftenberg; identical to SEQ ID NO: 87603

SEQ ID NO: 90250 - DNA, 1398 bp, Salmonella enterica subsp. enterica serovar Senftenberg; identical to SEQ ID NO: 86590

SEQ ID NO: 90251 - DNA, 597 bp, Salmonella enterica subsp. enterica serovar Senftenberg; identical to SEQ ID NO: 87603

SEQ ID NO: 90252 - DNA, 1398 bp, Salmonella enterica subsp. enterica serovar Senftenberg; identical to SEQ ID NO: 86590

SEQ ID NO: 90253 - DNA, 597 bp, Salmonella enterica subsp. enterica serovar Senftenberg; identical to SEQ ID NO: 87603

SEQ ID NO: 90254 - DNA, 1398 bp, Salmonella enterica subsp. enterica serovar Senftenberg; identical to SEQ ID NO: 86590

SEQ ID NO: 90255 - DNA, 597 bp, Salmonella enterica subsp. enterica serovar Senftenberg; identical to SEQ ID NO: 87603

SEQ ID NO: 90256 - DNA, 1410 bp, Salmonella enterica subsp. enterica serovar Worthington; identical to SEQ ID NO: 87624

SEQ ID NO: 90257 - DNA, 597 bp, Salmonella enterica subsp. enterica serovar Worthington; identical to SEQ ID NO: 88501

SEQ ID NO: 90258 - DNA, 1398 bp, Salmonella enterica subsp. enterica serovar Senftenberg; identical to SEQ ID NO: 86590

SEQ ID NO: 90259 - DNA, 597 bp, Salmonella enterica subsp. enterica serovar Senftenberg; identical to SEQ ID NO: 87603

SEQ ID NO: 90260 - DNA, 1398 bp, Salmonella enterica subsp. enterica serovar Mbandaka; identical to SEQ ID NO: 87652

SEQ ID NO: 90261 - DNA, 597 bp, Salmonella enterica subsp. enterica serovar Mbandaka; identical to SEQ ID NO: 87653

SEQ ID NO: 90262 - DNA, 1410 bp, Salmonella enterica subsp. enterica serovar Worthington; identical to SEQ ID NO: 87624

SEQ ID NO: 90263 - DNA, 597 bp, Salmonella enterica subsp. enterica serovar Worthington; identical to SEQ ID NO: 88501

SEQ ID NO: 90264 - DNA, 1398 bp, Salmonella enterica subsp. enterica serovar Mbandaka; identical to SEQ ID NO: 87652

SEQ ID NO: 90265 - DNA, 597 bp, Salmonella enterica subsp. enterica serovar Mbandaka; identical to SEQ ID NO: 87653

SEQ ID NO: 90266 - DNA, 1398 bp, Salmonella enterica subsp. enterica serovar Senftenberg; identical to SEQ ID NO: 86590

SEQ ID NO: 90267 - DNA, 597 bp, Salmonella enterica subsp. enterica serovar Senftenberg; identical to SEQ ID NO: 87603

SEQ ID NO: 90268 - DNA, 1398 bp, Salmonella enterica subsp. enterica serovar Mbandaka; identical to SEQ ID NO: 87652

SEQ ID NO: 90269 - DNA, 597 bp, Salmonella enterica subsp. enterica serovar Mbandaka; identical to SEQ ID NO: 87653

SEQ ID NO: 90270 - DNA, 1329 bp, Aeromonas schubertii
atggaaatcaaacaactcaccctcgacaatctggggcgttttgagcgtcttgccatcgagtttgcccccacgcagcgggtcaactcgaaggtaactgtgctgatcggcaacaatggcgcaggcaaaacctcggtactcaaatcgttggcaacctcgctcagctggtttgttgcccgtttgcgcagcgacaaaggcaacggcagccccatcccggaagaggtcatcctcaatggtgccaataccgcagtggtctctcttcaactacacgatcagcagcgcgaataccgttggtcactcaccaggacccgtgcaggccgcaagagcaacgagcaatccatattggttgatgccagcaagctggccgatgagtatcgagcacgattgacagagcaggaaaatgtcagcgtgcccctgatcgccttctatcctgtcgagcggggggtgctggatatccccctcaagatcaaagagcggcactcattcttccagctcgatggctacgacaactccctgaatcagggggtcgattttcgccgtttcttcgagtggtttcgcgaacgggaagatagcgagaacgagtcggtgatccccgaggatgtattgaagcagctagagaagacgctcgccccttctatctggcaaaccttgcaacagcagcaagcctcggcccgggatcggcagctgaccgccgtgcgcgtggcgatagccaactttatgccgggctttgaaaatctgaaggtgcgccgcaagccgcgcctgcatatgtccatcgataaagagggtcagaccttcaatgtgttgcaactgtcgcaaggggagaaatccctgatggcgctggtgggcgatatcgcccgccgcctcgccatgatgaatccggagctggaaaatcccctgcatggcgatggggtggtgctgatcgacgaggtggacatgcacctgcacccgcaatgggcacgcaccatcatccagcggctcaccgataccttccccaactgtcagtttgtgctgaccacccactcccccctggtgatcagcgattgcaaagatgtactggtctattcgcttgataacggtgaactcactgaagtgccgtcccaatacggtcaggatgcgaactcggtgctgctggaggtgatggataccgctattcgcaatgagcgggtggcaaaccgactcaacgacttgctcgatctgattcaggatcggcattttgataaggccaatgccctgctggccgagctgaaggccgagctacctgccaacaatctggagctgaccaaggccagcctgctgctgcgcaaggaggagctgcgccgtgcgcaagattga

SEQ ID NO: 90271 - DNA, 651 bp, Aeromonas schubertii
gtgcgcaagattgacaaaggacaagagcccgcgagcctggcggcattcaaacgtcaacatcctcatgctcgatatcacgacctacccaacgatgaagagggtcaggcgattcgccagcatatccgagaggcttgtgctgctgagcaattccatctctgcgcctactgttgccaggccatcagcggcaccagtgaagacaccatgaacgagcatgttgaggcgcgggatctcgcccccaaccgcaccatggatttcagcaatctggtagccagttgcaaaacgccgaagcagtgcgatgccgcccatggctcgcagcccctgccgttgaccccgctgatgcctgagtgtgaaaccgagctgcgctttaaatggagtggccgggttgagggggtgactgaaagagccaaagaggcgatccgggtactcaatctgggtgacacggagcaaagcaacaaggtgctggttgccaagcgcaaacagctggtggatagcctgatttggacccactatggcgacgatcagcaggcactggcgctggaagatgatgcacaactgctggcaatgctgatcgaagatctgtgccaacccaaacaaggcaagctggagcccttcgcacctgtactggtgaacatactgcgcagtcagctctag

SEQ ID NO: 90272 - DNA, 1242 bp, Myroides odoratimimus
atgaaattaaagaagttatacttaaagaatattggccctttcttagatgatgagatagaatttgctactaacgaaaatgctggtagccaagtaactattgtcactggagagaatggagcaggtaagactattatcatcgatgcgattagaaagatgtttttggaatatgagggagatagtattcgttcaataagaagaggtaaggattttttgttgaatatggagttagagttgaatggtgctaacttgttattggaagcaaggttaaatgaaggtaatagcaaagagagttttgatatttataatagaggagaaaagtatgagttttttctaaaagcattatttgattcatcatcagcaaaaggaaataaatggatacttaattattggacatcccagaatgatcaccaaacatttagtataaatactttaggctttattaaacttgaagggtatttaagaaattgcttagatggtattcaacgaaatacagatacaacacagatagtaactttctttgattattttaaatcctctagcaatcctacagagagagcagagggagagtatatctatgaagttttaaagaagatatttaagattagtcttttagacggggagctgttacacgtagagcgctctactttcttacctgtcattagacagaatggagtggatatcacgatagagaagttgagcagtgggaatttgtatttggtacaacgtttaatctctttgttaagtcagatgtattctgtctataagttaaatgatttacctttagcagaactttgtttaacacctggtgtgttgttaatagacgaagcagagaatcatttacatcctaaatggcaaaaaacattcttaaactctatcttagagttgttccctaatcttcagattatcgtgactacacattcaccatttatcgtaggttctgttgaaggagctaaagtatatgtgtgtaaaccagagataggttactcaaagataatagatgagacaagtaagtattcaaataagcctattgaagaaatcttgagttctgatgtttttggggagacaagttcttttgcaaatgtagagattgacaaacttttaaaagaaagaattgaagcaatcgaagcaggtgataagacaaaagaaaaagaaatagaagaaaagttaatagctattaatccacagtattttgggtatttgaatttagatgatacacttaaacaattattagaaacgaagtaa

SEQ ID NO: 90273 - DNA, 645 bp, Myroides odoratimimus
atgaggtatattgatcgattagataaacctcagaagctagtggataatgaggagaaatggttagctaagtatttggagaagcgtgctctgtcagataaggtaacgcctcatactagtcagtatggacataaagaggtaaaggagactttagctagaagtagtttttataaatgcttttatagtgaggttaagttcgctgatttaagtgaagcacaagtggatcattatgtagaagtctcagaagatcctactaaagcttttgaatgggagaatctatatctatcccataaagatagtaatgttggtaaaataactaatagagctttgcctaatcaagattgtttagatccatgtacagcaatagatgctgagatagaagagcatttaggttttgaagatgaggttgttattggcttaactgaaagagggagaaaaacaatacagaaatatcatttgaataaacctctatacagtaaactaagaagtacagaacttagaaaactagataagattattagacaaagagctttatcagagttaccttttgatgagaagtttaaggctaagctacgaatatttgctaatcctgatcaagcattttcgttgatgtttaaaaagttactcatagaaaatggtttgctgtaa

SEQ ID NO: 90274 - DNA, 1608 bp, Elizabethkingia anophelis
atgaaaaataaagaagaaacttataaatgcaaaggctttaagcttttgtctctgagtttaaaaggtaactctctcactggtaaaagtgatcttgaatatgattttgttgatgaaaatgatgagcaaaacattatttatacgactgtacttattggagcaaacggcactggaaagagtaatttgtttagaattgttattgagctatttaaggagcttcacgatcttagtttaggcaaaaagcgttcttataaggttgatggaaattttaaattaaaattttttttggatggggatatttttgaatatacaaatgagagtgatacggaaagtgaaaacgggaatcaagcttttcttttgcgaaatggtagccaagtagattttgatgaagctcaatttcccacagcaattgtagctaattcaattatgcttacagataaattcccattttatagaaaagaaaataatgacaaaggtgaaaaagtagatgcatttccaatatataaatatttaggagcaagagatcttccacaaagtgcaagtacaagagcttatgtaagaagaacggttgaatttattgttgaacaatttagaaagggaaatagcagagaatcaaggtttattgacaacctaagaagagcaacagcttttctggaacttgataactatatagatattatatataaacctttaattggtaaagtattctttagcggacatttagttccatcatctttagatgaatactttgaacagattagagaaagatatcaaaatagtattcgtccaccattcaaactaaatcattatttaaaaataaaagatgataccaagttaattcgatcaatatgtgatttctgcaatggatttacctatataaacggtgcggggacatcttcattgcgattagcctcaggtacagaaattacttataatcttatcgagaaagaatcatttagaaaattaagtgatgagtattttctgttagaacatatgcgtcaactaggtatcgtttcctctcctgaaataggtttaaaacgaaccggaggttattcattacaggaaagtagttcaggagaatatcacttcttctcctcagttgttggcttaatggccacagtcaaagcaaagaatagtctaattataattgatgagccagagatcagtttacatccaaattggcagatggcatacttgtcgtttttacgagacctatttagtcattctgactatgcaaattgccatatattagttgccactcattcacattttttgatttccgatttaaaaggcgatagttcaaagattattggtttaaaaagagctgacagtggaatcgaaattattgatttgcctaaagaactaaatacttttggttggtctgcagaagatgttctgtataatgtatttaatgtagcctcaacaagaaacaaatttgttgcagaagatattgctaatattttaaatcatttatcgtccgggaaaacaaataaaatcaacaaattatctaaagaaaaatttgataaacttctctatttagaagctgcactaaaggaaaatgatcctttgaaaaaagttgtaaaaacaatcttaacaaaaatttctaaataa

SEQ ID NO: 90275 - DNA, 669 bp, Elizabethkingia anophelis
atggcagtacctcaagattatatatttaggataagagatacttatgttagaaccctagccgacgatacagaaattgacaatgatttaaataacaataaaaaatggtctgaaggatataaaagttttaaaagcaatattagagagcatttgagaatgcaacataatggacgatgtgcattttgcagatgcagagtaagtactgggacaagctggtcgaacttagaacatattgttccaaaaaagaaatatcctcaatttgagtttttgcctcaaaatttagcgtactgttgtaccaggtgtaattttggaaaaggtgaaggtgttacactttcaaatccgcttcaagataggacacaacaattgtatccagataattctgctggttttaacattgtcaatccctactatgataattttgaggatcatattaactttattgatgacgtaataattgtcgccgaaaataactctgataagggaaatgagacaataaaattctacaaactttatcgccctgaattggcagaagagcgggcatttgaattaagattagatcaagaaggagtaagtcatcaattactagccaggttaacagaaccgggacttgagcaagaagtagtaaatcaaataaatgcaataatctcacgaattcctacttggacattgtag

SEQ ID NO: 90276 - DNA, 1563 bp, Myroides marinus; identical to SEQ ID NO: 86720

SEQ ID NO: 90277 - DNA, 789 bp, Myroides marinus; identical to SEQ ID NO: 86721

SEQ ID NO: 90278 - DNA, 1299 bp, Tenacibaculum dicentrarchi
atgaagatttcaaaattaaaaatagcacagtataaacatctagaaaacctagattttgattttacgtatcaaagtggaaaacgaaaaggtgagcctttagataaaatctgttttattgggcaaagtgctactggaaaaactaatttattggagttgttattttcacaaatagaacaagttttaaatcaaaaaactatctctggatttcttatctatagaacttttcttgaaaaagaactagatggcgaattaattataaattttgacacagaatataaagttaaaaacggagtaacgacctataaagaaaaggaatataaacacaaagatataggtggtgaagtcaaagacttgatgccaaatgataaaaaatcaaaattacattatttcaaagctaatattatttcagatgaaaatattgaaatttttacagaaaatccaatagatttaattgaaaaacaccctaatataaccaataattacaaagataaattagttcatgtttttgataataatattgataaattagtatatgtttttgataataaggttccaaaagaattatggttatcgcttatagaagacattcttgattatcgaaagaagtttactcaaaaaatgtcagaattgattcataaaggtttattaaacgacccaaaaaaattacaagctgaattttcaaaatggcaacaagaaaatcctaataaattaatggattttgctgataaatttaatccgttattagaaaaattaaatttagaagttgatttagtgaataccgaatattccattcctatcatcaataaaagaaacgaagaaataattccgatacaacacacaagtaccggaactaaaggattattgctttcttttttgccgttatttaaattaaacaccaaagatgccattatattaatggatgaacctgagcgttctttatatcctgatatgcaaatgtctttgatggaaaattatcaaaatcttgcgcccgatgcgcagtttattgtagcaacacattctccttttattgccgcttcttttgaacctgaagaacgctttattttatattttgatgaagatggtaaagttgccgttaaaagaggaagttctcctattggcgatgacccaaacgatatgttaaaaaatgattttggtgttaactattacaataaacacgggcagaatgcttataaaaaatacctgaatttaaaacaggctattccaaaggaaaaagatactgaaaagaagaaaaagatgctttttgaatttatgaaattaggagatacttataatttttag

SEQ ID NO: 90279 - DNA, 597 bp, Tenacibaculum dicentrarchi
atgaaaagaagtatcaaaaaagtagactctgaaattataaaagaaaacttaaattatattgttggaaattctgcaaataataaaaagatttctaatattttatacaaagagcaaaaaggattttgtgcttataccgaagaatatattggcagaacagatgcgaaagatatcgaacattttaatccgaaattaaaaggaaaagaagcagattcttatcaaaattggtttttagtaaaacatcaatggaataaagaaaaatcttctaaatgggagaattttcaacctattttacatccaacagactccacttttgaaaatagaattttatacgaagatggcgattattttttagctaattcaaacgatattgaagctaaaaatctaattaatttactcaaattagatgaccttatgctagctgataatcgaaaaaaatatatcaagaggacaaaaaaatatatgaaactttctggtgaatctgctgataatttctttaaaacattaattaacgattatattaatggagttcattatttaagagctatcaacgaagaatttaatatcaatatttgggaattacttcctgaaattcaataa

SEQ ID NO: 90280 - DNA, 1356 bp, Escherichia coli
atgaatatccgcacgcttaagctcactaatctggggcggtttgaagaacttgacgttcatctggctccagtggaggagttcaagagcaatgtgaccgtttttattggtaataatggtgcaggtaaaacatcaatattaaaatcgttggcaaccagcctgagttggttcgttgcccgagttcgtactgaaaagggtaacggtagccctattcctgaagacgctattctgaacggtaggagttcggcgacaattgaacttcaggtactgaatacgcatccagcgacggaggccgctacgccctaccgttggttgcttgccagaacggccagtgggaaaaaatcgaccaccgcctccagcctgcaagaggccagccaattggctgcgttttatcgagatcaatacacccagaatagcggggcatccttcccgcttatcgccttctatcccgtagaacgtgtcgtgctggatgtgccgttgaaaataaaagaacgtcataattttttgcaactggatggctacgataacgccctgaatcagggtattgatttccgccgtttctttgagtggtttcgcaatcgcgaagatgcagaaaatgaatcgggcttaccccaagacgttctggataagctcagtaccaggatagatctcgataacgccgtcttaaatgcattaacggcaatcatggcctcgtcccgggatcgccagttgaccgccgtcagaacggccattagtcgctttatgccagggttcagcaacttacgcgtcaggcgtaaacctcgcctgcatatgtcgatagataaaaatggccagacactgaatgtgctgcaattatcgcagggtgaaaaatcactgatggcgttagtcggcgatattgctcgccgcctggcaatgatgaacccgatgttagaaaacccgctaaacggcgagggaattgtattaattgatgaagtggacatgcacctgcatccaacatggcagcgtacaatcatccagcgtctgacgacaacattcccacattgccagtttgtcttaacaacccactctcctttagtgatcagtgattgcaaagatgtgctggtttattctctggatgatggcgaattaacgcagctcccgtctctgtatgggcaagatgcgaatactgtgcttttgaatgtgatggatacggatattcgcaatgcgacagtggcagaaaaacttaacgatcttctggatctgattcagaaaaacgactttatcaacgctaacgctcttctgaatacgctaagcctggaacttcctgaaaaccatcttgaactggtgaaagccagaatgcttctgcgcaaacaggaaattaaacatgcgcgaaataactaa

SEQ ID NO: 90281 - DNA, 660 bp, Escherichia coli; identical to SEQ ID NO: 87575

SEQ ID NO: 90282 - DNA, 1356 bp, Streptomyces acidiscabies
gtgtacgtaacaaggctgaccctcgacggggtccgtggcttccacggaccccgcgcttgcgatctcgacttcgcgcggcccggtggcggatacgcggggtggacggtgctcgcgggacgcaacgggtcggggaagacgacgctgctgcgagccatcgccatcggcctcgcgggaccgcgtcgcgctcacaagctggacggggatctgcggtcacaggtgtcccacggcgaacccggcgggaagctcagtgtccatgtgctgcccgacccgttcgtggacactggcgaggggatgtccgactcgttcgaggcgtcggcgatgtgggagccagattgggatgggccgagtgaggcgccggtcgccgtcgtgttcggcccggtggacttcccgcggcgggcccgtgaccgcctctggtcggcggcccctcctcccggctggttccacgccggatacggccccttccgccgcatgaccggcgtcggcctgtacgacaggacgtcaaagccctcggaccgcgccgcagctctccgcaccctcttcgaggaacagtccgccctgaccgaggcgttcgactggctgctctccgtccacctccaggcactggagaaccgtcccggtgccgccgacctcaaggtcggcgtcctcgcactcctcaacgacggtctcctccccgacgattaccgcatcgaggacgtcaactccgagggcctgtggctcaatcggcgaggcgaggcaggctccgaagggccgctgacggagctgcggcacatgagtgacgggcaacggaccgtcgtagcactggtgttggacatcgtgcgccagatgcacaccgcgtacggcgagatcaccgtcgacgtccgggaccagcacccctgcctcccgtaccccggcgtcgtcctcatcgacgaggtcgacgcccacctgcacccctcctggcagcaacgcatcggcgagtggctcaagtcccatttcccggcagtgcagttcatcgtcagcacgcacagtccgtacgtctgccaggccgccgaccccggtggtctgatccgcgtgccgggaccgaccgaggacgtgccacccgcgccggtctccgaggaactgcggcaacgcatcgtctacggcaccggcgacgacgccgtactctccgaactcttcggcctggacacgccgtactcggagcgggcgcgcgaactccggcaggaactcgtcgagttggaggcgagagtggtcaccggggaggcgacggacgccgaagaggcgcggcatgcggcgctgcgggatcggctgaagagttcgcctcgtacgcgggccgtcgagttgcaggcccggctgaagcaactcggagtgctcgacgaatga

SEQ ID NO: 90283 - DNA, 756 bp, Streptomyces acidiscabies
atgattcgggtgcggcgtatcgaacttccgcgtcaactcgccgtaagagcagagcagttgaccgagcgcatagccggaacggccggagaggcacggacctccgaggccaaggggctgtggaagcacaccacgcaccggcgtgaactcgtcaccccgctgcgggcgttgctgaacgagatggctcacggcaaccgctgctgcatgtactgcggcgacgacctcagcaccgacatcgaccacttcgagccggtggccgagaacccgttacgcaccttcgactggctcaaccacctgctgtcctgcacggcgtgcaacagctcctgcaagagggatcagttcccgcgcgaccccgagaccggcgacccgttgctgattgacccgacgaccgaggaccccttcgaccacctctacctgagcctcgacaccggcctgtaccgcgggttgacggagaagggccggcagaccgagcgggtgtgcggactcaaccgggacgatctgccggaggctcgttgcatcgcgcgggacggggtcgtcatgtgcgtggaggggtggctgtcgggccgggagaagggcgaccaccggaagatggccatcgccgtacggaccgtccgcaaccaacccttcgccgacgtcgcccagtttatgctcaggcaagccctgctgccgaaggcgtccgtcgcgttcgccttcgacctcggcgaggagatactccggcacctgcgggacccggagctacgggccgcgctgctgatttga

SEQ ID NO: 90284 - DNA, 1170 bp, Myroides odoratimimus
atgtttttctttttttttgatcattattctgacttaactctaaataaggaggctaacgaggatgttaatatactcgtaggagttaatggtgttggaaaaagtactactttaaatgaattagcaaagtttcatataaaaaataaaaacaatgttattgttataagtaatactatttatgataagttttcttttagaggaagtccaacagctcataaacttaaaagtaactatgggaaatctatgttaaaaaacgtatttgatcaagtacttcttaaattaactaagaatgattcgaaaattattgagaatattaggaaaatacttcagtatataagatttgaattagaaataggattatctataaaaggattacatttagattatgagagattaatcaacgaatgtaatgagtttgaaagggatgaaaaaaatgatataattttttttattaatatgcttaataaagacattattgcaagaaatagtgaaattaataatgtctatcgtttgaacttggattctagtagttttaaatcaatgaaagatgttttttatttaaatattattcgatttgaaaaaaaactaaaaaaacttaaagtactaaagagaattgatattgtattgtataaagattctcagagtttctccttaaatgaaggtagttcaggagagttatcattgatagcttccttgttttttgttagtttacatataaaagaaaatagtattgttttaatagatgaacctgaaaatagtttacatcctaaatggcaagttgagtatgtaaaacaatttttagacttattccatttatataagccaaagattatattagctactcattcacctttaataataaatggtgcagaagttacaactgataaattgaatatttttaagggaaatacattcaggcaatttagaaagaaagaaaaagaacttaagaatgttgaggaaatctatgaagactattttgatattacaacgccagaaaacagatatatttctcaatatgtagtaaacaaacttaatgccttagatgagcaaaaaatcactaatgatgactttgaaaatgatatagaaaaattaattttaaattcttatgatgaagttcaaatagatgcacttaagcaaataatagaggttagtagagagattagttcaaattaa

SEQ ID NO: 90285 - DNA, 621 bp, Myroides odoratimimus
atgagtctagtatttacacaagatgaaatgaatactattacatttattagtaattctaatttgtctaatggagaaaagtggagttcaactcaactacttgctatcaaacgaaaaataaaagattattatttacgtattgggactagtagatgttgttattgtaaacgaaatttgttggcagagtttaatatggtaatagatatagagcatattttacctaaagaagcttttcctcaatatatgtttactatagaaaatttaaatgtttcttgtaaaaaatgtaatatgaaaattaaaggaagcaatatggatttcatagttaatgtaaacactattacagccaattttcgattatcaaatcagtattactttattcatcccaattttgatgattatttttctaatatgaaatattatgtaaaaattaagaatgataaaacatttactaaatataaaccaattaccccaaaaggtaaatattcatatgattattttaaactgaatgagtttgaagtaaatgattttaactctttacaaggaataaaggatcaattcaataatatgatggggaatttaggggcacaatatgatagattagttgatttactcaaaagagtataa

SEQ ID NO: 90286 - DNA, 1359 bp, Escherichia coli; identical to SEQ ID NO: 87574

SEQ ID NO: 90287 - DNA, 660 bp, Escherichia coli; identical to SEQ ID NO: 87575

SEQ ID NO: 90288 - DNA, 1338 bp, Xanthomonas citri pv. citri; identical to SEQ ID NO: 85890

SEQ ID NO: 90289 - DNA, 582 bp, Xanthomonas citri pv. citri; identical to SEQ ID NO: 85891

SEQ ID NO: 90290 - DNA, 1338 bp, Xanthomonas citri pv. citri; identical to SEQ ID NO: 85890

SEQ ID NO: 90291 - DNA, 582 bp, Xanthomonas citri pv. citri; identical to SEQ ID NO: 85891

SEQ ID NO: 90292 - DNA, 1338 bp, Xanthomonas citri pv. citri; identical to SEQ ID NO: 85890

SEQ ID NO: 90293 - DNA, 582 bp, Xanthomonas citri pv. citri; identical to SEQ ID NO: 85891

SEQ ID NO: 90294 - DNA, 1317 bp, Stenotrophomonas maltophilia
atggtttcaatcagaacggcggaggtgaggggttgtcagcttgatttgtacggggactacctaggcgacaatcgggttacgctagtcacaggtcccaatggagcaggtaaaacccacctgcttacatctatagcggcacgcatcaaaaatgatgacttctctaccggtcagattgacggaacggtcgcgaggctaatctgccaaacatacagtcctttttccagattctcgagtaaaggggaaaggggaatgagtgtggtgagctcatatcgcgacggggctgacgatctgtcattctatattccgcttggagttacggctgacaaggcgttcaggccgaggagggtgacgatcgatgtcctcgagcgagcaataataggcgtaagtcagagtgatgagagggctgagcacttctttaccttcttgaaggctgctgggtttctcgaaaaatgcgagctcgccttcaatttcctcccaaaggcgcagcagttccttgaagcactaaagagggatcctcaacaaaccagatggttgttggagtctaccgatgcgtttgcgcccctgcgtgaactaaagcgccaatgtgctggcgatgattggggggaactcgcgaacgttatccaaacgtccgtcgatacacttggtgaaacggttcgtaagggtacctttacagtccagttcggcagagatgtagccagctcctcgctgacatttgcgaggttccaatccctagccgtactccggcgcttgaaacttgtgagggtgtcaaaagcggcggtatttagggggagcggcgaggctctgagtgttgcatcggcgagctctggtgagcagcagcttctttgctctctgttgggcctcgccggaacactgaggaacaatgctgtggttctcatagatgagccggaacttagtcttcaccccaagtggcagatagactacgcaaagcacatggctcaactgatgagtattgttaaagattgtcatgtagtgatcgcgacccactctccgctaatcgctcaagggttctcaagctatgggtgcagggtaaccaagcttggtagtggcaggcatggtgagtcggctgaccatcaatttggctccgttgagaagatattggtcgatgtttttgagtcgcccgttccatctagcttgttcctggcggatgagatcatgcgtgctatttcagaagccgaagaacgtccggcggcggcaacggatgctatcgatcgtctcaaggagctttcaaaaacatacagcggaaattacgaagatcaaagcctaatcaatgaagcgataaggttgatgaagcaatga

SEQ ID NO: 90295 - DNA, 720 bp, Stenotrophomonas maltophilia
atgaacaatggactagttcggccgccgagcggaatggacattgggcttagtactgccaaatactttgcattagtctgcggacttactgatcgggtccactgggaggcgcctccagcgcacttggaggcggacctgcaagcattaaaggcgagcctcaaggattatttctactacgggcaagcacggcgctgttgctactgcggcattgagttgcctaataacaagcttgcataccagctggatcacgtaatatccaggaacgatagggcggacttcatggtctgcttgctgaacctggccgtcgcctgtggaccttgcaacggggcaaagtctaagaaggcagcattggcgaccgggattgttgcggccgaacttgccgtggttcctatgtcgtcggaagcgtacgcaattgttcatccccagttcgacgagtggggtcttcatctgaggttggacgagttcaatcgcgtgctgcatcgaacggaaaaggggcggtgcacgatcagtatctgtagaattgataaactgaatgcggctaggctctccgaccatttcgcagttggggatcggccaaaggtcgtagacctcgtggtaagggttggttcgtacaagcaaaagggtcggaagattgcggcaatccagttgctcgagaagctcgctgggcggggatcgcatagggcgcgggtagccgttggcagaatctcgcttgaagtgatgtaa

SEQ ID NO: 90296 - DNA, 1662 bp, Aeromonas salmonicida subsp. salmonicida; identical to SEQ ID NO: 86462

SEQ ID NO: 90297 - DNA, 864 bp, Aeromonas salmonicida subsp. salmonicida; identical to SEQ ID NO: 86365

SEQ ID NO: 90298 - DNA, 1641 bp, Streptomyces reticuli
gtgcggctgctgcgactgagccttccctcctaccggggcctgcgccacttcgagctggacctcgcgggtgccctcgacggcggccatgccattgccaccttgatcggccccaatggcggcggcaagtcgcgggctctgcacgcgctggccgagatcttcggtgccctgcaccggccggggcgccgtgcggggttcgccttcgagctcgactacgaggtccacgacaggacggtccgggtggttcagacgtcccccgatagctctcctgagctgaccgtgagtacctcattgggccggccggtccgtgtggcccgcgcggtgtgggcgcggcatctgcccgatcacgtcttcggctatcaggcgcatgcccaggcctcctggaccagcgagttcgagcagcaccgccgcttcgctgcccgtcgcatcggccaatggcggcggcagtggatgaaggacttcgaccagtggcgcgcacaccacacgccggacgagggagagctgtggaccgagcagctgaccctgcccatcaactgccccctgtacacgccggtgttcttgtgcacgcccgcgcacctgccgctcctgctcctcgcacagaccacccattggcccgactcgttcggcacctacctgcgccgccactcctacctgcagcgggtggcctccgcggtcctgcggatccgcgcgccacgcgccggacgcgccccgcacctggctgccctcccgtactggggcctgggcgggcccgcccgcaccctgttcgcggccgccgccgaatcggggcggttcggtctcatccccgacgccgacccggtggacggagctggcagccccgccgaagggttccagatcgtcctgggcaccgcggaggacgtccgcgccttccgtaacctcttcgacagcgacctgtcgatgttcggcctgctcgccaccctgctggacgccggctacctcaccgtcgacgtccgcctggacaaacccggcgcgctcaccgtcggcctggacgacctgagctccggggagcagcaactcctcaccattttgggcctgctgcgactgcagcggacacatgagtcgctgttccttctggacgagcccgactcccacttccacccggagtggagccggcgctggtactcctccgtgcgcagcgtgctgggaccgcatcagcactcgcagttcctcaccgccacccacgaaccgctcctggtggccaacatgacccgtgagcagatccgcgtcgtcaccaccgacgtggagggccaggccaccgcggtgataccccgggccaacccgcgcggacaaggcgccggcggcctgctgaccaccgacctgttcgacctgcccacccaactcgacgagcacacccaggacctgatcgaccgccagtacgcgctgctccccgaggcggaaggcgacccggtcaaacaggccgcactgcgcgacgtcaccgcccagcttgagaccatggactttcccaactccgaccgtgatccgctcgtagcggccttcctcgccgagctccaccgcagacgcctcgcgctcctcgaggccgcgcaaggccccaacccgccctcgcccgaacgactgcaggccctggtcgccgagctgttccacgagcgcttctcgtcggtgatctga

SEQ ID NO: 90299 - DNA, 1101 bp, Streptomyces reticuli
atgcaagggctcaccgccccgccggcctgggcaaccaaggccaaacgcaccctcgacgcggtcagagccgccgtcgccgccggcaccaagcgcacattcaccatgcactggaccgaggacgccgtacgcaacctgctcctcgaactcgtcggcgacaagtgctggtactgcgagaccctcatcgtgcgcgcggacatcaccgtcgaccactaccggccgaaatccgaagtactcgacgtgcccggccacccgggttactggtggctggcctacgacatgtcgaactaccgcatcgcctgcagacactgcaacagcggcggagcccgctacaacggcgtccgggaaggccgcgccaagggcagccagttccccctcataggcggaacccgcgcccgcacggcagccgacgacctggaccgcgaacaaccgctgctcctggacccagcccaccacagcgaccccgacctgctcggcttcgacagcgccggctacgcccggcgcagcaacaccccctactcgctggccgaaacgaaacgcggcctgtgccgcgccgacgaaaccatacggatcctcgcgctcaacgactcccacctcgtcccgctccgcagccgcctcatgcgggaggtcggcgtgctcgcccgctacggtgacaagaccgacatccagcagctgatcgacgacaaagtgggacccaaggcgccatacagctcggcagccggcatggccctggccttgcatcgcgcctgcgaccggcccgccgccgcgcccaccaccgcaacgacgcccacacccgccgtcgacccggcacgctcccgagtcgacctgcaagacctgctgcaacatctggacccggacgacctgaaggccggcatcaccctcaccggccggcacgagaagaaggtccaccaggcagtcctgaaccacgagggccagatcaacgtcctgggccgcccctggcgcaccccgaccaccgccgccagggccgcgaccggcagcaacaagatcgacggctgggatttctggcgtctgaccatcgccggtgtggagcagaccctcgccgagttccgcgtcacgcacttcccgccacccgcaccagcgtga

SEQ ID NO: 90300 - DNA, 1398 bp, Streptomyces sp. DSM 15324
atgtacgtcagccggatcatcgtcaaggacatcaagtccttccacggcccgcgccaggtcgatctgaccctgacccgtcccgatggcggccacgccggctggacggtgctcgccgggcgcaacgggtccgggaagacgacgttgctccgggcggtggctctggcgctcagcggacccgtggtggcccgcagtctggttccggggttcgagaactgggtcgcccagggcgccgctgaaggccgggtcgagatcgagatcgcgtgggacacgaaggaggatcggttctcgcaggggcggcgacccgccggtgccgtccgggccgggctcctgtggacagcgccccacgacgtctcgggcgccagagcgtcggtccgtagggggacccagcccgcgctggacgagatcaagtacacgaaggcgcagaacagcgtggcccgccggggcccctgggccgacaatccggccgggtggttctgtgcggcgtacgggcccttccgacgcatggccggaggttccggcgaggtgcagcggctgatgctggcatccggtccggtggcacggcaggcgagtctcttccacgaggacgcctcgctcgccgagggcgtcgcctggctggtggagcagcacctgagggcgctcgagaagaggccgggcgccgccgaactcaagcgaaccgcactggcgatcctccaggacgggcttctgccggacgggtaccggatcatcgacgtcgactccgagggcctgtgggtcgagcgtgacggccggcgctttcccctgcgggagatgagcgacggattccgcacggtggcggctctggtcgttgacatcctcaagcagatgcacgacgcgtccgggctgtccgtccgggatgcggaggggcagccgctcttcaaccgtctgcccggcgtcgtcatcatcgacgagatcgacgcccacctgcacgtctcctggcagcgccggatcggcccctggctgaccgatcacttcccccacatccagttcatcgtcaccacgcacagcccgtacatctgccaagccgccgaccccggcggcctgatccggctgccgggggtggacgaggcccggccgcccgaggtcatcggcccggacctgtacgaccgagtggtgtacggcagtggcgacgacgccgtgctctccgatctcttcggtctcgacacgccctactccgagcgggccgaacatctgagggccgagttcgtggagctggaggcggagatctacgacggggcctcgtcacgggaggtgctcgcccgctaccgggaactgaaggagcggcttgccagttcgccgtcggcccgtctggacgagatgagcgcgcaccttcaccgcaggacacgggagatggcccggcgcccgcgggacggagaagagtga

SEQ ID NO: 90301 - DNA, 591 bp, Streptomyces sp. DSM 15324
atggcccccggccacgaacgctgcatgtactgcggcgacggccagggcaccgacatcgaccacttcgagccgaagagcctcgctcccctgcggaccttcgactggctcaaccatctgcttgcctgctctttctgcaacagcaaccagaaacggagcctctttcccaccgcacccgacggcagccccctgctcgtcgacccgaccaccgaggaccccttggaccacctgcggctggtgctcccgctcggaacgtaccgggggctgaccgaccgaggacgggcctgtatcgaggtgttcgggctcaacgacagagcggtcctggtcaagggacgtgtggacgcctatgagcgggccgggatcttcatgcggcagtggcgcatcaccatggacgacggggagtgcgacgaggcgaggaagatcgtccggatcgcctgggaccaccccctcatcgatgtgctggtcaacatgttccaccagtccgcacatccggcggccgatgcccttttcgcgggggaggagaagatcctcgacctcctccgcgaccccgaactgcggaccgcgttcctgcacttccggggagtccgctactga

SEQ ID NO: 90302 - DNA, 1623 bp, Vibrio cholerae; identical to SEQ ID NO: 86122

SEQ ID NO: 90303 - DNA, 618 bp, Vibrio cholerae; identical to SEQ ID NO: 85887

SEQ ID NO: 90304 - DNA, 1623 bp, Vibrio cholerae; identical to SEQ ID NO: 86122

SEQ ID NO: 90305 - DNA, 618 bp, Vibrio cholerae; identical to SEQ ID NO: 85887

SEQ ID NO: 90306 - DNA, 1452 bp, bacterium BRH_c32
atgttcaagcttctcgaattgcaattacaggctcatccgtttcttggagatctaaatcttaagttcactgatgaaggtgaactggaaaatggcccttacacaactgtgattattggtccaaacggaactggaaaaagcgaaatactaagactgattattgatattctgcgggagaatgaccaacacttaagaaataaagagaaaaccaatcctgtcaattgtcgttatgaattattagttaaacatgatagtaaaatcttttcatttaataacaagggttctttttcttccaaccagactgattataatgttgctgatgtatcatgtttcccagtcaaggttattgcaacctcaattttactcaatgataaatttccagttgtcgatagcaaagatgatgatatttaccaatatgtaggaataagacgaagccctcaagttgctgggaccagagaccttattaaaaaggttgttaaaaacatttccattattgcatcaaattctggttttgaaaaaaatgttaagtatttactaaagttacttggttatacacagcaattatggatttcatattatcctagaagaaaacatattttctttaagggtgatttaacaattgagaaattcagtgatttttatgaaaatcctcataagtatacacaacggaaaaccgaatcatggagcgtatcgttttataaaaaaataaaggataatgaaaaagaactcactgaattgattgattatatcaattatatatcatcaaatttgacagatgttagtgcgcgctctaaagcatatttcatagatatttttggaaaaaacagagacataaaaaaagatattgaattaatcgaaaaacttgaaagacttgatttagtaagttatccaggaattgatttagaaaaagaaaaaagctttgatatacttaatgcaagttcgggagaataccatctactaatttcatttttgggaattatgacaaagataacaccaaatagtttgcttttattagatgagcctgatattagtcttcatcttaattggcaaatgaaatatatacacttactaaaagaaagctttaaagaatactcaaattgtcatttcttaatagcaacacattctcattcattcgtatcagatcttgaaccttcaagttctcgattgattgggttgacgagggatgatgaaaataaaataacagaaattccattacctaaaaacacttatggttggtcggcagaggagattttatataaagtgtttcgtgtaaaaacaactagaaactattatttggaatcggatctgagagatttgctacataaaatagctaacaaatcagaagataaagatggaatgagttctattctttccaaaattaaaaatctcagcttcaatactgcagatccaataaacttgataatagaaaaagctgaagagtatcttaagaaatga

SEQ ID NO: 90307 - DNA, 627 bp, bacterium BRH_c32
atgataaaacaagcacaatacaatttatctctaacaagaaatgagttaaaacaattagcccaaatgaaagattggactgggaaacaatgggaaaataaatccaaagatgaatttatcattagcataaaaactaaaattcggcgtcaattagaagacgttcaaaaaacatgttgttattgtggtctaaaacttcgggggacaagcaagggagatattgatcatattgctgccaaagctcgatttaggcatcctgaatttacatttactcttaaaaatctagcattagcttgtggttggagtaatacatcagaaaagaaagggaccaaggaaacaatagcaaagaaaaataaagtctattccaaatgtgaattcttattagttcatccatattttgataatccagttgatcattatgagtggaccgatagtgatatcgaaattttaattcaagttaaaaacaattcaagcaaagcttcattttcaattaaaatgtttggtcttgatacaactgaaatgagtgaattaagagctgcacaagtatcttatgaaaagaaaaagctagaacaaacgttatctgttaatgatgaagatttagtgaaaagaacaatggaatataaacaaccgtag

SEQ ID NO: 90308 - DNA, 1104 bp, Stenotrophomonas maltophilia
gtggctgtctcccatctgcctaccgataaattccgtttggcgggcgagagttctgacttctaccgttacctcggattgcgccaagcgaccaacttaaccaccacgggggcgctggaagccaaggttatccagacgctttttaatgcgctgctgctgccggatttcgaggctcggatgtcgcaatggctggctcttgctggcatggataaggacatcggggtggccatctcagtaccagatctcaagcttctaacgggcgaacatcaggtcttcgtcgatgctgcagccgatgccgcgaagcgccgatacggccgccagagagcgtctagcgttcttcttaaccaggactggttcgaagatctcgataggatgtggcgtctcttcgaagagctgcacaagttcaaatggcagcaccgtggtagaggcgccgaagccacgatccagatcatgccgggtctcctggaggttgataatctggatgtctggatacatggtttcgagtcggctaggaagtggcggatttttacctacctatccttggtcttggtcaagaacggccaagcaatcgagttctccgatctcagctcaggcgagcaacagttgattggtaccagcatccgactgctggcaggtctggagcctcacacgttggtaatcatcgatgaaccggaggtcagcctgcatccggagtggcagatcaaatacgtccctactctgatgaagacgttagagggagagccttccacacacgtcgtcatcgccacacattcccacttcatggtgtcagatatcaaagagcaaggatccgcgcttatcacggcctcaggaggccggaagccggaattcagtatttttgacggtgaggtttacgggagatcccctgagaacatcctgtaccgtgtatttggcgtagcaactgccggtaacctcaatgtagaaagggaccttagtgtggctttgaggatgatgtctggctcactccccatgcggcggggtgagttaattaagatctacgaccggctacggagggttcgcggcgaagacaatgtggcacttaatatgattatgaatcagattggaagtgcgatcgaggttggcgaatga

SEQ ID NO: 90309 - DNA, 621 bp, Stenotrophomonas maltophilia
atgatcaagttcgattcgtgcgcgacaatttctgttgagatacaggccggcgttgataaatttccggccgtagagcgctcgaagcgctgggacgggaaagccaaagccgtcgtcgcattcaagaaggaaatcatgcggcaggggctagagattcaggggcatagatgtgcttggtgcacattggaggtaggggaaaaggggcgtcgttcggcccatcgcgatcacgtcgctccgaaaagtattcatcaggtgtggacgttcaatgcaaagaaccttgttatttcttgcgagtactgtaatgggttccttgtaaagggggatgtcgataccgtccaggttgtcaataatgtctacgagaaatgtgaattctgggtagttcatccctacctggatgaggtggttaaacatatttccttctggaaggcggatggcgcatccgatattctggttaagtctcattccgataaggggagatggacagttgagctcttcaggcttgacacccctgaagcgaccgcacttcgggccaaggactacctccatgcagagcatctggtcggcctaactgctcgggatgagcagctcttgaaatctgccgtgggcaacttggggaaggtctga

SEQ ID NO: 90310 - DNA, 1308 bp, Marinomonas fungiae
atgaaaatagaatcccttcgtttagagcattttagacgatttgatgattttaccatttcatttgataagcaacttacagtgttggttgccaaaaatggtgcagggaaaaccagtattttagatggtttagccaccgcgttggggccatttttaactcgcctccccggtgtcaatggcatcaatccgaaagagacggattttcagatttatcctgatggaagcaaaccggcgtatatgcgcatcacggcggagtcgtttgagggggttaagtgggatcgaaccgaaaaaagagacaaggcaaaaggcaccgccaagcaaatccctgaggcgttgggggttaaacccatcaatgaatacgctgatgggtttattgaacagtttaacaatcgtatagcatttgagttacctatctttgcctattacggtgctggtcgcggtgtatttgatgtgcctgctcgcaagcgaggttttggcaaaaactttacgcgattcgatgcgctgaaaggctgccttgagagccgaaccaactttcgtggtttcgttgagtatttttattctttggaagagattgaaaataacaagcaaaaggaagctcgctcttttgatatcgagatcgcggagcttcgagcgattcgtgaagcagtgaataaaatgatccctgcattttctaaccctagaggcgcttatcctgctggtatttacgtggattggcagcaagatgggatcaaaaagcaattacgtattgagcaacttagcgatggctaccgcaccacattggcgatggtcatggatatcgccgcgcgcatggcggaagccaatccagataatccagatatgaactcaccgttagacagccatggtgtagtgatgattgacgaagtggatttacatctgcacccagggtggcagcaaaccattctcttggatctaatgcgcacctttcctaatgtgcaattcattgtctccacccatagtcctcaagtgatctcatctgttaaaccgcaatcacttcgcgtcatcgactggaaaaaaggcgcacccgaattagtcccgattgctttttctgaaggggctgaggcacaacaggttttactggatgtattaggacttgagtcgcctcgggtcgaagctttgaatatcgtaaaaacgttggagcaatatcaagcactggtagccgcggataaatgggactcgaaagaagcactcgaaatgcgccaaaccctagacgaatggggagccgagcatgagcctgaactggcccgcttagacatggatattcgcataaaagagtgggagcgtgagcaataa

SEQ ID NO: 90311 - DNA, 768 bp, Marinomonas fungiae
atgaaaaaggtatcaaaaggaattgaaccggctcgtttaaggcattatcggactcagcaacctgccaatacttgggagcagtttagaagcactcaagatcggcgcatcgaaacacagcaacgtctgatcgtggatcaagggggattgtgtgcttattgcgaaattgatcttttgcagagtacaggccatgacgagtccgattttcgtgttgagcatttccaccccaagtcaggccagtcaacgcctcataattggcatttagattggcaaaacctcttaggctgttgtcacggtggtagtcagcgtaacgttgttgatgcgggcaatcgctttaccagcccagatagctcttgcgatgttcccaaaggggacaagaatttagatggcgttattttaaacccccttctcattcctgcttttccaagactgttttcttgcgatagagccagcggccactttagcgttgatgctaataattgtcttttggcaaatattaatgcccaaacagcacaaaacacaattgacgaacttcatttagatgctgagcgattaaaacgactgcgcagtgcggtgttaaatgacttaaatgctcagcttcaaacactagttactcaaggtatgtctattggcatagcacgtgaaagacttgccaaagcaatactaaggaagaacgcgagtggccactggccaaagttttttaccagcattcgtagctatttgggtgacgcagcggaaacgcatctgagcgccataaactacaatggttga

SEQ ID NO: 90312 - DNA, 1047 bp, Comamonas thiooxydans
atgatggttttaggagaaaaaaagagagttggaattggtgggaactctatcgatcccaggggctatagaagacattcaataagggcatggaatcacccggacagggagatgggccgggaatctgtcttgctacatgaaaccgataaaaagctggatgggttctgcccactatttattggagcagaaagaagtattaaatatcatcagatagatgggatgactcgagagctggggcttgcgcagcagcgccaaaaatattcatcaaatggaacacagtcattatatggagtaaatcctatagatattaagcagtggttcattaatcgatattttatgattgataaggaatgggcgacagaagaaagagaaaattggaaaagattaattgaaaagctccccgctctggcgccatttaatagtaatttctcttatattagaaccgagaaagactttgagccaatattttcaatttatggtgaagagtgctacatggaggagctctctgccggctttcaggcagtattatcaatagtcgctaatatatttcaatgggttgaagcgactcggagtgcaggtgaaaggttggctgccaatgctacgggttcagttttagtggatgagcttgatcttcacttgcatcctgagtggcaattcacactgcgagatggattggagagcttatttccgaatattcaatttatagtaacaactcattctccgcatttgctttcatctgcgaaggaaaatgaagtaattataatgaatagggaggcaggcacaagtgaattaactcttaagccaacggctaagagattttctggttggagcactgatcatattctatcggaagttatgggtgtagttagtttagagaataaagactacgaaatacttatttctgaatcttttgataaaatccaagaggggtctattgaaggcttaaagaatgctattttcagactatctgaagtggctcacccgagtgattccattttgaccgtcttaaatacaagatatgcatcgatggtagcgctgtcaaatgattaa

SEQ ID NO: 90313 - DNA, 747 bp, Comamonas thiooxydans
atgattaagctaagtcgtgataataagcctgccgtgctgataaataatgaaaattcgtggacaactagtctaatcgaggcagtcactgtttttgggggttactcaaaaattcctgcagagcagaaagaaaaactacttattcattatcggcaccaagaaataaaaagcgtcttatttaaaagttcgcttgagaaatgtgcgttttgtgagacaaagcccggggagagtggaaatatcgaggtggaacattttgcccctaagtcgatctatcctgcgctagcatttaattgggaaaacttccttccggcatgtagaaaatgcaatgaccgcaaaggcggacatgacacggtaagttatcctattattaacccctatgattctgatccggaagatatattccattacactgacataaaaatcgcagtaaataatattcacaaggaaatcggcgagcggactataagcgtctgtggactgaattctgtaagattgatgaggcccagggcagatattttagtaagcctgcatagttttagcgaatcacttgaagaagccataaaggattacgaagatgctgagacagatatcaagaagcagaacaaaaagagaaaaataagagaggcactggagattatggaatctatgactaaaccctccgagacgttttcaggattctgcaaggactatcttaaaaggtgtgctccatatcatgaagcaaaaattatcgtcggtgaacagattgcataa

SEQ ID NO: 90314 - DNA, 2091 bp, Comamonas thiooxydans
gtgacaccaattgaccggccgccatgtttacctttcatggtcaggtttctggcggataggccggctaccgaccctgcaggcattgatgatttcgagagactcagcaatagcgctaaagcgggactgccaagggtcctaggtaaagactatccaaaatttcgcgaatacctgacggagacgttcgccggaaagtgctgctactgcgagtctccgctcggtgcagctaccgaaggagaaatagaactctttcgaccgaggatcgtcgatgatcctggtccatccgcccgaaaggagctgtactggtatctcgcgcaggattggcgcaacctgtacctggcttgcccatcttgcaatcgcaacaaggccggtcgctttccggtccaaggtggtgtacgagcacaagaaggtatgccttacagccaagtcgtaaacatcgagcggccgcttcttttggatccctgcgacgtttacgatgatcctgacgcacacctcatgttcctaaatgatggcagcgtagctggacgaacagagcgtggtcgggcaaccgtagaaattctagcgttgaaccggcgggctctggtcgagacccgtgccagtgaggccctgcagtttcaggctgcgacctcgaacgaacgccgtcggcgagcggatggccgcgggccctacgcagctgtgtggcgccagatgcttttcgcagagagacatccggagttctcgcgtgaaagcctcgatgcatccagcgaacaaagagcatttgatgcgcggcgatcggatgtctctacggaggacgcaactggcttagaaaactatcgtgctgtggctcgatacatcgagcgaataagaatcgaaaactttggtgcaatcggactgctgcaactcgatttgagcgggtcgatgtcgtcgctcgcgccttgctttgcactgttaggtgaaaacggtgtcggcaagagcacggtcttgcgtgcggttgctatggcgctttcgggtaaggcctatacgagacgcttggggcttagcagtaacgccttgcttccttcaaacgcgtacaagggggaagtgcgcgtgtcgatcgtaggccagcccgatctggtaatgaccttgcggcgcaaccggccgatcgatttcagcaagcaaacgtcgagttcacttgtgcttgcttacggtgcgacgcgcctgctgcctcggggaagacacaagccaaagagtggagagcggcatgccaagatcgacaatctgtttgatcccttcttgcctttaacggacccagagcaatggctcgctggccttgaccctcaccggttgtcaaacgtcaacggcgtcctgcagcgtttgctcccacccgaacagagactggagttggttagggacgacacaggccaagggctgaaagttctgatcgcaggtgatccagaacgaagaatctgtgaactcagcgatggctaccagtccatgctcgggatcgcggtggacatcatgcaggtgatgttcttggcatacgagtcaatggagtcggcacagggggtcgtcctcatcgacgaattgggtaaccatttccacccggcttggcgcctcagatgcgtaagcgcccttcgcacggccttcccgcgagtgcagtttattttcagtacgcacgatccgctctgccttcgtggccttgttgagggcgaggtggcagtattgcggcgcaaccgccttcgccagatctatgcgctggaagacttgccgccggtgcataagcttcgcgtggagcagcttctctcatccgagcacttcggcctgaacagtacgcttgatcctctactggaagagaccatcaaagagtacgaaaatctcatagagaacagtggccgtacagaggaagaagaacgacggcttgacgaaatcgtcggtgaacttactgaggcccagtatctgggttcttcgcgcagagagcgcatggcattgcagttgctcgataacgagaaggatcttgatatccccacgcagacgacagtcaatgttgccgagctatcaaaagccacagttgcgaagttgaagcggttgatgggagagatcgcaccggcccagggagcgctcgatgatcaaaattag

SEQ ID NO: 90315 - DNA, 831 bp, Comamonas thiooxydans
atgatcaaaattagcagacccgtaggtagcgccccgccgggccttgctaagtcagcggcaagagagctgcgctcgaaccgcgaggcgctgaagaagaatgagaagctggccttcaatgcctattcaagcgacgcggtgaagactgccctaaagaagatttttgggcgtaaatgcgcgttctgcgaatcgctgttgttgggaaatcagcccggcgatatagagcactatcgaccgaaaggtgcggtcgtagtagtagatccggtcacgcatgtaaagacgaccgtggcaggctactactggctcgcggcgaaatggtcgaaccttctggttgcctgcgcagactgcaatagaccccgaacacagacggatcacgacggggacgaccgggtaatcggaaagtcgagcttcttcccgctcgagaatgagagtcaccgagcggccaatccgaagggaatgggccttgaggtgccgctgctgctgaatccgtgtgaggacgatcctgctgagcatctggagtttttgcacgatggtcgtgtacaagcagcgagggtcgctggagtcataagcccgaaaggggacgcgacgattcactactgcggcttggcacgcatcgagcttttgcagatgcgttcccgccaccgccggatcgtaatggcagcgatccggcacactgtcgcggcgctggaggcaggacatgatcctggcgcagatttagatgacctcgttgcttttatgcatccccacgaggcatacgtcgcacttacgcgttcgttggtcaagacgcatttgagccagtacctacattccttaggactaaatcagctgctgtag

SEQ ID NO: 90316 - DNA, 1623 bp, Vibrio cholerae O1 biovar El Tor; identical to SEQ ID NO: 85886

SEQ ID NO: 90317 - DNA, 618 bp, Vibrio cholerae O1 biovar El Tor; identical to SEQ ID NO: 85887

SEQ ID NO: 90318 - DNA, 1335 bp, Thermobifida cellulosilytica TB100
ttgtacgtcgcgaaactggcgatctctgacatccgcgggttccatggcacacgcggtgtcgacctgcgattcactcgccccggtggtgaacacgcaggatggaccgtgctcgccggacgcaacggctccggaaagaccacgctgctacggtccctggctctggcactggtcggccacctgaccggacgccgcctagtccccgacttccaggggtggctgtcctccggcagttcgcgggggcagatcaacgccttggtccatcccgacccggaatgggacctcctgaacaacggctctcccctccgagagccgttcaacactgtgctgacgtgggagaacctcggcgacgatcgtcccgggaacagcgcccggtcaacgctcatcgtcgacgttccgtcagaccttccccttcaccgcggtccttggtcggataatcctcggggctggttcgtcgcaggatacgggcctttccgacgcttgggccgagggtcgtcagaggctcagcggttgatgctcgccacggggccggtctccaggctcgccactctcttcaacgaggacgcatccctgacagaaagtgtccagtggctgatcagcctgcatctgaggcgtctggaggagcgggagggagccgcagaactcctggagttcgtattctccctgctcaacgacggcttgctgcccgacgggttccgggtgctgcgggtggacagcgaaggtctgtgggtggtccgtgacggcggggagatcccgttgcgggagatgagcgacggctaccgcacggtcaccgccctggtactggatctggttcgccacgccttcgacgctttcggcactgaggctctcggcgagcgggactccgttccgaccgtggtctgtcccggagtggtactgatcgacgagatcgacgctcacctgcacgtgagctggcagaaggtgatcggtgactggctgaagcggcacttcccccgcatccagttcatcgtgacctcgcacagcccctacatctgccaaagcgccgatccgggaggcttgatcaggttgcccggcgtggacgaggacgaggctccccgtgtggtctccgaggagctgtacgagcgggtggtgtacggcagcggtgacgatgcactgcttaccgagctgttcggaatcgactcgccctactcggaacgtgccgaggagaaacgtcggcgactggcacgtctggagtctgccgtactgcgcggaacggccactcccgaagaggtgagtgaatacgaggacctgcaaaggactctgaccagttcgttcaccgcacgggtggacgaggttgcgggacggatacaccgggcttga

SEQ ID NO: 90319 - DNA, 723 bp, Thermobifida cellulosilytica TB100
gtgattcgtattcgccgggcgaagctgcccgaaccgttacgtcaccagttggccaggaaaactgaagaactccgcgcctctgaagctggccccggggaggcgcgaaacgagtggaagagggcggagaacgtccgccggtcggtacgagaactgctcgccacgatggccaccggtatcaagcggtgcatgtactgcggcgacaaccagggtgatgccatcgaccacttcgagccgatcgctcaagctccactgcgcaccttcgactggcacaaccatttcctcgcctgttcccactgcaacagccaccagaagcgtgatctcttcccccgtgctgccaacgggaccccgctgctgatcgatccaaccgccgaagacccctacgaacacttgaggctgctgctgagcatcggggagtacgaggcgctgtctgaacagggcgaggcaaccatcaaggtcttcggactcaaccgcaccgtcctcacccggggccgcgccgtcgcgttcataacaatgcggtcgttgctacgtgaccgacagcgcctcgtccaggaaggcaaccctacagaggctgccgagatcaccgagtcgctacgtttccagcccttcgcagacgtgctctcggcgatgctgcgctaccgccatcttcccggcgcggcggttgtcctgggcggtcccgatgtgctcgaagcactggacgatccagaactggacttctggtcgtag

SEQ ID NO: 90320 - DNA, 1722 bp, Enterobacter aerogenes
atgattgttcgtcatgtttttgattcaaaaattattgagtctgcaatgaaaagcagtttgaaatcaaactttcagcttattaaggatatcactgaaggaaaggttgagactaaaggagatggcattgctgatgaaattgtaactttggttaaagaaaagatttatagtaaaaggttaagagtaagtcaagttggtgtctacggtgttcgcggaattgaagatatcacgctgagcattgaggatgaccttacggttataatcggtaataacgggtcgggtaaatcaactatactcgatagtttaagtttgacattatcatggctaaaagcaagtattcttaaagaagagggggtgggaacttatttaagagaattggatataaataattcgagggatgtttcttatggaagtgtaacatgtcgactttgtttagaagaagagaactttaatttcctttcaactaaatcaaagccggggaggtctttgagtaggcgtagtgctttgcaagagattaaagctttaggtggtctttatagacatgttaattctcagtttgctgattctaatcttcccttggttgctcattattctgttgcgagatctaatgaaggcacaaaagatgattttgctaaggtggggtctcagattggtatcaaggacaagtggggtaaatttgatgcctacgaagacgtacttaaagacagacatgatttcaacgagtttattgtttggttagggagaatagacagcatagctcgtcaaggtggcgggataaacgaagaaatcagtaagttacagtctgaaataaatagtacaattaatttacttaaaatgtttaaggataagggtaatgaccagtcctttattcttcctttggaagagataataaaaaagaagaataaagaaatatccaatatatacaatgagaatttcaatcgggatgaggtgttggcctctaaggtgttcaaacacattaaacaggctataacaattttcattcctgatataaatgatgtcagattggtatatgaacaagaaggcgttaaattagttttatataaaaacaataaggaaattagtgctcagcaactatctcagggtgaaaaatcgcttttgtctttgattggtgatttgactcgtaggttagtgcttctaaacccaagtcttgacaatcctcttgaaggagaaggaatagttcttattgatgagatagatttgcacttacatccttcttggcagcaaactgttatacttaatcttcaaaatacattccctaatctgcaactgattgtaacaacacatagtccacaagtgctcagtaccgtctactctaggtctatccgatcacttcatgaagtgaatgatgttctaaatacaattccaagtcttgatgttaataataaaataatagcgtctgaaactcctgagtttcaaactagaggagttatgagtactgatattttatctaaaatcatgggtattgatccagttcctttagttaaggaagcgaaatgggtccaagaatatcttgcagcaattgaatatgataaaaatactgaggggtattacgctgacttgtgggcagatattgttgagcattttggtgagaatcatccagtggtaatatcctgcaaaaatgctgttaggttaaaaggtatgagaggtaagatcagggagatgaaaaaaaataaaaatgaagatatcaaaaagggaaaggagtga

SEQ ID NO: 90321 - DNA, 639 bp, Enterobacter aerogenes; identical to SEQ ID NO: 88847

SEQ ID NO: 90322 - DNA, 1374 bp, Enterobacter cloacae
atgaaaagactatattatgcccatcatgatactcgaaccttaaaacttgctatagaaggtgatgtttctgataatgcgaatatctttacagtaattgtaggtaagaatggcgttggaaaaagcaggttgttatctcagattgctaaagactgtattcaaaacatttatttctcgcaaacttttaatccattatttgatagagaaataatgccaaagttaattgccgtatctaccagccccttcgataaattccctccaggacgtagatcattaaataactcaaggcaagaaaataattatcgatatgtgggtatgcgtggagaaggtcccttcggcgtatcaaatgctgtatcccttttatcatcagcagcgagaggctggctagaaaaacttgcttattcagaaaatcctgcaaatttactcgatgtttttcattctcttgattttgagcctcatgtagagtttgtatttaaaccaacttacaacggaccggacactcctgactttaatttcatcggtggatattcagatgagatattaattgagattcaggggttatatttaaaacacaatataaaaattgacagaaaaaacgctgagagtctctctaagttaaatttcgaatcacgtcatgatatttacgaagcactggttgaaattaatcgatttgaatctgaacgtaaagctgtaaccttgtcagtcgattttatcaatggtgaaacattggttggctcgacttatgcaagcaattatttttccagagcaattcttaaacttatgaacgctggcttaatgagattgatggatatgcgactcataaaaaaaagctatggtcccatgtcacttaaacgtgcaagctcaggagaacaatgtttattagtgatgatgcttggaattgcagggcatataactgatgattctataatactaattgatgaaccggaaataagcttgcatcctcgatggcaagaagagtttatcattatgttaacaaaagcattttctacttactcaggttgtcaattcataattgcaactcattcgccgcaaataatatccaatttaccgaataaaggttgctatataacttctttgtcgaaaaattatctttataaagcaaaagactttagcaaccggtccgcagattatcaacttgcggaactatttgatgcccctggtattatgaatgaatacattgccagattagctttcaacttactttcaaaagtcaagacagctaagttagtaacagatgataattggagtgaattaaaacaactccagcttctccttgaaaacgttaatagtaatgaccctattaatgaactcgtgaattctgtatctcaggtgtgtgaaatctatgccaaaaattag

SEQ ID NO: 90323 - DNA, 636 bp, Enterobacter cloacae
atgccaaaaattagcaacccaattgaattcagcgcagagtcattaattattattgaggagaaattgtcttctccggattttaagcataccgactggggagatgatgatttgcaagttctccgtgcagaaattagaaatcattacagagaagaacaaaggctagaatgtgtatactgtcatgagcctattggggtaagagctgcacaagctgctcctatagagcatattgttccaaaatctcaatatctatcttttatttttgaacctaagaatctatgtgtagtatgtcctgactgcaatgaattcaaaggtaaaaatgaagtattatttgaacccgtaataaatggggagcgacgcagacgctatccaactgcatctgcatcatttcgcatcgttcatccacatatagatgattatgagatgcatattataaaagcaaatcgtgtttatgtggacataacacctaaaggacattataccattgggatatgtaagctaaatagattttttcattattttggggcgtgtgatgaatttgttaatgatgcaaaaattgctgaggcaaatgaaaattttttcaaaaatggtagtatcactactaatgaattgctggatgatgacattcatttgatttaa

SEQ ID NO: 90324 - DNA, 1239 bp, Enterobacter cloacae
atgagtaaattcttgtacagtataagtcgcagttcagaaataaaaagcgaaaatgataatattgatgttggcaacaaaaacctgatcatcactggaggcaatggttgcggaaaaacaacattactcaatgacatatacaataaactgtcaacacacctaatacagagaaatcaccaacctaaaagtcaaattgaaaacaacataaaatttcttttgaatcaaaaagaaaacgcagttaaaggttctcaagaatatcatcaagcaaaccaacaattacgatatcatcaggcggaacttgaaagggtgtggggtggtattcaattagaatttgaagatgctaacaaattatctttattactttcagaagggaaaggtgttattgctttttttcgagcagacagacaggcatcaattcaggctgcgaccggagctaataaaattataagcactgacgaatccaattacttgtcaatcagcaaccaagaactaggcaatacacttgaacaacatcttgctaatttaaaaacaagacagtcatttgctaagactcatgacaataatctcaaattgttcaattctattgaaaattggttttcagagttagaaaaaaatatcgcatacctaatggaggataccacatttgaacttaagttcaatcccgatgaattcaaattctttttaacacaagaaggtaaaaaaccttatacattccaaactctgtcttcaggatattcatctatatttaatattatctctgatttgataatgaaaaccgaggcttttaaaatctctccgagcgaactgcaggggatcgtgatgatcgatgaaatagatgcacatttgcatgtatcgcttcaaaggaaaattttgccgttcctgactaaaacgtatccatcgatacagttcattgtaacaacacactctccgtttgttatcggttcattagaagactccattatctatgatttgagttctaaacagcatttcaaagatctctccagttattcctatgaaactatcatcgaaggcttacttggagtgcctgtagtatcagtctctttggaaaaagatattaaacgcctatcattactcatcaatgaggataatcatgatatagaagccatagatgagattgtacagaaacttcttccttatagggataaacttgatgatgaatcagctatcttcttgataaaaggaatgaatttgcttaaatgcaaagcaagaggagataaataa

SEQ ID NO: 90325 - DNA, 657 bp, Enterobacter cloacae
atgtttcctgtttcgaaaaattcagttcctcctatatcgttagaaaggagaacatcttactctgaaaaagatgtcatagaaacactatcaaaggactttcataataaatgctatatatgtgaggtcaaagaccctctagttctaaacgttgagcatttcaaacctcacgaaggtgatgaaaataaaaaatatgattggaataatcttttctttgcttgcgggcgctgtaacaatattaaaagaaatcattttgaaaatattcttgattgtactgacccaagtgttgatgtattaaggtctatcaagcatgttttccccacgacagcctacgctgaacatgtcgatatagtgccaatgaacgacgacccaaagacgatagaaactgctacattaatttcaaaagttttcaatgacgaccacacaggcaataaagatcttacgcgcatatatttaaaaaagcggctaatgagacagtataggaaatttcttgacctagtttttgattacgacgatgaagatacccttccagaagataaagaaataatatgtaggaaaatcaaaaacatgcttcgtgtagaatatgaattttcagcatttctcagatgggctatattagatgctcctctgcttcatcattttaagagtgatgttttctaa

SEQ ID NO: 90326 - DNA, 1377 bp, Escherichia coli
ctgcttaactttcgttgcttcaaacagctcgatatcacttttgatgagcacattacgattctggttgcaccgaatggcgcgggcaagacgacagtgctggatgcggtacgcctggcgctgttcccctttattcgtggttttgatgccagcctctacgtgaaagataaatcactagcgatccgtaccgaagacttacgtctgatttaccgccaggaggcactgaacatggaaatgtcgtctccagccaagattacagctaccggagaatgggcaagcggaaaaacggcaacctggatgctcgataaacgaggagaacagccgccacatgaagataagatggcggcgcagcttacccgctggggtgagcaactccagaaacgagtacgtgaagagcatagcttgcaacaagttgaacttcccctaatgctttatttggggactgctcgcttatggtatcaagaacgttatgaaaaacagcctactgagcagcgcctggataatagtgccttttcacgtttgtccggctatgacgattgcctctcagccacatctaactataaacagtttgagcagtggtatagctggctatggcttagctaccgtgaacatcaaatcacacaacttgaatcaccttcagcaaagttaaaagaaggtgttcgtgttcaacggatgaaagaagccattcaggctatccagcaggccattaactgtctgacccagcaggtgacaggctggcacgatctggaatacagcgccagccataaccagcaactggtaatgagccatccgcaatacggcaagatccccttatcccagctcagcgatggcttgcgaaatgccgtcgcaatggtggcagatatcgcatttcgctgtgtcaaactcaatcctcatttacaaaatgatgcagccttaaaaacgcagggaattgtgctgatcgatgaagttgatatgttcctgcaccctgcctggcagcagcaaattatccagtctttacgcagcgcatttccgcagatccagtttattgttacgacccatagcccgcaggtgctcagtacggtaaaacgcgagtccattcgtctgcttgagcaggatgagaatggcaacgggaaagcgttgatgccgctcggagcaacctacggcgagccgagtaacgacgtgctgcaaagtgtaatgggcgtcgatccacagcctgcagtgaaggagaaggcagacctgcaaaaactgacaggatgggtggatcaggggaaatacgacgagccgaaaacgcagcaactgatggtcgcattggaagttgcgttgggtgagaagcatccacagcttcaacgcttacagcgcagtattgcccggcagagactgctgaaagggaaagcgcaatga

SEQ ID NO: 90327 - DNA, 606 bp, Escherichia coli; identical to SEQ ID NO: 88315

SEQ ID NO: 90328 - DNA, 1722 bp, Enterobacter aerogenes; identical to SEQ ID NO: 90320

SEQ ID NO: 90329 - DNA, 639 bp, Enterobacter aerogenes; identical to SEQ ID NO: 88847

SEQ ID NO: 90330 - DNA, 1359 bp, Pseudomonas syringae pv. tomato; identical to SEQ ID NO: 86262

SEQ ID NO: 90331 - DNA, 651 bp, Pseudomonas syringae pv. tomato; identical to SEQ ID NO: 86263

SEQ ID NO: 90332 - DNA, 2349 bp, Pseudomonas syringae pv. tomato
atgcaacgatttgcccgcaatgaaatacccccacctattttccgcgaaaaaaggttcaagttggctcgaaaggagttgcttgaactcttcacgctcgacacacaggaactctcacaaacccgcattacgggagaagagctgagtctggatctgagccaggtcggccccattcatgacgcgctagggcacctgtttcatggcaaatgtgcattttgcgaaagccaggacctgaccgtcccctaccgatttcgagcggcgtcatctgtaacgtctgccatgggaatggtggactcacacctctactacgtctggctcgcgaatgcctgggaaaacatctatcccatctgcatcaaatgtattccgcgccagcctgcgttctttcctgtcgacggcaaacgtgtgccgattccaagcctggagcaaatacgccggtatgccgcagaggatctcgggtcatggcgcacctccggaccacgtgagtcagccgttttgctcgatccatgcattgacaggaattttgagcgacacctttttccctccgttgatggcgatctgctgccactgagtgaaaggggtgatactaccatcgccaatttccgcttggatcgtctcgacttgaataaggcgcgtgccgccagacttcgcgagtatcgcgaggctctattggcgcccgatcgaaaccgggcgaatttacgctacagtaattttcaaaatttatttgacttccaagaacttgaatttggtggcctgtggtacctgcaatgccggctcattgcgcggtacctatcgcaaaaagttggcatggtaatgccgaccggccgctcccatatagcaaggacactgaaaaccctgctctttatgggggactataagctgtcgcatgaacaattaaagagttggattgaagagaccgatttcggccacctaccgcttgagatcccgcccacggactatggcgttctggagcccgcgccggtcatccaaaaggcagtcgtaccgcggatttatccttctttgcactctttgcagttcgaccacttcaaggtcatcgagcacctcaagctgaaacttgatatacccaccgccgaatcgcagttgaacaacgcagcgttgcaaccggcactgttgatattgggtgaaaacgccactggtaaaagctcgattctcgaagcaattgcgctcgcgctgagtccccgtgaaacacgtagggcattgaacctgacgccaggctcactcgtgctctcccctgcacaactcggttcaaatgacacgcccacgcaattctgggcacgcgtgcgactcgggtttgacgaggggcgtgacaaagtgttgagcattgacaatgccgcctgtaaacaattcggaccacgccttgtgccacctgtgtttgcttatggtgcctttcgccagtaccagaaaaaaacaccgccggtttttgaacccgctcacgggatcatcaacctgttcgaaaccgatcgcctcctcgcaaatccggaacaatggttacttgggctcaaaggcgaagatttcaatgacgtagcacgcgcgttgaaaatcatcatgtccgtggaaggcgacatcaaagtcatcgaaccagcccccgacggcaaatcctgcttgatcgtgacagcgcccgccggcgttgtgaccaagacaccgctcaatgatgtgtcctcaggttaccggaccatcctggcaatggtgtgcgacatcatgcaacggttgatggatcggcgcataaaccccgacttcccgggtcttgagcatgcccaagctgtggtattgatcgacgaagtcgaagcgcacctgcacccacgctggaaaattcagattatgcaggtgttgcgccgggcattgcccaagatcacgtttatcgccaccagccatgatcccctgtgcctgcgcggcatgcaggacggagaaatcgtagtggttcatagccggtccagggccggcggggccaatacccagtacgcgacgtgtattgagcaactgcatgatctacccgactccacgcagttaacgattgagcagctgttgacatccgactttttcaatctgatgtccaccgaccagccggcaacggaaaaacaattggccaacgttgccgacgtgttgaataagttaaaaagaaaggagacgttgaccgacgaagatgagcaggtcatgcggtatttcgaaaaggagatcaaggaggctctccccattggcaccagcgaagcccagcgcgtcgttcaggaggctgtcgcccagtttcttcaggaacggcgggaaaagccatccatcgagtggggcgcgatacggacggacgccaagaccaaaatattgaacatcctcaggaactcttga

SEQ ID NO: 90333 - DNA, 1005 bp, Pseudomonas syringae pv. tomato
ttgaccgcccattatgaaaaaaagtccgccgcgcttgcagctgcactggcggctgatgatccggttgcggcctcagcctctgtggcggaggagttctcagcgaaaaagcctccgttcacgacccaccggaaagactcggtcaaaacccagctgtacgcaatatttcatggcaaatgcgcgtattgcgaaacattctaccctgccgtagcgccagttgacgtggagcattaccgacccaaagggggcgtgagccaggatgctgatcatccagggtattggtggttggcaatggagtgggaaaatctgctgcctagctgcattcattgcaaccggctaaataaacacgcaacgccgaagctttcgacccagctagttgaactgcgcgctgacggcacaggcttcagtgaccaatacaaggtcaccacgggcaagggcaaccactttccaatactggggccacgcgctacgccagcttcaagggattgttcaaccgaatacccgctgttgctcaacccttgcctggatgacccacaagagcatttggccttccatgtcgaccgcaaaaaactcatcgggctggtgttacccaaaccgcacaacggtgcggggctaccggcgcacgtttccaccacggacctgctgccagcgttcgcagacgaaatcgatcaggcgctaagggacaagctcagcctgcgcggcgccgtgtcgatccacacctatggactgaaccgattgggattggtccaggatcgcacgcgtgtgctgcgccaactcgcatttctggaggagtcggtgaaggatctttgcgccatgatccagagcctggaagcacgcataaacgaccccttcgcggttgaaaacatacgcatcatcaagcgcatggaggcattggtagaacgcacagcgcagcacatggcggatatggccaagcctcaagcgccctactcgaccatggttcgcgagtttttacagggctttgaggcgcgcctggttgccattccctag

SEQ ID NO: 90334 - DNA, 1434 bp, Pseudomonas syringae pv. tomato; identical to SEQ ID NO: 88390

SEQ ID NO: 90335 - DNA, 630 bp, Pseudomonas syringae pv. tomato; identical to SEQ ID NO: 88391

SEQ ID NO: 90336 - DNA, 1596 bp, Enterobacter cloacae
atgaataaacgtattgttagtacaatagctaagcttgaacacaaggcgaagaaaggatcttgggaagcggcatatcaactttatgaatattatctagatgggaaatatgttgataaaaattatgaagttgctatcaaatatattgatcttgcagtagaacatattcaaagtaattttattggctttgatgagattattatacaagattttagagctttagataatctaacgttaaatctctctttaagaaatctgattgttcttgctggtgagaatggtgcaggaaaatcatctgttttagatgctctctcttattcactgagttggttagtaaatagaattttatataaaggggggagaggtcgagaaatagagaaacttgatataagagataattctgaaagaggttactcttcaattctaactaagctttgtttgaatagaattaataaagttcgctttgaactttgtgaattacatttaggtagttcagccaataaaaaaagttacctaaatgaggtcactaagctgggcgctctgtacaagtttgcaggtgaacatcgatcatcatttacgttacctatttttgcacattatggtgtcttacgaaccattgatattaacacgaaagatatcaacgcaatagatgatattgtacaaataaataataatagatttgaaggttatataaatgcattttcaggtaaagctgatataaaatcatttattaaatggtttaaaagattagatgatattgaaaaacaccgaaccgtatcaactaataacctttcacaagatgaagacttaattaataaattggcagtcttggcgcctagtgatgtgaatgccagaaaactacttgaatcactaatgtcaaaaagcaaggataaagaggaagatagcgaagtattggaaatttataagataaaacaaacattaaaccatgttattggtgaatttatgtttggctatagtgatttatctatagaactccaatcgggttttagcttaaacataaagaaagagaataataagttaaatatattgcagttatctcaaggtgaaaaaagtctattggcacttgtattggatatcgcaaggagaatgatagtattaaaccctcatctcgagaatcctttgcattcaccgggtgtgatcatcattgatgaaatagaccttcatttgcatcctcattggcaacgcttagttattcggcatatcaataatatctttccttattgccaattcattgtgtcaactcattcccctcaagttattagtgaagtcaagcacaatgaagttgttattctggataaagatgagtcaggttctataataggtttttcaccatcgcagtcttatggcttaacatccaatgaaatattaaatgagctaatgagtccagaggaaagacaacttattaggaatgagaaagtagaatatgagataaaaaatatatttatgttaattgaggaaggtaaaattagtgaagctgaagagcggatatacgcacttgaagacgaattaaatggatctatcccagagttagttagggctaaaatggaaatagaacttgatggttgggataaagaatga

SEQ ID NO: 90337 - DNA, 636 bp, Enterobacter cloacae
atgagacaaattattaaaaataaagagcctatagagttgacaacttataaaaaaataaaggatgctgaatatgatggtccaaattttacaccagttaaagcaatagttagatccagtctgcttaatgagcaaggttttttatgcgcatattgtatgcgtagaattaactttgaaacaatgaaaattgagcattgggcatgtcagcaaaaacatcccaatcatcaactagattatgcaaatctgcttgcatgttgtcttggacatgaaggatgctcacctcatgagcaaacctgtgatactctcaagggaagttgcgaattgaaattttctccagcaaattctcatcacaggattaatgatattattagatatgattttttgggggaaatatcatcaactgatgattcatttaatatgcaaataaataaggttttgaatttaaataaatcaaggcttaaattaaatagaagagaggcattgaaagttatacaagctaaattagctgaaaaaattggcagcagaaaaagtgctgaaatacagaaacttattaatatatataaccaaaaaaatagtcaaggaaagttcttcgaatattatgggattattatttattatttgcaaaaaaaatttaattaa

SEQ ID NO: 90338 - DNA, 1434 bp, Pseudomonas syringae pv. tomato; identical to SEQ ID NO: 88390

SEQ ID NO: 90339 - DNA, 630 bp, Pseudomonas syringae pv. tomato; identical to SEQ ID NO: 88391

SEQ ID NO: 90340 - DNA, 1359 bp, Pseudomonas syringae pv. tomato; identical to SEQ ID NO: 86262

SEQ ID NO: 90341 - DNA, 651 bp, Pseudomonas syringae pv. tomato; identical to SEQ ID NO: 86263

SEQ ID NO: 90342 - DNA, 2349 bp, Pseudomonas syringae pv. tomato; identical to SEQ ID NO: 90332

SEQ ID NO: 90343 - DNA, 1098 bp, Pseudomonas syringae pv. tomato; identical to SEQ ID NO: 89635

SEQ ID NO: 90344 - DNA, 1380 bp, Novosphingobium fuchskuhlense
atgaccgacgcaatacattatctcggcctatcgctgaccaacgtgcgtgcctttggcggtcagcagacacttgatctatccattgacggcaaacctgcccgctggtgcgtgatcattggcgagaacggcgtcggcaagacaactttgctccagtccctggcagccatgcgcccattgccgacagtcagcggcccggagtcggtcttccttgacgaggagctcgcggagtggactgagtcggccgagagtgttgttcaaattcccagcaaagaggccggtccacctgacgcgatctcgcccgcgttggccgactttgaaaacgacaggatcgagagccttgtgcgccgcggcgacgccatgactgccggattcagagtcgccatgatgaccgagcagggcgacgcgttcagctttggctatgacgtggtgacgcgtgccggagagctcgaatccgccgacccccggcttgccaggaaaaccttgtcgggggatggtccgctcgtgatcggctacagcgcctttcggcacgcgggtttccgaaatctctcgtcaattggggaatatggtcccgccgaagccctatttgacgagaagatcatgcttgtcgatcccgacgaggtacctgaccggatcgattacaatgcgctcctggcccaccgcgataagaatgaggtagagcaggcgcgctgggagacgtttcgagactcgatgctcgaagccatcgcagccctcattccgaaaatctcgcgcgatgatttgaagcttgctggcagcggtatcagcgtccggacaccctcgggctttgcgcctctcaggcagatgagcctgggcgcccagaccacggtcgcctggctggtcgaccttgcctggcgtttgcatatgaactttccggagagcagagatcccttcggagaaagcgcgatcgtgctcatcgacgaggtcgaactgcatctccatcccgtctggcaacgcagcctgcgcgatcagctgctaaagcactttccgcgcattcagttcatcgtctcgacgcactctccggtgattgcccaggaaagcatcgcagcgggggatccggtctcgatcgtcagatgggagggtgatcatgccgtcatcaagcccgatccgttcgccagggaggtcgtgcggctcgacgaggtggtgactgttgcgttcgaactcgagacgtccctgccatcgcgctttgaggcattgctcgcggaacgtcgcgaactgattcaaaagggtgacctagatcaagcagagagcgataggctccaacaccttcatcgctttgcccgtgccgttcagagcggttctctcgacgtgatgccggatatcgagaagctcatggcaggaaccggggaagacgtggcggactga

SEQ ID NO: 90345 - DNA, 795 bp, Novosphingobium fuchskuhlense
atgatccgaatcgacaagggagaggcgcccaacgtcttgctgacccaaggggtagatgccgccaaggaactttgctcggtctacgacaaggatcaggctgcctaccacaacggtaccaagcgcctgaccttcaacgatgggatatacgggcatcagagtgtgcgcgacgccttggaccgatcgcatcacggcaagtgcgcgttctgcgaggtccacatcccgaaaccttatgcgctcgcgcatgtcgaacactggcgacccaagggcagtgtcactcaggaaaaaggcataaaggcatcgacgcccggctattactggctcgcctattgctgggacaatctcctcctagcctgtcatttctgcaacagcagcaacaaaggtgtgcaatttccgcttgcagatccaacacggcgggccagcaaccatcatcagctcgtcgcggccgaggcgccgatgctccttaatcccgatgcggaggacccgtcggagcacatcgagttcgtggaggaaataccgcgcggcattagcccccgggggatcgccacgatcaaggccctcgggctagaccggctcgaacacacgccacgcgacgcgctgatcgccaagctgcgatccgatcatgatttcatcgctcgcaacaatgccgacccgcacccagagctgatatcagaggtggcccgccgccgggaattctacggccaggccggggatcccgcgtcgccgttcagtgcgatggcggccgcatttatcgcccgcaatccgttgcccgatccggtaatttttcccgtagattga

SEQ ID NO: 90346 - DNA, 1377 bp, Escherichia coli; identical to SEQ ID NO: 90214

SEQ ID NO: 90347 - DNA, 606 bp, Escherichia coli; identical to SEQ ID NO: 88315

SEQ ID NO: 90348 - DNA, 1377 bp, Escherichia coli; identical to SEQ ID NO: 90326

SEQ ID NO: 90349 - DNA, 606 bp, Escherichia coli; identical to SEQ ID NO: 88315

SEQ ID NO: 90350 - DNA, 1377 bp, Escherichia coli; identical to SEQ ID NO: 90326

SEQ ID NO: 90351 - DNA, 606 bp, Escherichia coli; identical to SEQ ID NO: 88315

SEQ ID NO: 90352 - DNA, 1377 bp, Escherichia coli
ctgcttaactttcgttgcttcaaacagctcgatatcacttttgatgagcacattacgattctggttgcaccgaatggcgcgggcaagacgacagtgctggatgcggtacgcctggcgctgttcccctttattcgtggttttgatgccagcctctacgtgaaagataaatcactagcgatccgtaccgaagacttacgtctgatttaccgccaggaggcactgaacatggaaatgtcgtctccagccaagattacagctaccggagaatgggcaagcggaaaaacggcaacctggatgctcgataaacgaggagaacagccgccacatgaagataagatggcggcgcagcttacccgctggggtgagcaactccagaaacgagtacgtgaagagcatagcttgcaacaagttgaacttcccctaatgctttatttggggactgctcgcttatggtatcaagaacgttatgaaaaacagcctactgagcagcgcctggataatagtgccttttcacgtttgtccggctatgacgattgcctctcagccacatctaactataaacagtttgagcagtggtatagctggctatggcttagctaccgtgaacatcaaatcacacaacttgaatcaccttcagcaaagttaaaagaaggtgttcgtgttcaacggatgaaagaagccattcaggctatccagcaggccattaactgtctgacccagcaggtgacaggctggcacgatctggaatacagcgccagccataaccagcaactggtaatgagccatccgcaatacggcaagatccccttatcccagctcagcgatggcttgcgaaatgccgtcgcaatggtggcagatatcgcatttcgctgtgtcaaactcaatcctcatttacaaaatgatgcagccttaaaaacgcagggaattgtgctgatcgatgaagttgatatgttcctgcaccctgcctggcagcagcaaattatccagtctttacgcagcgcatttccgcagatccagtttattgttacgacccatagcccgcaggtgctcagtacggtaaaacgcgagtccattcgtctgcttgagcaggatgagaatggcaacgggaaagcgttgatgccgctcggagcaacctacggcgagccgagtaacgacgtgctgcaaagtgtaatgggcgtcgatccacagcctccggtgaaggagaaggcagacctgcaaaaactgacaggatgggtggatcaggggaaatacgacgagccgaaaacgcagcaactgatggtcgcattggaagttgcgttgggtgagaagcatccacagcttcaacgcttacagcgcagtattgcccggcagagactgctgaaagggaaagcgcaatga

SEQ ID NO: 90353 - DNA, 606 bp, Escherichia coli; identical to SEQ ID NO: 88315

SEQ ID NO: 90354 - DNA, 1458 bp, Escherichia coli
atgagtttttatatagagagtgctcttgttgataataagagaatagaactagtgccacaatcaatacataatataggtaatatatatactgtattaattggaaaaaacggaacaggtaaaagtatttttttaagtaaacttgcaaatagtttatgtagtattcaagtggaaaataaatatttaaagcgtgattttgatagtaatgaaaaaaataacgctaaaatgtcttttaatattgtaaatgatggtgttggtaatgaaattagattggaggggcgtaagtttatagatggtgatagtaaatatcttctcccttccgttttgacatgtatatcaacaagcccatttgataaattttcatcagaacgtaggttttataactccaaacatgatattaacacattttatcattactttggattgaaagatttaggacggaaaaatgccattcatgcttttatagaaaaaatcctatattcaagaattaatagttcattaaaaaatgacagagagtcatttgaaaaaatattgggttttttaaattaccagcctaaaataaaaattgagttcagaactagagttaggcttaaaaaattatttgagcttgatgatgaagagcttataagacaaattgaaaagccaatatttacaccaacgggtatatataagtggagtaaaaatcaatctaattatgatgtgcctagaataagaagttcattatttctcattaacgattacattttagcctcctcagatagacgttcgaattcaggttcagaggcaaggtattttgatgttgagataaatgctcttaatgagaatatgataaatatatctgaacacgtgatgcatgagatgttatatttaatggggttgaatttattatctattagagatatatatctttataaaaaatcaggtgatgaagttatattatatgaagctagttctggtgagcagtgtttactaattaacacatttggtattgctaatagcattgcagataatgctttaatactgatagatgagccagaagtaagtcttcatccagagtggcaggaggtttatattgaattgcttatggatgtctttagtcataagaaaggatgtcactttattattgcaactcactcccctcaaataatatccaatcttaagaaagataactgttttattactactcttgaaaatggcaaaacatatcatgctaaggatttcataaataagtcagcagattttcaactagcaactttaatggagactcctgggcatgagaatgaatatttaaaaagactggcagtaaatatattaagtaaaatttctgccaatgaagagctgagtgatcaagatataaatgatgttctatggcttaaggatatatctaaaaatctagagccgaacgatacagtcatgtttcttattggtttgatcgttaagagcaaggtgtctttaaaatga

SEQ ID NO: 90355 - DNA, 639 bp, Escherichia coli
atgatttctaatgcttatttgtataataatgattttcaggaaaggataaatgcaaaaataagctcagaggggttttgttctgattcatggtctgataatgatattagtgatattaaagagtcaataaagcaattttatatacctgaacaaaaccatatttgtccttattgccaacaaagatttttgactaacaatgggaggcaatgggatatagaacatataataccacgccaaactcaagttggtttcatgtttaccccacagaatttatgtgtctgttgccctgattgtaatagtcataaaggatataaaaaaacaacgactagtgtcgctaaaaaaacgctacctacaaaaccgcacttatatcttatcgttcacccacacttcgataaatatgacgatcatatagaggtcattgaacccggatatctctatagagcaaaaagtaagaaaggtgaaaatacaatgtatgtttgttcattaaacaggttttatcagttttctggttataattcagcagtagcaacagatcatcgtttgatgatgttggcaaatggtttatcttctgcacagagcgaagaagagaaaaggcaaatacgtcgagaaatgatatctatatcactacgggcaaacatatag

SEQ ID NO: 90356 - DNA, 1377 bp, Escherichia coli; identical to SEQ ID NO: 90326

SEQ ID NO: 90357 - DNA, 606 bp, Escherichia coli; identical to SEQ ID NO: 88315

SEQ ID NO: 90358 - DNA, 1356 bp, Escherichia coli
atgaatatccgcacgcttaagctcactaatctggggcggtttgaagaacttgaagttcatctggctccagtggaggagttcaagagcaatgtgaccgtttttattggtaataatggtgcaggtaaaacatcaatattaaaatcgttggcaaccagcctgagttggttcgttgcccgagttcgtactgaaaaaggtaacggtagccctattcctgaagacgctattctgaacggtaggagttcggcgacaattgaacttcaggtactgaatacgcatccagcgacggaggccgctacgccctaccgttggttgcttgccagaacggccagtgggaaaaaatcgaccaccgcctccagcctgcaagaggccagccaattggctgcgttttatcgagatcaatacacccagaatagcggggcatccttcccgcttatcgccttctatcccgtagaacgtgtcgtgctggatgtgccgttgaaaataaaagaacgtcataattttttgcaactggatggctacgataacgccctgaatcagggtattgatttccgccgtttctttgagtggtttcgcaatcgcgaagatgcagaaaatgaatcgggcttaccccaagacgttctggataagctcagtaccaggatagatctcgataacaccgtcttaaatgcattaacggcaatcatggcctcgtcccgggatcgccagttgaccgccgtcagaacggccattagtcgctttatgccagggttcagcaacttacgcgtcaggcgtaaacctcgcctgcatatgtcgattgataaaaatggccagacactgaatgtgctgcaattatcgcagggtgaaaaatcactgatggcgttagtcggcgatattgctcgccgcctggcaatgatgaacccgatgttagaaaacccgctaaacggcgagggaattgtattaattgatgaagtggacatgcacctgcatccaacatggcagcgtacaatcatccagcgtctgacgacaacattcccacattgccagtttgtcttaacaacccactctcctttagtgatcagtgattacaaagatgtgctggtttattctctggataatggcgaattaacgcagctcccgtctctgtatgggcaagatgcgaatactgtgcttttgaatgtgatggatacggatattcgcaatgcgacagtggcagaaaaacttaacgatcttttggatctgattcagaaaaacgactttatcaacgctaacgctcttctgaatacgctaagcctggaacttcctgaaaaccatcttgaactggtgaaagccagaatgcttctgcgcaaacaggaaattaaacatgcgcgaaataactaa

SEQ ID NO: 90359 - DNA, 660 bp, Escherichia coli; identical to SEQ ID NO: 85983

SEQ ID NO: 90360 - DNA, 1356 bp, Escherichia coli; identical to SEQ ID NO: 90280

SEQ ID NO: 90361 - DNA, 660 bp, Escherichia coli; identical to SEQ ID NO: 87575

SEQ ID NO: 90362 - DNA, 1377 bp, Escherichia coli; identical to SEQ ID NO: 90214

SEQ ID NO: 90363 - DNA, 606 bp, Escherichia coli; identical to SEQ ID NO: 88315

SEQ ID NO: 90364 - DNA, 1356 bp, Escherichia coli; identical to SEQ ID NO: 90358

SEQ ID NO: 90365 - DNA, 660 bp, Escherichia coli; identical to SEQ ID NO: 85983

SEQ ID NO: 90366 - DNA, 1377 bp, Escherichia coli; identical to SEQ ID NO: 90214

SEQ ID NO: 90367 - DNA, 606 bp, Escherichia coli; identical to SEQ ID NO: 88315

SEQ ID NO: 90368 - DNA, 1356 bp, Escherichia coli; identical to SEQ ID NO: 90280

SEQ ID NO: 90369 - DNA, 660 bp, Escherichia coli; identical to SEQ ID NO: 87575

SEQ ID NO: 90370 - DNA, 1377 bp, Escherichia coli; identical to SEQ ID NO: 90214

SEQ ID NO: 90371 - DNA, 606 bp, Escherichia coli; identical to SEQ ID NO: 88315

SEQ ID NO: 90372 - DNA, 1377 bp, Escherichia coli; identical to SEQ ID NO: 90214

SEQ ID NO: 90373 - DNA, 606 bp, Escherichia coli; identical to SEQ ID NO: 88315

SEQ ID NO: 90374 - DNA, 1356 bp, Escherichia coli; identical to SEQ ID NO: 90358

SEQ ID NO: 90375 - DNA, 660 bp, Escherichia coli; identical to SEQ ID NO: 85983

SEQ ID NO: 90376 - DNA, 1215 bp, Escherichia coli
atgatgaatatccgcacgcttaagctcactaatctggggcggtttgaagaacttgacgttcatctggctccagtggaggagttcaagagcaatgtgaccgtttttattggtaataatggtgcaggtaaaacatcaatattaaaatcgttggcaaccagcctgagttggttcgttgcccgagttcgtactgaaaaaggtaacggtagccctattcctgaagacgctattctgaacggtaggagttcggcgacaattgaacttcaggtactgaatacgcatccagcgacggaggtcgctacgccctaccgttggttgcttgccagaacggccagtgggaaaaaatcgaccaccgcctccagcctgcaagaggccagccaattggctgcgttttatcgagatcaatacacccagaatagcggggcatccttcccgcttatcgccttctatcccgtagaacgtgtcgtgctggatgtgccgttgaaaataaaagaacgtcataattttttgcaactggatggctacgataacgccctgaatcagggtattgatttccgccgtttctttgagtggtttcgcaatcgcgaagatgcagaaaatgaatcgggcttaccgcaagacgttctggataagctcagtaccaggatagatctcgataacgccgtcttaaatgcattaacggcgctcatggcctcgtcccgggatcgccagttgaccgccgtcagaacggccattagtcgctttatgccagggttcagcaacttacgcgtcaggcgtaaacctcgcctgcatatgtcgatagataaaaatggccagacactgaatgtgctgcaattatcgcagggtgaaaaatcactgatggcgttagtcggcgatattgctcgccgcctggcaatgatgaacccgatgttagaaaacccgctaaacggcgagggaattgtattaattgatgaagtggacatgcacctgcatccaacatggcagcgtacaatcatccagcgtctgacgacaacattcccacattgccagtttgccttaacaacccactctcctttagtgatcagtgattgcaaagatgtgctggtttattctctggatgatggcgaattaacgcagctcccgtctctgtatgggcaagatgcgaatactgtgcttttgaatgtgatggatacggatattcgcaatgcaacagtgggtgagagcaaaaccacgggataa

SEQ ID NO: 90377 - DNA, 624 bp, Escherichia coli; identical to SEQ ID NO: 86041

SEQ ID NO: 90378 - DNA, 1377 bp, Escherichia coli; identical to SEQ ID NO: 90326

SEQ ID NO: 90379 - DNA, 606 bp, Escherichia coli; identical to SEQ ID NO: 88315

SEQ ID NO: 90380 - DNA, 1377 bp, Escherichia coli; identical to SEQ ID NO: 90214

SEQ ID NO: 90381 - DNA, 606 bp, Escherichia coli; identical to SEQ ID NO: 88315

SEQ ID NO: 90382 - DNA, 1623 bp, Vibrio cholerae; identical to SEQ ID NO: 85886

SEQ ID NO: 90383 - DNA, 618 bp, Vibrio cholerae; identical to SEQ ID NO: 85887

SEQ ID NO: 90384 - DNA, 1194 bp, Burkholderia cepacia
ttgaagggcgcgcgtgaggcgctaactggcttgacctaccacctgtcgctgccgaactctaacctcgcgccgtttggcgaggcaggttcggtgcgcgtcgaatcaatcgtcgccgcgggccgataccggttcgaagagcagtatcccgctcaggtagatgtggttggcgaggcgttcggaaaagcactagcgtggagcgtcgcaaagatcaattcagcaggcggtatgcagctcgatgggcaacagccgggtgcactttggcacgctgctttctctggtcagaacgcagacgacaccccgtcgaccgcggaccgcgcgctgccgattgtcgcgttctatcctgcttaccggctatggccccacgcgcaggtcaacgagatggtagcggccactgagcgtccgtctcgaatggatggctaccggtactggtgggaagctgcaggtgactcgctagcgcttcagcaatgggcaatcagcaagagcatggagcgactgcagttgacctccgagcgatcggtccgctgggacgaggtcgatgatgacgagctcggcatggtcaatactgcgctggctgcagttgttgaaggcggaaaggggattcgatatgatttttcccaaaaaaccttgctgatcgagtggctaggcgaggtacccccgaccgagttccggtttctgagcgatggtcagcgcgtcgcgattgccttggtggcggacattgcgcgccgcatgtgtttgctgaatccgcacttgggccagtcggtgacccagaagactccaggcgtcgtattgatcgacgaactggatgtccatctgcatccccgctggcagcgcctcatgacgaaggggttgcaggctgcttttccgcaggttcagttcatcgttaccagccattcgccacaggtgctcggcgagttgcagccgcagcaaatcatcctcttgagtcaggaggggatcacccatccacccgtcagctatgggctcgatgcgagccgcgtactcgcgcagatcatggacgccaatcaacgttcgaccgaggtcgagaaggcgttgtcggcgttatttgaaagcttggagcgaaacgagctcgggcgagcgagagggtacctttcgaacctgaagactgtggcgccaggcattccggagctggcaggtgctgaggcattgttgaagcgcaaagaggtgcttggccgatga

SEQ ID NO: 90385 - DNA, 717 bp, Burkholderia cepacia
atgaaacaggtgacgaaacgcgcgtcgccgactgagttcgaagattggaagactcgcggcgcggtcgattggcaaccaacctatgcggatctgcagcggcccgagaagcaaattctccaccatgcgctgctcgacgagcaaggttgggtgtgctgctactgcggcggtgcggtaacggaaaagaatagtcacatcgaacatttccgcccacagagtgacttcggtgcgctgcagttgaactacgataacctgcacgcgtcctgtatggggacgtcgaggcaggcattggacgaccgcgaagacggggcgaatgggagtcgctctgtgaagcggctgccgacgttttgcggtgacgccaagcgtgatcaatttgacgaggctcgacatatttctccggccgatccgaactgtgaatctcgcttcatctatacccagacaggtcagatcttgccgagtgatcatggcgactcgtcggcaagttacatgctgggcattctggcgctggacgtgcagcatttgcgcgccgcacgtgaggaagtccttaaggcatttgattcggcgtttctcgccaccgtgaccgcagatgaactgatgcaattgcgtgatgcatttcgtactcgggacgcagacgggaagttgaagccgtacgggcacgtggcggcccgttacgcggagcaacgtttggccgacctccagcagccggccgctggtgcatag

SEQ ID NO: 90386 - DNA, 1194 bp, Burkholderia cepacia; identical to SEQ ID NO: 90384

SEQ ID NO: 90387 - DNA, 717 bp, Burkholderia cepacia; identical to SEQ ID NO: 90385

SEQ ID NO: 90388 - DNA, 969 bp, Burkholderia cepacia
atgcagctcgatgggcaacagccgggtgcactttggcacgctgctttctctggtcagaacgcagacgacaccccgtcgaccgcggaccgcgcgctgccgattgtcgcgttctatcctgcttaccggctatggccccacgcgcaggtcaacgagatggtagcggccactgagcgtccgtctcgaatggatggctaccggtactggtgggaagctgcaggtgactcgctagcgcttcagcaatgggcaatcagcaagagcatggagcgactgcagttgacctccgagcgatcggtccgctgggacgaggtcgatgatgacgagctcggcatggtcaatactgcgctggctgcagttgttgaaggcggaaaggggattcgatatgatttttcccaaaaaaccttgctgatcgagtggctaggcgaggtacccccgaccgagttccggtttctgagcgatggtcagcgcgtcgcgattgccttggtggcggacattgcgcgccgcatgtgtttgctgaatccgcacttgggccagtcggtgacccagaagactccaggcgtcgtattgatcgacgaactggatgtccatctgcatccccgctggcagcgcctcatgacgaaggggttgcaggctgcttttccgcaggttcagttcatcgttaccagccattcgccacaggtgctcggcgagttgcagccgcagcaaatcatcctcttgagtcaggaggggatcacccatccacccgtcagctatgggctcgatgcgagccgcgtactcgcgcagatcatggacgccaatcaacgttcgaccgaggtcgagaaggcgttgtcggcgttatttgaaagcttggagcgaaacgagctcgggcgagcgagagggtacctttcgaacctgaagactgtggcgccaggcattccggagctggcaggtgctgaggcattgttgaagcgcaaagaggtgcttggccgatga

SEQ ID NO: 90389 - DNA, 717 bp, Burkholderia cepacia; identical to SEQ ID NO: 90385

SEQ ID NO: 90390 - DNA, 1164 bp, Burkholderia cepacia
ttgacctaccacctgtcgctgccgaactctaacctcgcgccgtttggcgaggcaggttcggtgcgcgtcgaatcaatcgtcgccgcgggccgataccggttcgaagagcagtatcccgctcaggtagatgtggttggcgaggcgttcggaaaagcactagcgtggagcgtcgcaaagatcaattcagcaggcggtatgcagctcgatgggcaacagccgggtgcactttggcacgctgctttctctggtcagaacgcagacgacaccccgtcgaccgcggaccgcgcgctgccgattgtcgcgttctatcctgcttaccggctatggccccacgcgcaggtcaacgagatggtagcggccactgagcgtccgtctcgaatggatggctaccggtactggtgggaagctgcaggtgactcgctagcgcttcagcaatgggcaatcagcaagagcatggagcgactgcagttgacctccgagcgatcggtccgctgggacgaggtcgatgatgacgagctcggcatggtcaatactgcgctggctgcagttgttgaaggcggaaaggggattcgatatgatttttcccaaaaaaccttgctgatcgagtggctaggcgaggtacccccgaccgagttccggtttctgagcgatggtcagcgcgtcgcgattgccttggtggcggacattgcgcgccgcatgtgtttgctgaatccgcacttgggccagtcggtgacccagaagactccaggcgtcgtattgatcgacgaactggatgtccatctgcatccccgctggcagcgcctcatgacgaaggggttgcaggctgcttttccgcaggttcagttcatcgttaccagccattcgccacaggtgctcggcgagttgcagccgcagcaaatcatcctcttgagtcaggaggggatcacccatccacccgtcagctatgggctcgatgcgagccgcgtactcgcgcagatcatggacgccaatcaacgttcgaccgaggtcgagaaggcgttgtcggcgttatttgaaagcttggagcgaaacgagctcgggcgagcgagagggtacctttcgaacctgaagactgtggcgccaggcattccggagctggcaggtgctgaggcattgttgaagcgcaaagaggtgcttggccgatga

SEQ ID NO: 90391 - DNA, 717 bp, Burkholderia cepacia; identical to SEQ ID NO: 90385

SEQ ID NO: 90392 - DNA, 1194 bp, Burkholderia cepacia; identical to SEQ ID NO: 90384

SEQ ID NO: 90393 - DNA, 717 bp, Burkholderia cepacia; identical to SEQ ID NO: 90385

SEQ ID NO: 90394 - DNA, 1194 bp, Burkholderia cepacia; identical to SEQ ID NO: 90384

SEQ ID NO: 90395 - DNA, 717 bp, Burkholderia cepacia; identical to SEQ ID NO: 90385

SEQ ID NO: 90396 - DNA, 969 bp, Burkholderia cepacia; identical to SEQ ID NO: 90388

SEQ ID NO: 90397 - DNA, 717 bp, Burkholderia cepacia; identical to SEQ ID NO: 90385

SEQ ID NO: 90398 - DNA, 1194 bp, Burkholderia cepacia; identical to SEQ ID NO: 90384

SEQ ID NO: 90399 - DNA, 717 bp, Burkholderia cepacia; identical to SEQ ID NO: 90385

SEQ ID NO: 90400 - DNA, 969 bp, Burkholderia cepacia; identical to SEQ ID NO: 90388

SEQ ID NO: 90401 - DNA, 717 bp, Burkholderia cepacia; identical to SEQ ID NO: 90385

SEQ ID NO: 90402 - DNA, 1194 bp, Burkholderia cepacia; identical to SEQ ID NO: 90384

SEQ ID NO: 90403 - DNA, 717 bp, Burkholderia cepacia; identical to SEQ ID NO: 90385

SEQ ID NO: 90404 - DNA, 1194 bp, Burkholderia cepacia; identical to SEQ ID NO: 90384

SEQ ID NO: 90405 - DNA, 717 bp, Burkholderia cepacia; identical to SEQ ID NO: 90385

SEQ ID NO: 90406 - DNA, 1194 bp, Burkholderia cepacia; identical to SEQ ID NO: 90384

SEQ ID NO: 90407 - DNA, 717 bp, Burkholderia cepacia; identical to SEQ ID NO: 90385

SEQ ID NO: 90408 - DNA, 969 bp, Burkholderia cepacia; identical to SEQ ID NO: 90388

SEQ ID NO: 90409 - DNA, 717 bp, Burkholderia cepacia; identical to SEQ ID NO: 90385

SEQ ID NO: 90410 - DNA, 1362 bp, Burkholderia ubonensis
gtggcggacgaattcatccggagcgccacgggagttccgccagccccgccacccacgatagttccgtcggtcgatacggccgggattcccagcatcgtgtggctcgataccatcgaaatcagcaacttcaagaccatcaagcatttgaagctgacctttcccacgcagcccgaggatgtaaaacagaaagggcagccgtggctaatggtgctgggggagaacagcgtcggcaaaagcagcctgctgcaagctgtagcgttgacgctaatgccagacgaggagcgtgaacgccttggccgtgcggatgcctgccttaccaagcggaccggtgcctcaaacggttacgttcgcctgacattcaccgacggctcgcagcgcaagctttcattcgcaaagggcgacaagcacttccagatcgacgggccgaagcctgatatgccggtactggcatacggatccacacgcctgttgcccggcgcacgcacgcgcaaaccagaccgcccgccgtcagtcagcgttcgcaatctgtttgatcatactcatccgctcgtgaacgctgaacgttatctatgcgacaccgatctcatcgacgatgagcgcttcaacctcctcgcaaccagtctgaaggacctgttgcccgtcagcggaaaagcacacatcacgcgcaacgccagacacatgaagagcacgatgaacggcttacatgcgtcgctggacgaattgagtgacggctataagtccgtgctggcactagccatggacattatgtttcatctatcgaacagttcgttcgacatggagtcggctcaaggcctcgtcatggtggacgagctcgaactgcatctgcatccgcgctggaagattcgcatcatcgaccagttgcgcacgctgttcccacgtgtccgctttattgtcagtacccacgacccactatgcgtacacggtctgcagaacggtgaactgcatgttatggccaagcatccaagagacaatgaattcatgatcgagcagatcgacgtgccgcaaggtactcgcgccgacgaagtgctgaccggcccatggtttggcctgccgtccacgatggatgcagagactctggaattcatgtccgaacacagcgcgctactgcagcgaccggagcgaacggtcgtccagacgcagcgcatgcatgagctggaagaactcctgcgaaaacgcatgggaacctttggtaatacacgcgcgcagcgtgccgccatggcagccgcggcagtactcgatcgcggcatgcatcaggaccaatacgatctggtgatcaagcgccgtctgaacgaagcgctgagtgacatgccagggcccaagacgggagatgaaaatgcgtaa

SEQ ID NO: 90411 - DNA, 858 bp, Burkholderia ubonensis
atgcgtaagctctttcgtcccgatgagcatcacgcctttgaagatgcggttcgagatgccaagaaaaacgtcgacgccgacataaagaagaaaagtgagaccgtcgaatttccgagcaaatggtcagctttcaaagatatcttcatcaaagcccagcgtggtaaatgcggctactgcgaagggcgagtgtgggggctgcagtatggagacatcgagcatttccagcccaaagcggaagtgcacgaactgtccgacaatcccgatcattggggcagggaaaccccgtgggaatcaaccgtcgagcagcgaaaaaccgagaacacactgaaacccggttactggtggcaagcttacgagtggagcaactatctgattagctgccagatctgcaaccagcaatggaaaaaaaacctgtatccgctcaaggaaccgcgaacacagcctccacaccgagacgactgcgaacagccgctgctgctatcccccttccttgaagacttcgacccggccgaacatttcgagtatggtcggctgggcgagattagcgggaaatccgagcaaggccgagcaaccatcgtcacctgcgggctggaccgccccagcttgcgccttgcgcgctacgagcaggccaaggccacacatgaacatctcgatgaaatcgctggcgacataacagaacgggacatgctggaaatgttgcgctacatcaagcgcgacggtgacgaagcacgaccttactgcggcatggtgcacaccatcttcaagcaacgtaccggattgacctgggaacaactgagtaagctcatctccagactggaggcaagccagactccggagcggtcgctgtgcaattgctga

SEQ ID NO: 90412 - DNA, 927 bp, Burkholderia ubonensis
atgctgttattggcctatgggtcaagcagactggtggaaacatcccgccataaggctcgcgacggcctgctgcacgcgaaaatcgacaatctattcgacccgttcctgccaattcacaatgcaaagggatggctctcgcaagtcgatcaacggacggccgatgaagttcacgcaacgctgcagtccttgattgcggacggcaaaagcgctaaggttctgaaggcaatcgatgaccgcagcctgctgtttgacttcggcgatggcagtgcgtggccacttgaagagctcagtgacggatacaagtcgttgctagccatggctgtcgatatcattcaggtgatgtctatggccggcttcgaatcgatggaatctgcccaaggtgtcgttataatcgacgagctgggaaatcatttccacccgacctggaaaatgcgcattgttcgtgcgctgcgtgaggcgtttccgtttgttcagtttatctacagcactcacgagcctctttgtcttcgaggtttgaaagatggcgaaatcgcagttttcgagcggggcgacgatgcatccgcctatgccctcgttaatctgccgtcaaacagcgcactttacgttgaccaactcctgacttcagagcatttcgggttggagtccacgctcgacccgcaactccagatggatatgtcgcgctacgaagaactggcatcgatggtgcatcggtcggacgttgacgaggcggaactcgaatcgctcgaacaatcgcttacagatgcaggccacctggggaagtcgcatcgcgagagaatcatgttgatggtgattgacgcgcttctgaaggcagaaaagccttcacgcaccaaaggcaccatcgatatcaaagccctcgacgaaaagaccgtcgcgctgctaacgaacgtgttcgctaagctggaatga

SEQ ID NO: 90413 - DNA, 885 bp, Burkholderia ubonensis
gtgattaaggtcgacagaagcaaggtcaccatacctgagtaccttgacggcgccggcagcgccggtgacgaagaaatgcaagcaaacctgcggcggcacgctgccgggaataacgactttgtatttgaagcatacaaacacaacacggtcaaagacaggcttgaggagcttttcgggcgaaaatgcgcctattgtgaatcagacatcgaggctgttcaaccgagcgagattgagcattaccgccccaaggggcgcgtagccgaactgaacccgaccacgaacaaggttgaataccaacttggctacttctggctggcagcaagatgggaaaacctccttgttgcctgcattgattgcaaccgtcggcgcaatcacaaggatgaccaaggcgacctcgaattgctgggaaaagcggactacttcccgcttgcaaccggcacggctcgagcgctggatgacgcgacactggcggcagaacaacccatgctactcaatccgtgcgtggacgacccgcgcgcccatctggaatttactgatactggcggcgtccgtgcaatcaagaggaatgggacagcggaccctcgcggcgcagcgactatcgagcttctggggcttgcacgaggaggattgttgaagaagcgcgccaagcacgccatgtctgtccgatactgccttgagggattgcgggaatcactcaagaacggtggcagtgtaactcgacatctgaacgagctgcttcgactgctcgacccaaaatacgaacacaccgggctcacaaaacatctggctgcaaccgaactgcttgacctcttcagagatgttgagttgccggcggccctcgaagcggcactgacgaaagtcgccgatgcgctagataacatttga

SEQ ID NO: 90414 - DNA, 684 bp, Burkholderia vietnamiensis
gtgttggactttagccgtgcgcgggaatttgcctccgtgctgaaactcgaatccaggttgcgcgcctggaacgtcctgcggggcattcgcgtgtatctgcagcgggtcgataacggcgacgctatcgagatacagcacgcgagctctgggcagctcgcgctcatctcgtcgcttctgttcgtgatcgcgaatacgcgcgaggatccaatcgtcatcatcgatgagccagagaacagcttgcaccccaagtggcagcgtgaatacatcgagaaggtcatgactgccttgagctaccgcaatgcgacgatcatcgttgccactcatgctccactggtggtcacgggagcccttgcggacagtccgcaaatcgtatccgtgttcgagctccgaaatggccgtccacagcgtttgcagatggaccgcgcaggtagctcgccgggtagcatcgaggaaatattgtggcgtgcctttgaggttgtgacgccggcgaaccacttcgtcagcgagcagatcgtcgacgaggtctcgcgtttcgaaaaaggtgaggtgaggaaggaggaggtcctggcgctcatcggaaggatggaggacgaaagtttcgacgagcgccaacggagttttttcaacgcagtgcgcgggctgcttgacaaggttgaggcgggtagtgatgagggagaccaatga

SEQ ID NO: 90415 - DNA, 657 bp, Burkholderia vietnamiensis
atggtcgatagatacctgccggcacttgatgcgttcatgctaaccgtcgatgagcagagtgctgtgacttccgccctcacgagcgcggacccgtgggagtggaatccgggcggtgcacaatcgaccgcgatagccagcgtaaagacgaagattcgtgactatcatctcgcgcgccacggcgacagatgttgctactgtcgggtcaacctccatggtggcggccccttcatgaccgacagggagcatgtcttacccaagtcggtcgctgactacagacctttgtcctatacgatgtggaacctaggcatcgcctgcaagcggtgcaacatggaatacaagaagaacaggactgacttcgtcgtggctttggaggatgcttcattgttgcaagagggggcgaattaccgttttatccaccccaacttcgatttctaccgcgaacacttgttgcgcttcgccctggaagttgaggagactgtgatcgtcaaatatgtggtcgtggctgggagtgcgaaaggcgcatacacctacgactacttcaatttacgcgggctggaagtgaacagcttcgacagcgcgcagggcttggacacactagaggctccgggcgaggccgctcaagcggtcaggtcgcttgccgcttctttcgggcagtga

SEQ ID NO: 90416 - DNA, 1428 bp, Burkholderia sp. MSMB0856
atgaatgttgaaaagctcgaactgagaaatgttgggcagttccggtcgctaacggtcgctttagcaccgctgcccgccgtgccatcaaacgtaacaatacttattggaaacaatggcactggcaagacaacgatcctcaaatcgcttgcgactgttcttagttggttagtggccagagttcgcagtgacaatggaaatggtacgcctatccctgaggaggtcatcagaaatgacgctgtatctgccgcgcttgaaatcacattaacggagcagtcggatcgtttcggttggaccctggcaaaggcgcgcctcggtcggaagggcgaacatgcgtctaattttgacgacgcaaaccaactggcggacagataccgacatgccttctcaatcgatgcgtcaacaagtcttccgttgatcgccttctactcggttgaacgggtggtactggatgtccctctcaaaatcagggaaaagcacacattctctcagctggacggctatgacaactcgctaaagcaaggcgttgactttcggcgattcttcgagtggtttcgtgaaagagaagattgggagaacgaatcgggtatctccaaggcagctgataacctcgaaagaaacgatcccgaaaagttgaaagcactcatcgacttcatagaaaacggtggagctgatcttgataatttgaagaaatttgacttcaagggactgagaacggtgctccagcaggccacgaacgcccttcaaatagcgaggacattgcgagaaggtgtgcgtgacccccaactggatgcagtcagacgggcgatcggggagtttatgccggggtttcggaacctgaaagtgcggcgcaaaccgagattgcacatgtcagtcgacaagcaggggcaaagactaaatatcctgcaactctcacagggggaaaagtccctcatggcattggtgggtgacatcgcgcgccgactcgcgatgatgaatcccggcttggaggaccccttgcatgggaatggcattgtgctgatagacgaagtagatctgcatcttcatccacaatgggcgcgcaaaattgtcgagcgactccgcactactttcccaaattgccagtttgttctaaccacccattccccgctggtaataagcgactgtagggatgtgctcctctacgcactcaacgatggcgagttgacgcaagtaccgtcgcaatacggacaggatgccaacaccgttctgttagacgtgatggatacgcatatccgaaattcgacaattgctaaacgtctgaatgacctgatggacttcattcaagagagtaaacttgaggaggccaaaggattgctgaatgagttgaagctagagttaccaccgaacaatttggaattgactaaggcgagcctacttcttcgcaagaaggaacaacgtgcgaaagattga

SEQ ID NO: 90417 - DNA, 639 bp, Burkholderia sp. MSMB0856
gtgcgaaagattgagaagggcaacgagccagatagcctaagggcgttcaaaagagccaatcagcactgccgctatgtcgatttgactgatgcggaacgacgcgacatacggagcgtatgtacccaagaacaatattttttgtgcgcctattgctgtcagccgatctctggggagaatcgagacacgatgaacgagcacgtcgaggcgcaaaacctagcaccaaaccggacagttgatttcgctaatatagtagcaagctgcaaagcgccgagacagtgcgactccgcgcataagggacaggcgcttaacctaacacctttgatgccggaatgcgaaaccgagttgcgcttcatgctgagtggcagggtaaagggcaaaactccccgcgcaaccgacgctattcgtgtcttgaatttgggtgatcatgaggaaaataataaggcgttgattgagaaacgcaaaaatctcgtggaacagcttatttggcgcaaggctgggaacgggcccgaagacctttctattgaagatccggaaatactcgaaatgctgatagatgacttgtcacagcctgtcgatgggcggctcgagggctttgcgccggtattggtcaacattttgcgcaactacctcgacgaataa

SEQ ID NO: 90418 - DNA, 1380 bp, Enterobacter cloacae; identical to SEQ ID NO: 87572

SEQ ID NO: 90419 - DNA, 636 bp, Enterobacter cloacae; identical to SEQ ID NO: 87573

SEQ ID NO: 90420 - DNA, 1194 bp, Burkholderia cepacia; identical to SEQ ID NO: 90384

SEQ ID NO: 90421 - DNA, 717 bp, Burkholderia cepacia; identical to SEQ ID NO: 90385

SEQ ID NO: 90422 - DNA, 1194 bp, Burkholderia cepacia; identical to SEQ ID NO: 90384

SEQ ID NO: 90423 - DNA, 717 bp, Burkholderia cepacia; identical to SEQ ID NO: 90385

SEQ ID NO: 90424 - DNA, 1311 bp, Burkholderia cepacia
atgagactcgattcgattgtcctgaaaaattaccgaggttttcggcacttgcccatcaagttccaaccaggtttcaatgtccttgccggtgtcaacggaagtggcaaaacttcaatcttgaagggcgcgcgtgaggcgctaactggcttgacctaccacctgtcgctgccgaactctaacctcgcgccgtttggcgaggcaggttcggtgcgcgtcgaatcaatcgtcgccgcgggccgataccggttcgaagagcagtatcccgctcaggtagatgtggttggcgaggcgttcggaaaagcactagcgtggagcgtcgcaaagatcaattcagcaggcggtatgcagctcgatgggcaacagccgggtgcactttggcacgctgctttctctggtcagaacgcagacgacaccccgtcgaccgcggaccgcgcgctgccgattgtcgcgttctatcctgcttaccggctatggccccacgcgcaggtcaacgagatggtagcggccactgagcgtccgtctcgaatggatggctaccggtactggtgggaagctgcaggtgactcgctagcgcttcagcaatgggcaatcagcaagagcatggagcgactgcagttgacctccgagcgatcggtccgctgggacgaggtcgatgatgacgagctcggcatggtcaatactgcgctggctgcagttgttgaaggcggaaaggggattcgatatgatttttcccaaaaaaccttgctgatcgagtggctaggcgaggtacccccgaccgagttccggtttctgagcgatggtcagcgcgtcgcgattgccttggtggcggacattgcgcgccgcatgtgtttgctgaatccgcacttgggccagtcggtgacccagaagactccaggcgtcgtattgatcgacgaactggatgtccatctgcatccccgctggcagcgcctcatgacgaaggggttgcaggctgcttttccgcaggttcagttcatcgttaccagccattcgccacaggtgctcggcgagttgcagccgcagcaaatcatcctcttgagtcaggaggggatcacccatccacccgtcagctatgggctcgatgcgagccgcgtactcgcgcagatcatggacgccaatcaacgttcgaccgaggtcgagaaggcgttgtcggcgttatttgaaagcttggagcgaaacgagctcgggcgagcgagagggtacctttcgaacctgaagactgtggcgccaggcattccggagctggcaggtgctgaggcattgttgaagcgcaaagaggtgcttggccgatga

SEQ ID NO: 90425 - DNA, 717 bp, Burkholderia cepacia; identical to SEQ ID NO: 90385

SEQ ID NO: 90426 - DNA, 1194 bp, Burkholderia cepacia; identical to SEQ ID NO: 90384

SEQ ID NO: 90427 - DNA, 717 bp, Burkholderia cepacia; identical to SEQ ID NO: 90385

SEQ ID NO: 90428 - DNA, 1164 bp, Burkholderia cepacia; identical to SEQ ID NO: 90390

SEQ ID NO: 90429 - DNA, 717 bp, Burkholderia cepacia; identical to SEQ ID NO: 90385

SEQ ID NO: 90430 - DNA, 1194 bp, Burkholderia cepacia; identical to SEQ ID NO: 90384

SEQ ID NO: 90431 - DNA, 717 bp, Burkholderia cepacia; identical to SEQ ID NO: 90385

SEQ ID NO: 90432 - DNA, 1263 bp, Burkholderia cepacia
ttgcccatcaagttccaaccaggtttcaatgtccttgccggtgtcaacggaagtggcaaaacttcaatcttgaagggcgcgcgtgaggcgctaactggcttgacctaccacctgtcgctgccgaactctaacctcgcgccgtttggcgaggcaggttcggtgcgcgtcgaatcaatcgtcgccgcgggccgataccggttcgaagagcagtatcccgctcaggtagatgtggttggcgaggcgttcggaaaagcactagcgtggagcgtcgcaaagatcaattcagcaggcggtatgcagctcgatgggcaacagccgggtgcactttggcacgctgctttctctggtcagaacgcagacgacaccccgtcgaccgcggaccgcgcgctgccgattgtcgcgttctatcctgcttaccggctatggccccacgcgcaggtcaacgagatggtagcggccactgagcgtccgtctcgaatggatggctaccggtactggtgggaagctgcaggtgactcgctagcgcttcagcaatgggcaatcagcaagagcatggagcgactgcagttgacctccgagcgatcggtccgctgggacgaggtcgatgatgacgagctcggcatggtcaatactgcgctggctgcagttgttgaaggcggaaaggggattcgatatgatttttcccaaaaaaccttgctgatcgagtggctaggcgaggtacccccgaccgagttccggtttctgagcgatggtcagcgcgtcgcgattgccttggtggcggacattgcgcgccgcatgtgtttgctgaatccgcacttgggccagtcggtgacccagaagactccaggcgtcgtattgatcgacgaactggatgtccatctgcatccccgctggcagcgcctcatgacgaaggggttgcaggctgcttttccgcaggttcagttcatcgttaccagccattcgccacaggtgctcggcgagttgcagccgcagcaaatcatcctcttgagtcaggaggggatcacccatccacccgtcagctatgggctcgatgcgagccgcgtactcgcgcagatcatggacgccaatcaacgttcgaccgaggtcgagaaggcgttgtcggcgttatttgaaagcttggagcgaaacgagctcgggcgagcgagagggtacctttcgaacctgaagactgtggcgccaggcattccggagctggcaggtgctgaggcattgttgaagcgcaaagaggtgcttggccgatga

SEQ ID NO: 90433 - DNA, 717 bp, Burkholderia cepacia; identical to SEQ ID NO: 90385

SEQ ID NO: 90434 - DNA, 1380 bp, Enterobacter cloacae; identical to SEQ ID NO: 87572

SEQ ID NO: 90435 - DNA, 636 bp, Enterobacter cloacae; identical to SEQ ID NO: 87573

SEQ ID NO: 90436 - DNA, 1314 bp, Burkholderia cepacia
atgatcatcacgcgcctcaagttggccaatgtccgcggcgtcgaggatgccgagttcgctttcaaggctgggttcaacctgatcgtcggtgtgaacggtgttggcaagacgacagtcctcgactctcttcggatctgttgctcacgtgtgctccccggattgacgccttcgaaggcgaaggcgatgacgttcgagcgtagcgacatacggattggatttccatttttgaatgccgctgcccacttcgaggtgggtgggcgcgaattcatcttcgagcgttgcgagtggcgagagaccgtcgctgccgacaacgaagagaaccttgcaaacttgcgccgcgagatcattgagacagagcggttgagagaacggccacgcaagctgcttcgcgagcttgcgaactcgcagtctctcgtggattcggatttctattcgctgaccaagccggagttgcagaaattggttgcggtaaatggtccgccgttggcggtgttctactcgaccagccgttctgtgatttctgctactcactcgaagggaaagtctgtcggtgggccggcggcaggctacgccgaggcgctcgtcccgcgcgcttggcatgtcgagcagtttgccgactggatccgcgtgcaggaatcgctggcccacgagagcgacaaggctagtcggcacgtcgcggccatgaaagctgctgcgtcaaaattccttccgggctgcactgacatcatacccggagactctgccggctcgccgctgacgattgcgaagtcaggacttcgactcgacgtgcggcagctgtcagatggtgaacgaggagcccttgggattgcgctcgatctcgcgcggcgcttgtctcacgtcaatccggaagcagccgatccgttgactgagggcgaggccatcgtgctcatcgacgagattgatctgcatctccatccaaaatggcagcgtcagatcgtccacaatcttacggaagcattccctcgctgccagttcatcgcgacatcgcattctcctcaggtcattggtgaagtgcagtccgatcgaatacagatcatcgccgacggacaggtctactcgccgtcacactctttcggcgtcgactcaagccgaatactcgaagagattatggaggctccgcctcgtgcacgcgcagttcaagcactcctcgacgacctctcaaggcgcgtcgacgagaacgacctcaaagccgccagctccatcgtcgcccaactcgtagacgagctcggagaaggcgacgcggaggtgattcgcgcccgcacgctccttgacttccttggagccgaggaatga

SEQ ID NO: 90437 - DNA, 654 bp, Burkholderia cepacia
atgagggccatcaccaaggggcaggaaccgcgaagcctcgtcgagcaccgcgcgaatgcctattcggactacgccaactacgacgacaaggacaatctgcgggcagtgctcgtgcgtgaccagcgtggcctctgctgctattgcatggcgcgaattaagcctaccggtaccgacatgaagatcgagcactggcgatgccaatcgcggaactcgcatttagagctgtcgtactcgaacctgctcgcagcgtgcctcggagggcacggccaaccaggggcacaccagcactgtgacacgcgtaagggtgagcgcgacctgaagttcaatccagccgaccctttgcaccgtatcgaacagcgaattcgcttcgaactcgacggcgccattagatcgagcgatgcggagttcgacacgcagctcaacgatctcctcgggctcaacttgccggtgctaaaaaaccggaggaagggggtgctcactggcattctagagtggtggaagtgcgagaaggttaggctgaaggggccagtgccacgcaagcaactgattcgcgagcgagctcgacgcgatggcaacgagggcggagatctcaggccctttgatccagtggcagtctggtggcttgaccaacgcctcgcccgggatacggaataa

SEQ ID NO: 90438 - DNA, 1752 bp, Burkholderia anthina
ttgcaactcaagcacctctccatcccgcactttcgtaatctgcgaggggtagagattgacttcgcgacgcagctctcgtgcctacttggagaggctgcggacgcgccacccaaggcaatccgaagccacgcgttaatcggccagaacggcaccggcaagtccaatctaatcgaggcgctgatcaccatcttccgcgacatcgatctggaccgagatgccgcgatggactacatgctggagtacgaaatccgcggacagacagtgcgcatccaggctgacaccgccaagcagaagcgtcccttcgtttggacgaatggcaagagcgagtcacaaggctatttactgaaaaaccgtgagctattgccctcgcacatttttgcctactactccggccgcaacgagcgcatcgaggccttgtttcaggagcaccagcgccgcttcaaccagcggcaagaaatcaccaccgatgaggtccttcccgggcagttgctggaaaacttcactgccagcgattccgacatccgcgcggtgaaagaagccaagcgacgtcgcgagactcgactcaaggaagcgggcgatgaccgcttgcgccgattgttctattgccgtggcggccacagccagttggtgctactggcgtgccttctgtcagacgatccgatcttccagaaggtgcttaataacctgcacatcgagtcgttggagtccgcgttgttcgtgttgaaggagccgcaccgcctgcgcactaagcgccgcgagggcaaattcgatgagaatgagcttagcgaaggcgatccccgcttctggtatgcccgcggcaatgtcgttagtgagtttctcgacaagctttggcaagtggcctgggctcccattgaacaggaagccacacgacaggtcgatttccgggggcgcaccgagaagcagaagcagctttatcttttcgtgcccagccacgccaaactgaagcagttgggcgaattggttggaggcacggatagcttcttccgctatgccgaaggtgcctatattggagacttgatcgacgaagtgcgcatcacagtaaagaagcgcgacgatcacggcggtaaggtgagcttcacccagctatccgaaggcgagttgcagatgctcacagtgttgggattgatgcgaatcacccgggaagatcattgccttttcctgctcgacgagccggatacacatctgaacccaatctggaagctgcgttacttcgatgacattgagggagtgctaagtgcaggcgcaggtcagctcatgcaaggcgaatctcagatcctcatcaccacccatgatccaatgatggtgggcagcctgaagcgcgagcaggtacacattctgcgccggaacggacagcgcactttggtggagacaccagatgatcacccacaaggcatgggcgtgaccgggctattaaagagcgagctattcggcctgtcgtccacactggacatcgaaaccgagcggcgccttttccgtcgcaacgagctattcgtgaagtcagcacgtacaccagaggaggatgcggagctttcacgcttgtccgctgagcttgcggatctaggcttttcaacggccgattttcgcgatcccgactacgctttgtttgtgcgcaagatggcgcagcatcgaaaattccgcaagccaacactcacgccggaagaacaggccgagcaagatcgcatcgcagacgacatcattgatgaaatcttgcgtgaggaggacggtaagtga

SEQ ID NO: 90439 - DNA, 858 bp, Burkholderia anthina
gtgattttcattgacctggaacacaaaaagccaacggatgcggatatcccagggtgggcaccttggacccaggcacaatgggacgcctggctggtgaagtcgagacggctcgttaccgacatggcagcatttgaagccgtaggtaagcgtgatgagcgcaacgcgctgatcgtcgccaatagcgcacattggggggcgctgaaggagtggatgctggcgctctccggtggaaagtgctggttctctgaagtaagggagctgtattcacattacgacgtggaacactttcgacccaagaaagaagccagggcgcttgatggtacggagcgcgacggttactggtggttggccttcgactatatgaatttccgggtatgcggaaatgtgggcaaccgcaagaagggaggatggtttccgctaaaggatggctcactgtgttcgagctacgctgcaccttgcgaggaatcggaagcccggtacctgctcgaccccattgacgatgatgatgtatcgctgatcgccttcgacgaagaaggtaaggtcattccagctcctggcacctcagattgggagcaggaacgtgtgaatgtgacagttaagcgcctaaagttgaacgaacatgctcccctagccgaagagcgccgcaaagtttggcagaagattgatggcttaattaaggacttctatgctgccaaggccaagtgctctcacggcaacaatccagcggccaaggcgaaactgctggaggtccgcgcccgcgtgcgggagatgaccaagagatctgccgaattgtctgcggtcgctcgctggtgcatccaggtccgcaatgaaccgcagctatcaaggctggtctcctga

SEQ ID NO: 90440 - DNA, 1365 bp, Burkholderia cepacia
atgcttctaacttatacatccgattccgggcgctacgagtttgtaaaagacggccacgtaaactccgtggagaacacgtacaccgttattgtcggcaagaacgggactggcaagagccgattgctaagagcggttgtgtttggtctgttcgatgctgaaattcgcgaagagcttgtagaccggagcgatagagccgagctccggcagctcttcttcgagcttgatacggagttttcgcccgagcaagtgatatgcgtttcgacaagccccttcgacagatttccgcttttgcgccgcaatcagaatatccccggatacgcatatcttggaatgcgcggactgtcgagcgcgaaccaaagtctctcttacttgtctaaaatcgcaaacaccctcgtcgattccgttcaaagcgacaagagacaagccaatgcgattgccggcgtattggactacctcggttacgagtcatcgattacgctgtcgtggcagcttttatcacagcgattggtcgatgatttgctccaagctgcgaacccgcgcgacgctgctcgcgaattgattcgccgtggtcccgccatgttcctgagcgaggtggcaggtaattaccaacgaatcattgatacgcccgcagacaaactccggcacgcattagaattagcacggcacgtgcagcttggaaagcgctcacacttcgttaaactatggcttgatgaatatggactcgccagtgaagttcaagacgaattcgggctggaagacgtcctgctgcttatcaacaccggcttgttacggctccgccaagtagagctccggaagaagggtgccgacagaggctttcttatcaatcacgccagttctggtgaacaggcagtagtgctcagtctattaggcattgggagtcaaatccgcgaccgcagccttatctgcatcgatgagccggaggtctgccttcatcctgagtggcaagaaaagtatatccagcttctgtattcaacgttccaccatttcaagggctgccatttcgtcattgcgacgcactcgcctcaaatcattgcgcagttgcccgaggggaactgttacgtgatgtccatggaaacgggactcgcaaccgacgcgtcgacctactctcgaaaatctatcgattatcagctcgctgagctcttcggagcaccagggacacgcaacgagtacctgagccgtaaagcattgaacgttttctcgtcagtatcgaaaaatcgcgcgttcgactctgactcactcaaaacgctagtggcgctcgaaaagatggtcgaccttctccatgaggatgaccccgtactcgacctcattctcgctctacgggagcggcgtaatcggtatgagtga

SEQ ID NO: 90441 - DNA, 651 bp, Burkholderia cepacia
atgagtgatattgcaaatcccgtcgtctataccgacgaacagaatgcgctagtggcagcaaagagaaatgatgctgcttttacgcaccacgactgggggcacgtcgaactcgaagcgttccgctcacacgtccgcaatcattatcggaccgagcaaagagggatttgcgcgttttgtcgagaacacgtctctctgcaagcagcagagaactgtcaggtggaacatatcgtgcccaagtctatccgccctgagttcatgttcgagccgaagaacctctgcgtcatatgtgccgattgcaataccataaagcgagaccaagaagtaaccgccaccatacctgacacggtggcgcctagacgcggtcgccagagatacccccgcgcgtcaagttcgttcctgatagttcatccgcacttcgacagatacagcgaccacattcttattgagcgcgggcactacttcgataggaccgacaaggggcatttcaccatcggtgcctgcaagctgaatcgccgccttcgtgtgttcgggtgggacgaaagaattgtcgaagagccgaagctgatggatgcggcgcagcagttgctcgagtcaaaaccaggggtcgagcgacaggcagccctacaacgtatacgcgaggttctccagtga

SEQ ID NO: 90442 - DNA, 1353 bp, Pseudomonas sp. TAA207
atgattaatgcaataaattttcaagcgtgggacggtgattggaggagcattcccttcgtagcatccgagggcggctgtgaaaaacacggctttaggtgcactgtagtcaccgggcagaacggctcgtataaaagcacaatgcttcgagaattggtggctggcctgattgctccgaaatccactgagacgaagcttgatgtcagcgatggctcagtcatgaaccacgtcatctgcgcatccggctctgttgctgacagatttccctctaaggaaaaagcaggcggtggtagtaccgagtttgcgacagaacagtatgcttatatcggtcagagggttggggcgaacctccttagcaagaaacgaccttttgagaccgtgattgtatttgctttagatagaagcaagagcgaacgtttcacatggcctttctataaacaggctcatgagtttgctaacatcatgccggatctaaacgtgtcggtcttggtgcgtaaggatgggcttaagagatccagcaggcggagcgcggaggaaagcgggtactcagtgagcaaactgaagcgattgttgaatatggaggacgctgatctttctggccctgtgtctgatgacgtggctcggcatatactgaaagaattcagtgaaaacgtcttcaatgactttattaaattcatgtcttccactaaggctcgactgatcttgagtatggggaggggagggattcattgcaaaactgcctctaacgaagtagtccgcttgggctttatgctcgacattttttcgcttcgcgatgttacagttaagcgagccggaagtgatcttgaattctcaattttcgaattgagttcgggcgagtatcatatgtatacaaaccttatggggctagggttcggggtcgaagaggggtcgctgatgctcttggatgagcctgataatagcctccatccacaatggcagcgagactttatggcggcagtgcatgggatctgccagataggaatgaaatctggacatctggttgtatgcactcactctccattgatcgtcagtgcctcattagaaggcagtacaatcgttgatctctccaatgatcaacccgtcattagcgtggcatcttatggcgcttcatctgatgatattttgcttgagcagtttggcttgacttccagtcgaaatcgaatcgtagtggatgtcgtccagcgcgcggtttctatcatagaaaaagacggctttgcacatcctgatctactcgcattgacggatcagctggtctcaatcaagtcggctctgaggagggaggatcctttagttgaggtgattgatgcgatccttggagagtcgggcaatgattaa

SEQ ID NO: 90443 - DNA, 726 bp, Pseudomonas sp. TAA207
atgattaaaataggattcgagcaaatccatccgatccctgtcctccccgctgacattgttgtcgcgaatctgaagggccttagctggagtagtggtgtgaatgctgtcactgcattcaaagacacactcaagcccatgctgcgtaaggtacaacagggaagatgtagtctgtgtcggcggtttctttacgatgattatgctactcacttggagcattttatcgagaaaggtatccatcgggacttcacatacgaagttacgaacttatctttgtcctgtgggacgtgcaatataaagaagaatggatataaccgtacactcaatagcctgatcaaaaagcgtgcaagacgtaaagggcagcaagccagcaagtactgtccagtactcgctgtgaaaatttccgctaatgctccaatgcccgtttcttctgctagctatcgctggattcatccttatttcgatcgatattcagataacattgagatcgagaaaggatggatattcacgggcaaatctagaaaagggcagaggacaattcgttccgtgaaacttaatgccttggcacaaattgagcgaagagcactcgcggagcgattggaagcacggcccggtcggctatcgaagcttttgggggcgacagccgaactggataaatacagggctgggcacctcttcaaattggtgacaaagcagctatggaaacgccgagaggcttccgacgtctga

SEQ ID NO: 90444 - DNA, 1353 bp, Pseudomonas sp. TAD18; identical to SEQ ID NO: 90442

SEQ ID NO: 90445 - DNA, 726 bp, Pseudomonas sp. TAD18; identical to SEQ ID NO: 90443

SEQ ID NO: 90446 - DNA, 1230 bp, Shewanella frigidimarina
atgaaacagatacagcatgtatcgctcacactcccacatacgggtgagcctattgatattagtctcaaaggacataaccttattatcacaggaggtaacggctgtggtaaaacgagttttataaaacaattgcatgatgacattattcgcaactccgattctcaaaagtcattgcagaatctaatccaactattacaacaagctgaagatcaagtcaaacaaggagcctctaatcaaaattacaatcattttcagaataggggccgcgaacttttaaaggaaatcgataaagcaaaatctattcggatttcaatgcgagataatgctgagttcatacaagagtatgcagataaacattttgtcctcagttactacaaagcagaacgccaatcagagatatcagtagacgacacccgacctagtttacagtccctcaaaacaagggagtcaagcaaggcaatgtctgagcattttggtgtcgtttttgaaaagtatttagttgcgcaaaaagtaatctttaacgatatcgtggcaaccgaggatacaaaagcacaatcacaagcagatcgtatccagagttggctatacaaagttgaacatgatctacgctatttgtttgaggatgacgaattagaattaaaattcaacagagaaaaacaatctttcgagatccatcaagcagataaaagtccatttcagttcaacgaactttcatctggtttctctgcaataatgtatatctactctgacttgttaatgaaagtggagttgaaagacattcctgccgaccaattgaaaggtattgttctaatcgatgagatcgacgctcatttgcatgtatcgttacagcgtaaaattttatcgttcttcactcaggcttttccaaatattcagttcatagttactacacactcacctttcgttgttcaatcggtcaatgacgctgtgatatatgacctatcaaaacgagaacagttggaagacctttcgatgtactcatacgagtcgattctaaaaggattactaggcgttgaaagtacgtcagatctcttgaaagaccaactggatgaaatggctcagttagtgaacgaaacgccattgaacaaaaagcgcctcaatgaattaatagcgaatattgaaccccatgaagcaaagttggatgctaggtcacgtgctttcttactgcttggaaagaatgctattttagattcgaatgatggtgaggagtaa

SEQ ID NO: 90447 - DNA, 666 bp, Shewanella frigidimarina
atgtttaatgttactcgtacctacccagcaccagatagcattgataaaggcaagtacaacgagaaagatgttctctcagcattgaagccaatgttcttagagaaatgctacctctgtgaaagagatgagatccaagatgccgaggttgagcattttgttcctcaccaaagtgatgtggctttgaaatacgactgggaaaacttgtactactcatgttcacgttgtaacagcatcaagagcaacacacacgtaaaccttctagattgtgctaacaatgctattgatgttagtaaattaatcagttgcatgatgccttctgcaccatctgaaaaggtcacagtaaaagccataagtacaaagcctacagtacaaacaaaaaataccgttactcttttggataaatgttacaacctcgaaaataccgctctgagaggtattagccgcgaatcattgatggaacagatgtgggagcactacacagaccttctactcgcaaggcaaacacttcggaagaagaaggccgcggctatggacaaacaacaagcagaacaagttattgcggcaatgctggatttggagcatccattctcggtattctggcgatactactacttgaatgatgctttcctcatggagaaatactctaagttaagagccgtattttaa

SEQ ID NO: 90448 - DNA, 1752 bp, Burkholderia ubonensis
ttgcaactcaagcacctctccatcccacactttcgtaatctgcgaggggtagagattgacttcgcgacgcagctctcatgcctacttggggaggctgcggacgcgccacccaaggcaatccgaagccacgcgttgatcggccagaacggcaccggcaagtccaatctaatcgaggcgctgatcaccatcttccgcgacatcgatctggaccgagatgccgcgatggactacatgctggagtacgaaatccgcggacagacggtgcgcatccaggcagacaccgccaagcagaagcgtcccttcgtttggacgaatggcaagagcgagtcacaaggctatttactgaaaaaccgtgagctgttgccctcgcacatttttgcctactactccggccgcaacgagcgcattgaggccttgtttcaggagcaccagcgccgcttcaaccagcggcaggaaatcaccaccgacgaggtccttcccgggcagttgctggagaacttcactgccagcgatgccgacatccgcgcggtggaagaagccaagcgacgtcgcgagactcggctgaagcaagcgggcgatgaccgcttgcgccgattgttctattgccgcggcggccacagccagttggtgctactggcttgcctcctgtcagacgatccgatcttccagaaggtgcttaataacctgcacatcgaatcgttggagtccgcgttgttcgtgttgaaggagccgcaccgcctgcgcactaagcgccgcgagggcaaattcgatgagaacgagcttagcgaaggcgatccccgcttctggtatgcgcgcggcaatgtagttagtgagtttctcgacaagctttggcaagtggcttgggctcccattgaacaggaagccacacggcaggtcgatttccgggggcgcaccgagaagcagaagcagctttatcttttcgtgcccagccacgccaagctgaagcagttgggcgagtcggttggaggcaccgatagcttcttccgctatgccgaaggtgcctatattggagacttgatcgacgaagtgcgcatcactgtaaagaagcgcgacgatcacggcggtaaggtgagcttcacccagctctccgaaggcgagttgcagatgctcacagtgttgggcttgatgcgaatcacccgggaagatcattgccttttcctgctcgacgagccggatacgcatctgaacccaatctggaagctgcgttacttcgatgacattgagggagtgctaagtgcaggcgcaggtcagctgatgcaaggcgaatcgcagatcctcatcaccacccatgatccaatgatggtgggcagcctgaagcgcgagcaggtacacattctgcgccggaacggacagcgcactctggtggagacaccagatgagcacccacaaggcatgggcgtgaccgggctactaaagagtgagctattcggcctgtcgtccacactggacatcgaaaccgagcggcgccttttccgtcgcaacgagctattcgtgaagtcagcacgtacacgtgaggaggatgcggagctttcacgcttgtccgctgagcttgcggatctaggcttttcaaccgccgattttcgcgatcccgactacgctttgtttgtgcgcaagatggcgcagcatcgaaaattccgcaagccaacactcacgccggaagaacaggccgagcaagatcgcatcgcagacgacatcattgatgaaatcttgcgtgaggaggacggtaagtga

SEQ ID NO: 90449 - DNA, 858 bp, Burkholderia ubonensis
gtgattttcattgacctggaacacaaaaagccgacggatgcagatatcccagggtgggtaccttggacgcaggcgcaatgggacgcctggctggtgaagtcgaggcggcttgttaccgacatggcagcatttgaagccgtaggtaagcgtgatgagcgcaacgcgctgatcgccgccaatagcgcacattggggggcgctgaaggagtggatgttggcgctctccggtggaaagtgctggttctctgaagtaagggagctgtattcacattacgacgtggaacactttcgacccaagaaagaagccagggcgcttgatggtacggagcgcgacggttactggtggttggccttcgactatatgaatttccgggtatgcggaaatgtgggcaaccggaagaagggaggatggtttccgctaaaggatggctcactgtgttcgagctacgctgcaccttgcgaggaatcggaagcccggtacctgctcgaccccattgacgatgacgatgtatcgctgatcgccttcgacgaagaaggtaaggtcattccagctcctggcacctcagactgggagcaggaacgtgtgaatgtgaccgttaagcgcctaaagttgaacgaacatgcgcccctagccgaagagcgccgcaaagtttggcagaagattgatggattaattaaggacttctatgctgccaaggccaagtgctctcacggcaacaatccagcggccaaggcgaaactgctggaggtccgctcccgggtgcgggagatgaccaagagatctgccgaattatctgcggtcgctcgctggtgcatccaggtccgcaatgaaccgcagctatcaaggctggtctcctga

SEQ ID NO: 90450 - DNA, 1248 bp, Burkholderia ubonensis
atggatttggacagcgtacagggagccgatgcaacacaagcaccagaggacgaactcttcggctgtttgttgcaggggatagaaaagtcgttgcgatcggggcaggggccgcacttcacatatatcatcggcaacaatgggacagggaaaagtcgacaactcgcgaggatcgccggccatttcacgggtgaacagggcacgccgcagatcatcggatgcatttcgaacgcggtctatgaccgttttacgttgactaaccgaggacagatcgagtatctgggggcacgtacttcgggcaatgcggtttttcatgccgcaatcgatcggcagctttcgaaaataattttgaagggaatcttgcgcaacaagagcgttgtgcgccggctcgagcagacgctagggatggatttcatgttctcgatgcgcgcacccgagagcggcaagatcgaattccaaaagctcgttgaccgccgcaagctcaaaggctcgccgatctcgtctttcctgagtcgtgccgaacaagcgcttgtaagtggttttttgggaaggcagttccgattctcgcgcctgtcgagggaacaagccactgcacttcagaagtttatggaattgaatccagacgtcaggatctttgttcggcgacgcgacggcacgcacagcacgattgacttcgaccagttgagtaccggagagcaaaacagagctcttacttacgctaaagtcctgtcggtcgctcaggaagcagcgctgattcttatcgacgagccggaaattagccttcatctgcattggcagatggcctttcatcagtcgctttgcgaaattttggaaggatacaggcgctatcacgtcgttgtcgcaacgcactcgccagtgatcatctcggagggggcaaagtataacggcgacgatgcgagggtcgtcgtactcgagcgtgaggtacacgaggaaggggcgagtttgacattccggcatcacaagttcggagacgttgcgagtcacgaacggctcgtgctcagggacttcaatacagctacgtatcatactgcagccgtcaatgtcgagatcgctgagtccgtacttaacgcggtcgagcggcccaatgagatcgaccatatcgtcacaaggctcgaatcgatgagcgcgaagctcggactgtctaacgaggacgaaagaaacatccgggctgcaatcaacgtcgtgaggaaccacgtgtcaacaatcggtgccgaggagaacgaccaatga

SEQ ID NO: 90451 - DNA, 723 bp, Burkholderia ubonensis
atgatgagtttggcgaagaccgacatcgagaaagacacgctgcgcaggctgttgcattacgtcgacgatgagacgttgacgggtaccagcgcatggacctgcttttcgtcgccgcgcgcggagcacgtctacgatgaggacgagccgccgattacattcacgaccgacgagaggaactcgctcaagtcgctcaagaagcgggtcgtcgaaaggctggagcgcaggaatcgccgcgcctgcgcatactgcaagcgcccagtgggcaactacggatacggctggaatatcgagcatgtctatccgaaagccagtttcccggcgagcacgttttcgttacaaaacctcacgatcggttgcgtcgactgcaaccaatggaaggctgcgcgcgtcgacaaaaagacgctagccgaagggctcacgatcatcgaacccgtcgcgaacggttttcgctatggcgatcacatcaacctcgtacacatcgcaacggaggacatctgctttataaagtaccggccgacaagcaaagcaggcaagcagacatacgagaaactgcagtttaccgacatcgagcgatcgacaatcatcgatagcgtcaacgacgacctcgcagcgctccatagacgaatgaacgacctgctcgcgagtgcgcagagcggcgattcacatacagaactcgtcgcactgcttggccaactgaaatcgaatatctatcgcctcggctga

SEQ ID NO: 90452 - DNA, 1545 bp, Acinetobacter baumannii; identical to SEQ ID NO: 87768

SEQ ID NO: 90453 - DNA, 642 bp, Acinetobacter baumannii; identical to SEQ ID NO: 87761

SEQ ID NO: 90454 - DNA, 1545 bp, Acinetobacter baumannii; identical to SEQ ID NO: 87768

SEQ ID NO: 90455 - DNA, 642 bp, Acinetobacter baumannii; identical to SEQ ID NO: 87761

SEQ ID NO: 90456 - DNA, 1248 bp, Burkholderia ubonensis; identical to SEQ ID NO: 90450

SEQ ID NO: 90457 - DNA, 723 bp, Burkholderia ubonensis; identical to SEQ ID NO: 90451

SEQ ID NO: 90458 - DNA, 1284 bp, Flavobacterium columnare
atgaaactttcaaagttacatatagaccaatacagacatttagaaaatttagattttgactttacctatcctatggattttcacgatgaaacaatgcgtggaaaacctttaaacaaaatatgttttattgggcaaagtggaacaggaaaaacgaagttattagaactaatacacaaagatattagcaatctactgagtactgaattagatgaagatagcaaaatctggataaatttcaataaatatgatagtactattggattacagataaacgaaaataactttagttttaaagaaggcaattactacctaaatggaaacattatacaaagaagttcgaataaatcaacttttactagcacacttataaaagaagcaaaaagtctattttattttacagctgaactactatcaactaaaaatttagaatttttcgaaaaagaacctattttgttaatagaaaaatctagaactttttcttttattgatcaatttgctgtaaatgaaaatcaaaacataattttcaatgacaatattgaagaagaaatttggatcagattactaaattcaagtataaattatttacaaaactttttacaatttgcaacagaattaattaatagcggaaatgtactagacaattcctctcaaaacaaaatagatgcttggaaatcagaaaatataaatcctctaatagatttttcagaaaaattcaatatcatcttagagaaaattcaattagaagttgatttaacaaatgcaaaaaacattatccctttaaaaaataaaaacacaggagagaatgttgatataaaaaacatcagtacgggaaccaaacaacttttactcaactccttacctctttacaaactcgaaaccaatgaatcaatcgtcttaatagacgaaccagaacgttctttatatcctgatatgcaaatggaactgatggatcattatcaaaggctagcacaaaatgctcagtttataatagcaacccactctccatttattgcagcctcttttgaaccttgtgaacgatttattttatatttcgatgaagaaggaaaagtggctgtaagacaaggaacgtctcctataggtgatgacccgaatgatattttaaaaaatgattttgaattagaatttttaatgaacgaaaaaggcagaagagcttttgagagatttagagaattaaagagggaaattgctacggtagagaatgaagaggaaaaagataaattattagacgaaattctaattcttgctaaagcatataaattttaa

SEQ ID NO: 90459 - DNA, 585 bp, Flavobacterium columnare
atgagaaagcaagttaaatttacagattctttagccaaagatttgagttatataatagatggggataattcgaaactttgccaaattctattcaatgaacaaaaaggattttgtgcttatactgaaacttatttaggcagaactgatcaaaaagatattgaccattttaatccgtctaaaagttttacagatagaaataagtaccaaaatctttttctttgtaaagctcaatggaatagagaaaaatcaaacaagtgggataaatatcaacctattttatatccgcttgaagaaaattttgaaaagagaatttcttacaatcaagatttaaaactttttgaagcaactgacagagaagacagagaagctgtaaatttagtaaaacttttaaaactagacgattacgacttatctattgaaagaaaaaaatatattgaattatgttttgaattaatacaacattatgaaaatccaacagtttatttccaaaaaataattcaaaaaaacataaaccaccttcaatttatacgaagtttagagattgaattcaacatagacatttggaaaatgattccacaaccataa

SEQ ID NO: 90460 - DNA, 1398 bp, Salmonella enterica subsp. enterica serovar Tennessee; identical to SEQ ID NO: 86900

SEQ ID NO: 90461 - DNA, 726 bp, Salmonella enterica subsp. enterica serovar Tennessee; identical to SEQ ID NO: 87627

SEQ ID NO: 90462 - DNA, 1398 bp, Salmonella enterica subsp. enterica serovar Tennessee; identical to SEQ ID NO: 86900

SEQ ID NO: 90463 - DNA, 726 bp, Salmonella enterica subsp. enterica serovar Tennessee; identical to SEQ ID NO: 87627

SEQ ID NO: 90464 - DNA, 1398 bp, Salmonella enterica subsp. enterica serovar Tennessee; identical to SEQ ID NO: 86900

SEQ ID NO: 90465 - DNA, 726 bp, Salmonella enterica subsp. enterica serovar Tennessee; identical to SEQ ID NO: 87627

SEQ ID NO: 90466 - DNA, 1377 bp, Salmonella enterica subsp. enterica serovar Tennessee
ctgcttaactttcgttgcttcagacagctcgatattacttttgatgagcacattacgattctggttgcaccgaatggcgcgggcaagacggcagtgctggatgcgatacgcctggcgctgtttccctttattcgtggttttgatgccagcctctccgtgaaggataaatcgctggcgatccgtactgaagatgtacgtctggttttccgccccgaagcgctgaacatggaaatgtcatctccggccataattacggctaccggagaatgggaaagcggaaagacggcaacctggatgctcaacaagcgaggagaacagccgccgcatgaagataagacagcggcgcagcttacccgttggggtgaacaacttcagacgctggtgcgtgaagagcataatttgcagcaggttgaacttcccctaatgctttatctggggactgctcgcttatggtatcaggaacgttatgaggcacagcctactgaacagcgtctggataacagcgccttttcacgtttgtctggttatgacgattgcctttctgccacatcaaactataagcaatttgaacaatggtatagctggttatggcttagctaccgtgaacatcaaatcacacaacttgaatcaccttcagcaaagttaaaagaaggtgttcgtgttcagcggatgaaagaagctattcaagccatccagcaaaccattaactgtctgacgcaggaagtgactggctggcacgatctggaatacagctccagccataaccagcaattggtgatgaaccatccacagcacggtaagattcccttatcccagctcagcgacggcctgcgtaatgcggttgcgatggtagcggatatcgcgtttcgctgtgtcaaactcaacccccatttacgcgatgaagccgccttaaaaacacaggggattgtgctgatcgatgaagtcgatatgttcctgcacccagcctggcagcagcaaattatccagtctttgcgcagcgcatttccactaatccagtttattgtcactacccatagcccgcaggttatcagcacggtaaaacgtgaatccattcgtctgcttgagcaggatgagaatggcaacgggaaagcgttgatgccgctcggagcgacctacggcgagccgagtaacgacgtgctacaaagtgtgatgggtgtcgatccgcaacctccggttaaggagaaggctgacctacaaaagctgacggcttgggtagatcaagggaagtacgacgagccagaagcacagcaactgatggctgcattacaggtggcgctgggtgatcaacatccacaactccaacgcttacagcgcagcattgcccggcagaacatgctgaaagggaaagcgcaatga

SEQ ID NO: 90467 - DNA, 597 bp, Salmonella enterica subsp. enterica serovar Tennessee; identical to SEQ ID NO: 86901

SEQ ID NO: 90468 - DNA, 1377 bp, Salmonella enterica subsp. enterica serovar Tennessee; identical to SEQ ID NO: 90466

SEQ ID NO: 90469 - DNA, 597 bp, Salmonella enterica subsp. enterica serovar Tennessee; identical to SEQ ID NO: 86901

SEQ ID NO: 90470 - DNA, 1377 bp, Salmonella enterica subsp. enterica serovar Tennessee; identical to SEQ ID NO: 90466

SEQ ID NO: 90471 - DNA, 597 bp, Salmonella enterica subsp. enterica serovar Tennessee; identical to SEQ ID NO: 86901

SEQ ID NO: 90472 - DNA, 1377 bp, Salmonella enterica subsp. enterica serovar Tennessee; identical to SEQ ID NO: 90466

SEQ ID NO: 90473 - DNA, 597 bp, Salmonella enterica subsp. enterica serovar Tennessee; identical to SEQ ID NO: 86901

SEQ ID NO: 90474 - DNA, 1398 bp, Salmonella enterica subsp. enterica serovar Tennessee; identical to SEQ ID NO: 86900

SEQ ID NO: 90475 - DNA, 726 bp, Salmonella enterica subsp. enterica serovar Tennessee; identical to SEQ ID NO: 87627

SEQ ID NO: 90476 - DNA, 1377 bp, Salmonella enterica subsp. enterica serovar Tennessee; identical to SEQ ID NO: 90466

SEQ ID NO: 90477 - DNA, 597 bp, Salmonella enterica subsp. enterica serovar Tennessee; identical to SEQ ID NO: 86901

SEQ ID NO: 90478 - DNA, 1377 bp, Salmonella enterica subsp. enterica serovar Tennessee; identical to SEQ ID NO: 90466

SEQ ID NO: 90479 - DNA, 597 bp, Salmonella enterica subsp. enterica serovar Tennessee; identical to SEQ ID NO: 86901

SEQ ID NO: 90480 - DNA, 1377 bp, Salmonella enterica subsp. enterica serovar Tennessee; identical to SEQ ID NO: 90466

SEQ ID NO: 90481 - DNA, 597 bp, Salmonella enterica subsp. enterica serovar Tennessee; identical to SEQ ID NO: 86901

SEQ ID NO: 90482 - DNA, 1377 bp, Salmonella enterica subsp. enterica serovar Tennessee; identical to SEQ ID NO: 90466

SEQ ID NO: 90483 - DNA, 597 bp, Salmonella enterica subsp. enterica serovar Tennessee; identical to SEQ ID NO: 86901

SEQ ID NO: 90484 - DNA, 1377 bp, Salmonella enterica subsp. enterica serovar Tennessee; identical to SEQ ID NO: 90466

SEQ ID NO: 90485 - DNA, 597 bp, Salmonella enterica subsp. enterica serovar Tennessee; identical to SEQ ID NO: 86901

SEQ ID NO: 90486 - DNA, 1377 bp, Salmonella enterica subsp. enterica serovar Tennessee; identical to SEQ ID NO: 90466

SEQ ID NO: 90487 - DNA, 597 bp, Salmonella enterica subsp. enterica serovar Tennessee; identical to SEQ ID NO: 86901

SEQ ID NO: 90488 - DNA, 1377 bp, Salmonella enterica subsp. enterica serovar Tennessee; identical to SEQ ID NO: 90466

SEQ ID NO: 90489 - DNA, 597 bp, Salmonella enterica subsp. enterica serovar Tennessee; identical to SEQ ID NO: 86901

SEQ ID NO: 90490 - DNA, 1377 bp, Salmonella enterica subsp. enterica serovar Tennessee; identical to SEQ ID NO: 90466

SEQ ID NO: 90491 - DNA, 597 bp, Salmonella enterica subsp. enterica serovar Tennessee; identical to SEQ ID NO: 86901

SEQ ID NO: 90492 - DNA, 1377 bp, Salmonella enterica subsp. enterica serovar Tennessee; identical to SEQ ID NO: 90466

SEQ ID NO: 90493 - DNA, 597 bp, Salmonella enterica subsp. enterica serovar Tennessee; identical to SEQ ID NO: 86901

SEQ ID NO: 90494 - DNA, 1377 bp, Salmonella enterica subsp. enterica serovar Tennessee; identical to SEQ ID NO: 90466

SEQ ID NO: 90495 - DNA, 597 bp, Salmonella enterica subsp. enterica serovar Tennessee; identical to SEQ ID NO: 86901

SEQ ID NO: 90496 - DNA, 1377 bp, Salmonella enterica subsp. enterica serovar Tennessee; identical to SEQ ID NO: 90466

SEQ ID NO: 90497 - DNA, 597 bp, Salmonella enterica subsp. enterica serovar Tennessee; identical to SEQ ID NO: 86901

SEQ ID NO: 90498 - DNA, 1377 bp, Salmonella enterica subsp. enterica serovar Tennessee; identical to SEQ ID NO: 90466

SEQ ID NO: 90499 - DNA, 597 bp, Salmonella enterica subsp. enterica serovar Tennessee; identical to SEQ ID NO: 86901

SEQ ID NO: 90500 - DNA, 1398 bp, Salmonella enterica subsp. enterica serovar Tennessee; identical to SEQ ID NO: 86900

SEQ ID NO: 90501 - DNA, 726 bp, Salmonella enterica subsp. enterica serovar Tennessee; identical to SEQ ID NO: 87627

SEQ ID NO: 90502 - DNA, 1377 bp, Salmonella enterica subsp. enterica serovar Tennessee; identical to SEQ ID NO: 90466

SEQ ID NO: 90503 - DNA, 597 bp, Salmonella enterica subsp. enterica serovar Tennessee; identical to SEQ ID NO: 86901

SEQ ID NO: 90504 - DNA, 1377 bp, Salmonella enterica subsp. enterica serovar Tennessee; identical to SEQ ID NO: 90466

SEQ ID NO: 90505 - DNA, 597 bp, Salmonella enterica subsp. enterica serovar Tennessee; identical to SEQ ID NO: 86901

SEQ ID NO: 90506 - DNA, 1377 bp, Salmonella enterica subsp. enterica serovar Tennessee; identical to SEQ ID NO: 90466

SEQ ID NO: 90507 - DNA, 597 bp, Salmonella enterica subsp. enterica serovar Tennessee; identical to SEQ ID NO: 86901

SEQ ID NO: 90508 - DNA, 1377 bp, Salmonella enterica subsp. enterica serovar Tennessee; identical to SEQ ID NO: 90466

SEQ ID NO: 90509 - DNA, 597 bp, Salmonella enterica subsp. enterica serovar Tennessee; identical to SEQ ID NO: 86901

SEQ ID NO: 90510 - DNA, 1377 bp, Salmonella enterica subsp. enterica serovar Tennessee; identical to SEQ ID NO: 90466

SEQ ID NO: 90511 - DNA, 597 bp, Salmonella enterica subsp. enterica serovar Tennessee; identical to SEQ ID NO: 86901

SEQ ID NO: 90512 - DNA, 1398 bp, Salmonella enterica subsp. enterica serovar Tennessee str. 2691; identical to SEQ ID NO: 86900

SEQ ID NO: 90513 - DNA, 726 bp, Salmonella enterica subsp. enterica serovar Tennessee str. 2691; identical to SEQ ID NO: 87627

SEQ ID NO: 90514 - DNA, 1398 bp, Salmonella enterica subsp. enterica serovar Tennessee; identical to SEQ ID NO: 86900

SEQ ID NO: 90515 - DNA, 726 bp, Salmonella enterica subsp. enterica serovar Tennessee; identical to SEQ ID NO: 87627

SEQ ID NO: 90516 - DNA, 1398 bp, Salmonella enterica subsp. enterica serovar Tennessee; identical to SEQ ID NO: 86900

SEQ ID NO: 90517 - DNA, 726 bp, Salmonella enterica subsp. enterica serovar Tennessee; identical to SEQ ID NO: 87627

SEQ ID NO: 90518 - DNA, 1398 bp, Salmonella enterica subsp. enterica serovar Tennessee; identical to SEQ ID NO: 86900

SEQ ID NO: 90519 - DNA, 726 bp, Salmonella enterica subsp. enterica serovar Tennessee; identical to SEQ ID NO: 87627

SEQ ID NO: 90520 - DNA, 1398 bp, Salmonella enterica subsp. enterica serovar Tennessee; identical to SEQ ID NO: 86900

SEQ ID NO: 90521 - DNA, 726 bp, Salmonella enterica subsp. enterica serovar Tennessee; identical to SEQ ID NO: 87627

SEQ ID NO: 90522 - DNA, 1398 bp, Salmonella enterica subsp. enterica serovar Tennessee; identical to SEQ ID NO: 86900

SEQ ID NO: 90523 - DNA, 726 bp, Salmonella enterica subsp. enterica serovar Tennessee; identical to SEQ ID NO: 87627

SEQ ID NO: 90524 - DNA, 1398 bp, Salmonella enterica subsp. enterica serovar Tennessee; identical to SEQ ID NO: 86900

SEQ ID NO: 90525 - DNA, 726 bp, Salmonella enterica subsp. enterica serovar Tennessee; identical to SEQ ID NO: 87627

SEQ ID NO: 90526 - DNA, 1266 bp, Pseudomonas syringae pv. syringae
atgcgcctcgaccgcctccacctgcagaattttcgttgctacgaagatgctcatttcgacttccagcctgggttcaatctggtggtgggggttaatggcagtgggaagacgtcgttattgctgggggtggcgggatgcttcgggaatctacttggaagcattggcgtccatcaaccatcgatagccgagtccgatgttcggttcgagttagtaaagttcgaagacaggattcgttttgagcgcagctatcctcttgtgttgactgcccaaggtggcgcgtttgagcatcaggaatggcacgtatcgctagaacgcagcagtcttcagacaaattttagcgcgctgaacagtctcgtattttcggaaaatctgatcagcatcgacggcgctactcacggggatttgcctgtattcgccgtctatcaagccaatcgacgctggctgacgatgagtgtaaccgctgagcatgctgcacagagcaaaccatcaagactggatgcctacacctcttggttcgatgccgcttccaacttgaaaaacttcgagacctggttcatcggcaagacactggagcgctttcaaagactggccagaacgggtttccctggcattctcaccgacgaactcacctggatcaattcagctatccagtgcgcactgccggagtccaagggcatagagtacgacatggaaatgcgggggctgatggtggacattgatgaccgaaaaaccccgttcaacgacctgagcgacgggcaacgcggaatggtcgccctcttcgccgatattgcccgccgtatctgcctgctaaatccgcacatggggaaggatgttctaagcaagacaaacggcatcatcgtgatcgatgaactggacatccaccttcaccccgtctggcaacgcaccattgcacccgcgctgaaaaaagcatttcccagcattcagttcatcgctgccagccactcgccacaggtcatcggcagcctgcaaccgggcgaggtcatcctgctgaataaccatgacggctctcacccaagagcaacctacggcctggactccagcagcattctggaagaagtcatgggcgtgcctcagcgtgagcctgaaattgaagagttgctcgatcagctattcagcactctggaaaacaacgagcttgaaaaagccaggtcgcagcttgatgcactgaagaagaaggcgcccgatctaccagagttcgcgggtgccgaggcgctactcaaacgcaaggagatcattggacgatga

SEQ ID NO: 90527 - DNA, 648 bp, Pseudomonas syringae pv. syringae
atgagacgcatcatcaaaggaactgagcctgcgtcattcaccgaatggaaagccagtgcaaacgaagactggacgcccacttatccaaccttgcagaacccgcaaaaacgcgacctgcatgatcccctgctgcaagagcagaacttctcatgctgctattgcggcagggaaatagaacttgatagcagtcacatcgaacatttcagaccgcaggatcattatctgccattggcactggagttcagcaatcttcatgcgtcctgcctgcgcgagaccacaccaggaagcccgttgcactgcggccactacaagggcaactggttcgatgaagacctgcacatctctccgacagaggacgattgcgaacagcgcttccgttacttgctgacagggaaaatccagagcacatcccacaccgaccttcccgccacgacgatgatcgaaaagctcgcactcgatatcgcgtatctgaccaaaagacgtcaggaggccatcacgggtgtgttcgatgaacagttcatatccagcgccagcgatgcggaactcgctaaccttgtagacagcctgcgctcgggcaccgctaatacctctattgctttcggccatgtcgttgcgcgctatgcggagcaattgctgacgcagcggtag

SEQ ID NO: 90528 - DNA, 1350 bp, Pseudomonas syringae pv. syringae; identical to SEQ ID NO: 85922

SEQ ID NO: 90529 - DNA, 651 bp, Pseudomonas syringae pv. syringae; identical to SEQ ID NO: 86097

SEQ ID NO: 90530 - DNA, 1266 bp, Pseudomonas amygdali pv. morsprunorum
atgcgcctcgaccacctccatctgcagaattttcgttgttacgaagatgctcattttgatttccagccggggttcaatctggtggtgggggttaatggcagtgggaagacgtcgctgttgctgggtgtcgcgggatgcttcgggaatttacttggaagcattggcgtccatcagccatcgatagctgagtccgatgttcggttcgcgttagtaaagttcgaagacaggattcgtttcgaacgcagctatcctcttgtattgactgcccaaggtggcgcgtttgagcgtcaggaatggcacgtatcgctggaacgcagcagtcttcagacaaatttcagcgcgctgaacagtctcgtattttcggaaaatctgattagcatcgatgtaagtacccacggggacttgcctgtattcgccgtctatcaagccaatcgacgctggctgacgatgagtgtaaccgctgagcttgctgcacagagcaaaccatcaagactggatgcgtacacctcttggttcgatgccgcctccaatttgaaaaacttcgagacctggttcatcggcaaaacactggagcgctttcaaaggctatcccgagcaggttcttccagcgttttcaacgacgaactgacctggataaactcagccatccaatgcgcactacccgacgccaagggaatagagtacgacatggagctacgtgcgttggtagtcgatatggatgaccgaaaaatcccgttcaacgacctgagcgacggacaacgcggaatggtcgcactcttcgccgatatcgctcgccgtatctgcttgctcaacccgcacatggggaaggatgttctaagcaagacaaacggcatcatcgtcatcgatgaactcgatatccatcttcaccccggctggcaacgcaccattgctccagcactgaaaaaagtatttcccagcatccagttcatcgccgccagccactcgccacaggtcatcggcagcctgcaaccgggcgaggtcatcctgctgaataaccatgacggctctcatccaagagcaacctatggcctggactccagcactattctggaagaagtcatgggcgtaccgcagcgcgagcctgaaattgaagcactgctcgacgagctattcagcacactggaaaacgacgagcttgaaaaagccagactgcagcttgatgcgttaaaacagaaagcgcccgatctgcccgagttcgcaggtgccgaagcgttgctcaaacgcaaggagctcattggacgatga

SEQ ID NO: 90531 - DNA, 684 bp, Pseudomonas amygdali pv. morsprunorum; identical to SEQ ID NO: 89737

SEQ ID NO: 90532 - DNA, 948 bp, Pseudomonas amygdali pv. morsprunorum
atgatggatactctcggtgctgccgttcccattgaggccttgttcgatcagctagggttgcaaactaaattcaggatctcgctttctgctacgagtaaaagaaaattttcagaagcgctaagcagtccagatgctttacttgaatatattcataattattcaaattatcagcgtcgaatgcaggtcgatatgttcacgtccacctcaaaaaaagatgtgatgtctatatttgaggggtataaacatttaagacagcagactgataagtcacactattttgatatagatttaaaaagcgatgggcggggtcatagtgaaatatatgatttcctaaatattgttaggcgagtaggcctgattaaggatgtccatttagaactatttagagttggtgcttatgaatcttatgcattctctaatgcaagctctggtgaaactcagttgctttacggtttttctagtattctaaggtatgcgtgcgacgactctataatttttattgatgagccagaagtcagcttgcatcctgcttggcagattcgttatgtagggctgttgaaaaaagcattggtagctgttaagaattgtcatttgattattgctacgcattcgcattttatcctttctgatttggatgaggctaatagttctctccatgtttttaaaaaggaaaaagatggtggtatttctatcgagaatctcgagtattcaacttatgcatggagtccagaaaatattttgtactctgtttttaatgttagaactatcggtaatcatgcgttcgaaaaagatctgcaggaagcattaaatctgatcgcagttaaagacagcgatctggttcgcttgtcagtgctagcatctaagtttcaagggctggtgttcgactcatcggatccgctaaataaggtgattggagcaatcaggggatactctgatggccatcactaa

SEQ ID NO: 90533 - DNA, 630 bp, Pseudomonas amygdali pv. morsprunorum; identical to SEQ ID NO: 86071

SEQ ID NO: 90534 - DNA, 984 bp, Pseudomonas amygdali pv. morsprunorum
atgaaattccgtcacagaaagccgcttgaatttttaccggaaaactcagaggccctagtcattggctatggcgctactagactactcccccaggggcggcataaatctcggcctggagagacttatgcgaaagttgataatctattcaatccattccttccattgacggatccgtcaaaatggttgcttgctgaaactgaggatcgttggatagaggtcaatcaggcgcttgcgaagcttcttccggatgggcacaaattctctgttgctaaaaacgatggaaaggtatgggcctgctcaagtgacggatctaaacgcttaattaaacatttgagtgatgggtaccagtgcatgattggcatggcagtcgacattattgaggtgatgtcgattgtttatgagtccatggaatctgctgaggggatagttttaatcgatgagttggggagccacttccaccctgcatggcgacttcattgtttgggtgctttgcgtgacgcatttcctcgcattcagtttatctacagtacacacgatccgttatgccttcgaggcttgactgagggtgaagtcacagttcttaaaagagataaaatgggccagatctatgcgctagaggacttgccccctgttgagcagttgagggtagaacagctccttacttcagaacacttcgggctgaagagcactgttgatcctgagatggagaggagcatacgcaggtatgaggcattagctatccaacctaatcgtactgacgaagaggatcgagagtaccaggggcttgttaagtctttgactgatgaacgttacctgggcaccacacgtcgtgaacgtttggcgctgcagcttctcgatgtagattcaatcccagagattcctgtttccagtcgcgtaagtgctaagaacctatcccaggcgacagttcagaaacttagatggcttttgaaggaaatcaaacctgtgcaagatgcagagtcatga

SEQ ID NO: 90535 - DNA, 840 bp, Pseudomonas amygdali pv. morsprunorum
atgataaagatcgatcgctctaggggtgttgaaccagctactctgggagcggctgcggccttggagattgctgaaaacgaagctcgtgtagagcaaggaattactagaaaaaataagttaaaattcacggcgtattcagatgccgcagtgaaagtcgaactcataaaaatttttggaagaaaatgttgctattgcgaatctcttctcaagggtacgcaacgctccgctattgagcattatcgtcccaaagcgagtctgcggatagcaaaagcggacgggacatatgagagtcgaattggctattactggcttggtggtgactgggataattttctgatttcatgctcagactgtaactcaactatcacgcatgaacatcaagacggtggaactgcggtaagcgggaagggtacgtattttcctataatggttgagaagcaaagggcaacatgtcccgatgaaattttgcgcgagcagccaattctattgaatccatgtgtggatgagccttctgaacatatatatttttctgaggatggcgctgttcacgcccttgagctgggcggtgtcagaagcttgcgaggggcaggtaccattgaattgataggcctgcacagaagcgagcttgtacaaatgcgcgcaaggcatagatatatagttctttccgcaatccggcatactgttaaggcaatggaggaagggtgtgatcctggtgctgacttagaggatcttcttcgactgctcaagccaggtgaaccatatctggcttacacgcatatgcttgttaggaactatatggtaaattatctggaaatgcttgggctggatgaaatgatgtga

SEQ ID NO: 90536 - DNA, 1266 bp, Pseudomonas amygdali pv. morsprunorum; identical to SEQ ID NO: 90530

SEQ ID NO: 90537 - DNA, 684 bp, Pseudomonas amygdali pv. morsprunorum; identical to SEQ ID NO: 89737

SEQ ID NO: 90538 - DNA, 1266 bp, Pseudomonas amygdali pv. myricae
atgcgcctcgaccacctccatctgcagaattttcgttgttacgaagatgctcattttgatttccagccggggttcaatctggtggtgggggttaatggcagtgggaagacgtcgctgttgctgggtgtcgcgggatgcttcgggaatttacttggaagcattggcgtccatcagccatcgatagctgagtccgatgttcggttcgcgttagtaaagttcgaagacaggattcgtttcgaacgcagctatcctcttgtattgactgcccaaggtggcgcgtttgagcgtcaggaatggcacgtatcgctggaacgcagcagtcttcagacaaatttcagcgcgctgaacagtctcgtattttcggaaaatctgattagcatcgatgtaagtacccacggggatttgcctgtattcgccgtctatcaagccaatcgacgctggctgacgatgagtgtaaccgctgagcttgctgcacagagcaaaccatcaagactggatgcgtacacctcttggttcgatgccgcctccaatttgaaaaacttcgagacctggttcatcggcaaaacactggagcgctttcaaaggctatcccgagcaggttcttccagcgttttcaacgacgaactgacctggataaactcagccatccaatgcgcactacccgacgccaagggaatagagtacgacatggagctacgtgcgttggtagtcgatatggatgaccgaaaaatcccgttcaacgacctgagcgacggacaacgcggaatggtcgcactcttcgccgatatcgctcgccgtatctgcttgctcaacccgcacatggggaaggatgttctaagcaagacaaacggcatcatcgtcatcgatgaactcgatatccatcttcaccccggctggcaacgcaccattgctccagcactgaaaaaagcatttcccagcatccagttcatcgccgccagccactcgccacaggtcatcggcagcctgcaaccgggcgaggtcatcctgctgaataaccatgacggctctcatccaagagcaacctatggcctggactccagcactattctggaagaagtcatgggcgtaccgcagcgcgagcctgaaattgaagcactgctcgacgagctattcagcacactggaaaacgacgagcttgaaaaagccagactgcagcttgatgcgttaaaacagaaagcgcccgatctgcccgagttcgcaggtgccgaagcgttgctcaaacgcaaggagctcattggacgatga

SEQ ID NO: 90539 - DNA, 684 bp, Pseudomonas amygdali pv. myricae; identical to SEQ ID NO: 89573

SEQ ID NO: 90540 - DNA, 1266 bp, Pseudomonas savastanoi pv. nerii; identical to SEQ ID NO: 89754

SEQ ID NO: 90541 - DNA, 684 bp, Pseudomonas savastanoi pv. nerii; identical to SEQ ID NO: 86199

SEQ ID NO: 90542 - DNA, 1266 bp, Pseudomonas syringae pv. syringae; identical to SEQ ID NO: 89788

SEQ ID NO: 90543 - DNA, 648 bp, Pseudomonas syringae pv. syringae; identical to SEQ ID NO: 85921

SEQ ID NO: 90544 - DNA, 1350 bp, Pseudomonas syringae pv. syringae; identical to SEQ ID NO: 85922

SEQ ID NO: 90545 - DNA, 651 bp, Pseudomonas syringae pv. syringae; identical to SEQ ID NO: 86097

SEQ ID NO: 90546 - DNA, 1350 bp, Pseudomonas syringae pv. syringae; identical to SEQ ID NO: 85922

SEQ ID NO: 90547 - DNA, 651 bp, Pseudomonas syringae pv. syringae; identical to SEQ ID NO: 86097

SEQ ID NO: 90548 - DNA, 1266 bp, Pseudomonas syringae pv. syringae; identical to SEQ ID NO: 89788

SEQ ID NO: 90549 - DNA, 648 bp, Pseudomonas syringae pv. syringae; identical to SEQ ID NO: 89537

SEQ ID NO: 90550 - DNA, 825 bp, Pseudomonas syringae pv. syringae
atggtgatccgagccttgcgtgaaattctgtccatcgacggacgtttcgatgtcatccgtcgagacattgctagcaagcaatgctatgtcgtaacaggtattcgcgacgacggcagccctctgtctcaaagctcgttgaaagttgcttcttccggctttcgctccatcctggccatggcttgcgacgtgatgcgcggtctgatgaaccccagcatctacccggacttcgagagccttcagaccgccagagcggtagtgctcattgacgaggtcgaggcccatctgcacccacgctggaagatgcgcattatgcgtgggctacgggaggcgctacccaatgtcacttttatcgcgacgactcacgacccgttatgcatccggggcatgaacgacggcgaaatcgtggtgctgcgacgggtccaactcagacaaggcaccaccgatgcggggctgcaatcccaggttgaggcgcaaaccgacttgccgccattgtctgagctgaggatcgaacaattactaacctcggatctgttccagctgcactccacagacgatccggaaatggatcagcaattcgcgcatatcgccgatctgctggccatgccgtcggaacaacttgagccggaacaactacggacgctgaaacgattcaacgacgatgtagcatccgcgctgcccgtcggcacgtccgaagcccatcgagtggtgcaggatgccgttgctgaatacctgcaaatccgtgcacggacatctgtgcagcgagtagcggacgccaaggccagtgttaaggccaagatcatccaagcgctgaagggaattctttaa

SEQ ID NO: 90551 - DNA, 930 bp, Pseudomonas syringae pv. syringae; identical to SEQ ID NO: 89533

SEQ ID NO: 90552 - DNA, 1266 bp, Pseudomonas amygdali pv. ulmi
atgcgcctcgaccacctccatctgcagaattttcgttgttacgaagatgctcattttgatttccagccggggttcaatctggtggtgggggttaatggcagtgggaagacgtcgctgttgctgggtgtcgcgggatgcttcgggaatttacttggaagcattggcgtccatcagccatcgatagctgagtccgatgttcggttcgcgttagtaaagttcgaagacaggattcgtttcgaacgcagctatcctcttgtattgactgcccaaggtggcgcgtttgagcgtcaggaatggcacgtatcgctagaacgcagcagtcttcagacaaatttcagcgcgctgaacagtctcgtattttcggaaaatctgattagcatcgatgtaagtacccacggggacttgcctgtattcgccgtctatcaagccaatcgacgctggctgacgatgagtgtaaccgctgagcttgctgcacagagcaaaccatcaagactggatgcgtacacctcttggttcgatgccgcctccaatttgaaaaacttcgagacctggttcatcggcaaaacactggagcgctttcaaaggctatcccgagcaggttcttccagcgttttcaacgacgaactgacctggataaactcagccatccaatgcgcactacccgacgccaagggaatagattacgacatggagctacgtgcgttggtagtcgatatggatgaccgaaaaatcccgttcaacgacctgagcgacggacaacgcggaatggtcgcactcttcgccgatatcgctcgccgtatctgcttgctcaacccgcacatggggaaggatgttctaagcaagacaaacggcatcatcgtcatcgatgaactcgatatccatcttcaccccggctggcaacgcaccattgctccagcactgaaaaaagcatttcccagcatccagttcatcgccgccagccactcgccacaggtcatcggcagcctgcaaccgggcgaggtcatcctgctgaataaccatgacggctctcacccaagagcaacctatggcctggactccagcactattctggaagaagtcatgggcgtaccgcagcgcgagcctgaaattgaagcactgctcgacgagctattcagcacactggaaaacaacgagcgcgaaaaagccagactgcagcttgatgcgttaaaacagaaagcgcccgatctgcccgagttcgcaggtgccgaagcgttgctcaaacgcaaggagctcattggacgatga

SEQ ID NO: 90553 - DNA, 684 bp, Pseudomonas amygdali pv. ulmi; identical to SEQ ID NO: 89803

SEQ ID NO: 90554 - DNA, 1350 bp, Pseudomonas syringae pv. syringae; identical to SEQ ID NO: 85922

SEQ ID NO: 90555 - DNA, 651 bp, Pseudomonas syringae pv. syringae; identical to SEQ ID NO: 86097

SEQ ID NO: 90556 - DNA, 1266 bp, Pseudomonas syringae pv. syringae; identical to SEQ ID NO: 89788

SEQ ID NO: 90557 - DNA, 648 bp, Pseudomonas syringae pv. syringae; identical to SEQ ID NO: 85921

SEQ ID NO: 90558 - DNA, 2541 bp, Serratia marcescens
atggtatatgatgatgaagacctagagcttgctaaggctcaggcaagagaaatatggaagatgcttgattatgttagaggagcatcacctatatctagctatcgttcacttgcgtattcaatatttttcattcgctatctacaatctaatacaggtcagcactttgaagcgccaaggttcgatagttttaatgctatttccaattattcttatgaactgataaattgtgccgttcaacttgggttcattaataatgaagtatctggttttctgtgtgattacttagagaagacactgcgattattcgaaaatattgatgaatcttttgttcgccatgcaataaaagatggcgtgatgagtaaacatcactccatagcatcgctttctttgtctgaactagatttactctttgcagaaaatgaaggcaaatcaggtggtgaattttatactccaagagacgtaaacaacttggttgcagcaattgggttgagttatcaaccaaaatcaatatgtgacccgttcgcaggagcagggaatactgcattttcttttgctgatatagattataaaatagttactattgatactcaagaagttaacaaggatgcttactttaaattgataataagcagaattattaggggggtaaaaggtagagactattttggtgactctttatcgcaaccaacttatcagcaaaataaatatgatctaatcgtttcttttccaccttttggaatgaaaatcccgaaggctactcgggataatattcactataaagcgcgtaataattggctagatatagccggaaatttaccagaaagtagaagtgactggtttataactttatcaatgctgcaggccctttctgagggaggcaagctattagtcggtatgccctctggggctttaacaagaggaggctcggaggctagggttcgccaatatttggtctctcatgggattatcgaacaagtaattctactgcctaaaaatatccattactcgacgtctatctcaaccgtgcttcttgtcctcaattcaggatcaaacataacaaatagtagaggagttaaatttgtcgatgcctcacttttttatgagcctactcgaggtagaaatgttctcacgccagataatatcaatgagatcgtggaagctattcatagcgatggccgatttagtattagcttgcatcgtagccaaattgcagagagagattttaatttagatccttcactttatgtacgtaaagatctaaaggttagtgaagttactgtaaaaaatttcagaggttactctgaatttaaagttccaatgcatccttgcttgactgtattagttggggagaatggtgcaggtaaaacatcaatactagaagccctagcatgtggtcttggtccttttcttaccgctatgcctgacgcaaaagggaaactgataaaaaaatcagatattcgtatagattcaaaagggattgctagctatgcccggatatccattgaaacaacatcaagtctgagctgggatctcgtggcaaaagggaaagatgtttctgaaccccctaaaataggaacaacggcactcaccagttatgctagtcatcttgtagatagtcagtctgaattcccactgattgcttattatggaactagccgtgctcttaattctacaaactctaaagttgcaataaatccattcgagaaagaagttcgtggagaaggttatgactctgctctggatgccaaggtcaactacggaatcataaaaaactggttttcaaaaattgaagttgatgagcttagaaaacgtgatgaactcaaagaccacaaatttattcaccctgctaagagacttgtttccgaaactgtttaccagatcgtagaacgagccacgagcttagaattcgacaaggatagtaatgatgttgtggtgcattggaaaaatgaaaagaatgaatacgtaaagcttacattggagcaattgagtgaaggttatagaaatatggttgcacttaccattgacttagtgagacgcgcttatttactcaatccaactagttctaacccattagcagtgaacggaatagtcttaattgatgaaattgagcttcatttgcacccgagatggcagcagaagattcttaatgatcttactcacttgtttgagaaaatccagttcattgttacaacacatagtcctcaggtcctaacaaccgtaaaagccgattctattcgtattgtttctgccgatgcagtcgaagcgaaattagtaaaagggaccagtacttacggatctgaaagttcaagaatgttggaagatgttttaggtggtagcattaggcctcaacacattgaaattgttaaaaaattaaatcgttacactaaattggtagaggccgaccaatgggatacagatgaggctttagagctcaaaaaagttttatacgaatggggcggacagacagaagcggaacttcaaagactagaaacagatattcgtattcgtgagttcgagcgtgacaatgaaaataatcaataa

SEQ ID NO: 90559 - DNA, 789 bp, Serratia marcescens
atgaaaataatcaataagggtgtggagcccaatcgattcggtgcattcagagctgcccaccctgatgctttatgggagagagatgaggactcaattggagaggctttccgttgttgtagtgcaagatatcaggaaactcagcaacaattacgagcggatcaaggtaatttatgtgcatattgtgaacaggatttattgtctggaactaatggggcactagatgactgtcgaattgagcattttcacccaaagtcgaaacgagaactaggagagcctaattgggggctggagtggagcaatttattagcagtttgctgtggtggaaatcaaagtagagttgttaatcctgaggagagatttgatattgagccagaaaattattcttgcgatgtaccgaaaggtaataaaattttggatcaaattatcttaaaccccctgcgattacctaacttaaatatttggaggttcagtcgttctacaggggagatttctgtaaatgagaagttgtgtttatcactagggctagatgtcgaaatggcacaccaaacaattgagaaattaaatttgaactctccgcgcttaatgagattcaggaaaactgttatggataacctcaataatctgattacagaaagtttgaatagtgggaaaacagtagaccaagctgttagttctattgccatatcaatattccggagaaatagagcaggtgactggccatctttttttagtactgcaaggttttatctaggccagcaggctgagcttgttttagctcatccaatttaa

SEQ ID NO: 90560 - DNA, 1413 bp, Serratia marcescens
atgatatttaatctaaaaattaaaaatcacgaagtgtttggtgattcagaaattgtattaagtgatgatggtgtcgcaaaggatgctaactattacacattaatcctaggtgataacgcgacgggtaagagtgaattgcttaaagcaatgatagattcggtggtctttatggataatcatagcgaacttcaaaagaaaagaaaaaaagaaaaaaaagaactaacttatgagttaaataattcatcagaatacacatgtccggattgtattatcgcatcgtcatccaacttaaatgataagttcccggttaagatcactaagtcgaagattaatggtgagcgatataagtatttgggaataaggtcagcaaataacaatgcatttgttggtaagtataaatcaatattttatcattcatttataaagatcatagagaataaaaaacggcttgacactctaaaatcctcgctggagtattatgacttccctttggacttttcatttaaatttgtagtgagtaaattagcatcgccattaataggatatgggcatttaatgggtgattatgagtcattcttgaatgctgctaggtatgctcttgggaagataagtgagagcactagtatgggtaaggataaaatattgcccatacttaatgacgaaggtgtaatgaaagtcatatatgaatcatcccagttgctttttaataaaggaaatgagcataatttaacattgaatttgggaagtgtggtttcgtgcaacgactacattgcttcatcgaagtatattactatattgctcaggtatgggataatatctgttgaagagttctctattgaaactgaacatacttttggattcaaaaatgctagctccgggcagtttaatttatttagttccttgcttacattatcatcggagttaatggataatacacttttgctaatcgatgaacctgaaataagcttgcatccaaaatggcaggttatgtatatgtctgctctgagagaaataataggaaagtataaaggttgtcaggttgtaatagcaacgcattcacacctgttagtgagtaatatgccaattaaagactctagcgtgttaatgtctaagaaagatgcagccggaaggataacattctctagacttgactgtagtcctactggctggtctgctgaatcagttttgtataatgtatttggcgtgctttcatctagaaattccgtctttgaagttgatgtgaggaagttagctatgtatatgagtgattggaaagatgaaaatatttgcgagtacaaagaaatactgaggagattgaataggtttgagttggcgaccaatgatccattgagagagttagtaactaaagcgaaagagtatctcgatgagaggttaagtaatgctaagttataa

SEQ ID NO: 90561 - DNA, 681 bp, Serratia marcescens
atgctaagttataagtttacaaggccacgatctccagttgagtatattgaaaaacaaattgattttgtgagaagatttaatgatataggtggaggggcatggaacggtaaaattaaagataagatcggttttattcgtggtgatataaaagttagagacgaaataagggttttcataaaaacaaaattaaaagaaaatcaagagaatttttgctattactgtggtgaaagttttgatgtgttcaataatgatgataaatgtatacatatcgatcatattttgccaaaaaaagcaattcatggtcgatacggcaggtttacatttgagccacttaatttaatactttgttgttatgtttgtaatatgacattaaaagaagataaagactacgggacagcttctgatgatgaaactaattacagtggttatgattttacgataatccatccgtaccttgatgatataacggcgcacttagaggtgaacagaattggtgctgtagagttgataaacgaagataagtctaaaggggacttcatgataaatgaatttaatttaaatgacacatatagagtcgaaaggcgattctcttcaatatgtgcacgtggcatgagtgttcttctaagtcaaggaatggaagacttagtcaatagagtattagatgcgagtagtgcaagataa

SEQ ID NO: 90562 - DNA, 1245 bp, Serratia marcescens
atgtatttacacgaggttgatgccgatttcttcaaaggatttgatcgtattaaaattccatttaatactagatttacagttttatcagggcctaatggtgtcggtaagtcttcggtgctattcgcgattgctagtgccattactatttcatatggcccattaccattaaatgaacaaactcaatgtaagattgaatttactgatagaaataataatcgcgattgttgcggttttggcccaaattcatacaaaatgatttctcgtcgagtaagtcagtttataggggggcctagggattatttatttggggacggaaacgctaaatatatttttaaaaatgatattgctgaatatttttccccgctttttattgggcctaatagaaatatattctatcaaaaaatagaaggcatgaagtcagaaagtacaccgcatgaatatcgaaaggaatatttgaataatgctattaaaaatttagcaaacggctataccccagaaataaaacaatggatgataaatagatactttatcattgaaaaagattgggctgttgaggaaaagaaaaactgggattatattatatctcatcttgactttatttttggaggggatggccgtttttcttttggtaatattgaaagagatcttgaaccaaatttcactcttgatggagcattggtctatttagaagatctctcatcgggttttaaatcaatattatctattgttctttcaattgttgaatggatagaaaaaacaaacgacagaagcaatatggatattgaaactgcgaccggtgttgttttgattgatgaattagatgctcacctgcatccctcatggcaaacaaaaatcagggagatattacagacattattcccttgcattcaatttatagttacatcgcattctcctcatataattagtagtgcagaggctggtgaagttatagttttgaagcgcgaaggcaaagaaatgggctatgatgtaatagataaaccattggatgcttggaaaactgatgatatttactctctgattatgggagtaagcacagtacatcagcagacactttcagatgttgttaataaaatcgaggatttaattagtggtaaattttttgaagaagctttatctttgattgatgagtattctaaaaaaataccagactcagatcccactgcaatgattttaaagaaacaaatagatttcgttcaattaaaaattgagcgaggtgttaaatga

SEQ ID NO: 90563 - DNA, 735 bp, Serratia marcescens
atgataaagataaatagggggaatgaacctgctgtactgagtgctaataaaggcccttggacccgtgatttattaactgaggtcgaaaagtaccaaggttatgacaaaatcccggatgacgtcaagaagaaagtagtatcacattatcgtaatgaacaaattaagggtgttttatttgcgacctcacatgataaatgtgcattttgcgaatgcattccttctgaaggcggaaattatgtccaggttgagcattttcatcctaagtctacatatccaaatgaatgctttgcatgggaaaattttctcccatgttgtggaatatgtaacaataataaaggaacactagatacaaaaaatgttgagatacttaacccttatgatgatgaaattgatggggctttttctgtaagttatcttaaaattttgccaaatttacagaatgtgaaagcagtaaatactgagaaagaagtgtcgttgaattcagataggctgatcagttcacgtgttggaatgttggcgaaactacagattcagactgaagaaattagacagtggaccgatgtgttattagagtctgatactgacaggaaatatgaaatacgattggggaaattaaaggataaagtaaatacacttgaagaatttactaagccagagtgttctcatagtttcttctgttcagagataataaagggcgatatttattatttaaaagcaaaagagttaataggttaa

SEQ ID NO: 90564 - DNA, 1245 bp, Serratia marcescens; identical to SEQ ID NO: 90562

SEQ ID NO: 90565 - DNA, 735 bp, Serratia marcescens; identical to SEQ ID NO: 90563

SEQ ID NO: 90566 - DNA, 2154 bp, Serratia marcescens
atgagaaagattagaagactcaaagccgatacccctactatcttaaaatctggacgtattgttgaagaagtgagcaagttaagaaaatattacctccaatcagaggagttgcgccgctatagccgccccccggtcaataaagaaattttctatgatgagagcgtgcgtgtttcgctacgcaaaacattccatgactgctgtgcttggtgtgagacctacctaactcctagagaagaagaaattgttcattttcgacctatcgggaatgccagaggactaaatgatgatgaaagcgtagaatcttacggttggttggcttatatttgggataacctttttttgtcttgtcccgagtgtaaccgcgcgcaacgaaattattttcctgtggagtctgtacgtgctccagtcctttctacttgggaagaagccaactcattggagagagtgttacttatcaatccatgtcgagatgaccctctccgtcacctttcacttagctcagatgggtcgctgcaggccttaacggataaaggtgagcacactctgctaatttttaatctgaatcggtcaggactcgtttttgctcgggcggaacaaattcgcattgttcgcgctatggtttttgagaataatggatctgttgaagagttcaatagctattattcaagtgataaatgccttgtcggtgttacaaactttattgtttctatgttcctaaaggaatactccagaagacaaggaacctattctactattaaaattgagtctttcataaaggatagcctacagaattaccattttaattttgactatccaataaatactccaattgaaatatatgaagattctattgcgctgaaaattccatccgactattatgataggcttgcaaaaaaaataggtgatgaggacaaagcatcccgccatctaaaaatcattgaaattcggggttttaaagggataagtaaattcactttgaatataaagcatggtgactcgaaatctcttgcgccttgcgtgatgttacttggtgaaaatgctacaggtaaaagctcaattcttcagtcaatagcacttacaatgatgacagaatctcaacgtggaaaattgcaccttagctacgacgattttatttctagagatagaggtgaatggacggtcgataatattcaacccgcggtaattaaattaatatttaatgatggattcaattgtgcttttcagatagatgaaaattttaatgccagcggtgagggttctgagaatattgtctttcttgcctatggagctagacgctttgttaagccacttaaacgtaccagtcaaggaaatggcattatctgccaaactcttttcaatccggtagccttactttcaaatccaactaaatggttgcaagaatgtgatgagattgtatttcaatctgtggctagggccatgaaggagatccttgccttaaagcaggatgacataatttatcgtaatgaacttagacatgtcatggtccatgctcacaaacgtaacactcctcttgaaaacatgagtgatggctataaggctctgttttatgttgctattgacattatgcgccatatgctaaaacgttgggaaaatttagaatatgcatcaggcatcgttattattgatgaaattgaaacgcatcttcatccccgatggaaaatgcagatagtgggtgcctttcgacgagcaatgcctggtgttcagttcatatttacaacccatgatcctctttgtttgcgagggatgtttgatggtgaagttcatgtactaaagcgtgatgaaatatactcaattactgaggaggaagatttacctggattccaggggttgagaacggagcaattattgacatctgagtattttggccttctctcgactgatgatccagatcttgagcggagactagaagatattaacaggaaagaaggaagtaatcaggcggaatatattcgtcatatagaaaaagaacttagtgaaataactgtacttggtacgactcttagtcaacgagtagtccatgaagcattggcgcgatatttaatttcagtaaaacgaaagatgcctgaagccaaagatgtgaaagaggatgcgatcagagcaatccttaacgttcttgagcaaaaaggctattga

SEQ ID NO: 90567 - DNA, 909 bp, Serratia marcescens
atgattaaaatcgatcgctcagttcaaccggtgccagtctcattaaccacggcaggtaatgttgttgataatgaacgtattgctgcacgaagatattacgcagtcgtaccagcccccagtaaaacatataaatttaagcgatataaagaagaagatatcgtcgaagccttggaacatctttttcacggtaaatgtgcctattgcgagagtaaatacataggtacccagaaaatggatgttgagcattatcgtccgaaagggaaggtgaacgaaagtcagggacatccgggttactggtggctagcgttggagtgggagaatttattgccatcctgcattgactgtaatcgccgtcgagggcaaaaatcctatactttgcaagacgatggcacatttgtctttatcgatgatacagaaaatgcaggtaaagaatgcgcatttcctgtctccggagtctatcgagcgcaggggagacaagatgatcttagacttgaaatacctttacttataaatccctgtgaacatgaccctagagatcatcttcgctggcatattaacaatttgaagctccccctactgctcgcgaattcggtgcagaacctgcctgatgagaggggagtaaaaagtattgaaattatgggattaaatcgttttggacttgtgactaagcgtgctgaagtactacaacctgttgtagtacaaattaatagtattttcgagttaatagatattacggcaacgttaccacccggcgaggctcgagatagatatcttgcgaagatcgggcgggatattgatgcattgcagacctgctatgaacctagccgggaatatgctggaatgattaaatcttacattgattcacatatggatactctaaaagaagaacttgctagattagtggcatga

SEQ ID NO: 90568 - DNA, 1524 bp, Serratia marcescens
atgtttagaataaattcaatcatgaacgacagtcgagacaaggtaagagtccatgactttagtgaagactcacataacaattattacacaattctcactggtgataatgcaagcggcaaatctagtttattaagtaaggctataaatttctttctgtttagcaatgtaaataacaacgatcgcaaccccgctgttgaacttgaatgtttatcagagaggaatcctagcaaaatcattgccatatgcaactcaaagtttgatagattcacatccaataaaatcctcaatgataaattaaataataaagaagcaactcgaattacaatgagttacattcacccagaggtaaatgacaataccaggagagggatatcgggtattgttgaccaatgcattaaaaattcattgcgtcataaaaacataagaggtttgcaagacgctaatagagtgaaagaagcatttatgatgtttgggttgcaatctgatttgcaccttaagtgtactttgaatacacaaaacataaagtatgtcttgtctatattaagcagtctggttaatggtggggtgatactgtctgacgaaggtattacgcataccaagaaaattgattattcaaaaaacgaagagttgaaaaataaaaacttcaagttggacaagtctattgaaattattttaagagaaagtgaatataaaaaccatttggatggattatacgacacgttgctaatgttagatgcagggaagtttacacagggaaattttagtagtatatatttttctgttgcagaaggaacaattagcacggaatctaaatatctatttgatgatctaaatgaagctgaaataattaatattttatttgtattggatgtgattaatgtttctgatattcaggttatgcatcttaactcaaaaaaagaagtcaacatagtttcactgagttctgggcagagaacattattcggcaatgcaattgtattaagtggatatgtagaaaaaaactgcatgatatgtattgacgaaccagagaatagtttacatcctgaatggcaacttaattttatgcgtttcatctctcttttatgccccgacactcttgaagctcatatacttattgcgacgcattcacctcaaattatttctggtatgcagtttgataatggttgtgtgctgtccctagaaaatagagataattttgattcaataataagaaaagaaaacaaatatgaagaaggtgggttttatgaactacagcctttgaaagcctatagagagcagtctgctggaaaacaacttacaggtgtttttaaaagccctgggtataaaaatgactttatcataaaaaaattactcttaatactgtctaagatatcaaaaaaaatcgctcttacaaaagatgataatgaatttatggacgaaatcagcatactcattgataaaaagagaataccggaaggagaccctgtacaactgatattcaagcagatccttagctttgagtatgcaaggaactctgatgattaa

SEQ ID NO: 90569 - DNA, 675 bp, Serratia marcescens; identical to SEQ ID NO: 88981

SEQ ID NO: 90570 - DNA, 1245 bp, Serratia marcescens; identical to SEQ ID NO: 90562

SEQ ID NO: 90571 - DNA, 735 bp, Serratia marcescens; identical to SEQ ID NO: 90563

SEQ ID NO: 90572 - DNA, 1245 bp, Serratia marcescens; identical to SEQ ID NO: 90562

SEQ ID NO: 90573 - DNA, 735 bp, Serratia marcescens; identical to SEQ ID NO: 90563

SEQ ID NO: 90574 - DNA, 1245 bp, Serratia marcescens; identical to SEQ ID NO: 90562

SEQ ID NO: 90575 - DNA, 735 bp, Serratia marcescens; identical to SEQ ID NO: 90563

SEQ ID NO: 90576 - DNA, 1245 bp, Serratia marcescens; identical to SEQ ID NO: 90562

SEQ ID NO: 90577 - DNA, 735 bp, Serratia marcescens; identical to SEQ ID NO: 90563

SEQ ID NO: 90578 - DNA, 1524 bp, Serratia marcescens; identical to SEQ ID NO: 90568

SEQ ID NO: 90579 - DNA, 675 bp, Serratia marcescens; identical to SEQ ID NO: 88981

SEQ ID NO: 90580 - DNA, 2154 bp, Serratia marcescens; identical to SEQ ID NO: 90566

SEQ ID NO: 90581 - DNA, 909 bp, Serratia marcescens; identical to SEQ ID NO: 90567

SEQ ID NO: 90582 - DNA, 2541 bp, Serratia marcescens; identical to SEQ ID NO: 90558

SEQ ID NO: 90583 - DNA, 789 bp, Serratia marcescens; identical to SEQ ID NO: 90559

SEQ ID NO: 90584 - DNA, 1245 bp, Serratia marcescens; identical to SEQ ID NO: 90562

SEQ ID NO: 90585 - DNA, 735 bp, Serratia marcescens; identical to SEQ ID NO: 90563

SEQ ID NO: 90586 - DNA, 1245 bp, Serratia marcescens; identical to SEQ ID NO: 90562

SEQ ID NO: 90587 - DNA, 735 bp, Serratia marcescens; identical to SEQ ID NO: 90563

SEQ ID NO: 90588 - DNA, 1524 bp, Serratia marcescens; identical to SEQ ID NO: 90568

SEQ ID NO: 90589 - DNA, 675 bp, Serratia marcescens; identical to SEQ ID NO: 88981

SEQ ID NO: 90590 - DNA, 2154 bp, Serratia marcescens; identical to SEQ ID NO: 90566

SEQ ID NO: 90591 - DNA, 909 bp, Serratia marcescens; identical to SEQ ID NO: 90567

SEQ ID NO: 90592 - DNA, 1266 bp, Pseudomonas amygdali pv. eriobotryae; identical to SEQ ID NO: 89742

SEQ ID NO: 90593 - DNA, 684 bp, Pseudomonas amygdali pv. eriobotryae; identical to SEQ ID NO: 89743

SEQ ID NO: 90594 - DNA, 1356 bp, Pseudomonas syringae pv. avii
atgcagaactatcgctgcttcggtgaattcgagatcgacttcgatccgcatctgaccatacttattgcctccaacggcggcggaaaaaccaccattcttgacgccgcccgagtggcgctgtggcctttcgtcaaggggtttgatcttggtggtcagacaggaaagtccgccactatccagattgaagatgtgcgactggccccattcggcagtggcaatatggagtcgcaggtacccagcgttatcgaagcaaaaggtatctggtgggaaaaagccgatgactgccgttggttgcagcagcgcgtcagcttgaaaaagtccaccaacaccattggcgatgccggatcgaaagcgctgactttgtatggtaagtcgcttcaagacagtgtgcgtagcgatgcacatgtcactctgccaatggtgacttacctgggcacttccaggctatggttcgagggacgcttcagttcggcagcggctcagacaacactcgataaaagtgagtactccagaacgtccgcatacctcaattgcctgtcttattcatccagcttcaagaccttcactgcatggtacatctggatgtaccgcagctaccgtgaagctcagttgatcgctctggagcgcggtgaagaaatgtccgataccgggcagcgctttgagaaaatcatctcggctgtcaaagaagccatcgacaggctgataaaggctcctacgggctggcacagacttgaatacagtgccagtcatcaacaacaactggtcatgcaccacccggaccaggggattttacctgtcgaaatgcttagcgatgggctgcgtaacacgatcgccatggttgctgaccttgcttttcgtgcctgcaaactcaacccgcacctcggcgagcgggcacccttgcaaacgccaggtatcgccttgattgatgaagtggatatgttcctgcatcccttctggcaacagacgatagtaggttcattgcgtgcggcctttcccgccatgcagtttattgtcactacgcacagtccgcaggtgttgagtacggtccgacgtgaaaatattcgggtgatcggtaaagatgcccaagggcgtttgattgcatcccggccccttgccatgacctacggtgagccgagcaacagcgtgctgcgaagcgtgatgcaggtcgatccgcagcctccggtggatgaaaagccgggcctgctacaactcacggaatgggtggacaaaggtcgctataacgaaccacaggcgatcttgctgatgcagcagataacggaggctctaactgaacaacaccctcaactgcagcggctgaagcgcagcataaagcggcagaaggcattgaggggatga

SEQ ID NO: 90595 - DNA, 570 bp, Pseudomonas syringae pv. avii
ttgtgttgctacagcgaaattcgacctgaccgggttggcctgagtttccatatagagcacgtcgaaaacaagagccaacaccctcagcgtacttttgactacaacaacctcgctgcctgcgcgctggacagtcagagcgatctggacgtgttgaaaatacaaggcgccgaggtatttggtgggcacgcgtcaggtaagtcgaaaggggtcgacatggctcgcttcgtctcgtgtcacatgcccgactgctcgcgcttcttcgcctatttgtctgacggccgtgtggtgcctgctgacgggttgtcactggatgaagttgaccgagctgaatacaccatcgacctgctaaaccttaacagcccttatcttcaggacttgcgacaatcctggtgggatgagctggaagcgctttttgaagagcatgttgatcaagatatgagtctgcattgtctggcggggattgatctcatccctgtgggtgcgagcttaagtcagtttttcagcattacccggaattttttcggaggcatcgctgaagaggtccttgatcaagaggctggtcgctggtaa

SEQ ID NO: 90596 - DNA, 1266 bp, Pseudomonas amygdali pv. dendropanacis
atgcgcctcgaccacctccatctgcagaattttcgttgttacgaagatgctcattttgatttccagccggggttcaatctggtggtgggggttaatggcagtgggaagacgtcgctgttgctgggtgtcgcgggatgcttcgggaatttacttggaagcattggcgtccatcagccatcgatagctgagtccgatgttcggttcgcgttagtaaagttcgaagacaggattcgtttcgaacgcagctatcctcttgtattgactgcccaaggtggcgcgtttgagcgtcaggaatggcacgtatcgctggaacgcagcagtcttcagacaaatttcagcgcgctgaacagtctcgtattttcggaaaatctgattagcatcgatgtaagtacccacggggatttgcctgtattcgccgtctatcaagccaatcgacgctggctgacgatgagtgtaaccgctgagcttgctgcacagagcaaaccatcaagactggatgcatacacctcttggttcgatgccgcctccaatttgaaaaacttcgagacctggttcatcggcaaaacactggagcgctttcaaagactatcccgagcaggttcttccagcgttttcaacgacgaactgacctggataaactcagccatccaatgcgcactacccgacgccaagggaatagagtacgacatggagctacgtgcgttggtagtcgatatggatgatcgaaaaatcccgttcaacgacctgagcgacggacaacgcggaatggtcgcactcttcgccgatatcgctcgccgtatctgcttgctcaacccgcacatggggaaggatgttctaatcaagacaaacggcatcatcgtcatcgatgagctcgatatccatcttcaccccggctggcaacgcaccattgctccagcactgaaaaaagcatttcccagcatccagttcatcgccgccagccactcgccacaggtcatcggcagcctgcaaccgggcgaggtcatcctgctgaataaccatgacggctctcatccaagagcaacctatggcctggactccagcactattctggaagaagtcatgggcgtaccgcagcgcgagcctgaaattgaagcactgctcgacgagctattcagcacactggaaaacgacgagcttgaaaaagccagactgcagcttgatgcgttaaaacagaaagcgcccgatctgcccgagttcgcaggtgccgaagcgttgctcaaacgtaaggagctcattggacgatga

SEQ ID NO: 90597 - DNA, 684 bp, Pseudomonas amygdali pv. dendropanacis
atgagacgcgttatcaagggaactgagcctgcgtcactcgccgaatggaaagccagcgcaaacgaagactggacgcccacctatccaaccctgcagaacccgcaaaaacgcgacttgcataattgcttgctgcaagagcagaacttctcatgctgctattgcggcagggaaatagagcttgatagcagccacatcgaacattccagaccgcaggatcattatctgccattggcactggaatacagcaatcttcatgcgtcttgcctgcgcgagaccacaccaggaaacccgttgcactgcggccactataaaggcaactggttcgatgaggacctgcacatttccccgacagaggacgattgcgaacagcgcttccgttatctgctcacagggaaaatccaaagcacgtcccacacagatcttcccgccacgacgatgatcgaaaagctcgcactcgatatcgcgtatctgacaaaaagacgccaagaggcaatcacgcgcgtgtttgatgagcaaatcttagccagcatcagcgacacagagttgacacttttggtacaaggcctccgctctggggatgccaacaaacagctcgcctttagtcacgttgtcgcccgctatgcggagcagtttctggcgtctttaaaccctcctcccgaaaaaagctcggtcaagaatacgtga

SEQ ID NO: 90598 - DNA, 1266 bp, Pseudomonas savastanoi pv. fraxini; identical to SEQ ID NO: 89754

SEQ ID NO: 90599 - DNA, 684 bp, Pseudomonas savastanoi pv. fraxini; identical to SEQ ID NO: 86199

SEQ ID NO: 90600 - DNA, 1623 bp, Serratia marcescens
atgaatgatgcgaaaagaagagtagataacgttttttcagaatttatcgaattaattaacaatgatgattctgaaaaaagtattaaagcttctcctgtattaaaactattaaatgattccttaaataaagataatctttatattaagaaagtaacagtttcagacttcaaaaggctaagggaggtcatagtcaatcttgaagatgacctaactgtttttgtagcagataatgggtacggaaaaacaacattacttgatgcgattgcaatttctttaagttggcttcgttctaacatacagaaaaaagacaagcctgggtcatatattcgcgaaacagatataaataactctaaggatgcattatatgcatcaattactactacatttaaagtacagaacttgaatactaatgtattaatcacaagcacaaaagaaggagtgtcctttaaacgtagtaatgaattacaagaaattaagtccttggctacaatgtaccgctatgttaatacttttttggatgactccagtttgccagtgatggcttattattcgatagtgcgctctgtggttggtggtggcatcgataataaaaggaaaaacaataaaaacaaagtttcttggtcgaaattcgatgtttacgatgactttatatttgataggaatgattttggtgaatttttaaattggcttatgttcttgtctaataaatcattgcatgagaatgcctcgactgttcacacctccgaatcattaaaaatagaaatagagagaattaatagcacaattgaacaactgagtgctgtttctaacattgattcaaatattataaataccttggcgcttagtcttgaggagaaaaaatcacaatttaaacaagttagcaatgtaggggggttaaactcatcagttttatataataatgtaataagcgcgatattgagatttttacctgagtttgaaaatataaatctggtttatagtgaaaatgaatttaagttggttcttacaaagagtggcattgaattggatgctcaacagctctcgcaaggtgagaagaccattcttactcttgttggcgacttagctcgcagactttcacttcttaacccagagctagaaaatccttttgaaggaaaaggcatcgttcttattgatgaaattgatttacacctccatcctacatggcagcagaaaattatagggcgcctattaacaacatttcctaatgtgcaatttattctttctactcacagcccacaggtcttatctacggttccagccagaagcataaggatcttagaagaggtgcaggatgaattaggcaatgtttcgataaaggctacaaatcctcgttatcaaacgaaaggtttgatgaatagtgatgcattactttatggcatggggacagaccctgcaccaccagttaatgaagttaaatggttggacgagtacaaagcagctattgaacttgatcagtttgacagtgagtcagctcttatcttgagggataatattatcaagcattttggtaaggagcacccattggtgattgaatgcgatcagatgatttctttaatgaaatttaagcgagaaataagaaataataaagagggcgaaaaatga

SEQ ID NO: 90601 - DNA, 669 bp, Serratia marcescens
atgaaacatcttcacagagtacacccagggccggatgttttaaggaaatatgactgtaaaactcaaacctgggatgatgtttcatcatcagataaaaaagctatttgggtcgaactggtcaaaatgcaaggaaaagtgtgtgcgtattgtgagagaaaaattgatttacataaggagggtgataaacatattgagcattttaaaagaaaaggatcacacaaggggttgacatttgattggggaaatcttttcggttcttgcggtgaaaaaaaacgatgtggattttacaaggataagcaagaatataatgagagtgatctattaaaagcagatgtgttagatcccaatgacttttttttatttatctatagtggcgatgttgttgtaaaaccaggcgttaatgcacaatcaaaaaaaatagctgaagttactctttcagtatttaatctcaaccccaaatacggaggggttaaggcagaaagaagaagtgccttagaaaaaggaatgagtgctatgatgggttatataaaaatagctcaagagttaatcgaatccggtggtgacgtcgatggggtcagccaatatgttcgggattgttactacgagcatattgaaaaaatggactttatttcggcaaggaaacatgttttcgatgcatttcttccataa

SEQ ID NO: 90602 - DNA, 1359 bp, Pseudomonas syringae pv. broussonetiae; identical to SEQ ID NO: 89770

SEQ ID NO: 90603 - DNA, 651 bp, Pseudomonas syringae pv. broussonetiae; identical to SEQ ID NO: 89771

SEQ ID NO: 90604 - DNA, 1266 bp, Pseudomonas syringae pv. castaneae; identical to SEQ ID NO: 89736

SEQ ID NO: 90605 - DNA, 684 bp, Pseudomonas syringae pv. castaneae; identical to SEQ ID NO: 89737

SEQ ID NO: 90606 - DNA, 2541 bp, Serratia marcescens; identical to SEQ ID NO: 90558

SEQ ID NO: 90607 - DNA, 789 bp, Serratia marcescens; identical to SEQ ID NO: 90559

SEQ ID NO: 90608 - DNA, 2154 bp, Serratia marcescens; identical to SEQ ID NO: 90566

SEQ ID NO: 90609 - DNA, 909 bp, Serratia marcescens; identical to SEQ ID NO: 90567

SEQ ID NO: 90610 - DNA, 1524 bp, Serratia marcescens; identical to SEQ ID NO: 90568

SEQ ID NO: 90611 - DNA, 675 bp, Serratia marcescens; identical to SEQ ID NO: 88981

SEQ ID NO: 90612 - DNA, 1524 bp, Serratia marcescens; identical to SEQ ID NO: 90568

SEQ ID NO: 90613 - DNA, 675 bp, Serratia marcescens; identical to SEQ ID NO: 88981

SEQ ID NO: 90614 - DNA, 2154 bp, Serratia marcescens; identical to SEQ ID NO: 90566

SEQ ID NO: 90615 - DNA, 909 bp, Serratia marcescens; identical to SEQ ID NO: 90567

SEQ ID NO: 90616 - DNA, 2541 bp, Serratia marcescens; identical to SEQ ID NO: 90558

SEQ ID NO: 90617 - DNA, 789 bp, Serratia marcescens; identical to SEQ ID NO: 90559

SEQ ID NO: 90618 - DNA, 1413 bp, Serratia marcescens; identical to SEQ ID NO: 90560

SEQ ID NO: 90619 - DNA, 681 bp, Serratia marcescens; identical to SEQ ID NO: 90561

SEQ ID NO: 90620 - DNA, 2154 bp, Serratia marcescens; identical to SEQ ID NO: 90566

SEQ ID NO: 90621 - DNA, 909 bp, Serratia marcescens; identical to SEQ ID NO: 90567

SEQ ID NO: 90622 - DNA, 1524 bp, Serratia marcescens; identical to SEQ ID NO: 90568

SEQ ID NO: 90623 - DNA, 675 bp, Serratia marcescens; identical to SEQ ID NO: 88981

SEQ ID NO: 90624 - DNA, 1443 bp, Serratia marcescens
ttgtttacactattatcatttaatattacacacaaagaaaatgaaatatatgactgtatatttacagatattcaaaggcacatccgaaatcttccgttgagtagtattattattggagagaatggttctggtaaaagttatttgctatctcaggttgcagatttctttagatttattcaaagaatcaaaatcaaagaaaagaaaccatattacaaatatgaatctgcatcagttagatatttgattgattcggatttaattgttataaaaaaggaaaaaaataaaatcttttgttttgttaatgatattccttctgatatatccctcgtaagattaccaaccaaagtaatagccatgtcctttatggttaatgataagttttctttttcgaggttcgaagaagatgatttttatgattatcgtggagttagagcgacgtctaatgcttcttatactagcacaattaaaagaatgataaccaactcattaatattgtcgataggttatagagataaactaaaggcggtaaaagacactttgcattttttgggcatgagtgaaaaattagctattacttacaatctaaatagaaaaactttactaaaaagacaactaccacttaacaccatacttaaaaaaatagatgcaattttgcgacgaaagcagtacgttaatgagagtgaattttataaaatcaaaaaaaacccagaagtcatacttcatgatatagatattttgcgtgaggaatgcaaggaaaaaaatggtaggatacatcttaatcttgatcttagtgatgaagggaggggggtcaaaacatcattattccagtctttatcacgcttggaaaagctagagtttatatctaaccctgatgttgaattctacaaaaaagataatttttcatttgaagaaaccagttctggtgaaaagaatattatttttaccattcttaatttaattgcaagcatcaaaagggattcattacttttaattgatgagccagaattgagtttgcatcctgcctggcaaatgaagtacataaatttcataaaaaaatcaatagcttataattttgattgtcatcttttatttgcatcgcactcacatttcatggtatcagatttagaaccagaatcatcatcactgacatctataaatcaatatgatggaaaaagaatatgtgagcatattgaatatagcacatatgcttggtccgtagataatatactctacaaggtttttcatttacgtactattagaaatgctcaagttgaaatggatctttatgaattatcagctctcatatctcaaaaaagctcagatattaagagggtggaaaaaatacttacacatttggaaaggatcgtattagatgtaaatgaccccttaaatttgatactagaacagggtagagtctatattggtgactaccatgataaatag

SEQ ID NO: 90625 - DNA, 576 bp, Serratia marcescens
atgaataagataaactcgtttaaaccttttgtgggggggagttgggacagaaaagacaaagagattattattttcaaacggttgttgagaaagcagctattaacagcgcagaatgattgttgtgcatactgtggattgccattaggtgaaacaggaaaaacagaaattgaacatttggttgcaaaaggcgggcctaaaaggccaaagcatgtagaatttacctttgaagttgataatctttatttatcgtgcaatttatgtaatagtcctttgaaaaaaggtactaaagaaacaattattcataaagatccgatctcatactctaattgtacttttagtattgtacaccctagatatgatacacctaatatgcattattcatgggttgtaaaccctatagagattctcatacaaggaatttccgataaaggtcgagagagtattaaaatgtttaaacttgactcaattcctcatactgaagcacgtgctagaatagaaatgtcaaagagatttaaaatgctcaatgacccccagcaaattgaactggtaatggcagctcttcaatataatccataa

SEQ ID NO: 90626 - DNA, 2541 bp, Serratia marcescens; identical to SEQ ID NO: 90558

SEQ ID NO: 90627 - DNA, 789 bp, Serratia marcescens; identical to SEQ ID NO: 90559

SEQ ID NO: 90628 - DNA, 2541 bp, Serratia marcescens; identical to SEQ ID NO: 90558

SEQ ID NO: 90629 - DNA, 768 bp, Serratia marcescens
atgaaaataatcaataagggtgtggagcccaatcgattcggtgcattcagagctgcccaccctgatgctttatgggagagagatgaggactcaattggagaggctttccgttgttgtagtgcaagatatcaggaaactcagcaacaattacgagcggatcaaggtaatttatgtgcatattgtgaacaggatttattgtctggaactaatggggcactagatgactgtcgaattgagcattttcacccaaagtcgaaacgagaactaggagagcctaattgggggctggagtggagcaatttattagcagtttgctgtggtggaaatcaaagtagagttgttaatcctgaggagagatttgatattgagccagaaaattattcttgcgatgtaccgaaaggtaataaaattttggatcaaattatcttaaaccccctgcgattacctaacttaaatatttggaggttcagtcgttctacaggggagatttctgtaaatgagaagttgtgtttatcactagggctagatgtcgaaatggcacaccaaacaattgagaaattaaatttgaactctccgcgcttaatgagattcaggaaaactgttatggataacctcaataatctgattacagaaagtttgaatagtgggaaaacagtagaccaagctgttagttctattgccatatcaatattccggagaaatagagcaggtgactggccatctttttttagtactgcaaggttttatctaaatagctgcgcggaatag

SEQ ID NO: 90630 - DNA, 1227 bp, Serratia marcescens
atgctttgtagtatttctaaaataaatatactaatcccatactctagaaaaaaagttaatatacaattagatggaaaaagtctgattatcactggtggtaatggttgtggaaaaacaagtttcataacagccatttataactatttgaaaaagggaatagatgatcctaataataatagcatcgaatatttgatgaatcagataaatcattacaaacaccaaatagaaaacattgggcgagatggtgggaattataattactataaggatatgttagagaaaaacaaggatagattagaagaaattaataatttcaatatcgaaacagattatattgacaacaaagacattcggtctttgctcagattccatagtgctacaagacaatccgcaatctcttcaccaaatcaagcaccaaaacactctgttctaattgaggaaaataagcatttccctaatgataaagatggcagtcaattctttgaaagctatttattgagtttaaagaaaaaccaaagctatgcaatagcttttgataaagatgaaaatgaagcaaaacgtattaacctatggtttgataagatacagttagatctgcgctcattatttgaagatccaggtttaggtctagagtttgatacaaaagatgagaagttttatttacatcaagatggaaaagacagatatacctttcagacgttatcagctggatactcttcaatactaagtatctataccgatttaataatgagagttgaaatgtgggaggtctctcctgataatatacagggaattattttcattgatgaaattgatgctcatctacatgtatcattacaaaagcaaatattaaggtttttcattaaatcatttccaaaaattcaatttattgtgacaacccactctccttttgtggttacatccgttgcagattctgttatttatgatcttacagctaatgagcaaatcatagatgcttcttcatattcatatggtgtggttatggaagaaattttcggcgttctaccagattcccatgcattaacggataagcttacacacatagaaaacttagtcaaaaatataaccaaagaaaatatttttgaactagaagaaatcatatcatctttggcatctaataaggataacatgagcgataatactcaagcattccttgactcagtacagttaaaactaatcaagacaaagaaaaatattaggaggtag

SEQ ID NO: 90631 - DNA, 654 bp, Serratia marcescens
atgtttaatgtaataagaacaatacccgcccctgcttcgctgtcagacaaaaaaacttatgacggcgatgatgttcattcagctctacaagaatgttttcatgaaaaatgttatttatgtgaaactaagaaaccattggatataaatattgaacattttgatcctcacatgggtgatataactaaaaaattctcatggactaatctatatttagtatgttcacgatgcaacaatataaagctgataaaatataaaaatcttcttgattgttgttcaataagcgtttgggatagagtgaaattaactcctggattttctccaaaagcaaaaaaattcattattacgccgcaatttcctgacgataaaacaattgaaacagcacagctactaaatgatatttacaacaatgacaatacaataaacaaaagacttacagctcgttccctacgaacccaagtagtccaaaccacacacaaactaacacagcatatgattgtttatcatagcgaagattctacagatgaagaaaaagaaaatgcacttgataaaataaaagttatgattaagaaatcatatccatactctgcattttgtcgctggatgataaaagatgatgaagatcttgataaattattaacccccatcatggactga

SEQ ID NO: 90632 - DNA, 2541 bp, Serratia marcescens; identical to SEQ ID NO: 90558

SEQ ID NO: 90633 - DNA, 789 bp, Serratia marcescens; identical to SEQ ID NO: 90559

SEQ ID NO: 90634 - DNA, 2541 bp, Serratia marcescens; identical to SEQ ID NO: 90558

SEQ ID NO: 90635 - DNA, 789 bp, Serratia marcescens; identical to SEQ ID NO: 90559

SEQ ID NO: 90636 - DNA, 1524 bp, Serratia marcescens; identical to SEQ ID NO: 90568

SEQ ID NO: 90637 - DNA, 675 bp, Serratia marcescens; identical to SEQ ID NO: 88981

SEQ ID NO: 90638 - DNA, 2154 bp, Serratia marcescens; identical to SEQ ID NO: 90566

SEQ ID NO: 90639 - DNA, 909 bp, Serratia marcescens; identical to SEQ ID NO: 90567

SEQ ID NO: 90640 - DNA, 2541 bp, Serratia marcescens; identical to SEQ ID NO: 90558

SEQ ID NO: 90641 - DNA, 789 bp, Serratia marcescens; identical to SEQ ID NO: 90559

SEQ ID NO: 90642 - DNA, 2541 bp, Serratia marcescens; identical to SEQ ID NO: 90558

SEQ ID NO: 90643 - DNA, 789 bp, Serratia marcescens; identical to SEQ ID NO: 90559

SEQ ID NO: 90644 - DNA, 2541 bp, Serratia marcescens; identical to SEQ ID NO: 90558

SEQ ID NO: 90645 - DNA, 789 bp, Serratia marcescens; identical to SEQ ID NO: 90559

SEQ ID NO: 90646 - DNA, 2541 bp, Serratia marcescens; identical to SEQ ID NO: 90558

SEQ ID NO: 90647 - DNA, 768 bp, Serratia marcescens; identical to SEQ ID NO: 90629

SEQ ID NO: 90648 - DNA, 2541 bp, Serratia marcescens; identical to SEQ ID NO: 90558

SEQ ID NO: 90649 - DNA, 789 bp, Serratia marcescens; identical to SEQ ID NO: 90559

SEQ ID NO: 90650 - DNA, 2541 bp, Serratia marcescens; identical to SEQ ID NO: 90558

SEQ ID NO: 90651 - DNA, 789 bp, Serratia marcescens; identical to SEQ ID NO: 90559

SEQ ID NO: 90652 - DNA, 1245 bp, Serratia marcescens; identical to SEQ ID NO: 90562

SEQ ID NO: 90653 - DNA, 735 bp, Serratia marcescens; identical to SEQ ID NO: 90563

SEQ ID NO: 90654 - DNA, 2541 bp, Serratia marcescens; identical to SEQ ID NO: 90558

SEQ ID NO: 90655 - DNA, 789 bp, Serratia marcescens; identical to SEQ ID NO: 90559

SEQ ID NO: 90656 - DNA, 1245 bp, Serratia marcescens; identical to SEQ ID NO: 90562

SEQ ID NO: 90657 - DNA, 735 bp, Serratia marcescens; identical to SEQ ID NO: 90563

SEQ ID NO: 90658 - DNA, 1449 bp, Serratia marcescens
atgtttaagcttgatacaataaaaaatcacagaaaagatgacgttatagttagcattgacaataaattgaataatgagagcttttacacattaattacaggtgagaatgggtgtggtaagtctactttactaagcaaagctattaatagctttctatttatcaaccctaagaaaagtaaagagtgtcaagtttcttcttcgtcaaaatcgcaaccatcgagaataattgccatatgcaatgctcgatataataagtttgcgctaaaaaaaaccttcttggaaaaaaataaaatctataatcctgattattatatccaagcagatcctaccttggaagtagggagggccttaaatgaagtaatccaattatcattaagggaaataactaatacacaaaatgaaatcaataacaaaacggtgagaaccatacaggataaagaaagatgctttaaagctttttccatgatcggaatacaccctgagattagatttaatttggaattaaatgttgatagagtttgtaaaataaaggatgcgtacgagcgtcaggaattaaatgaacctagtcatgtctcagttgttcattccctctctagggagttcctttatctcgccaggatgaatcacattagttcaagtgatattgaagaatttttcaatttttatgattttattgacaataaaacaattagcttaggagagggtgttttacactttgattcccctagatatcagattctatcagaacagactaatactgacttattaagaatcggaatagcagtgggttttattgcccctgcaaaaataaaagttcagcgtgacaactctttgaaatgggtaagccatcatgaccttagttctggacaacaatctttacttttaaatgcaatactcatatctattttcgcgaaaaaaaattctttgatttgcattgatgaaccagaaaatagtcttcaccctgagtggcaaataaactatatgaagtttctagactgcttatgtccatcaaatctgcaaagtcatatttttattgcgacacactcgccacaaataatttcaggactacagagcaataatggttgcatagtgtctttgttaaatttaaatcctatgcataaaaataacagaaatcatatttcaacaactggggaaataatttcaacaaattggcaagagttacattcagcatcatcgtatagaagaaaatccgctgctcatcaactagtggatatttttaaaagccctggttttgataatgaggcaataataaataagttattattaattctcactaaacagacaaaaaaaattgagataaattatgaagatgaaaattttattgatggtgttcaaaatttaattagaaatgaaaaaatagatgactgcgatcctgtattggtaatgtacaaacaaattaaagctattgctaatttaaggggattttaa

SEQ ID NO: 90659 - DNA, 699 bp, Serratia marcescens
atgatattgcaagcaatcgagttcaaaggtgacttactcagacatgtggagacttttgatggtgattcaggccactgggatggaactgacaaaattagagttaagctgaggggagcgataagaaagcattatcttgcgcagcaagattatcattgtgcttattgcaatagattcaggcaagacttccatgggtattgctgggatatagatcatattatccccaaagacacacaccctcaattcacctacgagccgcataattatgcactgacatgcaaggattgcaatactaagaaaggtgagtttaatgttttagaacctagtgttatagctgctgtaaaatatcctaaaaatagcaatgattatataataataaatcctcattttgatgactacagtgttcatatggctgtggattataactttaataaacaggtttaccacattccaaaaacaaaaaaaggaactgagacatttaggatgtgcaatctatcaagattcacagaggtaatagcaaaaacatcagaggttgttgaaggtgaaaatatcactataggcttttcagatacagagtttagagaaatctatataaattataaagcaataatgaacaataatgaactaactccgagtgagagaaagcaacgactcatttcaagattgactgaattactaggagttgacatgaacaatatgtga

SEQ ID NO: 90660 - DNA, 1524 bp, Serratia marcescens; identical to SEQ ID NO: 90568

SEQ ID NO: 90661 - DNA, 675 bp, Serratia marcescens; identical to SEQ ID NO: 88981

SEQ ID NO: 90662 - DNA, 2154 bp, Serratia marcescens; identical to SEQ ID NO: 90566

SEQ ID NO: 90663 - DNA, 909 bp, Serratia marcescens; identical to SEQ ID NO: 90567

SEQ ID NO: 90664 - DNA, 1230 bp, Vibrio parahaemolyticus; identical to SEQ ID NO: 86310

SEQ ID NO: 90665 - DNA, 666 bp, Vibrio parahaemolyticus; identical to SEQ ID NO: 86125

SEQ ID NO: 90666 - DNA, 1413 bp, Vibrio parahaemolyticus; identical to SEQ ID NO: 86314

SEQ ID NO: 90667 - DNA, 645 bp, Vibrio parahaemolyticus; identical to SEQ ID NO: 86309

SEQ ID NO: 90668 - DNA, 1377 bp, Salmonella enterica subsp. enterica; identical to SEQ ID NO: 90466

SEQ ID NO: 90669 - DNA, 597 bp, Salmonella enterica subsp. enterica; identical to SEQ ID NO: 86901

SEQ ID NO: 90670 - DNA, 768 bp, Arthrobacter sp. ATCC 21022
ttggaaaagctggatgctgcggttgcgtcagcgaagattacttcgtcgaaaagcctattctgggagattgaagccgacttctcaaaagaaaacatcggtgctaagtcgaatgcaagccgcgaattttcagattccaatttgttgcggcgtgccggtttgattcgtctcgagtcagttatcttgaagaggctcggagacggagccttgcttgatctccgcgaagctagttcagggcaaatctctcttgccaccacattcttaggtattgcagcatcgataaccgatggcgcacttgtcttgatagatgagccggagataagtcttcacccagaatggcaagcggcctatctaggccttgcgcagcggctattctcgagttatacgggatgccacttcttggttgctacacattccccctccgtcgttgcgggcatgtccgaaaccaacgcgaatgctgtttcgttggatctggcgtctgttggcccggaagtaagttccaactacggcggggactctgtcgacgaattgcttgtacgagagtttggggtttatgagagcggcaatctcttcttgcagaaggagttggcaagagcgcttgatttggcctcagtcggggaaatatccagtgatgcgtttcggcatgcagttgaggtgatatctcctgcagcgattgagcttaaggacgagccgttcggaaggctcgttgcaagcctactccgcgcggcaaagcatgccgacgacagtgaagtgggttccgtttcgcgatga

SEQ ID NO: 90671 - DNA, 684 bp, Arthrobacter sp. ATCC 21022
atggaatatgagtacctgcccgaagactcccaggcgcttcggtcacacgtcggagatggtcaggatttgtggggtgctgactggggtgcatcggatttggagcccgtacgaagtcggttgaagaagtttcacatggccaatgaaagtcagcgctgtgtgtactgtcgccagcagatcattgaccagcatgcgatccactggaacattgatcatattgtgccgaaatcagtcgtcccagattattcctatttcccgaagaacctagctctttgttgttggggttgtaaccaggcaaaaggaaaagcagatcctcgcactagacaggccgttaagcacgcctcgtatccctctgaggcgcgacactatgaggcataccacccctattttgatgagtgggaggatcacttttatatggatgaagattcacttgtaattattcctcggaaaggcagtgctaaagcgaagaagacgattgaaatgtgtcgcctgaagcgcttggctgaaattaaggctcaactcgcaatggatgcgaaagagagtcgcgccatcgacacaatgcgcgaattgatgggtaaggggaatcagagcttgatcctgaagtttattgcagccctagatgactttagtgggtcgaaggcggaattttcgcagttggttcgggaaatgcaaattacgggttcttga

SEQ ID NO: 90672 - DNA, 1269 bp, Pseudomonas fluorescens; identical to SEQ ID NO: 90054

SEQ ID NO: 90673 - DNA, 645 bp, Pseudomonas fluorescens; identical to SEQ ID NO: 90055

SEQ ID NO: 90674 - DNA, 1107 bp, Pseudomonas fluorescens
atgcacattaattttgtagtcggaaagaacgggtcaggcaaaagccgacacttgcaagaagtctctcaaggttcacgcagagatacgctgataatctgcaacacagtgcacgacaagttcaggacacggcctggtgtaaaaaaattttcggtacgcaacctcagaaacacgccatcaaacattattaaatctgcctttgtggagttggcccgcgaaagcacctaccgattgaatgcaatcgccaaggtgcttgaatactgcaattacaatcctgtgctaacgttcattgcagtccttcacaaagacgccgaagagactctctcagagcttagccacatggccatgagtagtagaagagatttcgacataagtcccaacatcattgagtcgctttcagagtcgaacagccatgggcatatcgagtttgaaattaatcttactctaagctacatcgagccaagaattcaagagatgcttcttggcatactggagggagagcatcacctaagaaagctaaaacttttaaaaggcgtagaagtacatgtccagcataaggatggaaatagatttctaagaatagaccaagcaagctcgggagagctaactttgatcgcctcgcaattattcattctcaccaatatgcggaatggtagcttgattttgattgacgagccagagaacagccttcacccccagtggcagaaagactatgtaaatacattaggtgatctgattggacgatatgatgtcgaagtctttattgccacgcactcaccactaatcgtctccggcgtgaggaatagcgaagacagtattagctttcactatgcggaaacaggaaatacgaccttcttcgatcactctgttccgagcgcagaagaaagcctttgggagcaattcgaaacgatcacacctgaaagcagatatgtcagtgaccatgtcgtcgatctcctagaagatctagacaataaaaagcgcacctttgatgaagttacgcaagcattggaaagtatggcgcgcgcgtcctatgatgagcgtcagggaaaggttttgcaggctgcgaagaaactggctatcgaaattcatcaggaagctcaaaatgtctga

SEQ ID NO: 90675 - DNA, 654 bp, Pseudomonas fluorescens
atgtctgaccccttgcacccgccactgactgatttcgcttttacagcagaagaggaagaagctgtcaaatttgcattgaccaccagtaagccctggaagcatgagcatgacgacctcaagggtgtaagggctgtcttggttgccttgaagcatagaattcgtagctttcacctaaaaagacagagttctaagtgctgctactgtcgcatgaatcttcacggtggaggcagtttcatcgttgatcgtgaacatatagtccccaaggaaaagtaccgcgacctgacctacgttatttccaacctttctgttgcctgcaagcggtgtaatatgcaactcaaaaaggatgacgtggaatttctagtaagtcgcgacaccattcttaccaatcacggctcaagcgatcaatatcggttcattcatcccaattttgacaaatacagtcagttcatcaaaaaaataagctatgaggaggatgatcaaacctacgtaaaatacactaaatcagatcatcccaaggccgaatatacatactcctatttcgacttgcgagccttggaagtgaatagcttcgatcagggtcagggcattgatacttcgaacgtaagtaacctcatacgcgagcgtctggatcaagaagtcagccagttgggctag

SEQ ID NO: 90676 - DNA, 1284 bp, Pseudomonas fluorescens
atgcagatcaagcgttttaccctcgtcaatttccgcggtatcgagaagatggaactcgatttcgaaggcaggaagactgtcgctttggtgggcatcaacggcgtgggcaagtcgtcgattctggatgcgttggcgataacgctttcgaacttgacatcgcgggttgtgggcaaggctgccaaatccagaactttgtccaaagatgatattcgagcaggggaagattacacccgtttggagttaacgacggatttgcaaaatcagccgggtacaaaggatttgagctgggcaatagccttgaataagaaaggaggcaaacatccagcagatcgtagtagcgatttattggccttgaacgtaaaagccgacgagttcgaatacggcatccggcactacgagtcaggatttgatgattggataacattgccgttggcagtttattacgacgtgcaccgtgccgtactagacgtaccattgcgcgttcgcgaacagttggttaacgctatcgctgaagggtatgacgatgcgttgggccacggtggcgcggacttcaagcggttcttcatctggtttcgcaatcaggaagatcttgaaaatgaaagtagtcgggacacccctggctatcgagacagagagctctccgctgtacgccgagctatcgaaaccttcactggattccgggacgtccgcgttcgtcgtaagccagcgttgagaatgacggtcctcaaaggcgatctcgaattcaatgtcctgcagctatccgacggtgaaaaatgtctattggcaatggttggcgatttggcgcgcaggcttacattactcaatcgcgaagtggctgacccactgcaagggaagggtgtcgtcctgatcgacgaattggacctgcatctccatccgggttggcagcgtaccgttgttgcaaaccttgaaaagacctttcccaattgccagttcatcatcaccacccattcaccacaaatattgggtgagctgccggctgaagcaatcatgctattgaaggatggccggtttatcgggcatccagagcgttcgcttgggttacgcagcggcgaagtgatcgaagaattgatgggggatgtcgcgcaaaaccgcgacgttggccatcaactccaggcaatacatcgctatctggatgacgacaaactggagcatgccgaagccagtctctcgcaattgagagataaggttggggacattccggacatcctggaagtacaagcgagcatcgactccttgaggtgggccggagaaagtgaagcatga

SEQ ID NO: 90677 - DNA, 720 bp, Pseudomonas fluorescens
atgaggtccatcacgaaaggggcagagccccgcgagttgattgagtggcgtcgggaaaacaaagacacgccgcaaaatctgttttatggccgtggtagcagttttccggcggagcctgtgcgcaggtcgttattgcgtgagcagtttcatctttgcgcttatacgctacgtcggctacctacggcgcaagaatgcggagccaaaggccaagacactatttttagctgccatatcgaacatgtgctgccccaggcaaggcatgtggaccaaagcatcgcttacgacaacatggtcgcatgctatccgcctagtcagtccaatgtcgcctgtgagtacggagcagaggaaaaaaaggcctacgaccccgctcgaaacccctttgtatcgcctctttcgccccacgcgagccggctttttcgatttttaagagacggaaaggttgaagggctttcaccggaggcggttcaaacgattgaagtgctcaagctcaatcacgccacgctggtcaatgaccgcaaggcggtcatcaaaggctggcttatgccacgaggaaaacccatttctgccgcagcggccaggcgtttgagcacggaggccgagacgccggacgccaatctttgtttacttcagtactgcatggcacttaagcaacaggccgagttacatgcggacaagtacgaaaaacgcgcagtgcgtacccgaggtcaggtgagaccatga

SEQ ID NO: 90678 - DNA, 921 bp, Pseudomonas agarici
atggccgcatcaaaagagctaaagcgtatcgacaatggcgagcagattgatctacctgtactcgctttctacagagccgaccggcgctggagctcttcaggcgtatctcctgagattgcagcaacgactaaaatctccaggcttgacggatacattgactggtcaaactcggcagttaacttaaaaaattttgaaggctggatgatcggaaaaaccttagaacgtctccagcgactatctcgctccaagggtacaccggaaaaatacgaagatgaacttcaatgggtcaacgctgcattaaagtatgctctacctgaatctcaaggtatcgaatatgatcttgagttgcgcaacctcttagtgagctttaacactaacaaaactgtacctttcaacgacctcagcgacggtcagcgcggccttatcaccctgatcgccgatatcgctcgccgcatgtgcattctcaacccgcacatgggcaaggacgtcctgcggaacacctcgggcgtggtcatcatcgatgagttggatatccatcttcacccagcctggcagcgcaccatcgtccgcgccttgaagaccgcctttccgaaagtccagttcatcgtggccagccattcgccgcaaatcattggtagcctgcgcccaaaagaaatcatcgtattggacaacggtgacagctcgcacccacgcgtatcctacggacttgattcaagccgcgtactagaagaagtcatgggcgtatcgcaacgcgaaccgaaagtggaaagcctgctgagcgaattgttccgcgcgctggaaaacaacaatctggaagaggccaaagcacgtctgctcagcctgaaagcagaagctcccgatctccccgaattcgccagagccgaagccctgctcaaacgcaaggagatactcggcaaatga

SEQ ID NO: 90679 - DNA, 642 bp, Pseudomonas agarici
atgaagcaagtgatcaaaggaactgagcctgcttcattcaccgactggaaagcctctgcaaacgaagattggcaacctagctacgagacactgcaaaatccgcagaagcgtgatctgcacctgagcctgctactagagcagcgccatgcctgctgctattgcggtcgggaaattgatctgcacagcagccatatcgagcacttccgtccacaggaacacttcgaacatctggcgctggactacgaaaatctgcacgcctcctgcttgagggaaaccaaaccgggcaatccgctgcattgcggtcatcgcaagggcaactggttcgaggaaaagcttcatatctcgcccctcgagcaaaactgtgagcagcgtttttgctacctgctcacgggtgaaatacaggcattcaccaacgatgccggtgccacaaaaatgatcgaggtactggctctggatattgcctatctcaacaaccgccgggaagaacaattactgggtttcttcgataacgatttcctgattgatgccagcgaagaggatttgcgtagaaccatagagtttttccgctgggtcgaaaacgatcacccagtgccgttcagccacgttattgcccgctatgcggaacaattgatgagtgcgtag

SEQ ID NO: 90680 - DNA, 1296 bp, bacterium P3
ttgctgttttcaaagaaaagttgtaattttgcggccataaagaatgacattatgagaatagaacggcttgaactgagaaacttccggtgctttgagcatatcagtgctaaactgcatccgaaaatgaacgtaatggtgggtatcaatggcactggcaagactacgatgctggaagccatacgcatattcgtgggtgcggcattctgtgaacttgacaagatagaaaatagaatctcatcgccaagtattgcagatgacgacgttcggctgcataatctggaaagccagtatcccgtaagaattgagggggtggtggatgttgacaaaggattattgcctgataaattggcccagtgggataggacactggagaaatatggcggtaggaccaagtttgacaatagcaaggatgtgaagtcattatccaagaatatacaatctatcattcgcgacgggaaggatattcctattcccgtcattgcatattactcgactgacaggtataaaaaagaaaagcggaacactggattggaggctgacggaagtcgtctgcgtggttactataatgcgttagactctacgaccaacatctggttcttcttgaatattatcaagacggaaactttgtgggaacttcaagaggggaaaaagtctgccgttctttctatggttcgcaaggtgattgttcaatgtgtacctgactgcaaggaaatcaagcacgatgtcaaacaggataaactgatcatcacacaggctaatggtgagaaggtgccattcagttctttgtctgatggcgtgcgtaatgtcctgtcaatggtaatggaacttgctttacgatgctatttgctcaatccgtcgcagggtgagaatgccccttcaaaaacccccggcattgtgctgatagacgagattgatttgcaccttcatccagaatggcaactccacatcctgaacgacctaacttctgtatttgggcgcatacagtttattgtaagtactcatgccccattgatacttagttctctgcaggacggtgagattttaagtatttctgacaggaaggtttataatttcccaaatcaatacaagcgccgtcctgagcaaattttgaaagatatgaataccagtatagccagtgatgacatagaaaaggctcttgctgactatcggttgttgatagaggctggcaaaggcaaatctgaagaagcggtagccttgaggaaaaaacttgtatcagcccttggtgaaggacacgaagaactgcaacggacggatattatgctgcaattgttctaa

SEQ ID NO: 90681 - DNA, 723 bp, bacterium P3
atgagatatattcccaaaccagactattcttctgccttaactcttttggaagatgcccaaaagaaaatgcgagaagcgggtatcagcgaattgtatgagcactttcatgagaaagagcaactaaatagtattctacgagaagaacaaaagctgatttgctgttattgtcagcgacgcatagaccatttccaaggtgataacgaacgtggtagccataatgagcattttgaaccagagaagggtgataatgcacgtaccgacttacagcttgattacaagaatctctatgcctgctgcaatgcttcaaaaggatttgagaaacggctgcaacactgtggagagcataaggggagtgatgttataaacagaaattttcttgccatgcgtgattgctctgagtatttcaagtataacacgaacggcgagatattgccacaatgttcaatgaacagttttaaggaaatttgtgaacatcgtgaatcgttgacggatattcaacgcgatgccttgcagatgattgaagtattgaacctaaacgtagacagtcttacggaattcagacgaaatgttcaggccgatgttttcaaatttgcattgaacaaaagccaaaagcaattagaatataaggctcaacttctgaacacggaaagaaaagaatatgtgcagatggtagatatggtgctctttttcctaaaagtattttcccagaaggctgcaagataa

SEQ ID NO: 90682 - DNA, 1623 bp, Vibrio cholerae O1 biovar El Tor; identical to SEQ ID NO: 85886

SEQ ID NO: 90683 - DNA, 618 bp, Vibrio cholerae O1 biovar El Tor; identical to SEQ ID NO: 85887

SEQ ID NO: 90684 - DNA, 1296 bp, bacterium F083; identical to SEQ ID NO: 90680

SEQ ID NO: 90685 - DNA, 723 bp, bacterium F083; identical to SEQ ID NO: 90681

SEQ ID NO: 90686 - DNA, 1431 bp, Burkholderia sp. LMG 29319
atgcacttgatatcgcttgcgattaccgacgttcggtcgattgcgaagatgacgctggacttttccagtgacaagccaacggcgcgtcgatggacccttttgcttggagagaatgggtgcggcaaaagtaccgtcctccggtgcatcgccttggtgctcgcgggcggagatggcttggccgacttgctaagtgaccctgatgcatggatccgccatggacgtccgagttgcaagatatctgcgacaatcgaatttgaaccggggcgccatttagatatttcgctggaaatgcgccgaggcgatacgctgtcggagatcttagatcgcaatcgtgaatcgttagtgcaattcgaccagtccctgaagcagaattctgagtcagcagtagcattgggttatggcgtctcccgccgattaccggttgccggtaggcgcgtcactgggttgagccggctaacgcgatcaccacgagcgggcgctttcgcgacaatgtttctgcccgaatttcccctaatctcccttgaagattgggccattgatttacattaccgaaaaggcgcaaagggattatccgcgatccgtgattcgctcaatacgctgttgcccggtatggaattcgctcgtatcgatcgcgtgagaggtaaactcatgttccgtacgaccgatgggccgattgctttgagcgagctttcggacggttaccaaagtatggctgcatggtttggggacttgctctttcggatcacgcagactttgccgcatgctataaatccattaatggcgtcgggacttctcttaatcgatgaacttgatctccatctgcatccactttggcaacgtagactcgttcaatttctcgataaaactctacctaacttccagatcatcgcaacgacccactcgccgcagaccgcgcagcaaagttcagagggtgatctttatgtaatcagacggcatgctcgaacgaacgcgcccgagctcataccgtttgttggagagccaaaaacgatgctgctccatcagctcatcatgagtccaatgttcggcattgattcgatggactccctggaagttgaaaagaagcgcgcggcagcaaggcgactcgaattaaccgactcacgaaccgcaaatcaagaaaagcgtcttcgcaatctcgctacggagcttagcagtcttcctgaatggaccgtctccaaggacgaactagtgaagcttggcgttcttaccgacacgcgtcgcaaaactggccaggcaagccattcgcctaaacctgtaatctcacccacacacctgcgcgcgatgcgtagacgtctagaggctaagggtgactccatgcaaggaattgtaggacgtgctccgactgagcaacgcgcaaccgaaagaccttcacgcgcgtccacacctaagaagcggcggagcgcgaaggcatga

SEQ ID NO: 90687 - DNA, 843 bp, Burkholderia sp. LMG 29319
atgatccgacttacccgcattcgcgatgaagctcatttgaagggttttactggtgctgcccttcaggaaaagctcgaaaagcttctgggatactatttttccgatccagggaagggcgttgattttaagatcaaatcccgtcatgtatggaaaactgctaagaactcgctgaagattgaatcgcataacaaatgtgcttattgcgaagcagatactgctaccgttgcctacggtgacgtcgagcattttcgacctaaagatcattattggtggctttcctactgttacgacaatttcgctttcagttgtcaagtatgtaatcaatcatacaagggtgcgaatttcccggtggaccaacagcgactagctaggccgaagcttccgcgcgcactaccaacagatgtccttaaattatcttcgtatgcgaaatcgctgtccccagatcctttcgtacataaagataatgcgataacgcgattgttccgtagtgaattagcacatttgccgaacccttatcaaggtcagccagagaaactatttggatggaaggttactaagtcaacgaaagaggtccacgtagtcccgaggaaaggcagcgtgcgctccacgaaagccgtcgtagctgcagagaaattcttgggcatcaatcgttcggagttgttgcgggtacgttttctgcactatgaaagtcttgaaactatggtatctctctttcaggacagtaagtatagtccatcagctcagaaaaagatgctggctcgcatacagagaatgggagataacgatcagccgttcgccgggatgaagcgcttctttcttcgacaatggggtctcatcgattaa

SEQ ID NO: 90688 - DNA, 1386 bp, Burkholderia sp. LMG 29324
atgctaaccgcatttgactttgaaaatagaaatttccgcctcaccaccggggacgtcgttggagacgaaaataaatacaccgtaatcgtcggaaagaacggtacaggtaagagccgcatactaaaggcgatcgtagagcatttcgtcgatcccgacactctcgaacggcgtcgatctgacgagcttcgcttgcgtacgtcaccttatctccggcttgcctacgactatcaaccaagcaatgtcatcgccatatccacaagtccctttgaccgtttcccgttgccggaatcccggcggcttctgatcgaacatctgggctccggcgatgcagtgtatccttcttacgaatatctcggacttcgtggactgtttagcagaaatctaggtctgtctttcatgagccggaccattacatcgttaatcaaatcggtatatgagaactcacagcacgcgaagcagatctgtcaagttcttaactaccttagatatgacgggtcgatagaggcaagattccaacttgatccctcgatcagcacgctacgccggattctgacggaagaggacccgattcccgcgcttcacgattatcttgcctcacgacgcgaggtctttaggctgaaccccttacgcaatcgggaccgaacggcggacgttgacgacctgatctatgcgcttcgcaggtttgtaaatgcattggggcgtccccgcattgacataaagatagatcgctttggtgcgcacagcctgaaccaagtagaccttcaaatcgacaacgatttcgtccttctgctggaacttggactgttaagactccgtggagtaagcctgaggaaactagacacccccgacagaatacacttgaacgaagcgagttccggggagcaatccgtcgtattagggttcctgggaattgcgggacacatccaggacggctcgctcatttgtatcgatgagcccgaaatctgcttgcacccggagtggcaagagcgctacattcagcttctcatctccacgttccggaggttcaagcgctgtcacttcgttatcgcgacgcactcgcctcaaatagtcgctcgactggaagaggataactgtttcgttcttaatatcgaaaccgcacacattgcggatgcaaaagttcttattaaaagatcgtcagacttccagctagctaccacctttggcgctccaggttataagaatgagtacctgtcacgagagctcataaccctgataacccattttagcaaagtcggtgagctcgacgacgaacaagcaggtcttgcgcgaacattgttgaaactgcgatcggttcttgatgacgcggatccggttgcaagcctgatgaaaatgcttgatgagattctcgtggagcaaacaaaatga

SEQ ID NO: 90689 - DNA, 732 bp, Burkholderia sp. LMG 29324
atgaagttcattccggctcccgtcgaatatgtcgaagaaaagataaaagccaaggtcgacgggtataatttgttaaaggaaacggaaaagagcggtaaatactgggatcagccagatgatgcagcgctggcagcggtcaaaaagcacataaaagactattatattggagtgcaggatggcaaatgtccgtattgtcgtcaacagatgcttgttaagcacaacggtgcgtgggatgcggaacatataattcccaaagatttacaccccagattcttgttcgatcccgagaatctttgcgtgtcttgcaaggactgcaacggtgagaaatcgaacaagaacgtactcaagaattcgaattacaagcccaagaagttacctcggaacaaagatgcgtacatcatctgccatcctcatttcgacacgtacgaggacgaagtgaaggtagtcatgaatccacttttccatataccgaagagcgagaaagggcggaagactatagagatttgcgggctgcttagatttgcttacaagatgagtacatacggcaccgtatcgacaggaattgctgatgaaattggtgtgctgcatcggtcgctcgcatcggctaccgagggaggcgaacaagcgctgattttagcggcgataaaggacaaatgcgatgaaggcgttgaattagcgaaaagggctcggatcgccgatctcgtcaaacgacagagcgctctaaccgggtaa

SEQ ID NO: 90690 - DNA, 1659 bp, Klebsiella pneumoniae; identical to SEQ ID NO: 87546

SEQ ID NO: 90691 - DNA, 843 bp, Klebsiella pneumoniae; identical to SEQ ID NO: 88901

SEQ ID NO: 90692 - DNA, 1278 bp, Leptolyngbya sp. NIES-3755
atgctgctcaaaaatctcaccctcaacaatgtccgtgcttttagccatgccgaattcacttttcaacccggcatgaacttgatcgttggaattaatggtgttggcaaatctacggttttagaagtaattcgcattgtcctagccacaattctgcctaaattcagcttggcaactattgaaagaaccattaaattcaaagctgatgatataaaagttggagaaagtagcttaacagtatcgttgaatcttcaagtactagatactcctatccaatgtgaatttcaatatttgaggaaagctgaagttaaactaaatccaaataatcaagtaattcttgacaggctcaaacagcgcgtaatacccttagcagtttatttttcacctcaacgtgccatcgcaagcatggcgaaatctaaggatattacgtatggagtgtcaactgcgtttgttgatgcacttaaacatcgtgagcttcgctttctagaatttgcagactggctctttgctcaagaaaatcttgcattagaaaacgtccctcacgtcgaaaagttcattgatacactaaactccgtaatttcctattttcttgattctctaggtcgtccacgagcttttcaactggtcaagattcgtgatgttaaagacaagccgcaccataagaatattgatgtaactacgaatttcagaatcgaaaaatctggagtaggactaacggtatcacaactttctgatggtgagcgcggtatgcttgctcttgttctggatctcgctcgtcgtttagcgatcgccaatcccgatctagaagatcccctacaaggcaaagccgtcgtcctcattgatgaactcgatctccatctccatccaaaatggcaacgcacgatcgttcaaaaactcactactacctttcccaactgtcaattcatcgccactactcactctccactaattatcagtgaggttccatcatcaggtttgatcctactcagtcaagaagacgatcaaatcaatgtgattcaatctggcttatatggtttcggattcgatacaagttggattcttcgtcatctgatggacactgattctcgtaatcctgaagctcagacccagattgatcgggtcgaagaagccctagaagacggcgacttagatctcgctcgtcagcatctggaacaactcaaaacaatgcttcatggaaaagatgatgaagttattcgtttagaagctagcatcaacaacctggaggctctcgcggatgcgatggatacggaagcagaatga

SEQ ID NO: 90693 - DNA, 702 bp, Leptolyngbya sp. NIES-3755
atgcgatggatacggaagcagaatgaacctcgccaactaactgaatggcgattgaaatacaaaaaagaccctaacttaggttatgaacttctgcgtaaaaacaaagaagccatagccgctgtacatttctctctgcttgaagaacaaggctatctttgcgcctatacaggcacgggtatagatgaaaattccagtcatattgaacacattaaaccgcagacacactgtcaaccgatcgagacggtgacttataccaatattgttgcgtgctgtcctggcgctaataaacccgacccaccttatggagctaagaaaaaagaccattggccctcacctgctgaagctcacttattcgtttctcctttagaaccatcttgtgaaagcaaatttagatatgcgaagaatggtgagattaaatatcaagcaggagatctagcagcacaaattacaattaagaaactgggcttaaatcataaattactcattgctactcgtaaagccacaatccaaggggttttaggtaaaacaaataacttatctcttaaagacgcgaaacaacgtcttaaacaacttcaaaatcagaattcaggaaagttagaacctttctgttttgttataattcaagccttggagaaatatatcaaatcgattgagtttcgccgcgctcaaaagcaaattcaatcgaaaaaaacgaagaaatag

SEQ ID NO: 90694 - DNA, 1263 bp, Leptotrichia wadei
atgaaaattagaaaaattcatattaaagaatataatggacttaaaaatttgaatataaattttaagagcaacgacaaaattttggatacaataattttaattggagttaatggaagtggaaaaactagaattttagaaagtatttatcattgttttaaaatatttaaaagcacaattgttgatttagaattattttatgaaaaaaatgaaaatgaagttttagaaagtctaatggatagtgaaggattgacagaaattgaaaaagaaatgcaaaaggatattgactatatagattgtttacggaatattaaatattataatgaagattacaaagaaggaaaaaatcaaaatataaattcaaaaataataagtcaaagttttaagaaattaaaaatttttcctaaaataatttatgttccaacagagataaattttcagaaagtagaaatcgcttctcctatgctagttcaagaatatagttttttaaatattgtagattcgattttaataaaagatgtgccttcctacatagcgacaagaataatggaaatggctaatgagcaagaaaatacaccaatgggagaaataagagcagctgtattcaaagaaataaatgagatttttgaaatattggatttagatataaaaatttcaggaatttctaaaaatgcaaaaagtataccgatttttacaaattcagcaggagataaatttgatataaatgaattatcttctggggaaaagcagttatttttacggactttggctataaaaatgttaaatcctgaaaattcaattattttgattgatgagccagaactttcgttgcatccgaaatggcagcagagaattgtcgatgtttataggaaaattggaaaaaacaatcagattattattgcgacacattcaccgcatattttaggaagtgtaaaaaaagagaatattatgttgctagataaggatggtgaagggaaaattgtggttaggactggggatgaattgtatgattcttacggacagccgacagatagagtgttgaaggatattatgggcttggaaactactagaaatcctaaagtgtttaagttgttggaagaggctggggagttagtggataaaaatgaatatgagagtgaagaatttaaaactaaatataaaaaattacgagaaatattaggtaataaggatgaggatttgcttttaatggatatggatattcaaattagaaaaaaacgaggtttgaaaaatgttgaaagtaaataa

SEQ ID NO: 90695 - DNA, 654 bp, Leptotrichia wadei
atgttgaaagtaaataaaaaggatgaaccagaatttttttcagagttcaaaagaaagaaaaatcctaaacactgggatgttcttaataaaccagagaatcttcatataaaaccagagttaaaatcttatatgttaaaaaatgaacaaaaaataggagataaaagttactgtccttattgtgaaatgatactgtcttttgaagataatgatttaaaagaagataaaaaaagccatatagaacatataaaaccaaaaagtaaatttgccaatctcacttttgattacagaaattttttaacatcctgttcagaaaataaaacatgtgggcataaaaaacaatctacttgggataataaattatttataaatccagttgaagaaaatccagaagaatatttttcatatagcataagaacaggtaaaattattcccaaaaaagaaactggacttgaatacgagaaggcaataaagacaattgaaattttaaatttaaatgaaaataaattatgtgattatagaaaaagttatataaatcagatattaaatagcattaaaaactcaagaaataatgatgaaaaaatagaaattataaattattttgatgaacttccaacattaaaaaaatttttaatagaaaatattaaaattttataa

SEQ ID NO: 90696 - DNA, 1257 bp, Porphyromonas gingivalis; identical to SEQ ID NO: 87552

SEQ ID NO: 90697 - DNA, 606 bp, Porphyromonas gingivalis; identical to SEQ ID NO: 87553

SEQ ID NO: 90698 - DNA, 1539 bp, Moraxella osloensis
atgaaaatcaaacaattacagttacagaattatggcagatttgaagatttgacgattgactttgctccgactgaggatagagcaagcaatgtcacggtcattgtgggaaataatggggcaggtaaatcacaaattttgcaagcattggcgactgggttaagttggtttgttaacggattgacgaaggtgaaaagtataaataatcattcggacaaatttgaatttgaatggacatttgattgtgaaggagtgcatatccctaaaaaaatgataaaaaataatcaaagtttttccgagatagaacttttctttaatgacgaaaatagtaaatttggttcaagtattaagattgatacgtcagttaataatggattagatattgcttcatatggtcgtgaaatgactaattttgaggctctgttagatttttatagggaaaatattaaaaacacgaaaaattttaatttaccattattagctttttatagtgtagaaagaaatgtaagtgtaagtgagcttgaaccaagcttaagctttaagaatcatcaatttagtggttatctaaatgctttgaatgctggttcagattatagtcagttttttcaatggtttcgagataatgaagatttagagaatgagattaacaaaactaaatacttaaaagaacatgatgaatttttacgaattgaaataaaaattgaacaattagaggaaattcaagaacatatagatgacattgattattttcccaacgatgaagaaaagtataaatactctgcaaaaattgcccgccaaattaaagaagagaaggaaaaatataataatttacttatcagaaatagctttttaaaagatacatcaaatcaaattcaaactttacctttaaaatttgttcgacaagctatcgaggaattcacggaatttaaaaacatcagaattcaacgtcaagacacccctacaatgataatcgaaaaagacggtgaagaactggacgtaaaccaactttcccaaggtgaaaaatccttacttgccttagtaggcgacatcgcaagacgattagcaatacttaaccctagcctagacgacccacttcaaggcgaaggtgtcgtcatgattgacgaagtcgatttacacctacacccaaaatggcagcacgacctaatcgataagctagttcgcaccttccccaacgttcaatttatcctaaccacccattcgccactgattgtcagcgatagcccaaacattttagtttactctttggaaaatggtaatttgcacaaaacgaagaatatctacggggaagatgcaaatacactattgaataatatattcgatgtgcctgttcgtacccccgaagttgaaaatgactttaataatattcgacgagcgattagcaaccaggaatttgaaatagctgataatcttattaatagtattgcaaagaaagtagcatcaggtaatacagaattattgaaagtcaaattgttattggctcaagcaaaacttgcccaaaaatcagcgacaaatttgggttag

SEQ ID NO: 90699 - DNA, 633 bp, Moraxella osloensis
atgcagaagattgataaaaaattacctatgcctccaataatggcggggtggattaagcgtcacaaaaaccaaccttggaatttaaaaaatgatttttctgaaggttatgatgctatacatcagcaattgtacgaggaacaacttggcttatgttgctattgctgtaaatctttagttgatgaagaaactagggttgagcacttagattgtaggtcaaaatatcccaaaaaaacttatgagtatgataatcttttactttcttgtgccactgaaaatcagtgtgataaagctaaagagaacaaagcgttaccattaactcccttgatgaatgagtgtgatgaagaaattaaaataaattttgcaggagaacttgtcggtaatacacatagggctaaattagcaatagaaattctgaatttaaatcaacgaaaaatttgtaataatcgtaggttaaaatacgatgagatcattatgttatatctgcaaaataaagaattcttaaatctaacagaaacatcgactttagaagagattaaacatgaactcaattcatttctaaattctatatatggtaatactgaagagttttatgaaatcatatatattctcaaaaagataacccaaatcaaataa

SEQ ID NO: 90700 - DNA, 1614 bp, Alteromonas addita
atgaatgagaagaatttaagaaatttgaaaaatcgagcccacaaaggcgatattcttgctaagtttgagctttacaaccttttcgttgatgaagataaagttaaagcagaaaaattaaagaaagagttaatagaacatttaaatagtaatggaataaggctggaagatatccaactttattcattcagaaaatttgagacgttaaggattgaatccggctttgataaaaacttaacagtgcttataggccttaatggtgacggcaaaacatctattctagaagctatatcgaaaacactcagttggctcacagccaatatagttaaagagcaaggccaaggctcacctgtcaactatagtgacataaagaacaactcaatccttttcagtgacattgctagtgagtttagtagtaatagtaaatatcgatatcaagctagactttcaagagcagtgaaaggttctgggaaaaagagagatagtgatgtaataaacctacgaaaaattgcagatatatggaggacatttagtaacgaagacgatgtatgcttccctattttcgcaagctatctcgtagagcgctcttaccctttatcagttgaaaagcgcgctggccgaaaagagagaatgcagtggcatgatgcttattctaactgcttagaaggctcagggaaatttgagtcgtttatcgattggttcatatcaacgtcgaagatagcaaactcttcatcaagcgaatcaattgataaaactgaaaacataaagccaatcatagaaaagctggcttttctagcagataataaatcgaatctttcagttgatgaatacgaaaaactaaaagaagtactttcaaaatttgagtccaaggctgatgtatcagtagatagtaattcagcctctattgaactatcagtattaaaacgcgctatttctagtgtcattccatctgtgaccgacatttggctatcaaatagcgaaggcaaagatgacataatggtgaacattgattcgaaggttgtaaaccttaatcagctgtcagatggacaaagaaccttgctcgccctgatttgtgacttagccagaagactaatgttactaaataaaaacagaaaaaaccctcttcatggtaacggtatagttttaattgatgaaattgagctccatttacatcctacttggcaacaatcaattattcctcttttaactaaaacattccctaacatacagtttgttatcgctacccatagccctcaagttttaacaactgttgataaaaaaaatatacggcagtttgatgaaacaaatagcgacgatgaattttggcttgctattccagagtttcaatctgaaagctcagagaacaacatagttctcgaacagttaatgaatacaccatcagctcctgaaacaaaaacgctggagcttttaaaagatgtgacatatttagttgaagcaggcctatttggtgcttcagatgaacatatgcacaagcttaaaaacttggaatctcattttggcgattcccacccaaatattttgagactcaaagattcgataaaattaatgacgttaaaaaagcggattgcagagagaaaacaaagcaaggaagaatag

SEQ ID NO: 90701 - DNA, 657 bp, Alteromonas addita
ttgaagcgattaactaggcctgatgagcccactgctttaaaaatgataagggacaaaggttcaaggtcatggaaagaagcacctcgagcagatatttggaaagcattggatgaaatgcagaataaattttgcgcatattgcgagaggcaattatccgataataaaaagcacattgaacattttcaatctagaagtattagccccaatctaacttttatttggaacaatctctttggttcgtgtggaaaagatagttgggacagctgtggaatatttaaagatacaaagggccgaccttatgaccacaacaagttaatcaagcctgatcaagataaccccagagaatacctgctttttttaaccaatgggctagtggtgcctcgccccaaaacttccccgagcacttcagaaaaagcagccaccacaataaaggtgtttaatctaaatgctgctcctagactagtaggcgctagaagagaagcattgcgttcttcagttaacactgtgcaagaaatttatgaatggcgggaaagtggcgaaatagacgaagatacttttgatgaaattatccaagaagaattggaaagccttgaagggcgagaatttgaaactgcactcagagatatctttgaatataactctatttatggcgaatga

SEQ ID NO: 90702 - DNA, 1341 bp, Agrobacterium sp. R89-1
atgtgcacttttttgctaaggtctgagttcggcacccgtgaggtcaaaatgtacgttagacgtctaaaaatccgtgatcttcgggtctttcgaacggcggaagtggatcttctttatcctggccgcgagcagaacgaatcttttgaggacgtttcgcgttggccacctcggctggacaacgtgaacgtgtttctgggcaacaacgggtcggggaaaagtactcttttgagtgcggtagcgctgtccctgatgtctcctatcgccccatcatcgggctatcgaccgcgctcgcttatccgtagatctgcacgcgggcaggtgaaaagcgcggaggtatcgacggaagtagtcctgcatcagcaagacggagggcgggatggtaatgcttcgactttcgccgcgcagatcctacgtcgtggagatattgagtttctgcagccttcgacagatgtcgtcgatgagcagttctttgaagatgacaatagcgctttctttttcgttggctacggggccacaaggcggaccgaggtgttgtctgcgaatgatctggcgagccgacgtaaggcgcgcgcagtgcgatacgaacgagttgcatcactattcgaagagcatttcgcactaacaccaatcagcgcatggctcccaagatggcgtgatgagaacccagggcgttacaagcaagttgccaatctgctcaaacgtctgatgcctccgtcgatttctttcactgaagagctcgaaggtggcgagtaccttttcggttatagaacgctaaggctgccgtactccgcgctgtccgacggctatcgtttgtatatcggctggattggagacctgctctaccacctttgcatgggtgcaccgtctggctttaagctagtagagagccgtggtgtggtaatggtcgacgaagtcgacttgcatattcatcctgcctggcagcggacactcatcccaactctgtcgcgcacgttgaagaatattcagttcatcttcacgacgcatagtccactactggtaagcacattggagcgctccaatatctacaacgtgatgctgggcagcgggcccacgcccgaggtgcgaaggccagaggaagaaacgttcggactgagcgccgatcaactgctgcgttccgaggtcttcggtttggattcgtctagagatccggaatttgctgacaaattgcgcgatctttcgcaggcagctgagcgcggcgagagaggtgcagcgttggcctttcttagaggcgcatcggctggcggcggcgaggaccctccagaggcaggggatgcgccagaatggttgaagagttttggcgagcggagcaaagcattgtga

SEQ ID NO: 90703 - DNA, 879 bp, Agrobacterium sp. R89-1
gtgatccgatatgcggttctgtcgaaggctgaattggaagcccgcgttgatgccgtcgatgccggttggcgcacgcgggctgcgacgaggcgcaatgcgtttatcgcagccggaaaattccaagaagacgcttctatctggagcgatgtcaaaacggtctttatggacctgcagcacgataagtgtgttttttgtgagcgtgtcctcggcggaaaactcaccggcaagtcagaacatgatgtggagcattttcgcccaaaggggagggtgacgaactggccctatcccaaacgaacgccaaaattaacgtacgcatttggaaccggcgtaccgagcaacacgggttattattggctggcttatgatgttgagaattatgcttgcgcctgcaagggctgcaattctgatcgaaagcgagactattttcccatcctcggacctcgaggggtggcgacgacggacattgctacgctgaacgcctcagagactcccttactgcttttccctcacgggtcactcggcgacaatccagagctgttcatcacgtttgaaggcgtcattgcaaaacctattcacgccactgggcttgaaaagatcagggcccaggttacgattgattttttcagcttgaatgatcgcgaagagcttctagcagatcgtgctcgagtaatccgagagctcttcaaaacaatccgattgactagtgatcaagatccggccgttcaatcggccgcgtatcgtgatatcgatacgattacttcaaatctttcgccacaagcggcatgtgcgcgggcgtatttagcgctggcaaagacgacgccgcaaaaggcctgggaaatttacctggatgtggaccgatacctcaagccagccagatag

SEQ ID NO: 90704 - DNA, 1398 bp, Escherichia coli; identical to SEQ ID NO: 86202

SEQ ID NO: 90705 - DNA, 732 bp, Escherichia coli; identical to SEQ ID NO: 88895

SEQ ID NO: 90706 - DNA, 1257 bp, Bacillus cereus
atgataataaaaaatctggaaataaataattggaaccagttcgaaaaagttaatatcgattttcatcctaggttaactgttttaactggggcaaatggtgcgggtaaaagtacaattttaagaatttttagtacactacttggctggagatttaatgaaattgctacgccattaaaaaaatcccccacaccattaaaatataaaattggtggtagaagaaaaactcaacctaaagaacagcaagatatggtaaatattggaagtattgagtgttttaatggtgatacttctaaactttttgttccagatttaagtcaatcagcaagctactatataaattattctaatccaaactctaattattattctaattctactcttaacttaagaggaattaatatcccttctcatagaatagcatattcttacaaggaaattggaaatatagctccaaaaccagcttcaagacaacaggcttttacaacatttaacacttctttaatgaatagaatctttgagaattatggcgattcaccctcttttcatatgaaaacaacacttgtgagtctagccctttttggtgagggaaatacatatgttcaagaaaataaagaggcattagatttgtttttaggatttattgaaacgctaaaaattcttcttccaccaacactgggttttcaaagtatttcaattagagatggtgaagtggttttagaaacaactagtggagattttttattagatgctgtttctggtggtataggtgcgatactagacttagcatggcaaatctatatgtttgatgaaaataaaaatgaaccatatgttgtattaattgatgaggcagaaaatcatttacatgcttcaatgcagagaaggttgatgcctagtttgatacaagcttttcctaatgcacaatttataattactacacacagccctttgatggtaaactctgtaagagattcatctatctttgtgctcaaatataataagaatagttcagtaattagcgaattattggatttcgaaaataaagcagcaaatgcatcagaaattttaagagatgtattgggtgtacctgtaacaatgccactttgggtagagaatcgattggaagatatcttacagaattttaaagggtatgaaattactccagaaagctatagtagactaaaaaatgaacttgcatctgttggtttaaaagatcacttgccacaggctttgggaatccttcaagggggtaactattaa

SEQ ID NO: 90707 - DNA, 648 bp, Bacillus cereus
atgatttctttaataaaaacaacaaaacctataattcttgaggataaagaaagtgattggacaaatgaattaaaaagttttttgacatctggtacaagggtacctgatcatataaaaggtagatatcgtcacaaagatattaaagatgctttactattagaaacgcattctaaatgtgcatattgtgaaagtaagatactccatatagattatggagatgttgaacatatattacctaaaagtatttttcctgaaaaaacattctcgtgggataatcttacaattggatgtactaaatgtaatcagagtaagagtaactattatgatgataaatatccattacttaatccatatgttgattatcctgaagataaaataatatttagaggggctatcccgtttgcaaaaccagggtgtaaagatgcatatgctactattaaaaagttaaaacttgatcgtcccgagttaattgaacatagaagtaatttaattaaaaaaattcaacctttaatttggcaatacgagaatactgaggatgacacattaagaaaaatgttattacaagatttaatagagtttactaataaagatcaagaatattcatcaatgataaaacatttattagactctctcgctataacagcttga

SEQ ID NO: 90708 - DNA, 1158 bp, Alteromonas sp. Nap_26
gtgcaggaagctcatatttacgtaggaattaatggcgcaggtaaaagctttaagcttggtaaaattgctaaaaaagcactgagattgaatcgacctgttgtagcagtcagtatgtcacttaacgacaaattcccacctaacttcaaaaaaaggccatataactttatggggattaagcaaggaagaagtgtatatagaaaggcgatcgaagacgcacttattgcgtgtaacagagaagagcatccggtccaaataaatacattgctcaaaattttaagctatgcaggttatgatgaaagaataggatttttggttcgagggttcgactggagttttgaatctcgttttgaatccgagtcttttacaaataatttatcaaaggatgcagtcgataatattttttcattatgtttagcgtacagacgaattcacaatgaaaacgactccgaaaatctgcattgggtaactcattatagtaagttcggaagtcagtcagtactagacatcgagtctcgtttcggtgaggtccccagcggagaaattttatctgagctactaaaacacaaagctttgctcaagaaactcaaaataataaaggatatacggcttttttttgaaaaagaaaatttaaatagaaaacttttcgctataaatgaaatgagctcaggagagttaagtttgatttctactgcattcttcttaagccatacacttaaggatgggggaatgcttcttattgatgaacccgaaaatagtttacatccagaatggcagctcgcatacatttccagaatcaaagacctttttccttatactgattatcaattccatatagcaactcattccccgctcataatatctggcgcacaaaaagaggaaaatactcttatacatcgatttgatggaagtcgatttaaggaaattgattcaacttcgaaaaacatagaagacgctttaatcgaccaatttgggattattacaccaaagaacaacgctctatctgagcgatgcattgagataattaattcagtaattgataaaaaaatatcgaaaaaagaggctatagaaaaagtatcacagttcaaaaattcatcctatgaagaaacacaaaagcaattcttacaaagtgttcaagagctaataagggatgaagtatga

SEQ ID NO: 90709 - DNA, 612 bp, Alteromonas sp. Nap_26
atgagtaaattaaaattttccgcagaggaagtcgatattttaaaagaagcatatgctctggggcatcaaggttggaaattagataagctgacgccaattaagcaaaagatcaaagctaaaaaaagactaatacaaggtgaaatatgttgctactgcctcagagatacgactggtgaggcaaagatggttctagatatagagcatatattacctaaaagcttgcgcccaagaaatatgttcacaatgaagaacttggcaatatcttgtaaacgatgcaacctgcaaataaagcaaacaaagactgattttctcactgtcccaataaatcagcttcccaagcgagccttcaagagcggcttttatcgttttgtacacccaaatcttgattatgttgaatcacatattgaaagagttttttcgggaagaacaaaatcacgaattgttaagtatgtttttccagaaacatcttcaaaaggacggtacacgtacgaatattttaagttaaaagagttagaggtagatacagcaaacaatgcacaaggcagaagaaaaagaaaaaaaataaaagatgagcgcatcagagttgcattcgatgctcttactcaatattga

SEQ ID NO: 90710 - DNA, 1452 bp, Salmonella enterica
atgagtttttatatagaaagtgctcttgttgataataagagaatagaactagtaccacaatcaactcatgatataggtaataaatacacagttttaattgggaggaatgggactggcaaaagtatatttttaagtaaacttgcaaatagtttatgcagtattcaaatggaaaacaaatatttaaagcgtgattttgatattaacgaaaaaaacaacaccaagatgtcttttaacattgtgaacgatggtgtcgaaaatgagattcggttggaagggcgtaagtttgtaggtggtgatagtaagtatcttcttccttcagttttgacatgtatatcaacaagtccatttgataaattttcatcagagcgtaggttttataactccaaaaatgaggttaatacattctatcattattttggattgaaagaattaggtcggaaaaatgccattcatgcttttattgaaaaaattctatattcaaaaattaatagtttattacaaagtgatagggaatcatttgaaaaaatattgggttttttaaattatcagcctaaaataaaacttgagtttcgcactagaattagtttcaaaacattatttaaactcgatgatgaagagcttgtaagccaaattgaaagaccaatttttacacacacaggtgtatataggcgaagtaaaagccaatctgattatgatgtatctagaataagaaatgcattattattcattaacgattatattttatcttcatcagatagacgttcaagtgctgaggcaaggtattttgatgtcgaaataaatgctcttgatgagaatatgataaatatacctgagatagtgatgcatgagatattatatttaatgaaattgaatttattatctattagagatatatatctgtataaaaaatcaggtgatgaagttgtattgtatgaagctagttctggtgagcagtgtttactaataaatacatttggcattgctaattgtattgcagataatgccttaatactgatagatgagccagaagtaagtcttcatccggagtggcaggaggtttatattgagttacttatggatgtctttagtcataagaaaggatgtcactttattattgcaactcactcccctcaaataatatccaatcttaagaaagataactgttttattactactcttgaaaatgggaaaacatatcatgctaaagatttcataaataagtcagcagattttcaactcgcaactctaatggaagctcctgggcatgagaatgaatatttaaaaagactggcggttaatatcttaagtaaaatttcggccaatgaaaagttgagtgaacaagatataaatgatgttctatggcttaaagatatatctaaaaacatagaaccaaacgatacagtcatgtttcttattggtttgatcgttaagagcaaggtatctttgaaatga

SEQ ID NO: 90711 - DNA, 639 bp, Salmonella enterica
atgatttctaatgcttatttgtataataatgattttcaggaaaggataaatgcaaaaataagctcagaggggttttgttctgattcatggtctgataatgatattagtgatattaaagagtcaataaagcaattttatatacctgaacaaaaccatatttgtccttattgccaacaaagatttttgactaacaatgggaggcaatgggatatagaacatataataccacgccaaactcaagttggtttcatgtttaccccacagaatttatgtgtctgttgccctgattgtaatagtcataaaggatataaaaaaacaacgactagtgtcgctaaaaaaacgctacctacaaaatctcacttatatcttatcgttcacccacacttcgataaatatgacgatcatatagaggtcattgaacccggatatctctatagagcaaaaagtaagaaaggtgaaaatacaatgtatgtttgttcattaaacaggttttatcagttttctggttataattctgcagtagcaacagatcatcgcttgatgatgttggcaaatggtttatcttctgcacagagcgaagaagagaaaaggcaaatacgtcgagaaatgatatctatatcactacgggcaaacatatag

SEQ ID NO: 90712 - DNA, 1452 bp, Salmonella enterica; identical to SEQ ID NO: 90710

SEQ ID NO: 90713 - DNA, 639 bp, Salmonella enterica; identical to SEQ ID NO: 90711

SEQ ID NO: 90714 - DNA, 1182 bp, Salmonella enterica
atgaaaatacaaaaaattgatatcaaagatgttggtggtataaaaagagcaataattaattttgatgcgagcatgaatattatttgcggaccaaatgggataggaaaaaccacaattttagattccgtagcacatagttttattaatacaaacagctatgtccttaaaagacatgctcagtctactgatggtcagataaataccgtattaaatgattgtgacaatattagagaaagtcatatttctcttaaacagttcaatcctaaggattactcatatattagtggcttaagagagtcaggaaggaaagtgatttatttgaatatttctagaatgttcaaatatgtatctttatctaatatctctaaagatgaggagagacaagatcatagcatatacacacttttgactgacggaatttcggttgcggatatgaaaaattggttcgcaaaacgctgtctcttctttaatacaccagaagcattaagtgaaaataataaggttaatttggagttggcaaaaaaatgcttttcactgcttaatgctgaatataaattttctcgcgtagatgcgaaaaaatttgatgttttcgtatctactccaaatggagaaatttggtatgaatatttgtcatcagggtttaaatcatgtctgagtattttattcggcataataaaagagattgaactaagaatgcctgatgaggaatgtttagcacagcattttgatggcattgtattgattgatgagctggaaatgcatcttcatcctgaatggcagtccaaaattgtttctgttttgcgagacacatttcctgcaacacaatttatagttactactcatagtcctcacattatacaaaatgcggaacctaatcagataattgcattagggacagatagtaatggatatacatacgtcagagaacttccgagtaatgagtttggttatactggatggacattagatgaggtactcaaagatgtaatgggaatggaagacacaagaagtcagaaattacaaagtatgcttgctgcatttgatcaagctattgatgaggagaataaaattgaagcagagcgtatttataaagaattagatagggcacttcatccagcaaatgtgcttagaaaaatgcttagtattgatctttcctcagtaatcgaggagggcagtaaataa

SEQ ID NO: 90715 - DNA, 747 bp, Salmonella enterica; identical to SEQ ID NO: 90081

SEQ ID NO: 90716 - DNA, 1452 bp, Salmonella enterica; identical to SEQ ID NO: 90710

SEQ ID NO: 90717 - DNA, 639 bp, Salmonella enterica; identical to SEQ ID NO: 90711

SEQ ID NO: 90718 - DNA, 1398 bp, Salmonella enterica
atgagaatcgacaaactttcactgcttaactttcgttgcttcagacagctcgatattacttttgatgagcacattacgattctggttgcaccgaatggcgcgggcaagacgacagtgctggatgcgatacgcctggcgctgtttccctttattcgtggttttgatgccagcctctacgtaaaagataaatcgctggcgatccgtacagaagatgtacgtctggttttccgccccgaagcgctgaacatggaaatgtcgtctccggccatgattacggctaccggggaatgggaaagtggaaaaacggcaacctggatgctcgacaagcgaggagaacagccgccgcatgaagataagacagcggcgcagcttacccgttggggtgaacaacttcagacgctggtgcgtgaagagcataatttgcagcaggttgaacttcccctaatgctttatctggggactgctcgcttgtggtatcaggaacgttatgaggcacagcctactgaacagcgtctggataacagcgccttttcacgtttgtctggttatgacgattgcctttctgccacatcaaactataagcaatttgaacaatggtatagctggttatggcttagctaccgtgaacatcaaatcacacaacttgaatcaccttcagcaaagttaaaagaaggtgttcgtgttcagcggatgaaagaagctattcaagccatccagcaagccattaactgtctgacgcaggaagtgactggctggcacgatctggaatacagctccagccataaccagcaattggtgatgaaccatccacagcacggtaagattcccttatcccagctcagcgacggcctgcgtaatgcggttgcgatggtagcggatatcgcgtttcgctgtgtcaaactcaacccccatttacgcgatgaagccgccttaaaaacacaggggattgtgctgatcgatgaagtcgatatgttcctgcacccagcctggcagcagcaaattatccagtctttgcgcagcgcatttccactaatccagtttattgtcactacccatagcccgcaggttatcagcacggtaaaacgtgaatccattcgtctgcttgagcaggatgagaatggcaacgggaaagcgttgatgccgctcggagcgacctacggcgagccgagtaacgacgtgctacaaagtgtgatgggtgtcgatccgcaacctccggttaaggagaaggctgacctacaaaagctgacggcttgggtagatcaagggaagtacgacgagccagaagcacagcaactgatggctgcattacaggtggcgctgggtgatcaacatccacaactccaacgcttacagcgcagcattgcccggcagaacatgctgaaagggaaagcgcaatga

SEQ ID NO: 90719 - DNA, 726 bp, Salmonella enterica
atgaggcatgtgataaaaacccgacgtggaacagatgccttactcactgcacatgagcaaccaccacaaaattcagatcaatcaactcgtcgctggcagcactttggtcgtgagaataaagcagccttaatgactctgcttctcaatgagcaatatcacctttgctgttacagcgaaatccgtgctgatttgcgtggcctcggctatcacattgaacacgtcgaaaataaaagtcagcagccagggcgaaccttcgattatcaaaatctcgccgccagcgcgttagactctgagaatggtttgcacctgtttggtatcaacgctttcggcggtcacgcaagaggaaaacaagaggccgtggatatggcaaagtttattcattgtcacctccctgactgttctcgttattttgcttacctttctgatggccgaatagtaccggctgatgagctaaatacccaggaaatggagagggcagagtacaccattgatctactaaatctgaacagcggattccttcaaacggaacgtcgtaatcattgggaagagctggaacagctttttgaggaacatattgaaaaaggctgggatctgcaacaattacttcagcttgagctggtcccttcaccagatcataaactgcatgaattcttcagcattacacgccagtttttccagcaagaagctgaacaggtattacagaaccacgccccagcattaatttaa

SEQ ID NO: 90720 - DNA, 1410 bp, Pseudomonas monteilii
ctgaagaatttccgctgctatgccgatctggagatatccctgcattcgcagcttactgtgctggtagccgagaatggccagggcaaatcgaccctactcgacgctgtgcgcattgcactctggccctatgttagcagcttcgatctctcctccacggggtacaacgatccggccaatagcattgccatcggcgatgcacgcttgcaacgaatgagtgatggcagcatgtcgcgttgcttgccaagtagtgtgcagatgaccggagactacgggggcgggctgtgcagttggttgcgttatcgcgacagcgaagctgaaaagaccaagaccaagagtgatggcgaaactcgacgtatggagcagtgggtcagtgctctgcaacaaagtatccgcgatcctcaggttgggtcgcagactttgagcgtttttggttactacggtaccggtcgtctgtggtcagagaagaagctgaccaaggcgcagaaggctaaggacgagacgcaggataccgatttctacatccgcaccttcgcctaccgtgactgcctggatcctgcttcgacttacaagcatttcagagcctggttcatctgggcttcgcaaagctaccaggaacagcgtctcaagaggctggatgggcgggacaatcaagaggagttgcagcaagcagaattgcgcctacaagttgtacggaaggccatcgacactttcctgcaaccggctactggctggcactcgctcgaatacagcatcagccgggagaaaacgctggtgctgcaacatgaccagcacggcacgctcaatgctgaccaacttagtgacggcattcgtagcgtactggccatgatcggcgacattgcctatcgctgtatcaaactcaatccgcatctgggcgccgaggctgctcgccagaccagcggtgtggtgctgattgatgaagtggacatgcacctgcacccacgctggcaacagatcatcctttcccagttgcaggaagccttcactcgtatccagttcatcgttactacccatagcccgcaggtgcttagcactgttcccgccgaatgcatccgcgtgttggtggcggagcgagacgaagacagcggccagcagcgtatggctgttcatcccgtcactcaacaaacccagggtgtggctagttccgatgtgctggccgaggtgatgggcaccgatccggtgccggatatcgcagcagcccgccagctcagtcgctatatggcgtttatccagcagaatctggaaggcagcgacgaggcgcagcagttgcgtgctgagttgaatcagcacttcggcgccgatcacccgcaaatgctcgaatgccaacgtctgagccgccttcaggctctcaagcgccgacggccgttacgcccaggcggcgcggaggactga

SEQ ID NO: 90721 - DNA, 642 bp, Pseudomonas monteilii
atgcaccgacttcaacgtggcccagcgccgatctgccttgcccgccacaggcatggccgggacaactggagtgccctggatggtgcagataggaccgaaatctggcaaacgctggaggccatgcagagccggaggtgcgcctattgcgaggcggccattgcagaaggcaatcggcacatcgagcattttgtgcagaaggggcgtgaccctcgggtcacattccagtgggacaacctctttggctcctgcaaccgcgaggactcttgcggcaagtacaaagatcacggagctggggcctacaaccctggcgacttgctcaagcctgatgtcgatgatcccgaccattacttcgtcttcgtggccgacggcactatccagctgcgcgctggcctgaatgacaccgatcggcagcgtgccagcgaaactctgcgtgtcttcaatctcgatgcggaacacggtgccctacgccatatgcgccagagggagtccgccggttatgtgccgatagctgaggaactgtggacgcttttcgatgaatttcccgaggatgagtggcagcagttgctggatgacgaactggctgccacgacccatctgccttttgttagtgccatccgccataccctatgccggatgagctga

SEQ ID NO: 90722 - DNA, 1377 bp, Escherichia coli; identical to SEQ ID NO: 90214

SEQ ID NO: 90723 - DNA, 606 bp, Escherichia coli; identical to SEQ ID NO: 88315

SEQ ID NO: 90724 - DNA, 1356 bp, Escherichia coli
atgaatatccgcacgcttaagctcactaatctggggcggtttgaagaacttgacgttcatctggctccagtggaggagttcaagagcaatgtgaccgtttttattggtaataatggtgcaggtaaaacatcaatattaaaatcgttggcaaccagcctgagttggttcgttgcccgagttcgtactgaaaagggtaacggtagccctattcctgaagacgctattctgaacggtaggagttcggcgacaattgaacttcaggtactgaatacgcatccagcgacggaggccgctacgccctaccgttggttgcttgccagaacggccagtgggaaaaaatcgaccaccgcctccagcctgcaagaggccagccaattggctgcgttttatcgagatcaatacacccagaatagcggggcatccttcccgcttatcgccttctatcccgtagaacgtgtcgtgctggacgtgccgttgaaaataaaagaacgtcataattttttgcaactggatggctacgataacgccctgaatcagggtattgatttccgccgtttctttgaatggtttcgcaatcgcgaagatgcagaaaatgaatcaggcttaccgcaagacgttctggataagctcagtaccaggatagatctcgataacaccgtcttaaatgcattaacggcaatcatggcctcgtcccgggatcgccagttgaccgccgtcagaacggccattagtcgctttatgccagggttcagcaacttacgcgtcaggcgtaaacctcgcctgcatatgtcgattgataaaaatggccagacactgaatgtgctgcaattatcgcagggtgaaaaatcactgatggcgttagtcggcgatattgctcgccgcctggcaatgatgaacccgatgttagaaaacccgctaaacggcgagggaattgtattaattgatgaagtggacatgcacctgcatccaacatggcagcgtacaatcatccagcgtctgacgacaacattcccacattgccagtttgtcttaacaacccactctcctttagtgatcagtgattgcaaagatgtgctggtttattctctggatgatggcgaattaacgcagctcccgtctctgtatgggcaagatgcgaatactgtgcttttgaatgtgatggatacggatattcgcaatgcgacagtggcagaaaaacttaacgatcttttggatctgattcagaaaaacgactttatcaacgctaacgctcttctgaatacgctaagcctggaacttcctgaaaaccatcttgaactggtgaaagccagaatgcttctgcgcaaacaggaaattaaacatgcgcgaaataactaa

SEQ ID NO: 90725 - DNA, 660 bp, Escherichia coli; identical to SEQ ID NO: 86205

SEQ ID NO: 90726 - DNA, 1653 bp, Escherichia coli; identical to SEQ ID NO: 86934

SEQ ID NO: 90727 - DNA, 651 bp, Escherichia coli; identical to SEQ ID NO: 86935

SEQ ID NO: 90728 - DNA, 2526 bp, Moritella sp. JT01
atgggtaaatttgaagacgctaatagcgtcgctcaagctcaagcaaaagaagtatggaagttacttgaatatattcgtggtgcttcaccaatctctgattatcgttcactagcatatgcacttttatttattcgttatatgcaagataaatgcgggacacattttaactctccaaggtactattcctttgatattattagaaaccacattgatgaactttcacagagctgtgtaaacttagaacttttttctgtagatgaagggcgttatataagtcagtatattgaagatattttacttaaaaataataatatagatgaagattatatcagattagctatccgaagtgatttattgaataaaaacagcagtgtagctcgtgctactttaagtgaactcgatattcttttttctgaaaatgaatctaagtcgggtagtgagttttacactcctcaagatgtaagcagtcttgttactgcccttggtctaagttatgaacccaaatcaatttgtgacccttttgctggtggaggcaatactgcattttcttttcatgaagccctaaatggctgtgtgagaattgatactcaagaaattaatcgaaatgttcattttcaaatcgtggtgaatagaatcattcgaggtattaaaggctctgatttcgttggcgattcgttaacaaaacctgaattctcaaataatcaatacgatttgattacttcgtttcctccttttgggttaaagatacgaaaattagcaaggcaacatattattgatagctcaaatagcccctggctagggctcacatacaatcttcctgaatcaagaagtgattggtttgtatgcttatcgatgttttctgctttaaaaaaacaagggaaactaattattggtatgtcattaggtgcatttacacgtaccggtgctgaagcatttattagagagaggcttgttaatgaaggtgtaattgataaggtaattcttttgccaaaaagtattcatttttccacttcaatatcaactgtattactagtccttgatgctaacactagccatagagaaaaagggattcgttttgttgatgcttcattattttatgagccccgtcgaggtagaaatgttctatctcccgataacataaaaaaaatactagagtcttgtcatagggatggaaggtttagcattacagcaacgagtgatgatattgctaaaaatgattttaatttagatccaagtttatatgttgaaaagacaatcaaagtaagcctggttcagttgactaattttcgaggatatacagactttacaatacctttacatgaatcgttgactgttatagttggtgaaaacggagcaggaaaaacgtcaatattagaagctattgcatgtggactaggcccatttttaaccgcaatgcctgatgcaaaaggtaaattgatacgtaaatctgatattcatgttggagctaatggagtcgcagactcagctcgtatatcgattgatacagcatcaagtctcagctgggacttagcgactaaaggttcggatagaaatacgcttgccaaaattgggacactagcgctttctgattatgcgaaacaaatcgttgatagcgatgagcaataccctttaatagcctattatggcactaaccgtgctttatccacacaaagtggcaaagtatcaataaacccttttgaggaagtcctgcgaggtgaagggtacgactccgcattagatgccaaaattaattatgggatattaaagaactggttctctaaaattgaagtcgacgaactaaaattaagggatgaaaagaagaatcacaagctgactcacccggcaaaaaaattaattactaaagcggttaagcaaattgtagacagagttaatgatgtaactttcgataaaggttctaacgatgtcgttgtagtttggaaaaatgaacagaataagtttatctcattaagtcttgagcaattgagtgaaggttatcgcaatatggttgccctcactattgatctagtgcgtagggcgtatctgttaaatccagatatgcctaagccattatctgtttttggtgtcgtattaattgatgaaattgagcttcatttacatcctcgatggcaacagaaggtcttaagtgagttaactggactatttcctaatatacaatttgtagttacaactcatagtccacaggtgttaacaactgttaagggtgaatgcattcgggtggtatcgagttcatcaagagtggctgaggctgttacttctccgtatggaggtgaaaatagccgagtaatgcagcagattctgcatgttaaccctagacctgaaacagaggtgtctgaaaagctaaaggaatatttcttcttaattgagttaggtaaaggggaagaggaagctgcaataaggttgcgagaagaactctcactattaaccggaggtacagagcccatgctggtagaggctgatttagccattaagcgtgttaattggatgaagtcaagaaagagccagtaa

SEQ ID NO: 90729 - DNA, 759 bp, Moritella sp. JT01
atgtcaattcaacatattgaagaacctatattgttaagggattttaggctagctacccccaatgccacctggaatcagttgaaagctaattcagatgtgaacaatgcactgaaggttactgcgataaagaaaactggtggactatgtgtttattgtgaacataagttaatagctaaaatagattatcagattgaacacttttatcctaaaaaaggaaatgacaatagtgagttcggaaatggaatagcgaatagagctatagagtgggcaaacttgtatccaggttgcttaggtggcactgctaagctagcgcatttttctgttcaacaagatattgattgtcgaactggagcgaataaaagaaataaaaataaacttacatgtgggcaaaagaagggggaagccgatcccgagggtgttttcatttcaccgttagagttaaacaatcaaaatcctatttttttgtttaatgaagccgatggttcaatatccttaaatgaagataattgtgtaactcaaaacatatctgtcgaattaggagttaatcatataacaagattgaatttagatagtgaacggttaagaggtggaaggttagcattagcaacttcactcaggagcgagtttaataaagcttttgaatttgatgctgaaacggttgatgaattaatggatgattggctcgaaatagatgaagagggtatgtacgggcacccatttataagtctgatttatagcaaatacagtcttgaagtataa

SEQ ID NO: 90730 - DNA, 1284 bp, Acinetobacter haemolyticus
atggcttttattcataagcataacagtagtggaaaaacttttactttttatactgatgaaattacttcaaaagaaaaaaacatatttactgttcttgtagggaaaaatggtagtggaaaaagtcgcctactaaatagtttagtaatgcgaggaattgaagaaagaaaatatgttcttgctttttctaactctatgtatcacaaatttcctcagcttaataatgataaaacttttggttatttatgctacgcaaataataaaaatgtattgaaaaattatgcttactgtaatgctttgcatggactaatggatcaagagttagttcatttagcaattgaaaaacaattatttcatactatgccactaatgcaatttaaagagtggaatatacaaaatcttatacccttgttgattctaaagttaaaacaagaacctcaacgtgcttatttattagagagagttttagacttcttaggttttgaaaataacatccatattacttttaatcgaaataaaaaatcatcagatattttcattaatgcatttaatgaaaaactattatcctttcaaaataaaatcaaacatcatgaaattcttaaagaaattgccattaatctttataacaataaattaaccgattattatttcccaatagctagggatttaaaaacattttcagcagtgggttatggtatagctttagatctttggaaaattaaaaaaattaattttataaaaaaaggtgaaaaaatttcatatcgagatcttagttctggtgaaacatcatttttaaccctcggtttattcctactaatatttctagaaaatgattcaattatatgtatagatgaacctgagattaatctacatcctgaatggcaaagtcaggttattaactttctaaacaatgtctttcaaaaatttaaccaatgccatttttttatagccactcatgctccacaaataatttctggagctaatggaggaaatatttatattcatgatttagaaaagaatataaatcaaaatattaataacattagaaatagatcttctgactttcaattaagtgaggttttcaattttcctggtaacaataatgagtatttaattagaaaattaatcattgttttaaacaacttgaacacagaggagaatttccatctagacttggaaagccaagagcttttaaagaatatagagattctaatcaataataaaaaaattcatgaagatgacaaagtgttcgttctgttcagccttataaacagttacagaggttga

SEQ ID NO: 90731 - DNA, 660 bp, Acinetobacter haemolyticus
atgcaagtgtgtcaaatacctagtgaacttcaaacttttattgataactataataaaaaaaactatcagctttggaatgatgagacgaataaagatgtacaagcttttcgatctttaattcgtgctcattatttatctgatcaaaagcttacgtgcttttactgtaagcaatatattttttcgactaatggattacattggcaagtagagcatattctacctaaatcattatttcctcaattcttatttgaacctagaaatttaattgtcatctgtccagattgcaaccgagaaaaaggtgatcaaaatcctcatgtaagtggagatagagcttgctcacaagttacctatccaagcaaaagtggacgctataaaattattcatcctttatatgatacatatgaagatcatattgaacgagtacctgcaaatcattgtgattatcctgatcactatttcctaagggttcatactcctaaaggtaaagctactgtaaaaatgtgtgacctaaatcgcttttatcaggaatttgcaggttataaagatatgaaaggaaagcaagtcgcggcattagatgaatttattgaagaaaaagatataaatctactgacacgtgagcaaaaaatggaattggttcaaaaaattatggcaagtatgtaa

SEQ ID NO: 90732 - DNA, 1653 bp, Escherichia coli; identical to SEQ ID NO: 86934

SEQ ID NO: 90733 - DNA, 651 bp, Escherichia coli; identical to SEQ ID NO: 86935

SEQ ID NO: 90734 - DNA, 1656 bp, Escherichia coli
gtgaactcaaagtatactaaatcaccaaatgacattcgtacattattgcagtcttatgtaaataaaactgaagatggtttagaattcagtaaagagaacattcctgaagaggtatcttcgttatataaggaaattgaagatgcaccatttcttataaataaagtcgccatctcagactataaaagagtcagggatctttttgtttcgatcgacaaaaaactaacagtgtttgttggtgataatggttacggtaaaaccaccattcttgaagcattatttattgctttaagttggtttagagcaaatgttcaaaaagaagataaaagcggttttcatataaaagatggtgatattaacaatcataatgatgtcaattatgctgcaataactgcgcagtttaaacttaaaaaaataacgtcaaatattttagttacacgtgttaaagatggagtatcacaaaaaagaaataatgagttgctttctataaaagagatggcgtcattctttcgtgttgtgaattcatattatgaagatgtaagccttccggttcttgcatattactctgtatcaagatcttcaaatggtgcaggcatagataataaaagaaatgttaataattctgtgcgtcgatggactaagcttgatgcttatgaagatatagagtttgatcgccgtgacttcggtgagtttttaaattggttcatatttgttaataataaggcattgtctgaggagtccttgataccagaaaaacaaagagatcaacttgttattgatatctcaaagcttaaggtatctttggaggttttgaaatctttcagtgatgttgatagaagaacattaatagatatagaaacacaaattgctaataaagagttgattcttaatacgttaccgtctacaccaaatggtttaagtcgttcaaaagatattgttgctaatgttaaaagggcaataattaatttccttcctgaaattagctctgttgaacttcaatatactgaaaatgaagttcgtttagttttagcaaaagatgatttactattagatgcccagcaactctctcaaggggagaaaactatacttacattagtgggggatttaacaagacgcttggtgttgctgaatcctaagttaaataatccacttcaagggaaaggtatagtattaattgatgaagttgatcttcatttgcacccaagctggcagcaaaacattattgagaaattgcagcatacatttcctaacgtacaattcataattaccactcatagccctcaaattgtatcgacagttccaagtaaatgcttgcgcatccttgaggaaataaaaaacccttcgacaggcatgaaggaattacgtgtgcttttaccatcatctcaaacaaaaggtactaagaattcgtacgctttgctttatgggatgaaaacagatcctgtacctaatgtaaaagaagtcgcatggctgagcacttataagaaatttattgaaaacaggcagcaggattcggaggaagccataatgataaggaaaaagttagacaagcattatggaattgatcacccattattacttgagtgtgatggtataattcgtgtattaaagctaaaagacaaagtgcggggtgagtctggcaataaggaatctaaacaatga

SEQ ID NO: 90735 - DNA, 669 bp, Escherichia coli; identical to SEQ ID NO: 86881

SEQ ID NO: 90736 - DNA, 1656 bp, Escherichia coli; identical to SEQ ID NO: 90734

SEQ ID NO: 90737 - DNA, 669 bp, Escherichia coli; identical to SEQ ID NO: 86881

SEQ ID NO: 90738 - DNA, 1128 bp, Acinetobacter venetianus
ttgagtaaaaatttaaactatgatattgaaaacatcaaacctactcttgaaagctataatttaagcgaaaaatttcactatgattcaagaattaataagagaataataattgaaactgaagagctcctatatagtctagaaaaaatgtctcggctattaaacaactttgacaaatttacgactttaggtagtgatttaaaagttattattgaaaacattgaggatttaagtagaaatctaaagtcttcaaaagttacatttaattattttactgcatttagacaaacacaaattactcattcaactaacacaacatctttagatgattatattaaccatgctaaaaatggttatgaaaatactttaggtcaactatttgaacaatatttagttaatataaaaattgatcgatcattagctttaacagaatccaccaatcatgaattggtttacaaaatagacaattggtttgaaaaattaaataaagatttaaaatttttatttgaagatgattctacttatttagattttgacataaaaacaaaaaaattcagtataaaccaaaattcaaaaaaatttagctttcaaacattatcatcaggatattcatcaatatttgctatatatactgaattaatgttgagatcacaattccttaatattttaccagatgaattaagtggtattgttttgattgatgaaattgatgcccatcttcacatttctctgcaaagaaaaattctacccttctttattaaatcttttcctaatattcaatttattgtgacaacacattcaccatttgtcatcacatcatctaacgatgatactgtaatttttgacttaactaatggagactttattgatgataatcttagtaaatattcagtcgaatcaataaccaaagagttattccatgtcgatacagagtcaatagacctaaaagaatccattgattacatttataactccatgcacagtaatattactaatttcaagaaactaaacaatgaactaaaaaaaatacaaccatataaatctaaattaaatatcgaatcaaagaatatttatatgcaagctttgaatttcctaattgacaacaatgaattaggtgatcttgatgtttga

SEQ ID NO: 90739 - DNA, 672 bp, Acinetobacter venetianus
atgtttgagattgttcgttctttaccagctcctgctgacctactaagaaataaatataatacagcccctattctttctgctctttcaaagatatgttattcaaaatgctatttatgtgaaaatgataaagttcaagaggttgaggttgaacattttctacctcatgctcatcatccagcattaaaatttgaatgggaaaatttattttatagctgtaaaagatgcaatagaatcaaaggtgataattatgagtatattttaaacccttgtgataccactcataatatttttagaaatattttaataatagccccttctcgtgcaaatgattctgtaatagttaaaaatttatgtgtttccactgatccgaattatgcaagttccgttaaaactgtagaattactagacagatgctttaatgatatttcaacacccgctagaagaattagcagaagggaattaataaaccaattactggaagagttatctctaatactagaaataagaggtagactaaagtcaaaaaggcttacttcttttcaagaaggagaagaaatcgagaaattaaaaaatatgacttctcctcattatccattttctgctttttggcgctggtatgtattagatgatgagattttagtaacaaaaatgggaacatttattaacttttaa

SEQ ID NO: 90740 - DNA, 1281 bp, Marinobacter sp. T13-3
atgcatatcagcaaactaaccttgcagcgctttcgtggcgctcaagatctaccgctggatctggacgacaagctcaatgtgtttgtcggtatgaatggcgcgggcaaatccagcattctggatgcttcggccatcatgctgtcctggctggcgaaccggattaagcatgcgggtgcatctgggcgtccgattgcagaatccgatatcagaaatggtgaatcctccgccaatctggccattcagctatgtgatgagggtacttccttcggctggaacttggcgaaggtgcgtaaggggtacagcaaaaaggacctggcctctgttctgatttctgcatccgaaacggccaagggtattcaggccggcatcaccgaacacaacgggaaggtaaacatccccttgtttgcttactacccggtgaatcgcgctgtgttggatattccactgcgtatccgagaaaagcatcagttcgggcttctttctgcttacgaggagtcgctaaccagtggcgccaacttccgtactttctttgaatggttccgggagcgtgaagaccttgagaacgagaaccgcaaatacatagatgatctgatcaagccggacgatttcgagttcccggattcgcagctaacggcggtgcggcgggcccttgagattttcatgccggacttccaaaacctgaccgtaaggcgccaaccgctgcggatggaggtaacgaagaaaggccagcggctgacggtaaaccagctttccgatggcgaaaaatgcttgatggccatggttggcgaccttgccaggcgcatggccatagccaacccggagcgagaagatccgctgctgggagatggcattgtgatgatcgatgaaattgatctgcacctgcatccgaaatggcagcgcctggtggtgcccagtttgagggcggttttcccgaactgtcagttttttatctccactcattcaccgcatgtaattacccatgtgaaaccggagaatctgttccttatgaacatgacagatgccggggaattggagattgttcgcccgaatgagtcctacgggaagacggtggacagggtacttgaagatctgatgggccttgagaccacacgccctgaccaagtggaagatgctcttcgagctatttacgggcaaatcaatgatggcgagcttgatactgccagaaaaggcattgctgaattggaacgagacattggcgaagatccggaactggtaaaagccaaggtgctgatcaaacgcaaggagctgattggccgatga

SEQ ID NO: 90741 - DNA, 400 bp, Marinobacter sp. T13-3
atgcgggagcagggttacatctgctgctattgtgaacgccggttaaccgagggcgattcccacatagaacactttcagcctcagagtgacccgactgtggatccgctggattacggcaatcttttgtgctcctgccagaatcagatcagaaagggtgagccccgtcactgcggtaacctgaaaggcgactggtttgaccccgagctgttgatatctccgctggatgcgaattgtgagccccggtttggttttgaaggtgatggttggattaaacctgctgacaataacgaccgggcggcctgtgaaaccattacccgactgggcctcgacctgcccaagttgaatgagttgagagctggagcaattgagcctttcctggatgatagcttgagccatgatg

SEQ ID NO: 90742 - DNA, 1281 bp, Microcystis aeruginosa NIES-88
atgagaattaagtctataaagcttattaattatcgaggtgcagtcagtttaaacatcgactttcatcggcaattaaacgtatttataggagttaatggtgctggaaaatccaccattttagatagtttggcgattatgctttcatggttagttaatcgcctaaaaaatactaatgccagtggacgaaagattagcgaaaccgagattaataatggtcagggtacggctataattgaaatcactggggtgacggaagatagtcaagagattacttggaaaatagtaaaaactaggactggatatatccacgctggggaagggagtaattttagtcaattaaatgaatacactcaacaaatacaacgacaaattactgaacatcaaggacaaattaacttacctttatttgtttattattctgttaatcgagcagtgctgtatatacccttaaaaattaaaacaaaacatcaatttgattctctaagtgcctacgaaaatgctttaaccagtggatcagattttcgcactttttttgaatggtttcgcgagcgcgaagatttagaaaatgaaaatagaaaatatcaggattatctaattaaacccgaaggtttttgttttcctgatccccaattggaagcggttcgggaaacggtcgaacgttttctaaccgattttactaatcttagcgtccgtcgtaatcccttgagaatggaagtaacaaaaaagaatgaaatagttactgttaatcaactttctgatggagaaaaatgtctgattgctatgctgggagatttagctcgaagaatggcgattgctaatcctcaaaatcctgatcccttaacgggtactggcgttattatcattgacgaaattgacttacatttacatcctcaatggcaaagatttgtagtacctaaattactagaagtttttcctaactgtcaattttttatttccacccattctcctaatattatcactcatgttcaaccagaaagtttacacttcatggaacaaacagaaatgggaataaaagttcatcccgtgcaggagtcctacggcaaaaatgttgatcgaattttggaagatttgatggggttagagacaactcgtcccaaggaaatcgctgaagctttgaaagatatctatgaacaaatatctcaaaatcaattagaggcagctaaaaataaaatcaatgatctcagagctaaaattcaagatgatccagaattaattaaagctgaagttattattcgacgcaaggaaattatcgggaaatga

SEQ ID NO: 90743 - DNA, 504 bp, Microcystis aeruginosa NIES-88
atgacagaacagggggaaatatgttgttattgtgaaagtcgattggttgatggtgaatgccatatagaacattttaaacctcagagtgatcccactgttgatcccctagattatgccaatttgctatgttcctgtcaggcaaatcttaggactggtgaacttcggcgctgtggtaatctaaaaaatagctggtttgatgaaaatctcttaatctctccacttaatcccgattgtgagtctcactttgcctttaattatgatggcacaattaaacctgcacaagaagatgatcaaaaagcaattaatactatcgaaaagttgggattaaacctcaaccaaatcaaggcacttcgtaaggcagccatcgatccttttttggatgaggagatagataatgctcaattaaaagtttttgtcaatggatatttatgcttagatgatcaacaaagatacaatcctttctggacaacaatcaaatatttgttcagcgatttaattgaataa

SEQ ID NO: 90744 - DNA, 1377 bp, Salmonella enterica
ctgcttaactttcgttgcttcagacagctcgatattacttttgatgagcacattacgattctggttgcaccgaatggcgcgggcaagacggcagtgctggatgcgatacgcctggcgctgtttccctttattcgtggttttgatgccagcctctacgtaaaagataaatcgctggcgatccgtacagaagatgtacgtctggttttccgccccgaagcgctgaacatggaaatgtcgtctccggccatgattacggctaccggggaatgggaaagtggaaaaacggcaacctggatgctcgacaagcgaggagaacagccgccgcatgaagataagacagcggcgcagcttacccgttggggtgaacaacttcagacgctggtgcgtgaagagcataatttgcagcaggttgaacttcccctaatgctttatctggggactgctcgcttgtggtatcaggaacgttatgaggcacagcctactgaacagcgtctggataacagcgtcttttcacgtttgtctggttatgacgattgcctttctgccacatcaaactataagcaatttgaacaatggtatagctggttatggcttagctaccgtgaacatcaaatcacacaacttgaatcaccttcagcaaagttaaaagaaggtgttcgtgttcagcggatgaaagaagctattcaagccatccagcaaaccattaactgtctgacgcaggaagtgactggctggcacgatctggaatacagctccagccataaccagcaattggtgatgaaccatccacagcacggtaagattcccttatcccagctcagcgacggcctgcgtaatgcggttgcgatggtagcggatatcgcgtttcgctgtgtcaaactcaacccccatttacgcgatgaagccgccttaaaaacacaggggattgtgctgatcgatgaagtcgatatgttcctgcacccagcctggcagcagcaaattatccagtctttgcgcagcgcatttccactaatccagtttattgtcactacccatagcccgcaggttatcagcacggtaaaacgtgaatccattcgtctgcttgagcaggatgagaatggcaacgggaaagcgttgatgccgctcggagcgacctacggcgagccgagtaacgacgtgctacaaagtgtgatgggtgtcgatccgcaacctccgattaaggagaaggctgacctacaaaagctgacggcttgggtagatcaagggaagtacgacgagccagaagcacagcaactgatggctgcattacaggtggcgctgggtgatcaacatccacaactccaacgcttacagcgcagcattgcccggcagaacatgctgaaagggaaagcgcaatga

SEQ ID NO: 90745 - DNA, 597 bp, Salmonella enterica; identical to SEQ ID NO: 88503

SEQ ID NO: 90746 - DNA, 1169 bp, Sutterella sp. KLE1602
acctcatctggtacgccatgaccagacagtggccctctgaagtaaacccgcagcttaccaacagctcgattgcccgtccctcctctcactctcacacggctgtcctcaaggcggaaattctggggtcgcaaaaaaatgccaaggtgcaagcgactttttctgctgacgacgatcgctgggttttcaatcgcggcaatccagtatcgcccggcttggttttttatttgatggctgatggtagctttgccgtatgggattctgaacggaatcgcaagagcaatgacatcgaggctccccctcccgccttcgtcctgacaaacaagcaggtcttcaatggtctcgctggtgatggagatgccaaattatgcaacggcctgattgccgactgggctgcttggtccgatagtatcagttacgcggatctggcgaagcagatgaattcggttctgctggccttgtcaccctccggagaagcctacgaagccggcaagccggttagagttggcatcagcgactcgcgaagaatccccacaattaagatgccgtacggcatcgaagttccgatcacgcaagcatcctctagcatcaaaagaattgctgaacttgcctatatgctcgtatggagcgtcgccgagcacacggaaattgttaatttgaaaggcaagaagatcgatactcgcgtgacgatactcgttgacgaggtagagtctcatcttcatccacgctggcagcgttccattgttcctgctctgttggaggccatcgatgtgttgtataaacaacgaggcgcctcggttagtacgcaaatcgttataacaactcattctccgttggtgatgtcttctgtcgagtgtaaattcaacccgaagtatgaccaatggttcgatttggatttgattgatggaaataatgtctctcttaccaatcgtgagtatattcccatggggagctttgaaaattggctgactagtaaagctttcgaccttacaacatcctattcaatggatgcagagatggttttgcgaaaagctaacgaactccttaagaaagattgcgtaaaaagaagcgaaatctcgcaggtgagcagtgaactagcaaaggttcttccagaaatggatccttattggatcatttggaatgcggaattgaaacggaggggtatcaattga

SEQ ID NO: 90747 - DNA, 642 bp, Sutterella sp. KLE1602
ttgattcctgtaaagccggcgccggagccctcaacattcaataagaaggtcaggaaacctggtcgagattttttaaagaatctgggtattacaaagcaaggggatgtagcagataacatcccgtgggataaggctcgcttttgggcaaaatgctccaaagaacttgatagcgcatacaattacatatgttgctatgtcggaatgaggatcaataatagcagtaatagattcgaaagccattcagtcgaacacttcattcctaaaagtattaatccttggttggcatacgaatgggacaactatcgtctagcttgcaggaaggcaaatagtgaccgggataaaaagccggtcatagatccatttctagtggggcctgatgatttcagactggatctatttacccaaaagttattccctaatccaatactatctaaacaaaaacaacaagaagtaaaagacacaatcgataacatcgatttaaattgcgactattgggtcaagaacaggcaaaattattactgcgaataccttaaaatggaatctgaggaagaggggaggaaataccttcaaaaaaacgccccgattttactcgctgaacttctacgaccctctcaaaaaaccactgtcgtcgaagacgtctag

SEQ ID NO: 90748 - DNA, 1185 bp, Clostridium perfringens
atgaaaataaaaaacatacatttaagtggagtaggaggaatagagcatttagagttagatttcaatagtggacttaatcttatttgtggtacaaatgggataggaaagactacaatacttgaagcaatttcaaatgcatttacaattaggtcttcaaataatttaaaaagaaacactaattttgaaaaaggtataatagatttaacttttgaggataaagataatattgagcaaaaaaaaacatatgaaataaaagaatttgaagcatataaaaccgatgatatttacaaattatcatctgatagttttttgatattatattttaagacaaatagagaacttgactataagaaagttgatggaattaaaggtgatcaacctgttagtgaagttaatgcagggaatagtataaatactgggattcaagcagaagatgctaaaagttggctattaaatagacagcttttttcaaaacaagaaaactctttaacatcagaacaaatagataatcttaatttggcattaagtacatttagtattttagataaaaatattagattctcaagaatattaccagattccttggatatattagttaatacccatcaaggagaaatatatttagagtatttatcttcaggatacaaatcttgtttatatattttattaggaataataaaagaaattgaatatagatttaaaaatccgagaataaacgtaaaaaattttgaaggtgttgtattaattgatgaaatagatttacatcttcatcctgaatggcaaggtgaacttgtaagagcattgaaaaaaatgattcctaaggcacaaattatagcaactactcacagtcctaatattcttcagtcagtatcggctaatgaaataattccattaacattaaataaaaatggagatatttataagaaggatttacagctaggcaaatatggattgcaggggtggacaatagaggagatattaactgatgtaatgggactaaaaacaacttcttctaaaatatataatgaaactttaagaaattttgataatgctatggataacgaagatgtagagcaaatagaggaaaattataaaattttatgtgaaatgctacatcctaatagtcctattaagaagattttagaaatacaggtggcaggtttaagagatgataaaactagatag

SEQ ID NO: 90749 - DNA, 765 bp, Clostridium perfringens
atgataaaactagatagacctcctaaacctattcaactaacagaagaagttcaaaaacagttaactgaaaaatttaaagatgataattctaaaagtgtatggaaacaacaatatattgtagatgaattattaaatatgtctagtcaaaagtgttgttattgtgagactaaacttcttgaagaatcaaaatatttgcacattgaacattatcatcataaaagtaaatatccagatgaagttgtagagtggaataatttattgccatcatgcgaaagatgcaatataaataaaggaacacatgatacagtaaggaagccaataataaatccaactattgaggatcctaagaaatatctttttattaaaaattataggtataaaagtaagaagagaaataaattagggctagaaacaataagtactttatatttaaatgacactaaaaaattagttaaggtgagatttgatatttgtaatgctttatcagacaagctattggatatagaggtattattagattcacataaggatcaagatactatacatactagaacaaaaaatagaattgtaaatggaataaaggatattcttagatctgctcagcctacagaagaatatagtgctttcgtatctagtactatattaaatgatgatacttatagtaatataaaaaaaatattacaagatttagatttatgggataatgaattagaagagttggaaaatacagcaaaaaaaataatgttggattgtgatgattgttaa

SEQ ID NO: 90750 - DNA, 1356 bp, Pseudomonas azotoformans
gtgcagaattaccgctgctttggagagttcgaaattgacttcgaccctcatctaaccgtcttgatcgcatccaacgggggcggcaaaaccactattctggatgccgcgcgcgttgctttatggccttttgtcaaaggtttcgatctcggcagccaaaccggaaaatccgcgacaattcaaatcgacgacgtgcgtctagcccatctcgccagtggcaacatggagccccaaatcgccagcgttattgaagccaagggggtttgggagccaaacgaggctgaaaacatctggttacagcagcgtacgagcttgaaaaaatcgaccaacacccttggtgacttaggttcgaaagcactgacgggatacagcaagtctcttcaggaaaaagtacgccgtgatgagtctatcgtcttgccattggtgagctacctcggcacatcacgtctttggtacgaaggccgttttacttctgcagcggctcaaaccactctcgacagatctgaatattccagaacatctggctatctgaactgcctctcctactcgtcaagcttcaaaacgtttacggcatggtatggctgggtctaccgcagctatcgggaagcacaggtgatttctcttgagcgtagtactgagctgtccgatcttggtgttcgcttcgcgcagataatcaaggctgtcaaagaggcaattgatcgactgatacaagccccgaccggctggcacagcctggaatacagtgagagccatcagcagcagttgatcatgcatcatcctgagcaaggcatattacctgtagagatgctcagtgacggactgcggaatgccattgccatggttgccgatttagcttttcgagcctgcaagctcaatccacatttaggtgatcaggcccctttacaaactcccggtatcgcattgattgacgaggtggatatgtttctacacccgcactggcaacaaaaaatcctggggtccttgcgatcggcttttccggccatgcaattcattgtcaccacccacagcccacaagttttaagtacagtgcggcgcgaaaatattcgagtcattggcaaagatgttcagggcaagctgattgcctcacctcccctggcaatgacctatggcgagccgagcaataacgttttacacagtgtaatgcaggtagatccgcaacctccggtaattgaaaaagcggacttgttgttactcaccgaatgggtagacaaggggcgatacgatgaacagcctgctattgaattgatgaaggcgctcacaacggcattgagtgagcagcaccctcaacttcagcgcctgcagcgcagcatcaaacggcagagagcacttaacaaatga

SEQ ID NO: 90751 - DNA, 573 bp, Pseudomonas azotoformans
ctgtgttgctatagcgaggtacgacccgaccaagccggtctaggcctgcacatagaacacgtagaaaataaaagccagaacccgcaccgtacattcgactacaacaatctcgctgcttgcgcattggatagcaaaacagatctgcgcgcattcagagggctcgcttcagaagtgttcggtggccacgcccctggtaagtcagaagcggtagatatccatcgctttgtatcctgccaccaacccgattgcagtcgtttttttgcatacctttccgatggtcgcattgtatctgccgatggattatccgtagaagatcaagagcgagcgtcctacaccatcgccctactcaatctgaatagcccatttcttcgggatttacgccaacgatggtgggatgaactggaaacgcttttcgatgagcacattgagcaggatatgagccttcactgcctcgcaggtattgacctcgtacctcgagaaaaccaactgagtccattcttcagtattacccgaaactttttcggccaaattgccgaagaggttatagagcaggacgcgccctatctggcgtaa

SEQ ID NO: 90752 - DNA, 1242 bp, Steroidobacter denitrificans
atggcttatttttccagaatcgcattggtcgactggcgacagtttgcttccatcgagatagatctctctaaacaggtgaccatacttacgggcccgaatggatccggcaagaccacgatcctaaatattctcagcaagcactttgggtggaatttaagtttcgtatctaccccctatctgggcttaaagcaggcgcgaaaattatggtccgacgttaagcgagctagggaggaggagcttttggatgctgcggcagcaagtgaggctcaaagtgtggggtatatcacctacgacgacggcaggaaatgcattttggccacaacaaagaccactaaacctcagtatcgtcttgcctacgctaatgagcaatccgttgtaggtttgcatatcccttcacatcgtcctccggctacctatcaagcggtgggcgagatacccacaaatcccacatctatccagcaacactatcaagatttccagcagttgcttttccagacatatggtggagcgcgtcaatcgaacaaacagcagaatccttcttacgctcagaagcgatcactcatcgcgttagccctatttggttatgggaacaaagctgtagcgtcaaatgtggagtaccagcagattttcgagagctttcaggaagtgttacggctgatactgccaaaggaaattggatttgagcgcttggaagttcgtatgccagaggtcgtgcttgtcactcggtcaggggaatttgcgattgactcaatgtctggcggcataaacgcgatgttcggaatagcttggcagatacacatgtacggtgcaggaaaatctgaatgtaccgtaacaatagacgagccagagaatcaccttcatccgagcatgcagcgatcctttctgccatcacttgctgcagccttcccgaggtttaagtttatcgtcgcaactcacagtccctttgttgtctcttctcataggtcgtcatcggtgtatgggctaacgtttagcgaaaaccatcaagtcatttccagccagttgactgaagacgagttcgcaggaactcccaatcgcatcctcagagagatactcgacgttccatctaatctcccaatttgggtggaagatgagattcgtaagatttttgaaaatgcgtccggagataaccctcatgctctaggagagcgtgtgcttgcagaactacgtcgtctcggagtagttgacgctgcctcggatctgaacctggaagatgggcaatga

SEQ ID NO: 90753 - DNA, 660 bp, Steroidobacter denitrificans
atgatcagagtcgtgaaagggcaacgcccggaagtgcttcagcaaaatgaggggagttggttggacgagtttttaagcgaccctcaaaatggcacgaaaaggtatcgatacaggacgccggagataaagcaggcattaatagcggagacgcactccaaatgcatatattgcgaaagtaagattggccacaatacacccggcgatgtagagcataaaattccgacttctctggtacgggaaagacatttcgattgggagaatcttactattgcatgcacagagtgcaatcgcagaaagaatgattacttagacgctgaacgcccatttttagatccttacgcagataacgttgaggcaaggctcgttcactatggacctgtcgtcgcctgggttgatggggatgcaccagcggagattaccgttagaaagctagctctgaacgagtcaactcgacttcagcttatccttagaaagatagaaaagttggagcagttgagtatccttaggggcaggatagtcaacgaactaagtgaaccacttcgcctcattttagagacacgtcttgaggagatgcagagcgatggcgcagagtatgcgggaatgattagatcggcgatgcggacacaaggatctgtgagaagcatagagcaggagcgctaa

SEQ ID NO: 90754 - DNA, 1371 bp, Burkholderia megalochromosomata
atgggccgttttcagtttgtgcaccagcactacggacgattccctggtagcaacacctttacagttattgttgggaggaacgggactggtaaaagccgcctcttgcggtcactaatactgaacctgatgggtggtgttctttcgggcgagcaatgggaccgcagcgagcgaggcggccggtatgagccgttgggcaacctgcagaagtcagaggcgccctcgcatatcatcagcgtgtccacgagcccgttcgataggtttcctcttccgaggcgtggcaatgtcgtcgccggctatacctatcttggtcttcgaggactaccgagctctaacctcagcttggcctacctatcgaagatagtcagcacccttttcctctcggcccagagcaatccggctcaagctgaagcggttgcgggagtgctggagtacttggcttacgagccgaccatctctgtctcgtttcaacttatccccgaggttctgctaaaggagttagctaatgcggagcatccgcacgaggcacttgaagagcggatgcgaaacagcggaccgttctttccgaatgacgccgtgaatggctataggcaaatgtttgagtctccgaccgaggacgtcaagcgagcgctcgacctcgtccagagtcgaagattgtcgcggcgtcagaggaccattcacctgcgactgaacaagcacggcattgccattggcgacacggaaggaggaagcgccgactttctgagtggcgattttgtcctcgccgaggcgctcttcctccttcgagtcggcatgctgcgactgaaagatgttgtcttattcaagagaggagagcgagagagtttcaacataaccgacgcgagctccggcgaacaagccgtcgtattaagtctactcggcatcggaagtcaaatcagggacggtgccctgatttgcattgacgagccggaaatttgtcttcatcccgagtggcaggagaagtatatccaccttctctacaaaaccttcagtcacttcgagggatgtcacttcgtcatcgccactcactcgccgcagattgtcgctcaacttcctgcgggcaactgtcacgtgatgtccatggaaacgggaactgcggaacctgccaatagctattcccacaaatctatcgactatcaactggccgaagtgttccgagcacccggctatcggaacgagtatctcagtcgcactgctctcactctcttttcctccgtatcgaaaaagcgagggttcgaccttgaggctcgaatcactatgggcaagctcgaaagcatgattcacttgctgaacaatgacgaccccgtgttagacctcatccttgcgctcaaggagatgcggagcgcctatgagtga

SEQ ID NO: 90755 - DNA, 654 bp, Burkholderia megalochromosomata
atgagtgaaatcgttgaaccggtatccttccctccggacctggagacgcttattgaaaggaaaaaggccgacgcgactttcacccataaggattggagttgcgatgaactcgagccgctgcgctcgctcgtcagaaggcactacagaagagtccagaaaggcagatgcgcatactgtcggaaggacgtgtcgttgacgtccgccttgaactgtcatgtggaacatatcgccccaaagtcgaagtacccgcaattcatgtttgagccgaagaacctttgcgttgtttgtgccgattgcaacgagataaagcgagagcaggaagtcgccaatgccgagccagacacgcttgcctcgcggacgggtcgcatctcgtatccacggtcgtcgaatggctttcgaatagtgcagccccacttcgacgaatacagcaaacacatcctggtctatcgtggcttcttcatcgaccgaaccgataaaggcaatttcaccatcggtgcctgcaaattgaaccgtcggcttcgggagtttggctgggatgaaaaaatagtcgaggacggtgaacttctcgaagcctctcaagagttcatcgaggcaagcgacgctatagcgagattagccgcgctgaatcgaatccgcgatgcatgtctttcttga

SEQ ID NO: 90756 - DNA, 1746 bp, Lysinibacillus sphaericus
atggaattatttagacagtttattgaactcagagaagaacaggaaaggttaacaaatttaattaacgatatccaggaaaatggttttgaaataaatttcattaagaaaaagatttatctatataaaaatgggattgcctatataggtttagattgtcaaaatatagagagagaaaaattgatttcagtttttttgattaaagaaagtaaatctagacgtatacaagaaattgattcctattttatagattattttaatgcaaatctaaaagatattgttatcaatttagaaattgaaaacctgtttttagaatcaaaagcttatttattagaagagttatttatgttagaacaattgatctcagaagatttaacagttgattttagaattaattcaattaaatttgaagaatataaatgttttaaagatgaagaaattacgtttgaagaaagaataactgtattagttggaaagaatgcaagtggaaagacaagtattctagatgcgatctctgttgctattggtgcatatttaagtgggattgatgaaagtaccgatacaaaatcaattttaaaaagtgatgttcgttttacttctaaagatgttcatggtactaaggtagtaaaacatcatgcacctacaagaatcaattttaattcagattttattaataaaagatttgattggtctagaactagatcgaaattgaaatcaacaaaattaactacaaaggactctaaacaagttgtaaatttatctagatttttatatagggaaataaataataatgatcttagaaatataacattacctgttttttcttaccatggaaccggtagggtcgcgaattttacaaaaaatatgaatcaactagagaaaacggaaaatatttctaggttttttgggtataaagattgtttaaaaccagcatcaaattataaaacgtttatttcttggtattcgaagatgcagtatagggcatttatgttgaataaaaggatagaagtattagaccaagtgactaagtgtttaaaagaaacctttgtctttttaacagaagaagataaaaataaagtttctgatgtaatatatttagagggcagtttacatttgaaatattcaaatggggatatgattccaatagagtttctaagtgatggctataaagatataataggtattatttcagatattgcttatcgaatggctattttaaatcctcacttagaaaaagatgtaataaaagcaacaccaggtattgttttaatagatgaaattgatttacatttacatccaagatggcaacaaaaaataattaaactgttaaaaaatcttttcccaaaagtacaatttgttgttacaactcactcagctttggtagtctcatcaactgaatatagagaagcaaaagaattaaaagtagttgaagaaaacctgaatgaaaattttacaatagttgctgaaataatcggagattccaaagaatggtatattcatgatattttaagaaacgtttttcatgtagatccattattgcatacacgtcttacatctgaatatatagatcaggatgaagttgatgatttaattaatgacttgaacgaatatgttaagaaatatttagttagtagagaagagcatattttaaaaaaaataaatactttaaatggaaagttgaatacttgcttaacgcctaatacacctaaaaaaagagtagttgatgctttaatggagatggtgagatga

SEQ ID NO: 90757 - DNA, 732 bp, Lysinibacillus sphaericus; identical to SEQ ID NO: 85963

SEQ ID NO: 90758 - DNA, 1269 bp, Marichromatium gracile
atgaaagttctatccttgactctgctgaactttcgcgggatcgagtcgctgcatgtcgatttcacccagcgcacgaccgccttcgtcggaatcaacggggccggtaaatcggccgtcctggatgccttggcgatcgggttgtcgcaactgacctggcgtctcgacggacaaccgctcaaggcccgccccattgcactggacgacattcgcgaaggcgcggacttcgcccgcatcaccctgacggcccaactcaggggagaaggtctgcaatggtcgatcgtgactaaccggctcaagggaagctatcccgatcccttgcgcaagagcgatctcactgccctgaatgcggcggtatcggcactgcatgaagagtggaagcatgtggagcgcgaatggcaggagccccatgacttgcccttggcggtctactacgacgtgaaccgcgccgtgctcgatatccccatccgggtccgcgaacagtttcaggacaagccatccgacgtgtatcgggacgcgctcgaccatggcggtgccgatttcaagcgcttcttcatctggtttcgccaccgcgaggacatcgagaacgagcagcgccgcgaccatcccgcctttcgcgatccggatctggagaccgtgcgtaccgccgtggacctgttcacaggctttcgggacctgcggatccgtcgcaagccactgcgcatgaccctagtcaagcaagggttggagttgaacgtgacccagctctccgacggcgagcgcaacatgctggccttggtcggggatctggcgcggcgcttgtgtctgctcaacccgaaccgggaacgaccgaacgaaggccagggggtcgtcctcatcgacgagatcgacctgcatctgcatcccggttggcagcggactgtcgtagcctcgctggaacgtgccttccccaactgccagttcatcgtgacgacccattcgccgcaagtcgtcggcgagttggcgccggagtcggtgatgctcctgcggggcggggccttgctggggcatgcgccgcgcgcgctggggttgagcagcggcgaggtgttggaggagttgatggaagggcgggcgcgcaaccccgaggtcgccgcacagctcgacaccatccatcggcacatcgacgacgaccgactggccgaggcgcaagccgcgctggaccagttgcgtgccaggattggcgacattccagaggtgctggccgtgcaggcgtcgatcgacagtctgggttggctaatggacgaggaggcatga

SEQ ID NO: 90759 - DNA, 723 bp, Marichromatium gracile
atgaggagcatcgtcaaaggcgccgagccacgggcgctgattcaatggaaggcggacaacgcacagactccagagaacctcgtctacggtggcggcggctttccggccgaggccgtgcgcacggctctgctggcggagcaatgccatctgtgcgcctacaccatgaaacgtctgaaaaccgtcgccgagtgccaggagcagggccgggataccacagacgcctgtcatatcgagcatctgcttccacaggcgcgcaaggcaccgggagaggacatcgactaccgcaacatggtggcctgctatccgcccagtcgctccaagatcgcctgcggctacggcgcgcaagcaaagggcgatttcgatccgacgaccggacccttcgtgtctccgctctcgtccaacgccgagcgccatttcgagctcgacgcgcgtggtggtatcaccggccggacgccggaaggaatggcgacgatccaggtcttgaggctggaccacgcggccctggtgaacgaccgcgctgccgtcatccgaggagccttgcggcccaagggcaagcccttgtcggccgctgccgcgcgacgcctggcgggagaggtgatgcgtcccaatcaggaaggatgcttgcccgctcattgcgtcgcggttgcctccgcagcactcgctttggctgatcgtgccgagcggcgagccgcaaggatgcgcagacagggcgacacccgatga

SEQ ID NO: 90760 - DNA, 2253 bp, Bacillus cereus
atggaacagattgaatcaatagaagatttaaaacctggaagtattatcgacaataaaaatctagccagaatttttaaatgtagttctcaaggaggaatgcgacgttcgctaaaaactaactcacttgtactgctatcttttaaaaataaatcaccatatgaggaaataaagaaagaaggagaattattactttatacgggtatgggaagaaaaggtgatcaaagcctagattttatgcaaaataagaccttacttcattctaatgaaatgggagtaaaagtgtacttatttgaagtggaggaagcaaggtatactttcatagatagagttattttgggttcttctccaaaacaaggtgtacaacttgatttagataaaaaattacgcaaagtatggttatttccattgcttaaagttgggtgctcagaagaaatacatcattttctacaaaaacaaccaagaaaggttttggaagagaagaaaataatttcatatccaaaatatgaactctcccttcatagtgtggatccattatcacaattaatgatcgagaaaggtatagatactttaataggaccaggtggatggtattttacagctacccaatactattataatcctaatactaagagcaagcataagattggaaatataaattttttatccgaaacacagaatatcaaaaaaggaatagtttttgaaaaccagaacaaatttattaatcccttttttttaacagcacctgatcccttggataatgctcttcaggaaaaagaatctagtcccgaagaaggcaactttttaatacgtaaaattaaatataaatatccgaatagtgaatggataagtgtagaatttgttcaaggagaacggagaagtgatggtccatttattacacttatgattggtccgaatggtacaggtaaaagtacgatcctttctaatattcaaaagattttattggatgtatataattataaaaaagcttttattaaaacgcatatgtcgagagaaatagactatacgttggaatatcagctaggaaagattatctataccatcattaatgagaatagaaatagaaaattcttaaagaatggaaaagaagttccttttaattctttaagatttccaagaaaattaattgcaagtgcatttagtattaatgataggttcacctttatgcagcaatctgaagagccgctggaagagtatagttatttaggtattaaaagctctgacaatgttgctagggtaggagaaacctcgaaaaatctggttttaaatatcgtaagttcctctcaaaaagggaattttactaaaatgttaaggtacattatggaatatgtaaagttgtgtcctgtaattaaaatagaatatcgaaccaaaaacaatgaaaggctaaaggatatcattacggaaagtaatatagttacacttcaaaataaatttcttaaaaaaataaaaaaaaagaaattccgaaacacgagtttaattgatcatcaagatattatggagtttataaatggattttctgataaagatcccagtatttttagtatgaaaaatgataatatttctataacatttcatcttaatgccgaagaacaatactataagtattatgagaattttcacatgttgtggcacttatttgaaattggtatacttcaagaacctgttgtatatataaagaaaaaagatttctttaaattagaagatgctagttcaggagaatcacaatatttaaccactatgattaatattttatccaaaatagaagaagattcattggtactcttggatgaaccggaaattagtcttcatcccaactggcagaataaatatgtacatggtattaaagaaatatttaaacataatcattcatcttgccattttattttagcaacacattcacattttatggtttctgatttagaaaaaggtaagtcctcgcttgtttctctagagatagaaaatgaatttaaaacttggattcgcttacgcgatgaagaaacatttggatggtcagttgaggatgttctatttaatatatttggtatggcaacagatcgtaattattatttagcggatgaactagataaaattttattggcaattagcttaggtgaaattacagaagatataaaagcgagagtaaactatttgaatcaaatgtcagagaatttaaaagaagctgatcccttaaaagaagtcattactttaatatcttcgaaagtaataaaagggtga

SEQ ID NO: 90761 - DNA, 1311 bp, Bacillus cereus
atgtatagactaacagatgctgaaaaacgatctataaaagaatatgaatatgagtgggatgagcctaagttaaaatatcttaaatataaaataaaaagtagcttaattcaaaatccattaaatgataatatttgttattattgtaaatctcctttggattgtgggacgactcctggggatattgagcatattgtacataaaagtaaatacgaaattttcacatacgagccgataaatttaactttagcatgcgatagatgtaatactgccaaaggaagtgaagatatacttatcactgatttacctgattcttatactgaggaagattatccacttcattcagatgcttttaaaataattcatgcacatattgatttatatgaggaatatattcaaattcaagactatatattctttgtgggaattgatcaaaataataaaggtgaaaatacaattaaatgttgtaatttaaataggctagaccttgcgcttagtaaaataaaacaagttaagagtgaaaatgcggtttcaagtccagttaaaaagatgattaatggtgctgtagattcagagaaaacgttgaaggagattgaaaaaatatttgaaaaaccatcacatgaagaaatgtttgaagcaattattaatttaaataaggatataaatacaattaaaattgttaaccagttatcaaaaattgatgatttagaaacgaatttagatcctgaaaaaataactgatttgaaaaaattcattacatgttttagggaaattgaggcgtattataatatgattgatgagcttcataaaagaacaaatcttctttcccaactaatggatcttcctctaaaagatgatgtgattcttcctactatgggaaaattacttttaaatagaaggggattacaacaattaaaagaagaaataagtacccgtgaatttagccgtttccaaaaacggagtaagacagtattattaacgttgttagaggaattattggatagttacgatttatctaatgttgaagcattacttccgcgattaaatattattatgttagtcatgcaatgtgttacggatatatataaggataaaactattattgagttattacctggtcttaatccaacccttgttagaacagtaagtcaagatgctgagaggattctaccatatgaatgttataattctcagatttctatcatgttccatatgaaaagcatttatgaagaaatatttagtaactgggataaagtagtatttaataaatctaaggtattagctagaaagataaatcatttcatcaataagtaa

SEQ ID NO: 90762 - DNA, 1617 bp, Vibrio alginolyticus
atggaagaaaaatttagtaaaacaattcgacggttgatttccagatctaataaaggagatttttcagcatctttccaactagcacaatcgtatgatgaaggttttagtgtagaaagagataaagaaaaggcacaacattatttatcagtttgtgcgagtcaacttaaagaaaacaaatttagaataaagtcaataaaactgaataattataagggatttgagttcttagatttgaagctttctaaagaaagctctactacagtgctagtaggaaataatggttgcggtaagtcaactgtactagaagctataaaaaagtgtttaactcaccttaattctagattagctaccaaatcaaataatggtgatttgatagaagaaattgaaataaagaatggtgaagacttttcaagtattggtgctgaattcgaaatagaacagcaagtcatcaatatggagttgatgcagaagactgctttaagttcaaaaagagttcgaggtagttacacgcagatcaatgatatttgccaaattttaagacaagcaaacgaatctgacccccaactatcactacctctattctgttcatatacagtggaacgagcaaatgatgttacaaccaaagatatcgaggaatctgacgaaataaaagatgaacatgtatggaataaagctaaggcatacagtaaaagtttatctggaaaagcagattttaaattattctttagatggtttaaggagctaattgaaagtgacaacgaactttcaagtaacgcagatgagctaagagtaaagattcaagctaaagagaaagagataaatagcccactattaaaagagctaatcaataagcatcctgagttggaacaccttttagactctcacaaaaaagagttggcagactacaaagagcaattaaattcaatatacaccatagatgagaaatcgttagatattgtcaaggatgctatatataagtttctaccaggttttagtgatttaaaacttcagagaaagcccctagatttaacacttaataaaaatggcactcaactaagtgtattgcaactttctcaaggggaaaaaaccatattggctttagttgcagatatagcaagaagactaactttactaaaccccaaatcgttatcacctttagaggggtcaggaatcgttcttatagacgaaatagatctccatttacatccctcttggcaacagaaaattattcaaaggcttgagtctactttcccacacattcagtttgtagtaacaactcatagtcctcaagtatgccatactgtcgatagttcatctatctggttgctaaaggatgggaaaaagtatagagcccctaagggaacaagaggtgctgtatcctcttgggtattaaagaacctatttgaggttgacgttcgtccaccggatgatgaaataacacaaaatctgaaacgctatcgagagcttgtttatgatgacaagtatgacactgtagatgctttagaattgaaaaaacaactctctcgacatttcggctctgcatatgaggacttagttcagttagatttatatatagataaccgtaagtgggagaaagagtatgaggaagatcaataa

SEQ ID NO: 90763 - DNA, 792 bp, Vibrio alginolyticus
atgaggaagatcaataagtctcaagctcctaatgagcttactatttatgctatatctaaccctgatgatacttgggatagcttccgacgtaataaaagtaaagatgcaaaaaaaataaaaaatagaattttctcagaacaaaactatatttgtgcgtactgtgaaattgaattatgtgaagataatgtttttgagcatcatagaagagttgaacactttaactcaaaatctggttgggtggtaggtgatgctcaaccaaattggcacttggactggaataatgttattggtgtgtgtattggtggtaccgatagaaataacactgaacagtttgttatgccagacaataaatcatgtgattcatataaagaacacctcgaaactaaccatggagaaagtaaaaagtggctaggaaaaattgtatctcccttagaagataatttgagtagtgatatgtttaactattctctagccgatggaaagcttgaagttaatttagatactgcaaacttaaaaacatttgaacacaacaattttggaacaagttcagaacttctcgagtctactatcgaaaagcttaatttgaattgtgatcgactaaatcttgcaagacgagaagtccaatttagtttagaaagattaatagcatccttcagaaaaacaaatgatataaacaaattcaagtttatgctgcgtaagtgggccggggtagatggacctctttactttcaaacaaccagagatatattggttagagaaaatcggattgctagaaaagctctagaggattaa

SEQ ID NO: 90764 - DNA, 1173 bp, Acinetobacter venetianus; identical to SEQ ID NO: 86492

SEQ ID NO: 90765 - DNA, 732 bp, Acinetobacter venetianus; identical to SEQ ID NO: 86493

SEQ ID NO: 90766 - DNA, 951 bp, Acinetobacter venetianus; identical to SEQ ID NO: 86490

SEQ ID NO: 90767 - DNA, 420 bp, Acinetobacter venetianus; identical to SEQ ID NO: 86491

SEQ ID NO: 90768 - DNA, 1377 bp, Salmonella enterica subsp. enterica
ctgcttaactttcgttgcttcagacagctcgatattacttttgatgagcacattacgattctggttgcaccgaatggcgcgggcaagacggcagtgctagatgcgatacgcctggcgctgtttccctttattcgtggttttgatgccagcctctacgtaaaagataaatcgctggcgatccgtacagaagatgtacgtctggttttccgccccgaagcgctgaacatggaaatgtcgtctccggccatgattacggctaccggggaatgggaaagtggaaaaacggcaacctggatgctcgacaagcgaggagaacagccgccgcatgaagataagacagcggcgcagcttacccgttggggtgaacaacttcagacgctggtgcgtgaagagcataatttgcagcaggttgagcttcccctaatgctttatctggggactgctcgcttgtggtatcaggaacgttatgaggcacagcctactgaacagcgtctggataacagcgccttttcacgtttgtctggttatgacgattgcctttctgccacatcaaattataagcaatttgaacaatggtatagctggttatggcttagctaccgtgaacatcaaatcacacaacttgaatcaccttcagcaaagttaaaagaaggtgttcgtgttcagcggatgaaagaagctattcaagccatccagcaagccattaactgtctgacgcaggaagtgactggctggcacgatctggaatacagctccagccataaccagcaattggtgatgaaccatccacagcacggtaagattcccttatcccagctcagcgacggcctgcgtaatgcggttgcgatggtagcggatatcgcgtttcgctgtgtcaaactcaacccccatttacgcgatgaagccgccttaaaaacacaggggattgtgctgatcgatgaagtcgatatgttcctgcacccagcctggcagcagcaaattatccagtctttgcgcagcgcatttccactaatccagtttattgtcactacccatagcccgcaggttatcagcacggtaaaacgtgaatccattcgtctacttgagcaggatgagaatggcaacgggaaagcgttgatgccgctcggagcgacctacggcgagccgagtaacgacgtgctacaaagtgtgatgggtgtcgatccgcaacctccggttaaggagaaggctgatctacaaaagctgacggcttgggtagatcaagggaagtacgacgagccagaagcacagcaactgatggctgcattacaggtggcgctgggtgatcaacatccacaactccaacgcttacagcgcagcattgcccggcagaacatgctgaaagggaaagcgcaatga

SEQ ID NO: 90769 - DNA, 597 bp, Salmonella enterica subsp. enterica; identical to SEQ ID NO: 87653

SEQ ID NO: 90770 - DNA, 1377 bp, Salmonella enterica subsp. enterica; identical to SEQ ID NO: 90768

SEQ ID NO: 90771 - DNA, 597 bp, Salmonella enterica subsp. enterica; identical to SEQ ID NO: 87653

SEQ ID NO: 90772 - DNA, 1377 bp, Salmonella enterica subsp. enterica; identical to SEQ ID NO: 90768

SEQ ID NO: 90773 - DNA, 597 bp, Salmonella enterica subsp. enterica; identical to SEQ ID NO: 87653

SEQ ID NO: 90774 - DNA, 1377 bp, Salmonella enterica subsp. enterica; identical to SEQ ID NO: 90768

SEQ ID NO: 90775 - DNA, 597 bp, Salmonella enterica subsp. enterica; identical to SEQ ID NO: 87653

SEQ ID NO: 90776 - DNA, 1377 bp, Salmonella enterica subsp. enterica; identical to SEQ ID NO: 90768

SEQ ID NO: 90777 - DNA, 597 bp, Salmonella enterica subsp. enterica; identical to SEQ ID NO: 87653

SEQ ID NO: 90778 - DNA, 1377 bp, Salmonella enterica subsp. enterica; identical to SEQ ID NO: 90768

SEQ ID NO: 90779 - DNA, 597 bp, Salmonella enterica subsp. enterica; identical to SEQ ID NO: 87653

SEQ ID NO: 90780 - DNA, 1377 bp, Salmonella enterica subsp. enterica; identical to SEQ ID NO: 90768

SEQ ID NO: 90781 - DNA, 597 bp, Salmonella enterica subsp. enterica; identical to SEQ ID NO: 87653

SEQ ID NO: 90782 - DNA, 1377 bp, Salmonella enterica subsp. enterica; identical to SEQ ID NO: 90768

SEQ ID NO: 90783 - DNA, 597 bp, Salmonella enterica subsp. enterica; identical to SEQ ID NO: 87653

SEQ ID NO: 90784 - DNA, 1377 bp, Salmonella enterica subsp. enterica; identical to SEQ ID NO: 90768

SEQ ID NO: 90785 - DNA, 597 bp, Salmonella enterica subsp. enterica; identical to SEQ ID NO: 87653

SEQ ID NO: 90786 - DNA, 1377 bp, Salmonella enterica subsp. enterica; identical to SEQ ID NO: 90768

SEQ ID NO: 90787 - DNA, 597 bp, Salmonella enterica subsp. enterica; identical to SEQ ID NO: 87653

SEQ ID NO: 90788 - DNA, 1632 bp, Salmonella enterica subsp. enterica
ataaataaaatgaatttagagacttgctatgttgattttttagagttggaatcacatgtgataaacgaggattatttgaaggagtctgttgagcttcaaaagctaatatctactttaaatgagagtaagtttcatttaaataaaataggtatacatgattttaaacggataagagaactacagatttctttagaagatgatttgactgtttttgtcggggataacggattcggtaaaagcactattttggatgcaatagcaattgttttgagttggttgagatcaaatattgaaaaggagagtaagcctggtacttatattaaaagccatgaagttaataactctgttgatgttgagtatgcatcaattgatgcaaatataaaactcaaggactttaataccagtattttgattactaaagcgaaagagggggcatattattctagaaataatgaattgttggaggtaaaaaaacttgcaagtatttatagacttgtgaataaatatgttgataatgcaagcttgcctttgatggcatattattctattgcgcgttcttatataggcggtggggttgataggaaaagaaaaaatgctaaaactaaaactgtatggtcaaaattcgatgtgtatgatgaaatcgagtttgacagaaatgattttaccgatttttttcaatggcttgtatttcttcataacagagcttcacaagagaaattgagtgagtcacaaacgacaatcaatgcgttattttcagatattcagagtttgaaagcaacattaactcaactatctgcgattgataatattgattcaacagttataaaaggtttagagctttcgcttaaagaaaaattgaactacatgaaatctctgcaatcaggagaacataagtttaataatgcagtatcactttatgatagtgttataaataccattctaaagttcttgcctgaatttcagtggattaagcttgtttatggtgatgatgattataagattatccttaaaaaaggagaggttgaattagatattcaacagttgtctcaaggtgagaaaactatatttactttagttggtgatttggctcgacgtttaattttacttaatccaaatttatctaatcctctattgggatatgggattgttttaattgatgaaattgatttgcatttgcatccgcaatggcaacagacaattattgagcgtttgacatctacattcccaaatgttcaatttgtaattactacccatagcccacaggttttatccactgttagctctcgttcagtgcgtattctacaggaagtggaagtggatggtgttaatgatttgatagtgtctcaccccgactatcaaataaaaggtgttagtaatcaggatgcacttttatatggaatgagaactgatcctataccctctactaaagaaaatggttggcttgaagaatataaaaaattggttgagcttaatcgttatagcagtgacgaggctcttttgttaagagaaaaagttgttaaacatttcggattagaccatcctttagttcaagagtgtgatgatcttatatctgttttggagttcaaaaataagataaatcagcacttttctggaagtaaggatataaaatga

SEQ ID NO: 90789 - DNA, 684 bp, Salmonella enterica subsp. enterica; identical to SEQ ID NO: 87607

SEQ ID NO: 90790 - DNA, 1377 bp, Salmonella enterica subsp. enterica; identical to SEQ ID NO: 90768

SEQ ID NO: 90791 - DNA, 597 bp, Salmonella enterica subsp. enterica; identical to SEQ ID NO: 87653

SEQ ID NO: 90792 - DNA, 1377 bp, Salmonella enterica subsp. enterica; identical to SEQ ID NO: 90768

SEQ ID NO: 90793 - DNA, 597 bp, Salmonella enterica subsp. enterica; identical to SEQ ID NO: 87653

SEQ ID NO: 90794 - DNA, 1377 bp, Salmonella enterica subsp. enterica; identical to SEQ ID NO: 90768

SEQ ID NO: 90795 - DNA, 597 bp, Salmonella enterica subsp. enterica; identical to SEQ ID NO: 87653

SEQ ID NO: 90796 - DNA, 1326 bp, Sorangium cellulosum
gtgcgctgcttcgcgcgcggcgaggtgccgctcggggcgcaggtcacggtcgtcatcgggcagaacggctccggcaagacgagcatcatcgaggcgatcgcctcgctcgcgcccggcgacggcgaggggctcgaccgctttccgctccgccgcggggcatccggcggctggatcgcgctccacgggaccggcgccgagccgctcgcgcgctgggtcgatggcgaagggcgcgccgagcgcgcgcggctcccgcgcggacatcatgtcttcgcgtatggccagtaccgcgccttgcgtccgccggcgaggccgcgccaggcggccggcccgacgctcctcggtccggagtgggagccggcgctggcccggccgctccccgctcacctggaggacgcgctgcgccgcccggccacgcgcacgctggtggacttcgacgagtacctcttccgggatctctcggcctacgtcgcgctcctggaggagcgaggcgaggacgatcctgccgcgcgggcggtctgggagcggctgcgggcgtggctcttggggctcgaccggcgcatcgagggggtggacatcgtggagcaggaagggcgccgcgtggtggcgttccgtcgctcgggcgtcacgctctcgatcacagagctctccgacgggtaccgcgccatgctctccgtcgtcctggatctcgcgatccgctacgcgcagctcttctccgcgctcgacgatccgctcgcgggcgaggccatggtggccatcgacgaggtggatctgaacctgcaccctcgctggcagcggcggatcatcgaccagctcacgcgcctgttcccgcgtacgcgcttcgtgctgaccacgcactccccggcggtcgtgcaggccgcgatcgacgacaaggagcgcgagatccaggtcctcgtgctggacgagaagcctggcgagggcacgacggtgcggcccttgacgaagggcgatctggagcggctcgacggcgcggaggtcgactcggtcatggtggacgacgccgtcttcgatgtgccgtcgcgcctctcgccgacgtacgaggcgctggaggtgaaggccgccgagctccggcggaaggtcgagggcggcacggcgacggcgcgcgaccggcaggtgttgctggagacgctggatcagcttcaaggcgttctggcgcgggaggaggagcgggagggcaaggggccgctgctctccgagatcgcgcggacgcagatcgcgctgctccggcggctggatgcacagcttgccgcgaaaggagggggacggcgtgatccggctccggcgaagaggcgtaaagccgcccgctga

SEQ ID NO: 90797 - DNA, 741 bp, Sorangium cellulosum
gtggacgcggcgctcccggacgcggcggcgttctggaggaaggcgagggccttcgagaagctcgccgagcaaggggcgaagcggaggaaggggttcgccagctacgcgccggaggtgctgccgtccgacgagaaggggaagccggatttcccgcccgtctggcgcaccgatgcgcgggtacgacaggcgatcgccgggatgtcgcacggcctctgcgcctactgccagtctcctgtcagctcgagccaccccggggcgggcggggaggagaggccgccggggcaggtcgagcacttccggcccaaggcgcgctttcccgcgcaggcttacgagtggaagaactacttcctggcctgcatggcgtgcaacggcgcaaagcacgacaagtggccagccggggggtatgtccgacccgatgagggcagaccgggcagccgcttcgtgtttgctgagaacggcgagatcgaggcccgtgagggcgatgagcaggcgaggtgtacggtcgaggacttcggcctgaagcgttactggctcacgcagcaccgggggacggcgatccagtgccatctcgacttcgtgcgaaggctgatggggcgtgccggcattcggcttcaggacatgttgatcacgcggccggtcgcgttctccgaggcgatcaaccagaacgtgcggcgcgtctgggcgctcgggcagcggaagcggaggagaccttcgcgtgggcggcctcggcgcgggcgatga

SEQ ID NO: 90798 - DNA, 1233 bp, Sorangium cellulosum
atgatgttcgagctcgcgccgcggctgaacctcttcgcgggcgacaacgggctgggtaagacgttcgtgctggatgtcgcctggtttgcactgacagggacgtggcctggctatcccgctgcgccgcgacgcggcccggcggtcaagccagagatcgtccgagacacgcgtgacggggaggtcgtgcatcgggtcgcgtcgtcgttcgacttcgaggagcagcaatggcgtaccgtctatccatccgaggcctctagccgttcgggactcgttttttacgcccgcgtcgacggcagcttctccgtgtgggatccgcttcgacccgcggggcacctgcagttccccctcggcgtgaagtcgatgggaccggtaccggggtttcacttcacgcccagccagatctggaacgggctcaccgcggacgactacgacggctcagtcctctgcaacggcctgatccgcgactgggcaacgtggcagctccagcgcggcagcgcgttcgatctgctgacgcgcgtgctggaagtcctgtcgccgaaacctggggagaccctccgccccggatcgagcacgacccgggtctcgctgcacgacgtgcgcgacatccccaccctcgacatgccctacggcaacgtcccggtggtgctcgcgtccgccgggatgaagcgcatcctctcgttcgcctacctactggtctggatgtggcgcgaacacgtcgaggccgcgaagctccgaaacatccccccggagcggggcgtggtcgtgctcgtcgacgaggtggaggcgcacttgcacccccagtggcagcgcgtgatcctgcctgccctgctccgggtctcgcgcgagctcgagccgtccatcgagacgcagctcttcatcacgacgcacgcgccgctggtcctcgcttccgccgagccacacttcgacgaggcgcgcgacgcgctcttcctgttcgacctcgacgccgccgaggtcacggtctcaagacccgcatggaagccgcgcggggacgcctcggcgtggctcacctccgacgtgttcgacctcgcgcaggcccggtctgtcgaggcggagcgggcgatcctcgacgccatggcggcgatgcggcggccggatctgccgatcgaggacgcgaagcggattcacgaggagctgcacgacgtgctcaaggacaccgaccccttctgggtgcgctggctcgtcagggcgcggcaggccgggctcacgccgtga

SEQ ID NO: 90799 - DNA, 579 bp, Sorangium cellulosum
gtgatccacgtacctctccagccggagccggcgcgcttcgatgcgctcgtgcggcagcccggccggcgcgccctcgccgccaacgtggagcacctgcccccctactggcgggagtgcctggacgatctgcgcgacggctaccgcggcatctgcgcctacctgtgcgtgctcgtcccgcggggaacaggagcgcggtcggtcgatcacgtcgcgccgaagtcgaagcggcgcgagctcgcgtacgagtggagcaactaccgcttcgtgtgctcgctcatgaacgcgcgcaagcgcgacttcgacgacgtgctcgatccgatggagatccctgacggctggttcgtcctggagctgtcgttcctccaggtgctcccggcggaaggtctccacgacgaggcgcgcgcgtgtgtccaggcgaccatcgaacgcctgaagctcaacgacaaggagtgcatcgccgcgcgagagatgtactacaccgcttacctcgacaaggggctgacgctggagctgctccaggaatggagcccgttcgtcgccagggaggtcgtccggcagggactggccaggcgagagtga

SEQ ID NO: 90800 - DNA, 1365 bp, Sorangium cellulosum
atgctccacctggacaggttgacgttgcgcaacttccgttgtttcgcggcgtgcgaggtcgagctgcacaggaagctcacggtgctcgtcgccgacaacgggcgcggcaagacggcgatcctcgatgcgatcgggatcgcgctcgggttgttcgtggacaccgtgtcggggatacggaagtaccggggcttcgagcgcgaggacgtgcgccacgttcctgccgcggacggcgcgatgagagcagcgctcccgaccgagatcgtggcgtccggctcggtggatgggaagcggacccggtggggccgagcgctcaggggcgatgacgcccgggcgcggaccaccacgaaggacgccgaggagctccgccgggcagcgcaggggcttcgtgaccgcatcgacgccttcgcggcggagcccgggaaggcccgcccgctcttgccgctcgtggccttttacggcaccggccgcctgtggagcgaacatcggctgacggagggcaagagagggccggatcccgcgacgctgggccggctgtcgggatacatcgactgcctgtcgtcgtcgtcgtcgttcaagacgttcgtcgcctggtacgaggacatggcgaacgcggcgcgcagcccggcctcggtggcctacgggccacaggagcgaccggagaagctgctcgcggcggtccggaaggcgacgcggacggtgctcgcacccacggggtggcattcgctggactgggatttcgagcagcggaagctggttgtggagcacacggagcacggccggctgcccctgtcgatgctgagcgacggcgtgcgcaacatggtggccctggtggccgacctggcgcaccgatgtgtccggctgaacccacatttcggcgaggaggccgcccggtccacgcccgggatcctgctgatcgacgaggtggacatgcaccttcacccacggtggcagcagctcgtcgtcgatctgctccggaacgtcttcccggagatgcagatggtgatgaccacgcacagcccgcacgtcctgtcgacggtcgacgtggactcgatccgcgtcctccggcttcgcgacggcgaggccgtgctcgacacgccgacgttccagacgcgcggcgtggagagcgccgacgtgctggcggcgatcatgggcgtcgatccggtcccgcaggtggaggaggcgcggtggctgagccgctatcgggcgctcatcgaagacggcatggccgagacgccggacgcagaagctctccgcgggaagctcgtgcggcacttcgcgccgaaccaccccgtgatcctggactgcgacaggctgcgccgttttcaggcgttcaagctccgccgggctcgtccggagggggcctga

SEQ ID NO: 90801 - DNA, 648 bp, Sorangium cellulosum
atgcgaaagctcgaccggggtagcgttgcatcgccgccttgtctcgccggctaccggcacggcaggcacacatgggacaacgtggacgcggcggacaaagcggcggtccgggcagccctggatgagatgcagggtcgccggtgcgcctactgcgaaggggatctcgacgcgctcgggcagcacatcgagcactttcgccggaagcacgtcttcccgcatctcacgttcgcatgggtcaacctgtactggtcgtgcgatcaacgcgactcgtgcggcaggcacaaggaccatgatgccggcccgtacaatcccgatgacctccttgacccgtgcgtggacgacccggatcggttcttccggttccggtcggacgggaccatcgacgtgcggccggacctctccgcgagcgatgcgcgaagagcccgcgagacgttgcgcgtgttcaacctggatccgggccacggtcgccttcgctcgatgcgccggcgcgcgctggaggcctactgcgcacgggagaccgggatcctggaggctctggagggcttcacgccagaagaccggcgcacaatcatctccgaagagctggcgagcacgagcggcgagccgttctccaccatcgtccgacactttttcgaggacgtcatctga

SEQ ID NO: 90802 - DNA, 1662 bp, Sorangium cellulosum
atgcacctgaatacccagctggtcgaggacgcgcgcggaaaccagcggacccgcgcgaagctctccctgcacggaccgatcccctggcccgaggatccggcatcctggtgggaggaggacaaccccggcaagctcgtcgagcacgacctccagtcgcccacgatggaaggccgagtgcctgcctacctcgacgtgctcgcaccggacgatctggacgaagaaggtttctccgcggcgcttcaggagctgaggaaggagctctccacatcgccccaggcgtgggtacgctgcggcagcgtcgcggcgcacttctggctcgcttctcggattgagccgcagcagtcgagcatcctcgacgcgctgctcgaagcggccaacatcaggtaccggcgccggaggttgcgtgtgtcgctccgcatctcgcgcctcgtgctcaccgattttcgcggcatcgatcagctcacgctcgtgctctcgccgaggcaaaccaccgtcctcgtcggcacgaacggttcgggcaagacgacgctgctcgatgccgcggtgctccttctgtcccaactccagtcagggatcgatcagaaaatcccgccccgcaagttcacggatgcggacatcatgaacggccgcctctcttcctcgatcgagacgacggcagacgtcgacggctatcgggtgacgtggtcgctcgtgcacgagcacgggggcgaggcatccactcatgaaggcgagagactcctcgcgcttggcgagcagatcgcccggatccgagccgagatcgcgcgcggcgacatctgcttgccggtgacggtttactacaccgtcaaccggacggtgctcgacatccctctccgtatccgggctcggcaccccttcgatccgctcgaggcatacgaaggggcgctcaccggcggacggagcaatttccggctgttcttcgagtggttccgcaaccgagaggacctcgagaacgagcgccgcatccacgactcgcggcaccgggaccatcagctcgaagcggtacgtcgggccatccagtcgatcgtgcccgagttctcaggactgcgcgtccagcgagcgccgctcggtctggtcgtcacaaagggcgaatggacgctctatgtcgaccagctctcccagggcgagaagtgcctcctggcgatggttggcgatctcgcgcgtcggctcgccatggccaacccgttcgccgatgatccgctccagggaggcggcgtggtgctcatcgacgagctcgagctgcatctgcaccctggctggcagcggcgcatcgtccccgctctcgagaggacgttcccgaactgccagctcctcgtgacgacccactcgcccgcggtcctcggccacgtcgagcacgacgcggtcgtcatcctgaagcccgaggggaccggcgtccgcgtcgcgcgaccggacacctccaaggggatggacgtgaaccgcatcctcgaggatctgctcgacgtgcccgcgcgcccggaggagttccaggccaagctcgacgagctgcacaggcggatcgatgaaggcgataccgttggggcgcgcgcgctgcacgaggagctctcggccacgctcagctccaccgatccggcgctggtcaaggccgaggtgctcctgcgccggcgagaggctgctcggcgatga

SEQ ID NO: 90803 - DNA, 594 bp, Sorangium cellulosum
atggcgttcaaggcggccgccaacgccgactggacgccccggtaccgcgatctcgacaagaaacccgttcgcgccgcgctggctcgcgagcagggatacctgtgcggttactgcgagagccgcgtcggcgagcgggacggcgactgtcacatcgagcacgtggaccctcagagcgtcaacccagcccgcgcgctcgactacacgaacatgctcgcgtcatgccaggggagcgacgctcagcccccggtgcccaggcactgcggtggcgcgcgaggaaacgagcaactcgccgtgaccccgttcatggaggactgcggcgccttcttcctctacgggtccgacggccgcatcgaggcggcgagcgagccggccaagcacgaggccgcgaagcaaacgatccgcgtcctgtgtctcgacatcggccgcttgaaggcggcccgccgggcggcgatcgagggtgcgctggaggggctcgaagatctgtcagcagacgcgtggcggaccgaggccgccttctatgaccagccgggggccgatgaccgcctcgcgcccttctgctccgcgatacagcatgtgctcctgagcttcgcctga

SEQ ID NO: 90804 - DNA, 1416 bp, Sorangium cellulosum; identical to SEQ ID NO: 87248

SEQ ID NO: 90805 - DNA, 807 bp, Sorangium cellulosum; identical to SEQ ID NO: 87249

SEQ ID NO: 90806 - DNA, 1341 bp, Sorangium cellulosum; identical to SEQ ID NO: 87252

SEQ ID NO: 90807 - DNA, 639 bp, Sorangium cellulosum
atgatcccgttcgagcgcgcgcccgagcccgcgggcttcgacgccagcgtccgacaacccggccagcggtggctcgccaagggcgacgccaggagcacgccggggtactggcgccgcgcggcgcgcgacctcagggccgccttcaaggatctgtgcggctacacggcgatgtggctctcgacgccagggacggtcgaccacttcgtctcgcgggatgaagaccccagcctcgcctacgcgtggaccaactttcggtacgccgcggcatggatcaacagcagcaagagcgcgctccgctccgatcaggtcctggatccgttcgagggcggcgacggctggttcgagatcatcctgccgtcctgccagatggtgctgaccgaccgctgcccgccggaggtccgcgatcgcgcgcagacgatgctgaagcggctcaagctcggcgatggtgagagcgtcgtctcgttccggcaggagtggtaccggatgtactgcgagggagagctcagcctggagggcctcgcgcgcaaggcgcccctccttgcgcgcgcggtgcggaagcagcgggagcaagcagccgccgagccggcggcgagcgacggcgcaccgcgctccaggccagccgaagcctcgggcgcatga

SEQ ID NO: 90808 - DNA, 1242 bp, Sorangium cellulosum
atgcgactgctcgatctgtccatccagaacatcggtccgttcgatgaggcgcgcctggagttcctgtcagcgcacgacgatccggtaccggtagcgatcatcaccggcgagaacgggaccgggaaaacgatcctgctcgatgcaatccggggactgttcggcgaatactacggacgcctcgagcgcgcaatctggagaaacgggacgccattccaggcagaagcaaacctgttcatcgacggacaacgagaaaggctgctctcgaaacaaaaacagtattcacaaggggcgttcgactttctcccacaccactcgaagatatctcgtcttcctatcgacgtcgaagggggccagcagtgtcccaactgggtggtggatttctggcgctcttcgcttcctgcagatgcttacacgatcagccagctcgcgcgacctgcgccaaagagcttcttgagcaatgcgctgaaaggcattcagcgcaacgccgcggtgaccgagctcgtctgcgccttcgattacctccggggcagcgacgatccccgcgatcgccgggacggtgaggtcctctacgagaccatacgccgcatcgtcgagctcagcgtgctcgacggggagctgagccacgtggaccggcgcgcgttcatgccgatggtgcgtcagagcggccagctcgtgccgctctccaacctcagcagcggcaacgcgtacctcatccagcacatgatcggattgctgggcaagatgtacgccgtgcacgtcttgcgcgagacggacgcctccgagctgtgcaagacccctggactgctgctcatcgacgaggccgagaaccacctgcatcctcgctggcagaagcgctttctgggcgacgtgctcagcattttcccgaatcttcagatcatcgccacgacgcactcgccgttcatcgtcggctcggtcccgggcgcgcgggtgttcgtctgccgttatgatcgggagcggaagacctgcgtggtcgacgatgccacagatctttacgcgaacaagccggtggaggagatcctgctctccccggcgttcgatggcacgcagccgttcggcgaggagatctcgcgcctgctcgaggaacggaaggctgccttcgaggcgggggactccgtccggcgaaaggagatcgagaagcagctcaaggacaagaaccccgagtacttctcctacatcgacattgaagagcggctgcagtcgctgcgcggagagggggaatga

SEQ ID NO: 90809 - DNA, 657 bp, Sorangium cellulosum
atgatcccgatcaagcgactgccggcgcctgatgtgctcgctcgaaatgaagatcgctggcgcaccgcattcctgaagcagcgcgcaaaagatccacagaagcggcccagctccaagcagtatgcacaccccgacatcgtttccaccctcgagacgatgagccatcacaagtgcttctactgcgagcagagcacgaagcagacgcggcgcgaggtcgatcactacatcgacatcgccgaagatccgacgcgcgcattcacgtgggcaaacctctatctcgcctgctgggagtgcaatcaccaaaagcagccctaccgggccatccccgtgaccgactgcctggacccttgcgccccggatgctcagccttccgcccacctgatgttcgagaaggagctcattcgagctcgagaaggctcggcacaaggacttgcgacgatcaagaagtacaggcttgaccggaaggatctggaccacaagcgattgaagcagcttcagctgttcaacgaagcgctggtccgcatcaaggatgcccagatcgccgatggccggaagaacatgaacgaaagcgagaaggcgctgctacggagcttttgccagccagattttcccttctcacttatgttccaggtgtacctcgagcgtcatagtctctga

SEQ ID NO: 90810 - DNA, 792 bp, Sorangium cellulosum
ttgaacaatgctctgaaaggcattcagcgcaacgccgcggtgaccgagctcgtctgcgccttcgattacctccggggcagcgacgatccccgcgatcgccgggacggtgaggtcctctacgagaccatacgctgcatcgtcgagctcagcgtgctcgacggggagctgagccacgtggaccggcgcgcgttcatgccgatggtgcgtcagagcggccagctcgtgccgctctccaatctcagcagcggcaacgcgtacctcatccagcacatgatcggattgctaggaaaaatgtacgcggttcacgtcctgcgcgagacggacgcctccgatctctgcaagacccctggactgctgctcatagacgaggccgagaaccacctgcatcctcgctggcagaagcgctttctgcgcgacgtgctcggcatcttcccgaatcttcagatcgtcgccacgacgcactcgccgttcatcgtcggctcggtcccgggcgcgcgggtgttcgtctgccgctacgagcgggagcgaaagacctgcgtggtcgatgacgccacggatctgtacgcgaacaagccggtggaagagattctgctttctcctgcgttcgatggcacgcagccgttcggcgaggagatctcgcgcttgctcgaggaacggaaggccgccttcgaagcgggggactccgtccggcggaaggagatcgagaaccaactcaaggacaagaaccccgagtacttctcgtacattgatatcgaagagcggctgcagtcgctacgcggagaagggaaatga

SEQ ID NO: 90811 - DNA, 513 bp, Sorangium cellulosum
atgagccatcacaagtgcttctactgcgagcagagcacgaagcagacgcggcgcgaggtagatcactacatcgacgtcgcggaagatccgacgcgcgcgttcacgtgggcaaacctctacctcgcctgctgggagtgcaatcaccaaaagcagccccatcgggccatccccgtgaccgactgcctggacccttgcgcccccggcactcagccttccgcccacctgatgttcgagaaagagctcattcgagctcgagaaggctcgacacaaggacttgcgacgatcaagaagtacaggctcgaccggaaggatctggaccacaagcgactgaagcaactccagctgttcaacgaagcgctggtccgcatcaaggatgcccagatcgccgatggtcgaaaggacatgaacgaaaacgagaaggcgctgctacggagcttttgtcagcccgactttcccttctcactcatgttccgggtgtacctcgagcgtcacggtctctacagcagccattga

SEQ ID NO: 90812 - DNA, 1341 bp, Sorangium cellulosum
atgctgcgatcgctgcacctggaaggcgtggggccggccgatcggctcgacctggagctcggcgagcggctcaacgtgctcaccggcgacaacgggctcggcaagagcttcgtgctcgaggtcgcatggtgggcgctcaccggaacgtggacggatcggccggtgctgccgcggccaggcaaggaagagggcgcgcggatcgcgggcgaggccgagccgggcaccacgcgccatcagttcgaaggcaagtacgatcgactggctcagcagtggagcgacaggttcgagcgccacatgggccgcagctggaccgataccccttccggggcggtcatctcttcgtgggtacgcggcctggttccggtgctccacgtccgtacgaacggcgcatgctccgtctgggatccctgtcgaaatattccctcgttgggcagcgctctgtaccggctgtcgtcgtcaccttcgcccgatccccagccctatctcttcgaggaaaggcagctctgggacgggctcggtcacgagggcaggcccgtctgcaacgggctcgttcaggactgggtgacgtggcagctcgaggcggcggacggcgacgaggcccacccgttccagctcctctgccgcgtgctggagcagctctcccaccccgaggagacgatgaagcccggcaagccggtgcggctctacctcgacgacgtgcgcaagttcccgaccatcgagctgccctacggcacgatccccatcgtccacgcgtcggccgggatgaagcggatcctcgcgctctcctacctcatcgcatggtcctggtcggagcacgtgcaggcgtcacgcctcatcggctggaagccctccgaccgcatcgtcctgctgatggaggagcccgagacgcacctgcacccgaagtggcaacgccacatcgtccccgcgctcctcggcgccctgagcgggctctctccctcgatgcgcccgcaggtgctgctgacgacgcactcgcccctcgtgctcgcgtccatggaaccgcacttcaagccggccagggacaagctgttcgtgttcgagctcgacggcgccgatgtgaccgtgcgcgagctcccctgggcgaagcgcggcgatgcgatcgggtggctcacctccccggtgttcggtctggagcaggcgcgcacgatcgaggcggagcgcgcagtggaggccgcagaggcgttcatgcgcggcgagaccggcgcgctgccggaggggctccggagcgaggacgcgatccatcgggagctcgtgcgcctcctgccggatcaggatcgcttctggccgcgctggatcgtgcgccgggagcgggtgggcgcatga

SEQ ID NO: 90813 - DNA, 639 bp, Sorangium cellulosum
atgatcccgttcgagcgcgcgcccgagcccgcgggcttcgatgtctgcgtccgacaacccggccagcggtggctcgccaagggcgacgccaggagcacgccggggtactggcgccgcgcggcgcgcgacctacgagccgccttcaaggatctgtgcggctacacggcgatgtggctctcgacgccagggacggtcgaccacttcgtctcgcgggatgaagaccccaacctcgcctacgagtggaccaactttcggcacgccgcggcatggatcaacagcagcaagagcgcgctccgctccgatcaggtcctggatccgttcgaggtcggcgacggctggttcgagatcatcctgccgtcctgccagatggtgctgaccgaccgctgcccgccggaggtccgcgatcgcgcgcagacgatgctgaagcggctcaagctcggcgatggtgagagcgtcgtctcgttccggcaagagtggtaccggatgtactgcgagggagagctcagcctggagggcctcgcgcgcaaggcgcccctccttgcgcgcgcggtgcggaagcagcgcgagcaagcagccgccgagccggcggcgagcgacggcgccccgcgctccaggccagccgaagcctcgggcgcatga

SEQ ID NO: 90814 - DNA, 864 bp, Sorangium cellulosum
ttgagcaatgcgctgaaaggcattcagcgcaacgccgcggtgaccgagctcgtctgcgccttcgattacctccggggcagcgacgatccccgcgatcgccgggacggtgaggtcctctacgagaccatacgccgcatcgtcgagctcagcgtgctcgacggggagctgagccacgtggaccggcgcgcgttcatgccgatggtgcgtcagagcggccagctcgtgccgctctccaacctcagcagcggcaacgcgtacctcatccagcacatgatcggattgctgggcaagatgtacgccgtgcacgtcttgcgcgagacggacgcctccgagctgtgcaagacccctggactgctgctcatcgacgaggccgagaaccacctgcatcctcgctggcagaagcgctttctgggcgacgtgctcagcattttcccgaatcttcagatcatcgccacgacgcactcgccgttcatcgtcggctcggtcccgggcgcgcgggtgttcgtctgccgttatgatcgggagcggaagacctgcgtggtcgacgatgccacagatctttacgcgaacaagccggtggaggagatcctgctctccccggcgttcgatggcacgcagccgttcggcgaggagatctcgcgcctgctcgaggaacggaaggctgccttcgaggcgggggactccgtccggcgaaaggagatcgagaagcagctcaaggacaagaaccccgagtacttctcctacatcgacattgaagagcggctgcagtcgctgcgcggagagggggaatgttcccgatcaagcgactgccggcgcctgatgtgctcgctcgaaatgaagatcgctggcgcaccgcattcctga

SEQ ID NO: 90815 - DNA, 501 bp, Sorangium cellulosum
atgagccatcacaagtgcttctactgcgagcagagcacgaagcagacgcggcgcgaggtcgatcactacatcgacatcgccgaagatccgacgcgcgcattcacgtgggcaaacctctatctcgcctgctgggagtgcaatcaccaaaagcagccctaccgggccatccccgtgaccgactgcctggacccttgcgccccggatgctcagccttccgcccacctgatgttcgagaaggagctcattcgagctcgagaaggctcggcacaaggacttgcgacgatcaagaagtacaggcttgaccggaaggatctggaccacaagcgattgaagcagcttcagctgttcaacgaagcgctggtccgcatcaaggatgcccacatcgccgatggccggaagaacatgaacgaaagcgagaaggcgctgctacggagcttttgccagccagattttcccttctcacttatgttccaggtgtacctcgagcgtcatagtctctga

SEQ ID NO: 90816 - DNA, 1308 bp, Sorangium cellulosum
gtgctgctcgaggcggccaacgtccggtaccgacgccggagattgcggacgtcgctccacatctcgcgcctcgtgcttaccgacttccgcggcatcgatcagctcacgctcgggttttcgtcgaggcagaccacggtcctcgtcggcacgaacggttcgggcaagacgacactgctcgacgcggaggtgctcctcctgtctcgcctccaggcaggaatcctagaagagaaacgtccgccccgcgggttcacggatgcggacatcatgaacggtcgcctctcttcctcgatcgagatcacggcagacctcggcggcgactcggtgacgtggtccctcctgcacgagcgcggaggcgaaatgcccgagcgaaacgaagagaggctcctcgcgcttgacgagcaggtcgtccggatccgggccgagatcgcgcgcggtgacgtctgtctgccggtggcggtgtactaccccgtcaaccgggcggtgctcgacatcccgctccgtatccgaacgcggcacccgttcgatccgctcgaggcgtacgacggggcgctcgccggcggacggagcaatttccggctgttcttcgagtggttccggaatcgggaggacctcgagaacgagcgccgcattcagtactcgcagcaccgggatcatcagctcgaagcggtgcgacgggccattcattcgatcgtgccggagttctcgaacctgcgcgtacagcgctcgccgattggcatggtcgtcacgaagggcgagtggacgctctacgtcgaccagctctcgcagggcgagaagtgcctcctcgccatggtcggcgatctcgcgcgtcggctcgccatggccaacccctttgccgacgacccgctccagggaggcggcgtggtgctcgtcgatgagctcgagctgcacctgcaccctggctggcagcggcgcatcgtccccgctctcgagaggacgttcccgaactgccagttcctcgtgacgacccactcgcccgcggtccttggccatgtcgagcacgacgcagtcatcattctgaagctcgaggggactggcgtccgcgtcgaccggccggacacgtcgaaggggatggacgtgaaccgcatcctcgaggacctgctcgacgttcccgcgcggccggaggagttccaggtcaagctcgacgagctgcacaggcggatcgatgagggcgacaccgtcgcggcgtgcgcgctgcacacggagctctcggcgacgctcagccgcaccgatccggccctggtgaaggccgaggtgctcctgcatcggcgagaggctgctcgtcgatga

SEQ ID NO: 90817 - DNA, 624 bp, Sorangium cellulosum
gtgcgccgaggccccgagccctccgagctccgggaattcaaggcggccgcgaacaccgactggacgcccgggtaccgcgatctcgacaggaagcccgttcacgccgcgctggctcgggagcaggggtacctctgcggctactgcgagagccgcatcggtgagcgcgacggcgactgtcacatcgagcacgttgaggctcagagcgtgaacccagcccgctcgctcgactacacgaacatgctggcgtcgtgtcaggggagcgacgctcagcccccggtgcccacccactgcggcggcgcgcgtggaaaagcgcacctccccgtgaccccgttcatggaggactgcggcacttacttcctctacggttctgacggccgcatcgaggccgtgagcgaaccgatgaatcgcgaggctgcgaagcagacgatcgatgtcctgcggctcgacatcggtcgattgaaggccgcccgccgtgcggcgatcgagggagcgctcgaggggctcgaaggcctgtccgcggacgactggcgcaccgaggccgcccgctacgaccagccgggggcggatggtcgcctggtgtcgttctgctccgcgatacagcagttgctgttgagctacgcctga

SEQ ID NO: 90818 - DNA, 1206 bp, Sorangium cellulosum
atggcctacatcacgcgcatccatgtcgagaagtgccgtaacgtccggcagctcgacatcgatctgtccgtgtcgctccccgccggcgacgcagatggacctgcttccgcgagacgacagaagttccgtcatctcatcctcacggggccgaacggctccggaaagagcggtgtgctcgaggcgatccgggacgaggtctcgaccggcctggtacctccgcaccatcagcagctcactcttccgttggtcgcggacggccgcaacgcgctggtctggagctgcgagaacgacgagctcgacaggatgtttcagcgcggcgacatcatcgccgtgtacctttctgccacacgccgcctgcgtcgacacgatgtccccggcccaaagaagctgcggtgggaccctgcggatctgcggcctgagcagcaggttgcaagcaagctgcttcagtttctggtgaacaaacgcaccgagatggcctacgccgccgaggacggcgaccaacataccgcgtcgcgcatcaatctctggttcgagaacctcgaacaccggctgcgccagctcatggaggacaaagggttgaccctcgagttcgatcggcgctcctacaatttccactttcggaagagcgacggatacgtctttgatttcaacacgctcgcggatgggcacgcgtccgtcctcgccctgctggccgagctgctgatccgcgtggacgccgcccagcagagccgcgacgacttcaccttcgaaccggagggcgtcgtgatcgtcgacgagatcgagacgcacctgcacctgagcctacaggagcagatcctccccttcctgacggatttcttccctcgcttccagttcctcgtcgccacccactctcccgccgtcgtcgccagcgtcccgaacgcagtagtttacgatctcaagaagcgcgagcagacgctcagcgacgacttccgcggggtccgctacggcacgctgatgaccgagcatttcggcatctccagcgagatcgatctcgactcgacccagaagttgctccgtctacgagagctcgcgcgccgctcgccccgcacactggaggaagaacgcgtactcgccgagctggcggcgctcctctcggcacgttcgcccacgctcgcggtggaggtctggatggccaaagagcaactgggaacgcctggcgccgctgccgcggagcaggtgcgttga

SEQ ID NO: 90819 - DNA, 693 bp, Sorangium cellulosum
ttgatcgacgtcgagcgtcccgccgaggcgccgccgagcctcggcgcgggcaagacttacacgggcgccgacgtgatggaggcgcttcacctcgcctttcacggtaaatgctacctctgtgagacgccgatcgccctcggcaccttcgaggtcgaccaccgccggcccagggcggatcagcggttcacacacctgatctgcgcgtgggacaacctcttcccgacgtgcacgacctacgcctgtaaccagcgacggcgcaagcggtacccggatggggggctgctcgatccagggcaaggcgtcgagcgacgcatcttccagcgcgtcgagggcgcggtctcgatctcgctgcgcaaggccgggaccgttgacatcgtgttccgggccgccgaccctgccgacgcggccgccgtgaacaccgccgaggagcttgaccggatccacaacggtacccatagctccgcgatacccaaggccgatgcgctacagagggccatcctcgagcacgtcagctctgtgagcatcgaagtctaccgattcgtgaccttatccgcgcgccccacgtccgagcctgccgcgatcgacgaccagcggcggcgcgtgcaagcgctcgtcagcaggcgcgctccctatgcgatgctcgtgcgcagcgtcttcgcctccctcgacgcggtgcgcgcgctcttcgactga

SEQ ID NO: 90820 - DNA, 876 bp, Sorangium cellulosum
atgggtgcgagcgccttgacggagcctcgtggcgacgatcccatcgccaccctcttcgacgaacacgtgcccctgcgcaacgccgaggagtggctcctccaggccgactacgccgcgaacaagccctcaccgcaccaggagcgggctcgcgcccgccgggacgcggtccgatcgatgctcatcgagctgctgcccgaggtcgaggacatccagatcctcgccgatctggacgataaccctgcccgcccccgccccggtatcctgctcgagacgccttatggctgggtgcccctccagggcctgagcctcggctacaagaccttgctcgcgtggatggtcgactttgccagccgcctctacgagcgttaccccgacagcgagaaccccctcgcggagccggcggtggtcctcgtcgacgagatcgatctgcacctgcatccggcgtggcagcggaagctgctcagctatctctcggagcgcttccccaacgtccagttcatcgtcaccgcgcacagcccgctcgtggtccaggcggcggagaacgccaacatcgtcgtcttgcgtcgcgagggcgaccatgtcgtcatcgacaacagcggcgcggcggtccgaaactggcgggtcgatcagatcctgaccagcgacctgttcgggctgccgagcgcccggccgcctgcgctcgacgccctcctcgccgaacgccgggatatcctgaccaagcctcgactctcggccgcggatcgacgtgcgctcgagcgcatcgagcgagagatcggcgagctgccgagcggcgagacgcccgagcagatggaggccatggacatcatccaacaggcggcgcgctcgctgaagaaggccggcggcgcctccggatga

SEQ ID NO: 90821 - DNA, 795 bp, Sorangium cellulosum
atgatccgggtcaagaaggcggagcaggcgcccaggaagctgcgagacatggcgcccgctgcgcgcgcggccgtctgcgcgtcgtatcgctgcgcgcgcgcttcgatccagcgcggcgcggcgacgctcgacttcgtggccgccgtctatgcccaccccaccgtgaagaaggcgctggagaccgctcaccacggcaagtgctgctactgcgagtcgaaggtgaagcacgtcgctcctggggacgtggagcactatcggcccaaggccgcggtgcggcaggcgcggacggcgcccatcgagcgccctggctactactggctggcatatgggtgggaaaacctcctcttctcgtgcgtgctctgcaacgagaagcacaagaggaatctgttcccgctgcgtgatccccggaagcgcgcccgctcggcgcgcgccaagctggcggcggaggcgccgctgctcgttcatcccgcgcaggaggatccagagcagatcatcggctttcgcgacgagtacgcctactccatcgagggggatccgcgcggagaagccacgatcgacgaggtgctgcagctcaacgagcggccacctctcctggagcgcaggcgcgagcacctcgcgatcctccgtgccatgcaggtgatcgcgggccagccagatgtcgatcccgcggatcgagcgcgggcccgtgcgtggctcgatcgcagcgtcgccgacgacgccgagtacgcggccatgactcgagccgcgctccgctcgccctcagctcgccgtgaggcctcccggcccgcgcgctga

SEQ ID NO: 90822 - DNA, 1326 bp, Sorangium cellulosum
gtgcgctgctttgcgcgcggcgaggtgccgctcggggcgcaggtcaccgtcatcatcgggcagaacggctctggcaagacgagcatcatcgaggcgctcgcctcgctcgcgcccggcgacggcgaggggctcgaccgcttcccgctccgccgcggggcgtccggcggctcgatggcgctccacgggatcggcgccgagccgctcgcgcgctgggctgatggcgaagggagcgccgagcgcgcgcggctcccgcgcggacatcatgtctttgcctatggccagtaccgcgccttgcgtccgccggcgaggaggcgccaggcgaccggccctgcgctcctcggaccggagtgggagcaggcgctggcccggccgctcccgtcgcacctcgaggacgcgctgcgccgcccggccacgcgcacgctggtcgacttcgacgagtacctcttccgggatctctcggcctatgtcgcgctcctggaggagcggggcgagtacgaccctgccgcgcgggcggtctgggagcggctccgcgcgtggctggtggggctcgacaagcgaatcgaaggcgtggagatcgtcgagcaggaaggccgacgcgtggcggcgttccggcgctcgggcgtggtgctctcgatcacggagctctccgacgggtaccgcgcgatgctctccgtcgtgctggatctcgcgatccgctacgcgcagctcttctccgcgctcgacgatccgctcgcgggcgaggccatggtggccatcgacgaggtcgacctgaacctgcaccctcgctggcagcggcggatcatcgaccagctcaccggcctgttcccgcgcacgcgcttcgtgctgaccacgcactcgcccgcggtggtgcaggccgccatcgacgacagggagcgcgagatccaggtcctcgtgctggacgagaagcctggcgagggcacgacggtgcggccgttgacgaagggcgatctggagcggctcgacggcgcggaggtcgactcggtgatggtggacgacgccgtcttcgatgtgccgtcgcgcctctcgacgacgtacgaggcgctggagctgaaggccgccgagctgacacggagagttgaggacggcacggcgacggcgcgcgaccggcagacgctgctgaagctcctggatgaactccagggggtgctcgcgcgggaggaggagcgtgaagccaagggaccacttctgtccgggatcgcgcggacgcagattgctctgctgaagcgtctggacgcgcagctctccgagaagaaaggaagacgggatgatccggctccggcgagacggcgtcgaagcgcccgctga

SEQ ID NO: 90823 - DNA, 789 bp, Sorangium cellulosum
atgatccggctccggcgagacggcgtcgaagcgcccgctgactggcgagagacggtcgatgcggcgttcccggacgcggcggcgttctggaagacggcgagggcgtttgaaaagctcaccgaacaaggggcgacgcgcaagaaggggttcgcgcgctacgcgccggatgtgctgccatccaaccggaagggcaagcgcgactttcctccggtgtggcgcaccgagggctgcgtccgggcggtcatcgcagagatgtcgcgtggcttctgcgcgtactgccaatcaccggtcagctcgacacaccccggaaaaagaggcaaggacaggccgccggggcaggtcgaccactttcgacccaaggcgcgttttcccgcgcaggcttacgactggaacaactatttcttggcgtgcatggcgtgcaacatcgccaagggcgacgcgtggccgagcgggggatatgtccggcccgacgagggcgagccgggtagccgtttcgtgtttgcgaggagcggcacgatcagggcccgcaaaggggatgagcaggctaagcgcacgatcgaggatctcgatctgaagcgggactggttgacccagcaccgggggaaggcgatcgagagatacctgaagttcgttgttccgctgataggccgtcccggctttcccatcgagatgctgctgatcgacggccccgacgagttctctgaggcgatcaaccagaacgtgcggcgcgcctgggcacgcgggcggcagaagaagcgcccgtatgcgcggactcggcgcgcgcgatga

SEQ ID NO: 90824 - DNA, 753 bp, Sorangium cellulosum
gtgaccgagctcatctgcaccttcgattacctccgcggcagcgaggatccccgcgatcgccgcgacggtgaggtcctctacgaagccatacgccgcatcgtcgagctcagcgtgctcgacggggagctgagccatgttgaccggcgcgctttcatgcccatggtgcgacagagcggtcagctcgtgccgctgtccaacctgagcagcggcaacgcatacctcatccagcacatgatcggcttgctcggcaagatgtacgccgtgcacctgctacgcgagacagacgcctctgagctctgcaagacgccagggttgctcctcatcgacgaggccgagaaccacctgcatcctcgctggcagaagcgcttcttgcgcgatgtgctcagcctcttcccgaaccttcagatcatcgccacgacgcactcgcccttcctcgtcggctcggtcccgggcgcgagggtattcgtctgccgttacgatcgggagcggaggacctgcgtggtcgacgacgccacagatctctacgcgaacaagccggtggaggagatcttgctctcccccgcgttcgacggcacacagccgttcggcgaggagatctcccggctgctcgaggaacgaaaggccgcgttcgaggcaggggacaaccttcggcgtcgggaaatcgagaggcagctcaaggacaaaaaccccgagtacttctcgtacatcgacgtcgaagaacggctgcaggcgctgcgcggcgagggggcatga

SEQ ID NO: 90825 - DNA, 501 bp, Sorangium cellulosum
atgagtcaccacaagtgcttctactgcgagcagagcacgaagcagacacgacgcgaggtcgaccactacatcgatgttgccgaggacccggcgcgagcgttcacgtggacgaacctctacctgtcttgctgggagtgcaatcatcagaagcagccccacagggccatcccgacgaccgactgcctggatccttgcgcgccggacgctcagccctccgcgcacctggtattcgacgacgagctcattcgagctcgcgaaggctctgcgcaagggctcgcaaccatcaagaagtacaggctcagccggccggatctggaccacaagcgcctgaagcagcttcagctcttcaacaaagcgctcggccacatcaaggacgccatgatcgccgaaggccggaagcacatgaacgagaaggagaaggcactgttgcggagcttccgcgctcctgatttccccttctcactcatgttcaacgtcgttctcgaaaggcttcacctgtaa

SEQ ID NO: 90826 - DNA, 1332 bp, Sorangium cellulosum
atgcgaatcgacgagatccggctgatcaacttccgcgccttcgagcggttcgcgctgcatctggagccgcggctcaccgtgctcgtcggccgcaacgggacgggcaagacgaccgtgctcgaagggctggcggtggcgctgggcgcgtggctgagcttcttcaacgcgagccgggacgaccgcccgatcccgaagtcggcagcgcgctttgttaccacgatgcacggcggcgtcccgagcatggcgacgtgctacccggtgcgcgtcgaagcgagcggtgagaccccgctgggccacgtggagtgggcgagggagcttcgcggcgcagacagccgcacgacgacgggcgtcaccaagtccggtcgggaaggcccgctagaggcgacccggttcatgcctcgtggcatcgaggatgcgatatcgggcgccaaggccgtcgcgctcccggtgctcgcctactacggaacaggtcggctgtggcaccacaagcgagacaggaaccccgagagggcgagcttgaagtccaggcttcaagggtaccgggccgcgctcgaggccgcgtccgaccagaaggggttcgaggcctggatggcctggcgcgaggaggatcgtgtccagcgcctcgcgcgcgccgcggaggaggggcgcccgctcaccgaggtgcggagccccgagctggagggggtgagcgcggcggcctgcacctgcctcgagggcgctcgccggatctattacagcgccaaccaccaggagctgcgcgtcgacttcgtggacggctcctccctccccttcgtcgccctctccgacggccagcggaacctcatcgccgtggcggcagacatcgcgtggcgcgcgacgcagctcaacccgtctctcggcgccgaggccccggcgcgggcgacgggcgtcgtgctcatcgacgaggtggatctccacctccaccccgcgtggcaatggcgcgtgctcgacgacctgcttcgcgccttcccgggcattcagttcgtcgtgacgacgcactcgcctcaggtgatgtccgcagccccgcgcggctcggtgcgtctcctcgatccggatcaccaggcgcaccgggtcgagaggatcgcgggaaaggacaccaacaccatcctggaggacatcctcggcgccccgtcacgcttgaaggaaacacgggagaagctcgacgagctggcacggctgatcgacgacggccagcttgcggaggcgaaggcgctgctggcagagctgtcgggcctcctcggggaggacgacgctcaggttgtcgccgcgcgatgggagctctccatggcggagaccggcgatgcgccggattga

SEQ ID NO: 90827 - DNA, 699 bp, Sorangium cellulosum
atgcgccggattgagaaggaccgcgagcccgcttgcctggccgacctccggggtacgcccggcgcggcctggagctcggtgcacgggacgcagaggcagcagatgcgggagcacgcgtccaaggagcagcacgggctctgcgcgtactgcatgtcccggctgccgggaccgccgagcgccgaaggcatgaagatcgagcatttcaagacgcgcgcgctgtcgccggagctggtgttcgactggggcaacctcctcggggtctgcctgggcgatgtgggcatccacgatggcggaggagctcaccgcgatcgctaccactgcgacacctaccgcggacatctcccgagagaggagcaacggatcgagctgaacccggcggcgtctccgcccgacgtcagctcgatgttctcctatacgaaccagggtgagatgcgacccgcgcgcggcctggagcccgcgatgcgcgccagcgccgaagcgcagatcgagcgtctgaacctcaacatcgctcgccttcaacggaaccggagggccgtgatcgaggccctccggtccgaatttcagaagaaggcgccgagggccgcacgtgtgaaggcgctgctggagctttcatcgacgccggacagtaccggtcttttgccgccctactgccaggctgcagcctactatctggaaaagaagctcaggcagctcggctga

SEQ ID NO: 90828 - DNA, 1326 bp, Sorangium cellulosum
gtgcgctgcttcgcgcgcggcgaggtgccgctcggggcgcaggtcacggtcgtcatcgggcagaacggctccggcaagacgagcatcatcgaggcgctcgcctcgctcgcgccgggcgacggcgaagggctcgaccgcttcccgctccgccgcggggcgtccagcggctcgatggcgctccacgggatcggcgccgagccgctcgcgcgctgggctgatggcgaagggcgccccgagcgcacgcggctcccgcgcggacatcatgtctttgcctatggccagtaccgcgccctgcgtccgcccgcgaggccgcgccaggcgaccggccctgcgctcctcggtccggagtgggagcaggcgctggcgagggcgctcccggcgcacctcgaggacgcgctgcgccgcccggggacgcgcacgcttgtcgacttcgacgagtacctcttccgggatctctccgcctatgtcgcgctcctggaggagcggggcgagtacgaccctgccgcgcgggcggtctgggagcggctccgcgcgtggctcgtggggctcgaccggcgcatcgaggcggtggagctcgtcgagcaggaagggcgccgcgtggcggcgttccggcgctcgggggtggtgctctcgatcacggagctctccgacgggtaccgcgcgatgctctccgtcgtgctggatctcgcgatccgctacgcgcagctcttctccgcgctcgacgatccgctcgcaggcgaggccatggtggccatcgacgaggtggacctgaacctccaccctcgctggcagcggcggatcatcgaccagctcacgcgcctgttcccgcgcacgcgcttcgtgctgacaacgcactccccggcggtcgtgcaggccgcgatcgacgacagggagcgcgagatccaggtcctcgtgctggacgagaagcctggcgagggcacgacggtgcggcccttgacgaagggcgatctggagcggctcgacggcgcggaggtcgactcggtcatggtggacgacgccgtcttcgacgtgccctcgcgcctctcgccgacgtacgaggcgctggaggtgaaggccgccgagctccggcggaaggtcgagggcggcacggcgacggcgcgcgaccggcaggcgttgctggcgatgctggaccagcttcaaggcgttctggcgcgggaggaggagcgggagggcaaggggccgctgctctccgagatagcgcggacgcagatcgcgctgctcaggcggctggatgcacagctttccgcgaaaggaggggaacggcgtgatccggctccggcgaagaggcgtaaagccgcccgctga

SEQ ID NO: 90829 - DNA, 741 bp, Sorangium cellulosum
gtggacgcggcgctcccggacgcggcggcgttctggaggaaggcgagggccttcgagaagcttgccgagcaaggggcgaagcggaagaaggggttcgccagctacgcgccggaggtgctgccggcggacgagaaggggaagccggatctcccgcccgtctggcgcaccgatgcgcgggtccgacaggcgatcgccgggatgtcgaacggcttctgcgcgtactgccagtctcctgtcagctcgaaccaccccgggacgagcggggaggacaggccgccggggcaggtcgagcacttccggcccaaggcgcgctttcccgcgcaggcttacgagtggaaaaactacttcctggcgtgcatggcgtgcaacggcgcgaagcacgacaggtggccagccggaggatatgttcggcccgacgagggcaggccgggtcgccggttcgtgttcgcggaggacggcgggatcgaggctcgtgagggcgatgagcaggcgaggtgtacggtcgaggacttcggcctgaagcgctactggctcacgcagcaccgggggacggcgatccagtgccacctcgacttcgtgcggaggctgatgggccatcccggcattcagcttcaggatgtcctgatgacgcggccggtggcgttctccgaggcgatcaaccagaacgtgcggcgcgtctgggcgagcgggaggcggaagcggaagaaggcttcgcgggcgcggcctcggcgcgcacgatga

SEQ ID NO: 90830 - DNA, 792 bp, Sorangium cellulosum; identical to SEQ ID NO: 90810

SEQ ID NO: 90831 - DNA, 513 bp, Sorangium cellulosum; identical to SEQ ID NO: 90811

SEQ ID NO: 90832 - DNA, 1218 bp, Serratia plymuthica; identical to SEQ ID NO: 87314

SEQ ID NO: 90833 - DNA, 624 bp, Serratia plymuthica; identical to SEQ ID NO: 87315

SEQ ID NO: 90834 - DNA, 1428 bp, Aeromonas veronii
atggaaatcagacaactcaaacttgaaaatctggggcgttttcaatccctagacatcaattttgctcccaccgatacagttacatcaaatgtaaccgttctgatcggaaataatggagcaggaaaaacctcgatcctgaggtcactggcaacgtctttaagctggtttgtcgcccgtcttcgtagcgataagggcagtggtagtccgctaccagaagaagtcattttaaatggtacccctacaactacaagtgagattattttacaagatcaagggactgaatttagttggttactaaccaaaactcgcaaaggccgcaaaggcaatcggcaatctcaacttaatgaggccagcaggctggcggataattaccgggtgcgtttggcagaaaatgactcagctagtctacctctaatagccttctatcctgtcgaacggattgtattggatattcctctaaaaattaaagagaggcacacattccaacaacttgatggatatgataactctttaaatcaaggggtagatttccgtagattttttgaatggtttcgagagcgagaagatattgaaaatgaaagagaaggagatgtttttcttgacttttactcaaaaaacactcaactaatagatgatatgatggagattgcagagtcagcttcatctcgtctagatcagattaaagattttgatattgaggccctgactaaagagttctcacaaatcacaaaaatgatgaatgttatgaagcacgttgagactcaaactaaagatcctcaactgaatgcagttcggtctgcaatcgaatcatttatgccaggattcagcaatatccgaattcgtcggaagccacgcttgcatatgtccatagataaagagggtcaaaccctcaatgttttacaattatcccaaggtgagaaatctttaatggcgctggtgggagatattgctcgtcgtctagcaatgatgaaccctaacctagaaaatcctttacatggtgatggtgttgtactgatcgacgaaatagatatgcatttacacccccagtgggcgcgcactattatctctagactaactagagcattccctaattgtcagtttattttgactacgcattctcccctggtgattagcgattgtaaagatgttcttgtttattctcttgataacggaaacgtaattcaagtaccatcacagtacgggcaagacgctaactctgtcctactgaatgtaatggatacttatgtccgtaatgaagctatatctaaacagctaaatgattttatggatctagttcacgacaaaaaactggatgatgccaatatactttttgataaattggctgcggagcttccggcagacaacttggaattaaccaaggctcgtctgttattacgcaaagaggcattgcgtcgtgaaaaaaattaa

SEQ ID NO: 90835 - DNA, 630 bp, Aeromonas veronii
gtgaaaaaaattaacaaggggccagagcctgtatcactcacagcattcaaaaaaactaacccactggctcgctatcaagatttgtctgatgtagagcgtcaggatattcgtcaaagttgctctagagaacaattttatctctgtgcatattgttgccaagcaataagtggtgccaatcaagatacaatgaatgagcatgtagtagctcgaagactggctcccgaacgttcactagactttagtaacatagtggcaagctgcacaacgccaaaacagtgtgatagctctcatgactcacaacacttaccacttaccccatttatgtctgagtgtgaaaatgaattccgtttcaaactcagtggacgtgttgaaggtgtaactgatagggctcgcgaggcaatacgagtactcaatcttggtgatacagaagaaaacaacaagggtttgatcgagaaacgcaaacagctagtcaataccttgatctggaaagactatggtaaccctgattcgctatccattgaggacgatagagagctcttgaatgaactaattaatgaactgaatcaaccacaagatggtaagctggaaccctttgctcctgtactggtgaacatattaacccagttatag

SEQ ID NO: 90836 - DNA, 1329 bp, Chryseobacterium sp. GSE06
atgattataagttatactaaacgaagtaaaacatatcaattttgtaagccatctgctgattacaaaaatgtttttactataatcgtgggaaagaatggaagcggaaaaagtcgcttactaaatgacataataagcaatttcattccctctcatcttgccaaaaaaatatccacggcaaaagacggtttcttaatgcgttcatctgagccaactaaagttctagctgtatcaactagcccctacgataaatttccactgacacgatcactgttcggattaaaatttcccgaaggcaattattcttacatcggaataagagagattcgttcatcagatttttctttaggttttatttctaaaattattaaggaacttttgcatgtaagattaagtaatcctgagcagtttcataaaattatagacgtattaggttacttaggttataatggggagctacaagttaaatttgaaactgttatatcatctgcacaaatccggcgttttttagaaagtcgtaagactgaagatgactttagacatatctttttcaaaaataatacagcacgtataaatacaggtttctttgaaacaggtgaaaaacttgacttcgtaaaactagaatatttacagaaaatatttatgagttacgaattttccaaatatatgcgatctccaacagttacgattaatgctgattctattgaattacaaatggatttagaggacttattatttattcttgaagccggtctactgcgactgaaagatgtatatataaggaaaattgaaaacaatagaatttatcctattaatgaagccagttcaggagagcaatgtatattcaatacttttatagggattgcctgcaaaattgctgacaatagcttaattgtcattgatgaacctgaaatttctttgcatcccgcttggcaagaacgatatataacacttctaatggatactttccaacattataaaggttgtcattttatcattgcgacgcactctccacaattggtatctaaattatccaatgagaactgttatgttttgaagatggatgatggtgagttgatggatggagagttaatagcaaacaattcagcagattttcagctcgcaaatgtttttaatacccctggctttaaaaacgagtatttaggtaggatagctttttctattatttctaaagtgggaaaaactaataagtttgacagtgaagatctagagaatttcacaattatccaatctcagatcaagaatatgcagcataacgatcccatcagaaaattatttgatttaattaaagacttaaaaagaaatgcctga

SEQ ID NO: 90837 - DNA, 657 bp, Chryseobacterium sp. GSE06
atgcctgatatcaatcaaccagtagtttatactccagcaatcaaaaaacgtattttaggttttcttagtaagtctgatttaaaaagttcagattggtctgatgatgatataaaagatatccggaagttcattcgtgattattatagaaatataacaagaaaatgtttttattgcagaaaggagatttcgcttcgatctgtagataactgtcatgtagagcatataatccccaaaagtgaacaaatacaatttatgtttgaaccaagaaatctttgtgttgtatgtagtgattgtaacattataaaaagcaaaaaagaagtttccggccaaattgaaacagttacaaaaaatggaaagctctatacaatgtatcctagatcatcaaatgcatttatagttgttcatccacattttgataattatgatgatcatattcatcactgtggtgatatttatatctcaaagtcgaaaaaaggatcatacacaatccatatttgtgaacttaacagaaaagtacatgaatatggaatggattcaaaccctttaacacaatctgaattatttgatatttttcatgatataatgaattcggacgatgttgtacaacaatctaaatatatgaacaaattaagggaacattttattaaagcgggataa

SEQ ID NO: 90838 - DNA, 1764 bp, Chryseobacterium sp. GSE06
atgctggatcttgttgaagttcatgaagaattatatttatatctgcttgaacaaaggaaaagaaattctgaactaaaatttacttttagaaaaagtaatcatgcaaatagattggaagaagggtattggttttacggaaatgaaaactatttagcaatatcattttgggaagggatggattggaaaaatagaactccgaatatatgtttcacaattgatagcaagggaaaatgcaccttggaaattaatgtttcagattctactatcaagaaagaatttattgaaagatattttttagaaagaacactaaatttagaaaaaattggtaaaaaatatatcatcaagtatgataatgttttttctgaatacagtaatcgcatatatgatctaaacgattacaagtctgtttttgattttttcctgcacacagataaagaaaatattgatgatattattaggagtaattctgatttttttgagatgatgggatcaagtgaaaatgaaatttcatttttaagttcagaagaatttctaaaaagacataataaaattaggcagtatagaaaacgcaagcaagagattgataatgaagatgaatttgttatcaaagaggataagccttggaaattattttcaattaatataaaagattatggattaataaatgacttatcgattgaaataaaaaacaaaaaaaatcagtggatatttttaacaggtgagaatggatctggtaaaacgaaccttttacgagcaatggcaacaacattgggaaatagaatgttgtcaaaaaatgaatttgaagaaaatcctaattttaaagttattgccaacttcatttataaaaataaattacaagaatacaatagaattggaaatggtgaagtaaaaggtaaaagaaaaccatacattcaagggttggcaatgtatggtccttatagacttgatatggtggtagataagatgaataaggctaaatttaaaaaagaattaaataaagaagagtctttcaaatctttatttaaggtaggaactccactattaagtattgacaaacagtttgagttttggaggtctggatcaaagcgggaaaagaatctttttcaaaaaagagaatattatattaagtctttaataattgatgttgttcataatttagttgatattagatttaccattgaaaataacaaaaaaattacaaagtacatttttactaatgatcagaatcaagaatattctttagtttgggaaaaattatcaactggtacaaagagtactattgcgatgcttggtgatattctgattcgtcttttcaatcaacaatctgacattcttgatccagcagaattacgagggattgttattatagatgaaattgatttacaccttcatcctaaagcacaaaaagaattagtaataaacctctcaagaacatttcctaatattcaatttattgtttcttcccatagtccaataccttttattggtgcacctgaagagagtgtattcattacggttgaaagagatcagaataataatatcaaagcgacaatgttagatatagacatttcaaatctattacctaatacaattttaagctcacctatttttggctttgattccataattaatgttcaacataatccaaatgagagtttgataacagagaacgattatcaagaagccgcattttataaaattttgaatagaaagatcacggaacgaactatacaattaggaatagataatgattcagataactag

SEQ ID NO: 90839 - DNA, 909 bp, Chryseobacterium sp. GSE06
atgattcagataactagaaaagattacaatgatattcccgaacctttgacaagacctgggacatttaggcaaattgagcgcgcagttgcagaaatgaatggtgataagtacaatactacttattataaagatgaagttgtagttaataagcttaaagcattttctgtgcataaagataatcttgatgcgggtgataaaccaaaatgctattattgtgaatcatatgttgatcacgtagcgactttacaggttgaacattttagaccaaaggctaaagtcgatgaaattgataataatagtttatcccaccctggttattattggttgggtttggagtggagcaaccttttgttatcttgtccaagttgtaatggtaaaaatgcaaaaggtaatagatttcctttagttgatttcaacaatagagccagagcaataaacccaataggaaattcaccactttcatttgacagaacacattgtattgccaatcaatctcccttattagatgaagaaccattattaattaatccggagtatgaggatccgactccttatttgacatttaatgacgtaggacaaatacagggtatcggtgaaaaaggagaaaagacagttgatatattgaaattatatagagatcctttgttggcagcccgtcaggttaaattaaatgaaattattaagaatattgaattagcttgcgcagcaagagaaatgggtaaaattaatgatgatggtctaaaagtttggctagaagcagagtgtactaaagtcttagaattagataatgttagaaatgagtactgtttgtggggtagacatattattgcaaattttgaaagttgcgttgtttctaaaattgcgatatataaagacgagttacgaaatgctttccaagaagttagatag

SEQ ID NO: 90840 - DNA, 1314 bp, Acidovorax citrulli; identical to SEQ ID NO: 85946

SEQ ID NO: 90841 - DNA, 630 bp, Acidovorax citrulli; identical to SEQ ID NO: 85947

SEQ ID NO: 90842 - DNA, 1269 bp, Pseudomonas sp. MS586
atgcgcctggaccgtctccacattcagaattttcgttgctacgaagatgccacgttcgactttcagccagggtttaatctggtggtgggggttaatgggagcgggaagagttcgttgttgcaggcggttgccgtttcgttcatcgaactcggcaatgccatgaagccaagtcagacctctctaaaaaatgaagacattcgctttgtcatagatcgttttgaaaacagaagccgctttgagcgcaagttccctttgctggtacatggcataggcagtttcttcggagctatagactgggtcctgaaacgagatgcagaagacttgccccatcttgtagattcagtattcgacgccgagatagacaaactaaaacagaaaatcaacctggccattccggtcgatttgcctgtgcttgctttctaccgctccaatcgccgctggcaaggggtcggagtatctgctgagttcgccgcgaaacaacgcgtctcgcgcttcgatgcctacgttaactggttcgatgcagttgcggatctcagagaatttgaaagctggttaatcggcagaacgctggagcggatgcagaaccttcttgattccaacacccagtcacttgagttcgacgacgaactttactgggtaaacactgcgatcgagcgcgctattccccacgcacaaaatttgcgctatgacctccggctgcaaagcttgttgatcgacctggatggaaaaaccattcccttcaatgagcttagcgatggtcaacgcgggatgattgcattgttcgccgatatcgcccgacgcatgtgcatcctcaacccccacatgggcaaagacgtcctgaagaacacctcaggcgtggttatcatcgacgaactggatatccaccttcacccggcctggcaacgcagcatcgtgcctgcattgagacaggcttttcccaaagtccaattcatcgccgcaagccactccccacaaatcatcggcagcctgaaacctgaggaagtcatcctgttgcacaacggggatcctactcatccgcgggtcacctacggtctggattccagcagcgtgcttgaagaggtaatgggcgttacgcagcgcgaaccagagatcgaagatctgctgtccgagcttttttccacgttggaagataacgacctcgaaaaggcaaaatcacaacttgaggcgctgaaaaagaaagcccccgacctaccggaattcgccggcgccgaagcactgatcaggcgcaaggagattctcggcaaatga

SEQ ID NO: 90843 - DNA, 645 bp, Pseudomonas sp. MS586
atgaagcgagtgctcaaaggaactgaaccagcttcatttacagattggaaaaactcggcgaacgacgagtggagtccaacttacccaacgctacaaaacccgcaaaaacgggatttgcataatgccctgcttaaggagcaaggctttttctgctgttattgcggccgggaaatagatgcctcgaccagccatatcgagcacttcagacctcaagagcatttcgaagagctggcgttggagtttcacaaccttcatgcctcctgcctgcgagaaaccaagcccggcaatccgttgcactgcggccataagaagggcaactggttcgacgaaaaccaacacatttctcccaccgacgagaactgtgaacagcgcttccgatatctgcgaaccggcgaaatccagccaaaagattctgacgaccttcccgccacaaagatgatcgaggtattggcgctagacatcgcctacctcaaaaatcgacggcaggacacaatccgccgcctcttcgatgatgagttcgtcatgcaaatcagcgaggaagagcttgagcggttggtgacggcgatcagaaataccgcgattcccaatcaaaaacccttcgaccacatcatcgcccgctacgccgaacaactcctcggacgctaa

SEQ ID NO: 90844 - DNA, 1230 bp, Vibrio parahaemolyticus; identical to SEQ ID NO: 86310

SEQ ID NO: 90845 - DNA, 666 bp, Vibrio parahaemolyticus; identical to SEQ ID NO: 86125

SEQ ID NO: 90846 - DNA, 1413 bp, Vibrio parahaemolyticus; identical to SEQ ID NO: 86314

SEQ ID NO: 90847 - DNA, 645 bp, Vibrio parahaemolyticus; identical to SEQ ID NO: 86309

SEQ ID NO: 90848 - DNA, 651 bp, Hymenobacter sp. PAMC 26554
ttgcccggccgtggcagcccccggcagggcgtgcgcttcaaaacgccctacggctgggtgcgcctgcgcgacatgagcctcggctaccaaacgctggttgtctggctcaccgactttgccgataagctttttgtccggtatcctgacagcaagaatccgctggaggagccagctattgtgctcattgatgaaatcgacttgcacctgcatcccagctggcagcgcaagctgctgaagtcgctgagcgagatttttatcaatacccaattcattgccaccgcgcatagcccgctggtcgtgcaggcggccggcgacgccggggccaacgtggtgctgctgcgccgcgagggcgaccagacggtggtggtgccggatttgcccgacgtacaccgctggcgcatcgagcagattctgagcagcgagctgtttgacgatacctccccgctgtcgccccaaaccgaagcagatttgaaacgccgcaacgagctgctgctgaagaagcgcctcacggcgaaagacaaagcagaattagcgcagcttgatgcggcgctgactacccagcccattggcactaacgcccccgagcgccgggccgaggacctgttggcgcagctggcccgcaacctgggcaaagccgacgtgctgcaatag

SEQ ID NO: 90849 - DNA, 822 bp, Hymenobacter sp. PAMC 26554
atgattcagattaccaaaagccaacccgcgcccctacccctgcctagcagcggcacgcgccatcgccaaaagctggaggcccggcaagctgccgaccccgccgcctgccaggtgccggataataaagtgctggctacccgcgacggtatctataacgatgcgcgggtgaaggagcgccttcgggccgaccagcacgacaaatgctgctactgcgaatcatatttcagcagcaccagctatggcgatgtcgagcactttcggcccaaagctggctaccggcaagctgcggccgacgacttgcacaagcccggctattactggctggcctacgaatggagcaatctgtattttgcctgccagctctgcaaccagcgctacaaaggcaacctatttccgttggctgaccctacccggcgggctgtcgcgcatactgatgcgctggccgccgaacagccccttttgcccgacccggcaaccgaaaacccagcgactcacctaacattcgtgcaagatgccgcccaggccctggatgcgtgcggggcggcctgcattcaggttttcgggctcgaccgaccagaattgattaagcgacgtttggacaagctgaaatcgctgaagcaggctcactttctgagtggacttgacatgagtttgccgctgaatccagttattgaggcttattttcagaaactaagattaacgtatgctgaaagcgtagatatggttgcttatgccaagcaaatttgggaagccgccgctctggatgccgccgagtttgccggcatggtgcgggctaattttccggcgttaccccggcgctag

SEQ ID NO: 90850 - DNA, 1242 bp, Fusobacterium necrophorum subsp. funduliforme; identical to SEQ ID NO: 86156

SEQ ID NO: 90851 - DNA, 483 bp, Fusobacterium necrophorum subsp. funduliforme; identical to SEQ ID NO: 86157

SEQ ID NO: 90852 - DNA, 1242 bp, Fusobacterium necrophorum subsp. funduliforme; identical to SEQ ID NO: 86156

SEQ ID NO: 90853 - DNA, 483 bp, Fusobacterium necrophorum subsp. funduliforme; identical to SEQ ID NO: 86157

SEQ ID NO: 90854 - DNA, 1242 bp, Fusobacterium necrophorum subsp. funduliforme; identical to SEQ ID NO: 86156

SEQ ID NO: 90855 - DNA, 483 bp, Fusobacterium necrophorum subsp. funduliforme; identical to SEQ ID NO: 86157

SEQ ID NO: 90856 - DNA, 1242 bp, Fusobacterium necrophorum subsp. funduliforme
atgaagataaaaaaaatagaaataaaaaaacttaaaggaatcaaaaatctttctctttcttttgaaaatgaaggaaaacctttggatattattgtattagccggttcgaatggaacaggaaaaacaacgattttagaagctataaaaaatatttttgttggagattactcagattatgggaatgaaaatttcccagtaagaatggaaatattctttgagagtttagaagaggtagctatttctaaatccaaaatgtcttctaaggaaaccaatataaaacaatggaaaatacttaatgctttcagaaactattcgtcactaaaagaggagttagagcaagaattttttgactatcaattagcaaagaatctgaagattttacctaagataatttatttgcctaccagaacaaactttcaaaatgtaaatacaaaaacgactgcattaaaagctagcaatcattttgtcaatattgtagataatgaaatatttaaagacattccttcttatattgcgactagagtttactatgttgcaaatacacaagagaatttaactttaaaagaggctaaggaaaaagtagcagaggaaattaatagtgtatttaaaattttagatttggatattaaatttataggtttgtctaaagatgaagaaagcaatcctattttttcaaattctgctggggaagagtttgatattaacgaactttcttctggagaaaaacaactttttttaaggactctatccatacagatgttaaatcctaaaaattcgattattttaatagatgagccggaagtatctttacatccggaatggcagcaaaaaattatagaagtatatagaaaaattggaagtaacaatcaaatcattgttgccacacattctccacatattttaggaagtgtcagaaaggagaatatatttgttctagtaaaagatacagaagggaatatcacagtcaaaacgggagaagaactgtatgcttcctatggacaacctactgataaaatacttgaaggtatcatgaatttatcttctgccagagttcctgaggttgcgagtaaattagaaaatctcaggcaacttgtagataacaataaatataatactgaagaatttaaggagaaatccgaagagcttcacgaaatccttggagaaaaggatattgatttaatgctcattgacatggatgtggaattaaaacaaaaggagaatttaaatgctcaaagtgaataa

SEQ ID NO: 90857 - DNA, 477 bp, Fusobacterium necrophorum subsp. funduliforme
ataaaagaaaatctaaaaaaatctctgttaaaagagcaagaaggaaattgttgcccatactgtgaagtcaagattcatttagagagaagtcatatagaacacattaagccaaaagacaaatttccgaaatttctacatgaatatgataatatgattgcctgctgtgttagcaataaaaattgtggtgcgacaaaggcaaatcaatgggataatttgtttataaattctgttttggataatccggaggagtattttaaatatgatattaaaactgggagaatacttcctatagacgaagtaggatataaatttgacagagcagaaactacgataagatttctaaatttgaatgaaaaaaatttatgtgacaaaagaaaagtgtatatccttaaatttagagatactcaaaaagaatataggaaattttttcaagaattcccttctttaaaaagatatctgcaaaatgttctgacataa

SEQ ID NO: 90858 - DNA, 1242 bp, Fusobacterium necrophorum subsp. funduliforme; identical to SEQ ID NO: 86156

SEQ ID NO: 90859 - DNA, 483 bp, Fusobacterium necrophorum subsp. funduliforme; identical to SEQ ID NO: 86157

SEQ ID NO: 90860 - DNA, 1242 bp, Fusobacterium necrophorum subsp. funduliforme; identical to SEQ ID NO: 86156

SEQ ID NO: 90861 - DNA, 483 bp, Fusobacterium necrophorum subsp. funduliforme; identical to SEQ ID NO: 86157

SEQ ID NO: 90862 - DNA, 1242 bp, Fusobacterium necrophorum subsp. funduliforme; identical to SEQ ID NO: 86156

SEQ ID NO: 90863 - DNA, 483 bp, Fusobacterium necrophorum subsp. funduliforme; identical to SEQ ID NO: 86157

SEQ ID NO: 90864 - DNA, 1242 bp, Fusobacterium necrophorum subsp. funduliforme; identical to SEQ ID NO: 86156

SEQ ID NO: 90865 - DNA, 483 bp, Fusobacterium necrophorum subsp. funduliforme; identical to SEQ ID NO: 86157

SEQ ID NO: 90866 - DNA, 1242 bp, Fusobacterium necrophorum subsp. funduliforme; identical to SEQ ID NO: 86156

SEQ ID NO: 90867 - DNA, 483 bp, Fusobacterium necrophorum subsp. funduliforme; identical to SEQ ID NO: 86157

SEQ ID NO: 90868 - DNA, 1242 bp, Fusobacterium necrophorum subsp. funduliforme; identical to SEQ ID NO: 86156

SEQ ID NO: 90869 - DNA, 483 bp, Fusobacterium necrophorum subsp. funduliforme; identical to SEQ ID NO: 86157

SEQ ID NO: 90870 - DNA, 1242 bp, Fusobacterium necrophorum subsp. funduliforme; identical to SEQ ID NO: 86156

SEQ ID NO: 90871 - DNA, 483 bp, Fusobacterium necrophorum subsp. funduliforme; identical to SEQ ID NO: 86157

SEQ ID NO: 90872 - DNA, 1242 bp, Fusobacterium necrophorum subsp. funduliforme; identical to SEQ ID NO: 86156

SEQ ID NO: 90873 - DNA, 483 bp, Fusobacterium necrophorum subsp. funduliforme; identical to SEQ ID NO: 86157

SEQ ID NO: 90874 - DNA, 1242 bp, Fusobacterium necrophorum subsp. funduliforme; identical to SEQ ID NO: 86156

SEQ ID NO: 90875 - DNA, 483 bp, Fusobacterium necrophorum subsp. funduliforme; identical to SEQ ID NO: 86157

SEQ ID NO: 90876 - DNA, 1845 bp, Vibrio sp. 1048-83
atgcaacttcgatatttagccattccgcagtttcgtaacttgcgcaatctagaagtgagctttgccagcgagcttgagcccgtttctggcacactagggaatacgccggcaaaacggattcgcagccatgcgctgattggccagaatggcacaggaaaatccaatttaattgaagcgctgattaccctatttcgcgatgtcgatctcgaccgcgaagcggcatttgactacacattggaatacgaaattcgcggccacatcgtgcgtattcaggccgatactgccaaacaaaaacgcccttacgtttgggtagatggtgaccgtgtaagtcaagagtatctgattaaaaatgacccagcggacaaagtcccgcaagatgagcgtcgcggcccacggttattaccaacacacatatttgcctattactcaggccgcaatgagcgcattgaacagttatttcaggaacaccaacgccgatttaataaacgtcaggaaatcaccaccgacgaagttttatctgaagacctgctggaaaacttcgccgcctccgatgctgatattcgggcgataaaagaggctaaacgccgccgcgaggccaaattaaagcaagcaggcgacgatcgtctgcgccgcctgttttattgccggggcggccatagccagttggtgttactcgcctgtttattgtctgatgaccctgtgttcaaaaaggtactgaataatcttcatatcgaatcgttggaatcagcgctatttgtgctcaaagaacctcatcgcctgcgagaaaaacgccggggcggcaagttcgatgaaatagaaatcaacgaaggcgacccgcgcttttggtatgcacgtggcaacgtagtgagcgagtttctcgacaaactctggcaagtcgcctgggcgcctatcgaacaggaagccagcaagcaaattgactttcgtggccgcacagaaaaacaaaagcagctgtatttgtatgtacctaacaaagaaaagctgaaagagttaggcgaactggtcggcggccccgacagcttcttccgctatgccgaaggtgcttacattggtgatttgattgacgaagtgcgcatcagggtaaaaaaacgcgatgagtatggcggtaaagtgagttttacccagctttccgaaggcgagctgcaaatgctcactgtattgggcttaatgcgcatcacccgcgaagatcattgtttgtttttgttagatgagcccgatacgcatttaaaccccatctggaaactgcgctatttcgacgatattgaaggcgtgttgagttccgaaaaagattcactggcacaaggcgaatcgcaaattctgattaccacccatgacccgatgatggtgggctcgctcagaaaagagcaagtccacattattcgtaaaagcgaaggtaacactctagttgaacagccagacgagcacccgcaaggcatgggtgtatctggcttgctgaaaagtgaaatgtttggattaccatccacgctcgaccgccacaccttaaacacactgcaacgacgcaatgacttgctcgccaaacgcaagtatgaggggttaagccacgatgagcagcaagaattggattgcttggtggttcgcctcgacgacttgggtttttctcgtgagtaccgagacccaatgtatcaactctttatcgaacagatgtacaaagtgcgcagcaaaccgcttgatgaattactcagcgagcaagaactccaagagcaaaatgccttggctgaaaaaataatggaacaattggtaaaagcgcagcgtaaagaggatttgtcatcgcttgcgcaagagctggccgagaagttaaaggagtaa

SEQ ID NO: 90877 - DNA, 828 bp, Vibrio sp. 1048-83
atgcgcaaagtcatcattacaggcacaccaccagcggactgggttgctgaggctgatgccattaccgcgcagctgcttgccgctgcggatgatatcgctcgtcaagcaatcgtagataagaacgaaaaacactggcgtgatcaaaggattcgcggttggctaatgagtcagttcgccaataagtgctggtatacagaagcggaagaatctgtctcaccgattcacgtagatcattttcgtccaaaaggccgggtaaaaaatcttgatggcagctacgaagagggttattggtggctgactttcaattggaagaactacgtcatagctggccacttaataaatacgaaaaagagcgactttttccctttaatggagggagagcgccgtgccgcagtcaacagctcggaagttcaattaaaactcgaaggggcagtgttgatcgacccgttgacagatcagacgcgtttgatttcttacgaacgtgatgatgatggttgtattgccgtacttgctggggatattgatgacctagagaaattcaaagcagagaaaactattgaaatcttgggattaaaccgcattgaccgcttaaaccaaaaacgcggcaaaaaatgggatgattgtttaaaggacatacaagactaccgaggagcaagagcacatggtgcgcacgctctagtttggcttgtgaaagaaacagcaattgcccgtttgaaagagagaataaagtacgatgctgagttttcttcagttgcagaagcttgcattcgcaagcaagctccagaagccgttattgccgctgtgtttgagcggcgaagtaatatgtaa

SEQ ID NO: 90878 - DNA, 1746 bp, Lysinibacillus sphaericus; identical to SEQ ID NO: 90756

SEQ ID NO: 90879 - DNA, 732 bp, Lysinibacillus sphaericus; identical to SEQ ID NO: 85963

SEQ ID NO: 90880 - DNA, 1191 bp, Bacillus thuringiensis; identical to SEQ ID NO: 88646

SEQ ID NO: 90881 - DNA, 774 bp, Bacillus thuringiensis; identical to SEQ ID NO: 88647

SEQ ID NO: 90882 - DNA, 1305 bp, Tistrella mobilis
atgccggccggcatcatcggggtgccctgcctggcgccggccggccgccggggctctgtcgccgaggacctgatcttgtacgccgacacgctgtcgatctatgattttaaatgcttcggcaaggcggtgctgcggctgcaccacccgcggcggcgcaatgatctgcggctgaagaacgttaatctggtcctgggcgacaacggcgccggcaagtcgtcggtcttgcgggcgctggcgattgccgtgcttgcccccgctctgctcggctccggtttcgtgccttaccggctggtgcgccgcagcggtcaggaagaggtcgatggcaggcaggcacttctcaaagttgatgggatcgtcgacgctgcggagacggaatatcggccgtcacgccgcaagttcgagttgctggccaagatagatgcgcggccgggcgatcgggaccggttgcatctcgacagcacccccgcaacaccgattgcagcgctgctcgacgacgatacgtcgccggcctttttcgtcgtcggctacggcgcgacccggcgtgtggagacgggggactatgtgccgagcagcgcccggcgggcgcgtgggctgcgctaccagcgcatcgccggcctgttcgaggatcacctcgccctgcgtccgatgcaggactggctgcccaggctgaggtaccgggcgcccgaccgctatgatgcggcggtgcgccggatcaacgacgtgctgcccgaagacatccgctttaccggcgagatcgattcgaacgaccagtatctctttactttccgcggcgtcgagacgccctttcccgctctttccgacggctacaaggccttcatcggctggattgccgatctcctcggccatatgacggacgttctgccggacggcggggagctcgacgatctggcgggtatcgttctggtcgacgagatcgacctgcatcttcatccgtcctggcagcgacgcatcgtacccgatctggcgcgcgtatttccgaaactgcaattcgtcttcacatcgcatagccccatcgttgcggccacggtggaaagcgcgaatgtcttcgtgaccgataccgacgatcatggcctggccacgatccgccagctggacgaaaagaccctgggccggacaccggaccagctgttgctctcgggctatttcggcctggagacgacgcggcccgaaaccttccgcaaagaggcgcaggatctgttcacacgggcggcaggaggagacgggcgcgctgcgctggagtatctggaacgcctggtcggcggcagcgagcgtggtggcgcatga

SEQ ID NO: 90883 - DNA, 555 bp, Tistrella mobilis
ttgaacgggccgggcggaggtggggggagcggatattactggctggcctatgacgtcgagaattatctcggagcctgcaagatctgcaacacgatcatgaagggcactctgttccccgtggcaggcacgcgctgcgtcgcgccgggtaccccggcccagctggcgggggagcgggcctatctctgccatccattgaacccgtcggacgcagatccgcaggatctgatcaccttcgacggcgttctcgccatccccgcgcacgcatccggtttcgatcgggcgcgggccgatctcatcatttctttattccgcctgaacgaccgggaggaactggtcaacgaacgggcccggcaaatcgttcttttcggcggctattttgagaagcaccaccgtggagaccggagcccgaggatcgcagagatcctgaactttgcagacaatccgggcattccccatgcatcatgcgttcgggcacatgcccgcatgtgggcggacgatcccgggcgtgcacgtgaaatctgggcactctgcgagaaaatgaccttctcattgtga

SEQ ID NO: 90884 - DNA, 1752 bp, Pseudomonas aeruginosa
atgcagttgttgcgcattcgcattcctaccttccgtaatcttcgcgatctagacatcgctttcgcaacgcacttgcaggctatggagggggctccccaggatgtgctgccaaagtctatccgtagccatgcgctgattggccaaaatggcaccggcaaatcgaatttgttagaagcgttgatcaccatctttcgtgatgtggatctgaaccgcgaagcggagttcgattacacgctggaatacggcattcgtggccatgttgtacgtattgaagctgataaggcgaaacagaaacgtccttatgtttgggtcgatggaaaaggcgagtcgcaaggctatctgctgaagaaccgtgcgctgctgcccactcatgtctttgcctattattccggccgcaacgagcgtatcgaggcgttgtttcaggagcaccagcgtcgcttcaacgagcgtcaggaaatcaccacagacgaggtgctgcctgaacaggtactggaaaactttaccgggtccgaggcggacatccgcgcggtggaagacgccagacgccggcgtgatatacggctcaagcaagcgggcgacgaccgccttcgtcgtctgttctactgccgtggtgggcacaatcagctggtgctgttggcctgcttattgtccgatgacccggtgtttcagaaagtgctgaagaacctgcacatcgagtcgctagagtccgcgctgttcgtacttaaggagccgcaccggctgcgagaaaagcgtcggagtggcaagttcgacgaacaggagctaaatgagggcgatccgcgcttctggtacgcacgcggcaacgtggtcagcgagtttcttgacaagctctggcaagtctcctgggcgcccattgagcaggaggagatcaggcagatcgactttcgtggccgcactgaaaaacagaagcagctgtacctgttcgtaccgagtcaggacaagcttaaacaactgggcgaactcgtcggaagcaccgacagctttttccgctatgccgaaggcgcttacatcggcgacttgattgacgaggtgcgcatcacggtcaaaaagcgcgatgagtatggtggcaaggtgagctttacgcatctgtcggaaggcgagctgcaaatgctcaccgtgctaggcctgatgcgcattacccgcgaagacaattgcctgttcctgctcgatgagccagacactcatctgaatccgatctggaagctgcggtacttcgatgacatcgaaggtgtgctggcctcggatgacggcacgctagtgcaaggtgaatcgcagatcctcctcaccactcacgaccccatgatggtgggcagccttaagcgcgagcaggtacatatcctgagacacaacggtagtcggacagtagtggatatacctgatgaacacccgcaaggcatgggtgtgactggactccttaagagcgagttgttcggcctgtcgtccactctggatatcgaaaccgagcggcgcctgttccggcgcaatgagctgtttgtaaagcagccgcgctcgccagcagaagatgctgagctgtcacggctttccgccgagctggctgatttgggtttttctaccgccgactttcgcgacccagattacgccttgttcgtgcgtaagatggcgcagcaccgccgttttagaaaaccagcgctaacgccggaagagcaagctgaacaagatgcgattgcagactcaataattgacgaaattctgcgtgaggaggccgctgagtga

SEQ ID NO: 90885 - DNA, 879 bp, Pseudomonas aeruginosa
gtgatttggatcgacctcaagaataaatatcctactactgctatcccgaactgggatcccaaagctacagctcagcagtggattccttggacgcaggagagatgggatgcatggttagctagatccaaacagttggttgcagaattagcggcgcttgatgcggcgggtaaacgtgacgagcgaaacgccttgatagatgccaatagtgggcattggggagagctgaaaggctggttattagcattgtcggctggtaaatgttggttttcggaagttcgtgagctgtactcacactatgacgttgagcactttcgaccaaagaaagaagctaagactttaggttctgctgtacgtgatggctactggtggctggcttttgattacatgaattttcgtgcttgcggtaatgtcggtaaccgtaagaaagggggttggtttccgcttaaagatggatctctctgctcaacatttgctgaccaatgtgaggagtcggagacacgttatctgcttgatcctattgacgatgacgatgtggatttgatcgccttcgatgaggagggaaaagtcattcctatgcctggtacatctgagtgggatcaacagcgtgtacaagaaactgttactcgactgaagctcaatgatcatgtgcctttagctgaggagcgccggaaggtttggcagaaagttgacggtcttattgaggattttaaggctgctaaagcacgttgtggagggaataacccagcggcgaaggccaagcttttagaggtgcgcagtaacattcgagaaatgacaagtcggactgctgaactatcggctgttgctcgttggtgcgtactttttcggaacgatccgcttttatccaagctagtaagctag

SEQ ID NO: 90886 - DNA, 1356 bp, Pseudomonas fluorescens
atggaaatcagaaaaattcgactgaataacgtcggtcgttttgccgacttggaagtcgcctttgcgcctaccgaaaagcatgcgtcgaaggtgacggtgtttgtggggaacaatggggcggggaagacgacgattttgaagtcgatagccacgtcgttaagttggctggttggccgcattcgcaccgacaatggcggcggcagtcccatccaagaggatgtggtcactaatggtgagcgattcgcgacaatcgaggctgaagtcagcggtataactcacccgtcagcatcagcctcggcgacctattcatggacacttgctcgcaccttgcggggccataaagcaaaggtaaatagctctcttactaagttaactgagctggctgaactctatcgcgttcatctagggttgattgatggcagcggctcacttcccctagtggccttctaccctgtcgaaagatctgtccttgacgttccactaacaatccgaaaatccgaaaatccattcgatcagtttgatggatacgaaaacgctctaaatggtggcgtagatttcggacggttttttgaatggttccgtgacagagaagatactgagaacgagcagggcatatcctcagccgtaatggaacagctggaaaaaatctccagtacggatgaaaaactggtatctgagctgaaaaatatgcacctagcatcacgtgatcctcagctaaatgccgtgcggaccgccgtcagcaagtttatgcctgactttagcaaccttagagtccagcgaaaacctagattgcatatggctatcgacaagctaggcaatacactcagtgtttctcaactttctcaaggggaaaaatcactgatggcacttgtcggcgacattgctcgccgcttggcactcatgaatccctcattgaagaatccgcttgaaggcactggtgtcatcctaatcgacgaggtcgaccttcatctgcaccctcaatggcaacgccgcctaatccagcaactcactgaaaccttccccaactgccaattcatcctgacgacccattccccattggtgatcagcgataccaagaacgtcctgtgctatgtcctcgacgatggcgaactggaggagcgcaccggcctatacggccttgatgccaatcaggtactgctcagcgtcatggacacagatatacgcaacagtgaagttcagtctcgactggatcgcttgctggagttgctgcaagaaaaaaagctgaaagaagccaatgcactgttcgaagagctgtccactgacctgccccctggccatatcgaactgaccaaagccgcccttctgatccgcaagctggagttgcgcagtgcgtaa

SEQ ID NO: 90887 - DNA, 630 bp, Pseudomonas fluorescens
gtgcgtaagatcataaaaggaaatgaaccagcagaattgacgaaatggatgcgcgacaatccgaaaggtcgctactgcgacctaacccacgaagaaagaaacagtattcgccaagcctgtatcgaagagcagcatggtttgtgcgcgtattgctgccatgcaattacccaagagactgcccataacgaacacgttgcggcccgggagacccgcccccatcggacgctcgattattcaaatatcgtcgccagctgcaaccgcagcaaacagtgtggcaaagcccatgcacatcagacattgccactgacatccttgatggacgaatgcgaaaccgaactgaagttttatctatcaggccgtgtggcgggtttgagccccagggcgatcacgtccatccaagtgctgaaccttggcgactgccgtgaaaacaatcgcacgctgttcagcgccagaaaatccattcttgatacgctgctcttcgactacggaatggaaggcaatgaccttgaagccgaagacggcgagcttctgaagatgctactggaagacttaagactgcccgatgcgcacaatcggctgaagccttttgcccccatcctcgtaaatgtcatccgtcaactaaccaactga

SEQ ID NO: 90888 - DNA, 1215 bp, Hyphomonadaceae bacterium UKL13-1
atgtcggtgcgcaatgtgcgctgctttggtgacccgcccgagtcattgtctttggctgagcccgacaacgaggcacagcccgcccgctggacggttattcttggcgcaaatggggttggcaaaacgacgcttttgagggctttggcccttctgaggacgcagtttgagcctgaagtttcctatattggaatagtttggggtcgtttcaaacgtcaaaagctggacacctgtctgttttcttatcgaactagtcagagtgatgcaaagctaagtgcacgcattagatttgcgactgagagcgggcattttctaacggctaccatttccccgtctcaggtcctgccgatagcggcctatggcgcgggtagaaattggaatgatctttctgcggacgatttatggcctcaaggaacattatttgatcgtagcgccgtggttcgaaatccaagtgaaatcctctctcgtttggaatttcgggagatcaaagaacagataaagggtccgtcgcgctttcaaatgtaccgcgatgccttgaccaatggcgtgttgccggatgtttctgatttgcgcactgttttcgcagagaacgataaggctgtcgtcgaattcaagacccaagacggctggataacacttgacgatatgtcctggggctatcaggtgtttgctgcttttgccgctgattacgccagtcgattgattgattggtatcccgactccgaggcgccgctgaaggaacccggcatttgcttgattgatgagcttgatcttcacatgcatcccaaatggcagcgggaagttatcagccaactctccgaagtctttccagcaacccaattcatcgtgaccgcccactcgccgttggttgtgcaagcggctgaagaagccaatctggtacttctagagcgctatgaagatgacaagtcacgagtgcggatccgcaatgatgttgaggcgatacagggctggcggatcgatcaagttctgacaagcgatctttttgggcttgagagttcgcgtccaccgtcgtttgcgaagagccttcaagagcgaagtgatcttctgaagaaggacaaactttcaaagccggaacaagctcgcctcaatgcattgaatgatgttgcaatgagtttgccaactgaagatcaggactgggaagcaagggccaagcgtgcgttagctttagcatccgatgagctcaaatccgcgagctag

SEQ ID NO: 90889 - DNA, 774 bp, Hyphomonadaceae bacterium UKL13-1
atgatccgtctaacccgtccacctgagcctccgaccttcacacgcgtcaacggcaaagcgcgacgaaaacgcgaagagttggagcaagcatttgccgccagtccagcattgcggggcgggcaacaaaaacctgtctttgacagttccgtttgggcttcagccaagcccgccctcatggcagcacaacacaaaaaatgtgccttctgcgaaagcagagtctcgcatatctcttatggggacgttgagcatttccggccaaaagcaggctatcattccaaacgaaatgaaccgcttatccagccaggttattggtggctagcttactcttggaacaattattcggttagctgccagatatgcaatcaactgctcaagaaaaacctctttccactaggtccaaacggcgtgcgtgctactgggccggctgatgaccttttggcggaagatgcgttgcttgttgatccgatgctggacaacccattggctcacatagaatttcgtgaagagctggcggtagctcgaggtgcgtcagagaagggagccgcgacaatcgacattctgggcttgaaccgacctgacttatcggaatctcgccgcgaacgctgggttcttgtccgggcattgatcattgaacgaatggccaagatggaaaatggcagtccaacactcgaacttgacactctccttgttgaagcaattaggccagaaaaagagtattccgcaatgtcacgagacctcttagctcgtttagctccagaactgcttgcgccctag

SEQ ID NO: 90890 - DNA, 1338 bp, bacteria symbiont BFo1 of Frankliniella occidentalis; identical to SEQ ID NO: 88978

SEQ ID NO: 90891 - DNA, 582 bp, bacteria symbiont BFo1 of Frankliniella occidentalis; identical to SEQ ID NO: 88979

SEQ ID NO: 90892 - DNA, 942 bp, Corynebacterium variabile
gtgatcagctactacagctcaaagcgactctgggcgcaccacaacgccagcaggaaaaccgctgtcctgaccaggagccgtaccgcggggtacgacggttgcctgtctccgttgtcaagctacaagcagctccaggactgggtgaaggcggcgaccctcgccgatttccagcagcagtcccgccagcgtgaggtgaccggagcgacggggctcggtgaccggcttcggggcattgccgatgccgtggataccgtcatgaagaacgaggggtggtcagggttccactacgacttcgctgaagaggaactggcgatgttccacccggagcacggtgacctgctgatgaccttcctaagtgacggtgtttgcgcgatggccgcactcactgcggatctcgctcaacggtgcgtccgcctgaacgggcatctgggggcggatgcgccccgtcgtaccagtggcattgtcctcatcgatgaagtggacctccatctacatccagcgtggcagcaccaggtgctgcccgccctgactgaggctttcccccgggtccagttcgtcgtgagcacacacagcccccaggttctgagcacggtgccgcaggaatgcatccggtcggtgttccaggatgctgacggagcctggcacgcggaggaaccacagcggctggtgaagggactcaagagttctgtggcacttcaggagatcatggacgtggatcccgtgccggcagttccggaggcccgtctcatcgaggagtacaccgccctgatcgagaacggacagcaggactcggacgaggggcgggacgtgcgtcaccgacttgaggagttctacggtccgaagcatccggtcgtggcggacgctgaccggctgatccggttccaacggatgaagttgaggtcacagtctgcggcaccgcggcgggaagctgaggagagctga

SEQ ID NO: 90893 - DNA, 654 bp, Corynebacterium variabile
atgcgagggttctcccggccgtcaccaggacctgaatgcctgaaggcagtgcccgtcgggacaccgtggggagatttcggttcttcctgcaaagaccaggttcgctcggcgctgcggatgatgcagacaggccaggggtcggcactgtgcgcatactgcgaatccgtcctgggaccgcgttcaggtacacatatcgagcatttcgtttcccggagcagagaccccggtctcacctacgagtggcacaacctcttcctgtcctgtggacatgccgaccactgcggccaatacaaggacagtcgcaaggcctcttcgtgcgacctgtccgacctgatccgcccggactctaaagatcccgatgcctacctgcacttccactcgtcaggtgaagtgtgggtgcgggaggggctgagcggtggtgaacgtacgcgggcacagacgacgatcgatgtgctcaatctcaatgcgccctcgctcaaggctgcccgacgtgcgctgataacccaggccagggacatgatcctgcaggacctggacttcctcgaggggctggaggacgaggaccgacaggaagtcctcgcggaggatatcgacgctttccagtcggggccataccctaccgcgggccgccactttttcacccatctggtctaa

SEQ ID NO: 90894 - DNA, 1434 bp, Grimontia sp. 96-237
atgaaaatagataaaataacgcttgagaacttccgttgttatacaagcttggaaataagctttcacccagaaatgacagtactggttgccaacaacgggcaaggtaaaacgtccattctcgatgcagtgcgtgtcgctctttggccttttgtcagtcaatttgacttggcgaataccccatttaaagatcctgctaacaccatcactattgatgatgtaaggatcatcaaagcagacaatgctaaaagagcagctggctttggtgttttagatgaaatggtgcgcaagttcccggcatctgtcactgctactggagattacggttcaggtccgactcaatggcaaaggtaccgtgacagtgaagctgcaaaatcacagacaaaagatgataaaaattgtcgtgatctaaaagcatttgcaaaagacctgcagaaacaagtgcgagatctgacattaacgccagttacattgcctgtgtttggttattacggaacaggtcgactttggaaagagaagcgattaactgaatccaagcgtggtaataatgcaaatgatgagaacattcgaacgttcgcactacgtgattgcctagacccagcttccagttaccgccagtttgaagattggtttactgatgcttataaaaaagtgttggagcaccaaattgcgcagttacaacaaggggcaacatttattgatgttgatccaaaactaaaaactccagtgaaagttgtacaagacgcagtgaatgaggtgttgaagccagtaggctggaagaacttacagtttagtcagcgtgatgatgaatcattagttttacggcacgacgattacggcgtaatgaaagccgataggttaagtgatggcattaaaaacatgcttgccatgattgctgatattgcctatcgcgctgtcttactgaacgggcatttaggggaagaagcagcgagaaaatcaccaggaattgtaatgattgatgaggtggacatgcatcttcacccacaatggcaacaaacagtgattggttcgttacgcaccgcttttcctaaaattcagtttattgtcactacccatagtccgcaggtattgtccaccgtttcggcagaatcaatccgcgttttaaaacatgaaactgattctaattcaggggagctagtgtcagctgctgaacaaaaaggtatgcagactattggtatcccgagcagtgacatcctcattgattaccaagaagtgaacccaattccacctgtacaggaggcacaatgggttgctgaatacactgcactcattgagcaaggccaacacgaaactaataccggcaaaacactgcgacaaaaactcatagagatatatggagactctcatcgtgttttattggatgcagataagctcattcgcttccaatccttcaagcaaaaaagcaagaaggattaa

SEQ ID NO: 90895 - DNA, 687 bp, Grimontia sp. 96-237
atgcataaattgaatcgaggaaatacagaagcgcctcagtgtctaagtgactatgatcacaatactcagacttgggatgatttcggtggtgaatgcaaaaagcgactgcgagctgcacttgcacaaatgcaaggtatacccggcgtaaccacggaagatgcatctgaatatggggtgcgttgtgcctattgtgaggatgctattcaccacgctggacacattgaacattttcgccgcaaaaatagaaatcattttccagagctaacctttgaatggaataacttgtttttggcttgtggctctaatgaccactgcggtcattataaagaccgcagaggagctgatgcctataacccagataacctaattaagcccgatgtagaagaccctgaagattatctttattttcattcctctggtgaggtcaggccgcgtgtgggtatagatgcaaacaaggaacttaaagccaacgaaaccattcgagtgtttggtctaaaggatcaaacgcttacaagtagtcgagcccgtgcattaaaaacttataaagaaaagatgcttgatgaattagatgaaatagccaattgggaacctgagttaatagctgagtatatccaacaagaaattgaaaacacccaatggcaagcgttttctacaacgattaaacacttcttagcaggtgcctgctaa

SEQ ID NO: 90896 - protein, 362 aa, Cyclobacterium marinum DSM 745
MTENLNNNVNSGVQTNVGMEFQKHCTLYLFLDKYEQLKSERYFIILEHLEDIVFGYLDENEILTKIETYQAKKSTNKWVLSGLFEIIKKIAETSQAILNDTHPKGNGFTQQNYFATNHTVEIKTQINKTKYLATINETNSEVDYLDIDQELKNKITEGNDSISFSPEDIESLDNLTFKYIDISRTPKAQLEQLHGKFISVFGDSIIDHKAALDTFLYHLKEIESTFNQGNIAKLKDSSKRIESSEISNILNILTTKKLAFEFWRQKGELICQNLGISLFDINTFKLHFLNSFDEFKDLNESEHRKIYSFIVDNKQVFSNHYTDNDCIVAFYNEFNMKKSTTLRDIQLKAAVSAAYIEIKSTL

SEQ ID NO: 90897 - protein, 576 aa, Cyclobacterium marinum DSM 745
MKVKLDIEKILIYSEVNDKYFFTEFKDKLNVIYGKNTAGKSTLIQLILYCFGINDNKIKLSEILAEEIFVRVDCIIKKDATPEKYTFLRQDETLLIRDNNGKILRFNGIGSDNSAEHIKLKKYFNELFDFNLLLESNSGITDAPIETIFLPYYVSQDVGWVYLRKSFSNLNFYKNFKEDFLDYYLGIVNVTDREKKREIENTIRGLQQQIAFFTNVERENKDFEVSKIIDSSLSGKANELIESIASVKSELLELENAYVKESNKLTFYNQRLSVVSKVKRNHVNQFPGTDNCPTCTQILPKNIEGIYSYFQADNDTINLQHDLKEKIKNAQSKLNSLNKKIEKARSSIESTHVAYKKYSESEITLEKWIYNKANIQLYDNLVSQVGKLQITLSEERDNLKDYKTDDEILLERQKKNNSFKKTYLQNNVNLGLPTLDEERFYKLYDISSFPFQGVQLHLAVLSYHFAFNKLLTESTDIHRLPFILDSVFKEDIDGGNKDNILKFISSNFPTDTQTILSIADDKNIDSRIEYYSKEIFKGNAHLICIGNGIEKKALLKNNDNEQDDLIEESFEIIETV

SEQ ID NO: 90898 - protein, 364 aa, Leptospira interrogans str. 2002000621
MNKNIKHDLVTKKVREKAGAISSNRFDYQKDWAICKIIELDEKGMEYAIIMEHHEDVVTVNPFSDPKEIHFFQIKTSNKNWTLQSLTKKESNLSIIGKMADSHKLFPYGDSFSFCSNSPYSLSLKDSDNKSQDFECLSINLINEDEIKKIKETLRDDGLSEIDIDNFLQKLILIRLKIDKSSHCAIAKAKLIDFIEKKYGSIPYRPGALYKTLFEEVKRKTNYEDSVGTYDELVDNKGITKSQFSAMIQVALANSIPKIIEIRNFLQNKLNFENAPLRLVASLLANLQSIYIDRQEQNIQVQKLLTEVVNTVGNLTSEELDLGLWVNIKKISGIIGHTDLKSKEYIYTSIGLSIYERLESSPSD

SEQ ID NO: 90899 - protein, 570 aa, Leptospira interrogans str. 2002000621
MRNLKFNEVLILSLKEKKAFRLKLGKKLTVVHGKNESGKSTLLKSIYWAFGADPAKIHRNWSVIDPIVCVNFDVDSKKYSILRYKDKFSLFSENSELIGNYSSVGKELTPELSKIIGYKLVLTDRKNKAVLPPPAFIFLPFYFDQDKSWVEAWSSFSNLEQFTNWKSPVIDYHSGIKTDEYYVFKSKKDFLKARIKETQVQITQYERIENTIRKRNSNIIIEIDEEEYKKQLQELMENLANLRSKQEDYRLEYRKLTEHVHSLIQQEAILKSKIQNINKNYKHSLTLPELIYCPTCGADYKNNFEVRFRLADSEEQCIEFLTDIQNEKIVYEEKIIAFKNKLNSVDLNLSQLNKEIETGKEKISLKQYLEIEGKNQAQKAVHNFQNRLKKVLGHRNVKLNKIDEKLQSFNNDDRKNEVIATFENSMRKNLKSLNASGVSEETFKNITGTIRELGSLGPRALLAYYFAYLETIKQNKKGIFCPIIIDSPNQQAQDPFNHKAILKFIQGNQPEGSQIILGVEELHSLDGQKNIIQLVGKKSLLKSDQYQQVKKLLDPYLASIFESDSIESKS

SEQ ID NO: 90900 - protein, 231 aa, Leptospira interrogans serovar Bulgarica str. Mallika
MNKNIKHDLVTKKVREKAGAISSNRFDYQKDWAICKIIELDEKGMEYAIIMEHHEDVVTVNPFSDPKEIHFFQIKTSNKNWTLQSLTKKESNLSIIGKMADSHKLFPYGDSFSFCSNSPYSLSLKDSDNKSQDFECLSINLINEDEIKKIKETLRDDGLSEIDIDNFLQKLILIRLKIDKSSHCAIAKAKLIDFIEKKYGSIPYRPGALYKTLFEEVKRIMKIQSEHMTNW

SEQ ID NO: 90901 - protein, 570 aa, Leptospira interrogans serovar Bulgarica str. Mallika; identical to SEQ ID NO: 90899

SEQ ID NO: 90902 - protein, 314 aa, Leptospira interrogans str. 2002000626
MEHHEDVVTVNPFSDPKEIHFFQIKTSNKNWTLQSLTKKESNLSIIGKMADSHKLFPYGDSFSFCSNSPYSLSLKDSDNKSQDFECLSINLINEDEIKKIKETLRDDGLSEIDIDNFLQKLILIRLKIDKSSHCAIAKAKLIDFIEKKYGSIPYRPGALYKTLFEEVKRKTNYEDSVGTYDELVDNKGITKSQFSAMIQVALANSIPKIIEIRNFLQNKLNFENAPLRLVASLLANLQSIYIDRQEQNIQVQKLLTEVVNTVGNLTSEELDLGLWVNIKKISGIIGHTDLKSKEYIYTSIGLSIYERLESSPSD

SEQ ID NO: 90903 - protein, 190 aa, Leptospira interrogans str. 2002000626
MRNLKFNEVLILSLKEKKAFRLKLGKKLTVVHGKNESGKSTLLKSIYWAFGADPAKIHRNWSVIDPIVCVNFDVDSKKYSILRYKDKFSLFSENSELIGNYSSVGKELTPELSKIIGYKLVLTDRKNKAVLPPPAFIFLPFYFDQDKSWVEAWSSFSNLEQFTNWKSPVIDYHSGIKTDEYYVFKSKKIF

SEQ ID NO: 90904 - protein, 364 aa, Leptospira interrogans str. 2002000624; identical to SEQ ID NO: 90898

SEQ ID NO: 90905 - protein, 570 aa, Leptospira interrogans str. 2002000624; identical to SEQ ID NO: 90899

SEQ ID NO: 90906 - protein, 364 aa, Leptospira interrogans str. 2002000623; identical to SEQ ID NO: 90898

SEQ ID NO: 90907 - protein, 570 aa, Leptospira interrogans str. 2002000623; identical to SEQ ID NO: 90899

SEQ ID NO: 90908 - protein, 364 aa, Leptospira interrogans serovar Muenchen str. Brem 129
MNKNIKHDLVTKKVREKAGAISSNRFDYQKDWAICKIIELDEKGMEYAIIMEHHEDVVTVNPFSDPKEIHFFQIKTSNKNWTLQSLTKKESNLSIIGKMADSHKLFPYGDSFSFCSNSPYSLSLKDSDNKSQDFECLSINLINEDEIKKIKETLRDDGLSEIDIDNFLQKLILIRLKIDKSSHCAIAKAKLIDFIEKKYGSIPYRPGALYKTLFEEVKRKTNYEDSVGTYDELVDNKGITKSQFSAMIQVALANSIPKIIEIRNFLQNKLNFENAPLRLVASLLANLQSIYIDRQEQNIQVQKLLTEVVNTVGNLTSEELDLGLWVNIKKISGIIAHTDLKSKEYIYTSIGLSIYERLESSPSD

SEQ ID NO: 90909 - protein, 570 aa, Leptospira interrogans serovar Muenchen str. Brem 129; identical to SEQ ID NO: 90899

SEQ ID NO: 90910 - protein, 314 aa, Leptospira interrogans str. UI 12758; identical to SEQ ID NO: 90902

SEQ ID NO: 90911 - protein, 507 aa, Leptospira interrogans str. UI 12758
MIQLFCVNFDVDSKKYSILRYKDKFSLFSENSELIGNYSSVGKELTPELSKIIGYKLVLTDRKNKAVLPPPAFIFLPFYFDQDKSWVEAWSSFSNLEQFTNWKSPVIDYHSGIKTDEYYVFKSKKDFLKARIKETQVQITQYERIENTIRKRNSNIIIEIDEEEYKKQLQELMENLANLRSKQEDYRLEYRKLTEHVHSLIQQEAILKSKIQNINKNYKHSLTLPELIYCPTCGADYKNNFEVRFRLADSEEQCIEFLTDIQNEKIVYEEKIIAFKNKLNSVDLNLSQLNKEIETGKEKISLKQYLEIEGKNQAQKAVHNFQNRLKKVLGHRNVKLNKIDEKLQSFNNDDRKNEVIATFENSMRKNLKSLNASGVSEETFKNITGTIRELGSLGPRALLAYYFAYLETIKQNKKGIFCPIIIDSPNQQAQDPFNHKAILKFIQGNQPEGSQIILGVEELHSLDGQKNIIQLVGKKSLLKSDQYQQVKKLLDPYLASIFESDSIESKS

SEQ ID NO: 90912 - protein, 364 aa, Leptospira interrogans str. UI 13372; identical to SEQ ID NO: 90898

SEQ ID NO: 90913 - protein, 570 aa, Leptospira interrogans str. UI 13372; identical to SEQ ID NO: 90899

SEQ ID NO: 90914 - protein, 364 aa, Leptospira interrogans serovar Pomona str. UT364; identical to SEQ ID NO: 90898

SEQ ID NO: 90915 - protein, 284 aa, Leptospira interrogans serovar Pomona str. UT364
MRNLKFNEVLILSLKEKKAFRLKLGKKLTVVHGKNESGKSTLLKSIYWAFGADPAKIHRNWSVIDPIVCVNFDVDSKKYSILRYKDKFSLFSENSELIGNYSSVGKELTPELSKIIGYKLVLTDRKNKAVLPPPAFIFLPFYFDQDKSWVEAWSSFSNLEQFTNWKSPVIDYHSGIKTDEYYVFKSKKDFLKARIKETQVQITQYERIENTIRKRNSNIIIEIDEEEYKKQLQELMENLANLRSKQEDYRLEYRKLTEHVHSLIQQEAILKSKIQNINKTINIH

SEQ ID NO: 90916 - protein, 364 aa, Leptospira interrogans serovar Australis str. 200703203; identical to SEQ ID NO: 90898

SEQ ID NO: 90917 - protein, 142 aa, Leptospira interrogans serovar Australis str. 200703203
MRNLKFNEVLILSLKEKKAFRLKLGKKLTVVHGKNESGKSTLLKSIYWAFGADPAKIHRNWSVIDPIVCVNFDVDSKKYSILRYKDKFSLFSENSELIGNYSSVGKELTPELSKIIGYKLVLTDRKIKQSYLPQLSFFTVLL

SEQ ID NO: 90918 - protein, 364 aa, Leptospira interrogans serovar Lora str. TE 1992; identical to SEQ ID NO: 90908

SEQ ID NO: 90919 - protein, 570 aa, Leptospira interrogans serovar Lora str. TE 1992; identical to SEQ ID NO: 90899

SEQ ID NO: 90920 - protein, 292 aa, Leptospira interrogans str. FPW1039
MEYAIIMEHHEDVVTVNPFSDPKEIHFFQIKTSNKNWTLQSLTKKESNLSIIGKMADSHKLFPYGDSFSFCSNSPYSLSLKDSDNKSQDFECLSINLINEDEIKKIKETLRDDGLSEIDIDNFLQKLILIRLKIDKSSHCAIAKAKLIDFIEKKYGSIPYRPGALYKTLFEEVKRKTNYEDSVGTYDELVDNKGITKSQFSAMIQVALANSIPKIIEIRNFLQNKLNFENAPLRLVASLLANLQSIYIDRQEQNIQVQKLLTEVVNTVGNLTSEELDFRVCGVKTLKKYREL

SEQ ID NO: 90921 - protein, 149 aa, Leptospira interrogans str. FPW1039
MRNLKFNEVLILSLKEKKAFRLKLGKKLTVVHGKNESGKSTLLKSIYWAFGADPAKIHRNWSVIDPIVCVNFDVDSKKYSILRYKDKFSLFSENSELIGNYSSVGKELTPELSKIIGYKLVLTDRKIKQSYLPQLSFFYRFTLIKIKAG

SEQ ID NO: 90922 - protein, 364 aa, Leptospira interrogans str. 2003000735; identical to SEQ ID NO: 90898

SEQ ID NO: 90923 - protein, 570 aa, Leptospira interrogans str. 2003000735; identical to SEQ ID NO: 90899

SEQ ID NO: 90924 - protein, 364 aa, Leptospira interrogans str. 2002000632; identical to SEQ ID NO: 90898

SEQ ID NO: 90925 - protein, 570 aa, Leptospira interrogans str. 2002000632; identical to SEQ ID NO: 90899

SEQ ID NO: 90926 - protein, 364 aa, Leptospira interrogans str. 2002000631; identical to SEQ ID NO: 90898

SEQ ID NO: 90927 - protein, 570 aa, Leptospira interrogans str. 2002000631; identical to SEQ ID NO: 90899

SEQ ID NO: 90928 - protein, 364 aa, Leptospira interrogans serovar Bratislava; identical to SEQ ID NO: 90908

SEQ ID NO: 90929 - protein, 570 aa, Leptospira interrogans serovar Bratislava; identical to SEQ ID NO: 90899

SEQ ID NO: 90930 - protein, 364 aa, Leptospira interrogans serovar Muenchen; identical to SEQ ID NO: 90908

SEQ ID NO: 90931 - protein, 570 aa, Leptospira interrogans serovar Muenchen; identical to SEQ ID NO: 90899

SEQ ID NO: 90932 - protein, 364 aa, Leptospira interrogans; identical to SEQ ID NO: 90908

SEQ ID NO: 90933 - protein, 570 aa, Leptospira interrogans; identical to SEQ ID NO: 90899

SEQ ID NO: 90934 - protein, 364 aa, Leptospira interrogans; identical to SEQ ID NO: 90908

SEQ ID NO: 90935 - protein, 570 aa, Leptospira interrogans; identical to SEQ ID NO: 90899

SEQ ID NO: 90936 - protein, 360 aa, Comamonas testosteroni CNB-2
MAFLDVLNDSLTKERGGRHGGKGHEFQRYWALCHLLQVDLEKDDYLLLLEFIEDVAVLNSEFSPGQMELYQLKKKEGSSTKWTKTNLAKPPKEGKSILAKLHDSKSIAKDETAAIAFVSNVPVDLTLSSGDDPTGLSEFSASQIKSTLLADLKSSVATELGCDLDDIDFDNLKFIRSPLAMDDLESHATGKVATFLATKFPDQSPRADVLCKAIYSELKVKATSTEDAATFVDLKRIRGISKQQFSAMVALTLSRKSDSDVIDGFLSGLAQENVPYIQRESIKCAARQFVVEKAGRGSSLLSLLQKQVEKSLLGIPNNLVTSWEVANWIVEQVLAQTGGTDFSILDRDYMIAATLYWMNQ

SEQ ID NO: 90937 - protein, 216 aa, Comamonas testosteroni CNB-2
MDSQSSEVIRGAFAKDIDTLKRQLSDKEKIAADAKFKVGQFDLPERTKAINDFYSERMELFASELGVHDLREDVKKRPDAAISASGSALPRSLLAYQFAVLHTAKEKGDAKHFPVVIDSPNQQGQDADHLRQMLSFIVKRTPNDQQLILAVEDKPSNFSFDGGLVELTTPFSLLDPGQYDLACDELRDMVVSVEAGLEQRLASSRVGAFEDNNELV

SEQ ID NO: 90938 - protein, 394 aa, Comamonas testosteroni TK102
MLLQWVPKQQSVTNVGSVRNSVQEIEDIESNDALHDFGGSHANKGHDFAAYWVIGRLIELELAKHPDYVFVCEYVQDVAEFDSQVNPQTVKLYQLKKKEDGYWTVSDLTGQTAKNKTSVADSPVRKLIRHVRAFTTVRATGALVSNSKFKVRLKGDDSSVEVVTVALNLLDDEHTAGLRTAVALEETSAERTVVADDVDLSLVELCRATLALDDLQTHMTGLMFNFLNQIATEHTGQASSLVETLYARIKERSRRTEKAPNWPQLLQRRGFSKKSFNDAVEGLKQIPDAALFRSRLLSKLAGSRNERWAARVTAKLSQCSIEKILGGTANRWHSDQAAIDALCEEADNKNHSDEELFVSLSNYLQISLPVLSEYEIYALAIYEMSQWNLRQTLV

SEQ ID NO: 90939 - protein, 607 aa, Comamonas testosteroni TK102
MSSLQFKRIRICSEAEQAAMELTFDPKRTLLWGPNGAGKSAVIKSVFRAIGAEPHGELPGWDYRAILALNFSFRGREFTSVRFQDLRGLFEGSELLGATTSDEEWNEIFSEAVDFQLRLLSRDGQLQRASPEHFFLPFFVNQDGSFGSHWDTFNGIRKFQQSALQTLEYFARVRPPKYFGIKAEEQGVKVKIAERRAEITTLQRTRLRLKKTQRALPVRLNQREFQEEIQELTRRLLTLSKAQEDLRKHIIEDQDLEVSLTEQISMSEHALKVHEADFQFAARESIDKSEFICPTCNAKHPESFHMFLGLAEDARELNLLRERLVHMAASAKERLKRNRSKAIALKRDFSELNALLATKKGKFTFDDFLKSRSVLVADDQLASEERLVRKEIEAHERQLGEIKISLADLEKHHDAKAPLKLFRTKFAKALVRLEAPNPTGVSKWPLAKRPDASGSRHARSIFAYYSALWHTMVTDGRLPAPIFVDSPNQGGQDKENLQKLIASVVRAAPAGSQVVLCHEMYVEAFSDGKTIEFKKGSKLLDGATFKRLSREMFQYLAVARTYLAQVKDVDGGSEAESQPGPDVARQRVSISGQRPNSEAKQRDLFEP

SEQ ID NO: 90940 - protein, 389 aa, Pseudomonas aeruginosa MSH-10
MLENKSPREQSGRDSFSRYRAQVRSAAVATLSILEGLDIDRVYCDLHDDFVIRKKDESGFTYIFYQVKTKGKQNHNWTINELFGIKTKLKDQSKQCSKSIKSSFIGKLLLHTVVFDQYCNSVVFQSNIHNSDEVIELLEDIESGAFANKFTKVLLERFNECFNENPSEYTLEQVKERLSKLKLQSDVSYLKENDNSFDLVVKEKIYQFSEIELERAEFREILLRLLDLVERKSSGTIKTWSAESIEKFAGISIDDLLSVLSISRDAYLALLAGGDPNAIKSASMIQRSLRNNGADISVVMYCSRCKIDWDLWFRKARHVIAEFDLLFISDRIASILRSAVTPQGVLIVRNLRQPIKKLLGELEKKKLKFDLNEDLILGGIFSTLVRGKS

SEQ ID NO: 90941 - protein, 589 aa, Pseudomonas aeruginosa MSH-10
MNLISLKIYPNGPSGWGSPLLKFGRDITQLYGPNGCGKTPVVQSIPYCLGFPSIFRNDIYDKCKHVELTVSSRKGILILRRVYSRDFDIQVTEPSGVIQRFFNELDYSRYIFEWLDLTAHNLVTTGNQLGSPYLSSFLPLYYLDQDIGYAEIYCPPSRFIKDQFSEMMRMVFDLPVKNSFDIKKDKFRAKERLDYLDKETQTLARMVESAQKSTSGIHKSRPELEAEIEQFEIQVQNLQSFGASRDESIDAIDRLISGRRSVILEISDEIRQLQIRNEGIGRMVHEINTEIETLNLNEEARRVFLSFQEICGSEICQLFSASSESYTKNLLYLRDQIKDLERNASLDELRIDELQQQRTAQEIVVQQLVDERKISSASSEISALVSSITKLKTEIFELQMQLDELKKVEALKEKHFNSLIERDKAYTLHQSFSSDRSSSPELIKIRADIRQRFIEWLDTLHTYNVSRDITFKDDFTPLLGIESIAQIKGSTKIRTVLAYHAAVFQVFAERKVSGFRFLILDTPKQHDINNDDLGRYLDALKELCGKHGIQVVFSTTEYHYSGDENDSEWLPTYPGADQSMFLHLGGVQD

SEQ ID NO: 90942 - protein, 381 aa, Pseudomonas aeruginosa CF614
MIESQGMLGEELDTENGSPGRNPLAAAQRERAGAQTFEKYEYQYHWALCRILGAHENSDDYVVFIELHEDVVLATSTDESLARFEFNQIKNVNATPWNQKKLTSIPKSTTKKNSNSILGKMLQGIQKKPFFEKLNSLDLVATCGFKLPPKTDGLKLSIISIGDLHDECLKDIQAAIDKELGSYPIPRTLRFITPDLATTGFQDVVIGRISKLVNIKAPGAMYDSSTIYRVLIDDLHRKGTVAFDFTDWKNLIKNKGTTHGDVERVISSYTEKKGLEAFEKDLDDILKDLELKSNKRIQVRRAFERYHNAVRLERSLIAIDNQQAVKDAVEHNFEVFEKQGVMDFMNLTLEILPEATKKNLVNLESIQAAIIYELLSKCHEK

SEQ ID NO: 90943 - protein, 587 aa, Pseudomonas aeruginosa CF614
MENLVFKRLVVASDTLKSGNQFEFKPRFNLITANDNSVGKSTLAKLLFWALGGDPVLDVTWTGFDVRCLVDFSVGNQTYQAGRYGNIMFLRRPNGEWEKFPKITGAYSDAFAEIVGFEALLPSRSDSTKLETPPPAFYFLPFYVDQQRSWSHAWNGFTNLEQYAKWQKTIIEYHTGYLRPEFFTFEEKIAAQNLEKKTAEGEVRKIETAIDVVKTYVPQSRKMVTLSKGEFDILASEVSDDIAKLQAKQEDLLGTIAELQTERVYLQGQLDLAAIASSELDKDYTFSVECIEGESLLCPLCGTMHDNSSPSRASILADKDEAERQVMQINGKIERLNKELANSQKRLESTRTEIDEINSKYKSLEPSSMPENQENASEASFLDSIASRAVQKHVQRTMETKTALIRSINSTNRSLRAEQKKLLTKEQREDLNAAFKNSLTSYLQELNAQGVNLAPVESPLDYKKIHGSGGAAESTRGILAYYMSVIRQAHKAENEAFSAIVIDTPNQQEQADFNYEKILQFLTGAVPSNAQLILCAMNRDEIKDYKREAHVIELDEQKILKETNYTECRSLLNFDGSITGPSNNLPS

SEQ ID NO: 90944 - protein, 348 aa, Pseudomonas aeruginosa BL20
MDRVYCDVHEDYVVKHIVNSKAQYRFVQVKTKSKLNYQYSILEIFGLKKKPRKDNPEHDLAGSFAGKLLLHVEEFGEACRSIEICTNVNFDDEVEQIVSEIQGKLSPTKHTTSLISETKKLIPSLTTKSDMEVIDFLSHLALAPRKQILNEEEDIFVTQASTQIYKYSEINLNPIEVKKIIIQLLSLIEERSATPLSSNITESDLDAKASVNLNDILDILCISRSAYYALKANGDDSAIKSVSILQRMLKRSGFSDETVDTFAGFKCNWETWYRINRHALLEFRLAIAKEKIIQLAKKMAIGQIDMNSITPEISLLKSDLCTTLGRQDIDEELTFGAVLSELVKGEAQ

SEQ ID NO: 90945 - protein, 596 aa, Pseudomonas aeruginosa BL20
MKFESLEIIPNSPNGWHSGELKFGEAITQLYAKNGSGKTPLIQAMMFCLGLHVQFRDDIVRNCKMARLKVMLNGKGFTLERMMGDSFDLTVKVDNKTENRFYNEEDFSKFMLKSLKLRSDRLVTNGNTPTIPYFSALLPLFYLDQDQGYSEYYAPPRPGFIKNQFSEMVRLAANFPPQHSYDKKKKAIEVKKDLDYLDITIVDSRKLMDRLAQELPSPVRKIEDIEKQISESKSRLEDLKKTKDIKSESISSLDHLIGAQRRRHHELTSEEASLESKISSSTQIREEIQSEIETLNLNEEARRAFVSFSDICTSPSCGIFMASADSYGKSLLYLRDQIKDLEIATVSNIQKAEAISTEKQFIEKQITQLAQQRGLAEREAGIEVFIEAISRIASEIFELELEKNKLEKYEQQKKSHLELLTRRETTLTLENSLQTSREQSPDILEFRIELGQKMAEWLDILNSKNISRDIRIDSELKPILGTEKLGIIKGSSKARTVLAFHAALFELCTNNQNSPFRVLIFDTPRQQEIHWEDLDAYIQALKSVAVRNKAQVIFSTTSYKYEIDTKTDIEWLPKFAGDEQPMYLGKIGQAPIEGSE

SEQ ID NO: 90946 - protein, 348 aa, Pseudomonas aeruginosa BL09; identical to SEQ ID NO: 90944

SEQ ID NO: 90947 - protein, 596 aa, Pseudomonas aeruginosa BL09; identical to SEQ ID NO: 90945

SEQ ID NO: 90948 - protein, 381 aa, Pseudomonas aeruginosa BL08
MIESQGMLGEELDTENGSPGRNPLAAAQRERAGAQTFEKYEYQYHWALCRILGAHENSDDYVVFIELHEDVVLATSTDESLARFEFNQIKNVNATPWNQKKLTSIPKSTTKKNSNSILGKMLQGIQKKPFFEKLNSLDLVATCGFKLPPKTDGLKLSIISIGDLHDECLKDIQAAIDKELGSYPIPRTLRFITPDLATTGFQDVAIGRISKLVNIKAPGAMYDSSTIYRVLIDDLHRKGTVAFDFTDWKNLIKNKGTTHGDVERVISSYTEKKGLEAFEKDLDDILKDLELKSNKRIQVRRAFERYHNAVRLERSLIAIDNQQAVKDAVEHNFEVFEKQGVMDFMNLTLEILPEATKKNLVNLESIQAAIIYELLSKCHEK

SEQ ID NO: 90949 - protein, 587 aa, Pseudomonas aeruginosa BL08; identical to SEQ ID NO: 90943

SEQ ID NO: 90950 - protein, 389 aa, Pseudomonas aeruginosa X24509
MLENKSPREQSGRDSFSRYRAQVRSAAVATLSILEGLDIDRVYCDLHDDFVIRKKDESGFTYIFYQVKTKGKQNHNWTINELFGIKTKLKDQSKQCSKSIKSSFIGKLLLHTVVFDQYCNSVVFQSNIHNSDEVIELLEDIESGAFANKFTKVLLERFNECFNENPSEYTLEQVKERLSKLKLQSDVSYLKENDNSFDLVVKEKIYQFSEIELERAEFREILLRLLDLVERKSSGTIKTWSAESIEKFAGISIDDLLSVLSISRDAYLALLAGGDPNAIKSASMIQRSLRNNGADISVVMYCSRCKIDWDLWFRKARHVIAEFDLLFISDRIASILRSAVTPQGVLIVSNLRQPIKKLLGELEKKKLKFDLNEDLILGGIFSTLVRGKS

SEQ ID NO: 90951 - protein, 589 aa, Pseudomonas aeruginosa X24509; identical to SEQ ID NO: 90941

SEQ ID NO: 90952 - protein, 389 aa, Pseudomonas aeruginosa MSH10; identical to SEQ ID NO: 90940

SEQ ID NO: 90953 - protein, 589 aa, Pseudomonas aeruginosa MSH10; identical to SEQ ID NO: 90941

SEQ ID NO: 90954 - protein, 389 aa, Pseudomonas aeruginosa MSH3; identical to SEQ ID NO: 90940

SEQ ID NO: 90955 - protein, 589 aa, Pseudomonas aeruginosa MSH3; identical to SEQ ID NO: 90941

SEQ ID NO: 90956 - protein, 348 aa, Pseudomonas aeruginosa 148; identical to SEQ ID NO: 90944

SEQ ID NO: 90957 - protein, 596 aa, Pseudomonas aeruginosa 148; identical to SEQ ID NO: 90945

SEQ ID NO: 90958 - protein, 281 aa, Pseudomonas aeruginosa WS136
MLLHVDNFGDTCHSLVILTNINFDDDVEGLVSDAQSGEIVSKHTTTLIAETKKLVPSLAAKTDKEVLDFLSHLKLAPRQQILNDEDDNFVSSAHGQIYKYSEINLTPKEVRLLIIQLLSLIESKSSEKIKGSMTEDILNDKASIALDDMLDILAISRPAYYLLKNGGDPNAIKSVSILQRVLKRNNYKEETLNSFANFKSQWETWYRVNRHTIQELKLLELMDEIKILTDNLAVGKIDMKTITGAVVKLATDLRMLLGRNDLTEELVFGAVLSEIVKGESS

SEQ ID NO: 90959 - protein, 593 aa, Pseudomonas aeruginosa WS136
MKFESLQFFASHNGGWASQELKFGKSITQLFALNGSGKTPLIQSIMFCLGLDVQFREDIIRNTGKVVLRANINTNLLSFERKIGEKYDITVSSDGRTINRFYNDEDFSRFMLGILNLRSERLTTNSDTATIPFFSAILPLFYLDQDTGYSDYYVPPRHGFIKAQYSEMIRLAVGLPARSSFDAAKKTINLKKELDYLDKTITDSRKLMERLRQDLPAAPRFEADTERDITSLKARLDELKTTKDIKSETLNSFDFLITDLRRQHREIASQHITLESRIRSSSQIRNEIESEIETLDLNEEARRAFISFSEICTTPSCGMFLVSSDSYGKSLLYLKDQLKDLEAVTIANIQQAEALLTKMTWIEGQIADLSAKRGIAEREAGIEMFIEAISKIASEIFELELEKGQQQKHKSQEGKHLELLNRREAVQNELESLGKTREQSPDVMRFKLALAEKMARWLDILNSKNISREIQIDSDLKPILGSEKLGIIKGSSKARTVLAFHAALFEICTGNPTSPFRTLIFDTPRQQEIHSEDLDAYIKELKVVALKNNAQVIFSTTSYRFEIDPATDEEWLPKFGGFEQPMYLGHFNNILDS

SEQ ID NO: 90960 - protein, 375 aa, Pseudomonas aeruginosa
MLGEELDTENGSPGRNPLAAAQRERAGAQTFEKYEYQYHWALCRILGAHENSDDYVVFIELHEDVVLATSTDESLARFEFNQIKNVNATPWNQKKLTSIPKSTTKKNSNSILGKMLQGIQKKPFFEKLNSLDLVATCGFKLPPKTDGLKLSIISIGDLHDECLKDIQAAIDKELGSYPIPRTLRFITPDLATTGFQDVAIGRISKLVNIKAPGAMYDSSTIYRVLIDDLHRKGTVAFDFTDWKNLIKNKGTTHGDVERVISSYTEKKGLEAFEKDLDDILKDLELKSNKRIQVRRAFERYHNAVRLERSLIAIDNQQAVKDAVEHNFEVFEKQGVMDFMNLTLEILPEATKKNLVNLESIQAAIIYELLSKCHEK

SEQ ID NO: 90961 - protein, 587 aa, Pseudomonas aeruginosa; identical to SEQ ID NO: 90943

SEQ ID NO: 90962 - protein, 375 aa, Pseudomonas aeruginosa; identical to SEQ ID NO: 90960

SEQ ID NO: 90963 - protein, 587 aa, Pseudomonas aeruginosa; identical to SEQ ID NO: 90943

SEQ ID NO: 90964 - protein, 375 aa, Pseudomonas aeruginosa; identical to SEQ ID NO: 90960

SEQ ID NO: 90965 - protein, 587 aa, Pseudomonas aeruginosa; identical to SEQ ID NO: 90943

SEQ ID NO: 90966 - protein, 375 aa, Pseudomonas aeruginosa; identical to SEQ ID NO: 90960

SEQ ID NO: 90967 - protein, 587 aa, Pseudomonas aeruginosa; identical to SEQ ID NO: 90943

SEQ ID NO: 90968 - protein, 402 aa, Burkholderia cepacia
MEANGEDGLSSIDGAAELLSVANNPKYSEAGGGHGAKGVDFSRIWAVFRMMELEKASEPDFLLLFESVQDVAELDSVTAPTRVKVYQVKKKDSGTWTWSVLTGTVEPKAPPAPSTKAAKANAAPPKLAKAPDFKKVPESVLGKLHLSLNAFTALPVEGVFLSNQGCDFPLKTGGSTATAMACSLADLATDHVQLLTDALASLSPGGSPPDLARMKLQKVAIHPDNLNAPAIEAALDLLNERSPGHAGQAKAFVESLLMKISPLTRRTDTCLSFNELVKERGFSKSAFVAALAALETVPDRNALFNDWMNQLQIEGLDFMTISSVRVAATRAQQERLTGGTDVSREIDDFSDAWIAANPPTSKLRPFVEAALAELKVQFSAHRDHDLIARFVMRAITKCVDPN

SEQ ID NO: 90969 - protein, 568 aa, Burkholderia cepacia
MHRFRFKNIWLLSHQEHKARHVEFHPSKNLLVGRNHTGKTTLIRSLFETLGATPQGKLEQWDKNAVSLLEFSVDDKRYFALHQDGRRALFDATFNLLISTAKFGEWSKRFCETTDFNLVFSDKRQAEVVPADPACFFAPFYVNQDGSWQAEWNTFGGMKRFSAPFKPILEYFTGVCPPEYYAASAEKSQHAKALEEHRREYKLLERTIERFSKSVPLTGPKVNADNFAAEIEQLTKEVNELNTRQERLRSIIVREQELVKSLDHQIHLAERALAAYDSDAKYLLKEGADPLICPTCHAEHEKPFLDLLEFAEDARVLRELAARLREDAAEVRTRTHKAFSELNSLNENYLRISRLLDSRKGELKFKDVVGSLGAESAFAAFEEERKLIQAGIDAVVLTIDALETKMNELRSLKRTKAILTDFREHYAASRIALQLHPVPTKNMQLASRPSLSGSGGPRSILAYYAAIWRTVQGKSGTYDVPVVIDSPNQQAQDDLNLPAVLSFIAKDLPTGMQLIVGLETPTNFSFDREVILTQKYGMLIETDWEATLALVTPLLRKMYDATLAQSQS

SEQ ID NO: 90970 - protein, 387 aa, Pseudomonas fluorescens SS101
MTISAGASELLLVANKPGLTETGGGHGAKGVDFQRWWAVLRMVEMEQANELDFLLLFETVQDVTELDSVSTPTRARVYQVKKKDRGEWSWSVLTGTTAPLKKKSSTVVSKAAAPTFTKVPDSALGKLQLSLAAFNNLSVEAYFISNAGCDIPLAAGGNAATSMPCSLADFAPEHSKLLAQALHSLSTDGAPAPDLTKLKLKRVAIHPDEPSSYVIKSALELLTQRSPPHAGQAASFVESLVTKISPLGRHTDTCASFGDLVEQRGFARHEFISALGALETIPDHSAYLNDWLVQLQSEGMDFMMVTAIRAQAARVVREQLTGATLPIVQSLHDFCDIWLDANVRGSGLRLYFEAGLVALKKDFSSFRDAELLARFAMRAIKKCVDPN

SEQ ID NO: 90971 - protein, 569 aa, Pseudomonas fluorescens SS101
MKSLRFENIWLLSHRDKKARHVSFHPKKNLLRGRNHTGKTSLIRSIFETLGAKPQGKLESWDENTASLLEFSVDGCHFFALHQNGRRALFNANREMIVATSKFGEWSQAFCNVTDFNLVFTDKKESAIQPADPACFFLPFYVNQDGSWQSEWNTFGGLKRFSSPWSAILEYFTGVCPPEYYRAKAERAQESKALEESRREYKLLERTIERFSRTLPLSGPKLNPENFANEIALLTKEVTELNERQEILRSAAVKEQDLLSSLEQQIRLADEALAAYDHDAKYLRAGNSEPLICPTCNAEHTKSFLDLLNFAEDARVLRELAGRLRDDASEVRYRCSTASAKLSTVNENYKRISVLLDTRKGALKFEDVVGSLGAESAFAAFEAERQLLQEAIDKTLGVIDSLDEKMKLLRAPKRTRAILEDFRSHYMTGRVALQLPPVDVSKMKLAGRPDLSGSGGPRSILAYYAALWQTCQGAMGTFDVPVVIDSPNQQAQDDFNLPAVLQFIAKDLPDGMQLIVGLETETDFPFDREIHLDVKYSMLREDHWAETERIVEPLLEKMYVMMESDVAEV

SEQ ID NO: 90972 - protein, 372 aa, Pseudomonas putida SJ3
MTKTNKAANSGVDALLGFEFQRNCALYLLLTNYTQISSREFFLCIEHHDDFLFCYRSDCLSNIESIDSYQAKKLSGGMWTIDARFAEIIAKMLDVGNDLKNDPAPKCKDYSHSLTFISNTDIKLSYVPKKAEKQKGKTDVIHLLNEQNSKSRYDDIPEEIKNKIKEKVREHCSKESSTFNEAEFSNLHIQWVDFPRNKNSQKDILVGLMHRKFPHIPDHLAAVELLLSLFRDVEAVYNQGKIINLLDNAKRVEGIEIKKAINVIETEQKAFKLWRANSAELTRKFRVPLGIQRNHENYIRNTFELLKDMSNNEHQIIKTFIKENDYTLDFHSYEEMFDAYINSIKNTININLKDIDIFFAALCAFVEYYGEN

SEQ ID NO: 90973 - protein, 587 aa, Pseudomonas putida SJ3
MSTTLTFDRLFVSSEIHDACFYSEFSPGANIISGRNTSGKSSLIQSLLYTFGVNDLKENLSEILNCQPTFRVDFSKTTEDQKEKYSIIRTQGSIYVKEPTGKVVPFHGINADNSAEHIALKEYVRNLVGFNLQLEQKGELKSAPLECMFLPYYISQSVGWVYLRESFSNLQYYKGFKDDYLDYYLGVSNNFDRVEHRQLTQRKDKLSSDISNLRRYGKKAEFQFANLVDEEFGAQAEEYIDSYVKLSNSLDEERRKYINLCNKLSLLQNHHKILKRTKSNIKKQKYNDVDRCPACTQILTYSLEGLYSHYQKYNDTVELESHITEQLTDRKSEIHTSSKKITNISKEIIENYGTLLNNTIDGVSFDQWISNKANVVLYRKMQADIQGFEDELESIKTSLDSMTTEKETLTKRISREAEFKKLFVKYMSLLELKPLTDSRYLDLYKISSFPRQGVELHKTVMAYHFALNSLIANSKSAHRLPFLLDAILKEDIDETNLNIILSFIGNNLPSDTQAFISISEHVRDEAGSDETLKPIERIKVSIIKDTYFPENSKLIYIGGGKSERSFLSQPLDKHQEMHMNTIEITAF

SEQ ID NO: 90974 - protein, 375 aa, Pseudomonas putida S12; identical to SEQ ID NO: 90960

SEQ ID NO: 90975 - protein, 587 aa, Pseudomonas putida S12; identical to SEQ ID NO: 90943

SEQ ID NO: 90976 - protein, 386 aa, Pseudomonas syringae BRIP39023
MKLHEVRPREQSGRDTIDRFRAQFKAASLESLALLENGEMERVYCDIHEDYVVKHIVNSKSKYRFVQVKTKSKLNHQYTILEIFGLKKKPKISPIHDLVGSFVGKLLLHVDKFGDACVSIEICTNVNFDDEVEKIYKEVKDKLSPTQNTMALIEETKKLIPSLATKSNSDVIAFLSHLALTPRKQILNEEEDVFVSQASSQIFKYSEINLNPLEVKQIIIQLLSLIEDRSAVPLSSSITEKELDAKASVHLDDILDILCISRSAYYVLRAGGDDKAIKSVSILQRMLKRSGFSDDTVDTFAGFKCSWEAWYRTNRHDLLEFRLAVAKNKIIKIAGKIATGQIDMGSITEEISNLTVQISKDLGRSDISEELIFGAVLSELVKGEAQ

SEQ ID NO: 90977 - protein, 515 aa, Pseudomonas syringae BRIP39023
MMGDSFDLTIKVDNKTEDRFYNEDEFSKSILKLLNLRSDRLVTNGNTPTTPYFSALLPLFYLDQDQGYSEYYAPPRPGFIKNQFSEMVRLATNFPPQHSYDKKKKAIEVKKDLEYLDTTIVDSRRLLERLGKELPSPARKIEEIDRLIAESKSRLEDLKKSKNIKSDSLSSLDHVIGNLRKRHRELNSEEAILGSKISSTTQIREEILSEIETLNLNEEAKRAFISFSDICTSPSCGIFMVSADSYGKSLLYLRDQIKDLEISTSSNIQKAEAISTEKTFIEAQIAQLAQQRGLAEREAGIELFIEAISRIASEIFELGLEKNKLEKYEQQKTEHFELLKRREVTLTLEDSLQTSREQSPDILKFRIELGQKMAEWLDILNSKNISRDIRIDSDLKPILGTEKLGIIKGSSKARTVLAFHAALFELCTSDPLSPFRVLVFDTPRQQEIHWEDLDAYIQALKAVALRNNAQVIFSTTSYQYAIDQNTDREWLPKFTGDEQPMYLGKVGQPTLDGTP

SEQ ID NO: 90978 - protein, 392 aa, Pseudomonas syringae pv. syringae HS191
MNSTEDFYSTKPREQVGRDTFLRYRAQIRAAALAALEILEGGEVDRVFCDYHDDFVIGKKVSGKQQYEFFQVKTRAKTSKNWTLNEVFGLKTQKNASHSAENVKVSFAGKLLQHTVTFPDVCAKIVFMTNAHLDETVEAMSVSLERNDVANKYLRFIVDNFNDCFVLTEPKLSETQILEKLSKLRFESDVSFIKDKNNSFESDARTKIYQFSEIDLEFNEARQILVNLLELMSKKTSGVISVFDEATINIKASVDINDLLDLLSISREAYHSLIQGGDARAIKSASVIQRTMFASGASNEEIEYSSRCKTEWDVWLRDNRNKLSDFDLLSIASKVDTLLADTLDGTKSFRLGALHPKLKQLMVDLDCLGLAYDLTPPLLFGGFISALVRCKS

SEQ ID NO: 90979 - protein, 586 aa, Pseudomonas syringae pv. syringae HS191
MRLIRLQIFPKGDNGWSSESLVFGQDITQLFGPNGCGKSPLIKSIVFCLGYPSKFRDDILENCLCAELEFEVNNVNYVARRYFKPGLDVVLTDFAGVKHEFLNELDYSRYLFELLGFDIPTLVSSDEKKAAQAYFSALLPIYYLDQEEGYRKYYSPSTSFIKDQLSESIRIVLGVAPKNAFDAKKKLIDAKRELEQRDKQVYALKKEYESAKDVYGSIDSVGIDVELKSLYQRLEELKSGTADKTASTDAIDELIGSNNETIRSLDRELGDISKRDRSFQRIHAEIQTEINTLSLNEEAKRVFSSFEEICNSPGCQLFSFSSDSYGKNLLYLKDQLKDLERNVEIGRGRGEQLSLRRGELVAQTQSLTERRNSLVNTSDIKALVEAITQITSRIFGLEQDKKSLDSIEDISDRYVKALSAQDEAINRREELEKTGQGNPLIIRFRSVLRENMLKWMDILDTNNVSSDIKFEGDFVPILGSERLAQLGGSTRLRVILAYHAALLECFEFFKRKKVSFIIFDTPKQHEMHGVDLGRYVDALKVFSRATGVQIIISGTEYHYIGDVRDKDWEPKFPGSKQKMFLKRGRL

SEQ ID NO: 90980 - protein, 400 aa, Pseudomonas syringae pv. actinidiae
MLNQRHSRAVKPPPDELAELLLDKPDDESKGAEATIGFSYQQWWATLIALEMLSVHDDYALGMEVKEDVAILDSSTKPTRVEFCQIKKNEQAGAWALSDLHNKGAKLKKGHEPSTLAKLYKRKIDFSGHNVSLRFVSNVGFKISAIGVLKKVHSVEARLKELELVDKELIVTAISSQLKIEKSSVSIDEIRLHRSNLPMAEQEIFVAGKISQLWEERILPFRIDQPTVAARFLASEIQSRAASNSYAKNMSDLQARIISRQQVMVALSNVASAKKSVSEVLDSAIATLESEKAVFLLIKKIKKERITICADSADRTNLYFRDIIKSLHESMELSLETADDNAGLLQLMNLVVERCTAKNSLAFMGVSTPYLHAAALLVLNDGIDFDVLTASVGSQSKAEQ

SEQ ID NO: 90981 - protein, 92 aa, Pseudomonas syringae pv. actinidiae
MNRKLIFKKLWLLSEKESKGKIQPLKEGKTLLLGKNGTGKSRITKNLFWVFGCEPNKRNMGKWDPDTIAGLDFSFGGREYFVMRRGKKLAHF

SEQ ID NO: 90982 - protein, 389 aa, Pseudomonas syringae pv. cilantro
MLDTKKAREQNGRDSFSRYRAQVRSAAVASLSILEGGTVDRVYCDLHDDFVIRKKDGDGFTYIFYQVKTKGKQNHNWTINEVFGLNTQLRDQSKQNVDAFKGSFVGKLLLHAVVFDQYCNSVIFQTNVNNSDEVEDLLSDIESGIFAHKFSKVMLDRFNECFGENANSFSSEQAKSMLSKLSFESDVSFLKEGDNYFELIVKEKIYEFSEIELERAEFREILLRLLELVERKSSGVIKTWDANSIESCAGVSVDDLLSILSISKDAYYSLLSGGDGNAIKSASMIQRALKSSGADISMIMYCSKCKTDWDVWYSSARHVIQELDLLSISERVSAILYSTMNTQGVLGMNSLRIPIKNLLVELESESLKFDLTNDLILGGVFSALVRGKS

SEQ ID NO: 90983 - protein, 589 aa, Pseudomonas syringae pv. cilantro
MKLVSLKIFPNGQSGWGSDLLIFGRDVTQLFGPNGCGKTPLVQSIPFCLGFPSVFRNDIYDKCKCAELVVSSAKGELRLRRVYGRDLDVEVVEPTGGVQKFFNERDYSQYIFDWLGIVTNNLVTTGNQLGAAYLATLLPIYYLDQDVGYSEIYCPPGKFIKDQFSEMMRMVFDLPVKNSFDVKKDRFRAKERLEFLDKDAQTFARMVDLARKNVSEITKSKSEILAEISQLEFELDSLQDVGVSRDDSVNALDRIIYIHRNNIREISAEINQLQRRNLGIGKIVQEINTEIETLNLNEEARRVFLSFKEICGADLCQLFSSSSESYSKNLLYLRDQIKDLERNADLDEVRVGELNRQRDAQEQAIQSLVDARNSSSAKSDISALVEAITRLKTEIFTLQGQLSELEKVTALEGKHFKAIVERDKALTLYESFSVGRAYSPDLIRVRADIRRNFIEWLDVLHTNNVSRDITFKDDFSPLLGVETISQLKGSTKIRAVLAYHAAVFQAFAESGVLGFKFMILDTPKQHEIHNDDLGRYLMALKKLCSDRGAQIVFSTTEYHYDGDDNDAEWLPTYDGEEQKMFLKVGGVIA

SEQ ID NO: 90984 - protein, 372 aa, Xanthomonas translucens
MSSNVIAEFMSSAPLAEEGGAISADRFDYQKNWALARLLSLHQGDGNYVLLCELHEDIAVLDCSEEPTKAVFYQIKTSASGAWTLKKLTNRRKGKDGASLPSILGRLCAKASELKEQQVTFQFVTNVGSGFSFKAPLATKATESSGQRLFDALNSSEWNTLKQCLADELGQDLSIPLQDQLKVSIAQIHLGTHNETTVGLVANFLEEHVPGAHIQPKAFYRTLFDELRRRTVAKRPVGHISDVCKMKGIDRQAFDFMLASARSVAPAAGAWAQIQVELHHDGVSLALRRKLKEAYPAYFSRMQSPLDAAFRRDHRLLVAASESTMSEHQTLLELAEGAVKIARKDPGYGAAGMSAEQELIVVMMAFYETDTH

SEQ ID NO: 90985 - protein, 500 aa, Xanthomonas translucens
MISALEFTVDAIPYILLREGKTFTLIYADKVVGCYTSVTEGLAPALYDLLGAKLRLKNRSDKVVVPPPAFLFIPFYVDQDAGWNQPLTSFARLDQFASWQQDVVNFHVGVTGAEYFEALEAQADATAARVEPAKQLEGLKSLQKRAQETVLEDIDMEIDPDVFAEEIERVVGLLQGLVEMREEVRAKLSKLTQRRLELEAQKEILERVRRELHADYMFAVKHEGDELECPTCGQLHENSFAQRFALAQDEGRADDVLVEVMNSLADVSGQIAISRQRLKDATEDEQKFNDLLTRRRGQVTFARLLERAGQKRFSSQLDEQVADLVRVIADLDYRIKQAAERLRSARSTHRKKEVIESYAGLLKSFAQALSVSFPDEFLGSLTAKLNETGSDRPRAILAYAYAILRLVWEAEDAVRCPIVLDSPKQQDQDDINHIKLLEFIRDERPSDSQLILFLVDDAEVDFGCKPLVLDEKHSLLSAGEYEQTSSLIRSWQTLRETSMN

SEQ ID NO: 90986 - protein, 350 aa, Agrobacterium tumefaciens CCNWGS0286
MTIIEDLMKIPERENAGSKAYNAFDYQTAWGIIHLLKLHATADDYALAFEFHDDIAELDSANAPTNLRFYQVKTSEKATWSLAKISQRRGAGKVKSSYAGRMFDTVVKFGNAVEKVVFVTNQALTDADHGDEEIPFGSAKPQKLKKFVATLAKEQENFSAQNHLPLFRFLQSTLNISNFDATLVGEFTNFLEGAVGSGEDARTFYLMMSDECRRKSRRLSDLSGLEELLTSKFVTRAGFEAKIESFRHRRERRPNFNAAQPHLNLGWREEIELEREWRNYEMARRERIHVSMLRFGDEVKNIVEPIINAANTLMDGVIQAASAVGPLVEIQFGPPRPAFVRAIILYEFMR

SEQ ID NO: 90987 - protein, 564 aa, Agrobacterium tumefaciens CCNWGS0286
MKSLRFEKLELLSLAENKARAIKFHPRMTVIKGANDVGKSSVIKSLYWAFGAEPKSIHKAWRDANVKAMVSFNVDGNPYSILRSRDTFGVFDGGGKLLLSTASVTKDLAPFIADLIDFRLVLNGRSGQPETPPPAYAFLPFYVNQEGGWERAFNSFDYLGQYPDFRQSIVEYHSGILGNDYYELAAEKRKLTLDQDEISRDRKAVAKAIEKLGIEVTFTGLELNAPEHEQTVEQILAHMKKIRAVRQSRAAELADVLDQRQSLESQVKIARQAISELERDATYAAALDAEEVLCPTCGTTHENSFANRFAILDDREACFEFLTSSREKLLKLAEAAAAAARSVHDVDARLDQLQTLLAERQSDVSIGEIIQSEGRRTARSMFEEQMRDLDEQFGRLFAEISAIDVELKELKKLAQKDDIEGFFARLMLKYLEELDVKKIDHAVASKIDGRVKESGSDLPRAVLAYDLAFLQTVHKYSKAFTAPAIFDSPNQQDQDDINVAKMIRLIVSERPKDGQTILGTVSLHGIEIEDATVIEFDEKLSVLKASDFSEIHSHLQPFLAQMQA

SEQ ID NO: 90988 - protein, 354 aa, Sinorhizobium fredii NGR234
MKLIDDMMTVKEPENGGRTAIDRFDFQTAWGISKVLKLHAADLNYAVAFEFHDDIVSLDDADAPTKAVFYQVKTQEAGNWTITRLVDRPMSTGKVPKPKASFVGKMFGNFKRFGSAAEKLVFVSNQPLVEIGTKYGEASFSTAKPEDVAKFVTAMKLENKGFKEVDHLGYFHFDYCELNLASYEQAVFGEVSLFLKDHTSAEPGSVPFTLHLANEGKRRSKRLANVKSFADLKASKFMTRADMDKWLGALDSAYLYRPSWETTSRQLAVPHQEDSRLEREWNSYMAERKRRWSAGTLELAANVKETVTPVIDAAATLKGGMEGCLPLVSDEVRRWKPNATDDFVKAVILYEYKR

SEQ ID NO: 90989 - protein, 562 aa, Sinorhizobium fredii NGR234
MKNLIFESLELLSLTERKARKVEFHPLLTVITGENGVGKSSLIKHIYWTLGAAPAVIHPKWKKVAVKGLLTFTIDGVRYKALRNKDRVAIFDEGDRLLLSTNSFTSELGPFLADLLDFNLVLSNRKGEPEQPPPAYAFLPFYVDQDAGWSKPLNSFDRLTQYSNFKTSVVEFHSGIRPNRYYELTAKKKQLDLQTKELGQDRTIVQNAISRLRLEPGFSGVELSLEDHENAIQDLLVKVKSIRELRQTRAAELADIVDRRVLIDEQIAIVEASIAELSEDAQWATDDIRDKIPCPTCGTMHLNDFTNRFAILTDREECFTFLSDAQQKKRGLAKSVEEIQRQIRSADETIAEIQALLDERRGDVTLRELIENEGRRTAAALLRSQIDDLETQIGKIVSEISDIDTDIREIDNPSTRQTVEKYYAAFMSQYMKALNVLDADNDAVTKISGRIVETGSEQPRLLLAYILALDVTIRKFSTAFAAPLVIDSPVQQEQDMTNAPAIIKLVTSARPHSGQTIIGTISLHGNAIDASMLREFTEKKSILSSGEYEAVYARLSPLIERM

SEQ ID NO: 90990 - protein, 385 aa, Methylobacterium extorquens DSM 13060
MATDFLDEIVGVFGDAEIGETGGGHGQKGVEYQRNWAIVQMFVLEEQGVTDFLFLFEAIQDIAVLDSPNSPKKIDLYQIKKKDRGEWSWAGLTKLHHPPDPTKKTKSKTKAKPLTDVANSPLGKLHSAVHSFNLLDSSGRFISNAGCDIAMADGSNAATSLPVALASLPAHLSSLLTAAFITLHKNGAAPPDLSKLVLEKADLPVDSTSTFTIGKAHAFLAKRSPKHAGQSQSFVDSLLAKIGPLGTRTAKCSTFEEMKSQHGYTRDEFVEALGALEGVIDIDYYLNAWLLQLQQEGMGILEVTSIRAAVTGIYRRQVMGKGLPEEVHIASACDEWLLTHEDPPKLMPFFKESLLYLLSKFPFSKPAELQAHFALRAINKCVAPN

SEQ ID NO: 90991 - protein, 567 aa, Methylobacterium extorquens DSM 13060
MKTFKFKSICLLSQSEQRARRETFAPRLNLIAGENHTGKSSLIKSLFVALGARPEGRLENWDKNAIALVSFTIDGNLYHVLQQQSYRALYNTNGDCTFATGVSAEWGAEFSKLVGFNLVLIDKNQEIVSADARAFFLPFYLNQDGSWQAVWSTFANIQQFKAPVQPILDYFSGVKPPKYYEISALRDGVNITLKELRREHKLVSQVRERFGRTLPLSGPKTMPDVFEQDVTRLTDEVTTLNHQQEELRNTLVREQEVYDSLRLQIHMAQEALRTYDGDASFLRTEPHDTLVCPTCGAQHHKMFMDILNYAEDGRVLRELIIKLRNDSEKIHKEFVQTQVRLRELDVNYIRVSQVLEARRGDLKFDDVIKSMGAEVAFTAFEDELTELKSQIDRCLGEIDNFEVMLNELTSQRRSKEILKIFRDSYASARVKLNLPPVETKNLRLTSRPNLSGSGGPRSILAYYTAIWATTSGKYGSFIVPLVIDSPQQLGQDEKNLPKMIEYVAKFLPENSQVILGIEGSTEEKFDHIIELTSAYKLLQEDQYEQVNGIIQPFLDQMYARIFSEDSE

SEQ ID NO: 90992 - protein, 383 aa, Komagataeibacter hansenii JCM 7643
MSVGISEFFTVSQRAEISETGGGHNQKGIEFQKNWALIKMLEMESNNSEDFLFLFEAVQDIAILDSEIDPKKIKLFQLKKKDRGEWSWSGLSCLSKPEDPQKKKKSKRKSIPLESIKSSPIGKLYNAVDAFKTMSSEGRFVSNSGCDLLMKDGSNAATSTMVSLDMLPTEFSDLLVKALQSFDPNGSLPDTSKLYIEKVSIPVDDPVPYSIGKACEFLRNRSPLHAGQAQSFVESLLIKITPLGARTETCRNFEEMRYRHGFGRKNFQAALNSLEKIIDPTPYYDSWLNQLQKEGFNLIEITAIRIALTEISRRKLSGTNLKEDIEIEMEVKKLLPVNPIPPILQPWLETLTASLAEMFPHEKKAKLRAYILCGAIEQCVDLT

SEQ ID NO: 90993 - protein, 564 aa, Komagataeibacter hansenii JCM 7643
MKIFRFKSISLLSHAEKKARRITFSPHRNLLVGGNHTGKSTIIKSLFITLGAYPEGKLSRWDVGAITLVSFTINEKNYSVLYQKPLRALFDDKGSLLFLTFKDGEWGTYFSQLLGFNLALTDKNNETVIADARAFFLPFYINQDGSWFSGWNTFRYMGQYKSPVPSVLDYFTGVKPPEYYELNSMRRTKLFSRADIVRDKLLVEQVRLRLSNKLPLSGPKVVPEAFEQDISRLTSEITELNAKQEDKRNELVRLRETVSSLFLQIQMADEALRNYKKDTRYLQSDHDLDLTCPTCGAEHNKIFFDLLSFTDDARVLFDLSVRLKEDLIDAQNKVRLKEVDLKILNENYVRINKILEIKRGDLIFGDVILGMGGEAASLAFEEELSELKSKIKEINIEIESIDADIAVLVSRKRSSEILSNFRISFEKSASLLNVSFENSKKMNLSSRPDVSGSAGPRSILAYYAAIWSNCSGKYGSFSVPLVIDSPQQQGQDEENLPRMIAFISSHLLGNKQIILGAEATTQETFDHVVRLSAEYRLLQEDEWDEVKDIIDPFLEKIHKYTIEN

SEQ ID NO: 90994 - protein, 365 aa, Acinetobacter baumannii OIFC047
MAEIKTIKTANPLAVVQRETAGASTYGKYEYQYHWALGRVLDEHSNSTDYVVFIELHEDVVYCSSIDGSKVQFEFNQVKNKSSSKYTNKSLTKRTKKDSNSVLGKMLLGIKDKPYRDKLISLNLVATCGFSLQLNGEPLNLEVIKIGDLHEECINDIQVAIDAEIGDKNLPDTLSFITPTLPAKGFQQYTIGQITSLVNKIKAGANHNAESIYRLLMDELRIKGAVTYDYKLWDDLIQKKGLTGITVENTISQFTQSNDLQVRENELTEILNELNFKHHEKAKIRKEFHRYHSSSLQRNLAVLQDHEIMKNIVNINYSVYEDEGLETFIDKTMEQLLKNDKITSSHDNVIKAGLFYELICKNEEH

SEQ ID NO: 90995 - protein, 548 aa, Acinetobacter baumannii OIFC047
MITGDDNSIGKSTLAKLLLWTLGCSTHHDPTWKSFDIRSLLVFNIGNSEYAVGRYNDIIFIKQPSKGWQKFEKITGEYSKLFAEIVGFKVLLPNKKDTTKLETPPPAYYFLPFYIDQESSWTQTWSGFTNLQQYRNWKPTVIKYHTGYINSEYFKILEEISKNQFEKKSVEEKVRTIETSINIITEYLPTSPKVIALTSSQLEDLYQTVNEDLNALQQQQEDFFKKISELNADKIYFQNQLDLALIASQELEKDYQFSIENIEFENISCPICGTKHDNSLVNRASILADKVEAERQIETIKNKLGVLNKNLLKNNGTLKEIETQIQLIHEKYDSSLSANEISQPNKPNILEEIATSTIHNRVQKTIEDSYIQIKKYDSEIRSSKKEQTKLLTKEEKDKLNSNFKLSLSSYIEKLDATAVNLSNISSSSDYSKMHGNGGAAESTRGLLAYYYAVLKQIHNAENEVFAPIIIDTPNQQEQADFNYSKIINFIIQHTPNSAQLFICAMNREEIKTYKEQANTIFLTENKLLDTKKYKELKDLLNFESYDFA

SEQ ID NO: 90996 - protein, 359 aa, Acinetobacter baumannii NIPH 60
MTENILAEPQRESAGASTFGKYNFQYHWALCRVIEKHKSNEEYALLIEYHEDVIIANSLNGQEALFEFYQVKNQSASFTENSLTKREKGKKDTFKSSVLGKLLSSCIGTQYEKRITQIGLVSSSGFSLKTEKNLQLDIIKVGDLSEDCLKNLTDQINNELGISLLPSHLQFIVPEIQLANQEDYVLAQFAKLVNTIFSGAQCNAVDIYRAIIDEMGRKGRIQLDYKEWDRLISKKSLTSDEVNDVLALNTTRPTITQLENDFNDLVSNFGWRPLSTRNLRSKLKTLALKRSGFPTSFDINIIRTVKSLIQKVDYNSFSSDLDYVNALFHQAKVDNLDSIIADSDDLKVEIFYVLLVDDL

SEQ ID NO: 90997 - protein, 574 aa, Acinetobacter baumannii NIPH 60
MRSFQFQRLVLISDSKKLANQFEFPKRLNLVTGGDNSIGKSTLVKNLFWALGCDPDFDEEWKTNDIKAIIYFTVNNISYVASRYHDSIIFGQVGSILRKYPKITGEYSQIFSDIVNFELKLANRSDNLECPPPAYFFLPFYIDQKRSWNQPWNSFDKLTQFSGFTRPLISYFCGYTKSEHFEMQEEFFVQKSIMKEADEQIARISSAIEVIEDISNDKINIALSEAELNHVQNEIEEELQNFLERQTRLFDTQTQINSEIYDLEKQHRIALNSVRELEKDYAFAVEYIPEDVLECPMCGTKHDNSLLSRAGILTDKSLLEEEADFIKESLNQKRTALRNLQEELHDVRFEINRINEKYVISPHENQNQNMQSAIHSIALKNVSQNVADVIVSHESRSKRAEKIQKEIKSDQNKLLTKKEKSDLSYYFFSNLEKNIAILSATGINLNGVKTPMDFKKILGGGAAEGTRGVLAYQLAILKQIEFANNCAIAPFVIDTPNQHEQASENYKRIISLLQHNLSSNIQIILCGMDHDILSDFKKDSHIIQLDRDKILQKKPYNTLSKEYTELVNNINIEA

SEQ ID NO: 90998 - protein, 359 aa, Acinetobacter baumannii CI78
MKNLNILDDEERENKGLDTLLRFEYQIDWAIYHALDKLSQKQEFVAFIEFHEDVLFANSCAFNPSTRFELFQIKTTYKSYTPASLTVLKGPNSTLGKMIIGIKDKTFEKQVDKLCLLCLEDINFSYKIQDVDKDYKFSELHENDKKILKNAISNELNFTIDSNYEDMIIFRKTALSLDQSDRQIKHKIQDFIENNYGDIGMRPASIYRVLADDLRPKSQHKQRYEFWEDCVKYRGLSSQTIAEHIIKNIDQNIEIELKELIESQLKEKGVKTIKIARILKKVREYFLFKICISSAVVQNELDQLLSEINLPLDIDDEKTYWESIDLLDKKINEHVLLKEYNKLQAVAIYEVFKVLYDQF

SEQ ID NO: 90999 - protein, 563 aa, Acinetobacter baumannii CI78
MQNTKSYFQFQRIVMRSLKERGGKVQKLYLRTLIDSKDNTKGKTTLINSLFWGLGCEVKFEETWCDDLETLISFSVADKNYEIYRNNEFISIVSEDEDKSYKYPIKSKKVDSDFIEKLNEILNFNVLLKYAKAKKLSRVPPSYYFATTYIEQMTGWANFWLCFQNMNAFDKNNRTELIKYICGVLDKKYYEKKYSENIITQEKKEIEKTLEKENCNFTYLKGFETDNYLNNVFRKSLTLENYEKNLLTLRNEYLDKASNLSSLTNEIELINIAIGELEQDYEYSVRNVDPFEVTCPTCGVIHENDIVNKFSILKDSDLLLKRIERLIGEKNKTRQELNKLSKLIQFEEENINELMDQNDVQEYLNYSVIQKKMIPAIQRRINHNEILIEEKKNLITESKSERSLIEKENQKDLEDEFVDYFERLCRELEITRGKKKNFTEILNHTSGGANGIKHMLAVRLTLLHAMCTYAESSIPPFVIDSPRQQDINDYNYGLVLKAFDKIPENVQFIVAAVKSQPISEIRDKFEEIFIGKKLLSEDEFDISSLLINKHENKIIFIDSDIKQ

SEQ ID NO: 91000 - protein, 393 aa, Acinetobacter baumannii CI78
MGIQRCFINRTMSDNKEFIDKLLDSEEDEKQGTHAKRGFRYQDWWCTYKTFETWASLNTNFAVGVEIKEDFTIIDCLESPTKIEFFQIKKNERPKLWSINDLIKSPQRKNKKEDSILSKLYSRWLKFMPLDTKMYFITNQKLKGKDVKNNDIEHFDSNLGCDLHPSEVNRITNALQRQLNLSSNEPVELNRIQFCISNMDVNEPDTHVIGKIYSLNEEAKFPIYLRNIGVAAKYLTNHFYQLSSNTNFAINIDQLKERCITRKGFEDIIHKIEDTHKTPEDYMNEGISTLSEEGYPYRSRKQIIKASTEVLLDLRNRNQQHSQNLFFEIDKFFSEQETMINKFDTLSNLINFVSERLFADRKYNFLTLEYIKCSVLIFEVSDGDIYCEQYFNL

SEQ ID NO: 91001 - protein, 547 aa, Acinetobacter baumannii CI78
MKSKIIYKEILILSKKEKKSKKVVLEPKNNIIFGKNHRGKSTVVKSIFWALGLSPTHFFTNGKFDKDITCLLTISYDENIYYFFRNGDNRKLYSDDKNIIFETDENNKWQESMAEFFNYPLSSIHFSNLQEYYLGLQGILTPYYINQDSSWTSKWSGPFNGLTRYLDFYQQVIEHFTGIVSNETVIKKQNQKKLNTRKKELEVELKIYKKSEEQLIITDYKNTPLPDINSSFFKEKLEKTSKILKSCKINQEKLKNEMIEIISEKNKLHNLLKNAYNTHHELVGDKNFLNKIEDNTYLECPTCGTNYLKSLKTDIALEFDIQGIEENIYSLREQIENLNKTEKDLSAKLNLINNEIENLTLETQINNDLNYSFETVIKTFSNRDIKQNLNSNMQSLYEQIFAIDDEIETIQLQINELESEEEIKAKKDKFKHYLKFFYKKLDVDTDILPKQVYFKPNLTGSSSSRSILAAHLAYITLSYELTDFPLFPIVIDTIQQNGQDMPNIDNMVQTIAKFKQHQIILGMETLPNNHQEHSFKITKLINKRALF

SEQ ID NO: 91002 - protein, 359 aa, Acinetobacter baumannii 1043794
MKNLNILDDEERENKGLDTLLRFEYQIDWAIYHALDKLSQKKEFVAFIEFHEDVLFANSCAFNPSTRFELFQIKTTYKSYTPTSLTALKGPNSTLGKMIVGVKGKTFEKQIDKLCLLCLEDINFSNKIEEVDRDYKFSELHENDKKILKNAILNELNFTIDSKYEDMITFRKTALNLDQSDRQIKHKIQDFIENTYGDIGMRPANIYRVLADDLRPKSQHKKRYEFWEDCVKYRGLASQTISEHIVKNTDQNIEIELKELIESQLTEKGEKTIKIARILKKVREYFLFKICINSAVVQNELDQFLSEISLPLDIDDEKTYWKSIELLDKKINEHVLLKEYNKLQAVAIYEVFKVLYDQF

SEQ ID NO: 91003 - protein, 563 aa, Acinetobacter baumannii 1043794
MQNTKSYFQFQRIVMRSLKERGGKVQKLYLRTLIDSKDNTKGKTTLINSLFWGLGCEVKFEETWCDDLETLISFSVADKNYEIYRNNEFISIVSEDEDKSYKYPIKSKKVDSDFIEKLNEILNFNVLLKYAKAKKLSRVPPSYYFATTYIEQMTGWANFWLCFQNMNAFDKNNRTELIKYICGVLDKKYYEKKYSENIITQEKKEIEKTLERENCNFTYLKGFETEKYLNNVFRKSLTLENYEKNLLTLRNEYLDKASNLSSLTNEIELINIAIGELEQDYEYSVRNVDPFEVTCPTCGVVHENDIVNKFSILKDSDLLLKRIERLNGEKNKTRQELNKLSKLIQFEEENINELMDQNDVQEYLNYSVVQKKMIPAIQHRINHNQILIEEKKNLITEFKNERLLIEKENQKDLEDEFVDYFERLCRELEITRGKKKNFTEILNHTSGGANGIKHMLAVRLTLLHAMCTYAESSIPPFVIDSPRQQDINDYNYGLVLKAFDKIPENVQFIVAAVKSQPISEIRDKFEEIFIGKKLLAEDEFDISSLLINKHENKIILIDSDIKQ

SEQ ID NO: 91004 - protein, 361 aa, Acinetobacter baumannii 1289694
MANKNILNEKERENNGLDTQLRFHYQADWAIVYLLEKLLKEEEFVIFVEYHEDVICSNSTHLHDDVEFEFYQIKTTEANFTIDNLCKYEVGGNSIIGKMILGVENKLFKKNVKKLCLLTISDINFKTKIKILGDQCHFTNLEENEIKDILDRLTNELKIVDPIYQNILCFQKSELPFPSSQLSAKGKIAEFIQSKHGDVRSDISSIYRVLWDDLKIKYEYKIPFDQWNECVQKRGLNSEEVKKILATHISLDLSENLKKFIENYINKLSGDDLLTPIRINLINNYYTYLLVNRSPEIIKYLEEMRSKISIPSNILDLNEIQREITKIDLIINDNLQFKEFNRMQSVAIYEVLNKVYEQFTK

SEQ ID NO: 91005 - protein, 551 aa, Acinetobacter baumannii 1289694
MKNTSNSFQFQKIIIVSRTEKSGRVLKIFPRTLITTKGNTIGKSTLLNCLFWALGCEVRFEEDWPELDTVVLIEFSINNKIYKVKRDSQAIHLQEDDEQWATYEKITGSYLDRLNSILNFNVLLKNSKAKKLSKVPPAFYFASTYIEQMSGWNEIWNSFNNLGQFDKNNKFELSKYLCGVLNKNYYDNKLNQNFYELKNFDISKEILKTNEVSDYFRSKRAISPQIDLQDKIKNSARSVVMAERKILEKKNEYINISSRMAAIDNELQIIQVAIGEIEQDYNYSIENIETTSIFCPTCGVEHKNDLVNRFSLIHDQNRLMEQIKNLQNEKSVLINKSYNLTNSIDSFYQEIEGAFKEESFNEDINQLFISKSLIPGLEEKVASDNREFRANTKEIRKIRNENKIIENSNLEEIEKDVVEYFNSLCTDLNIKMYLKHNLYDILNYYSGGANQVKAMLAKRLTILNSIYSHAELSTPPFIIDSPRQQDIDSDNYHNMLNILISNTPDDVQLIIAAVQNNFIDSIKGNFEEINLESTLLTAEEYELANFLISHS

SEQ ID NO: 91006 - protein, 365 aa, Acinetobacter baumannii 1295743
MSEIEKIKTPNPLAVAQRETAGASTYGKYEYQYHWALGRVLDEHSTSSDYVVFVELHEDVVYCSSIDETKALFEFNQVKNKSTTKFTSKSLTKCSKKEPNSVLGKMLVGIKDKPYRDKLISLNLVATCGFSLQLNGEPLNLEVIKVGDLHENCINDIQTAIDLEIGDKSLPDTLSFITPTLPANGFQQYTIGKISSLVNRIKAGANHNPESIYRLLMDELRIKGAVTYDYKLWDDLIQKKGLTGITVENTIAQFTNSNDLKTRENELTEILNELNLKHNEKAKIRKEFHRYHASSLQRNLAVLQVHEIIRNIVNINYPIYEDEGLEVFIEESMSQLLKNDKITSIHIDAIKAGIFYELIGKNEEY

SEQ ID NO: 91007 - protein, 581 aa, Acinetobacter baumannii 1295743
MGNITNLSFKQLTVVSNSQKSANQFNFHPKYNLITGNDNSIGKSTLAKLLLWTLGCSTHHDPTWKALDIRALLVFNIGDNEYTVGRYNDIIWIKQPNENWQKFEKITGNYSKIFAEIVKFKVLLPNKTDSTKLETPPPAYYFLPFYIDQECSWTQTWNSFSNLQQYSNWKPAVIKYHTGYINDQYFEILEKISKSKFDKKTVEEKVKTIETSLNIINEYLPSNSNIIALNSNQLEVLYENVNSDLKNLQKKQEDFFRTISELNADKIYFQSQLDLALIASKELDKDYQFSVENIQDENISCPICGTKHANTLINRASILADKAEADIQIKTIKNKISLINKTLDKNNEKLAEIESEINSINSKYNNSLSINENFKQNNTSIIEEIATSTIHNKVQQTIEQSAIQIKRYGAEIRSYQKEQNKLLTSEEKDKLNSNFKLTLSNYIEKLDATAVNLSNISSSLDYNKMHGNGGAAESTRGLLAYYYAVLKQIYTAENEIFAPIIIDTPNQQEQADFNYSKIINFIEQNTPDSAQLIICAMNRDEIKTYKDQAHTIFLTEHKLLDPQKYNELKNLLNFENYIFNN

SEQ ID NO: 91008 - protein, 361 aa, Acinetobacter baumannii 1475718; identical to SEQ ID NO: 91004

SEQ ID NO: 91009 - protein, 551 aa, Acinetobacter baumannii 1475718; identical to SEQ ID NO: 91005

SEQ ID NO: 91010 - protein, 361 aa, Acinetobacter baumannii 1475718; identical to SEQ ID NO: 91004

SEQ ID NO: 91011 - protein, 73 aa, Acinetobacter baumannii 1475718
MKNTSNSFQFQKIIIVSRTEKSGRVLKIFPRTLITTKGNTIGKSTLLNCLFWALGCEVRFEEDWPELDTVVLI

SEQ ID NO: 91012 - protein, 359 aa, Acinetobacter baumannii 972082; identical to SEQ ID NO: 91002

SEQ ID NO: 91013 - protein, 563 aa, Acinetobacter baumannii 972082; identical to SEQ ID NO: 91003

SEQ ID NO: 91014 - protein, 359 aa, Acinetobacter baumannii 232184; identical to SEQ ID NO: 91002

SEQ ID NO: 91015 - protein, 563 aa, Acinetobacter baumannii 232184; identical to SEQ ID NO: 91003

SEQ ID NO: 91016 - protein, 359 aa, Acinetobacter baumannii 268680; identical to SEQ ID NO: 91002

SEQ ID NO: 91017 - protein, 563 aa, Acinetobacter baumannii 268680; identical to SEQ ID NO: 91003

SEQ ID NO: 91018 - protein, 359 aa, Acinetobacter baumannii 655378; identical to SEQ ID NO: 91002

SEQ ID NO: 91019 - protein, 563 aa, Acinetobacter baumannii 655378; identical to SEQ ID NO: 91003

SEQ ID NO: 91020 - protein, 361 aa, Acinetobacter baumannii 263903-2
MANKNILNEKERENNGLDTQLRFHYQADWAIVYLLEKLLKEEEFVIFVEYHEDVICSNSTHLHDDVEFEFYQIKTTEANFTIDNLCKYEVGGNSIIGKMILGVENKLFKKNVKKLCLLTISDINFKTKIKILGDQCHFTNLEENEIKDILDRLTNELKIVDPIYQNILCFQKSELPFPSSQLSAKGKIAEFIQSKHGDVRSDISSIYRVLWDDLKIKYEYKIPFDQWNECVQKRGLNSEEVKKILATHISLDLSENLKKFIENYINKLSGDDLLTPIRINLINNYYTYLLVNRSPEIIKFLEEMRSKISIPSNILDLNEIQREITKIDLIINDNLQFKEFNRMQSVAIYEVLNKVYEQFTK

SEQ ID NO: 91021 - protein, 551 aa, Acinetobacter baumannii 263903-2; identical to SEQ ID NO: 91005

SEQ ID NO: 91022 - protein, 361 aa, Acinetobacter baumannii 723929; identical to SEQ ID NO: 91004

SEQ ID NO: 91023 - protein, 551 aa, Acinetobacter baumannii 723929; identical to SEQ ID NO: 91005

SEQ ID NO: 91024 - protein, 358 aa, Acinetobacter baumannii 1064293_45
KNLNILDDEERENKGLDTLLRFEYQIDWAIYHALDKLSQKKEFVAFIEFHEDVLFANSCAFNPSTRFELFQIKTTYKSYTPTSLTALKGPNSTLGKMIVGVKGKTFEKQIDKLCLLCLEDINFSNKIEEVDRDYKFSELHENDKKILKNAILNELNFTIDSKYEDMITFRKTALNLDQSDRQIKHKIQDFIENTYGDIGMRPANIYRVLADDLRPKSQHKKRYEFWEDCVKYRGLASQTISEHIVKNTDQNIEIELKELIESQLTEKGEKTIKIARILKKVREYFLFKICINSAVVQNELDQFLSEISLPLDIDDEKTYWKSIELLDKKINEHVLLKEYNKLQAVAIYEVFKVLYDQF

SEQ ID NO: 91025 - protein, 563 aa, Acinetobacter baumannii 1064293_45; identical to SEQ ID NO: 91003

SEQ ID NO: 91026 - protein, 361 aa, Acinetobacter baumannii 225588; identical to SEQ ID NO: 91004

SEQ ID NO: 91027 - protein, 551 aa, Acinetobacter baumannii 225588; identical to SEQ ID NO: 91005

SEQ ID NO: 91028 - protein, 361 aa, Acinetobacter baumannii 1451147; identical to SEQ ID NO: 91004

SEQ ID NO: 91029 - protein, 551 aa, Acinetobacter baumannii 1451147; identical to SEQ ID NO: 91005

SEQ ID NO: 91030 - protein, 212 aa, Acinetobacter baumannii 72431
MQQSPNELKIVDPIYQNILCFQKSELPFPSSQLSAKGKIAEFIQSKHGDVRSDISSIYRVLWDDLKIKYEYKIPFDQWNECVQKRGLNSEEVKKILATHISLDLSENLKKFIENYINKLSGDDLLTPIRINLINNYYTYLLVNRSPEIIKYLEEMRSKISIPSNILDLNEIQREITKIDLIINDNLQFKEFNRMQSVAIYEVLNKVYEQFTK

SEQ ID NO: 91031 - protein, 551 aa, Acinetobacter baumannii 72431; identical to SEQ ID NO: 91005

SEQ ID NO: 91032 - protein, 367 aa, Acinetobacter baumannii
MLDGNHSPQNPLAVPQRETAGANTFAKYEYQYHWALCRILDQHTKSQDYAVFIELHEDVVFSTSTELSKAEFEFNQIKNLTSKPLKAKNLIQRKKDKGKLKNSILGKMVIGVKDKPFFDQLKSLNLVATCGFDINLKNADLKLEVISLDDLHEDCVIELQNAVDIEVGKWPLPSILNLITPGLPDKCFQDVSIGKISSVVNIKKSGANHNPQLIYQVLIDELHRKGTVELDFTKWEDLISNKGLTGIKVEKTISQFTENNSLKQRETELSDILSELGILHHEKTKIKKAFNRYHTSTLQRNLAILQDQGILKEVINNNYSTYENEGLEFFLKISMDQLLKNDKITLKDVCDLNAGLLYELICKNEEF

SEQ ID NO: 91033 - protein, 579 aa, Acinetobacter baumannii
MGNIINLSFKQLTIVSNSQKSANQFNFHPKYNLITGSNNSIGKSTLAKLLLWSMGCSPNLDKTWKNLDIKSLLIFNIGDKEYSVSRYGNQIFFKQPSQAWQVFEKISGLYSELFAQIMKFHVLLPNKTQTTKLETPPPSYYFLPFYIDQKISWTSTWSGFANLSQYSNWRDTVIKYHTGYIDSQYFELQEKIYEKLTEKKSAEEKVKSLETSISVISTYIPTNSRITALTPEDLNKLYQLVTEDLKDLQNKQENFFSLISEQNASKVYYQSQLDLAKLAAHELEKDYRFSVENINNDSIFCPICGTEHDNSIVSRASILADKAEADEQIKSIQKKLDYINHQIIKNSKLLEDVEHQINLINQKYDSSLTNSNMSENISPNILEEIATSTIQIKVHKTINQENITIKTLEKDIKINKKEQKKLSTIEIKESLDAAFKLSLSSYIKQLDATTVNLADISSALNANRMHDNGGAAESTRGLLAYYYAVLKQIYNANNEVFAPIIIDTPNQQEQANFNYSKILDFIIRHTPSTSQLIICAMDRSEIQEYKDQANTIFLTENKLLDTKKYKELKTLFTFETFST

SEQ ID NO: 91034 - protein, 359 aa, Acinetobacter baumannii; identical to SEQ ID NO: 91002

SEQ ID NO: 91035 - protein, 563 aa, Acinetobacter baumannii; identical to SEQ ID NO: 91003

SEQ ID NO: 91036 - protein, 361 aa, Citrobacter freundii
MERNVLGHAQREISGATTFGKYDFQYHWALCRIMEKHKSNSDYALLIEYHEDVVIADSLYGSSAKFEFFQVKNTGKPFTSDALTKREQGAEGAKSSILGKLLSSCIGTDHEARITEIGLVSSSGFSFEQRDKKLKLDVITSGDLSVDCLSGLTGKLKDELGISLLPENLKFIVPKIKLENQEEFVIGRFAELVNEIFPNSHCNAVNIYRAIIDEIHRKGQNSYDFTVWEKMVEDKSLTSHKVKDVIAVNTTSPKFEDFEKDFEYLAKNDMKWNTLTYRKINKKIKQLFLRRTGHSSAFDMNIMRIVQQALSSVSEEDFTETRDYIESVIVKAQELNIEDQVPEYDDILCEVIYSFLKVMHE

SEQ ID NO: 91037 - protein, 577 aa, Citrobacter freundii
MRNLTFQRLVLISDSKRLANQFSFQKRLNLITGKDNSIGKSTLAKSLLWSLGCDPVFDEEWKSNDIKSILYFTINNKEYFSCRGTHSIILGAIGDEAQRYINITGDFSKDFSDLVNFKMKLPNRGDGNLETPPPAYYFLPFYIDQIKSWSSPWNSFENLGQYSNWKAPLIKYFTGYLKPEHFDIEENIYEYSEIKKESAHKIEKFQSAVEVIVDNSVDSHIALDNDDFIKIQNEIKNELYDLIDYQTRLYDAQATITSNIYDLESQYTLAITSANELEEDYKFAVESIPTDNLECPLCGTLHDNSLPNRALLLSEKDSLLNEANSIASKIAELNSSLNSLNDDVQFITNEIDRINKKYITDDDVVEKDLIAQVIDTISTENVSKNIQIKINNEDLNFNKANSSIKELKKDQKKLLSTKEREELNSSFMSKLLANIEALGSTGINLSKVKTPTDYKQLLGGGAAEAARGLLAYQLSILQQIHGAKSCVVPPFVIDTPNQQEQAGYRYETVIKELMRSVPQDYQIILCAMENDALNKFKHDANVIELNSNRLLTASQYNSLRSEYKYLQSMITGQSEKE

SEQ ID NO: 91038 - protein, 361 aa, Enterobacter aerogenes
MGLAETLVSIPQSERGGEIAQRGFDYQTCWALSQMLEYELDEKNYVFIFEYHDDVLILDDEVSPTQLTFAQVKTREKHWTASTLSNSTKKNPISIIGKLFIHQKNFAEYSPKLLFVTNASFNLCEENGGKSCFGANEVKVEYQTSFKKAIKDQVKLDDSSIDLSVMRFVQSSLSLDDHITHLKGKLCDFLSKKFGDSISLSVNALASLLEQACREKSKVKSADIINFPELISRKGFSSEALNGVLDSLNASNSLKPDWDKASPLFNDLGKTSLQLIILQAMFSQVCIDLNQNKKNPSTVYLEYAISLYDEASAHSDLKLYLTETMYKIDALCPDYALTLKSGKKECIVIYSIIQKLLEGGE

SEQ ID NO: 91039 - protein, 550 aa, Enterobacter aerogenes
MKSIYFKSAHILSLRDKKGFSFKFSPDINIITGENDTGKSSFIKSLYHTLGADVRLDKKWKEDNFVSKVVICVNNRDYAFLRHEKRISIFDITAGQEHHLVTSSSRAEIALAVRDVFDFNLELVTKTNLVQGQAQPASLYLPYYIDQDNGWGKVLDSFSSLAMYEDWQKNILNFHTGVKPKEYYTLQGKINLIDIDLVEIRTTLKALKRAKKRFEESFGRVLFDVDVKYYEELLERFLRKCQDLHQEETEYRIKLIKILSLRDELVTEIEESKRQLDENDIDSLLPSAGLEARYVVLENKEKLLQIIPKLYEEKSVYDDQLSKIKEDLKQAISLSSELKNMLLEVKEQLTLQDVIKSQASKQVEVTFDEQINELLLKIGELDVARTQLSKEIAKFEDKKRAKEINDKFKESLKFAQTELGIKDPKVGTILQYGPISKSETGSRAPRSILAYHYALLKTIEDKSTSPMLPVVIDSPKQQDPDPRTTKKLFDLCINGLSTNSQLIIGSVSFERETNQFKTLIMTEKYSLLKSELYNQVYQEIMPLYERAALS

SEQ ID NO: 91040 - protein, 394 aa, Enterobacter aerogenes
MAELHEVKPREQAGRDTLERYNAQIRAASIACLSILEGKDVKRVFCEFHDDFVVERVVANDIHYTFVQVKTKEKLREIWKLREVFGILKRKTKKNPQTDEMIRDSFVGKLLQHTINFEDTCKEVIFLTNTHIDEDIENVIDDIKTDAFSSVHCKLIIDSFNNCFISIRDGKKNLEIEEIKENLKKLKFKTDVEYIKSKHETFEILAKEKIFKYSEIDLSHIEAKEILLSLLALVNNKSSVKINDCSRGNIKDLSGIDIDDLLDVLSISKNAYYEFLYNGDEHALKSASVIERLLRKAGASESQIDFFARCKIKWDQWLRKNRHVISDLDYITIDSEINSTLDKLTFMHGVLFLSGLRSVVNELHDSLFENNLLNSLDKEALTGSLFARLVERSK

SEQ ID NO: 91041 - protein, 583 aa, Enterobacter aerogenes
MKLLSLKINGRDFSGLESDELIFGEHITELYGPNGCGKTPLLQSISYCLGYPCKFREDIYKLCKSATLTFTIGNDNFRATRDFEHTEFILSLVCNSKKSMFYNQADYSKYILEKLSLAYPSLLTTQNKQSYPYLATILPIFYLDQDFGYSKFYYSPNNFIKDQFSEMLRIVFFLPEKHSFDVKKKSINIMEEIKYLDNSLAIQRRDIEIAKEANKDKDIESIDNSIIDLKNELSVLKNSKSLKNDSLHSIDEIIRRQKENLRDLNEELSFIARRESSLVQIMKEINTEINTLNLNEEAKRIFRSFEEICPSLDCKMFSRSSESYAKHLLYLKDQIKDIERSLNLDGGRYDQITQEIAYVNKTVEDLNSMRNGIIEEEDLSSVIDAISSITSMLFKLQLEKSELHKISILEDKYVEMLNKRENALDKLEGLGKNRQSIPRLTRVKSTLREKYISWLKVLKTPNIDFNISFEQDFSPVLGFETLEQLKGSTKVRAILAYRSALIESMLELENKSFMFAIFDTPKQHEIHYEDINNFIFNLKKLSQKFNFQFIFSSTEYKYLGDENDILLTPKYPGEQHEMFLRRY

SEQ ID NO: 91042 - protein, 361 aa, Enterobacter cloacae
MGLAETLVSIPQSERGGEIAQRGFDYQTCWALSQMLEYELDEKNYVFIFEYHDDVLILDDEVSPTQLTFAQVKTREKHWTASTLSNSTKKNPISIIGKLFIHQKNFAEYSPKLLFVTNASFNLCEENGGKSCFGANEVKVEYQTSFKKAIKDQVNLDDSSIDLSVMRFVQSSLSLDDHITHLKGKLCDFLSKKFGDSISLSVNALASLLEQACREKSKVKSADIINFPELISRKGFSSEALNGVLDSLNASNSLKPDWDKARPLFNDLGKTSLQLIILQAMFSQVCIVLNQNKKNPSTVYLEYAISLYDEASAHSDLKLYLTETMYKIDALCPDYALTLKSGKKECIVIYSIIQKLLEGGE

SEQ ID NO: 91043 - protein, 550 aa, Enterobacter cloacae
MKSIYFKSAHILSLRDKKGFSFKFSPDINIITGENDTGKSSFIKSLYHTLGADVRLDKKWKEDNFVSKVVICVNNRDYAFLRHEKRISIFDITAGQEHHLVTSSSRAEIALAVRDVFDFNLELVTKTNLVQGQAQPASLYLPYYIDQDNGWGKVLDSFSSLAMYEDWQKNILNFHTGVKPKEYYTLQGKINLIDIDLVEIRTTLKALKRAKKRFEESFGRVLFDVDVKYYEELLERFLRKCQDLHQEETEYRIKLIKILSLRDELVTEIEESKRQLDENDIDSLLPSAGLEARYVVLENKEKLLQIIPKLYEEKSVYDDQLSKIKEDLKQAISLSSELKNMLLEVKEQLTLQDVIKSQASKQVEVTFDEQINELLLKIGELDVARTQLSKEIAKFEDKKRAKEINDKFKESLKFAQTELGIKDPKVGTILQYGPISKSETGSRAPRSILAYHYALLKTIEDKSTSPMLPVVIDSPKQQDPDPRTTKKLFDLCINGLSTNSQLIISSVSFERETNQFKTLIMTEKYSLLKSELYNQVYQEIMPLYERAALS

SEQ ID NO: 91044 - protein, 369 aa, Enterobacter cloacae
MAKNKAVNAGVDALTGFEFQRNCALYLLLDNFNSFINKEFFICIEHHDDFLFCYKTDCLSYINEIHAYQAKKLSGKIWTIDSRFSEMVSKILLVGENLRNDAFEKSEDYKHQLTFISNTEIELKYSPSKALKKQGIAEQVLRVNEQNSICVYDELHKNIKNKIEEKVTDICNEESSVFHRKELSNLKIQWVDFPRTAAKQKESLIGLMSRKFSHIADSKAAIEVILALFRNVETVYNQGQEICLLDPTKRVEGEEVKKVMNIIDSQQKAFDYWRTSAQQLSIQFRIPLNIQKNHEAYIINSFELLKDMSNFDYQLIKNFVRNNDYTAQYYSLQDILTAYIDGVRKSHSINLTNVDMFFAVLCSYVECYD

SEQ ID NO: 91045 - protein, 587 aa, Enterobacter cloacae
MKTIINFDRLFVVSESHNVYFDQRFTNGVNIISGCNTSGKSTLLQSILFTFGINDVKDGLNEIIRYNPIFRLDFSITKKGVEKKYVILREAGVIYLKEDGGSIVSFNGIDADSRFEHVKLKEKLSQLFGFGMLLEQKGELKTASIECIFLPYYISQSVGWVYLRESFSNLGFYKDFKDTYLDYYLGIENSFDKESFYQLTKERLQLQSKISSLNKYSNEPRLVISKLLDEEFGEEAQRYIDSYIHLVALLDEERDIYTNLGNKLSLTKNHIKILKRTKRNIKHQNYNNVDRCPACTQILPYSLEGLYGFHQNINDTDKLLEQLNIKIQSTQSDINSSRTKIKKLEIEISSKYSYFLEKKSQTVSVNEWIDNKANVRLLNNIHNEIEEHTKRSDEIKELIGEMGEEQSLFVERSHKEKDFKDIFQKYLNEMQLFNVKEARYTNLYKINSFPFQGVELHKTVMSYHFALNDLISKSENIHRLPFMLDAILKEDIDDRNFDLILSFVGKNLPKDTQSFISISEYSEDKLLKDGKEVSAFRRARVKNIKDRYFPDDTNLFFIGDGKHERTFLSKPLDLNLDIYVDTCQLTE

SEQ ID NO: 91046 - protein, 369 aa, Enterobacter cloacae; identical to SEQ ID NO: 91044

SEQ ID NO: 91047 - protein, 587 aa, Enterobacter cloacae
MKTIINFDRLFVVSESHNVYFDQRFTNGVNIISGCNTSGKSTLLQSILFTFGINDVKDGLNEIIRYNPIFRLDFSITKKGVEKKYVILREAGVIYLKEDGGSIVSFNGIDADSRFEHVKLKEKLSQLFGFGMLLEQKGELKTASIECIFLPYYISQSVGWVYLRESFSNLGFYKDFKDTYLDYYLGIENSFDKESFYQLTKERLQLQSKISSLNKYSNEPRLVISKLLDEEFGEEAQRYIDSYIHLVALLDEERDIYTNLSNKLSLTKNHIKILKRTKRNIKHQNYNNVDRCPACTQILPYSLEGLYGFHQNINDTDKLLEQLNIKIQSTQSDINSSRTKIKKLEIEISSKYSYFLEKKSQTVSVNEWIDNKANVRLLNNIHNEIEEHTKRSDEIKELIGEMGEEQSLFVERSHKEKDFKDIFQKYLNEMQLFNVKEARYTNLYKINSFPFQGVELHKTVMSYHFALNDLISKSENIHRLPFMLDAILKEDIDDRNFDLILSFVGKNLPKDTQSFISISEYSEDKLLKDGKEVSAFRRARVKNIKDRYFPDDTNLFFIGDGKHERTFLSKPLDLNLDIYVDTCQLTE

SEQ ID NO: 91048 - protein, 361 aa, Enterobacter cloacae
MESNILGHAQRETSGATTFGKYNFQYHWALCRIIEKHKSNADYALLIEYHEDVVIADSLFGSSAKFEFFQVKNTGNSFTVDSLTKRVKGAEGLKNSILGKLLSSCIGTEYETRITEIGLVSSSGFSFDQKDNKLKLDIITSGDLSVDCLSGLTGKLKYELGIDIFPENLKFIIPKIKLENQEEFVIARFAELVNEIFPNSHCNAVNIYRAIIDEIHRKGQNTYDFTMWEKMVEDKSLTSHTVKDVIAVNTTSPKFEDFEKDFEYLAKSDMKWNTLTYRKMVRKIKQIYLRRVGYASAFDMNIMRIAQQALSNVPEEDYTETSDYIKAVVMKAKELNIESQIPEDDDILCEIIYCFLKVMHE

SEQ ID NO: 91049 - protein, 577 aa, Enterobacter cloacae
MRSLQFQRLVLISDSKRLANQFTFPKRLNLITGEDNSIGKSTLAKSLLWSLGCDPVIDEEWKSNDIKSILYFTINNKEYFSCRGSHSIILGAIDGEAKRYTHITGDFSQDLSDLVNFKMKLPNRTDGKLETPPPAYYFLPFYIDQIKSWSSPWDSFENLGQYANWKKSLIKYFTGYLKPEHFELEEEIYEYSEVKKESTAKIEKFQSAVDVIVDNSADITIALDNEKFSEIQKEINTELQEFIDYQRKLYDAQATITSNIYDLEKQYELATSSANELEEDYKFAVESIPTDHLECPLCGTLHDNSLTNRALLLSEKDSLLDEANSIASEIEALRSSLFELNEVAQFATNEIERINKKYLTDDNEGEKTLITQVIDAISKEKVSRSIQVKIDNEDLKISKANNSVAELKKDQRKLLSNKDKEELNSSFMSKLLGNIEALGSTGVNLSKVKSPTDYKQLLGGGAAEAARGLLAYQLSVLQQINSAKTCIVPPFVIDTPNQQEQAEHRYETVIKELMRSIPEDYQIILCAMENNALNEFKHDANVITLNSEKLLDSSQYDSLRSEYKNIQLAVRETRDDD

SEQ ID NO: 91050 - protein, 369 aa, Enterobacter cloacae
MAKNKAANAGVDALTGFEFQRNCALYLLLDNFNSFINKEFFICIEHHDDFLFCYKTDCLSYINEIHAYQAKKLSGKIWTIDSRFSEMVSKILLVGENLRNDAFEKSEDYKHQLTFISNTEIELKYSPPKALKKEGITEQILRINEQNSICAYDELHKNIQNKIEEKVTDICNEESSVFHRKELSNLKIQWVDFPRTAAKQKESLIGLMSRKFSHIADSKAAIEVILALFRNVETVYNQGQEICLLDPTKRVEGEDVKKVMNIIDSQQKAFDYWRDEAQQFSMKFRIPLSIQKNHENYILNSFELLKDMSNYDYQIIKDFVRNNDYTTQYFSLQDALTAYVDNVRKSHSINLDNIDTFFAVLCSYVECYD

SEQ ID NO: 91051 - protein, 587 aa, Enterobacter cloacae
MKTIIKFDRLFVVSESHNLYFDQKFSNKINIISGCNTSGKSTLIQSILFTFGINDVKDGLSEIIRYNPTFRLDFSLTKGGVDKKYIIVRELGSIYLKEDGGNVFSFHGIDSDSRVEHVKLKEMLSQLFDFNMLLEQKGELKKASIECMFLPYYISQSVGWVYLRESFSNLGFYKDFKDTYLDYYLGIENSFDKEYFYKLTKERAQLQSKISSLNKYSAEHHFVVSKLLDEEFGDEAQKYIDGYIKLVASLDEERDVYTGLCNKLSLTKNHVKILRRTKRNIKNQNYNNIDRCPACTQILPYSLEGLYGYYQNINDTDKLSEQINNKIQKIQSDINSSLAKIKKLEIDISSKYSYFLEKKSQNLSVNTWIDNKANIRLLGNIHEEIEEYTKRSDEIKGLIDGMGEEQSLFVERFNKEKDFKEIFKEYLNDMQLFNVTEPRYTDLYKINSFPFQGVELHKTVMSYHFALNSLIRKTDNIHRLPFMLDAILKEDIDDRNFDLILSFVGKNLPTDTQSFISMSEYAEDNLLKDGKEISAFRRAKVKDIKNRYFPDGTNLFFIGDGKHERTFLSKPLDLNLDIFVDTCRLTE

SEQ ID NO: 91052 - protein, 394 aa, Pectobacterium carotovorum
MAELHEVKPREQAGRDTLERYNAQIRAASIACLSILEGKDVKRVFCEFHDDFVVERVIANDIHYTFVQVKTKEKLREIWKLREVFGILKRKTKKNPQTDEMIRDSFVGKLLQHTINFEDTCKEVIFLTNTHIDEDIDNILDDIISDTFSNVHCKLIIDSFNNCFISISNENKKLDIEGIKENLKKLKFETDVEYIKSKHETFEILAKEKIFKYSEIDLSHIEAKEILLSLLALVNSKSSVKINDCSKENINNLSGIDIDDLLDVLSISKSAYYEFLHDGDEHALKSASVIERLLRKAGASEIQIDFFARCKIKWDQWLRKNRHIISELDYVTIDSEINSTLDKLTFMHGVLFLSGLRTAVNELHDSLFESNLLNCLDKEALTGSLFARLVERSK

SEQ ID NO: 91053 - protein, 583 aa, Pectobacterium carotovorum
MKLLSLKINGRNFSGLESDELIFGEHITEFYGPNGCGKTPLLQSISYCLGYPCKFREDIYRLCKSATLTFTIGNDSFRATRDFEHTDFILSLDCNGKISMFYNQADYSKYILEKLSLAYPSLLTTQNKQSYPYLATILPIFYLDQDFGYSKFYYSPNNFIKDQFSEMLRIVFFLPEKHSFDVKKKSINLTEEIKYLDNSLAIQRRDIEIAKEANKDKNIEFIDNSIIAFKNELTVLKGSKSLKNDSLHSIDEIIKKQKENLRDLNEELNFIARRESSLVQIMKEINTEVNTLSLNEEAKRIFRSFEEICPSIDCKMFSRSSESYAKHLLYLKDQIKDIERSLNLDGGRYDQITQEIAYVNKTIEDLNSMRNGIIEEEDLSSVIDAISEITSMLFKLQLEKSELQKISILEDKYVEMLNKRESALDKLEGLGKNRQSIPRLTRVKSTLREKYISWLKVLKTPNVDLNISFEHDFSPVLGFETLEQLKGSTKVRAILAYRSALIESMLELENKSFMFAIFDTPKQHEIHYADINNFIVNLKKLSQKYNFQFIFSSTEYKYLGDENDIFLTPKYPGEQHEMFLRRY

SEQ ID NO: 91054 - protein, 394 aa, Pectobacterium carotovorum subsp. actinidiae
MAELHEVKPREQAGRDTLERYNAQIRAASIACLSILEGKDVKRVFCEFHDDFVVERVVANDIHYTFVQVKTKEKLREIWKLREVFGILKRKTKKNPQTDEMIRDSFVGKLLQHTINFEDTCKEVIFLTNTHIDEDIENVIDDIITDAFSSVHCKLIIDSFNNCFISIRDGKKNLEIEEIKENLKKLKFETDVEYIKSKHETFEILAKEKIFKYSEIDLSHIEAKEILLSLLALVNSKSSVKINDCSRGNIKDLSGIDIDDLLDVLSISKNAYYEFLYNGDEHALKSASVIERLLRKAGASESQIDFFARCKIKWDQWLRKNRHVISDLDYITIDSEINSTLDKLTFMHGVLFLSGLRSVVNELHDSLFENNLLNSLDKEALTGSLFARLVERSK

SEQ ID NO: 91055 - protein, 583 aa, Pectobacterium carotovorum subsp. actinidiae
MKLLSLKINGRDFSGLESDELIFGEHITELYGPNGCGKTPLLQSISYCLGYPCKFREDIYKLCKSATLTFTIGNDNFRATRDFEHTEFILSLVCNSKKSMFYNQADYSKYILEKLSLAYPSLLTTQNKQSYPYLATILPIFYLDQDFGYSKFYYSPSNFIKDQFSEMLRIVFFLPEKHSFDVKKKSINIMEEIKYLDNSLAIQRRDIEIAKEANKDKDIEFIDNSIIDLKNELSVLKNSKSLKNDSLHSIDEIIRRQKENLRDLNEELSFIARRESSLVQIMKEINTEINTLNLNEEAKRIFRSFEEICPSLDCKMFSRSSESYAKHLLYLKDQIKDIERSLNLDGGRYDQITQEIAYVNKTVEDLNSMRNGIIEEEDLSSVIDAISAITSMLFKLQLEKSELHKISILEDKYVEMLNKRENALDKLEGLGKNRQSIPRLTRVKSTLREKYISWLKVLKTPNIDFNISFEQDFSPVLGFETLEQLKGSTKVRAILAYRSALIESMLELENKSFMFAIFDTPKQHEIHYEDINNFIFNLKKLSQKFNFQFIFSSTEYKYLGDENDILLTPKYPGEQHEMFLRRY

SEQ ID NO: 91056 - protein, 376 aa, Escherichia coli MS 115-1
MMLLRESIELNIREYMGLAETLVSIPQSERGGEIAQRGFDYQTCWALSQMLEYELDEKNYVFIFEYHDDVLILDDEVSPTQLTFAQVKTREKHWTASTLSNSTKKNPISIIGKLFIHQKNFAEYSPKLLFVTNASFNLCEENGGKSCFGANEVKVEYQTSFKKAIKDQVKLDDSSIDLSVMRFVQSSLSLDDHITHLKGKLCDFLSKKFGDSISLSVNALASLLEQACREKSKVKSADIINFPELISRKGFSSEALNGVLDSLNASNSLKPDWDKASPLFNDLGKTSLQLIILQAMFSQVCIDLNQNKKNPSTVYLEYAISLYDEASAHSDLKLYLTETMYKIDALCPDYALTLKSGKKECIVIYSIIQKLLEGGE

SEQ ID NO: 91057 - protein, 115 aa, Escherichia coli MS 115-1
MKSIYFKSAHILSLRDKKGFSFKFSPDINIITGENDTGKSSFIKSLYHTLGADVRLDKKWKEDNFVSKVVICVNNRDYAFLRHEKRISIFDITAGQEHHLVTSSSRAEIALAVRD

SEQ ID NO: 91058 - protein, 375 aa, Escherichia coli KTE171
MLLRESIELNIREYMGLAETLVSIPQSERGGEIAQRGFDYQTCWALSQMLEYELDEKNYVFIFEYHDDVLILDDEVSPTQLTFAQVKTREKHWTASTLSNSTKKNPISIIGKLFIHQKNFAEYSPKLLFVTNASFNLCEENGGKSCFGANEVKVEYQTSFKKAIKDQVKLDDSSIDLSVMRFVQSSLSLDDHITHLKGKLCDFLSKKFGDSISLSVNALASLLEQACREKSKVKSADIINFPELISRKGFSSEALNGVLDSLNASNSLKPDWDKASPLFNDLGKTSLELIILQAMFSQVCIDLNQNKKNPSTVYLDYAISLYDEASAHSDLKLYLTETMYKIDALCPDYALTLKSGKKECIVIYSIIQKLLEGGE

SEQ ID NO: 91059 - protein, 550 aa, Escherichia coli KTE171; identical to SEQ ID NO: 91039

SEQ ID NO: 91060 - protein, 363 aa, Escherichia coli KTE43
MDSKIEMDNPLASPQRESAGADSYDRFEYQYHWALCQAFSAYKDAKDFAVFMEYHEDVIIADSLDKEKVKFKFNQVKANSTGSYTINKLTKREKGVNGDKPSLLGKLCSSVNNKSYLGKVTELNFVSTVGFNFSPKDRLKLRAVGLSDLDSGDFTTITDHLNKEVEEFSSFPKEIIRFVYSDIPLQSYYEHTITRITDSVEVVFPKHLLKPKDIYRVLMDALRIRGKDTFDYDKWDEAIVKKALTYDDLHKVVTKGISGDNSEVDLEAAKYIINDLKVSGLEKAKLLKEISAYSLLVLSPSLAMLETRNNIQEVINKNHCELNGSIMYDLLERFSDEIPEKTKSLFDSKRSLIAAIIYEIILS

SEQ ID NO: 91061 - protein, 420 aa, Escherichia coli KTE43
MRKLILEKIVIISHSTKSARQFEFGRNLTLITANDGNSVGKSTLAKMIFWSFGCEPFFSKVWKKLDCSSIIMFSIDDEPFALHRYKNQMSLRKNGQLIKAYDKITGAFSEKFAELVKFDVLLPKKNTFNLEVPPPAYYFLPFYIDQKRTWVKAWDSFANLQQYSKWAKPVISFHSGLISKEHFIVEEDIYEVKAQVNEVESNINELTNAVAILKSNITQQFYIANSEDLVIEILKYEELIKLNLEESSNLKIDIIGLDSQVKLAESIISELDKDYIFSVENMNEGSIECPTCGTIHENSIAHRSSILIDKETAERQLSLLLNEKKHLQDKLKSLNEALLELKEKLKYVQIAFEKSNSKEFSEFTTNNVDKQVEIIVGNKKVDLETKRLKEQGLIKTQGDLVTKQQKDKIKENFANTFLNI

SEQ ID NO: 91062 - protein, 361 aa, Escherichia coli 2785200
MGLAETLVSIPQSERGGEIAQRGFDYQTCWALSQMLEYELDEKNYVFIFEYHDDVLILDDEVSPTQLTFAQVKTREKHWTASTLSNSTKKNPISIIGKLFIHQKNFAEYSPKLLFVTNASFNLCEENGGKSCFGANEVKVEYQTSFKKAIKDQVKLDDSSIDLSVMRFVQSSLSLDDHITHLKGKLCDFLSKKFGDSISLSVNALASLLEQACREKSKVKSADIINFPELISRKGFSSEALNGVLDSLNASNSLKPDWDKASPLFNDLGKTSLQLIILQAMFSQVCIDLNQNKKNPSTVYLEYAISLYDEASAHSNLKLYLTETMYKIDALCPDYALTLKSGKKECIVIYSIIQKLLEGGE

SEQ ID NO: 91063 - protein, 550 aa, Escherichia coli 2785200; identical to SEQ ID NO: 91039

SEQ ID NO: 91064 - protein, 394 aa, Escherichia coli KTE73
MAELHEVKPREQAGRDTLERYNAQIRAASIACLSILEGKDVKRVFCEFHDDFVIEKVIASDIRYTFVQVKTKEKLREIWKLRDVFGILKRKSAKNPQTDEMIRDSFVGKLLQHTINFGESCNEIVFLTNTHVDEDIENIIDDIVSETFSNTHCKLIIDSFNNCFISIQEDHEKLDIDTIKQNLKKLKFETDVEYIKSKHETFEILAKEKIFKFSEIELSHTEAKEILFSLLALVNSKSSVKINDCSSENIKKLAGIDINDLLDVLSISKRAYYDFLDNGDEHALKSASVIERLLRKAGANDMEVDFFTRCKIKWDQWLRNNRHIISEFDYITIDREINATLDKLTFMHGNLFLSNLRTFINELYNSLHQNNLLHSLDKEALTGSLFSRLVERSK

SEQ ID NO: 91065 - protein, 583 aa, Escherichia coli KTE73
MKLVSIKIKGRGIVGLESDELVFGKNITEFYGPNGCGKTPLLQSISYCLGYPCKFRDDIYKLCKSATLTFTIANDIFKATRDFEHTDFILSLESNKEILKFYNEADYSKYIFEKLSLNYPSLLTTQNKQSYPYLSTVLPIFYLDQDLGYSKFYYSPRNFIKDQFSEMLRIVFSLPEKHSFDAKKKNINLTEEIKYLDNSLAVQRRNIEIAKDVHKDKNIESIDSSINNLKDELTELKNSKSLKNDSLVSIDAVIRNQKENLNTLKSELKFMERRESSLLQIMKEINTEINTLNLNEEAKRIFRSFEEICPSLDCKMFTRSSESYAKHLLYLKDQIKDIERSLKLDSDRHDAIEQEIKHTSKTIEDLNTMRTNIIEEEDISSVIDAISEITSMLFQLQLEKNELNKIALLEAKYVEMLNKREHALDELDGLDKNRQTIPRLAKIKTTLRDKFIFWLKVLKTPNIDFNITFENDFSPIMGYETLEQLKGSTKSRAILAYRSALIESMIELNCKSFMFAIFDTPKQHEIHHEDIDNFIMALKKLSKKHNFQFIFSSTEYKYNGDDDDIILTPKYPGEQHDMFLRRY

SEQ ID NO: 91066 - protein, 363 aa, Escherichia coli UMEA 3201-1; identical to SEQ ID NO: 91060

SEQ ID NO: 91067 - protein, 555 aa, Escherichia coli UMEA 3201-1
MRKLILEKIVVISHSTKSARQFEFGRNLTLITANDGNSVGKSTLAKMIFWSFGCEPFFSKVWKKLDCSSIIMFSIDDEPFALHRYKNQMSLRKNGQLIKAYDKITGAFSEKFAELVKFDVLLPKKNTFNLEVPPPAYYFLPFYIDQKRTWVKAWDSFANLQQYSKWAKPVISFHSGLISKEHFIVEEDIYEVKAQVNEVESNINELTNAVAILKSNITQQFYIANSEDLVIEILKYEELIKLNLEESSNLKIDIIGLDSQVKLAESIISELDKDYIFSVENMNEGSIECPTCGTIHENSIAHRSSILIDKETAERQLSLLLNEKKHLQDKLKSLNEALLELKEKLKYVQIAFEKSNSKEFSEFTTNNVDKQVEIIVGNKKVDLETKRLKEQGLIKTQGDLVTKQQKDKIKENFANTFFKYITKLKVSIDVSLIKSPLDYSKVYEVGGAAEDARAVLGYYLALYDHISEYCNEVVPPLVIDTPNQQEQSTENYNKIVEAISRGLTENKQYIICAMQHNALDNLSQDAKVIRLDERKILTSSEYEEAKELEEVFLFI

SEQ ID NO: 91068 - protein, 359 aa, Escherichia coli UMEA 3206-1
MALSDALITVNQAERGGENALRGFSYQASWGINYLLEKQKEKEKYLFLFEYHDDILVLNSSVSPTSAEFIQVKTKKDGKWTLAAIVNATKAKPKSFVAKLYDHFYQFVGHEIYMVLLSNAGFDFLNDNNEKGSDLNNEHKEIIISKVQEQLNTKKEVPLDKIKFKTSDLSLLDPNSHLYGKVAVFLNSYFGDDHGINSTAFTKLLINKCNEKVSVASSDIKTFEDLVLKKGISSEFVTDLLSGLIASIKITPKWEQVCMLLGTFSDPYEGIKLQSVFTRISIKVLNVNSIYYLYFLEFQSALKSIEHYREIPVRDLFFTLEKTIAAGDGDFSLLNQEEKFMIAIYAIIKLTFEDVSYEE

SEQ ID NO: 91069 - protein, 84 aa, Escherichia coli UMEA 3206-1
MKNNVKFKNIKILSLRDRKAFSYEFSEGVNFIYGTNDVGKSSLIKSLYYTLGGDLRLDDAWKSDDIVTLVEINNGESDFIFFAL

SEQ ID NO: 91070 - protein, 357 aa, Escherichia coli UMEA 3240-1
MNLANALIQVPQDERGGEIAIRGFEYQRCWAIDELLNRHKKNESYVFIPEYHDDILILNSPVSPTIATFAQVKTRDTHWTITPLIKSDGEGKLSFISKLFKHKYDFSSYQTDLTFITNALFKFFDKYEFNADELKEKEKGKVLNAVQAQLPGFSLSDLSSLKFKTSNLSLLDYDAHLLGKTVEYLEDTNASEVINAMAFKRTLVELFEKKTRVSSKEIKTFNELIEKKGISNELISELTLKIKALKTNFPDWENMSLLLSVLHKDDFEKLTLKIKYELFLVNVKNASSIEHDFYRSLKQYNYKGKLNATNIPDFILGSISYASKQLDEFGQLIDDDYKYIMACCAVIEMMSDNEAKK

SEQ ID NO: 91071 - protein, 554 aa, Escherichia coli UMEA 3240-1
MNQVIFKRVAILSLSEKKAFTFNFSEGLNFIHGTNDTGKSSLIKSLYFCLGGDLRLDDSWKKQEIITKLTLSYQDNIIDFIRKSSYFVVTVYKDGVKKSEKLFSKVSELTGEIQSLFGFNLLLTLKKNKETILANPASFFFPFYIDQDDGWSNVLESFNGLKMYVDWQKNALQYHSGIKPKEYYALNGEQKILALNINELEQEAELIRKTKFRFEKYFENIRFDIDVNFYIDKIDYFIKQCEDLELQERIYRLQALNLYSKRNIVSDLIFNIENERVNVSSEENGEDDISFSLNKYEINKNKVSLFSQKASLYDEKNKLDEQLSTIRIKLLEHREKSEYIKSMLSNVHEKFSIKEIIDSEAYKSATLAFEHQLSEIQERINALALEKVTIDAKIKAFNNIKRTKTINDYFLLMLNKAQTKLHLPISDKGGVIKYKALTTGKTGSRSPRAIFAYHYALLMTIKEFSTLPILPIVIDSPKQQDLDDELTEQLIQFCLDDLAEISQVIIGAVKPEKNMVGYHSVNLFEKFSLLKPDTFDGVFQEIVPQLNEMLAHLD

SEQ ID NO: 91072 - protein, 359 aa, Escherichia coli EC096/10
MALSDALITVNQAERGGENALRGFSYQASWGINYLLEKQKEKEKYLFLFEYHDDILVLNSSVSPTSAEFIQVKTKKDGKWTLAAIVNATKAKPKSFVAKLYDHFYQFVGHEIYMVLLSNAGFDFLNDNNEKGSDLNNEHKEIIISKVQEQLNTKKEVPLDKIKFKTSDLSLLDPNSHLYGKVAVFLNSYFGDDHGINSTAFTKLLINKCNEKVSVASSDIKTFEDLVLKKGISSEFVTDLLSGLIASIKITPKWEQVCMLLGTFSDPYEGIKLQSVFTRISIKVLNVNSIYYLYFLEFQSALKIIEHYREIPVRDLFFTLEKTIAAGGGDFSLLNQEEKFMIAIYAIIKLTFEDVSYEE

SEQ ID NO: 91073 - protein, 552 aa, Escherichia coli EC096/10
MKNNVKFKNIKILSLRDRKAFSYEFSEGVNFIYGTNDVGKSSLIKSLYYTLGGDLRLDDAWKSDDIVTLVEINNGENDFIFLRYKKIIGVFDLKNDDLVVYNTISSLASRVSNIFGFKLELHNKYTGATTQANPACLFAPFFIDQDEGWKAVINSFENMSMYSEWQKNILYYHSGIKPKEYYTVQGKIKEIKVKISELDGFVKVLKRSKSKIDESFGVVLFDVDLDFYKSKLERILNEYSNLNLVQTEYRLNLLRLYSRKNFLESELKEITAIIDNEFEISNFRDDNVAYSVNEYNYINHRDEMLKNIAVLADEKSKIEENIPKLNQKLEESRAASEALQALILETQSEITLHDVIKSAAYHEIESTFISQLDELFVEIGRKEGELTELQEELEVYNDKKRTVKINDCFKEYFAKALKELGVENTKVGGLSSYNNITKGKTGSRGPRGIFAFHYALLSVMKSNASVENMPIVIDSPKQQDLDPEHTHKLIKLCLDGFSLTNQIIIGTVGYESFMDGFNSIKLENKYHLLNDEHYDNVYSQLMPLFERVILSR

SEQ ID NO: 91074 - protein, 361 aa, Escherichia coli 1-392-07_S3_C3
MGLAETLVSIPQSERGGEIAQRGFDYQTCWALSQMLEYELDEKNYVFIFEYHDDVLILDDEVSPTQLTFAQVKTREKHWTASTLSNSTKKNPISIIGKLFIHQKNFAEYSPKLLFVTNASFNLCEENGGKSCFGANEVKVEYQTSFKKAIKDQVKLDDSSIDLSVMRFVQSSLSLDDHIIHLKGKLCDFLSKKFGDSISLSVNALASLLEQACREKSKVKSADIINFTELISRKGFSSEALNGVLDSLNASNSLKPDWDKASPLFNDLGKTSLQLIILQAMFSQVCIDLNQNKKNPSTVYLEYAISLYDEASAHSDLKLYLTETMYKIDALCPDYALTLKSGKKECIVIYSIIQKLLEGGE

SEQ ID NO: 91075 - protein, 550 aa, Escherichia coli 1-392-07_S3_C3
MKSIYFKSAHILSLRDKKGFSFKFSPDINIITGENDTGKSSFIKSLYHTLGADVRLDKKWKEDNFVSKVVICVNNRDYAFLRHEKRISIFDITAGQEHHLVTSSSRAEIALAVRDVFDFNLELVTKTNLVQGQAQPASLYLPYYIDQDNGWGKVLDSFSSLAMYEDWQKNILNFHTGVKPKEYYTLQGKINLIDIDLVEIRTTLKALKRAKKRFEESFGRVLFDVDVKYYEELLERFLRKCQDLHQEETEYRIKLIKILSLRDQLVTEIEESKRQLDENDIDSLLPSAGLEARYVVLENKEKLLQIIPKLYEEKSVYDDQLSKIKEDLKQAISLSSELKNMLLEVKEQLTLQDVIKSQASKQVEVTFDEQINELLLKIGELDVARTQLSKEIAKFEDKKRAKEINDKFKESLKFAQTELGIKDPKVGTILQYGPISKSETGSRAPRSILAYHYALLKTIEDKSTSPMLPVVIDSPKQQDPDPRTTKKLFDLCINGLSTNSQLIIGSVSFERETNQFKTLIMTEKYSLLKSELYNQVYQEIMPLYERAALS

SEQ ID NO: 91076 - protein, 361 aa, Escherichia coli 3-105-05_S1_C1
MGLAETLVSIPQSERGGEIAQRGFDYQTCWALSQMLEYELDEKNYVFIFEYHDDVLILDDEVSPTQLTFAQVKTREKHWTASTLSNSTKKNPISIIGKLFIHQKNFAEYSPKLLFVTNASFNLCEENGGKSCFGANEVKVEYQTSFKKAIKDQVKLDDSSIDLSVMRFVQSSLSLDDHITHLKGKLCDFLSKKFGDSISLSVNALASLLEQACREKSKVKSADIINFTELISRKGFSSEALNGVLDSLNASNSLKPDWDKASPLFNDLGKTSLQLIILQAMFSQVCIDLNQNKKNPSTVYLEYAISLYDEASAHSDLKLYLTETMYKIDALCPDYALTLKSGKKECIVIYSIIQKLLEGGE

SEQ ID NO: 91077 - protein, 550 aa, Escherichia coli 3-105-05_S1_C1; identical to SEQ ID NO: 91075

SEQ ID NO: 91078 - protein, 361 aa, Escherichia coli 3-475-03_S4_C2
MGLAETLVSIPQSERGGEIAQRGFDYQTCWALSQMLEYELDEKNYVFIFEYHDDVLILDDEVSPTQLTFAQVKTREKHWTASTLSNSTKKNPISIIGKLFIHQKNFAEYSPKLLFVTNASFNLCEENGGKSCFGANEVKVEYQTSFKKAIKDQVKLDDSSIDLSVMRFVQSSLSLDDHITHLKGKLCDFLSKKFGDSISLSVNALASLLEQTCREKSKVKSADIINFTELISRKGFSSEALNGVLDSLNASNSLKPDWDKASPLFNDLGKTSLQLIILQAMFSQVCIDLNQNKKNPSTVYLEYAISLYDEASAHSDLKLYLTETMYKIDALCPDYALTLKSGKKECIVIYSIIQKLLEGGE

SEQ ID NO: 91079 - protein, 550 aa, Escherichia coli 3-475-03_S4_C2; identical to SEQ ID NO: 91075

SEQ ID NO: 91080 - protein, 361 aa, Escherichia coli 1-392-07_S3_C1; identical to SEQ ID NO: 91074

SEQ ID NO: 91081 - protein, 550 aa, Escherichia coli 1-392-07_S3_C1; identical to SEQ ID NO: 91075

SEQ ID NO: 91082 - protein, 361 aa, Escherichia coli 1-392-07_S3_C2; identical to SEQ ID NO: 91074

SEQ ID NO: 91083 - protein, 550 aa, Escherichia coli 1-392-07_S3_C2; identical to SEQ ID NO: 91075

SEQ ID NO: 91084 - protein, 361 aa, Escherichia coli 2-474-04_S1_C1; identical to SEQ ID NO: 91038

SEQ ID NO: 91085 - protein, 550 aa, Escherichia coli 2-474-04_S1_C1; identical to SEQ ID NO: 91039

SEQ ID NO: 91086 - protein, 361 aa, Escherichia coli 3-105-05_S1_C3; identical to SEQ ID NO: 91076

SEQ ID NO: 91087 - protein, 550 aa, Escherichia coli 3-105-05_S1_C3; identical to SEQ ID NO: 91075

SEQ ID NO: 91088 - protein, 369 aa, Escherichia coli
MAKNKAANAGVDALTGFEFQRNCALYLLLDNFNSFINKEFFICIEHHDDFLFCYKTDCLSYINEIHAYQAKKLSGKIWTIDSRFSEMVSKILLVGENLRNDAFEKSEDYKHQLTFISNTEIELKYSPSKALKKEGITEQILRINEQNSICAYDELHKNIQNKIEEKVTDICNEESSVFHRKELSNLKIQWVDFPRTAAKQKESLIGLMSRKFSHIADSKAAIEVILALFRNVETVYNQGQEICLLDPTKRVEGEEVKKVMNIIDSQQKAFDYWRDEAQQFSIKFRIPLSIQKNHENYILNSFELLKDMSNYDYQIIKDFVRNNDYTTQYFSLQDALTAYVDNVRKSHSINLDNIDTFFAVLCSYVECYD

SEQ ID NO: 91089 - protein, 587 aa, Escherichia coli
MKTIIKFDRLFVVSESHNLYFDQKFSNKINIISGCNTSGKSTLIQSILFTFGINDVKDGLSEIIRYNPTFRLDFSITKGGVDKKYIIVRELGSIYLKEDGGNVFSFHGIDSDGRVEHVKLKEMLSQLFDFNMLLEQKGELKKASIECMFLPYYISQSVGWVYLRESFSNLGFYKDFKDTYLDYYLGIENSFDKEYFYKLTKERAQLQSKISSLNKYSAEPHFVVSKLLDEEFGDEAQKYIDGYIKLVASLDEERDVYTGLCNKLSLTKNHVKILRRTKRNIKNQNYNNIDRCPACTQILPYSLEGLYGYYQNINDTDKLSEQINNKIQKIQSDINSSLAKIKKLEIDISSKYSYFLEKKSQNLSVNTWIDNKANIRLLGNIHEEIEEYTKRSDEIKGLIDGMGEEQSLFVERFNKEKDFKEIFKKYLNDMQLFNVTEPRYTDLYKINSFPFQGVELHKTVMSYHFALNSLIRKTDNIHRLPFMLDAILKEDIDDRNFDLILSFVGKNLPTDTQSFISMSEYAEDNLLKDGKEISAFRRAKVEDIKNRYFPDGTNLFFIGDGKHERTFLSKPLDLNLDIFVDTCRLTE

SEQ ID NO: 91090 - protein, 369 aa, Escherichia coli; identical to SEQ ID NO: 91088

SEQ ID NO: 91091 - protein, 587 aa, Escherichia coli; identical to SEQ ID NO: 91089

SEQ ID NO: 91092 - protein, 361 aa, Escherichia coli
MGLAETLVSIPQSERGGEIAQRGFDYQTCWALSQMLEYELDEKNYVFIFEYHDDVLILDDEVSPTQLTFAQVKTREKHWTASTLSNSTKKNPISIIGKLFIHQKNFAEYSPKLLFVTNASFNLCEENGGKSCFGANEVKVEYQTSFKKAIKDQVKLDDSSIDLSVMRFVQSSLSLDDHITHLKGKLCDFLSKKYGDSISLSVNALASLLEQACREKSKVKSADIINFTELISRKGFSSEALNGVLDSLNASNSLKPDWDKASPLFNDLGKTSLQLIILQAMFSQVCIDLNQNKKNPSTVYLEYAISLYDEASAHSDLKLYLTETMYKIDALCPDYALTLKSGKKECIVIYSIIQKLLEGGE

SEQ ID NO: 91093 - protein, 550 aa, Escherichia coli; identical to SEQ ID NO: 91075

SEQ ID NO: 91094 - protein, 359 aa, Escherichia coli; identical to SEQ ID NO: 91068

SEQ ID NO: 91095 - protein, 552 aa, Escherichia coli
MKNNVKFKNIKILSLRDRKAFSYEFSEGVNFIYGTNDVGKSSLIKSLYYTLGGDLRLDDAWKSDDIVTLVEINNGENDFIFLRYKKIIGVFDLKNDDLVVYNTISSLASRVSNIFGFKLELHNKYTGATTQANPACLFAPFFIDQDEGWKAVINSFENMSMYSEWQKNILYYHSGIKPKEYYTVQGKIKEIKVKISELDGFVKVLKRSKSKIDESFGVVLFDVDLDFYKSKLERILNEYSNLNLVQTEYRLNLLRLYSRKNFLESELKEITAIIDNEFEISNFRDDNVAYSVNEYNYINHRDEMLKNIAVLADEKSKIEENIPKLNQKLEESRAASEALQALILETQSEITLHDVIKSAAYHEIESTFISQLDELFVEIGRKEGELTELQEELEVYNDKKRTVKINDCFKEYFAKALKELGVENTKVGGLSSYNNITKGKTGSRGPRGIFAFHYALLSVMKSNSSVENMPIVIDSPKQQDLDPEHTHKLIKLCLDGFSLTNQIIIGTVGYESFMDGFNSIKLENKYHLLNDEHYDNVYSQLMPLFERVILSR

SEQ ID NO: 91096 - protein, 361 aa, Escherichia coli
MESNILGHAQRETSGATTFGKYDFQYHWALCRIIEKHKENSDYALLIEYHEDVVIADSLYGSSANFEFFQVKNTGNPFTSDALTKREKGAKGPKNSILGKLLSSCIGTDYEDRITEIGLVSSSGFSFDQKDNRLKLDIITSGDLSVECLSGLTEKLKAELGIVIFPENLKFIVPKIKLENQEEFVIARFAELVNDIFPNSHCNAVNIYRAVIDEIHRKGRNTYDFTVWEKMVEDKSLTSHKVKDVIAVNTTSPKFEDFERDFEYLAKNDMKWNTLTYRKINKKIKQLFLRRVGHASAFDINIMRIAQQALSSVPEEEFTETSDYIESAIVEAKKLNIESQIPEHDDILCEIIYCFLKVMHE

SEQ ID NO: 91097 - protein, 577 aa, Escherichia coli
MRNLTFQRLVLISDSKRLANQFTFPKRLNLITGRDNSIGKSTLAKNLLWSLGCDPVMDEEWKSNDIKAILYFTINNKEYFTCRGSHSIILGAIGGEARRYTHITGDYSKDLSELVDFKMKLPNRNDGNLDTPPPAYYFLPFYIDQIKSWSSPWDSFENLGQYANWKKPLIKYFTGYLKPEHFDIEENIYEYNEFKKESAAKIEKFQSAVEIIVDNSADSPIALDNENFSRIQEEINTELLELIDYQTRLYDAQASITSNIYDLERQYELATSSANELEEDYKFAVESIPTDNLECPLCGTLHDNSLLNRALLLSEKNSLLDEANSIASKLVELKSSLAELNENAQFAINEIERINKKYVTDDNANKKDIIAQVIGTISTENVSRNIQVKIDNEEHKISNATSSIRELKKDQKKLLSTKEKEELNSSFISKLLVNIEALDSTGINLRKVKSPTDYKQLLGGGAAEAARGLLAYQISVLQQIHSAKTCIVPPFVIDTPNQQEQAGHRYETVIKELMRSIPQDYQIILCAMENNVLNEFKQDANVIELNSNRLLIASQYNLLRAEYKLIQAKIVGLDEEE

SEQ ID NO: 91098 - protein, 361 aa, Escherichia coli; identical to SEQ ID NO: 91096

SEQ ID NO: 91099 - protein, 577 aa, Escherichia coli; identical to SEQ ID NO: 91097

SEQ ID NO: 91100 - protein, 361 aa, Escherichia coli; identical to SEQ ID NO: 91096

SEQ ID NO: 91101 - protein, 577 aa, Escherichia coli; identical to SEQ ID NO: 91097

SEQ ID NO: 91102 - protein, 361 aa, Escherichia coli; identical to SEQ ID NO: 91096

SEQ ID NO: 91103 - protein, 577 aa, Escherichia coli; identical to SEQ ID NO: 91097

SEQ ID NO: 91104 - protein, 361 aa, Escherichia coli; identical to SEQ ID NO: 91096

SEQ ID NO: 91105 - protein, 577 aa, Escherichia coli; identical to SEQ ID NO: 91097

SEQ ID NO: 91106 - protein, 361 aa, Escherichia coli; identical to SEQ ID NO: 91096

SEQ ID NO: 91107 - protein, 577 aa, Escherichia coli; identical to SEQ ID NO: 91097

SEQ ID NO: 91108 - protein, 361 aa, Escherichia coli; identical to SEQ ID NO: 91096

SEQ ID NO: 91109 - protein, 577 aa, Escherichia coli; identical to SEQ ID NO: 91097

SEQ ID NO: 91110 - protein, 361 aa, Escherichia coli; identical to SEQ ID NO: 91096

SEQ ID NO: 91111 - protein, 577 aa, Escherichia coli; identical to SEQ ID NO: 91097

SEQ ID NO: 91112 - protein, 361 aa, Escherichia coli; identical to SEQ ID NO: 91096

SEQ ID NO: 91113 - protein, 325 aa, Escherichia coli
MRNLTFQRLVLISDSKRLANQFTFPKRLNLITGRDNSIGKSTLAKNLLWSLGCDPVMDEEWKSNDIKAILYFTINNKEYFTCRGSHSIILGAIGGEARRYTHITGDYSKDLSELVDFKMKLPNRNDGNLDTPPPAYYFLPFYIDQIKSWSSPWDSFENLGQYANWKKPLIKYFTGYLKPEHFDIEENIYEYNEFKKESAAKIEKFQSAVEIIVDNSADSPIALDNENFSRIQEEINTELLELIDYQTRLYDAQASITSNIYDLERQYELATSSANELEEDYKFAVESIPTDNLECPLCGTLHDNSLLNRALLLSEKIRCLMRQTL

SEQ ID NO: 91114 - protein, 394 aa, Escherichia coli; identical to SEQ ID NO: 91064

SEQ ID NO: 91115 - protein, 583 aa, Escherichia coli
MKLVSIKIKGRGIVGLESDELVFGKNITEFYGPNGCGKTPLLQSISYCLGYPCKFRDDIYKLCKSATLTFTIANDIFKATRDFEHTDFILSLESNKEILKFYNEADYSKYIFEKLSLNYPSLLTTQNKQSYPYLSTVLPIFYLDQDLGYSKFYYSPRNFIKDQFSEMLRIVFSLPEKHSFDAKKKNINLTEEIKYLDNSLAVQRRNIEIAKDAHKDKNIESIDSSINNLKDELTELKNSKSLKNDSLVSIDAVIRNQKENLNTLKSELKFMERRESSLLQIMKEINTEINTLNLNEEAKRIFRSFEEICPSLDCKMFTRSSESYAKHLLYLKDQIKDIERSLKLDSDRHDAIEQEIKHTSKTIEDLNTMRTNIIEEEDISSVIDAISEITSMLFQLQLEKNELNKIALLEAKYVEMLNKREHALDELDGLDKNRQTIPRLAKIKTTLRDKFIFWLKVLKTPNIDFNITFENDFSPIMGYETLEQLKGSTKSRAILAYRSALIESMIELNCKSFMFAIFDTPKQHEIHHEDIDNFIMALKKLSKKHNFQFIFSSTEYKYNGDDDDIILTPKYPGEQHDMFLRRY

SEQ ID NO: 91116 - protein, 363 aa, Escherichia coli; identical to SEQ ID NO: 91060

SEQ ID NO: 91117 - protein, 555 aa, Escherichia coli
MRKLILEKIVIISHSTKSARQFEFGRNLTLITANDGNSVGKSTLAKMIFWSFGCEPFFSKVWKKLDCSSIIMFSIDDEPFALHRYKNQMSLRKNGQLIKAYDKITGAFSEKFAELVKFDVLLPKKNTFNLEVPPPAYYFLPFYIDQKRTWVKAWDSFANLQQYSKWAKPVISFHSGLISKEHFIVEEDIYEVKAQVNEVESNINELTNAVAILKSNITQQFYIANSEDLVIEILKYEELIKLNLEESSNLKIDIIGLDSQVKLAESIISELDKDYIFSVENMNEGSIECPTCGTIHENSIAHRSSILIDKETAERQLSLLLNEKKHLQDKLKSLNEALLELKEKLKYVQIAFEKSNSKEFSEFTTNNVDKQVEIIVGNKKVDLETKRLKEQGLIKTQGDLVTKQQKDKIKENFANTFFKYITKLKVSIDVSLIKSPLDYSKVYEVGGAAEDARAVLGYYLALYDHISEYCNEVVPPLVIDTPNQQEQSTENYNKIVEAISRGLTENKQYIICAMQHNALDTLSQDAKVIRLDERKILTSSEYEEAKELEEVFLFI

SEQ ID NO: 91118 - protein, 359 aa, Escherichia coli
MALSDALITVNQAERGGENALRGFSYQASWGINYLLEKQKEKEKYLFLFEYHDDILVLNSSVSPTSAEFIQVKTKKDGKWTLAAIVNATKAKPKSFVAKLYDHFYQFVGHEIYMVLLSNAGFDFLNDNNEKGSDLNNEHKEIIISKVQEQLNTKKEVPLDKIKFKTSDLSLLDPNSHLYGKVAVFLNSYFGDDHGINSTAFTKLLINKCNEKVSVASSDIRTFEDLVLKKGISSEFVTDLLSGLIASIKITPKWEQVCMLLGTFSDPYEGIKLQSVFTRISIKVLNVNSIYYLYFLEFQSALKSIEHYREIPVRDLFFTLEKTIAAGDGDFSLLNQEEKFMIAIYAIIKLTFEDVSYEE

SEQ ID NO: 91119 - protein, 552 aa, Escherichia coli; identical to SEQ ID NO: 91073

SEQ ID NO: 91120 - protein, 369 aa, Klebsiella oxytoca 10-5245
MAKNKAVNAGVDALTGFEFQRNCALYLLLDNFNSFIDKNFFICIEHHDDFLFCYKTDCLVYINEIYAYQAKKLSGKIWTIDARFSEVVSKILLVGDNLKNDSFEKSEDYRHQLTFISNTEIELKYSPLKKLKAEGATEQIVKINEQNSTCVYNNLHESIKAKIENRITEVCNEESSVFHRQELDNLHIQWVDFPRTAAKQKESLIGLMVRKFPHIADPKAAIDVILTLFRDVETVYNQGQEICLLDPTKRVEGEDIKKVMNIIDSQQKAFDYWRAEAKQFSMKFSIPLSIQKKHENYILNSFELLKDMSNYDYQIIKDFIRNNDYTTQYTSLQDALTAYVDNIRKSHSINLDNIDTFFAVLCSYVECYD

SEQ ID NO: 91121 - protein, 587 aa, Klebsiella oxytoca 10-5245
MKTIIKFDRLFVVSESHNLYFDQKFSNKINIISGCNTSGKSTLIQSILFTFGINDVKDGLSEIIRYKPTFRLDFSITKSGVDKKYIIVRELGSIYLKEDGGNVFSFHGIDSDGRVEHVKLKEMLSQLFDFNMLLEQKGELKKASIECMFLPYYISQSVGWVYLRESFSNLGFYKDFKDTYLDYYLGIENSFDKEYFYKLTKERAQLQSKISSLSKYSTEPHFVVSKLLDEEFGDEAQKYIDGYINLVASLDEERDVYTSLCNKLSLTKNHVKILRRTKRNIKNQNYNNIDRCPACTQILPYSLEGLYGYYQNINDTDKLSEQINNKIQNIQSDINGSLAKIKKLEIDISSNYSYFLEKKSQNVSVNTWIDNKANIRLLSNIHEEIEEHTKRSDEIKGLIDGMGEEQSLFVERFNKEKDFKGIFKKYLNDMQLFNVTEPRYTDLYKINSFPFQGVELHKTVMSYHFALNSLIRETDNIHRLPFMLDAILKEDIDDRNFDLILSFVGRNLPTDTQSFISMSEYSEDNLLKDGKDINAFRRAKVKDIKNRYFPDDTNLFFIGDGKHERSFLSKPLDLNLDIFVDTCRLTE

SEQ ID NO: 91122 - protein, 369 aa, Klebsiella oxytoca 10-5248; identical to SEQ ID NO: 91120

SEQ ID NO: 91123 - protein, 587 aa, Klebsiella oxytoca 10-5248; identical to SEQ ID NO: 91121

SEQ ID NO: 91124 - protein, 359 aa, Klebsiella oxytoca; identical to SEQ ID NO: 91072

SEQ ID NO: 91125 - protein, 240 aa, Klebsiella oxytoca
MKNNVKFKNIKILSLRDRKAFSYEFSEGVNFIYGTNDVGKSSLIKSLYYTLGGDLRLDDAWKSDDIVTLVEINNGENDFIFLRYKKIIGVFDLKNDDLVVYNTISSLASRVSNIFGFKLELHNKYTGATTQANPACLFAPFFIDQDEGWKAVINSFENMSMYSEWQKNILYYHSGIKPKEYYTVQGKIKEIKVKISELDGFVKVLKRSKSKIDESFGVVLFDVDLDFYKSKLERILNEYS

SEQ ID NO: 91126 - protein, 369 aa, Klebsiella oxytoca
MAKNKAANAGVDALTGFEFQRNCALYLLLDNFNSFINKEFFICIEHHDDFLFCYKTDCLSYINEIHAYQAKKLSGKIWTIDSRFSEMVSKILLVGENLRNDAFEKSEDYKHQLTFISNTEIELKYSPSKALKKEGITEQILRINEQNSICAYDELHKHIQNKIEKKVTDICNEESSVFHRKELSNLKIQWVDFPRTAAKQKESLIGLMSRKFSHIADSKAAIEVILALFRNVETVYNQGQEICLLDPTKRVEGEEVKKVMNIIDSQQKAFDYWRAEAQQFSMKFRIPLSIQKNHENYILNSFELLKDMSNYDYQIIKDFVRNNDYTTQYVSLQDALTAYVDNIKKSHSINLDNIDTFFAVLCSYVECYD

SEQ ID NO: 91127 - protein, 587 aa, Klebsiella oxytoca
MKTFIKFDRLFVVSESHNLYFDQKFSNKINIISGCNTSGKSTLIQSILFTFGINDVKDGLSEIIRYNPTFRLDFSLTKGGADKKYIIVRELGSIYLKEDDGNVFSFHGIDSDGRVEHVKLKEKLSQLFDFNMLLEQKGELKKASIECMFLPYYISQSVGWVYLRESFSNLGFYKDFKDTYLDYYLGIENSFDKEYFYKLTKERAQLQSKISSLNKYSTEPHFVVSKLLDEEFGDEAQKYIDGYINLVALLDEERDIYTSLCNKLSLTKNHVKILRKTKRNIKNQNYNNIDRCPACTQILPYSLEGLYGYYQKINDTDKLSEQINNKIQNIQSDINGSLAKIKKLEIEISSKYSSFLEKKSQNVSVNTWIDNKANIRLLSNIHEEIEEHTKRADEIKGLIDGMGEEQSLFVERFNKEKDFKGIFKKYLNDMQLFNVTEPRYTDLYKINSFPFQGVELHKTVMSYHFALNSLIRETNNIHRLPFMLDAILKEDIDDRNFDLILSFVGRNLPTDTQSFISMSEYSEDNLLKDGKNVNAFRRAKVKDIKNRYFPDGTNLFFIGDGKHERAFLSKPLDLNLDIFVDTCRLTE

SEQ ID NO: 91128 - protein, 394 aa, Klebsiella pneumoniae EGD-HP19-C
MAELHEVKPREQAGRDTLERYNAQIRAASIACLSILEGKDVKRVFCEFHDDFVIEKVIASDIRYTFVQVKTKEKLREIWKLRDVFGILKRKSAKNPQTDEMIRDSFIGKLLQHTINFGESCNEIVFLTNTHVDEDIENIIDDIVSETFSNTHCKLIIDSFNNCFISIQEDHEKLDIDAIKQKLKKLKFETDVEYIKSKHETFEILAKQKIFKFSEIELSHTEAKEILFSLLALVNSKSSVKINDCSSENIKKLAGIDIDDLLDVLSISKRAYYDFLDNGDEHALKSASVIERLLRKAGANDMEVDFFTRCKIKWDQWLRNNRHIISEFDYITIDREINATLDKLTFLHGNLFLSNLRTFINELYDSLHQNNLLHSLDKEALTGSLFSRLVERSK

SEQ ID NO: 91129 - protein, 583 aa, Klebsiella pneumoniae EGD-HP19-C
MKLVSIKIKGRGIVGLESDELVFGKNITEFYGPNGCGKTPLLQSISYCLGYPCKFRDDIYKLCKSATLTFTIANNIFKATRDFEHTDFILSLESNNEILKFYNEADYSKYIFEKLSLNYPSLLTTQNKQSYPYLSTILPIFYLDQDLGYSKFYYSPRNFIKDQFSEMLRIVFSLPEKHSFDAKKKNINLTEEIKYLDNSLAVQRRNIEIAKDAHKDKNIESIDSSINSLKDELTELKNSKSLKNDSLVSIDAVIRNQKENLNTLKSELKFMERRESSLLQIMKEINTEINTLNLNEEAKRIFRSFEEICPSLDCKMFTRSSESYAKHLLYLKDQIKDIERSLNLDSDRHDAIEQEIKHTSKIIEDLNTMRTNIIEEEDISSVIDAVSEITSMLFKLQLEKNELNKIALLEAKYVEMLNKREHALDELDGLDKNRQTIPRLAKVKTTLRDKFIFWLKVLKTPNIDFNITFENDFSPIMGYETLEQLKGSTRSRAILAYRSALIESMIELNCKSFMFAIFDTPKQHEIHHEDIDNFIMALKKLSKEHNFQFIFSSTEYKYNGDDDDIILTPEYPGDQHDMFLRRY

SEQ ID NO: 91130 - protein, 394 aa, Klebsiella pneumoniae UCICRE 6; identical to SEQ ID NO: 91128

SEQ ID NO: 91131 - protein, 583 aa, Klebsiella pneumoniae UCICRE 6
MKLVSIKIKGRGIVGLESDELVFGKNITEFYGPNGCGKTPLLQSISYCLGYPCKFRDDIYKLCKSATLTFTIANNIFKATRDFEHTDFILSLESNNEILKFYNEADYSKYIFEKLSLNYPSLLTTQNKQSYPYLSTILPIFYLDQDLGYSKFYYSPRNFIKDQFSEMLRIVFSLPEKHSFDAKKKNINLTEEIKYLDNSLAVQRRTIEIAKDAHKDKNIESIDSSINSLKDELTELKNSKSLKNDSLVSIDAVIRNQKENLNTLKSELKFMERRESSLLQIMKEINTEINTLNLNEEAKRIFRSFEEICPSLDCKMFTRSSESYAKHLLYLKDQIKDIERSLNLDSDRHDAIEQEIKHTSKIIEDLNTMRTNIIEEEDISSVIDAISEITSMLFKLQLEKNELNKIALLEAKYVEMLNKREHALDELDGLDKNRQTIPRLAKVKTTLRDKFIFWLKVLKTPNIDFNITFENDFSPIMGYETLEQLKGSTKSRAILAYRSALIESMIELNCKSFMFAIFDTPKQHEIHHEDIDNFIMALKKLSKENNFQFIFSSTEYKYNGDDDDIILTPEYPGDQHDMFLRRY

SEQ ID NO: 91132 - protein, 394 aa, Klebsiella pneumoniae MGH 21; identical to SEQ ID NO: 91064

SEQ ID NO: 91133 - protein, 583 aa, Klebsiella pneumoniae MGH 21
MKLVSIKIKGRGIVGLESDELVFGKNITEFYGPNGCGKTPLLQSISYCLGYPCKFRDDIYKLCKSATLTFTIANDIFKVTRDFEHTDFILSLESNKEILKFYNEADYSKYIFEKLSLNYPSLLTTQNKQSYPYLSTVLPIFYLDQDLGYSKFYYSPRNFIKDQFSEMLRIVFSLPEKHSFDAKKKNINLTEEIKYLDNSLAVQRRNIEIAKDAHKDKNIESIDSSINNLKDELTELKNSKSLKNDSLVSIDAVIRNQKENLNTLKSELKFMERRESSLLQIMKEINTEINTLNLNEEAKRIFRSFEEICPSLDCKMFTRSSESYAKHLLYLKDQIKDIERSLKLDSDRHDAIEQEIKHTSKTIEDLNTMRTNIIEEEDISSVIDAISEITSMLFQLQLEKNELNKIALLEAKYVEMLNKREHALDELDSLDKNRQTIPRLAKVKTTLRDKFIFWLKVLKTPNIDFNITFENDFSPIMGYETLEQLKGSTKSRAILAYRSALIESMIELNCKSFMFAIFDTPKQHEIHHEDIDNFIMALKKLSKKHNFQFIFSSTEYKYNGDDDDIILTPKYPGEQHDMFLRRY

SEQ ID NO: 91134 - protein, 362 aa, Klebsiella pneumoniae HK787
MSILEGKDVKRVFCEFHDDFVIEKVIASDIRYTFVQVKTKEKLREIWKLRDVFGILKRKSAKNPQTDEMIRDSFIGKLLQHTINFGESCNEIVFLTNTHVDEDIENIIDDIVSETFSNTHCKLIIDSFNNCFISIQEDHEKLDIDAIKQKLKKLKFETDVEYIKSKHETFEILAKQKIFKFSEIELSHTEAKEILFSLLALVNSKSSVKINDCSSENIKKLAGIDIDDLLDVLSISKRAYYDFLDNGDEHALKSASVIERLLRKAGANDMEVDFFTRCKIKWDQWLRNNRHIISEFDYITIDREINATLDKLTFLHGNLFLSNLRTFINELYDSLHQNNLLHSLDKEALTGSLFSRLVERSK

SEQ ID NO: 91135 - protein, 583 aa, Klebsiella pneumoniae HK787
MKLVSIKIKGRGIVGLESDELVFGKNITEFYGPNGCGKTPLLQSISYCLGYPCKFRDDIYKLCKSATLTFTIANNIFKATRDFEHTDFILSLESNNEILKFYNEADYSKYIFEKLSLNYPSLLTTQNKQSYPYLSTILPIFYLDQDLGYSKFYYSPRNFIKDQFSEMLRIVFSLPEKHSFDAKKKNINLTEEIKYLDNSLAVQRRNIEIAKDAHKDKNIESIDSSINSLKDELTELKNSKSLKNDSLVSIDAVIRNQKENLNTLKSELKFMERRESSLLQIMKEINTEINTLNLNEEAKRIFRSFEEICPSLDCKMFTRSSESYAKHLLYLKDQIKDIERSLNLDSDRHDAIEQEIKHTSKIIEDLNTMRTNIIEEEDISSVIDAISEITSMLFKLQLEKNELNKIALLEAKYVEMLNKREHALDELDGLDKNRQTIPRLAKVKTTLRDKFIFWLKVLKTPNIDFNITFENDFSPIMGYETLEQLKGSTKSRAILAYRSALIESMIELNCKSFMFAIFDTPKQHEIHHEDIDNFIMALKKLSKENNFQFIFSSTEYKYNGDDDDIILTPEYPGDQHDMFLRRY

SEQ ID NO: 91136 - protein, 361 aa, Klebsiella pneumoniae
MESNILGHAQRETSGATTFGKYNFQYHWALCRIIEKHKSNADYALLIEYHEDVVIADSLFGSSAKFEFFQVKNTGNSFTVDSLTKRVKGAEGLKNSILGKLLSSCIGTEYETRITEIGLVSSSGFSFDQKDNKLKLDIITSGDLSVDCLSGLTGKLKSELGIDIFPENLKFIIPKIKLENQEEFVIARFAELVNEIFPNSHCNAVNIYRAIIDEIHRKGQNTYDFTMWEKMVEDKSLTSHTVKDVIAVNTTSPKFEDFEKDFEYLAKSDMKWNTLTYRKMVRKIKQIYLRRVGYASAFDMNIMRIAQQALSNVPEEDYTETSDYIKAVVMKAKELNIESQIPEDDDILCEIIYCFLKVMHE

SEQ ID NO: 91137 - protein, 577 aa, Klebsiella pneumoniae
MRSLQFQRLVLISDSKRLANQFTFPKRLNLITGEDNSIGKSTLAKSLLWSLGCDPVIDEEWKSNDIKSILYFTINNKKYFSCRGSHSIILGAIDGEAKRYTHITGDFSQDLSDLVNFKMKLPNRTDGKLETPPPAYYFLPFYIDQIKSWSSPWDSFENLGQYANWKKSLIKYFTGYLKPEHFELEEEIYEYSEVKKESTAKIEKFQSAVDVIVDNSADITIALDNEKFSEIQKEINTELQEFIDYQRKLYDAQATITSNIYDLEKQYELATSSANELEEDYKFAVESIPTDHLECPLCGTLHDNSLTNRALLLSEKDSLLDEANSIASEIEALRSSLFELNEVAQFATNEIERINKKYLTDDNEGEKTLITQVIDAISKEKVSRSIQVKIDNEDLKISKANNSVAELKKDQRKLLSNKDKEELNSSFMSKLLGNIEALGSTGVNLSKVKSPTDYKQLLGGGAAEAARGLLAYQLSVLQQIHSAKTCIVPPFVIDTPNQQEQAGHRYETVIKELMRSIPEDYQIILCAMENNALNEFKHDANVITLNSEKLLDSSQYDSLRSEYKNIQLAVRETRDDD

SEQ ID NO: 91138 - protein, 357 aa, Klebsiella pneumoniae
MNLADALIHVPQDERGGEIAIRGFEYQRCWAIDELLNRHKKNESYVFIPEYHDDVLILNSSESPTMATFAQVKTRDTHWTITPLIKSDGEGKLSFISKLFKHKYDFSSYKTDLTFITNAVFKFFDKYEFNADELKVSEKDKILDAVKTQLPGFGSPDLSSLKFKTSNLSLLDYDAHLLGKTVEYLEDTKSSEVINAMAFKRTLVDLFEKKTRVSSREIKSFKELIDKKGISNELIAKLISEIKSLKTSFPDWEKISILLSVLHKDEFETLMLKIKYELFLVNVKDINSIEYDFYRLLKQKRINEKFNAENIPIHIEEMISYALEESDEFRQLIDDDYKYIMACCAVIEKMSGNEAKK

SEQ ID NO: 91139 - protein, 554 aa, Klebsiella pneumoniae
MNQVIFKRVAILSLSEKKAFTFNFSEGLNFIHGTNDTGKSSLIKSLYFCLGGDLRLDDSWKKQEIITKLTLAYQDEIINFIRKSSYFVVTVHKNGVKKSEKIFSKVSELTSEIQNLFGFNLLLALKKNKETIIANPASYYFPFYIDQDDGWSNVLDSFNGLKMYVDWQKNALQYHSGIKPKEYYALNGEQKILALKISELEQEAELIRKTKLRFEKYFENISFDIDVNFYLNKIDYFIKQCEELEQQERAYRLKAMNLYSRRNILSDLIFSIENERADSSGNTSEEDDISFALKKYDINKNKVALFSQKASLYDEKSKVDEQLMTIRSKLLEHAEMSDHIKSMLNNVHDNFSIKEIIDSEAYKSAALAFEEQLSEIREKINALALEKAVLDTKIKTFNNVKRTRIINDYFLSMLNRAQVKLHLPITEKGGVINYKALTTGKTGSRSPRAIFAYHYALLMTIKKYSTLPILPIVIDSPKQQDLDDELTEQLIQFCLDDLAEVSQVIIGAVKPEKNMVGYHSINLVKKFSLLQPEAFSEVYQEVVPQFNAMFRHLN

SEQ ID NO: 91140 - protein, 394 aa, Raoultella planticola
MAELHEVKPREQAGRDTLERYNAQIRAASIACLSILEGKDVKRVFCEFHDDFVIEKVVANDIHYTFVQVKTKEKLREIWKLRDVFGILKRKSVKNPQTNEMIRDSFVGKLLQHTTNFEDSCKEVVFLTNTHVDEDIENIINDISSETFSNTHCKLIIDSFNNCFISIQNKQKELGIDAIKLKLKKLRFETDVEYIKSKHETFEILAKEKIFKFSEIELSHSEAKEILFSLLALVNSKSSVKINDCSKENIEKLAGVDINDLLEVLSISKRAYYDFLENGDEHALKSASVIERLLRKAGASDIEVDFFTRCKIKWDQWLRNNRHIISELDYITLEREINSTLDKLTFMHGSLFISNLRTFIDELYDSLHKHNLLHSLDKETLIGSLFSRLVERSK

SEQ ID NO: 91141 - protein, 583 aa, Raoultella planticola
MKLISIKIKGRDIVGLESEELIFGTNITEFYGPNGCGKTPLLQSISYCLGYPCKFRDDIYKLCKSATLTFTIANNTFRATRDFENTDFILTLEQNEETLRFYNQADYSKHIFELLSLSYPSLLTTQNKQSYPYLSTILPIFYLDQDLGYSKFYYSPGNFIRDQFSEMLRIVFSLPEKHSFDAKKKTINITEEIKYLDNSLAVQRRNIEIAKETHKDKNIEAIDSSIDNLKNELSELKNSKSLKNDSLFSIEAVIKKQKENLNDLKSKLNFMERRESSLLQIMKEINTEIETLNLNEEAKRIFRSFEEICPSLDCKMFSRSSESYAKHLLYLKDQIKDIERSLNLDSDRHDKIEQEIIYTSKTIEDLSTMRNNIIEEEDISSVIDAISEISSMLFKLQLEKNELNKITILEDKYIEMLNKREYALDELAGLEKNRQSIPRLAKIKTTLRDKFINWLKVLKTPNIDFNVTFENDFSPIMGYETLEQLKGSTKVRAILAYRTALIESMLELDCKSFMFAIFDTPKQHEIHYEDIDNFIMNLKTLSKRYNFQFIFSSTEYKYEGDADDVLLTPKYPGEQHNMFLMRY

SEQ ID NO: 91142 - protein, 394 aa, Morganella morganii SC01
MVKLHEISPREQVGRDVIERFNAQIRAASMACFSILEGKDTKKIYCEFQDDFVIEKVIGDTTKYVFVQVKTKRKLSDIWNINDVFGILKKETKTKVQSDENIRNSFIGKLLQHTINFPDTCDKVVFMTNTHVDDDIVTLLLDLSNNYNGKHSKVLIDRFNKCFHDNGNIEKNNFSDEDISFKLKKLEIETDVEYLKEKFDAFYSIARDSIYKYSEIDLEYNEVNEIMISLLNLVNKKSSVKIDVVNQENIEVSSGIGIDDLLKVLSISHKAYHDLLDSGDQNAIKSASIIERTLRRAGASDEQILFCSDCKIKWDSWVRNNRHILSRIDLISIDSYFQDSLNELSKGSMIIGISFLKHLVLKLKEELGNNGLLFDLDDETIIGGILSKVIGYKK

SEQ ID NO: 91143 - protein, 582 aa, Morganella morganii SC01
MRLLSLFLKGRENIGLESDELVFGKGITELYGPNGSGKTPLIQSIIFCLGYPCKFREEIYRSCHYARLKFEIDGKLYISERELSNDFILNIYFGGKVKRFYNEIDYSRFIFELLNMGFPSLITNQKKQTYPYLSTILPIYYLDQDNGFSKYYNAPANYIKDQFSEMLRLIFNLPEKNSFEKKKLSIDLDSEIKYLDESLVVQRRNIELIKNEINETNKIKLDSQINELKEELDELKESGSVKNDAISGIDTLIYNYKKSIKELKVKSRDLEKRNVSLGKIKDEINIEINTLNLNEEAKRIFISFEEICNSPSCGLFSKSTENYAKNLLYLKDQIKDIDRSINTGGLNIENIFSNISQLEFSMKQAQEIRKGIIDNEGFSSIIETISTITARIFELQQEKEKLVNLERAESIYIESLNRRDLILDRKESIDKTVINLPKLIKIKNQLRESYIKWLDIMNISNVSRNISFRDDFIPILGNETIEQLKGSTKVRAILAYRASLIETIAINCQKTFEFIILDTPKQHEIHHEDIDNFMRNMKLLSENYKFQVVFSSTEYLFSCDENDCLWEPKYPGEKHNMFLKNK

SEQ ID NO: 91144 - protein, 316 aa, Providencia rettgeri Dmel1
MFIFEYHDDVLILDDEVSPTQLTFAQVKTREKHWTAFTLSNSTQKKPVSIIGKLFIHHKNFAEYSPKLLFVTNASFNLCKENGGKSCFGANEVKVEYQASFKKAIKDQVKLDDSSIDLSVMRFVQSSLSLDDHITHLKGKLCNFLSKKFGDGISLNVNALVSLLEQSCREKSKVKSADIINFSELISRKGFSSKALNNVLDSLNVSNSLKPDWDKASPLFNDLGKTSLHLITLQAMFSQVCIDLNQNTKNPSTVYLEYAISLYDEASVHSNLKIYVAETMHKIDALCPDYALTLKSGKKECIVVYSIIQKLFEGGE

SEQ ID NO: 91145 - protein, 554 aa, Providencia rettgeri Dmel1
MKSIYFKSAHILSLRDKKGFSFKFSPDINIITGENDTGKSSFIKSLYHTLGADIRLDKKWKEDNVVSKVVICVNNRDYAFLRHEKRISIFDITEGQEHHLVTSSSRTEIALTVRDIFDFNLELVTKSSLVQGQAQPASLYLPYYIDQDNGWGKVLDSFSSLAMYNDWQNNILNFHAGVKPKEYYTLQGKINLIDIDLDEIRTTLKALQRAKKRFEESFGRVLFDVDVKYYEELLERFLRKCQDLHQEETEYRIKLIKVLSLRDELVAEIEESKRQLDENDIDSLLPSAGLESRYVVLENKEKLLQIIPKLYEEKSVYDDQITKIKEDLKNAKNLSSELKSMLQEVKEQLSLQDVIKSQASKQVEVTFDEQINELLLKIGELDIARTDLSKEIAKFEDKKRTKEINDKFKESLKFAQTELGIKDPKVGTILQYGPISKSETGSRAPRSILAYHYALLKTIEDKSTSPMLPVVIDSPKQQDPDPRTTKKLFDLCINGLSTNSQLIIGSVSFERETNQFKTLIMTEKYSLLKSELYNQVYQEIMPLYQRAVLSQSDH

SEQ ID NO: 91146 - protein, 361 aa, Providencia stuartii
MGLAEALVSIPQSERGGEIAQRGFDYQTCWALSQMLEYELDEKNYVFIFEYHDDVLILDDEVSPTQLTFAQVKTREKHWTAFTLSNTTQKKPVSIIGKLFIHHKNFAEYSPKLLFVTNASFNLCKENGGKSCFGANEVKVEYQTSFKKAIKDQVKLDDSSIDLSVMRFIQSSLSLDDHITHLKGKLCNFLSKKFGDGISLNVNALASLLEQSCREKSKVKSADIINFSELISRKGFSSKALNSVLDSLNVSNSLKPDWDKASPLFNDLGKTSLQLITLQAMFSQVCIDLNQNTKNPSTVYLEYAISLYDEASVHSDLKIYVSETMHKIDALCPDYALTLNSGKKECIVVYSIIQKLFEGSE

SEQ ID NO: 91147 - protein, 550 aa, Providencia stuartii
MKSIYFKSAHILSLRDKKGFSFEFSPDINIITGENDTGKSSFIKSLYHTLGADVRLDKKWKEDNFVSKVVICVSNRDYAFLRHEKRISIFDITEGQEHHLVTSSSRTEIALTVRDIFDFNLELVTKSSLVQGQAQPASLYLPYYIDQDNGWGKVLDSFSSLAMYKDWQNNILNFHAGVKPKEYYTLQGKINLIDIDLDEIRTTLKALQRAKKRFEESFGRVLFDVDVKYYEELLERFLRKCQDLHQEETEYRIKLIKVLSLRDELVAEIEESKRQLDENDIDSFLPSAGLEARYVVLENKEKLLQIIPKLYEEKSVYDDQITKIKEDLKNAKNLSSELKGMLQEVKEQLSLQDVIKSQASKQVEVTFDEQINELLLKIGELDVARAELSKKIAKFEDKKRTKEINDKFKESLKFAQTELGIKDPKVGTILQYGPISKSETGSRAPRSILAYHYALLKTIEDKSTSPMLPVVIDSPKQQDPDPRTTKKLFDLCINGLSTNSQLIIGSVSFERETNQFKTLIMTEKYSLLKSELYNQVYQEIMPLYQRAALS

SEQ ID NO: 91148 - protein, 314 aa, Serratia marcescens
MEYHEDVIIADSLDKEKVKFTFNQVKANSSGSYTINSLTKRDKGKNGEKPSLLGKLCSSVHKKCYLSKVTELNFVSTIGFNFSPKDGLKLRALGFSELNSGDLSLITNNLNKEIDEFDSFPKEIIRFVYSDIPLQSYYEHTITRITDSVEVVFPKHLLKPKDIYRVLMDALRIRGKDTFDYDKWDEVLVKKALTFDDIHKVVTNGISGENSGVDLETAKYVINDLTINGLEKGRLLKEVKAYTLRVLSPSLAMLEAQKSIQEVIVKNRNQIGDNITYDFLQRLSVEIPERTKYILDTERILIAAIIYEIISSEI

SEQ ID NO: 91149 - protein, 555 aa, Serratia marcescens
MRKLVLEKITIISHSTKSARQFEFGRNLTLITADDGNSVGKSTLAKMIFWSFGCEPLFSSVWKELDCSSIINFSIDGESISIHRYKNEMSFRKPGQLLKVYNKITGAFAELFAELVKFDVLLPKKNSFNLEIPPPSYYFLPFYIDQKRTWVKPWDSFSNLQQYSKWAQPVISFHSGLISKEHFVVEEDIYEIKAKADEVESDINELKNAVTILKNNIAHQDYTADSESLADEILKYEELIKRNLDESANLKIEIVDLESQLKLAESIISELDKDYIFSVENMNEGSVECPTCGTIHENSIAHRSSILIDKEKAEKQFTLLLNEKLRLQDNLTNLDRILLGFKEKLSNAQSAFELSNSKAFSEFMTNNVDKQIDVIVEKKSAVLENQKLKEKGLKKTQKDLITKEQRNTIKENFSNTFFKYITKLRVNIDASLIKSPLDYNKIYEVGGAAEDARAVLGYYLALYEHISEYGHEVVPPLVIDTPNQQEQSTENYNKIVEAIARGVTENKQYIICAMQHSALDTLSKDAKVIRLDERKILTASEYEEAKDIEEQFLFI

SEQ ID NO: 91150 - protein, 315 aa, Serratia odorifera DSM 4582
MMLLRESIELNIREYMGLAETLVSIPQSERGGEIAQRGFDYQTCWALSQMLEYELDEKNYVFIFEYHDDVLILDDEVSPTQLTFAQVKTREKHWTASTLSNSTKKNPISIIGKLFIHQKNFAEYSPKLLFVTNASFNLCEENGGKSCFGANEVKLEYQTSFKKAIKDQVKLDDSSIDLSVMRFVQSSLSLDDHITHLKGKLCDFLSKKFGDSISLSVNALASLLEQACREKSKVKSADIINFPELISRKGFSSEALNGVLDSLNASNSLKPDWDKASPLFNDLGKTSLQLIILQAMFSQVCIDLNQNKKILRLYI

SEQ ID NO: 91151 - protein, 550 aa, Serratia odorifera DSM 4582; identical to SEQ ID NO: 91039

SEQ ID NO: 91152 - protein, 361 aa, Yersinia enterocolitica (type O:5) str. YE53/03; identical to SEQ ID NO: 91038

SEQ ID NO: 91153 - protein, 550 aa, Yersinia enterocolitica (type O:5) str. YE53/03; identical to SEQ ID NO: 91039

SEQ ID NO: 91154 - protein, 375 aa, Yersinia enterocolitica
MLLRESIELNIREYMGLAETLVSIPQSERGGEIAQRGFDYQTCWALSQMLEYELDEKNYVFIFEYHDDVLILDDEVSPTQLTFAQVKTREKHWTASTLSNSTKKNPISIIGKLFIHQKNFAEYSPKLLFVTNASFNLCEENGGKSCFGANEVKVEYQTSFKKAIKDQVKLDDSSIDLSVMRFVQSSLSLDDHITHLKGKLCDFLSKKFGDSISLSVNALASLLEQACREKSKVKSADIINFPELISRKGFSSEALNGVLDSLNASNSLKPDWDKASPLFNDLGKTSLQLIILQAMFSQVCIDLNQNKKNPSTVYLEYAISLYDEASAHSDLKLYLTETMYKIDALCPDYALTLKSGKKECIVIYSIIQKLLEGGE

SEQ ID NO: 91155 - protein, 270 aa, Yersinia enterocolitica
MKSIYFKSAHILSLRDKKGFSFKFSPDINIITGENDTGKSSFIKSLYHTLGADVRLDKKWKEDNFVSKVVICVNNRDYAFLRHEKRISIFDITAGQEHHLVTSSSRAEIALAVRDVFDFNLELVTKTNLVQGQAQPASLYLPYYIDQDNGWGKVLDSFSSLAMYEDWQKNILNFHTGVKPKEYYTLQGKINLIDIDLVEIRTTLKALKRAKKRFEESFGRVLFDVDVKYYEELLERFLRKCQDLHQEETEYRIKLIKILSLRDELVTEIG

SEQ ID NO: 91156 - protein, 375 aa, Yersinia enterocolitica; identical to SEQ ID NO: 91154

SEQ ID NO: 91157 - protein, 342 aa, Yersinia enterocolitica
MKSIYFKSAHILSLRDKKGFSFKFSPDINIITGENDTGKSSFIKSLYHTLGADVRLDKKWKEDNFVSKVVICVNNRDYAFLRHEKRISIFDITAGQEHHLVTSSSRAEIALAVRDVFDFNLELVTKTNLVQGQAQPASLYLPYYIDQDNGWGKVLDSFSSLAMYEDWQKNILNFHTGVKPKEYYTLQGKINLIDIDLVEIRTTLKALKRAKKRFEESFGRVLFDVDVKYYEELLERFLRKCQDLHQEETEYRIKLIKILSLRDELVTEIEESKRQLDENDIDSLLPSAGLEARYVVLENKEKLLQIIPKLYEEKSVYDDQLSKIKEDLKQAISLSSELKNMR

SEQ ID NO: 91158 - protein, 389 aa, Yersinia enterocolitica
MVLETVPPREQSGRDSFARYRAQVRSAAIAALQMLSSTTIDRVYCDLHDDVVVRKKDENGLTYVFYQVKTRAKQNKNWTLGEVFGIQPKKNTICDKSIKESFVGKMLLHTIIFDRHCNSVIFQTNIHNDDNIEDLLSDIENGIYANKFSRIFLERFNNIYPNEIATPLSENEIKERLSKLKFENDVHYLKDDSSYFAPLARERIYQYSEIDLTHIESNDIIIKLLELISSKSSGVIKPFTKESIENSAAVSINDLLPLLSLSKEAYEQILQGGDPKAIKSVSIIQRTLLSAGASLEDVTFCSKCKTEWDVWYRNNRHNMSEIDLRFIVNKVRELLRNVQSSKDQSLTLGNLYTPLKQLLTELKSLELEFDLTTEMLFGAVFSELVKGGI

SEQ ID NO: 91159 - protein, 595 aa, Yersinia enterocolitica
MRLLKLKIFPKGRDGWMSEELIFAEHITQIFGPNGCGKTPVVQSISYCLGYPNVFRNDIYERCSHAILHVTTAKGEYQFKRYYEKDQLHINITEPNGVIQTFYDEASHSEFIFDLMDFNVNQLVTINSKATSPYLSLLLPIFYLDQDDGYGKIYSPPKNFIKDQFSEIVRMAFRLPPRNSVDEKREKKTAKDNLDNLDRVVQLLERQVEAVKIKSPEINKTPAQLRSEIQDLEIELEQLKGAGNSHDDSIGIYDRLISNHRTEIRDLEVQIAEILKRQNGIQKIIADINTEIETLSLNEGAKRIFLSFDEICGSNNCQLFSLSSNSYSKNLLYLKDQLKDLERNRVSDSVTLTHLQKTKLNYITILQAIIDERNASIQRPELATLVDAISRIKNKVFELQTQLSEIEHILLLEDRLFTKITERNYAFEKHKGLTGTRSTSPELMKIKLELKELFINWLDSIHTTNISKDITYSDDFTPKLGAENITQLKGSTRIRTVLAYHAALIELLMQRPKENFRFIILDTPKQHDIENKDLDSYIKTLKVLAGLKNVQIIFSTTGYHYNGDQDDKEWNPKFPGDDHLMFFKKNDNLDIKSIS

SEQ ID NO: 91160 - protein, 362 aa, Yersinia enterocolitica
MSESVNSGVEGGSGYTFQRCCVVYLLFDEYQKLNSPSIDYFICVEHHEDFLFTYIDENGIINSIDTFQAKKSRDDWKTDQAFCEIIGKISLVGNELINDRHPKSENYKHTLSFLTNRNIVLQGKKNKDKKQITEKIQISNISKNYPELHSEIKENIQSKLIDGKIADFNQLSNVKFSFIDLPQNHKGWKRVLTGLSTEVLGCKVNDHEAVITTLMALLQDVELTYNNAGYVLLADKSKRLTKQKIDSTFDIFTESKKAFSFWRTHADDLAKGLEIKLPIKRRAQELLDNCFDLFKDIQQVEYKKIYKFVSENTYIDEKHINEAECITELYQMYISSYNSRLEKHMIAFAIIAAYVETRGMYV

SEQ ID NO: 91161 - protein, 585 aa, Yersinia enterocolitica
MSKLILKNILAYSINGNGIFSTEFGESVNIIHGRNTSGKSTLMQSILYSMGVNDSKENLNDIISENVIFRLECEMQNINTFEKIVFVRLDDTLVVRIADNPPIRFDGINGNNSFEYGRYKELFNKLFDFKLILQKQANFTNAPIEAAFLPFYISQSVGWVYLRESIGDYRFYKDFKFDYLDYYTGLKNRTDRLKKYTLKKEKQQLEYERSQLIKYKSKDNSLKLSETLETRFKGKALDYLKSYDQLATTLISEEANHDKLCNKLSMLRGREKVLLQTIRNLKLQKPRVDRCPVCEQTLPGDIRELYIYTQDINDALREKEITSDKIKTISASLNSVEKKIKDSSGIINNEYRVLKESRVESIGFESWINHHANITILGEIKNKERDYDEKISGLQTNIDNLANDAEIDTLRYGIEKEFLGIFQEKAKCLEVKIPDSSRYKNLYSITSFPYQGVELHKIIMAYHFSFYQLISKRTTIHKFPFLLDAVFKEDIDVGNREIIFNFLSSEAKNHEQILFSVAEYKKEKNPTEGDPLFNINEINNRYFSGSAKQICIGNAKTVRSFLLQKSLNEDEQFLLDDAFSLLQTI

SEQ ID NO: 91162 - protein, 361 aa, Yersinia intermedia
MESNILGHAQRETSGATTFGKYNFQYHWALCRIIEKHKSNADYALLIEYHEDVVIADSLFGSSAKFEFFQVKNTGNSFTVDSLTKRVKGAEGLKNSILGKLLSSCIGTEYETRITEIGLVSASGFSFDQKDNKLKLDIITSGDLSVDCLSGLTGKLKSELGIDIFPENLKFIIPKIKLENQEEFVIARFAELVNEIFPNSHCNAVNIYRAIIDEIHRKGQNTYDFTMWEKMVEDKSLTSHTVKDVIAVNTTSPKFEDFEKDFEYLAKSDMKWNTLTYRKMVKKIKQIYLRRVGYASAFDMNIMRIAQQALSNVPEEDYTETSDYIKAVVMKAKQLNIESQIPEDDDILCEIIYCFLKVMHE

SEQ ID NO: 91163 - protein, 577 aa, Yersinia intermedia
MRSLQFQRLVLISDSKRLANQFTFPKRLNLITGEDNSIGKSTLAKSLLWSLGCDPVIDEEWKSNDIKSILYFTINNKEYFSCRGSHSIILGAIDGEAKRYTHITGDFSQDLSDLVNFKMKLPNRTDGKLETPPPAYYFLPFYIDQIKSWSSPWDSFENLGQYANWKKSLIKYFTGYLKPEHFELEEEIYEYSEVKKESTAKIEKFQSAVDVIVDNSADITIALDNEKFSEIQKEINTELQEFIDYQRRLYDAQATITSNIYDLEKQYELATSSANELEEDYKFAVESIPTDHLECPLCGTLHDNSLTNRALLLSEKDSLLDEANSIASEIEALRSSLFELNEVAQFATNEIERINKKYLTDDNAGEKTLITQVIDAISKEKVSRSIQVKIDNEDLKISKANNSVAELKKDQRKLLSNKDKEELNSSFMSKLLGNIEALGSTGVNLSKVKSPTDYKQLLGGGAAEAARGLLAYQLSVLQQIHSAKTCIVPPFVIDTPNQQEQAGHRYETVIKELMRSIPEDYQIILCAMENNALNEFKNDANVITLNSGKLLDSSQYDSLRSEYKNIQLAVRETRDDD

SEQ ID NO: 91164 - protein, 390 aa, Yersinia intermedia
MNELHEIKPREQAGRDTLERYNAQVRAASIACLSILEGKDVVRVYCEFHDDFVIEKNKLGKIAYSFVQVKTKDKLSDIWKLNDVFGILTRNSKKKPQTDEKVVNSFIGKLIQHTVNFPETCENIIFMTNTHVNEDIDAVVTDLLNEDFSNKHTLFLIEKFNGFFSPALSLTDEQIKVNLKKIIINSDVQYIKSQNNNFESLAKDVIYKYSEIDLQYVEAKEIIISLQSLVNSKSSVKIKSVTKDSLLSASGVGIDDLLSVLSISKVAYYELLKGGDEKAIKSASVIERMLRRAGAKDDEVEYCAKCKTKWDGWLRINRHILPAIDITVIEGYIGDIISELSRGRNIVRLSLLRTLMNNLIDKLEKEKIVYDLNNDLICGGIFSQLVRNEK

SEQ ID NO: 91165 - protein, 585 aa, Yersinia intermedia
MKLVSLFLKGRAVSGLESEVLIFAKEITELFGPNGSGKTPLLQSVVYCLGYPCKFRDDIYNFCEYAQLEFEISGEKYTSRRDFKQKEFYIRLVGSNGQVEHFHNEITYSKYIIGLLKLPYPSLVTIKNEQTHPYLSTLLPIFYVDQDDGYSRYYSAHNNFIKDQFSEMLRVIFGLPERNSFISKKELIDAEAQLEYLDKVLVVQRREVELARSEINVNRKLEDIDLAISNLNRELSDLKDDSNNKNDALSSMNVLISSHKKRIRILNDELDDINRRKISLAKIKDEINIEINTLNINEEAKRVFRSFKEICPSDGCKMFSQSSESYGKNLLYLRDQIKDIERNIELDSHSVDKIKSELDTTKKLIEEILEIRDQIAKSEGISSIVETISIITANIFTLQLEKSELQKVGMLEEKYFENLNKRELAQDRVETLKKGKGIIPRVTKLKIDLKLAYIKWLEILNTLNIDKNITFKDDFYPNLGSEVLTQLKGSTRVRAILAYKAALVELMCVGDKMPFKFIIFDTPKQHETHYEDIDKFMNELKVLSMKYGFQVVFSSTEYKYVGDSNDMIWEPKFPGEEHEMFLERN

SEQ ID NO: 91166 - protein, 362 aa, Yersinia pestis KIM10+
MDSEDTSDNPLSEPQRESAGAQSYDRFEYQYHWALCKAFSSYKESNDFAIFMEYHEDVVYANSIDKNKVKFTFNQIKANAKKTYTAKVLTKRENGTKPSLLGKLCSSVSDKKYFEKVEKLDFITTSGFNLTKNNKLNLASYKLSSLSSDEASEIIKCLSDELANFGKFPQEIIHFTTSDIPLESYYEHTISRITDSVEEVYPQHLLRTKDIYRILMDSLRIRGKNVFDYENWNDALTKKALTYKDIHTVVTKIVSKGNSDLNFEAIKYILDDLNLKGTIKAKIIQKINSYSLTLLSPTLAIIKAQKEIQELLKKNSKKIEIEMSYELLERLIIDLSKDTIGLFEDNISISSAIIYEMVEATN

SEQ ID NO: 91167 - protein, 496 aa, Yersinia pestis KIM10+
MKKLILKKIMILSDSGKSARQFEFGEHLTLITADDDNSVGKSTLAKMIFWTFGCEPIFSEVWRTLDCTSIIEFEINNAPYIIHRYKNEIKIRHSNGKLHSFPKITGDYSKYFSELVNFNVLLPKKGQLTLETPPPAYYFIPFYIDQKRTWAKPWDSFENLQQYSSWAKPVISYHSGLFIKAHFEVEKDIYVIKRELEEVEKGVTELNNAVIILRQNLIDTDNVLPSTEFIFSVIQESEKNKKNLLEERTNLRVEKIRLESQIKLAKGIISELDKDYIFSVENMEDGDIECPTCGTIHENSIAHRTSILIDMELAKNQLESLESEVNGIINLLVIKDEEITEQSNKSERSYNNVIESDSNSLISFTNDKFEKRAHEINSKKNITIEIKKSEEKTAKKSQSDILSKEQKSEIKQSFADRLSKYITKLKVNVDISKIKSPLDYKKIYEVGGAAEDARAVLGYYLAIYEQVADSCEEALPPLVIDTPNQQEQARGIIPTL

SEQ ID NO: 91168 - protein, 362 aa, Yersinia pestis biovar Microtus str. 91001; identical to SEQ ID NO: 91166

SEQ ID NO: 91169 - protein, 556 aa, Yersinia pestis biovar Microtus str. 91001
MKKLILKKIMILSDSGKSARQFEFGEHLTLITADDDNSVGKSTLAKMIFWTFGCEPIFSEVWRTLDCTSIIEFEINNAPYIIHRYKNEIKIRHSNGKLHSFPKITGDYSKYFSELVNFNVLLPKKGQLTLETPPPAYYFIPFYIDQKRTWAKPWDSFENLQQYSSWAKPVISYHSGLFIKAHFEVEKDIYVIKRELEEVEKGVTELNNAVIILRQNLIDTDNVLPSTEFIFSVIQESEKNKKNLLEERTNLRVEKIRLESQIKLAKGIISELDKDYIFSVENMEDGDIECPTCGTIHENSIAHRTSILIDMELAKNQLESLESEVNGIINLLVIKDEEITEQSNKSERSYNNVIESDSNSLISFTNDKFEKRAHEINSKKNITIEIKKSEEKTAKKSQSDILSKEQKSEIKQSFADRLSKYITKLKVNVDISKIKSPLDYKKIYEVGGAAEDARAVLGYYLAIYEQVADSCEEALPPLVIDTPNQQEQASGNYTNIIKSISDGINNDRQYVICAMEHKALEQIKTNAQVIKLDARKILLQDQYEKISKLRNEVIFD

SEQ ID NO: 91170 - protein, 362 aa, Yersinia pestis CO92; identical to SEQ ID NO: 91166

SEQ ID NO: 91171 - protein, 556 aa, Yersinia pestis CO92; identical to SEQ ID NO: 91169

SEQ ID NO: 91172 - protein, 362 aa, Yersinia pestis Nepal516; identical to SEQ ID NO: 91166

SEQ ID NO: 91173 - protein, 556 aa, Yersinia pestis Nepal516; identical to SEQ ID NO: 91169

SEQ ID NO: 91174 - protein, 362 aa, Yersinia pestis Antiqua; identical to SEQ ID NO: 91166

SEQ ID NO: 91175 - protein, 556 aa, Yersinia pestis Antiqua; identical to SEQ ID NO: 91169

SEQ ID NO: 91176 - protein, 362 aa, Yersinia pestis Pestoides F; identical to SEQ ID NO: 91166

SEQ ID NO: 91177 - protein, 381 aa, Yersinia pestis Pestoides F
MKKLILKKIMILSDSGKSARQFEFGEHLTLITADDDNSVGKSTLAKMIFWTFGCEPIFSEVWRTLDCTSIIEFEINNAPYIIHRYKNEIKIRHSNGKLHSFPKITGDYSKYFSELVNFNVLLPKKGQLTLETPPPAYYFIPFYIDQKRTWAKPWDSFENLQQYSSWAKPVISYHSGLFIKAHFEVEKDIYVIKRELEEVEKGVTELNNAVIILRQNLIDTDNVLPSTEFIFSVIQESEKNKKNLLEERTNLRVEKIRLESQIKLAKGIISELDKDYIFSVENMEDGDIECPTCGTIHENSIAHRTSILIDMELAKNQLESLESEVNGIINLLVIKDEEITEQSNKSERSYNNVIESDSNSLISFTNDKFEKRAHEINSKKI

SEQ ID NO: 91178 - protein, 362 aa, Yersinia pestis D106004; identical to SEQ ID NO: 91166

SEQ ID NO: 91179 - protein, 556 aa, Yersinia pestis D106004; identical to SEQ ID NO: 91169

SEQ ID NO: 91180 - protein, 362 aa, Yersinia pestis D182038; identical to SEQ ID NO: 91166

SEQ ID NO: 91181 - protein, 556 aa, Yersinia pestis D182038; identical to SEQ ID NO: 91169

SEQ ID NO: 91182 - protein, 362 aa, Yersinia pestis Z176003; identical to SEQ ID NO: 91166

SEQ ID NO: 91183 - protein, 556 aa, Yersinia pestis Z176003; identical to SEQ ID NO: 91169

SEQ ID NO: 91184 - protein, 362 aa, Yersinia pestis CA88-4125; identical to SEQ ID NO: 91166

SEQ ID NO: 91185 - protein, 556 aa, Yersinia pestis CA88-4125; identical to SEQ ID NO: 91169

SEQ ID NO: 91186 - protein, 362 aa, Yersinia pestis Nepal516; identical to SEQ ID NO: 91166

SEQ ID NO: 91187 - protein, 556 aa, Yersinia pestis Nepal516; identical to SEQ ID NO: 91169

SEQ ID NO: 91188 - protein, 362 aa, Yersinia pestis biovar Orientalis str. India 195; identical to SEQ ID NO: 91166

SEQ ID NO: 91189 - protein, 556 aa, Yersinia pestis biovar Orientalis str. India 195; identical to SEQ ID NO: 91169

SEQ ID NO: 91190 - protein, 362 aa, Yersinia pestis biovar Orientalis str. PEXU2; identical to SEQ ID NO: 91166

SEQ ID NO: 91191 - protein, 556 aa, Yersinia pestis biovar Orientalis str. PEXU2; identical to SEQ ID NO: 91169

SEQ ID NO: 91192 - protein, 362 aa, Yersinia pestis Pestoides A; identical to SEQ ID NO: 91166

SEQ ID NO: 91193 - protein, 556 aa, Yersinia pestis Pestoides A; identical to SEQ ID NO: 91169

SEQ ID NO: 91194 - protein, 362 aa, Yersinia pestis KIM D27; identical to SEQ ID NO: 91166

SEQ ID NO: 91195 - protein, 244 aa, Yersinia pestis KIM D27
MKKLILKKIMILSDSGKSARQFEFGEHLTLITADDDNSVGKSTLAKMIFWTFGCEPIFSEVWRTLDCTSIIEFEINNAPYIIHRYKNEIKIRHSNGKLHSFPKITGDYSKYFSELVNFNVLLPKKGQLTLETPPPAYYFIPFYIDQKRTWAKPWDSFENLQQYSSWAKPVISYHSGLFIKAHFEVEKDIYVIKRELEEVEKGVTELNNAVIILRQNLIDTDNVLPSTEFIFSVIQESEKTKKPS

SEQ ID NO: 91196 - protein, 362 aa, Yersinia pestis biovar Medievalis str. Harbin 35; identical to SEQ ID NO: 91166

SEQ ID NO: 91197 - protein, 556 aa, Yersinia pestis biovar Medievalis str. Harbin 35; identical to SEQ ID NO: 91169

SEQ ID NO: 91198 - protein, 362 aa, Yersinia pestis A1122; identical to SEQ ID NO: 91166

SEQ ID NO: 91199 - protein, 556 aa, Yersinia pestis A1122; identical to SEQ ID NO: 91169

SEQ ID NO: 91200 - protein, 362 aa, Yersinia pestis PY-02; identical to SEQ ID NO: 91166

SEQ ID NO: 91201 - protein, 556 aa, Yersinia pestis PY-02; identical to SEQ ID NO: 91169

SEQ ID NO: 91202 - protein, 362 aa, Yersinia pestis PY-05; identical to SEQ ID NO: 91166

SEQ ID NO: 91203 - protein, 556 aa, Yersinia pestis PY-05; identical to SEQ ID NO: 91169

SEQ ID NO: 91204 - protein, 362 aa, Yersinia pestis PY-06; identical to SEQ ID NO: 91166

SEQ ID NO: 91205 - protein, 556 aa, Yersinia pestis PY-06; identical to SEQ ID NO: 91169

SEQ ID NO: 91206 - protein, 362 aa, Yersinia pestis PY-07; identical to SEQ ID NO: 91166

SEQ ID NO: 91207 - protein, 556 aa, Yersinia pestis PY-07; identical to SEQ ID NO: 91169

SEQ ID NO: 91208 - protein, 362 aa, Yersinia pestis PY-08; identical to SEQ ID NO: 91166

SEQ ID NO: 91209 - protein, 556 aa, Yersinia pestis PY-08; identical to SEQ ID NO: 91169

SEQ ID NO: 91210 - protein, 362 aa, Yersinia pestis PY-09; identical to SEQ ID NO: 91166

SEQ ID NO: 91211 - protein, 556 aa, Yersinia pestis PY-09; identical to SEQ ID NO: 91169

SEQ ID NO: 91212 - protein, 362 aa, Yersinia pestis PY-10; identical to SEQ ID NO: 91166

SEQ ID NO: 91213 - protein, 556 aa, Yersinia pestis PY-10; identical to SEQ ID NO: 91169

SEQ ID NO: 91214 - protein, 362 aa, Yersinia pestis PY-13; identical to SEQ ID NO: 91166

SEQ ID NO: 91215 - protein, 556 aa, Yersinia pestis PY-13; identical to SEQ ID NO: 91169

SEQ ID NO: 91216 - protein, 362 aa, Yersinia pestis PY-16; identical to SEQ ID NO: 91166

SEQ ID NO: 91217 - protein, 556 aa, Yersinia pestis PY-16; identical to SEQ ID NO: 91169

SEQ ID NO: 91218 - protein, 362 aa, Yersinia pestis PY-01; identical to SEQ ID NO: 91166

SEQ ID NO: 91219 - protein, 556 aa, Yersinia pestis PY-01; identical to SEQ ID NO: 91169

SEQ ID NO: 91220 - protein, 362 aa, Yersinia pestis PY-03; identical to SEQ ID NO: 91166

SEQ ID NO: 91221 - protein, 556 aa, Yersinia pestis PY-03; identical to SEQ ID NO: 91169

SEQ ID NO: 91222 - protein, 362 aa, Yersinia pestis PY-04; identical to SEQ ID NO: 91166

SEQ ID NO: 91223 - protein, 556 aa, Yersinia pestis PY-04; identical to SEQ ID NO: 91169

SEQ ID NO: 91224 - protein, 362 aa, Yersinia pestis PY-11; identical to SEQ ID NO: 91166

SEQ ID NO: 91225 - protein, 556 aa, Yersinia pestis PY-11; identical to SEQ ID NO: 91169

SEQ ID NO: 91226 - protein, 362 aa, Yersinia pestis PY-12; identical to SEQ ID NO: 91166

SEQ ID NO: 91227 - protein, 556 aa, Yersinia pestis PY-12; identical to SEQ ID NO: 91169

SEQ ID NO: 91228 - protein, 362 aa, Yersinia pestis PY-15; identical to SEQ ID NO: 91166

SEQ ID NO: 91229 - protein, 556 aa, Yersinia pestis PY-15; identical to SEQ ID NO: 91169

SEQ ID NO: 91230 - protein, 362 aa, Yersinia pestis PY-25; identical to SEQ ID NO: 91166

SEQ ID NO: 91231 - protein, 556 aa, Yersinia pestis PY-25; identical to SEQ ID NO: 91169

SEQ ID NO: 91232 - protein, 362 aa, Yersinia pestis PY-29; identical to SEQ ID NO: 91166

SEQ ID NO: 91233 - protein, 556 aa, Yersinia pestis PY-29; identical to SEQ ID NO: 91169

SEQ ID NO: 91234 - protein, 362 aa, Yersinia pestis PY-32; identical to SEQ ID NO: 91166

SEQ ID NO: 91235 - protein, 556 aa, Yersinia pestis PY-32; identical to SEQ ID NO: 91169

SEQ ID NO: 91236 - protein, 362 aa, Yersinia pestis PY-34; identical to SEQ ID NO: 91166

SEQ ID NO: 91237 - protein, 556 aa, Yersinia pestis PY-34; identical to SEQ ID NO: 91169

SEQ ID NO: 91238 - protein, 362 aa, Yersinia pestis PY-45; identical to SEQ ID NO: 91166

SEQ ID NO: 91239 - protein, 556 aa, Yersinia pestis PY-45; identical to SEQ ID NO: 91169

SEQ ID NO: 91240 - protein, 362 aa, Yersinia pestis PY-48; identical to SEQ ID NO: 91166

SEQ ID NO: 91241 - protein, 556 aa, Yersinia pestis PY-48; identical to SEQ ID NO: 91169

SEQ ID NO: 91242 - protein, 225 aa, Yersinia pestis PY-53
MASYKLSSLSSDEASEIIKCLSDELANFGKFPQEIIHFTTSDIPLESYYEHTISRITDSVEEVYPQHLLRTKDIYRILMDSLRIRGKNVFDYENWNDALTKKALTYKDIHTVVTKIVSKGNSDLNFEAIKYILDDLNLKGTIKAKIIQKINSYSLTLLSPTLAIIKAQKEIQELLKKNSKKIEIEMSYELLERLIIDLSKDTIGLFEDNISISSAIIYEMVEATN

SEQ ID NO: 91243 - protein, 556 aa, Yersinia pestis PY-53; identical to SEQ ID NO: 91169

SEQ ID NO: 91244 - protein, 362 aa, Yersinia pestis PY-55; identical to SEQ ID NO: 91166

SEQ ID NO: 91245 - protein, 556 aa, Yersinia pestis PY-55; identical to SEQ ID NO: 91169

SEQ ID NO: 91246 - protein, 362 aa, Yersinia pestis PY-56; identical to SEQ ID NO: 91166

SEQ ID NO: 91247 - protein, 556 aa, Yersinia pestis PY-56; identical to SEQ ID NO: 91169

SEQ ID NO: 91248 - protein, 362 aa, Yersinia pestis PY-59; identical to SEQ ID NO: 91166

SEQ ID NO: 91249 - protein, 556 aa, Yersinia pestis PY-59; identical to SEQ ID NO: 91169

SEQ ID NO: 91250 - protein, 362 aa, Yersinia pestis PY-60; identical to SEQ ID NO: 91166

SEQ ID NO: 91251 - protein, 556 aa, Yersinia pestis PY-60; identical to SEQ ID NO: 91169

SEQ ID NO: 91252 - protein, 362 aa, Yersinia pestis PY-63; identical to SEQ ID NO: 91166

SEQ ID NO: 91253 - protein, 556 aa, Yersinia pestis PY-63; identical to SEQ ID NO: 91169

SEQ ID NO: 91254 - protein, 362 aa, Yersinia pestis PY-64; identical to SEQ ID NO: 91166

SEQ ID NO: 91255 - protein, 556 aa, Yersinia pestis PY-64; identical to SEQ ID NO: 91169

SEQ ID NO: 91256 - protein, 362 aa, Yersinia pestis PY-65; identical to SEQ ID NO: 91166

SEQ ID NO: 91257 - protein, 556 aa, Yersinia pestis PY-65; identical to SEQ ID NO: 91169

SEQ ID NO: 91258 - protein, 362 aa, Yersinia pestis PY-71; identical to SEQ ID NO: 91166

SEQ ID NO: 91259 - protein, 556 aa, Yersinia pestis PY-71; identical to SEQ ID NO: 91169

SEQ ID NO: 91260 - protein, 362 aa, Yersinia pestis PY-72; identical to SEQ ID NO: 91166

SEQ ID NO: 91261 - protein, 556 aa, Yersinia pestis PY-72; identical to SEQ ID NO: 91169

SEQ ID NO: 91262 - protein, 362 aa, Yersinia pestis PY-76; identical to SEQ ID NO: 91166

SEQ ID NO: 91263 - protein, 556 aa, Yersinia pestis PY-76; identical to SEQ ID NO: 91169

SEQ ID NO: 91264 - protein, 362 aa, Yersinia pestis PY-89; identical to SEQ ID NO: 91166

SEQ ID NO: 91265 - protein, 556 aa, Yersinia pestis PY-89; identical to SEQ ID NO: 91169

SEQ ID NO: 91266 - protein, 362 aa, Yersinia pestis PY-90; identical to SEQ ID NO: 91166

SEQ ID NO: 91267 - protein, 556 aa, Yersinia pestis PY-90; identical to SEQ ID NO: 91169

SEQ ID NO: 91268 - protein, 362 aa, Yersinia pestis PY-91; identical to SEQ ID NO: 91166

SEQ ID NO: 91269 - protein, 556 aa, Yersinia pestis PY-91; identical to SEQ ID NO: 91169

SEQ ID NO: 91270 - protein, 362 aa, Yersinia pestis PY-92; identical to SEQ ID NO: 91166

SEQ ID NO: 91271 - protein, 556 aa, Yersinia pestis PY-92; identical to SEQ ID NO: 91169

SEQ ID NO: 91272 - protein, 362 aa, Yersinia pestis PY-93; identical to SEQ ID NO: 91166

SEQ ID NO: 91273 - protein, 556 aa, Yersinia pestis PY-93; identical to SEQ ID NO: 91169

SEQ ID NO: 91274 - protein, 362 aa, Yersinia pestis PY-96; identical to SEQ ID NO: 91166

SEQ ID NO: 91275 - protein, 556 aa, Yersinia pestis PY-96; identical to SEQ ID NO: 91169

SEQ ID NO: 91276 - protein, 362 aa, Yersinia pestis PY-98; identical to SEQ ID NO: 91166

SEQ ID NO: 91277 - protein, 556 aa, Yersinia pestis PY-98; identical to SEQ ID NO: 91169

SEQ ID NO: 91278 - protein, 362 aa, Yersinia pestis PY-99; identical to SEQ ID NO: 91166

SEQ ID NO: 91279 - protein, 556 aa, Yersinia pestis PY-99; identical to SEQ ID NO: 91169

SEQ ID NO: 91280 - protein, 362 aa, Yersinia pestis PY-100; identical to SEQ ID NO: 91166

SEQ ID NO: 91281 - protein, 556 aa, Yersinia pestis PY-100; identical to SEQ ID NO: 91169

SEQ ID NO: 91282 - protein, 362 aa, Yersinia pestis PY-102; identical to SEQ ID NO: 91166

SEQ ID NO: 91283 - protein, 556 aa, Yersinia pestis PY-102; identical to SEQ ID NO: 91169

SEQ ID NO: 91284 - protein, 362 aa, Yersinia pestis PY-36; identical to SEQ ID NO: 91166

SEQ ID NO: 91285 - protein, 556 aa, Yersinia pestis PY-36; identical to SEQ ID NO: 91169

SEQ ID NO: 91286 - protein, 362 aa, Yersinia pestis PY-42; identical to SEQ ID NO: 91166

SEQ ID NO: 91287 - protein, 556 aa, Yersinia pestis PY-42; identical to SEQ ID NO: 91169

SEQ ID NO: 91288 - protein, 362 aa, Yersinia pestis PY-46; identical to SEQ ID NO: 91166

SEQ ID NO: 91289 - protein, 556 aa, Yersinia pestis PY-46; identical to SEQ ID NO: 91169

SEQ ID NO: 91290 - protein, 362 aa, Yersinia pestis PY-47; identical to SEQ ID NO: 91166

SEQ ID NO: 91291 - protein, 556 aa, Yersinia pestis PY-47; identical to SEQ ID NO: 91169

SEQ ID NO: 91292 - protein, 362 aa, Yersinia pestis PY-52; identical to SEQ ID NO: 91166

SEQ ID NO: 91293 - protein, 556 aa, Yersinia pestis PY-52; identical to SEQ ID NO: 91169

SEQ ID NO: 91294 - protein, 362 aa, Yersinia pestis PY-61; identical to SEQ ID NO: 91166

SEQ ID NO: 91295 - protein, 556 aa, Yersinia pestis PY-61; identical to SEQ ID NO: 91169

SEQ ID NO: 91296 - protein, 362 aa, Yersinia pestis PY-88; identical to SEQ ID NO: 91166

SEQ ID NO: 91297 - protein, 556 aa, Yersinia pestis PY-88; identical to SEQ ID NO: 91169

SEQ ID NO: 91298 - protein, 362 aa, Yersinia pestis PY-94; identical to SEQ ID NO: 91166

SEQ ID NO: 91299 - protein, 556 aa, Yersinia pestis PY-94; identical to SEQ ID NO: 91169

SEQ ID NO: 91300 - protein, 362 aa, Yersinia pestis PY-95; identical to SEQ ID NO: 91166

SEQ ID NO: 91301 - protein, 556 aa, Yersinia pestis PY-95; identical to SEQ ID NO: 91169

SEQ ID NO: 91302 - protein, 362 aa, Yersinia pestis PY-101; identical to SEQ ID NO: 91166

SEQ ID NO: 91303 - protein, 556 aa, Yersinia pestis PY-101; identical to SEQ ID NO: 91169

SEQ ID NO: 91304 - protein, 362 aa, Yersinia pestis INS; identical to SEQ ID NO: 91166

SEQ ID NO: 91305 - protein, 556 aa, Yersinia pestis INS; identical to SEQ ID NO: 91169

SEQ ID NO: 91306 - protein, 362 aa, Yersinia pestis 9; identical to SEQ ID NO: 91166

SEQ ID NO: 91307 - protein, 178 aa, Yersinia pestis 9
MKKLILKKIMILSDSGKSARQFEFGEHLTLITADDDNSVGKSTLAKMIFWTFGCEPIFSEVWRTLDCTSIIEFEINNAPYIIHRYKNEIKIRHSNGKLHSFPKITGDYSKYFSELVNFNVLLPKKGQLTLETLHLHITSYPFILTKKEHGLNLGIVSRIFSNIVAGQNQSSPTTQDYL

SEQ ID NO: 91308 - protein, 362 aa, Yersinia pestis 113; identical to SEQ ID NO: 91166

SEQ ID NO: 91309 - protein, 556 aa, Yersinia pestis 113; identical to SEQ ID NO: 91169

SEQ ID NO: 91310 - protein, 362 aa, Yersinia pestis S3; identical to SEQ ID NO: 91166

SEQ ID NO: 91311 - protein, 556 aa, Yersinia pestis S3; identical to SEQ ID NO: 91169

SEQ ID NO: 91312 - protein, 362 aa, Yersinia pestis; identical to SEQ ID NO: 91166

SEQ ID NO: 91313 - protein, 556 aa, Yersinia pestis; identical to SEQ ID NO: 91169

SEQ ID NO: 91314 - protein, 362 aa, Yersinia pestis; identical to SEQ ID NO: 91166

SEQ ID NO: 91315 - protein, 556 aa, Yersinia pestis; identical to SEQ ID NO: 91169

SEQ ID NO: 91316 - protein, 362 aa, Yersinia pestis; identical to SEQ ID NO: 91166

SEQ ID NO: 91317 - protein, 556 aa, Yersinia pestis; identical to SEQ ID NO: 91169

SEQ ID NO: 91318 - protein, 362 aa, Yersinia pestis Pestoides F; identical to SEQ ID NO: 91166

SEQ ID NO: 91319 - protein, 381 aa, Yersinia pestis Pestoides F; identical to SEQ ID NO: 91177

SEQ ID NO: 91320 - protein, 362 aa, Yersinia pestis; identical to SEQ ID NO: 91166

SEQ ID NO: 91321 - protein, 556 aa, Yersinia pestis; identical to SEQ ID NO: 91169

SEQ ID NO: 91322 - protein, 362 aa, Yersinia pestis; identical to SEQ ID NO: 91166

SEQ ID NO: 91323 - protein, 556 aa, Yersinia pestis; identical to SEQ ID NO: 91169

SEQ ID NO: 91324 - protein, 362 aa, Yersinia pestis A1122; identical to SEQ ID NO: 91166
